United States Patent Application Publication US 2004/0029129 A1 - sequence listing, part 21

SEQ ID NO: 64407 - protein, 575 aa, Mycobacterium tuberculosis
MKLTDVDFAVEASGMVRAFNQAGVLDVSDVHVAQRLCALAGESDERVALAVAVAVRALRAGSVCVDLLSIARVAGHDDLPWPDPADWLAAVRASPLLADPPVLHLYDDRLLYLDRYWREEEQVCADLLALLTSRRPAGVPDLRRLFPTGFDEQRRAAEIALSQGVTVLTGGPGTGKTTTVARLLALVAEQAELAGEPRPRIALAAPTGKAAARLAEAVRREMAKLDATDRARLGDLHAVTLHRLLGAKPGARFRQDRQNRLPHNVIVVDETSMVSLTLMARLAEAVRPGARLILVGDADQLASVEAGAVLADLVDGFSVRDDALVAQLRTSHRFGKVIGTLAEAIRAGDGDAVLGLLRSGEERIEFVDDEDPAPRLRAVLVPHALRLREAALLGASDVALATLDEHRLLCAHRDGPTGVLHWNRRVQAWLAEETGQPPWTPWYAGRPLLVTANDYGLRVYNGDTGVVLAGPTGLRAVISGASGPLDVATGRLGDVETMHAMTIHKSQGSQVDEVTVLMPQEDSRLLTRELLYTAVTRAKRKVRVVGSEASVRAAIARRAVRASGLRMRLQSTGCG

SEQ ID NO: 64408 - protein, 161 aa, Mycobacterium tuberculosis; identical to SEQ ID NO: 62658

SEQ ID NO: 64409 - protein, 238 aa, Mycobacterium tuberculosis; identical to SEQ ID NO: 62659

SEQ ID NO: 64410 - protein, 142 aa, Mycobacterium tuberculosis; identical to SEQ ID NO: 62660

SEQ ID NO: 64411 - protein, 235 aa, Mycobacterium tuberculosis
MSKTSKAYRAAAAKVDRTNLYTPLQAAKLAKETSSTKQDATVEVAIRLGVDPRKADQMVRGTVNLPHGTGKTARVAVFAVGEKADAAVAAGADVVGSDDLIERIQGGWLEFDAAIATPDQMAKVGRIARVLGPRGLMPNPKTGTVTADVAKAVADIKGGKINFRVDKQANLHFVIGKASFDEKLLAENYGAAIDEVLRLKPSSSKGRYLKKITVSTTTGPGIPVDPSITRNFAGE

SEQ ID NO: 64412 - protein, 178 aa, Mycobacterium tuberculosis; identical to SEQ ID NO: 62380

SEQ ID NO: 64413 - protein, 130 aa, Mycobacterium tuberculosis; identical to SEQ ID NO: 62378

SEQ ID NO: 64414 - protein, 1172 aa, Mycobacterium tuberculosis
MADSRQSKTAASPSPSRPQSSSNNSVPGAPNRVSFAKLREPLEVPGLLDVQTDSFEWLIGSPRWRESAAERGDVNPVGGLEEVLYELSPIEDFSGSMSLSFSDPRFDDVKAPVDECKDKDMTYAAPLFVTAEFINNNTGEIKSQTVFMGDFPMMTEKGTFIINGTERVVVSQLVRSPGVYFDETIDKSTDKTLHSVKVIPSRGAWLEFDVDKRDTVGVRIDRKRRQPVTVLLKALGWTSEQIVERFGFSEIMRSTLEKDNTVGTDEALLDIYRKLRPGEPPTKESAQTLLENLFFKEKRYDLARVGRYKVNKKLGLHVGEPITSSTLTEEDVVATIEYLVRLHEGQTTMTVPGGVEVPVETDDIDHFGNRRLRTVGELIQNQIRVGMSRMERVVRERMTTQDVEAITPQTLINIRPVVAAIKEFFGTSQLSQFMDQNNPLSGLTHKRRLSALGPGGLSRERAGLEVRDVHPSHYGRMCPIETPEGPNIGLIGSLSVYARVNPFGFIETPYRKVVDGVVSDEIVYLTADEEDRHVVAQANSPIDADGRFVEPRVLVRRKAGEVEYVPSSEVDYMDVSPRQMVSVATAMIPFLEHDDANRALMGANMQRQAVPLVRSEAPLVGTGMELRAAIDAGDVVVAEESGVIEEVSADYITVMHDNGTRRTYRMRKFARSNHGTCANQCPIVDAGDRVEAGQVIADGPCTDDGEMALGKNLLVAIMPWEGHNYEDAIILSNRLVEEDVLTSIHIEEHEIDARDTKLGAEEITRDIPNISDEVLADLDERGIVRIGAEVRDGDILVGKVTPKGETELTPEERLLRAIFGEKAREVRDTSLKVPHGESGKVIGIRVFSREDEDELPAGVNELVRVYVAQKRKISDGDKLAGRHGNKGVIGKILPVEDMPFLADGTPVDIILNTHGVPRRMNIGQILETHLGWCAHSGWKVDAAKGVPDWAARLPDELLEAQPNAIVSTPVFDGAQEAELQGLLSCTLPNRDGDVLVDADGKAMLFDGRSGEPFPYPVTVGYMYIMKLHHLVDDKIHARSTGPYSMITQQPLGGKAQFGGQRFGEMECWAMQAYGAAYTLQELLTIKSDDTVGRVKVYEAIVKGENIPEPGIPESFKVLLKELQSLCLNVEVLSSDGAAIELREGEDEDLERAAANLGINLSRNESASVEDLA

SEQ ID NO: 64415 - protein, 1316 aa, Mycobacterium tuberculosis; identical to SEQ ID NO: 62376

SEQ ID NO: 64416 - protein, 252 aa, Mycobacterium tuberculosis; identical to SEQ ID NO: 62365

SEQ ID NO: 64417 - protein, 240 aa, Mycobacterium tuberculosis; identical to SEQ ID NO: 62366

SEQ ID NO: 64418 - protein, 124 aa, Mycobacterium tuberculosis; identical to SEQ ID NO: 62672

SEQ ID NO: 64419 - protein, 156 aa, Mycobacterium tuberculosis; identical to SEQ ID NO: 62673

SEQ ID NO: 64420 - protein, 701 aa, Mycobacterium tuberculosis
MAQKDVLTDLSRVRNFGIMAHIDAGKTTTTERILYYTGINYKIGEVHDGAATMDWMEQEQERGITITSAATTTFWKDNQLNIIDTPGHVDFTVEVERNLRVLDGAVAVFDGKEGVEPQSEQVWRQADKYDVPRICFVNKMDKIGADFYFSVRTMGERLGANAVPIQLPVGAEADFEGVVDLVEMNAKVWRGETKLGETYDTVEIPADLAEQAEEYRTKLLEVVAESDEHLLEKYLGGEELTVDEIKGAIRKLTIASEIYPVLCGSAFKNKGVQPMLDAVVDYLPSPLDVPPAIGHAPAKEDEEVVRKATTDEPFAALAFKIATHPFFGKLTYIRVYSGTVESGSQVINATKGKKERLGKLFQMHSNKENPVDRASAGHIYAVIGLKDTTTGDTLSDPNQQIVLESMTFPDPVIEVAIEPKTKSDQEKLSLSIQKLAEEDPTFKVHLDSETGQTVIGGMGELHLDILVDRMRREFKVEANVGKPQVAYKETIKRLVQNVEYTHKKQTGGSGQFAKVIINLEPFTGEEGATYEFESKVTGGRIPREYIPSVDAGAQDAMQYGVLAGYPLVNLKVTLLDGAYHEVDSSEMAFKIAGSQVLKKAAALAQPVILEPIMAVEVTTPEDYMGDVIGDLNSRRGQIQAMEERAGARVVRAHVPLSEMFGYVGDLRSKTQGRANYSMVFDSYSEVPANVSKEIIAKATGE

SEQ ID NO: 64421 - protein, 396 aa, Mycobacterium tuberculosis; identical to SEQ ID NO: 62675

SEQ ID NO: 64422 - protein, 396 aa, Mycobacterium tuberculosis; identical to SEQ ID NO: 62725

SEQ ID NO: 64423 - protein, 101 aa, Mycobacterium tuberculosis; identical to SEQ ID NO: 62392

SEQ ID NO: 64424 - protein, 217 aa, Mycobacterium tuberculosis; identical to SEQ ID NO: 62391

SEQ ID NO: 64425 - protein, 223 aa, Mycobacterium tuberculosis; identical to SEQ ID NO: 62401

SEQ ID NO: 64426 - protein, 100 aa, Mycobacterium tuberculosis; identical to SEQ ID NO: 62400

SEQ ID NO: 64427 - protein, 280 aa, Mycobacterium tuberculosis; identical to SEQ ID NO: 62399

SEQ ID NO: 64428 - protein, 93 aa, Mycobacterium tuberculosis; identical to SEQ ID NO: 62398

SEQ ID NO: 64429 - protein, 197 aa, Mycobacterium tuberculosis; identical to SEQ ID NO: 62397

SEQ ID NO: 64430 - protein, 274 aa, Mycobacterium tuberculosis
MGQKINPHGFRLGITTDWKSRWYADKQYAEYVKEDVAIRRLLSSGLERAGIADVEIERTRDRVRVDIHTARPGIVIGRRGTEADRIRADLEKLTGKQVQLNILEVKNPESQAQLVAQGVAEQLSNRVAFRRAMRKAIQSAMRQPNVKGIRVQCSGRLGGAEMSRSEFYREGRVPLHTLRADIDYGLYEAKTTFGRIGVKVWIYKGDIVGGKRELAAAAPAGADRPRRERPSGTRPRRSGASGTTATGTDAGRAAGGEEAAPDAAAPVEAQSTES

SEQ ID NO: 64431 - protein, 138 aa, Mycobacterium tuberculosis
MLIPRKVKHRKQHHPRQRGIASGGTTVNFGDYGIQALEHAYVTNRQIESARIAINRHIKRGGKVWINIFPDRPLTKKPAETRMGSGKGSPEWWVANVKPGRVLFELSYPNEGVARAALTRAIHKLPIKARIITREEQF

SEQ ID NO: 64432 - protein, 77 aa, Mycobacterium tuberculosis; identical to SEQ ID NO: 62394

SEQ ID NO: 64433 - protein, 136 aa, Mycobacterium tuberculosis; identical to SEQ ID NO: 62393

SEQ ID NO: 64434 - protein, 787 aa, Mycobacterium tuberculosis
MAPEATEAFNGTIELDIRDSEPDWGPYAAPVAPEHSPNILYLVWDDVGIATWDCFGGLVEMPAMTRVAERGVRLSQFHTTALCSPTRASLLTGRNATTVGMATIEEFTDGFPNCNGRIPADTALLPEVLAEHGYNTYCVGKWHLTPLEESNMASTKRHWPTSRGFERFYGFLGGETDQWYPDLVYDNHPVSPPGTPEGGYHLSKDIADKTIEFIRDAKVIAPDKPWFSYVCPGAGHAPHHVFKEWADRYAGRFDMGYERYREIVLERQKALGIVPPDTELSPINPYLDVPGPNGETWPLQDTVRPWDSLSDEEKKLFCRMAEVFAGFLSYTDAQIGRILDYLEESGQLDNTIIVVISDNGASGEGGPNGSVNEGKFFNGYIDTVAESMKLFDHLGGPQTYNHYPIGWAMAFNTPYKLFKRYASHEGGIADPAIISWPNGIAAHGEIRDNYVNVSDITPTVYDLLGMTPPGTVKGIPQKPMDGVSFIAALADPAADTGKTTQFYTMLGTRGIWHEGWFANTIHAATPAGWSNFNADRWELFHIAADRSQCHDLAAEHPDKLEELKALWFSEAAKYNGLPLADLNLLETMTRSRPYLVSERASYVYYPDCADVGIGAAVEIRGRSFAVLADVTIDTTGAEGVLFKHGGAHGGHVLFVRDGRLHYVYNFLGERQQLVSSSGPVPSGRHLLGVRYLRTGTVPNSHTPVGDLELFFDENLVGALTNVLTHPGTFGLAGAAISVGRNGGSAVSSHYEAPFAFTGGTITQVTVDVSGRPFEDVESDLALAFSRD

SEQ ID NO: 64435 - protein, 122 aa, Mycobacterium tuberculosis; identical to SEQ ID NO: 61814

SEQ ID NO: 64436 - protein, 105 aa, Mycobacterium tuberculosis; identical to SEQ ID NO: 62494

SEQ ID NO: 64437 - protein, 187 aa, Mycobacterium tuberculosis; identical to SEQ ID NO: 62495

SEQ ID NO: 64438 - protein, 61 aa, Mycobacterium tuberculosis; identical to SEQ ID NO: 62496

SEQ ID NO: 64439 - protein, 132 aa, Mycobacterium tuberculosis; identical to SEQ ID NO: 62497

SEQ ID NO: 64440 - protein, 179 aa, Mycobacterium tuberculosis; identical to SEQ ID NO: 62498

SEQ ID NO: 64441 - protein, 122 aa, Mycobacterium tuberculosis; identical to SEQ ID NO: 62486

SEQ ID NO: 64442 - protein, 220 aa, Mycobacterium tuberculosis; identical to SEQ ID NO: 62487

SEQ ID NO: 64443 - protein, 65 aa, Mycobacterium tuberculosis; identical to SEQ ID NO: 62488

SEQ ID NO: 64444 - protein, 146 aa, Mycobacterium tuberculosis
MTLKLHDLRPARGSKIARTRVGRGDGSKGKTAGRGTKGTRARKQVPVTFEGGQMPIHMRLPKLKGFRNRFRTEYEIVNVGDINRLFPQGGAVGVDDLVAKGAVRKNALVKVLGDGKLTAKVDVSAHKFSGSARAKITAAGGSATEL

SEQ ID NO: 64445 - protein, 441 aa, Mycobacterium tuberculosis; identical to SEQ ID NO: 62490

SEQ ID NO: 64446 - protein, 181 aa, Mycobacterium tuberculosis; identical to SEQ ID NO: 62491

SEQ ID NO: 64447 - protein, 165 aa, Mycobacterium tuberculosis
MASDNRDPIAAARANWERSGWGDVSLGMVAVTSVMRAHQILLARVETALRPYDLSFSRFELLRLLAFSRIGALPITKASDRLQVHVTSVTHAIRRLEADGLVRRVPHPTDGRTTLVQITELGRSTVEDATVTLNEQVFANVGMGAEESQALVSAVETLRRNAGDF

SEQ ID NO: 64448 - protein, 312 aa, Mycobacterium tuberculosis
MPIRPNVHGMMARMPELSRRAVLGLGAGTVLGATSAYAIDMLLQPRTSHAAPAAAIGTNVPLAPTPALDPAPPAQAAPTMSTGSFVSAARAGKMTNWAIARPPGQTQALRPVIALHGLGGSASAVMDGGVEQGLAQAVNAGLPPFAVVSVDGGSSYWHQRASGEDAGAMVLNELIPLLDTQRLDTSRVAFLGWSMGGYGALLLGSRLGPARTAAICAVSPALWLSAGSVAPGSFDGPDDWSANSVFGLPALGSIPIRVDCGNSDPFYAATKQFVAQLPHPPAGGFSPGGHNGGFWSAQLPAELTWFAPLLTG

SEQ ID NO: 64449 - protein, 472 aa, Mycobacterium tuberculosis
MSIPNVLATRYASAEMVAIWSPEAKVVSERRLWLAVLRAQAELGVAVADSVLADYERVVDDVDLASISARERVLRHDVKARIEEFNALAGHEHVHKGMTSRDLTENVEQLQIRRSLEVIFAHGVAAVARLAERAVSYRDLIMAGRSHNVAAQATTLGKRFASAAQEMMIALRRLRELIDRYPLRGIKGPMGTGQDMLDLLGGDRAALADLERRVADFLGFATVFNSVGQVYPRSLDHDVVSALVQLGAGPSSLAHTIRLMAGHELATEGFAPGQVGSSAMPHKMNTRSCERVNGLQVVLRGYASMVAELAGAQWNEGDVFCSVVRRVALPDSFFAVDGQIETFLTVLDEFGAYPAVIGRELDRYLPFLATTKVLMAAVRAGMGRESAHRLISEHAVATALAMREHGAEPDLLDRLAADPRLTLGRDALEAALADKKAFAGAAGDQVDDVVAMVDALVSRYPDAAKYTPGAIL

SEQ ID NO: 64450 - protein, 312 aa, Mycobacterium tuberculosis
LITRFIADHQGHREGPDGLRWGVESICTQLTELGVPIAPSTYYDHINREPSRRELRDGELKEHISRVHAANYGVYGARKVWLTLNREGIEVARCTVERLMTKLGLSGTTRGKARRTTIADPATARPADLVQRRFGPPAPNRLWVADLTYVSTWAGFAYVAFVTDAYARRILGWRVASTMATSMVLDAIEQAIWTRQQEGVLDLKDVIHHTDRGSQYTSIRFSERLAEAGIQPSVGAVGSSYDNALAETINGLYKTELIKPGKPWRSIEDVELATARWVDWFNHRRLYQYCGDVPPVELEAAYYAQRQRPAAG

SEQ ID NO: 64451 - protein, 335 aa, Mycobacterium tuberculosis
MAVPAVSPQPILAPLTPAAIFLVATIGADGEATVHDALSKISGLVRAIGFRDPTKHLSVVVSIGSDAWDRLFAGPRPTELHPFVELTGPRHTAPATPGDLLFHIRAETMDVCFELAGRILKSMGDAVTVVDEVHGFRFFDNRDLLGFVDGTENPSGPIAIKATTIGDEDRNFAGSCYVHVQKYVHDMASWESLSVTEQERVIGRTKLDDIELDDNAKPANSHVALNVITDDDGTERKIVRHNMPFGEVGKGEYGTYFIGYSRTPTVTEQMLRNMFLGDPAGNTDRVLDFSTAVTGGLFFSPTIDFLDHPPPLPQAATPTLAAGSLSIGSLKGSPR

SEQ ID NO: 64452 - protein, 754 aa, Mycobacterium tuberculosis
MLDTVEHAATTPDQPQPYGELGLKDDEYRRIRQILGRRPTDTELAMYSVMWSEHCSYKSSKVHLRYFGETTSDEMRAAMLAGIGENAGVVDIGDGWAVTFKVESHNHPSYVEPYQGAATGVGGIVRDIMAMGARPVAVMDQLRFGAADAPDTRRVLDGVVRGIGGYGNSLGLPNIGGETVFDPCYAGNPLVNALCVGVLRQEDLHLAFASGAGNKIILFGARTGLDGIGGVSVLASDTFDAEGSRKKLPSVQVGDPFMEKVLIECCLELYAGGLVIGIQDLGGAGLSCATSELASAGDGGMTIQLDSVPLRAKEMTPAEVLCSESQERMCAVVSPKNVDAFLAVCRKWEVLATVIGEVTDGDRLQITWHGETVVDVPPRTVAHEGPVYQRPVARPDTQDALNADRSAKLSRPVTGDELRATLLALLGSPHLCSRAFITEQYDRYVRGNTVLAEHADGGMLRIDESTGRGIAVSTDASGRYTLLDPYAGAQLALAEAYRNVAVTGATPVAVTNCLNFGSPEDPGVMWQFTQAVRGLADGCADLGIPVTGGNVSFYNQTGSAAILPTPVVGVLGVIDDVRRRIPTGLGAEPGETLMLLGDTRDEFDGSVWAQVTADHLGGLPPVVDLAREKLLAAVLSSASRDGLVSAAHDLSEGGLAQAIVESALAGETGCRIVLPEGADPFVLLFSESAGRVLVAVPRTEESRFRGMCEARGLPAVRIGVVDQGSDAVEVQGLFAVSLAELRATSEAVLPRYFG

SEQ ID NO: 64453 - protein, 318 aa, Mycobacterium tuberculosis
MHRLRAAEHPRPDYVLLHISDTHLIGGDRRLYGAVDADDRLGELLEQLNQSGLRPDAIVFTGDLADKGEPAAYRKLRGLVEPFAAQLGAELVWVMGNHDDRAELRKFLLDEAPSMAPLDRVCMIDGLRIIVLDTSVPGHHHGEIRASQLGWLAEELATPAPDGTILALHHPPIPSVLDMAVTVELRDQAALGRVLRGTDVRAILAGHLHYSTNATFVGIPVSVASATCYTQDLTVAAGGTRGRDGAQGCNLVHVYPDTVVHSVIPLGGGETVGTFVSPGQARRKIAESGIFIEPSRRDSLFKHPPMVLTSSAPRSPVD

SEQ ID NO: 64454 - protein, 289 aa, Mycobacterium tuberculosis
MVVTLDGEILQPGMPLLHADDLAAVRGDGVFETLLVRDGRACLVEAHLQRLTQSARLMDLPEPDLPRWRRAVEVATQRWVASTADEGALRLIYSRGREGGSAPTAYVMVSPVPARVIGARRDGVSAITLDRGLPADGGDAMPWLIASAKTLSYAVNMAVLRHAARQGAGDVIFVSTDGYVLEGPRSTVVIATDGDQGGGNPCLLTPPPWYPILRGTTQQALFEVARAKGYDCDYRALRVADLFDSQGIWLVSSMTLAARVHTLDGRRLPRTPIAEVFAELVDAAIVSDR

SEQ ID NO: 64455 - protein, 258 aa, Mycobacterium tuberculosis
MAKRLDLTDVNIYYGSFHAVADVSLAILPRSVTAFIGPSGCGKTTVLRTLNRMHEVIPGARVEGAVLLDDQDIYAPGIDPVGVRRAIGMVFQRPNPFPAMSIRNNVVAGLKLQGVRNRKVLDDTAESSLRGANLWDEVKDRLDKPGGGLSGGQQQRLCIARAIAVQPDVLLMDEPCSSLDPISTMAIEDLISELKQQYTIVIVTHNMQQAARVSDQTAFFNLEAVGKPGRLVEIASTEKIFSNPNQKATEDYISGRFG

SEQ ID NO: 64456 - protein, 684 aa, Mycobacterium tuberculosis
MSDGESAAPWARLSESAFPDGVDRWITVPPATWVAAQGPRDTQNVGCHATGAVSVADLIARLGPAFPDLPTHRHVAPEPEPSGRGPKVHDDADDQQDTEAIAIPAHSLEFLSELPDLRAANYPRADHARREPELPGKQLTGSARVRPLRIRRTSPAPAKPAPNSGRRPMVLAARSLAALFAALALALTGGAWQWSASKNSRLNMVSALDPHSGDIVNPSGQHGDENFLLVGMDSRAGANANIGAGDAEDAGGARSDTVMLVNIPASRERVVAVSFPRDLAITPIQCEAWNPETGKYGPIYDEKTGTMGPRLVYTETKLNSAFSFGGPKCLVKVIQKLSGLSINRFIAIDFVGFARMVEALGGVEVCSTTPLRDYELGTVLEHAGRQVIDGPTALNYVRARQVTTESNGDYGRIKRQQLFLSSLLRSMISTDTLFNLSRLNNVVNMFIGNSYVDNVKTKDLVELGRSLQHMAAGHVTFVTVPTGITDQNGDEPPRTSDMKALFTAIIDDDPLPLENDHNAQRLGNTPSTPPTTTKKAPQAGLTNEIQHQQVTTTSPKEVTVQVSNSTGQAGLATTATDQLKRNGFNVMAPDDYPSSLLATTVFFSPGNEQAAATVAAVFGQSKIERVTGIGQLVQVVLGQDFSAVRAPLPSGSTVSVQISRNSSSPPTKLPEDLTVTNAADTTCE

SEQ ID NO: 64457 - protein, 389 aa, Mycobacterium tuberculosis
MSRRRAIQPSPALRIGPIELASPVVLAPMAGVTNVAFRALCRQLEQSKVGTVSGLYVCEMVTARALIERHPVTMHMTTFSADESPRSLQLYTVDPDTTYAAARMIAGEGLADHIDMNFGCPVPKVTKRGGGAALPFKRRLFGQIVAAAVRATEGTDIPVTVKFRIGIDDAHHTHLDAGRIAEAEGAAAVALHARTAAQRYSGTADWEQIARLKQHVRTIPVLGNGDIYDAGDALAMMSTTGCDGVVIGRGCLGRPWLFAELSAAFTGSPAPTPPTLGEVADIIRRHGTLLAAHFGEDKGMRDIRKHIAWYLHGFPAGSALRRALAMVKTFDELDCLLDRLDGTVPFPDSATGARGRQGSPARVALPDGWLTDPDDCRVPEGADAMGSGG

SEQ ID NO: 64458 - protein, 342 aa, Mycobacterium tuberculosis; identical to SEQ ID NO: 62501

SEQ ID NO: 64459 - protein, 256 aa, Mycobacterium tuberculosis
MRLIGRLRLLMVGLVVICGACACDRVSAGRWSESPSATSWPVRPVNTTTPSGPVPPVSEAARAAGLVDVRGVVPDAAIDLRYATANNFTGTQLYPPGARCLVHESMAEGLAAAAAVLRPHGQVLVFWDCYRPHDVQVRMFDVVPNPAWVARPGKYAHSHEAGRSVDVTFASAQRQCPSVRRSGELCLADMGTDFDDFSSRATAFATQGVSAEAQANRAHLRAAMQAGGLTVYSGEWWHFDGPGAGVDRPILEVPVD

SEQ ID NO: 64460 - protein, 425 aa, Mycobacterium tuberculosis
MPSYGNLGRLGGRHEYGVLVAMTSSAELDRVRWAHQLRSYRIASVLRIGVVGLMVAAMVVGTSRSEWPQQIVLIGVYAVAALWALLLAYSASRRFFALRRFRSMGRLEPFAFTAVDVLILTGFQLLSTDGIYPLLIMILLPVLVGLDVSTRRAAVVLACTLVGFAVAVLGDPVMLRAIGWPETIFRFALYAFLCATALMVVRIEERHTRSVAGLSALRAELLAQTMTASEVLQRRIAEAIHDGPLQDVLAARQELIELDAVTPGDERVGRALAGLQSASERLRQATFELHPAVLEQVGLGPAVKQLAASTAQRSGIKISTDIDYPIRSGIDPIVFGVVRELLSNVVRHSGATTASVRLGITDEKCVLDVADDGVGVTGDTMARRLGEGHIGLASHRARVDAAGGVLVFLATPRGTHVCVELPLKR

SEQ ID NO: 64461 - protein, 372 aa, Mycobacterium tuberculosis
MRSRQTRDRYRLLPEGYQVTPGRNRHPGTMVGNTPVLWIPELSGTSDPDRGFWAKLEGFNPGGMKDRPALYMVECARARGDIAPGAAIVESTGGTLGLGLALAGKVYRHPVTLVTDPGLEPIIARMLTAYGAGVDMVTQPHPVGGWQQARKDRVAQLMAEYPGAWNPNQYGNPDNVGAYRSLALELVAQLGRIDVLVCSVGTGGHSAGVARVLREFNPDMRLIGVDTIGSTIFGQPASNRLMRGLGSSIYPRNVDYRAFDEVHWVAPPEAVWACRSLAATHYASGGWSVGAVALVAGWAARNLPADTTIAAVFPDGPQRYFDTIYNDAYCNEHELLGGQPPTEPDEIASPLDAVVTRWTRSTTVIDPTQVVS

SEQ ID NO: 64462 - protein, 720 aa, Mycobacterium tuberculosis
MPDNTIQWDKDADGIVTLTMDDPSGSTNVMNEAYIESMGKAVDRLVAEKDSITGVVVASAKKTFFAGGDVKTMIQARPEDAGDVFNTVETIKRQLRTLETLGKPVVAAINGAALGGGLEIALACHHRIAADVKGSQLGLPEVTLGLLPGGGGVTRTVRMFGIQNAFVSVLAQGTRFKPAKAKEIGLVDELVATVEELVPAAKAWIKEELKANPDGAGVQPWDKKGYKMPGGTPSSPGLAAILPSFPSNLRKQLKGAPMPAPRAILAAAVEGAQVDFDTASRIESRYFASLVTGQVAKNMMQAFFFDLQAINAGGSRPEGIGKTPIKRIGVLGAGMMGAGIAYVSAKAGYEVVLKDVSLEAAAKGKGYSEKLEAKALERGRTTQERSDALLARITPTADAADFKGVDFVIEAVFENQELKHKVFGEIEDIVEPNAILGSNTSTLPITGLATGVKRQEDFIGIHFFSPVDKMPLVEIIKGEKTSDEALARVFDYTLAIGKTPIVVNDSRGFFTSRVIGTFVNEALAMLGEGVEPASIEQAGSQAGYPAPPLQLSDELNLELMHKIAVATRKGVEDAGGTYQPHPAEAVVEKMIELGRSGRLKGAGFYEYADGKRSGLWPGLRETFKSGSSQPPLQDMIDRMLFAEALETQKCLDEGVLTSTADANIGSIMGIGFPPWTGGSAQFIVGYSGPAGTGKAAFVARARELAAAYGDRFLPPESLLS

SEQ ID NO: 64463 - protein, 160 aa, Mycobacterium tuberculosis; identical to SEQ ID NO: 62305

SEQ ID NO: 64464 - protein, 606 aa, Mycobacterium tuberculosis
MSYVLATPEMVAAAANNLAQIGSTLSAANAAALAPTTGVLAAGADEVSAAVASLFSGHAQAYQTLGTQAAAFHERFIQALSTAAGAYGSAEAANASPLQQALNVINAPTQTLLGRPLIGNGTNGAPGTGQAGGPGGLLYGNGGNGGSGGVGQAGGAGGSAGLIGIGGTGGAGGAGAVGGVGGNGGWLYGNGGAGGLGGTGVAGVNGGMGAAGGAGGNAYLFGSGGAGGQGGMGAAGADGVNPTPTGTADAGSTGTDQTLGGNAIGGNGGPGDAGDAMTSGGAGGSGGNAVSTVNGDAVGGEGGKGGEGAYGGAGGAGGSAASIGNAAIGGNGGAGGNAQAPGGVGGAGGEGGDAQVGTNSPSNAEAGNGGSGGNGFDSFASGGTGGAGGTGGAGGRGGLLIGDGGAGGAGGVGGTGGSGAPGGGGGAGGDGGAANTDSAGSSRKAFGGDGGVGGDGASALGTGGEGGIGGQGGNGGAGGLLIGNGGAGGVGGTAGAGGTGGSGGAGGAGGAGGGGTNSGPGAAFGGNGNTGGNGGNGGAPGALGGKGGSGGLIGRAGSDGGVGAGGAGGAGGAGGTGGEGGTGGDGKTTDGNPGMGGSPGSAGQPG

SEQ ID NO: 64465 - protein, 431 aa, Mycobacterium tuberculosis
MADTDDTATLRYPGGEIDLQIVHATEGADGIALGPLLAKTGHTTFDVGFANTAAAKSSITYIDGDAGILRYRGYPIDQLAEKSTFIEVCYLLIYGELPDTDQLAQFTGRIQRHTMLHEDLKRFFDGFPRNAHPMPVLSSVVNALSAYYQDALDPMDNGQVELSTIRLLAKLPTIAAYAYKKSVGQPFLYPDNSLTLVENFLRLTFGFPAEPYQADPEVVRALDMLFILHADHEQNCSTSTVRLVGSSRANLFTSISGGINALWGPLHGGANQAVLEMLEGIRDSGDDVSEFVRKVKNREAGVKLMGFGHRVYKNYDPRARIVKEQADKILAKLGGDDSLLGIAKELEEAALTDDYFIERKLYPNVDFYTGLIYRALGFPTRMFTVLFALGRLPGWIAHWREMHDEGDSKIGRPRQIYTGYTERDYVTIDAR

SEQ ID NO: 64466 - protein, 495 aa, Mycobacterium tuberculosis; identical to SEQ ID NO: 62815

SEQ ID NO: 64467 - protein, 428 aa, Mycobacterium tuberculosis
MAGEFRLLSHLCSRGSKVGELAQDTRTSLKTSWYLLGPAFVAAIAYVDPGNVAANVSSGAQFGYLLLWVIVAANVMAALVQYLSAKLGLVTGRSLPEAIGKRMGRPARLAYWAQAEIVAMATDVAEVIGGAIALRIMFNLPLPIGGIITGVVSLLLLTIQDRRGQRLFERVITALLLVIAIGFTASFFVVTPPPNAVLGGLAPRFQGTESVLLAAAIMGATVMPHAVYLHSGLARDRHGHPDPGPQRRRLLRVTRWDVGLAMLIAGGVNAAMLLVAALNMRGRGDTASIEGAYHAVHDTLGATIAVLFAVGLLASGLASSSVGAYAGAMIMQGLLHWSVPMLVRRLITLGPALAILTLGFDPTRTLVLSQVVLSFGIPFAVLPLVKLTGSPAVMGGDTNHRATTWVGWVVAVMVSLLNVMLIYLTVTG

SEQ ID NO: 64468 - protein, 338 aa, Mycobacterium tuberculosis; identical to SEQ ID NO: 62710

SEQ ID NO: 64469 - protein, 553 aa, Mycobacterium tuberculosis; identical to SEQ ID NO: 62528

SEQ ID NO: 64470 - protein, 771 aa, Mycobacterium tuberculosis; identical to SEQ ID NO: 62527

SEQ ID NO: 64471 - protein, 332 aa, Mycobacterium tuberculosis; identical to SEQ ID NO: 62526

SEQ ID NO: 64472 - protein, 303 aa, Mycobacterium tuberculosis
MTHMSIFLSRDNKVIVQGITGSEATVHTARMLRAGTQIVGGVNARKAGTTVTHEDKGGRLIKLPVFGSVAEAMEKTGADVSIIFVPPTFAKDAIIEAIDAEIPLLVVITEGIPVQDTAYAWAYNLEAGHKTRIIGPNCPGIISPGQSLAGITPANITGPGPIGLVSKSGTLTYQMMFELRDLGFSTAIGIGGDPVIGTTHIDAIEAFERDPDTKLIVMIGEIGGDAEERAADFIKTNVSKPVVGYVAGFTAPEGKTMGHAGAIVSGSSGTAAAKQEALEAAGVKVGKTPSATAALAREILLSL

SEQ ID NO: 64473 - protein, 770 aa, Mycobacterium tuberculosis
MRVCVTGFNVDAVRAVAIEETVSQVTGVHAVHAYPRTASVVIWYSPELGDTAAVLSAITKAQHVPAELVPARAPHSAGVRGVGVVRKITGGIRRMLSRPPGVDKPLKASRCGGRPRGPVRGSASWPGEQNRRERRTWLPRVWLALPLGLLALGSSMFFGAYPWAGWLAFAATLPVQFVAGWPILRGAVQQARALTSNMDTLIALGTLTAFVYSTYQLFAGGPLFFDTSALIIAFVVLGRHLEARATGKASEAISKLLELGAKEATLLVDGQELLVPVDQVQVGDLVRVRPGEKIPVDGEVTDGRAAVDESMLTGESVPVEKTAGDRVAGATVNLDGLLTVRATAVGADTALAQIVRLVEQAQGDKAPVQRLADRVSAVFVPAVIGVAVATFAGWTLIAANPVAGMTAAVAVLIIACPCALGLATPTAIMVGTGRGAELGILVKGGEVLEASKKIDTVVFDKTGTLTRARMRVTDVIAGQRRQPDQVLRLAAAVESGSEHPIGAAIVAAAHERGLAIPAANAFTAVAGHGVRAQVNGGPVVVGRRKLVDEQHLVLPDHLAAAAVEQEERGRTAVFVGQDGQVVGVLAVADTVKDDAADVVGRLHAMGLQVAMITGDNARTAAAIAKQVGIEKVLAEVLPQDKVAEVRRLQDQGRVVAMVGDGVNDAPALVQADLGIAIGTGTDVAIEASDITLMSGRLDGVVRAIELSRQTLRTIYQNLGWAFGYNTAAIPLAALGALNPVVAGAAMGFSSVSVVTNSLRLRRFGRDGRTA

SEQ ID NO: 64474 - protein, 923 aa, Mycobacterium tuberculosis
MSFVVTAPPVLASAASDLGGIASMISEANAMAAVRTTALAPAAADEVSAAIAALFSSYARDYQTLSVQVTAFHVQFAQTLTNAGQLYAVVDVGNGVLLKTEQQVLGVINAPTQTLVGRPLIGDGTHGAPGTGQNGGAGGILWGNGGNGGSGAPGQPGGRGGDAGLFGHGGHGGVGGPGIAGAAGTAGLPGGNGANGGSGGIGGAGGAGGNGGLLFGNGGAGGQGGSGGLGGSGGTGGAGMAAGPAGGTGGIGGIGGIGGAGGVGGHGSALFGHGGINGDGGTGGMGGQGGAGGNGWAAEGITVGIGEQGGQGGDGGAGGAGGIGGSAGGIGGSQGAGGHGGDGGQGGAGGSGGVGGGGAGAGGDGGAGGIGGTGGNGSIGGAAGNGGNGGRGGAGGMATAGSDGGNGGGGGNGGVGVGSAGGAGGTGGDGGAAGAGGAPGHGYFQQPAPQGLPIGTGGTGGEGGAGGAGGDGGQGDIGFDGGRGGDGGPGGGGGAGGDGSGTFNAQANNGGDGGAGGVGGAGGTGGTGGVGADGGRGGDSGRGGDGGNAGHGGAAQFSGRGAYGGEGGSGGAGGNAGGAGTGGTAGSGGAGGFGGNGADGGNGGNGGNGGFGGINGTFGTNGAGGTGGLGTLLGGHNGNIGLNGATGGIGSTTLTNATVPLQLVNTTEPVVFISLNGGQMVPVLLDTGSTGLVMDSQFLTQNFGPVIGTGTAGYAGGLTYNYNTYSTTVDFGNGLLTLPTSVNVVTSSSPGTLGNFLSRSGAVGVLGIGPNNGFPGTSSIVTAMPGLLNNGVLIDESAGILQFGPNTLTGGITISGAPISTVAVQIDNGPLQQAPVMFDSGGINGTIPSALASLPSGGFVPAGTTISVYTSDGQTLLYSYTTTATNTPFVTSGGVMNTGHVPFAQQPIYVSYSPTAIGTTTFN

SEQ ID NO: 64475 - protein, 464 aa, Mycobacterium tuberculosis
MAKLARVVGLVQEEQPSDMTNHPRYSPPPQQPGTPGYAQGQQQTYSQQFDWRYPPSPPPQPTQYRQPYEALGGTRPGLIPGVIPTMTPPPGMVRQRPRAGMLAIGAVTIAVVSAGIGGAAASLVGFNRAPAGPSGGPVAASAAPSIPAANMPPGSVEQVAAKVVPSVVMLETDLGRQSEEGSGIILSAEGLILTNNHVIAAAAKPPLGSPPPKTTVTFSDGRTAPFTVVGADPTSDIAVVRVQGVSGLTPISLGSSSDLRVGQPVLAIGSPLGLEGTVTTGIVSALNRPVSTTGEAGNQNTVLDAIQTDAAINPGNSGGALVNMNAQLVGVNSAIATLGADSADAQSGSIGLGFAIPVDQAKRIADELISTGKASHASLGVQVTNDKDTLGAKIVEVVAGGAAANAGVPKGVVVTKVDDRPINSADALVAAVRSKAPGATVALTFQDPSGGSRTVQVTLGKAEQ

SEQ ID NO: 64476 - protein, 181 aa, Mycobacterium tuberculosis; identical to SEQ ID NO: 62350

SEQ ID NO: 64477 - protein, 248 aa, Mycobacterium tuberculosis
MNRQPIVQLSNLSWTFREGETRRQVLDHITFDFEPGEFVALLGQSGSGKSTLLNLISGIEKPTTGDVTINGFAITQKTERDRTLFRRDQIGIVFQFFNLIPTLTVLENITLPQELAGVSQRKAAVVARDLLEKVGMADRERTFPDKLSGGEQQRVAISRALAHNPMLVLADEPTGNLDSDTGDKVLDVLLDLTRQAGKTLIMATHSPSMTQHADRVVNLQGGRLIPAVNRENQTDQPASTILLPTSYE

SEQ ID NO: 64478 - protein, 855 aa, Mycobacterium tuberculosis
MNDQAPVAYAPLWRTAWRRLRQRPFQYILLVLGIALGVAMIVAIDVSSNSAQRAFDLSAAAITGKSTHRLVSGPAGVDQQLYVDLRRHGYDFSAPVIEGYVLARGLGNRAMQFMGTDPFAESAFRSPLWSNQNIAELGGFLTRPNGVVLSRQVAQKYGLAVGDRIALQVKGAPTTVTLVGLLTPADEVSNQKLSDLIIADISTAQELFHMPGRLSHIDLIIKDEATATRIQQRLPAGVRMETSDTQRDTVKQMTDAFTVNLTALSLIALLVGIFLIYNTVTFNVVQRRPFFAILRCLGVTREQLFWLIMTESLVAGLIGTGLGLLIGIWLGEGLIGLVTQTINDFYFVINVRNVSVSAESLLKGLIIGIFAAMLATLPPAIEAMRTVPASTLRRSSLESKITKLMPWLWVAWFGLGSFGVLMLWLPGNNLVVAFVGLFSVLIALALIAPPLTRFVMLRLAPGLGRLLGPIGRMAPRNIVRSLSRTSIAIAALMMAVSLMVGVSISVGSFRQTLANWLEVTLKSDVYVSPPTLTSGRPSGNLPVDAVRNISKWPGVRDAVMARYSSVFAPDWGREVELMAVSGDISDGKRPYRWIDGNKDTLWPRFLAGKGVMLSEPMVSRQHLQMPPRPITLMTDSGPQTFPVLAVFSDYTSDQGVILMDRASYRAHWQDDDVTTMFLFLASGANSGALIDQLQAAFAGREDIVIQSTHSVREASMFIFDRSFTITIALQLVATVVAFIGVLSALMSLELDRAHELGVFRAIGMTTRQLWKLMFIETGLMGGMAGLMALPTGCILAWILVRIINVRSFGWTLQMHFESAHFLRALLVAVVAALAAGMYPAWRLGRMTIRTAIREE

SEQ ID NO: 64479 - protein, 197 aa, Mycobacterium tuberculosis
MAMASKSALRDQLLAARRRVADDVRAAEARMLRGHLERMVTSDSTVCAYVPVGGEPGSIEMLDVLLRRAGRVLLPVARTAGGDLPLPLRWGEYRAGGLARARWGLLEPPEPWLPEAALAQASLVLVPALAVDRQGVRLGRGRGFYDRSLRCRDPHARLVAVVRTVELVDVLPSEPHDVPMTHALTPERGLIALPCGE

SEQ ID NO: 64480 - protein, 306 aa, Mycobacterium tuberculosis
MSRPEVLTPFTAIVPAAGLGTRFLPATKTVPKELLPVVDTPGIELVAAEAAAAGAERLVIVTSEGKDGVVAHFVEDLVLEGTLEARGKIAMLAKVRRAPALIKVESVVQAEPLGLGHAIGCVEPTLSPDEDAVAVLLPDDLVLPTGVLETMSKVRASRGGTVLCAIEVAREEISAYGVFDVEPVPDGDYTDDPNVLKVRGMVEKPKAETAPSRYAAAGRYVLDRAIFDALRRIDQGAGGEVQLTDAIALLIAEGHPVHVVVHQGSRHDLGNPGGYLKAAVDFALDRDDYGPDLRRWLVARLGLTEQ

SEQ ID NO: 64481 - protein, 285 aa, Mycobacterium tuberculosis
MSSGRLLLGATPLGQPSDASPRLAAALATADVVAAEDTRRVRKLAKALDIRIGGRVVSLFDRVEALRVTALLDAINNGATVLVVSDAGTPVISDPGYRLVAACIDAGVSVTCLPGPSAVTTALVMSGLPAEKFCFEGFAPRKGAARRAWLAELAEERRTCVFFESPRRLAACLNDAVEQLGGARPAAICRELTKVHEEVVRGSLDELAIWAAGGVLGEITVVVAGAAPHAELSSLIAQVEEFVAAGIRVKDACSEVAAAHPGVRTRQLYDAVLQSRRETGGPAQP

SEQ ID NO: 64482 - protein, 519 aa, Mycobacterium tuberculosis
MKPYYVTTAIAYPNAAPHVGHAYEYIATDAIARFKRLDRYDVRFLTGTDEHGLKVAQAAAAAGVPTAALARRNSDVFQRMQEALNISFDRFIRTTDADHHEASKELWRRMSAAGDIYLDNYSGWYSVRDERFFVESETQLVDGTRLTVETGTPVTWTEEQTYFFRLSAYTDKLLAHYHANPDFIAPETRRNEVISFVSGGLDDLSISRTSFDWGVQVPEHPDHVMYVWVDALTNYLTGAGFPDTDSELFRRYWPADLHMIGKDIIRFHAVYWPAFLMSAGIELPRRIFAHGFLHNRGEKMSKSVGNIVDPVALAEALGVDQVRYFLLREVPFGQDGSYSDEAIVTRINTDLANELGNLAQRSLSMVAKNLDGRVPNPGEFADADAALLATADGLLERVRGHFDAQAMHLALEAIWLMLGDANKYFSVQQPWVLRKSESEADQARFRTTLYVTCEVVRIAALLIQPVMPESAGKILDLLGQAPNQRSFAAVGVRLTPGTALPPPTGVFPRYQPPQPPEGK

SEQ ID NO: 64483 - protein, 264 aa, Mycobacterium tuberculosis
MVDAHTHLDACGARDADTVRSLVERAAAAGVTAVVTVADDLESARWVTRAAEWDRRVYAAVALHPTRADALTDAARAELERLVAHPRVVAVGETGIDMYWPGRLDGCAEPHVQREAFAWHIDLAKRTGKPLMIHNRQADRDVLDVLRAEGAPDTVILHCFSSDAAMARTCVDAGWLLSLSGTVSFRTARELREAVPLMPVEQLLVETDAPYLTPHPHRGLANEPYCLPYTVRALAELVNRRPEEVALITTSNARRAYGLGWMRQ

SEQ ID NO: 64484 - protein, 317 aa, Mycobacterium tuberculosis; identical to SEQ ID NO: 62340

SEQ ID NO: 64485 - protein, 215 aa, Mycobacterium tuberculosis; identical to SEQ ID NO: 62835

SEQ ID NO: 64486 - protein, 326 aa, Mycobacterium tuberculosis
MSHDWTDNRKNLMLFAGRAHPELAEQVAKELDVHVTSQDAREFANGEIFVRFHESVRGCDAFVLQSCPAPVNRWLMEQLIMIDALKRGSAKRITAVMPFYPYARQDKKHRGREPISARLIADLLKTAGADRIVTVDLHTDQIQGFFDGPVDHMRGQNLLTGYIRDNYPDGNMVVVSPDSGRVRIAEKWADALGGVPLAFIHKTRDPRVPNQVVSNRVVGDVAGRTCVLIDDMIDTGGTIAGAVALLHNDGAGDVIIAATHGVLSDPAAQRLASCGAREVIVTNTLPIGEDKRFPQLTVLSIAPLLASTIRAVFENGSVTGLFDGDA

SEQ ID NO: 64487 - protein, 495 aa, Mycobacterium tuberculosis
MTFPGDTAVLVLAAGPGTRMRSDTPKVLHTLAGRSMLSHVLHAIAKLAPQRLIVVLGHDHQRIAPLVGELADTLGRTIDVALQDRPLGTGHAVLCGLSALPDDYAGNVVVTSGDTPLLDADTLADLIATHRAVSAAVTVLTTTLDDPFGYGRILRTQDHEVMAIVEQTDATPSQREIREVNAGVYAFDIAALRSALSRLSSNNAQQELYLTDVIAILRSDGQTVHASHVDDSALVAGVNNRVQLAELASELNRRVVAAHQLAGVTVVDPATTWIDVDVTIGRDTVIHPGTQLLGRTQIGGRCVVGPDTTLTDVAVGDGASVVRTHGSSSSIGDGAAVGPFTYLRPGTALGADGKLGAFVEVKNSTIGTGTKVPHLTYVGDADIGEYSNIGASSVFVNYDGTSKRRTTVGSHVRTGSDTMFVAPVTIGDGAYTGAGTVVREDVPPGALAVSAGPQRNIENWVQRKRPGSPAAQASKRASEMACQQPTQPPDADQTP

SEQ ID NO: 64488 - protein, 1234 aa, Mycobacterium tuberculosis; identical to SEQ ID NO: 62676

SEQ ID NO: 64489 - protein, 325 aa, Mycobacterium tuberculosis; identical to SEQ ID NO: 62839

SEQ ID NO: 64490 - protein, 429 aa, Mycobacterium tuberculosis
MPIIEQVRAREILDSRGNPTVEVEVALIDGTFARAAVPSGASTGEHEAVELRDGGDRYGGKGVQKAVQAVLDEIGPAVIGLNADDQRLVDQALVDLDGTPDKSRLGGNAILGVSLAVAKAAADSAELPLFRYVGGPNAHILPVPMMNILNGGAHADTAVDIQEFMVAPIGAPSFVEALRWGAEVYHALKSVLKKEGLSTGLGDEGGFAPDVAGTTAALDLISRAIESAGLRPGADVALALDAAATEFFTDGTGYVFEGTTRTADQMTEFYAGLLGAYPLVSIEDPLSEDDWDGWAALTASIGDRVQIVGDDIFVTNPERLEEGIERGVANALLVKVNQIGTLTETLDAVTLAHHGGYRTMISHRSGETEDTMIADLAVAIGSGQIKTGAPARSERVAKYNQLLRIEEALGDAARYAGDLAFPRFACETK

SEQ ID NO: 64491 - protein, 860 aa, Mycobacterium tuberculosis
MTLLFADLCAIFTPYRWMIEHVTTKRGQLRIYLGAAPGVGKTYAMLGEAHRRLERGTDVVAAVVETHGRNKTAKLLEGIEMIPPRYVEYRGARFPELDVEAVLRRHPQVVLVDELAHTNTPGSKNPKRWQDVQEILDAGITVISTVNIQHLEGLNDVVEQITGIEQKEKIPDEIVRAADQVELVDITPEALRRRLAHGNVYAAERVDAALSNYFRTGNLTALREIALLWLADQVDAALEKYRADKKITATWEARERVVVAVTGGPESETLVRRASRIASKSSAELMVVHVIRGDGLAGVSAPQLGRVRELATSLGATMHTVVGDDVPTALLDFAREMNATQLVVGTSRRSRWARLFDEGIGARTVQEPGGIDVHMVTHPAASRASGWSRVSPRERHIASWLAALVVPSVICAITVAWLDRFMGIGGESALFFIGVLIVALLGGVAPAALSALLSGMLLNYFLTEPRYTWTIAEPDAAVTEFVLLAMAVAVAVLVDGAASRTREARRASQEAELLALFAGSVLRGADLATLLQRVRETYSQRAVTMLRVRQGASTGETVACVGTNPCRDVDSADTAIEVGDDEFWMLMAGRKLAARDRRVLTAVATQAAGLVKQRELAEEAGQAEAIARADELRRSLLSAVSHDLRTPLAAAKVAVSSLRTEDVAFSPEDTAELLATIEESIDQLTALVANLLDSSRLAAGVIRPQLRRAYLEEAVQRALVSIGKGATGFYRSGIDRVKVDVGDAVAMADAGLLERVLANLIDNALRYAPDCVVRVNAGRVRERVLINVIDEGPGVPRGTEEQLFAPFQRPGDHDNTTGVGLGMSVARGFVEAMGGTISATDTPGGGLTVVIDLAAPEDRP

SEQ ID NO: 64492 - protein, 709 aa, Mycobacterium tuberculosis
MMIARMETSATAAAATSAPRLRLAKRSLFDPMIVRSALPQSLRKLAPRVQARNPVMLVVLVGAVITTLAFLRDLASSTAQENVFNGLVAAFLWFTVLFANFAEAMAEGRGKAQAAALRKVRSETMANRRTAAGNIESVPSSRLDLDDVVEVSAGETIPSDGEIIEGIASVDESAITGESAPVIRESGGDRSAVTGGTVVLSDRIVVRITAKQGQTFIDRMIALVEGAARQQTPNEIALNILLAGLTIIFLLAVVTLQPFAIYSGGGQRVVVLVALLVCLIPTTIGALLSAIGIAGMDRLVQHNVLATSGRAVEAAGDVNTLLLDKTGTITLGNRQATEFVPINGVSAEAVADAAQLSSLADETPEGRSIVVLAKDEFGLRARDEGVMSHARFVPFTAETRMSGVDLAEVSGIRRIRKGAAAAVMKWVRDHGGHPTEEVGAIVDGISSGGGTPLVVAEWTDNSSARAIGVVHLKDIVKVGIRERFDEMRRMSIRTVMITGDNPATAKAIAQEAGVDDFLAEATPEDKLALIKREQQGGRLVAMTGDGTNDAPALAQADVGVAMNTGTQAAREAGNMVDLDSDPTKLIEVVEIGKQLLITRGALTTFSIANDVAKYFAIIPAMFVGLYPVLDKLNVMALHSPRSAILSAVIFNALVIVALIPLALRGVRFRAESASAMLRRNLLIYGLGGLVVPFIGIKLVDLVIVALGVS

SEQ ID NO: 64493 - protein, 341 aa, Mycobacterium tuberculosis
MCAHQFFGLVHNPVVAAAIGKPEPPPVDSDIGLPTTVPFEPWSVADFSRYLSTLGLPAAGDAVTLHRILSSMERAGLLLPLGWDPRLPVMGQKYISQGAISKGQRGGNLWLSEVFGAELIIPSYNAVTVQLAGHDDAGNPVDSWGTGLVVDHNHVITNKHVVTGLAGTSAGLSVYPSSNHAEAELVNFSGTAHPHPTLDVAVIKFEMPEGKYIPRLGGMAFRDPDWADEVYVFGYPRVPMTAEMAITVQRGEVVNPAATTIPGRQKIFLYSAIARPGNSGGPIVAQDGRVIGLVVEDSAEAPSTGTGPNAAPFYRGIPSSEVIRALDELDFGGIVEMDTLP

SEQ ID NO: 64494 - protein, 667 aa, Mycobacterium tuberculosis
MSFVLVSPSQLMAAAADVAGIGSAISAANAAALAPTSVLAAAGADEVSAAVAALFSAHAGQYQQLGARAALFHEQFVQALTGAASAYASAEATNVEQQVLGLINAPTQALLGRPLIGNGADGTAANPNGGAGGLLYGNGGNGFSQTTAGLTGGTGGSAGLIGNGGNGGAGGAGANGGAGGNGGWLYGSGGNGGAGGAGPAGAIGAPGVAGGAGGAGGTAGLFGNGGVGGVGGDGGQGGNGAGAGASGTKGGDAGAGGAGGAGGWIHGHGGAGGDGGAGGAGGQASPGAPGPPSQPGGAGGAGGAGGRGGDGGSAGWLSGNGGDAGNGGGGGTAGGAGNGGQFGGDGGTGGTGGTAGAGGNGGRGAVLFGHGGNAGHGGAGGNGAAAGAGGEHVVATAGKGGTGGVGGDGGGGGAGGGGGLLYGNGGAGGAGNSGGDGGTGLNAALGGNGGGGGVGGNAGAGGTGGSAGWLSGNGGAGGSGGSAGAGGAGGKGGDTPNGLAINPGIGGNGGDTGNAGNGGNGGSAARLFGGGGAGGAGGTGSTAGSGGSGGTNPPTGLQAAGGNGGSGHAGGHGGNGGGAGLLGGGGTGGNGGGGGQGGLGAAAGGVDGNGGNGGNGGKGGDAQLVGDGGNGGNGGKGGAGLIAGLDGAGGAGGTRGLIFGNAGTPGQ

SEQ ID NO: 64495 - protein, 242 aa, Mycobacterium tuberculosis; identical to SEQ ID NO: 62729

SEQ ID NO: 64496 - protein, 328 aa, Mycobacterium tuberculosis
MELVRVTEAGAMAAGRWVGRGDKEGGDGAAVDAMRELVNSVSMRGVVVIGEGEKDHAPMLYNGEEVGNGDGPECDFAVDPIDGTTLMSKGMTNAISVLAVADRGTMFDPSAVFYMNKIAVGPDAAHVLDITAPISENIRAVAKVKDLSVRDMTVCILDRPRHAQLIHDVRATGARIRLITDGDVAGAISACRPHSGTDLLAGIGGTPEGIIAAAAIRCMGGAIQAQLAPRDDAERRKALEAGYDLNQVLTTEDLVSGENVFFCATGVTDGDLLKGVRYYPGGCTTHSIVMRSKSGTVRMIEAYHRLSKLNEYSAIDFTGDSSAVYPLP

SEQ ID NO: 64497 - protein, 370 aa, Mycobacterium tuberculosis; identical to SEQ ID NO: 62739

SEQ ID NO: 64498 - protein, 415 aa, Mycobacterium tuberculosis; identical to SEQ ID NO: 62738

SEQ ID NO: 64499 - protein, 357 aa, Mycobacterium tuberculosis
MSLSLGIVGLPNVGKSTLFNALTRNNVVAANYPFATIEPNEGVVSLPDPRLDKLAELFGSQRVVPAPVTFVDIAGLVKGASEGAGLGNKFLAHIRECDAICQVVRVFVDDDVTHVTGRVDPQSDIEVVETELILADLQTLERATGRLEKEARTNKARKPVYDAALRAQQVLDAGKTLFAAGVDAAALRELNLLTTKPFLYVFNADEAVLTDPARVGELRALVAPADAVFLDAAIESELTELDDESAAELLESIGQSERGLDALARAGFHTLKLQTFLTAGPKEARAWTIHQGDTAPKAAGVIHSDFEKGFIKAEIVSYDDLVAAGSMAAAKAAGKVRIEGKDYVMADGDVVEFRFNV

SEQ ID NO: 64500 - protein, 490 aa, Mycobacterium tuberculosis
MTRITRANGCPDGTLENAVVALDGGANYPREILGNKGHGIDMMRRHHLPVPPAFCITTEVGVRYLAAPGSTIAAIWDDVLDRMSWLETETSCTFGRGPNPLLVSVRSGATQSMPGMMDTILDVGMTDAVERVLARPGAADFAHDTRRRFTSMYRRIVGSAGPITDDPYAQLRASIEAVFASWNSPRAVAYRDHHGLDDQGGTAVVVQAMVFGNLTANSGAGVLSSRNPITGANEPFGEWLPGGQGDDVVSGLVAVAPITALRDQQPAVYDQLMAAARSLERMAGDVQEIEFTVEDSQLWLLQTRGAERSAQAAVRLALQLHHEGLIDDTETLRRVTPTHIETLLRPSLQTETRLAAPLLAKGLPACPGVVSGTAYTEVDEALDAADRGEPVILVRDHTRPEDVMGMLAAQGIVTEVGGAASHAAVVSRELGRVAVVGCGPGVAAALAGKEITVDGYEGEVRQGVLALSAWSESDTPELRELADIAQRISS

SEQ ID NO: 64501 - protein, 393 aa, Mycobacterium tuberculosis; identical to SEQ ID NO: 62765

SEQ ID NO: 64502 - protein, 268 aa, Mycobacterium tuberculosis; identical to SEQ ID NO: 62500

SEQ ID NO: 64503 - protein, 121 aa, Mycobacterium tuberculosis; identical to SEQ ID NO: 62361

SEQ ID NO: 64504 - protein, 1232 aa, Mycobacterium tuberculosis
MTVTPHVGGPLEELLERSGRFFTPGEFSADLRTVTRRGGREGDVFYRDRWSHDKVVRSTHGVNCTGSCSWKIYVKDGIITWETQQTDYPSVGPDRPEYEPRGCPRGASFSWYSYSPTRVRYPYARGVLVEMYREAKTRLGDPVLAWADIQADPERRRRYQQARGKGGLVRVSWAEASEMVAAAHVHTIKTYGPDRVAGFSPIPAMSMVSHAAGSRFVELIGGVMTSFYDWYADLPVASPQVFGDQTDVPESGDWWDASYLVMWGSNVPITRTPDAHWMAEARYRGAKVVVVSPDYADNTKFADEWVRCAAGTDTALAMAMGHVILSECYVRNQVPFFVDYVRRYTDLPFLIKLEKRGDLLVPGKFLTAADIGEESENAAFKPALLDELTNTVVVPQGSLGFRFGEDGVGKWNLDLGSVVPALSVEMDKAVNGDRSAELVTLPSFDTIDGHGETVSRGVPVRRAGKHLVCTVFDLMLAHYGVARAGLPGEWPTGYHDRTQQNTPAWQESITGVPAAQAIRFAKEFARNATESGGRSMIIMGGGICHWFHSDVMYRSVLALLMLTGSMGRNGGGWAHYVGQEKVRPLTGWQTMAMATDWSRPPRQVPGASYWYAHTDQWRYDGYGADKLASPVGRGRFAGKHTMDLLTSATAMGWSPFYPQFDRSSLDVADEARAAGRDVGDYVAEQLAQHKLKLSITDPDNPVNWPRVLTVWRANLIGSSGKGGEYFLRHLLGTDSNVQSDPPTDGVHPRDVVWDSDIPEGKLDLIMSIDFRMTSTTLVSDVVLPAATWYEKSDLSSTDMHPYVHSFSPAIDPPWETRSDFDAFAAIARAFSALAKRHLGTRTDVVLTALQHDTPDEMAYPDGTERDWLATGEVPVPGRTMSKLTVVERDYTAIYDKWLTLGPLIDQFGMTTKGYTVHPFREVSELAANFGVMNSGVAVGRPAITTAKRMADVILALSGTCNGRLAVEGFLELEKRTGQRLAHLAEGSEERRITYADTQARPVPVITSPEWSGSESGGRRYAPFTINIEHLKPFHTLTGRMHFYLAHDWVEELGEQLPVYRPPLDMARLFNQPELGPTDDGLGLTVRYLTPHSKWSFHSTYQDNLYMLSLSRGGPTMWMSPGDAAKINVRDNDWVEAVNANGIYVCRAIVSHRMPEGVVFVYHVQERTVDTPRTETNGKRGGNHNALTRVRIKPSHLAGGYGQHAFAFNYLGPTGNQRDEVTVVRRRSQEVRY

SEQ ID NO: 64505 - protein, 558 aa, Mycobacterium tuberculosis; identical to SEQ ID NO: 62464

SEQ ID NO: 64506 - protein, 628 aa, Mycobacterium tuberculosis; identical to SEQ ID NO: 62461

SEQ ID NO: 64507 - protein, 362 aa, Mycobacterium tuberculosis
MSASLPVFPWDTLADAKALAGAHPDGIVDLSVGTPVDPVAPLIQEALAAASAAPGYPATAGTARLRESVVAALARRYGITRLTEAAVLPVIGTKELIAWLPTLLGLGGADLVVVPELAYPTYDVGARLAGTRVLRADALTQLGPQSPALLYLNSPSNPTGRVLGVDHLRKVVEWARGRGVLVVSDECYLGLGWDAEPVSVLHPSVCDGDHTGLLAVHSLSKSSSLAGYRAGFVVGDLEIVAELLAVRKHAGMMVPAPVQAAMVAALDDDAHERQQRERYAQRRAALLPALGSAGFAVDYSDAGLYLWATRGEPCRDSAAWLAQRGILVAPGDFYGPGGAQHVRVALTATDERVAAAVGRLTC

SEQ ID NO: 64508 - protein, 538 aa, Mycobacterium tuberculosis
MRIAGVGLGQLLLALDATVVSLVDAPRGLDLPVASTALIDSDDVRLGLAAAAGSADVFFLIGVTDDEAVRWVDDQARQRAPVAIFVKHPSDSVVAGAVRAGSAVVAVEPRARWERLYHLVNHVLEHHGDRADPTDDSGTDLFGLAQSLADRIHGMISIEDAQSHVLAYSASNDEADELRRLSILGRAGPPEHLQWIGQWGIFDALRPGREVVRVAERPELGLRPRLAIGIHQPGVGALRPPVFAGTIWVQQGSQPLADDAEEMLRGAAVLAARIMSRLATQPNTHALRVQQLLGLAELNATTAPVDVSTIARELGVAAEGNATLIGFDTAENRDTAVRHVRLVDVMALSASAFRHDAQVAANGSRIYVLLPQTTTGRAVTSWVRGTISALRAELGVALRAAIAGPVAGLAEVNPARVEVDRVLESAERHPILGQVTSLAEARTTVLLDEIVTLVGTDQRLVDPRIRDLGAQDPVLAQTLRAYLDAFGDIGAAARSLQVHPNTVRYRIRRIEQLLSTSLGDPDVRLLFSLGLRAMERTA

SEQ ID NO: 64509 - protein, 187 aa, Mycobacterium tuberculosis
MSAKIDITGDWTVAVYCAASPTHAELLELAAEVGAAIAGRGWTLVWGGGHVSAMGAVASAARACGGWTVGVIPKMLVYRELADHDADELIVTDTMWERKQIMEDRSDAFIVLPGGVGTLDELFDAWTDGYLGTHDKPIVMVDPWGHFDGLRAWLNGLLDTGYVSPTAMERLVVVDNVKDALRACAPS

SEQ ID NO: 64510 - protein, 311 aa, Mycobacterium tuberculosis
MSADNHQVPIEIRGLTKHFGSVRALDGLDLTVREGEVHGFLGPNGAGKSTTLRILLGLVKADGGSVRLLGGDPWTDAVDLHRHIAYVPGDVTLWPSLTGGETIDLLARMRGGIDNARRAELIERFGLDPTKKARTYSKGNRQKVSLISALSSHATLLLLDEPSSGLDPLMENVFQQCIGEARQRGVTVLLSSHILAETEALCEKVTIIRAGKTVESGSLDALRHLSRTSIKAEMIGDPGDLSQIKGVEDISIEGTTVRAQVDSESLRELIQVLGHAGVRSLVSQPPTLEELFLRHYSLGPEVAAEQQVATP

SEQ ID NO: 64511 - protein, 549 aa, Mycobacterium tuberculosis
MSHLSQRMAGLLRVHGEWSRSVDTRVDTDNAMPARFSAQIQNEDEVTSDQGNNGGPNGGGRLAPRPVFRPPVDPASRQAFGRPSGVQGSFVAERVRPQKYQDQSDFTPNDQLADPVLQEAFGRPFAGAESLQRHPIDAGALAAEKDGAGPDEPDDPWRDPAAAAALGTPALAAPAPHGALAGSGKLGVRDVLFGGKVSYLALGILVAIALVIGGIGGVIGRKTAEVVDAFTTSKVTLSTTGNAQEPAGRFTKVAAAVADSVVTIESVSDQEGMQGSGVIVDGRGYIVTNNHVISEAANNPSQFKTTVVFNDGKEVPANLVGRDPKTDLAVLKVDNVDNLTVARLGDSSKVRVGDEVLAVGAPLGLRSTVTQGIVSALHRPVPLSGEGSDTDTVIDAIQTDASINHGNSGGPLIDMDAQVIGINTAGKSLSDSASGLGFAIPVNEMKLVANSLIKDGKIVHPTLGISTRSVSNAIASGAQVANVKAGSPAQKGGILENDVIVKVGNRAVADSDEFVVAVRQLAIGQDAPIEVVREGRHVTLTVKPDPDST

SEQ ID NO: 64512 - protein, 411 aa, Mycobacterium tuberculosis
MHIGGRWGARPAVAAVRRGACRLTRAPAFGVAAIAPLVFASAVGSAAPVFPGRTAPVHAVITPVAAVAASGIDLSGPVVIAMKRPPTSFRVAVATISAPPPPMIVNSPGALGIPAMALSAYRNAELKMAAAAPGCGVSWNLLAGIGRIESMHANGGATDARGTAIQPIYGPTLDGTLPGNEIIIQSSVGNRVTYARAMGPMQFLPGTWARYATDGDDDGVADPQNLFDSTLAAARYLCSGGLNLRDPAQVMAALLRYNNSMPYAQNVLGWAAGYATGVFPVDLPPITGPPPPLGDAHLENPEGLGPGLPINVNGLTADGPMAHLPLIDLTPRQAALNPPPMFPWMAPDPSAPMPGCTLICIGSHGPPVGAPPFPPTAPPPPFLPAAPPPPDPLAGPPGDAGLAPPAPAPAG

SEQ ID NO: 64513 - protein, 468 aa, Mycobacterium tuberculosis
MVMSRGRIPRLGAAVLVALTTAAAACGADSQGLVVSFYTPATDGATFTAIAQRCNQQFGGRFTIAQVSLPRSPNEQRLQLARRLTGNDRTLDVMALDVVWTAEFAEAGWALPLSDDPAGLAENDAVADTLPGPLATAGWNHKLYAAPVTTNTQLLWYRPDLVNSPPTDWNAMIAEAARLHAAGEPSWIAVQANQGEGLVVWFNTLLVSAGGSVLSEDGRHVTLTDTPAHRAATVSALQILKSVATTPGADPSITRTEEGSARLAFEQGKAALEVNWPFVFASMLENAVKGGVPFLPLNRIPQLAGSINDIGTFTPSDEQFRIAYDASQQVFGFAPYPAVAPGQPAKVTIGGLNLAVAKTTRHRAEAFEAVRCLRDQHNQRYVSLEGGLPAVRASLYSDPQFQAKYPMHAIIRQQLTDAAVRPATPVYQALSIRLAAVLSPITEIDPESTADELAAQAQKAIDGMGLLP

SEQ ID NO: 64514 - protein, 562 aa, Mycobacterium tuberculosis
MEYLIAAQDVLVAAAADLEGIGSALAAANRAAEAPTTGLLAAGADEVSAAIASLFSGNAQAYQALSAQAAAFHQQFVRALSSAAGSYAAAEAANASPMQAVLDVVNGPTQLLLGRPLIGDGANGGPGQNGGDGGLLYGNGGNGGSSSTPGQPGGRGGAAGLIGNGGAGGAGGPGANGGAGGNGGWLYGNGGLGGNGGAATQIGGNGGNGGHGGNAGLWGNGGAGGAGAAGAAGANGQNPVSHQVTHATDGADGTTGPDGNGTDAGSGSNAVNPGVGGGAGGIGGDGTNLGQTDVSGGAGGDGGDGANFASGGAGGNGGAAQSGFGDAVGGNGGAGGNGGAGGGGGLGGAGGSANVANAGNSIGGNGGAGGNGGIGAPGGAGGAGGNANQDNPPGGNSTGGNGGAGGDGGVGASADVGGAGGFGGSGGRGGLLLGTGGAGGDGGVGGDGGIGAQGGSGGNGGNGGIGADGMANQDGDGGDGGNGGDGGAGGAGGVGGNGGTGGAGGLFGQSGSPGSGAAGGLGGAGGNGGAGGGGGTGFNPGAPGDPGTQGATGANGQHGLNG

SEQ ID NO: 64515 - protein, 1214 aa, Mycobacterium tuberculosis
MYRKFRDDPSSVDPSWHEFLVDYSPEPTSQPAAEPTRVTSPLVAERAAAAAPQAPPKPADTAAAGNGVVAALAAKTAVPPPAEGDEVAVLRGAAAAVVKNMSASLEVPTATSVRAVPAKLLIDNRIVINNQLKRTRGGKISFTHLLGYALVQAVKKFPNMNRHYTEVDGKPTAVTPAHTNLGLAIDLQGKDGKRSLVVAGIKRCETMRFAQFVTAYEDIVRRARDGKLTTEDFAGVTISLTNPGTIGTVHSVPRLMPGQGAIIGVGAMEYPAEFQGASEERIAELGIGKLITLTSTYDHRIIQGAESGDFLRTIHELLLSDGFWDEVFRELSIPYLPVRWSTDNPDSIVDKNARVMNLIAAYRNRGHLMADTDPLRLDKARFRSHPDLEVLTHGLTLWDLDRVFKVDGFAGAQYKKLRDVLGLLRDAYCRHIGVEYAHILDPEQKEWLEQRVETKHVKPTVAQQKYILSKLNAAEAFETFLQTKYVGQKRFSLEGAESVIPMMDAAIDQCAEHGLDEVVIGMPHRGRLNVLANIVGKPYSQIFTEFEGNLNPSQAHGSGDVKYHLGATGLYLQMFGDNDIQVSLTANPSHLEAVDPVLEGLVRAKQDLLDHGSIDSDGQRAFSVVPLMLHGDAAFAGQGVVAETLNLANLPGYRVGGTIHIIVNNQIGFTTAPEYSRSSEYCTDVAKMIGAPIFHVNGDDPEACVWVARLAVDFRQRFKKDVVIDMLCYRRRGHNEGDDPSMTNPYVYDVVDTKRGARKSYTEALIGRGDISMKEAEDALRDYQGQLERVFNEVRELEKHGVQPSESVESDQMIPAGLATAVDKSLLARIGDAFLALPNGFTAHPRVQPVLEKRREMAYEGKIDWAFGELLALGSLVAEGKLVRLSGQDSRRGTFSQRHSVLIDRHTGEEFTPLQLLATNSDGSPTGGKFLVYDSPLSEYAAVGFEYGYTVGNPDAVVLWEAQFGDFVNGAQSIIDEFISSGEAKWGQLSNVVLLLPHGHEGQGPDHTSARIERFLQLWAEGSMTIAMPSTPSNYFHLLRRHALDGIQRPLIVFTPKSMLRHKAAVSEIKDFTEIKFRSVLEEPTYEDGIGDRNKVSRILLTSGKLYYELAARKAKDNRNDLAIVRLEQLAPLPRRRLRETLDRYENVKEFFWVQEEPANQGAWPRFGLELPELLPDKLAGIKRISRRAMSAPSSGSSKVHAVEQQEILDEAFG

SEQ ID NO: 64516 - protein, 563 aa, Mycobacterium tuberculosis
MAFPEYSPAASAATFADLQIHPRVLRAIGDVGYESPTAIQAATIPALMAGSDVVGLAQTGTGKTAAFAIPMLSKIDITSKVPQALVLVPTRELALQVAEAFGRYGAYLSQLNVLPIYGGSSYAVQLAGLRRGAQVVVGTPGRMIDHLERATLDLSRVDFLVLDEADEMLTMGFADDVERILSETPEYKQVALFSATMPPAIRKLSAKYLHDPFEVTCKAKTAVAENISQSYIQVARKMDALTRVLEVEPFEAMIVFVRTKQATEEIAEKLRARGFSAAAISGDVPQAQRERTITALRDGDIDILVATDVAARGLDVERISHVLNYDIPHDTESYVHRIGRTGRAGRSGAALIFVSPRELHLLKAIEKATRQTLTEAQLPTVEDVNTQRVAKFADSITNALGGPGIELFRRLVEEYEREHDVPMADIAAALAVQCRGGEAFLMAPDPPLSRRNRDQRRDRPQRPKRRPDLTTYRVAVGKRHKIGPGAIVGAIANEGGLHRSDFGQIRIGPDFSLVELPAKLPRATLKKLAQTRISGVLIDLRPYRPPDAARRHNGGKPRRKHVG

SEQ ID NO: 64517 - protein, 631 aa, Mycobacterium tuberculosis
MTAPPGARPRAASPPPNMRSRDFWGSAARLVKRLAPQRRLSIAVITLGIAGTTIGVIVPRILGHATDLLFNGVIGRGLPGGITKAQAVASARARGDNTFADLLSGMNVVPGQGVDFAAVERTLALALALYLAAALMIWAQARLLNLTVQKTMVRLRTDVEDKVHRLPLSYFDGQQRGELLSRVTNDIDNLQSSLSMTISQLVTSILTMVAVLAMMVSISGLLALITLLTVPLSLLVTRAITRRSQPLFVAHWTSTGRLNAHLEETYSGFTVVKTFGHQAAARERFHELNDDVYQAGFGAQFLSGLVQPATAFIGNLGYVAVAVAGGLQVATGQITLGSIQAFIQYIRQFNMPLSQLAGMYNALQSGVASAERVFDVLDEPEESPEPEPELPNLTGRVEFEHVNFAYLPGTPVIRDLSLVAEPGSTVAIVGPTGAGKTTLVNLLMRFYEIGSGRILIDGVDIASVSRQSLRSRIGMVLQDTWLYDGTIAENIAYGRPEATTDEIVEAARAAHVDRFVNTLPAGYQTRVSGDGGSISVGEKQLITIARAFLARPQLLILDEATSSVDTRTELLIQRAMRELRRDRTSFIIAHRLSTIRDADHILVVQTGQIVERGNHAELLARRGVYYQMTRA

SEQ ID NO: 64518 - protein, 417 aa, Mycobacterium tuberculosis
MSPRPGPAGRGPAPCRCADLHSLCVDSHALRRDGMRFLHTADWQLGMTRHFLAGDAQPRYSAARRDAVAGLKALAADVGAEFVVVAGDVFEHNQLAPQIVGQSLEAMRVIGLPVYLLPGNHDPLDASSVYTSTLFRAERPDNVVVLDRAGVHEVRPGVQIVAAPWRSKAPTTDPVAEVLAGLPTDAAIRLLVAHGGVDALDPDHDKPSLIRLAALDDALTRQAIHYVALGDKHSLTQVGSSGRVWYSGAPEVTNFDDVEPDPGHVLVVDIDESDPRHPVTVDARRIGRWRFVTLHHQVDTSRDIADLDLNLDLMTDKDRTVVRLALTGSLTVTDRAALDTCLDKYARLFAWLGLWERHTDLAVIPVDAEFTDLGIGGFAAAAVDELVATARGGDDESAVDAQAALALLLRLADRGAA

SEQ ID NO: 64519 - protein, 875 aa, Mycobacterium tuberculosis; identical to SEQ ID NO: 62829

SEQ ID NO: 64520 - protein, 528 aa, Mycobacterium tuberculosis; identical to SEQ ID NO: 62830

SEQ ID NO: 64521 - protein, 612 aa, Mycobacterium tuberculosis; identical to SEQ ID NO: 62831

SEQ ID NO: 64522 - protein, 161 aa, Mycobacterium tuberculosis; identical to SEQ ID NO: 62832

SEQ ID NO: 64523 - protein, 550 aa, Mycobacterium tuberculosis; identical to SEQ ID NO: 62833

SEQ ID NO: 64524 - protein, 316 aa, Mycobacterium tuberculosis
MVTQALLPSGLVASAVVAASSANLGPGFDSVGLALSLYDEIIVETTDSGLTVTVDGEGGDQVPLGPEHLVVRAVQHGLQAAGVSAAGLAVRCRNAIPHSRGLGSSAAAVVGGLAAVNGLVVQTDSSPSSDAELIQLASEFEGHPDNAAAAVLGGAVVSWTDHSGDRPNYSAVSLRLHPDIRLFTAIPEQRSSTAETRVLLPAQVSHDDARFNVSRAALLVVALTERPDLLMAATEDLLHQPQRAAAMTASAEYLRLLRRHNVAAALSGAGPSLIALSTDSELPTDAVEFGAAKGFAVTELTVGEAVRWSPTVRVPG

SEQ ID NO: 64525 - protein, 602 aa, Mycobacterium tuberculosis; identical to SEQ ID NO: 62820

SEQ ID NO: 64526 - protein, 80 aa, Mycobacterium tuberculosis; identical to SEQ ID NO: 62821

SEQ ID NO: 64527 - protein, 357 aa, Mycobacterium tuberculosis
MTQPVQTIDVLLAEHAELELALADPALHSNPAEARRVGRRFARLAPIVATHRKLTSARDDLETARELVASDESFAAEVAALEARVGELDAQLTDMLAPRDPHDADDIVLEVKSGEGGEESALFAADLARMYIRYAERHGWAVTVLDETTSDLGGYKDATLAIASKADTPDGVWSRMKFEGGVHRVQRVPVTESQGRVHTSAAGVLVYPEPEEVGQVQIDESDLRIDVFRSSGKGGQGVNTTDSAVRITHLPTGIVVTCQNERSQLQNKTRALQVLAARLQAMAEEQALADASADRASQIRTVDRSERIRTYNFPENRITDHRIGYKSHNLDQVLDGDLDALFDALSAADKQSRLRQS

SEQ ID NO: 64528 - protein, 325 aa, Mycobacterium tuberculosis
MTSAPATMRWGNLPLAGESGTMTLRQAIDLAAALLAEAGVDSARCDAEQLAAHLAGTDRGRLPLFEPPGDEFFGRYRDIVTARARRVPLQHLIGTVSFGPVVLHVGPGVFVPRPETEAILAWATAQSLPARPLIVDACTGSGALAVALAQHRANLGLKARIIGIDDSDCALDYARRNAAGTPVELVRADVTTPRLLPELDGQVDLMVSNPPYIPDAAVLEPEVAQHDPHHALFGGPDGMTVISAVVGLAGRWLRPGGLFAVEHDDTTSSSTVDLVSSTKLFVDVQARKDLAGRPRFVTAMRWGHLPLAGENGAIDPRQRRCRAKR

SEQ ID NO: 64529 - protein, 404 aa, Mycobacterium tuberculosis
MQYGLEVSSDVAGVAGGLLALSYRGAGVPLRELALVGLTAAIITYFATGPVRMLASRLGAVAYPRERDVHVTPTPRMGGLAMFLGIVGAVFLASQLPALTRGFVYSTGMPAVLVAGAVIMGIGLIDDRWGLDALTKFAGQITAASVLVTMGVAWSVLYIPVGGVGTIVLDQASSILLTLALTVSIVNAMNFVDGLDGLAAGLGLITALAICMFSVGLLRDHGGDVLYYPPAVISVVLAGACLGFLPHNFHRAKIFMGDSGSMLIGLMLAAASTTAAGPISQNAYGARDVFALLSPFLLVVAVMFVPMLDLLLAIVRRTRAGRSAFSPDKMHLHHRLLQIGHSHRRVVLIIYLWVGIVAFGAASSIFFNPRDTAAVMLGAIVVAGVATLIPLLRRGDDYYDPDLD

SEQ ID NO: 64530 - protein, 250 aa, Mycobacterium tuberculosis; identical to SEQ ID NO: 62825

SEQ ID NO: 64531 - protein, 81 aa, Mycobacterium tuberculosis
MDPTIAAGALIGGGLIMAGGAIGAGIGDGVAGNALISGVARQPEAQGRLFTPFFITVGLVEAAYFINLAFMALFVFATPVK

SEQ ID NO: 64532 - protein, 446 aa, Mycobacterium tuberculosis; identical to SEQ ID NO: 62827

SEQ ID NO: 64533 - protein, 549 aa, Mycobacterium tuberculosis; identical to SEQ ID NO: 62828

SEQ ID NO: 64534 - protein, 418 aa, Mycobacterium tuberculosis; identical to SEQ ID NO: 62293

SEQ ID NO: 64535 - protein, 165 aa, Mycobacterium tuberculosis; identical to SEQ ID NO: 62316

SEQ ID NO: 64536 - protein, 389 aa, Mycobacterium tuberculosis
MIVAGARTPIGKLMGSLKDFSASELGAIAIKGALEKANVPASLVEYVIMGQVLTAGAGQMPARQAAVAAGIGWDVPALTINKMCLSGIDAIALADQLIRAREFDVVVAGGQESMTKAPHLLMNSRSGYKYGDVTVLDHMAYDGLHDVFTDQPMGALTEQRNDVDMFTRSEQDEYAAASHQKAAAAWKDGVFADEVIPVNIPQRTGDPLQFTEDEGIRANTTAAALAGLKPAFRGDGTITAGSASQISDGAAAVVVMNQEKAQELGLTWLAEIGAHGVVAGPDSTLQSQPANAINKALDREGISVDQLDVVEINEAFAAVALASIRELGLNPQIVNVNGGAIAVGHPLGMSGTRITLHAALQLARRGSGVGVAALCGAGGQGDALILRAG

SEQ ID NO: 64537 - protein, 603 aa, Mycobacterium tuberculosis
MSFVIAAPETLVRAASDLANIGSTLGAANAAALGPTTELLAAGADEVSAAIASLFAAHGQAYQAVSAQMSAFHAQFVQTFTAGAGAYASAEAAAAAPLEGLLNIVNTPTQLLLGRPLIGNGANGAPGTGQAGGAGGLLYGNGGAGGSGAPGQAGGPGGAAGLFGNGGAGGAGGDGPGNGAAGGAGGAGGLLFGSGGAGGPGGVGNTGTGGLGGDGGAAGLFGAGGIGGAGGPGFNGGAGGAGGRSGLFEVLAAGGAGGTGGLSVNGGTGGTGGTGGGGGLFSNGGAGGAGGFGVSGSAGGNGGTGGDGGIFTGNGGTGGTGGTGTGNQLVGGEGGAGGAGGNAGILFGAGGIGGTGGTGLGAPDPGGTGGKGGVGGIGGAGALFGPGGAGGTGGFGASSADQMAGGIGGSGGSGGAAKLIGDGGAGGTGGDSVRGAAGSGGTGGTGGLIGDGGAGGAGGTGIEFGSVGGAGGAGGNAAGLSGAGGAGGAGGFGETAGDGGAGGNAGLLNGDGGAGGAGGLGIAGDGGNGGKGGKAGMVGNGGDGGAGGASVVANGGVGGSGGNATLIGNGGNGGNGGVGSAPGKGGAGGTAGLLGLNGSPGLS

SEQ ID NO: 64538 - protein, 271 aa, Mycobacterium tuberculosis; identical to SEQ ID NO: 62514

SEQ ID NO: 64539 - protein, 204 aa, Mycobacterium tuberculosis; identical to SEQ ID NO: 62515

SEQ ID NO: 64540 - protein, 126 aa, Mycobacterium tuberculosis
MSTTRRRRPALIALVIIATCGCLALGWWQWTRFQSTSGTFQNLGYALQWPLFAWFCVYAYRNFVRYEETPPQPPTGGAAAEIPAGLLPERPKPAQQPPDDPVLREYNAYLAELAKDDARKQNRTTA

SEQ ID NO: 64541 - protein, 247 aa, Mycobacterium tuberculosis; identical to SEQ ID NO: 62817

SEQ ID NO: 64542 - protein, 623 aa, Mycobacterium tuberculosis; identical to SEQ ID NO: 62657

SEQ ID NO: 64543 - protein, 294 aa, Mycobacterium tuberculosis; identical to SEQ ID NO: 62727

SEQ ID NO: 64544 - protein, 430 aa, Mycobacterium tuberculosis
MSVLIRGVRPYGEGERVDVLVDDGQIAQIGPDLAIPDTADVIDATGHVLLPGFVDLHTHLREPGREYAEDIETGSAAAALGGYTAVFAMANTNPVADSPVVTDHVWHRGQQVGLVDVHPVGAVTVGLAGAELTEMGMMNAGAAQVRMFSDDGVCVHDPLIMRRALEYATGLGVLIAQHAEEPRLTVGAVAHEGPMAARLGLAGWPRAAEESIVARDALLARDAGARVHICHASAAGTVEILKWAKDQGISITAEVTPHHLLLDDARLASYDGVNRVNPPLREASDAVALRQALADGIIDCVATDHAPHAEHEKCVEFAAARPGMLGLQTALSVVVQTMVAPGLLSWRDIARVMSENPACIARLPDQGRPLEVGEPANLTVVDPDATWTVTGADLASRSANTPFESMSLPATVTATLLRGKVTARDGKIRA

SEQ ID NO: 64545 - protein, 376 aa, Mycobacterium tuberculosis
MSKAVLVLEDGRVFTGRPFGATGQALGEAVFSTGMSGYQETLTDPSYHRQIVVATAPQIGNTGWNGEDSESRGERIWVAGYAVRDPSPRASNWRATGTLEDELIRQRIVGIAGIDTRAVVRHLRSRGSMKAGVFSDGALAEPADLIARVRAQQSMLGADLAGEVSTAEPYVVEPDGPPGVSRFTVAALDLGIKTNTPRNFARRGIRCHVLPASTTFEQIAELNPHGVFLSNGPGDPATADHVVALTREVLGAGIPLFGICFGNQILGRALGLSTYKMVFGHRGINIPVVDHATGRVAVTAQNHGFALQGEAGQSFATPFGPAVVSHTCANDGVVEGVKLVDGRAFSVQYHPEAAAGPHDAEYLFDQFVELMAGEGR

SEQ ID NO: 64546 - protein, 403 aa, Mycobacterium tuberculosis
MSEKGRLFTSESVTEGHPDKICDAISDSVLDALLAADPRSRVAVETLVTTGQVHVVGEVTTSAKEAFADITNTVRARILEIGYDSSDKGFDGATCGVNIGIGAQSPDIAQGVDTAHEARVEGAADPLDSQGAGDQGLMFGYAINATPELMPLPIALAHRLSRRLTEVRKNGVLPYLRPDGKTQVTIAYEDNVPVRLDTVVISTQHAADIDLEKTLDPDIREKVLNTVLDDLAHETLDASTVRVLVNPTGKFVLGGPMGDAGLTGRKIIVDTYGGWARHGGGAFSGKDPSKVDRSAAYAMRWVAKNVVAAGLAERVEVQVAYAIGKAAPVGLFVETFGTETEDPVKIEKAIGEVFDLRPGAIIRDLNLLRPIYAPTAAYGHFGRTDVELPWEQLDKVDDLKRAI

SEQ ID NO: 64547 - protein, 576 aa, Mycobacterium tuberculosis
MSFLFAQPEMLGAAATDLASIGSAISTANAAAAAATTRVLAAGADEVSAAVAALFSGHAQTYQALRTQAAAFHQQIVQTLTSTAGAYASAEAANVEQQLLGAINAPTMALLGRPLIGHGADGAPGTGQAGGAGGILYGNGGNGGSGATGQAGGAGGAAGLIGHGGAGGLGGTGASGGAGGAGGWLWGNGGAGGNGGVGVAGDPGGVGGAGGAGGAAGLWGSGGSGGTGGQGGVGGGKSGDGGTGGIGGAGGGGGWLHGDGGAGGHGGQGGTGVSSGGNGGAGGTGGDGRGLSGSGGAGGRGGQTGVGGKVGENNFGGAGGAGGTGGLIGNGGAGGNGGQGAISGAGGAGGNAWLIGDGGAGGNGGDIRGQGGGAGGAGGAGGQLIGNGGTGGAGGTVTSPNGLGGAGGAGGSAGLIGHGGTGGAGGHSAQGPDGNGGIGGAGGAGGNGGQLYGTGGTGGTGGKGGDGFGVFGKGGAGGTGGRGGAAGLIGDAGTGGTGGKGGTAGEDGTGGNGGTGGNGGAAVLIGNGGGGGAGGNGGAGNDGTPGNGGGGGVGGTGGTLFGQPGQPGPPGQPGPA

SEQ ID NO: 64548 - protein, 457 aa, Mycobacterium tuberculosis
MTPRSRGPRRRPLDPARRAAFETLRAVSARDAYANLVLPALLAQRGIGGRDAAFATELTYGTCRARGLLDAVIGAAAERSPQAIDPVLLDLLRLGTYQLLRTRVDAHAAVSTTVEQAGIEFDSARAGFVNGVLRTIAGRDERSWVGELAPDAQNDPIGHAAFVHAHPRWIAQAFADALGAAVGELEAVLASDDERPAVHLAARPGVLTAGELARAVRGTVGRYSPFAVYLPRGDPGRLAPVRDGQALVQDEGSQLVARALTLAPVDGDTGRWLDLCAGPGGKTALLAGLGLQCAARVTAVEPSPHRADLVAQNTRGLPVELLRVDGRHTDLDPGFDRVLVDAPCTGLGALRRRPEARWRRQPADVAALAKLQRELLSAAIALTRPGGVVLYATCSPHLAETVGAVADALRRHPVHALDTRPLFEPVIAGLGEGPHVQLWPHRHGTDAMFAAALRRLT

SEQ ID NO: 64549 - protein, 339 aa, Mycobacterium tuberculosis
MNVEQVKSIDEAMGLAIEHSYQVKGTTYPKPPVGAVIVDPNGRIVGAGGTEPAGGDHAEVVALRRAGGLAAGAIVVVTMEPCNHYGKTPPCVNALIEARVGTVVYAVADPNGIAGGGAGRLSAAGLQVRSGVLAEQVAAGPLREWLHKQRTGLPHVTWKYATSIDGRSAAADGSSQWISSEAARLDLHRRRAIADAILVGTGTVLADDPALTARLADGSLAPQQPLRVVVGKRDIPPEARVLNDEARTMMIRTHEPMEVLRALSDRTDVLLEGGPTLAGAFLRAGAINRILAYVAPILLGGPVTAVDDVGVSNITNALRWQFDSVEKVGPDLLLSLVAR

SEQ ID NO: 64550 - protein, 201 aa, Mycobacterium tuberculosis; identical to SEQ ID NO: 62557

SEQ ID NO: 64551 - protein, 425 aa, Mycobacterium tuberculosis; identical to SEQ ID NO: 62554

SEQ ID NO: 64552 - protein, 154 aa, Mycobacterium tuberculosis
MPDLPSLDASGVRLAIVASSWHGKICDALLDGARKVAAGCGLDDPTVVRVLGAIEIPVVAQELARNHDAVVALGVVIRGQTPHFDYVCDAVTQGLTRVSLDSSTPIANGVLTTNTEEQALDRAGLPTSAEDKGAQATVAALATALTLRELRAHS

SEQ ID NO: 64553 - protein, 301 aa, Mycobacterium tuberculosis; identical to SEQ ID NO: 62558

SEQ ID NO: 64554 - protein, 342 aa, Mycobacterium tuberculosis
MTDGIVALGGGHGLYATLSAARRLTPYVTAVVTVADDGGSSGRLRSELDVVPPGDLRMALAALASDSPHGRLWATILQHRFGGSGALAGHPIGNLMLAGLSEVLADPVAALDELGRILGVKGRVLPMCPVALQIEADVSGLEADPRMFRLIRGQVAIATTPGKVRRVRLLPTDPPATRQAVDAIMAADLVVLGPGSWFTSVIPHVLVPGLAAALRATSARRALVLNLVAEPGETAGFSVERHLHVLAQHAPGFTVHDIIIDAERVPSEREREQLRRTATMLQAEVHFADVARPGTPLHDPGKLAAVLDGVCARDVGASEPPVAATQEIPIDGGRPRGDDAWR

SEQ ID NO: 64555 - protein, 325 aa, Mycobacterium tuberculosis; identical to SEQ ID NO: 62555

SEQ ID NO: 64556 - protein, 339 aa, Mycobacterium tuberculosis; identical to SEQ ID NO: 62561

SEQ ID NO: 64557 - protein, 412 aa, Mycobacterium tuberculosis
MSVANLKDLLAEGVSGRGVLVRSDLNVPLDEDGTITDAGRIIASAPTLKALLDADAKVVVAAHLGRPKDGPDPTLSLAPVAVALGEQLGRHVQLAGDVVGADALARAEGLTGGDILLLENIRFDKRETSKNDDDRRALAKQLVELVGTGGVFVSDGFGVVHRKQASVYDIATLLPHYAGTLVADEMRVLEQLTSSTQRPYAVVLGGSKVSDKLGVIESLATKADSIVIGGGMCFTFLAAQGFSVGTSLLEDDMIEVCRGLLETYHDVLRLPVDLVVTEKFAADSPPQTVDVGAVPNGLMGLDIGPGSIKRFSTLLSNAGTIFWNGPMGVFEFPAYAAGTRGVAEAIVAATGKGAFSVVGGGDSAAAVRAMNIPEGAFSHISTGGGASLEYLEGKTLPGIEVLSREQPTGGVL

SEQ ID NO: 64558 - protein, 491 aa, Mycobacterium tuberculosis
MSNVMVVPGMLSAAAADVASIGAALSAANGAAAPTTAGVLAAGADEVSAAIASLFSGYARDYQALSAQMARFHQQFVQALTASVGSYAAAEAANASPLQALEQQVLAAINAPTQTLLGRPLIGNGADGLPGQNGGAGGLLWGNGGNGGAGDAAHPNGGNGGDAGMFGNGGAGGAGYSPAAGTGAAGGAGGAGGAGGWLSGNGGAGGNGGTGASGADGGGGLPPVPASPGGNGGGGDAGGAAGMFGTGGAGGTGGDGGAGGAGDSPNSGANGARGGDGGNGAAGGAGGRLFGNGGAGGNGGTAGQGGDGGTALGAGGIGGDGGTGGAGGTGGTAGIGGSSAGAGGAGGDGGAGGTGGGSSMIGGKGGTGGNGGVGGTGGASALTIGNGSSAGAGGAGGAGGTGGTGGYIESLDGKGQAGNGGNGGNGAAGGAGGGGTGAGGNGGAGGNGGDGGPSQGGGNPGFGGDGGTGGPGGVGVPDGIGGANGAQGKHG

SEQ ID NO: 64559 - protein, 514 aa, Mycobacterium tuberculosis; identical to SEQ ID NO: 62301

SEQ ID NO: 64560 - protein, 373 aa, Mycobacterium tuberculosis
MTAQNPNLAALSAAGVSVWLDDLSRDRLRSGNLQELIDTKSVVGVTTNPSIFQKALSEGHTYDAQIAELAARGADVDATIRTVTTDDVRSACDVLVPQWEDSDGVDGRVSIEVDPRLAHETEKTIQQAIELWKIVDRPNLFIKIPATKAGLPAISAVLAEGISVNVTLIFSVQRYREVMDAYLTGMEKARQAGHSLSKIHSVASFFVSRVDTEIDKRLDRIGSRQALELRGQAGVANARLAYATYREVFEDSDRYRSLKVDGARVQRPLWASTGVKNPDYSDTLYVTELVAPHTVNTMPEKTIDAVADHGVIQGDTVTGTASDAQAVFDQLGAIGIDLTDVFAVLEEEGVRKFEASWNELLQETRAHLDTAAQ

SEQ ID NO: 64561 - protein, 700 aa, Mycobacterium tuberculosis
MTTLEEISALTRPRHPDYWTEIDSAAVDTIRVLAADAVQKVGNGHPGTAMSLAPLAYTLFQRTMRHDPSDTHWLGRDRFVLSAGHSSLTLYIQLYLGGFGLELSDIESLRTWGSKTPGHPEFRHTPGVEITTGPLGQGLASAVGMAMASRYERGLFDPDAEPGASPFDHYIYVIASDGDIEEGVTSEASSLAAVQQLGNLIVFYDRNQISIEDDTNIALCEDTAARYRAYGWHVQEVEGGENVVGIEEAIANAQAVTDRPSFIALRTVIGYPAPNLMDTGKAHGAALGDDEVAAVKKIVGFDPDKTFQVREDVLTHTRGLVARGKQAHERWQLEFDAWARREPERKALLDRLLAQKLPDGWDADLPHWEPGSKALATRAASGAVLSALGPKLPELWGGSADLAGSNNTTIKGADSFGPPSISTKEYTAHWYGRTLHFGVREHAMGAILSGIVLHGPTRAYGGTFLQFSDYMRPAVRLAALMDIDTIYVWTHDSIGLGEDGPTHQPIEHLSALRAIPRLSVVRPADANETAYAWRTILARRNGSGPVGLILTRQGVPVLDGTDAEGVARGGYVLSDAGGLQPGEEPDVILIATGSEVQLAVAAQTLLADNDILARVVSMPCLEWFEAQPYEYRDAVLPPTVSARVAVEAGVAQCWHQLVGDTGEIVSIEHYGESADHKTLFREYGFTAEAVAAAAERALDN

SEQ ID NO: 64562 - protein, 328 aa, Mycobacterium tuberculosis; identical to SEQ ID NO: 62382

SEQ ID NO: 64563 - protein, 261 aa, Mycobacterium tuberculosis; identical to SEQ ID NO: 62384

SEQ ID NO: 64564 - protein, 266 aa, Mycobacterium tuberculosis; identical to SEQ ID NO: 62381

SEQ ID NO: 64565 - protein, 162 aa, Mycobacterium tuberculosis; identical to SEQ ID NO: 62383

SEQ ID NO: 64566 - protein, 370 aa, Mycobacterium tuberculosis
MSFVVANTEFVSGAAGNLARLGSMISAANSAAAAQTTAVAAAGADEVSAAVAALFGAHGQTYQVLSAQAAAFHSQFVQALSGGAQAYAAAEATNFGPLQPLFDVINAPTLALLNRPLIGNGADGTAANPNGQAGGLLIGNGGNGFSPAAGPGGNGGAAGLLGHGGNGGVGALGANGGAGGTGGWLFGNGGAGGNSGGGGGAGGIGGSAVLFGAGGAGGISPNGMGAGGSGGNGGLFFGNGGAGASSFLGGGGAGGRAFLFGDGGAGGAALSAGSAGRGGDAGFFYGNGGAGGSGAGGASSAHGGAGGQAGLFGNGGEGGDGGALGGNGGNGGNAQLIGNGGDGGDGGGAGAPGLGGRGGLLLGLPGANGT

SEQ ID NO: 64567 - protein, 247 aa, Mycobacterium tuberculosis; identical to SEQ ID NO: 62357

SEQ ID NO: 64568 - protein, 269 aa, Mycobacterium tuberculosis [sequence omitted]

SEQ ID NO: 64569 - protein, 750 aa, Mycobacterium tuberculosis [sequence omitted]

SEQ ID NO: 64570 - protein, 1146 aa, Mycobacterium tuberculosis
MARHDEAKAGGLFDRIGNFVVRWPLIVIGCWIAVAAALTLLLPTLQAQAAKREQAPLPPGAPSMVLQKEMSAAFQEKIETSALLLVLLTNENGLGPADEAVYRKLIENLRADTQDKISVQDFLAVPEMKELLASKDNKAWNLPITFAGDAASPETQAAFKRVAAIVKQTVAGTSLTVHLSGPIATVADLTELGEKDVRIIEIGTAVSVLIILILVYRNLVTMLVPLATIGASVVTAQGTLSGLAEFGLAVNMQAIVFMSAVMIGAGTDYAVFLISRYHDYVRHGEKSDMAVKKALMSIGKVITASAATVAVTFLAMVFTKLEVFSAVGPAIAVAITVSLLGAVTLLPAILTLTGRRGWIKPRRDLTSRMWRRSGVRIVRRSTIHLVGSLIVLVALAGCTLLIRFNYDDLKTVPQHVESVKGYEAMNRHFPMNAMTPMVLFIKSPRDLRTPGALADIEMMSREIAELPNIVMVRGLTRPNGEPLKETKVSFQAGEVGGKLDEATTLLEEHGGELDQLTGGAHQLADALAQIRNEINGAVASSSGIVNTLQAMMDLMGGDKTIRQLENASQYVGRMRALGDNLSGTVTDAEQIATWASPMVNALNSSPVCNSDPACRTSRAQLAAIVQAQDDGLLRSIRALAVTLQQTQEYQTLARTVSTLDGQLKQVVSTLKAVDGLPTKLAQMQQGANALADGSAALAAGVQELVDQVKKMGSGLNEAADFLLGIKRDADKPSMAGFNIPPQIFSRDEFKKGAQIFLSADGHAARYFVQSALNPATTEAMDQVNDILRVADSARPNTELEDATIGLAGVPTALRDIRDYYNSDMKFIVIATIVIVFLILVILLRALVAPIYLIGSVLISYLSALGIGTLVFQLILGQEMHWSLPGLSFILLVAIGADYNMLLISRIRDESPHGIRIGVIRTVGSTGGVITSAGLIFAASMFGLVGASINTMAQAGFTIGIGIVLDTFLVRTVTVPALTTMIGRANWWPSELGRDPSTPPTKADRWLRRVKGHRRKAPIPAPKPPHTKVVRNTNGHASKAATKSVPNGKPADLAEGNGEYLIDHLRRHSLPLFGYAAMPAYDVVDGVSKPNGDGAHIGKEPVDHLLGHSLPLFGLAGLPSYDRWDDTSIGEPAVGHAGSKPDAKLST

SEQ ID NO: 64571 - protein, 1041 aa, Mycobacterium tuberculosis
MTDNAYPKLAGGAPDLPALELEVLDYWSRDDTFRASIARRDGAPEYVFYDGPPFANGLPHYGHLLTGYVKDIVPRYRTMRGYKVERRFGWDTHGLPAELEVERQLGITDKSQIEAMGIAAFNDACRASVLRYTDEWQAYVTRQARWVDFDNDYKTLDLAYMESVIWAFKQLWDKGLAYEGYRVLPYCWRDETPLSNHELRMDDDVYQSRQDPAVTVGFKVVGGQPDNGLDGAYLLVWTTTPWTLPSNLAVAVSPDITYVQVQAGDRRFVLAEARLAAYARELGEEPVVLGTYRGAELLGTRYLPPFAYFMDWPNAFQVLAGDFVTTDDGTGIVHMAPAYGEDDMVVAEAVGIAPVTPVDSKGRFDVTVADYQGQHVFDANAQIVRDLKTQSGPAAVNGPVLIRHETYEHPYPHCWRCRNPLIYRSVSSWFVRVTDFRDRMVELNQQITWYPEHVKDGQFGKWLQGARDWSISRNRYWGTPIPVWKSDDPAYPRIDVYGSLDELERDFGVRPANLHRPYIDELTRPNPDDPTGRSTMRRIPDVLDVWFDSGSMPYAQVHYPFENLDWFQGHYPGDFIVEYIGQTRGWFYTLHVLATALFDRPAFKTCVAHGIVLGFDGQKMSKSLRNYPDVTEVFDRDGSDAMRWFLMASPILRGGNLIVTEQGIRDGVRQVLLPLWNTYSFLALYAPKVGTWRVDSVHVLDRYILAKLAVLRDDLSESMEVYDIPGACEHLRQFTEALTNWYVRRSRSRFWAEDADAIDTLHTVLEVTTRLAAPLLPLITEIIWRGLTRERSVHLTDWPAPDLLPSDADLVAAMDQVRDVCSAASSLRKAKKLRVRLPLPKLIVAVENPQLLRPFVDLIGDELNVKQVELTDAIDTYGRFELTVNARVAGPRLGKDVQAAIKAVKAGDGVINPDGTLLAGPAVLTPDEYNSRLVAADPESTAALPDGAGLVVLDGTVTAELEAEGWAKDRIRELQELRKSTGLDVSDRIRVVMSVPAEREDWARTHRDLIAGEILATDFEFADLADGVAIGDGVRVSIEKT

SEQ ID NO: 64572 - protein, 1184 aa, Mycobacterium tuberculosis
MSGSSAGSSFVHLHNHTEYSMLDGAAKITPMLAEVERLGMPAVGMTDHGNMFGASEFYNSATKAGIKPIIGVEAYIAPGSRFDTRRILWGDPSQKADDVSGSGSYTHLTMMAENATGLRNLFKLSSHASFEGQLSKWSRMDAELIAEHAEGIIITTGCPSGEVQTRLRLGQDREALEAAAKWREIVGPDNYFLELMDHGLTIERRVRDGLLEIGRALNIPPLATNDCHYVTRDAAHNHEALLCVQTGKTLSDPNRFKFDGDGYYLKSAAEMRQIWDDEVPGACDSTLLIAERVQSYADVWTPRDRMPVFPVPDGHDQASWLRHEVDAGLRRRFPAGPPDGYRERAAYEIDVICSKGFPSYFLIVADLISYARSAGIRVGPGRGSAAGSLVAYALGITDIDPIPHGLLFERFLNPERTSMPDIDIDFDDRRRGEMVRYAADKWGHDRVAQVITFGTIKTKAALKDSARIHYGQPGFAIADRITKALPPAIMAKDIPLSGITDPSHERYKEAAEVRGLIETDPDVRTIYQTARGLEGLIRNAGVHACAVIMSSEPLTEAIPLWKRPQDGAIITGWDYPACEAIGLLKMDFLGLRNLTIIGDAIDNVRANRGIDLDLESVPLDDKATYELLGRGDTLGVFQLDGGPMRDLLRRMQPTGFEDVVAVIALYRPGPMGMNAHNDYADRKNNRQAIKPIHPELEEPLREILAETYGLIVYQEQIMRIAQKVASYSLARADILRKAMGKKKREVLEKEFEGFSDGMQANGFSPAAIKALWDTILPFADYAFNKSHAAGYGMVSYWTAYLKANYPAEYMAGLLTSVGDDKDKAAVYLADCRKLGITVLPPDVNESGLNFASVGQDIRYGLGAVRNVGANVVGSLLQTRNDKGKFTDFSDYLNKIDISACNKKVTESLIKAGAFDSLGHARKGLFLVHSDAVDSVLGTKKAEALGQFDLFGSNDDGTGTADPVFTIKVPDDEWEDKHKLALEREMLGLYVSGHPLNGVAHLLAAQVDTAIPAILDGDVPNDAQVRVGGILASVNRRVNKNGMPWASAQLEDLTGGIEVMFFPHTYSSYGADIVDDAVVLVNAKVAVRDDRIALIANDLTVPDFSNAEVERPLAVSLPTRQCTFDKVSALKQVLARHPGTSQVHLRLISGDRITTLALDQSLRVTPSPALMGDLKELLGPGCLGS

SEQ ID NO: 64573 - protein, 678 aa, Mycobacterium tuberculosis
MNFSVLPPEINSALMFAGAGPGPMLAAASAWTGLAGDLGSAAASFSAVTSQLATGSWQGPASAAMTGVAASYARWLTTAAAQAEQAAGQAQAAVSAFEAALAATVHPGAVSANRGRLRSLVASNLLGQNAPAIAAVEAVYEQMWAADVAAMLGYHGEASAVALSLTPFTPSPSAAATPGGAVIIAGFPFLDLGNVTIGGFNLASGNLGLGNLGSFNPGSANTGSVNLGNANIGDLNLGSGNIGSYNLGGGNTGDLNPDSGNTGTLNWGSGNIGSYNLGGGNLGSYNLGSGNTGDTNFGGGNTGNLNVGGGNTGNSNFGFGNTGNVNFGNGNTGDTNFGSGNLGSGNIGFGNKGSHNIGFGNSGNNNIGFGLTGDNQIGFGALNSGSGNLGFGNSGNGNIGFFNSGNNNIGMGNSGNGVGALSVEFGSSAERSSGFGNSGELSTGIGNSGQLSTGWFNSATTSTGWFNSGTTNTGWFNSGTTNTGIGNSGGNLVTGSMGLFNSGHTNTGSFNAGSMNTGDFNSGNVNTGYFNSGNINTGFFNSGDLNTGLFNSVNQPVQNSGWLHTGTNNSGYANAGTFNSGFDNNARDEHAEFVTGNSGLANVGNYNAGIINVGDHLSGFRNSVPTITGTANISGFVNAGTSISGFFNFGSLMSGFANFDDEVSGYLNGDSRASGWIH

SEQ ID NO: 64574 - protein, 437 aa, Mycobacterium tuberculosis
MAAATGGLTPEQIIAVDGAHLWHPYSSIGREAVSPVVAVAAHGAWLTLIRDGQPIEVLDAMSSWWTAIHGHGHPALDQALTTQLRVMNHVMFGGLTHEPAARLAKLLVDITPAGLDTVFFSDSGSVSVEVAAKMALQYWRGRGLPGKRRLMTWRGGYHGDTFLAMSICDPHGGMHSLWTDVLAAQVFAPQVPRDYDPAYSAAFEAQLAQHAGELAAVVVEPVVQGAGGMRFHDPRYLHDLRDICRRYEVLLIFDEIATGFGRTGALFAADHAGVSPDIMCVGKALTGGYLSLAATLCTADVAHTISAGAAGALMHGPTFMANPLACAVSVASVELLLGQDWRTRITELAAGLTAGLDTARALPAVTDVRVCGAIGVIECDRPVDLAVATPAALDRGVWLRPFRNLVYAMPPYICTPAEITQITSAMVEVARLVGSLP

SEQ ID NO: 64575 - protein, 349 aa, Mycobacterium tuberculosis
MTQAATRPTNDAGQDGGNNSDILVVARQQVLQRGEGLNQDQVLAVLQLPDDRLEELLALAHEVRMRWCGPEVEVEGIISLKTGGCPEDCHFCSQSGLFASPVRSAWLDIPSLVEAAKQTAKSGATEFCIVAAVRGPDERLMAQVAAGIEAIRNEVEINIACSLGMLTAEQVDQLAARGVHRYNHNLETARSFFANVVTTHTWEERWQTLSMVRDAGMEVCCGGILGMGETLQQRAEFAAELAELGPDEVPLNFLNPRPGTPFADLEVMPVGDALKAVAAFRLALPRTMLRFAGGREITLGDLGAKRGILGGINAVIVGNYLTTLGRPAEADLELLDELQMPLKALNASL

SEQ ID NO: 64576 - protein, 236 aa, Mycobacterium tuberculosis; identical to SEQ ID NO: 62723

SEQ ID NO: 64577 - protein, 272 aa, Mycobacterium tuberculosis
MSPATVLDSILEGVRADVAAREASVSLSEIKAAAAAAPPPLDVMAALREPGIGVIAEVKRASPSAGALATIADPAKLAQAYQDGGARIVSVVTEQRRFQGSLDDLDAVRASVSIPVLRKDFVVQPYQIHEARAHGADMLLLIVAALEQSVLVSMLDRTESLGMTALVEVHTEQEADRALKAGAKVIGVNARDLMTLDVDRDCFARIAPGLPSSVIRIAESGVRGTADLLAYAGAGADAVLVGEGLVTSGDPRAAVADLVTAGTHPSCPKPAR

SEQ ID NO: 64578 - protein, 410 aa, Mycobacterium tuberculosis; identical to SEQ ID NO: 62505

SEQ ID NO: 64579 - protein, 472 aa, Mycobacterium tuberculosis
MTRRGKIVCTLGPATQRDDLVRALVEAGMDVARMNFSHGDYDDHKVAYERVRVASDATGRAVGVLADLQGPKIRLGRFASGATHWAEGETVRITVGACEGSHDRVSTTYKRLAQDAVAGDRVLVDDGKVALVVDAVEGDDVVCTVVEGGPVSDNKGISLPGMNVTAPALSEKDIEDLTFALNLGVDMVALSFVRSPADVELVHEVMDRIGRRVPVIAKLEKPEAIDNLEAIVLAFDAVMVARGDLGVELPLEEVPLVQKRAIQMARENAKPVIVATQMLDSMIENSRPTRAEASDVANAVLDGADALMLSGETSVGKYPLAAVRTMSRIICAVEENSTAAPPLTHIPRTKRGVISYAARDIGERLDAKALVAFTQSGDTVRRLARLHTPLPLLAFTAWPEVRSQLAMTWGTETFIVPKMQSTDGMIRQVDKSLLELARYKRGDLVVIVAGAPPGTVGSTNLIHVHRIGEDDV

SEQ ID NO: 64580 - protein, 904 aa, Mycobacterium tuberculosis; identical to SEQ ID NO: 62440

SEQ ID NO: 64581 - protein, 481 aa, Mycobacterium tuberculosis
MPSPTVTSPQVAVNDIGSSEDFLAAIDKTIKYFNDGDIVEGTIVKVDRDEVLLDIGYKTEGVIPARELSIKHDVDPNEVVSVGDEVEALVLTKEDKEGRLILSKKRAQYERAWGTIEALKEKDEAVKGTVIEVVKGGLILDIGLRGFLPASLVEMRRVRDLQPYIGKEIEAKIIELDKNRNNVVLSRRAWLEQTQSEVRSEFLNNLQKGTIRKGVVSSIVNFGAFVDLGGVDGLVHVSELSWKHIDHPSEVVQVGDEVTVEVLDVDMDRERVSLSLKATQEDPWRHFARTHAIGQIVPGKVTKLVPFGAFVRVEEGIEGLVHISELAERHVEVPDQVVAVGDDAMVKVIDIDLERRRISLSLKQANEDYTEEFDPAKYGMADSYDEQGNYIFPEGFDAETNEWLEGFEKQRAEWEARYAEAERRHKMHTAQMEKFAAAEAAGRGADDQSSASSAPSEKTAGGSLASDAQLAALREKLAGSA

SEQ ID NO: 64582 - protein, 972 aa, Mycobacterium tuberculosis
MADRLIVKGAREHNLRSVDLDLPRDALIVFTGLSGSGKSSLAFDTIFAEGQRRYVESLSAYARQFLGQMDKPDVDFIEGLSPAVSIDQKSTNRNPRSTVGTITEVYDYLRLLYARAGTPHCPTCGERVARQTPQQIVDQVLAMPEGTRFLVLAPVVRTRKGEFADLFDKLNAQGYSRVRVDGVVHPLTDPPKLKKQEKHDIEVVVDRLTVKAAAKRRLTDSVETALNLADGIVVLEFVDHELGAPHREQRFSEKLACPNGHALAVDDLEPRSFSFNSPYGACPECSGLGIRKEVDPELVVPDPDRTLAQGAVAPWSNGHTAEYFTRMMAGLGEALGFDVDTPWRKLPAKARKAILEGADEQVHVRYRNRYGRTRSYYADFEGVLAFLQRKMSQTESEQMKERYEGFMRDVPCPVCAGTRLKPEILAVTLAGESKGEHGAKSIAEVCELSIADCADFLNALTLGPREQAIAGQVLKEIRSRLGFLLDVGLEYLSLSRAAATLSGGEAQRIRLATQIGSGLVGVLYVLDEPSIGLHQRDNRRLIETLTRLRDLGNTLIVVEHDEDTIEHADWIVDIGPGAGEHGGRIVHSGPYDELLRNKDSITGAYLSGRESIEIPAIRRSVDPRRQLTVVGAREHNLRGIDVSFPLGVLTSVTGVSGSGKSTLVNDILAAVLANRLNGARQVPGRHTRVTGLDYLDKLVRVDQSPIGRTPRSNPATYTGVFDKIRTLFAATTEAKVRGYQPGRFSFNVKGGRCEACTGDGTIKIEMNFLPDVYVPCEVCQGARYNRETLEVHYKGKTVSEVLDMSIEEAAEFFEPIAGVHRYLRTLVDVGLGYVRLGQPAPTLSGGEAQRVKLASELQKRSTGRTVYILDEPTTGLHFDDIRKLLNVINGLVDKGNTVIVIEHNLDVIKTSDWIIDLGPEGGAGGGTVVAQGTPEDVAAVPASYTGKFLAEVVGGGASAATSRSNRRRNVSA

SEQ ID NO: 64583 - protein, 201 aa, Mycobacterium tuberculosis
MSTETRVNERIRVPEVRLIGPGGEQVGIVRIEDALRVAADADLDLVEVAPNARPPVCKIMDYGKYKYEAAQKARESRRNQQQTVVKEQKLRPKIDDHDYETKKGHVVRFLEAGSKVKVTIMFRGREQSRPELGYRLLQRLGADVADYGFIETSAKQDGRNMTMVLAPHRGAKTRARARHPGEPAGGPPPKPTAGDSKAAPN

SEQ ID NO: 64584 - protein, 64 aa, Mycobacterium tuberculosis; identical to SEQ ID NO: 62438

SEQ ID NO: 64585 - protein, 129 aa, Mycobacterium tuberculosis; identical to SEQ ID NO: 62439

SEQ ID NO: 64586 - protein, 260 aa, Mycobacterium tuberculosis
MLTERSARVATAVKLHRHVGRRRAGRFLAEGPNLVAAALARGLVREVFVTEVAARRHELLLAAHEASVHLVTERAAKALSDTVTPAGLVAVCDLPATRLEDVLAGSPQLIAVTVEIREPGNAGTVIRIADAMGAAAVILAGRSVDPYNGKCLRASTGSIFAIPVVVAPDVGAAIADLRAAGLQVLATAVDGEMALDDADRLLAEPTAWLFGPEAHGLSAEIAALADHRVHILMSGGAESLNVAAAAAICLYESARALGRR

SEQ ID NO: 64587 - protein, 341 aa, Mycobacterium tuberculosis
MLSPEALTTAVDAAQQAIALADTLDVLARVKTEHLGDRSPLALARQALAVLPKEQRAEAGKRVNAARNAAQRSYDERLATLRAERDAAVLVAEGIDVTLPSTRVPAGARHPIIMLAEHVADTFIAMGWELAEGPEVETEQFNFDALNFPADHPARGEQDTFYIAPEDSRQLLRTHTSPVQIRTLLARELPVYIISIGRTFRTDELDATHTPIFHQVEGLAVDRGLSMAHLRGTLDAFARAEFGPSARTRIRPHFFPFTEPSAEVDVWFANKIGGAAWVEWGGCGMVHPNVLRATGIDPDLYSGFAFGMGLERTLQFRNGIPDMRDMVEGDVRFSLPFGVGA

SEQ ID NO: 64588 - protein, 831 aa, Mycobacterium tuberculosis
MRLPYSWLREVVAVGASGWDVTPGELEQTLLRIGHEVEEVIPLGPVDGPVTVGRVADIEELTGYKKPIRACAVDIGDRQYREIICGATNFAVGDLVVVALPGATLPGGFTISARKAYGRNSDGMICSAAELNLGADHSGILVLPPGAAEPGADGAGVLGLDDVVFHLAITPDRGYCMSVRGLARELACAYDLDFVDPASNSRVPPLPIEGPAWPLTVQPETGVRRFALRPVIGIDPAAVSPWWLQRRLLLCGIRATCPAVDVTNYVMLELGHPMHAHDRNRISGTLGVRFARSGETAVTLDGIERKLDTADVLIVDDAATAAIGGVMGAASTEVRADSTDVLLEAAIWDPAAVSRTQRRLHLPSEAARRYERTVDPAISVAALDRCARLLADIAGGEVSPTLTDWRGDPPCDDWSPPPIRMGVDVPDRIAGVAYPQGTTARRLAQIGAVVTHDGDTLTVTPPSWRPDLRQPADLVEEVLRLEGLEVIPSVLPPAPAGRGLTAGQQRRRTIGRSLALSGYVEILPTPFLPAGVFDLWGLEADDSRRMTTRVLNPLEADRPQLATTLLPALLEALVRNVSRGLVDVALFAIAQVVQPTEQTRGVGLIPVDRRPTDDEIAMLDASLPRQPQHVAAVLAGLREPRGPWGPGRPVEAADAFEAVRIIARASRVDVTLRPAQYLPWHPGRCAQVFVGESSVGHAGQLHPAVIERSGLPKGTCAVELNLDAIPCSAPLPAPRVSPYPAVFQDVSLVVAADIPAQAVADAVRAGAGDLLEDIALFDVFTGPQIGEHRKSLTFALRFRAPDRTLTEDDASAARDAAVQSAAERVGAVLRG

SEQ ID NO: 64589 - protein, 1011 aa, Mycobacterium tuberculosis
MSFLLVEPDLVTAAAANLAGIRSALSEAAAAASTPTTALASAGADEVSAAVSRLFGAYGQQFQALNARAATFHAEFVSLLNGGAAAYTGAEAASVSSMQALLDAVNAPTQTLLGRPLIGNGADGVAGTGSNAGGNGGPGGILYGNGGNGGAGGNGGAAGLIGNGGAGGAGGAGGAGGAGGAGGTGGLLYGNGGAGGNGGSAAAAGGAGGNALLFGNGGNGGSGASGGAAGHAGTIFGNGGNAGAGSGLAGADGGLFGNGGDGGSSTSKAGGAGGNALFGNGGDGGSSTVAAGGAGGNTLVGNGGAGGAGGTSGLTGSGVAGGAGGSVGLWGSGGAGGDGGAATSLLGVGMNAGAGGAGGNAGLLYGNGGAGGAGGNGGDTTVPLFDSGVGGAGGAGGNASLFGNGGTGGVGGKGGTSSDLASATSGAGGAGGAGGVGGLLYGNGGNGGAGGIGGAAINILANAGAGGAGGAAGSSFIGNGGNGGAGGAGGAAALFSSGVGGAGGSGGTALLLGSGGAGGNGGTGGANSGSLFASPGGTGGAGGHGGAGGLIWGNGGAGGNGGNGGTTADGALEGGTGGIGGTGGSAIAFGNGGQGGAGGTGGDHSGGNGIGGKGGASGNGGNAGQVFGDGGTGGTGGAGGAGSGTKAGGTGSDGGHGGNATLIGNGGDGGAGGAGGAGSPAGAPGNGGTGGTGGVLFGQSGSSGPPGAAALAFPSLSSSVPILGPYEDLIANTVANLASIGNTWLADPAPFLQQYLANQFGYGQLTLTALTDATRDFAIGLAGIPPSLQSALQALAAGDVSGAVTDVLGAVVKVFVSGVDASDLSNILLLGPVGDLFPILSIPGAMSQNFTNVVMTVTDTTIAFSIDTTNLTGVMTFGLPLAMTLNAVGSPITTAIAFAESTTAFVSAVQAGNLQAAAAALVGAPANVANGFLNGEARLPLALPTSATGGIPVTVEVPVGGILAPLQPFQATAVIPVIGPVTVTLEGTPAGGIVPALVNYAPTQLAQAIAP

SEQ ID NO: 64590 - protein, 400 aa, Mycobacterium tuberculosis
MTGASTTTATMRQRWQAVMMNNYGTPPIALASGDGAVVTDVDGRTYIDLLGGIAVNVLGHRHPAVIEAVTRQMSTLGHTSNLYATEPGIALAEELVALLGADQRTRVFFCNSGAEANEAAFKLSRLTGRTKLVAAHDAFHGRTMGSLALTGQPAKQTPFAPLPGDVTHVGYGDVDALAAAVDDHTAAVFLEPIMGESGVVVPPAGYLAAARDITARRGALLVLDEVQTGMGRTGAFFAHQHDGITPDVVTLAKGLGGGLPIGACLAVGPAAELLTPGLHGSTFGGNPVCAAAALAVLRVLASDGLVRRAEVLGKSLRHGIEALGHPLIDHVRGRGLLLGIALTAPHAKDAEATARDAGYLVNAAAPDVIRLAPPLIIAEAQLDGFVAALPAILDRAVGAP

SEQ ID NO: 64591 - protein, 307 aa, Mycobacterium tuberculosis
MIRHFLRDDDLSPAEQAEVLELAAELKKDPVSRRPLQGPRGVAVIFDKNSTRTRFSFELGIAQLGGHAVVVDSGSTQLGRDETLQDTAKVLSRYVDAIVWRTFGQERLDAMASVATVPVINALSDEFHPCQVLADLQTIAERKGALRGLRLSYFGDGANNMAHSLLLGGVTAGIHVTVAAPEGFLPDPSVRAAAERRAQDTGASVTVTADAHAAAAGADVLVTDTWTSMGQENDGLDRVKPFRPFQLNSRLLALADSDAIVLHCLPAHRGDEITDAVMDGPASAVWDEAENRLHAQKALLVWLLERS

SEQ ID NO: 64592 - protein, 470 aa, Mycobacterium tuberculosis; identical to SEQ ID NO: 62294

SEQ ID NO: 64593 - protein, 218 aa, Mycobacterium tuberculosis
MSGAKKLIFEQFALVGQALSSGHRLELLDLLVQGERSVDALARASGLTFANASQHLLQLRRAGLVTSRRDGKRVIYALSDPQVWDVVRAVRAVAERNLASVGSLVRQYYTDRDSLEPISRDELQARVAAGSVLVLDVRPAMEYAAGHLPGAVSIPLDELAERLDELPSGIDIVACCRGPYCVYAYDALELLRPNGFSARRLDGGFSEWLAADLPVVRT

SEQ ID NO: 64594 - protein, 305 aa, Mycobacterium tuberculosis
MLPQRPNCTKLFRPRRGVSERYRVTTAHNGSAPRFQRTRSGYDPVAVNHYIAELVLRQQAQHCEIETLKAEIASLKDENAALKDTSPSAQAVTDRMAKMLRLAVDEVFQMQSEARAEAATLVSAARDEAEAVRTQKREMLADMNARQRALESEHADVMRRAREEAEQLVAQATAEVERMRVIDARRREKAEQELDAEIIRLRTDAQFQIDDQLQATQQECEKRLGEAKIEADRRLHVADEQIEHGLSEARRTLEEISQRRVGILEQLARIHAQLENIPALLESARHSETEPLQSINGAVAELRAI

SEQ ID NO: 64595 - protein, 207 aa, Mycobacterium tuberculosis; identical to SEQ ID NO: 62607

SEQ ID NO: 64596 - protein, 424 aa, Mycobacterium tuberculosis
MSGMILDELSWRGLIAQSTDLDTLAAEAQRGPMTVYAGFDPTAPSLHAGHLVPLLTLRRFQRAGHRPIVLAGGATGMIGDPRDVGERSLNEADTVAEWTERIRGQLERFVDFDDSPMGAIVENNLEWTGSLSAIEFLRDIGKHFSVNVMLARDTIRRRLAGEGISYTEFSYLLLQANDYVELHRRHGCTLQIGGADQWGNIIAGVRLVRQKLGATVHALTVPLVTAADGTKFGKSTGGGSLWLDPQMTSPYAWYQYFVNTADADVIRYLRWFTFLSADELAELEQATAQRPQQRAAQRRLASELTVLVHGEAATAAVEHASRALFGRGELARLDEATLAAALRETTVAELKPGSPDGIVDLLVASGLSASKGAARRTIHEGGVSVNNIRVDNEEWVPQSSDFLHGRWLVLRRGKRSIAGVERIG

SEQ ID NO: 64597 - protein, 307 aa, Mycobacterium tuberculosis; identical to SEQ ID NO: 62807

SEQ ID NO: 64598 - protein, 586 aa, Mycobacterium tuberculosis
MRKHPQTATKHLFVSGGVASSLGKGLTASSLGQLLTARGLHVTMQKLDPYLNVDPGTMNPFQHGEVFVTEDGAETDLDVGHYERFLDRNLPGSANVTTGQVYSTVIAKERRGEYLGDTVQVIPHITDEIKRRILAMAQPDADGNRPDVVITEIGGTVGDIESQPFLEAARQVRHYLGREDVFFLHVSLVPYLAPSGELKTKPTQHSVAALRSIGITPDALILRCDRDVPEALKNKIALMCDVDIDGVISTPDAPSIYDIPKVLHREELDAFVVRRLNLPFRDVDWTEWDDLLRRVHEPHETVRIALVGKYVELSDAYLSVAEALRAGGFKHRAKVEICWVASDGCETTSGAAAALGDVHGVLIPGGFGIRGIEGKIGAIAYARARGLPVLGLCLGLQCIVIEAARSVGLTNANSAEFDPDTPDPVIATMPDQEEIVAGEADLGGTMRLGSYPAVLEPDSVVAQAYQTTQVSERHRHRYEVNNAYRDKIAESGLRFSGTSPDGHLVEFVEYPPDRHPFVVGTQAHPELKSRPTRPHPLFVAFVGAAIDYKAGELLPVEIPEIPEHTPNGSSHRDGVGQPLPEPASRG

SEQ ID NO: 64599 - protein, 311 aa, Mycobacterium tuberculosis; identical to SEQ ID NO: 62809

SEQ ID NO: 64600 - protein, 486 aa, Mycobacterium tuberculosis
MLQRIARELLSGVAVAIVALPLAIAFGITATGTSQGALIGLYGAIFAGFFAAVFGGTPGQVTGPTGPITVVATATIAEHGLEGAFFAFILAGVFQILFGACRLGSLIRYVPHPVISGFMGGIAILIIMTQLDQVRSSSLLVLVTVVLLLASGRFIKAIPPSLLVLVLVSSVLPLAAPWLRDLRAGPVSINRTVDYIGEIPQAMPSFDFPQVANSTMLQVLLSAVAIALLGSLDSLLTSLVMDNIRGTRHRSNKELIGQGIGNIAAGLFGGLSGAGATVRSVVNVRNGGQTALSAATHSVVLFVFVAGLGAVVQYIPLAVLSGILILVAVGMFDWHAMRKAHVSPRGDVIVMFTTMIITVVVDLTIAVMVGIALSLLVHRLRSRQRKAKVTQDDTGTYRIDGPLSFLSVDGVFGSLRDGREDVSLDLQHVTYLDTSGARALLYFIDHSEKDGVAVSIKRIPPRLESQLTALADNEQRDKLRTVLESA

SEQ ID NO: 64601 - protein, 254 aa, Mycobacterium tuberculosis; identical to SEQ ID NO: 62812

SEQ ID NO: 64602 - protein, 230 aa, Mycobacterium tuberculosis; identical to SEQ ID NO: 62813

SEQ ID NO: 64603 - protein, 463 aa, Mycobacterium tuberculosis; identical to SEQ ID NO: 62806

SEQ ID NO: 64604 - protein, 460 aa, Mycobacterium tuberculosis
MIATMPSMARRSRHDNKITTPAVDCLTIERLDSPASGAPQVTPYARALMGETTTCAIIGGGPAGMVLGLLLARAGVQVTLLEKHGDFLRDFRGDTVHPTTMRLLDELGLWERFAALPYSEVRTATLHSNGRAVTYIDFERLHQPYPYVAMVPQWDLLNLLAEAAQAEPSFTLRMKTEVTGLLREGGKVTGVRYQGAEGPGELRAELTVACDGRWSIARHEAGLKAREFPVNFDVWWFKLPREGDAEFSFLPRFSPGKGLGVIPREGYFQIAYLGPKGTDAQLRERGIEEFRRDVSELLPEATASVAALASMDEVKHLNVKVNRLRRWHIDGLLCIGDAAHAMSPVAGVGINLAVQDAVAAATILAEPLREHRVSSRHLAAVRRRRAFPTAVTQAVQRVLHRRLLGPLLQGRDPTPPAALLGLVERLPWLSAVPAYFVGVGVRPEHAPAFARRGPGNRKGP

SEQ ID NO: 64605 - protein, 294 aa, Mycobacterium tuberculosis; identical to SEQ ID NO: 62727

SEQ ID NO: 64606 - protein, 914 aa, Mycobacterium tuberculosis
MSFVIAVPETIAAAATDLADLGSTIAGANAAAAANTTSLLAAGADEISAAIAALFGAHGRAYQAASAEAAAFHGRFVQALTTGGGAYAAAEAAAVTPLLNSINAPVLAATGRPLIGNGANGAPGTGANGGDAGWLIGNGGAGGSGAKGANGGAGGPGGAAGLFGNGGAGGAGGTATANNGIGGAGGAGGSAMLFGAGGAGGAGGAATSLVGGIGGTGGTGGNAGMLAGAAGAGGAGGFSFSTAGGAGGAGGAGGLFTTGGVGGAGGQGHTGGAGGAGGAGGLFGAGGMGGAGGFGDHGTLGTGGAGGDGGGGGLFGAGGDGGAGGSGLTTGGAAGNGGNAGTLSLGAAGGAGGTGGAGGTVFGGGKGGAGGAGGNAGMLFGSGGGGGTGGFGFAAGGQGGVGGSAGMLSGSGGSGGAGGSGGPAGTAAGGAGGAGGAPGLIGNGGNGGNGGESGGTGGVGGAGGNAVLIGNGGEGGIGALAGKSGFGGFGGLLLGADGYNAPESTSPWHNLQQDILSFINEPTEALTGRPLIGNGDSGTPGTGDDGGAGGWLFGNGGNGGAGAAGTNGSAGGAGGAGGILFGTGGAGGAGGVGTAGAGGAGGAGGSAFLIGSGGTGGVGGAATTTGGVGGAGGNAGLLIGAAGLGGCGGGAFTAGVTTGGAGGTGGAAGLFANGGAGGAGGTGSTAGGAGGAGGAGGLYAHGGTGGPGGNGGSTGAGGTGGAGGPGGLYGAGGSGGAGGHGGMAGGGGGVGGNAGSLTLNASGGAGGSGGSSLSGKAGAGGAGGSAGLFYGSGGAGGNGGYSLNGTGGDGGTGGAGQITGLRSGFGGAGGAGGASDTGAGGNGGAGGKAGLYGNGGDGGAGGDGATSGKGGAGGNAVVIGNGGNGGNAGKAGGTAGAGGAGGLVLGRDGQHGLT

SEQ ID NO: 64607 - protein, 294 aa, Mycobacterium tuberculosis; identical to SEQ ID NO: 62727

SEQ ID NO: 64608 - protein, 618 aa, Mycobacterium tuberculosis
MSYLVVVPELVAAAATDLANIGSSISAANAAAAAPTTALVAAGGDEVSAAIAALFGAHARAYQALSAQAAMFHEQFVRALAAGGNSYAVAEAATAQSVQQDLLNLINAPTQALLGRPLIGNGANGLPGTGQNGGDGGILYGNGGNGGSGGVNQAGGNGGNAGLWGNGGSGGAGGNATTAGRNGFNGGAGGSGGLLWGNGGAGGAGGNGGPAPLVGGVGTTGGAGGNGGGAGLFYGFGGAGGNGGMGGVAPSTGPSMGILPAGGVGGPGGSGGASALAFGSGGVGGAGGLGGPTDGTVQGVGGFGGQGGNGGQSGLLFGNAGAGGAGAAGGAGTGDTESFGGHGGAGGDGGAVGLIGNGGAGGTGSPGAVVGGNGGVGGLGGAGSPGGLLYGTGGAGGNGGPGGDGGTGATVGFAGSGGFGGAGGIAQLFGTGGMGGSGGGIGAGTTTVVPPDVAPVGGTGGNGGRAGLLLGVGGMGGNGGATSVGGTLYAAGGNGGDGGLVWGNGGTGGSGGAGGAGSVGNGGAGGNAALLFGNGGAGGAGGAGGIGAGGAGGFGAVLFGNGGAGGSGAPGGIGAGGNGGNALLVGNGGNGGAGTGGAAGGAGGSGGLLFGQNGMPGP

SEQ ID NO: 64609 - protein, 639 aa, Mycobacterium tuberculosis
MWTSQMIVAPAFVDAAAKDLATIGSAISRANAEALVPITALLPAGADDVSAAIAALFATHGQAYQELSAHAVAFHEQFVQLMSAGAAQYASAEAANSSPLQIVGQTALDAINSPVQTLTGRPLIGNGANGVAGTGQNGGDGGWLYGNGGNGGSGGTGQNGGNGGSAGLWGSGGNGGQGGAGANGAAGQPGKAGGSGGNGGAGGWIYGHGGHGGAGGNGGNATAPGGASAGFDGGAGGNGGSGGRGGLLFGNGGNGSVGGMGGQGTNDTAGDSAGSGGLGGNGGNGAQGGWLIGNGGQGGDSGAGGGTDSTQTGVMNGASGGSAGIAGNGGDAGLVGNGGAGGNGGNGAAGSALGTTIFGGSGGVGGSGGDGGNGGWLFGSGASGGNGGQGGDAGTNGFAGFGGSAGGGGWVGAVNFGPISVQGFGLFGHGGDGGNGGDVGAGSLSIQFGASGGDGGQGGVLYGNGGNGGNAGSGGGTGFEGSAGQGGAAILIGNGGAGGNGATGGTGVGNIIQEAGGDGSDGGAGGSGGLLFGSGGAGGIGGAGGVGGSGNDGGNGGDGGQGGASGLGIGNGGPGGSGGTGGAGGTGGSAGTGGAGGDGGNAALLIGTGGDGGDGVPPAPGGQGGKGGLIGLPGQNGQP

SEQ ID NO: 64610 - protein, 498 aa, Mycobacterium tuberculosis
MSFVVTIPEALAAVATDLAGIGSTIGTANAAAAVPTTTVLAAAADEVSAAMAALFSGHAQAYQALSAQAALFHEQFVRALTAGAGSYAAAEAASAAPLEGVLDVINAPALALLGRPLIGNGANGAPGTGANGGDGGILIGNGGAGGSGAAGMPGGNGGAAGLFGNGGAGGAGGNVASGTAGFGGAGGAGGLLYGAGGAGGAGGRAGGGVGGIGGAGGAGGNGGLLFGAGGAGGVGGLAADAGDGGAGGDGGLFFGVGGAGGAGGTGTNVTGGAGGAGGNGGLLFGAGGVGGVGGDGVAFLGTAPGGPGGAGGAGGLFGVGGAGGAGGIGLVGNGGAGGSGGSALLWGDGGAGGAGGVGSTTGGAGGAGGNAGLLVGAGGAGGAGALGGGATGVGGAGGNGGTAGLLFGAGGAGGFGFGGAGGAGGLGGKAGLIGDGGDGGAGGNGTGAKGGDGGAGGGAILVGNGGNGGNAGSGTPNGSAGTGGAGGLLGKNGMNGLP

SEQ ID NO: 64611 - protein, 639 aa, Mycobacterium tuberculosis
MGPKLFKPSIDWSRAFPDSVYWVGKAWTISAICVLAILVLLRYLTPWGRQFWRITRAYFVGPNSVRVWLMLGVLLLSVVLAVRLNVLFSYQGNDMYTALQKAFEGIASGDGTVKRSGVRGFWMSIGVFSVMAVLHVTRVMADIYLTQRFIIAWRVWLTHHLTQDWLDGRAYYRDLFIDETIDNPDQRIQQDVDIFTAGAGGTPNAPSNGTASTLLFGAVQSIISVISFTAILWNLSGTLNIFGVSIPRAMFWTVLVYVFVATVISFIIGRPLIWLSFRNEKLNAAFRYALVRLRDAAEAVGFYRGERVEGTQLQRRFTPVIDNYRRYVRRSIAFNGWNLSVSQTIVPLPWVIQAPRLFAGQIDFGDVGQTATSFGNIHDSLSFFRNNYDAFASFRAAIIRLHGLVDANEKGRALPAVLTRPSDDESVELNDIEVRTPAGDRLIDPLDVRLDRGGSLVITGRSGAGKTTLLRSLAELWPYASGTLHRPGGENETMFLSQLPYVPLGTLRDVVCYPNSAAAIPDATLRDTLTKVALAPLCDRLDEERDWAKVLSPGEQQRVAFARILLTKPKAVFLDESTSALDTGLEFALYQLLRSELPDCIVISVSHRPALERLHENQLELLGGGQWRLAPVEAAPAEV

SEQ ID NO: 64612 - protein, 941 aa, Mycobacterium tuberculosis
MSDHSTFADRHIGLDSQAVATMLAVIGVDSLDDLAVKAVPAGILDTLTDTGAAPGLDSLPPAASEAEALAELRALADANTVAVSMIGQGYYDTHTPPVLLRNIIENPAWYTAYTPYQPEISQGRLEALLNFQTLVTDLTGLEIANASMLDEGTAAAEAMTLMHRAARGPVKRVVVDADVFTQTAAVLATRAKPLGIEIVTADLRAGLPDGEFFGVIAQLPGASGRITDWSALVQQAHDRGALVAVGADLLALTLIAPPGEIGADVAFGTTQRFGVPMGFGGPHAGYLAVHAKHARQLPGRLVGVSVDSDGTPAYRLALQTREQHIRRDKATSNICTAQVLLAVLAAMYASYHGAGGLTAIARRVHAHAEAIAGALGDALVHDKYFDTVLARVPGRADEVLARAKANGINLWRVDADHVSVACDEATTDTHVAVVLDAFGVAAAAPAHTDIATRTSEFLTHPAFTQYRTETSMMRYLRALADKDIALDRSMIPLGSCTMKLNAAAEMESITWPEFGRQHPFAPASDTAGLRQLVADLQSWLVLITGYDAVSLQPNAGSQGEYAGLLAIHEYHASRGEPHRDICLIPSSAHGTNAASAALAGMRVVVVDCHDNGDVDLDDLRAKVGEHAERLSALMITYPSTHGVYEHDIAEICAAVHDAGGQVYVDGANLNALVGLARPGKFGGDVSHLNLHKTFCIPHGGGGPGVGPVAVRAHLAPFLPGHPFAPELPKGYPVSSAPYGSASILPITWAYIRMMGAEGLRAASLTAITSANYIARRLDEYYPVLYTGENGMVAHECILDLRGITKLTGITVDDVAKRLADYGFHAPTMSFPVAGTLMVEPTESESLAEVDAFCEAMIGIRAEIDKVGAGEWPVDDNPLRGAPHTAQCLLASDWDHPYTREQAAYPLGTAFRPKVWPAVRRIDGAYGDRNLVCSCPPVEAFA

SEQ ID NO: 64613 - protein, 515 aa, Mycobacterium tuberculosis
MSFVVAAPEVVVAAASDLAGIGSAIGAANAAAAVPTMGVLAAGADEVSAAVADLFGAHAQAYQALSAQAALFHEQFVHAMTAGAGAYAGAEAADAAALDVLNGPFQALFGRPLIGDGANGAPGQPGGPGGLLYGNGGNGGNGGIGQPGGAGGDAGLIGNGGNGGIGGPGATGLAGGAGGVGGLLFGDGGNGGAGGLGTGPVGATGGIGGPGGAAVGLFGHGGAGGAGGLGKAGFAGGAGGTGGTGGLLYGNGGNGGNVPSGAADGGAGGDARLIGNGGDGGSVGAAPTGIGNGGNGGNGGWLYGDGGSGGSTLQGFSDGGTGGNAGMFGDGGNGGFSFFDGNGGDGGTGGTLIGNGGDGGNSVQTDGFLRGHGGDGGNAVGLIGNGGAGGAGSAGTGVFAPGGGSGGNGGNGALLVGNGGAGGSGGPTQIPSVAVPVTGAGGTGGNGGTAGLIGNGGNGGAAGVSGDGTPGTGGNGGYAQLIGDGGDGGPGDSGGPGGSGGTGGTLAGQNGSPGG

SEQ ID NO: 64614 - protein, 345 aa, Mycobacterium tuberculosis
MDVLSAVLLALLLIGANAFFVGAEFALISARRDRLEALAEQGKATAVTVIRAGEQLPAMLTGAQLGVTVSSILLGRVGEPAVVKLLQLSFGLSGVPPALLHTLSLAIVVALHVLLGEMVPKNIALAGPERTAMLLVPPYLVYVRLARPFIAFYNNCANAILRLVGVQPKDELDIAVSTAELSEMIAESLSEGLLDHEEHTRLTRALRIRTRLVADVAVPLVNIRAVQVSAVGSGPTIGGVEQALAQTGYSRFPVVDRGGRFIGYLHIKDVLTLGDNPQTVIDLAVVRPLPRVPQSLPLADALSRMRRINSHLALVTADNGSVVGMVALEDVVEDLVGTMRDGTHR

SEQ ID NO: 64615 - protein, 485 aa, Mycobacterium tuberculosis
MSSSESPAGIAQIGVTGLAVMGSNIARNFARHGYTVAVHNRSVAKTDALLKEHSSDGKFVRSETIPEFLAALEKPRRVLIMVKAGEATDADAVINELADAMEPGDIIIDGGNALYTDTMRREKAMRERGLHFVGAGISGGEEGALNGPSIMPGGPAESYQSLGPLLEEISAHVDGVPCCTHIGPDGSGHFVKMVHNGIEYSDMQLIGEAYQLMRDGLGLTAPAIADVFTEWNNGDLDSYLVEITAEVLRQTDAKTGKPLVDVIVDRAEQKGTGRWTVKSALDLGVPVTGIAEAVFARALSGSVGQRSAASGLASGKLGEQPADPATFTEDVRQALYASKIVAYAQGFNQIQAGSAEFGWDITPGDLATIWRGGCIIRAKFLNHIKEAFDASPNLASLIVAPYFRGAVESAIDSWRRVVSTAAQLGIPTPGFSSALSYYDALRTARLPAALTQAQRDFFGAHTYGRIDEPGKFHTLWSSDRTEVPV

SEQ ID NO: 64616 - protein, 100 aa, Mycobacterium tuberculosis; identical to SEQ ID NO: 62539

SEQ ID NO: 64617 - protein, 577 aa, Mycobacterium tuberculosis; identical to SEQ ID NO: 62532

SEQ ID NO: 64618 - protein, 211 aa, Mycobacterium tuberculosis
MTSLAVLLTLADSRLPTGAHVHSGGIEEAIAAGMVTGLATLEAFLKRRVRTHGLLTASIAAAVHRGELAVDDADRETDARTPAPAARHASRSQGRGLIRLARRVWPDSGWEELGPRPHLAVVAGRVGALSGLAPEHNALHLVYITMTGSAIAAQRLLALDPAEVTVVTFQLSELCEQIAQEATAGLADLSDPLLDTLAQRHDERVRPLFVS

SEQ ID NO: 64619 - protein, 224 aa, Mycobacterium tuberculosis; identical to SEQ ID NO: 62535

SEQ ID NO: 64620 - protein, 101 aa, Mycobacterium tuberculosis; identical to SEQ ID NO: 62534

SEQ ID NO: 64621 - protein, 414 aa, Mycobacterium tuberculosis
MAVNRRVPRVRDLAPLLQFNRPQFDTSKRRLGAALTIQDLRRIAKRRTPRAAFDYADGGAEDELSIARARQGFRDIEFHPTILRDVTTVCAGWNVLGQPTVLPFGIAPTGFTRLMHTEGEIAGARAAAAAGIPFSLSTLATCAIEDLVIAVPQGRKWFQLYMWRDRDRSMALVRRVAAAGFDTMLVTVDVPVAGARLRDVRNGMSIPPALTLRTVLDAMGHPRWWFDLLTTEPLAFASLDRWPGTVGEYLNTVFDPSLTFDDLAWIKSQWPGKLVVKGIQTLDDARAVVDRGVDGIVLSNHGGRQLDRAPVPFHLLPHVARELGKHTEILVDTGIMSGADIVAAIALGARCTLIGRAYLYGLMAGGEAGVNRAIEILQTGVIRTMRLLGVTCLEELSPRHVTQLRRLGPIGAPT

SEQ ID NO: 64622 - protein, 384 aa, Mycobacterium tuberculosis
MRAVVIDGAGSVRVNTQPDPALPGPDGVVVAVTAAGICGSDLHFYEGEYPFTEPVALGHEAVGTIVEAGPQVRTVGVGDLVMVSSVAGCGVCPGCETHDPVMCFSGPMIFGAGVLGGAQADLLAVPAADFQVLKIPEGITTEQALLLTDNLATGWAAAQRADISFGSAVAVIGLGAVGLCALRSAFIHGAATVFAVDRVKGRLQRAATWGATPIPSPAAETILAATRGRGADSVIDAVGTDASMSDALNAVRPGGTVSVVGVHDLQPFPVPALTCLLRSITLRMTMAPVQRTWPELIPLLQSGRLDVDGIFTTTLPLDEAAKGYATARARSGEELRFCLRPDSRDVLGAHETVDLYVHVRRCQSVADLQLEGAADGVDGPSMLN

SEQ ID NO: 64623 - protein, 343 aa, Mycobacterium tuberculosis
MSRAAGLPRLSWFAGLTWFAGGSTGAGCAAHPALAGLTAGARCPAYAAISASTARPAATAGTTPATGASGSARPTDAAGMADLARPGVVATHAVRTLGTTGSRAIGLCPCQPLDCPRSPQATLNLGSMGRSLDGPQWRRARVRLCGRWWRRSNTTRGASPRPPSTCRGDNVSMIELEVHQADVTKLELDAITNAANTRLRHAGGVAAAIARAGGPELQRESTEKAPIGLGEAVETTAGDMPARYVIHAATMELGGPTSGEIITAATAATLRKADELGCRSLALVAFGTGVGGFPLDDAARLMVGAVRRHRPGSLQRVVFAVHGDAAERAFSAAIQAGEDTARR

SEQ ID NO: 64624 - protein, 740 aa, Mycobacterium tuberculosis
MPEQHPPITETTTGAASNGCPVVGHMKYPVEGGGNQDWWPNRLNLKVLHQNPAVADPMGAAFDYAAEVATIDVDALTRDIEEVMTTSQPWWPADYGHYGPLFIRMAWHAAGTYRIHDGRGGAGGGMQRFAPLNSWPDNASLDKARRLLWPVKKKYGKKLSWADLIVFAGNCALESMGFKTFGFGFGRVDQWEPDEVYWGKEATWLGDERYSGKRDLENPLAAVQMGLIYVNPEGPNGNPDPMAAAVDIRETFRRMAMNDVETAALIVGGHTFGKTHGAGPADLVGPEPEAAPLEQMGLGWKSSYGTGTGKDAITSGIEVVWTNTPTKWDNSFLEILYGYEWELTKSPAGAWQYTAKDGAGAGTIPDPFGGPGRSPTMLATDLSLRVDPIYERITRRWLEHPEELADEFAKAWYKLIHRDMGPVARYLGPLVPKQTLLWQDPVPAVSHDLVGEAEIASLKSQIRASGLTVSQLVSTAWAAASSFRGSDKRGGANGGRIRLQPQVGWEVNDPDGDLRKVIRTLEEIQESFNSAAPGNIKVSFADLVVLGGCAAIEKAAKAAGHNITVPFTPGRTDASQEQTDVESFAVLEPKADGFRNYLGKGNPLPAEYMLLDKANLLTLSAPEMTVLVGGLRVLGANYKRLPLGVFTEASESLTNDFFVNLLDMGITWEPSPADDGTYQGKDGSGKVKWTGSRVDLVFGSNSELRALVEVYGADDAQPKFVQDFVAAWDKVMNLDRFDVR

SEQ ID NO: 64625 - protein, 839 aa, Mycobacterium tuberculosis; identical to SEQ ID NO: 62736

SEQ ID NO: 64626 - protein, 256 aa, Mycobacterium tuberculosis; identical to SEQ ID NO: 62637

SEQ ID NO: 64627 - protein, 322 aa, Mycobacterium tuberculosis
MTGKLVERVHAINWNRLLDAKDLQVWERLTGNFWLPEKIPLSNDLASWQTLSSTEQQTTIRVFTGLTLLDTAQATVGAVAMIDDAVTPHEEAVLTNMAFMESVHAKSYSSIFSTLCSTKQIDDAFDWSEQNPYLQRKAQIIVDYYRGDDALKRKASSVMLESFLFYSGFYLPMYWSSRGKLTNTADLIRLIIRDEAVHGYYIGYKCQRGLADLTDAERADHREYTCELLHTLYANEIDYAHDLYDELGWTDDVLPYMRYNANKALANLGYQPAFDRDTCQVNPAVRAALDPGAGENHDFFSGSGSSYVMGTHQPTTDTDWDF

SEQ ID NO: 64628 - protein, 303 aa, Mycobacterium tuberculosis; identical to SEQ ID NO: 62613

SEQ ID NO: 64629 - protein, 905 aa, Mycobacterium tuberculosis
MSASVSATTAHHGLPAHEVVLLLESDPYHGLSDGEAAQRLERFGPNTLAVVTRASLLARILRQFHHPLIYVLLVAGTITAGLKEFVDAAVIFGVVVINAIVGFIQESKAEAALQGLRSMVHTHAKVVREGHEHTMPSEELVPGDLVLLAAGDKVPADLRLVRQTGLSVNESALTGESTPVHKDEVALPEGTPVADRRNIAYSGTLVTAGHGAGIVVATGAETELGEIHRLVGAAEVVATPLTAKLAWFSKFLTIAILGLAALTFGVGLLRRQDAVETFTAAIALAVGAIPEGLPTAVTITLAIGMARMAKRRAVIRRLPAVETLGSTTVICADKTGTLTENQMTVQSIWTPHGEIRATGTGYAPDVLLCDTDDAPVPVNANAALRWSLLAGACSNDAALVRDGTRWQIVGDPTEGAMLVVAAKAGFNPERLATTLPQVAAIPFSSERQYMATLHRDGTDHVVLAKGAVERMLDLCGTEMGADGALRPLDRATVLRATEMLTSRGLRVLATGMGAGAGTPDDFDENVIPGSLALTGLQAMSDPPRAAAASAVAACHSAGIAVKMITGDHAGTATAIATEVGLLDNTEPAAGSVLTGAELAALSADQYPEAVDTASVFARVSPEQKLRLVQALQARGHVVAMTGDGVNDAPALRQANIGVAMGRGGTEVAKDAADMVLTDDDFATIEAAVEEGRGVFDNLTKFITWTLPTNLGEGLVILAAIAVGVALPILPTQILWINMTTAIALGLMLAFEPKEAGIMTRPPRDPDQPLLTGWLVRRTLLVSTLLVASAWWLFAWELDNGAGLHEARTAALNLFVVVEAFYLFSCRSLTRSAWRLGMFANRWIILGVSAQAIAQFAITYLPAMNMVFDTAPIDIGVWVRIFAVATAITIVVATDTLLPRIRAQPP

SEQ ID NO: 64630 - protein, 440 aa, Mycobacterium tuberculosis
MRRPLDPRDIPDELRRRLGLLDAVVIGLGSMIGAGIFAALAPAAYAAGSGLLLGLAVAAVVAYCNAISSARLAARYPASGGTYVYGRMRLGDFWGYLAGWGFVVGKTASCAAMALTVGFYVWPAQAHAVAVAVVVALTAVNYAGIQKSAWLTRSIVAVVLVVLTAVVVAAYGSGAADPARLDIGVDAHVWGMLQAAGLLFFAFAGYARIATLGEEVRDPARTIPRAIPLALGITLAVYALVAVAVIAVLGPQRLARAAAPLSEAMRVAGVNWLIPVVQIGAAVAALGSLLALILGVSRTTLAMARDRHLPRWLAAVHPRFKVPFRAELVVGAVVAALAATADIRGAIGFSSFGVLVYYAIANASALTLGLDEGRPRRLIPLVGLIGCVVLAFALPLSSVAAGAAVLGVGVAAYGVRRIITRRARQTDSGDTQRSGHPSAT

SEQ ID NO: 64631 - protein, 1327 aa, Mycobacterium tuberculosis
MRCGIVVNVTGPPPTIDRRYHDAVIVGLDNVVDKATRVHAAAWTKFLDDYLTRRPQRTGEDHCPLTHDDYRRFLAGKPDGVADFLAARGIRLPPGSPTDLTDDTVYGLQNLERQTFLQLLNTGVPEGKSIASFARRLQVAGVRVAAHTSHRNYGHTLDATGLAEVFAVFVDGAVTAELGLPAEPNPAGLIETAKRLGANPGRCVVIDSCQTGLRAGRNGGFALVIAVDAHGDAENLLSSGADAVVADLAAVTVGSGDAAISTIPDALQVYSQLKRLLTGRRPAVFLDFDGTLSDIVERPEAATLVDGAAEALRALAAQCPVAVISGRDLADVRNRVKVDGLWLAGSHGFELVAPDGSHHQNAAATAAIDGLAEAAAQLADALREIAGAVVEHKRFAVAVHYRNVADDSVDNLIAAVRRLGHAAGLRVTTGRKVVELRPDIAWDKGKALDWIGERLGPAEVGPDLRLPIYIGDDLTDEDAFDAVRFTGVGIVVRHNEHGDRRSAATFRLECPYTVCQFLSQLACDLQEAVQHDDPWTLVFHGYDPGQERLREALCAVGNGYLGSRGCAPESAESEAHYPGTYVAGVYNQLTDHIEGCTVDNESLVNLPNWLSLTFRIDGGAWFNVDTVELLSYRQTFDLRRATLTRSLRFRDAGGRVTTMTQERFASMNRPNLVALQTRIESENWSGTVDFRSLVDGGVHNTLVDRYRQLSSQHLTTAEIEVLADSVLLRTQTSQSGIAIAVAARSTLWRDGQRVDAQYRVARDTNRGGHDIQVTLSAGQSVTLEKVATIFTSRDAATLTAAISAQRCLGEAGRYAELCQQHVRAWARLWERCAIDLTGNTEELRLVRLHLLHLLQTISPHTAELDAGVPARGLNGEAYRGHVFWDALFVAPVLSLRMPKVARSLLDYRYRRLPAARRAAHRAGHLGAMYPWQSGSDGSEVSQQLHLNPRSGRWTPDPSDRAHHVGLAVAYNAWHYYQVTGDRQYLVDCGAELLVEIARFWVGLAKLDDSRGRYLIRGVIGPDEFHSGYPGNEYDGIDNNAYTNVMAVWVILRAMEALDLLPLTDRRHLIEKLGLTTQERDQWDDVSRRMFVPFHDGVISQFEGYSELAELDWDHYRHRYGNIQRLDRILEAEGDSVNNYQASKQADALMLLYLLSSDELIGLLARLGYRFAPTQIPGTVDYYLARTSDGSTLSAVVHAWVLARANRSNAMEYFRQVLRSDIADVQGGTTQEGIHLAAMAGSIDLLQRCYSGLELRDDRLVLSPQWPEALGPLEFPFVYRRHQLSLRISGRSATLTAESGDAEPIEVECRGHVQRLRCGHTIEVGCSR

SEQ ID NO: 64632 - protein, 99 aa, Mycobacterium tuberculosis
MAPGMKWAAKTDHLAIVLLPRHHRRHSRRGRALPARSRSALGWIIERYRVTTDKASGIVNDPNDWCDEHDDPTYIVDLIKKVTTVSVETMKIVDGLAGG

SEQ ID NO: 64633 - protein, 339 aa, Mycobacterium tuberculosis; identical to SEQ ID NO: 62568

SEQ ID NO: 64634 - protein, 874 aa, Mycobacterium tuberculosis
MKLGAWVAAQLPTTRTAVRTRLTRLVVSIVAGLLLYASFPPRNCWWAAVVALALLAWVLTHRATTPVGGLGYGLLFGLVFYVSLLPWIGELVGPGPWLALATTCALFPGIFGLFAVVVRLLPGWPIWFAVGWAAQEWLKSILPFGGFPWGSVAFGQAEGPLLPLVQLGGVALLSTGVALVGCGLTAIALEIEKWWRTGGQGDAPPAVVLPAACICLVLFAAIVVWPQVRHAGSGSGGEPTVTVAVVQGNVPRLGLDFNAQRRAVLDNHVEETLRLAADVHAGLAQQPQFVIWPENSSDIDPFVNPDAGQRISAAAEAIGAPILIGTLMDVPGRPRENPEWTNTAIVWNPGTGPADRHDKAIVQPFGEYLPMPWLFRHLSGYADRAGHFVPGNGTGVVRIAGVPVGVATCWEVIFDRAPRKSILGGAQLLTVPSNNATFNKTMSEQQLAFAKVRAVEHDRYVVVAGTTGISAVIAPDGGELIRTDFFQPAYLDSQVRLKTRLTPATRWGPILQWILVGAAAAVVLVAMRQNGWFPRPRRSEPKGENDDSDAPPGRSEASGPPALSESDDELIQPEQGGRHSSGFGRHRATSRSYMTTGQPAPPAPGNRPSQRVLVIIPTFNERENLPVIHRRLTQACPAVHVLVVDDSSPDGTGQLADELAQADPGRTHVMHRTAKNGLGAAYLAGFAWGLSREYSVLVEMDADGSHAPEQLQRLLDAVDAGADLAIGSRYVAGGTVRNWPWRRLVLSKTANTYSRLALGIGIHDITAGYRAYRREALEAIDLDGVDSKGYCFQIDLTWRTVSNGFVVTEVPITFTERELGVSKMSGSNIREALVKVARWGIEGRLSRSDHARARPDIARPGAGGSRVSRADVTE

SEQ ID NO: 64635 - protein, 534 aa, Mycobacterium tuberculosis
MSQIPVKLLVNGRVYSPTHPEATAMAVRGDVVAWLGSDDVGRDQFPDADVQDLDGRFVAPGFVDSHIHLTATGLMLSGLDLRPATSRAQCLRMVADYAADHPGQPLWGHGWDESAWPENAAPSTADLDAVLGDCPAYLARIDSHSALVSSGLRRLVPELAAATGYTAQRPLTGDAHHLARAAARYLLTDVQLADARAVALQAIAAAGVVAVHECAGPEIGGLDDWLRLRALEHGVEVIGYWGEAVATPAQARDLVTETGARGLAGDLFVDGALGSRTAWLHEPYADAPDCIGTCHLDVDGIEAHVRACTKAEVTAGFHVIGDAAVSAAVAAFERVVADLGVVAVARCGHRLEHVEMVTADQAAKLGAWGVIASVQPNFDELWGGGDGMYARRLGAQRGSELNPLALLASQGVPLALGSDAPVTGFDPWASVRAAVNHRTPGSGVSARAAFAAATRGGWRAGGVRDGRIGTLVPGAPASYAIWDAGDFDVDAPRDAVQRWSTDPRSRVPALPRLGPTDALPRCRQTVHRGAVIYG

SEQ ID NO: 64636 - protein, 101 aa, Mycobacterium tuberculosis; identical to SEQ ID NO: 62281

SEQ ID NO: 64637 - protein, 54 aa, Mycobacterium tuberculosis; identical to SEQ ID NO: 62282

SEQ ID NO: 64638 - protein, 78 aa, Mycobacterium tuberculosis
MSAHCQVTGRKPGFGNTVSHSHRRSRRRWSPNIQQRTYYLPSEGRRIRLRVSTKGIKVIDRDGIEAVVARLRRQGQRI

SEQ ID NO: 64639 - protein, 251 aa, Mycobacterium tuberculosis
MTVYFIGAGPGAADLITVRGQRLLQRCPVCLYAGSIMPDDLLAQCPPGATIVDTGPLTLEQIVRKLADADADGRDVARLHSGDPSLYSALAEQCRELDALGIGYEIVPGVPAFAAAAAALKRELTVPGVAQTVTLTRVATLSTPIPPGEDLAALARSRATLVLHLAAAQIDAIVPRLLDGGYRPETPVAVVAFASWPQQRTLRGTLADIAARMHDAKITRTAVIVVGDVLTAEGFTDSYLYSVARHGRYAQ

SEQ ID NO: 64640 - protein, 312 aa, Mycobacterium tuberculosis; identical to SEQ ID NO: 64450

SEQ ID NO: 64641 - protein, 291 aa, Mycobacterium tuberculosis; identical to SEQ ID NO: 62529

SEQ ID NO: 64642 - protein, 397 aa, Mycobacterium tuberculosis
MSLSVRRPPAARAAAIVEAESWFLKRGLPSVLTMRGRCRRLWPRSAPMLAAWAVVEGCLMAVFFVTDGGEVFISATPTTAQWVILALLAVALPLASLVGWLVSQISSGRGQAAVATMAVAFAAASDVIESGPIQLLRTAVVVGLVLLQTGCGVGSVLGWAVRMTLEHLATVGTLAVRALPIVLLTALVFFNTYVWLMAANINGERLTLAMVFLLAIAGAFVVSKTVERVRPLLRSTTVMPQGSQSLAGTPFATMGDPSPGFPLTRAERLNVVFLLAASQLVEILVVASVGAAIYLVLGMIILTPPLLREWTHYDSMTTTVLGMTFPAPDSLIRMCLFLGALTFMYISARAVDDAEYRAMFLDPLIDDLHTALLARNRYRNNVVTAPCAGVDAGHVDD

SEQ ID NO: 64643 - protein, 284 aa, Mycobacterium tuberculosis; identical to SEQ ID NO: 62530

SEQ ID NO: 64644 - protein, 1192 aa, Mycobacterium tuberculosis
MTAADKHLYDTDLLDVLSQRVMVGDGAMGTQLQAADLTLDDFRGLEGCNEILNETRPDVLETIHRNYFEAGADAVETNTFGCNLSNLGDYDIADRIRDLSQKGTAIARRVADELGSPDRKRYVLGSMGPGTKLPTLGHTEYAVIRDAYTEAALGMLDGGADAILVETCQDLLQLKAAVLGSRRAMTRAGRHIPVFAHVTVETTGTMLLGSEIGAALTAVEPLGVDMIGLNCATGPAEMSEHLRHLSRHARIPVSVMPNAGLPVLGAKGAEYPLLPDELAEALAGFIAEFGLSLVGGCCGTTPAHIREVAAAVANIKRPERQVSYEPSVSSLYTAIPFAQDASVLVIGERTNANGSKGFREAMIAEDYQKCLDIAKDQTRDGAHLLDLCVDYVGRDGVADMKALASRLATSSTLPIMLDSTETAVLQAGLEHLGGRCAINSVNYEDGDGPESRFAKTMALVAEHGAAVVALTIDEEGQARTAQKKVEIAERLINDITGNWGVDESSILIDTLTFTIATGQEESRRDGIETIEAIRELKKRHPDVQTTLGLSNISFGLNPAARQVLNSVFLHECQEAGLDSAIVHASKILPMNRIPEEQRNVALDLVYDRRREDYDPLQELMRLFEGVSAASSKEDRLAELAGLPLFERLAQRIVDGERNGLDADLDEAMTQKPPLQIINEHLLAGMKTVGELFGSGQMQLPFVLQSAEVMKAAVAYLEPHMERSDDDSGKGRIVLATVKGDVHDIGKNLVDIILSNNGYEVVNIGIKQPIATILEVAEDKSADVVGMSGLLVKSTVVMKENLEEMNTRGVAEKFPVLLGGAALTRSYVENDLAEIYQGEVHYARDAFEGLKLMDTIMSAKRGEAPDENSPEAIKAREKEAERKARHQRSKRIAAQRKAAEEPVEVPERSDVAADIEVPAPPFWGSRIVKGLAVADYTGLLDERALFLGQWGLRGQRGGEGPSYEDLVETEGRPRLRYWLDRLSTDGILAHAAVVYGYFPAVSEGNDIVVLTEPKPDAPVRYRFHFPRQQRGRFLCIADFIRSRELAAERGEVDVLPFQLVTMGQPIADFANELFASNAYRDYLEVHGIGVQLTEALAEYWHRRIREELKFSGDRAMAAEDPEAKEDYFKLGYRGARFAFGYGACPDLEDRAKMMALLEPERIGVTLSEELQLHPEQSTDAFVLHHPEAKYFNV

SEQ ID NO: 64645 - protein, 260 aa, Mycobacterium tuberculosis; identical to SEQ ID NO: 62329

SEQ ID NO: 64646 - protein, 241 aa, Mycobacterium tuberculosis; identical to SEQ ID NO: 62336

SEQ ID NO: 64647 - protein, 258 aa, Mycobacterium tuberculosis
MAADLSAYPDRESELTHALAAMRSRLAAAAEAAGRNVGEIELLPITKFFPATDVAILFRLGCRSVGESREQEASAKMAELNRLLAAAELGHSGGVHWHMVGRIQRNKAGSLARWAHTAHSVDSSRLVTALDRAVVAALAEHRRGERLRVYVQVSLDGDGSRGGVDSTTPGAVDRICAQVQESEGLELVGLMGIPPLDWDPDEAFDRLQSEHNRVRAMFPHAIGLSAGMSNDLEVAVKHGSTCVRVGTALLGPRRLRSP

SEQ ID NO: 64648 - protein, 379 aa, Mycobacterium tuberculosis; identical to SEQ ID NO: 62334

SEQ ID NO: 64649 - protein, 314 aa, Mycobacterium tuberculosis; identical to SEQ ID NO: 62333

SEQ ID NO: 64650 - protein, 494 aa, Mycobacterium tuberculosis
MSTEQLPPDLRRVHMVGIGGAGMSGIARILLDRGGLVSGSDAKESRGVHALRARGALIRIGHDASSLDLLPGGATAVVTTHAAIPKTNPELVEARRRGIPVVLRPAVLAKLMAGRTTLMVTGTHGKTTTTSMLIVALQHCGLDPSFAVGGELGEAGTNAHHGSGDCFVAEADESDGSLLQYTPHVAVITNIESDHLDFYGSVEAYVAVFDSFVERIVPGGALVVCTDDPGGAALAQRATELGIRVLRYGSVPGETMAATLVSWQQQGVGAVAHIRLASELATAQGPRVMRLSVPGRHMALNALGALLAAVQIGAPADEVLDGLAGFEGVRRRFELVGTCGVGKASVRVFDDYAHHPTEISATLAAARMVLEQGDGGRCMVVFQPHLYSRTKAFAAEFGRALNAADEVFVLDVYGAREQPLAGVSGASVAEHVTVPMRYVPDFSAVAQQVAAAASPGDVIVTMGAGDVTLLGPEILTALRVRANRSAPGRPGVLG

SEQ ID NO: 64651 - protein, 410 aa, Mycobacterium tuberculosis
MKDTVSQPAGGRGATAPRPADAASPSCGSSPSADSVSVVLAGGGTAGHVEPAMAVADALVALDPRVRITALGTLRGLETRLVPQRGYHLELITAVPMPRKPGGDLARLPSRVWRAVREARDVLDDVDADVVVGFGGYVALPAYLAARGLPLPPRRRRRIPVVIHEANARAGLANRVGAHTADRVLSAVPDSGLRRAEVVGVPVRASIAALDRAVLRAEARAHFGFPDDARVLLVFGGSQGAVSLNRAVSGAAADLAAAGVCVLHAHGPQNVLELRRRAQGDPPYVAVPYLDRMELAYAAADLVICRAGAMTVAEVSAVGLPAIYVPLPIGNGEQRLNALPVVNAGGGMVVADAALTPELVARQVAGLLTDPARLAAMTAAAARVGHRDAAGQVARAALAVATGAGARTTT

SEQ ID NO: 64652 - protein, 524 aa, Mycobacterium tuberculosis
MLTRLLRRGTSDTDGSQTRGAEPVEGQRTGPEEASNPGSARPRTRFGAWLGRPMTSFHLIIAVAALLTTLGLIMVLSASAVRSYDDDGSAWVIFGKQVLWTLVGLIGGYVCLRMSVRFMRRIAFSGFAITIVMLVLVLVPGIGKEANGSRGWFVVAGFSMQPSELAKMAFAIWGAHLLAARRMERASLREMLIPLVPAAVVALALIVAQPDLGQTVSMGIILLGLLWYAGLPLRVFLSSLAAVVVSAAILAVSAGYRSDRVRSWLNPENDPQDSGYQARQAKFALAQGGIFGDGLGQGVAKWNYLPNAHNDFIFAIIGEELGLVGALGLLGLFGLFAYTGMRIASRSADPFLRLLTATTTLWVLGQAFINIGYVIGLLPVTGLQLPLISAGGTSTAATLSLIGIIANAARHEPEAVAALRAGRDDKVNRLLRLPLPEPYLPPRLEAFRDRKRANPQPAQTQPARKTPRTAPGQPARQMGLPPRPGSPRTADPPVRRSVHHGAGQRYAGQRRTRRVRALEGQRYG

SEQ ID NO: 64653 - protein, 486 aa, Mycobacterium tuberculosis
MLDPLGPGAPVLVAGGRVTGQAVAAVLTRFGATPTVCDDDPVMLRPHAERGLPTVSSSDAVQQITGYALVVASPGFSPATPLLAAAAAAGVPIWGDVELAWRLDAAGCYGPPRSWLVVTGTNGKTTTTSMLHAMLIAGGRRAVLCGNIGSAVLDVLDEPAELLAVELSSFQLHWAPSLRPEAGAVLNIAEDHLDWHATMAEYTAAKARVLTGGVAVAGLDDSRAAALLDGSPAQVRVGFRLGEPAARELGVRDAHLVDRAFSDDLTLLPVASIPVPGPVGVLDALAAAALARSVGVPAGAIADAVTSFRVGRHRAEVVAVADGITYVDDSKATNPHAARASVLAYPRVVWIAGGLLKGASLHAEVAAMASRLVGAVLIGRDRAAVAEALSRHAPDVPVVQVVAGEDTGMPATVEVPVACVLDVAKDDKAGETVGAAVMTAAVAAARRMAQPGDTVLLAPAGASFDQFTGYADRGEAFATAVRAVIR

SEQ ID NO: 64654 - protein, 359 aa, Mycobacterium tuberculosis
MRQILIAVAVAVTVSILLTPVLIRLFTKQGFGHQIREDGPPSHHTKRGTPSMGGVAILAGIWAGYLGAHLAGLAFDGEGIGASGLLVLGLATALGGVGFIDDLIKIRRSRNLGLNKTAKTVGQITSAVLFGVLVLQFRNAAGLTPGSADLSYVREIATVTLAPVLFVLFCVVIVSAWSNAVNFTDGLDGLAAGTMAMVTAAYVLITFWQYRNACVTAPGLGCYNVRDPLDLALIAAATAGACIGFLWWNAAPAKIFMGDTGSLALGGVIAGLSVTSRTEILAVVLGALFVAEITSVVLQILTFRTTGRRMFRMAPFHHHFELVGWAETTVIIRFWLLTAITCGLGVALFYGEWLAAVGA

SEQ ID NO: 64655 - protein, 510 aa, Mycobacterium tuberculosis
MIELTVAQIAEIVGGAVADISPQDAAHRRVTGTVEFDSRAIGPGGLFLALPGARADGHDHAASAVAAGAAVVLAARPVGVPAIVVPPVAAPNVLAGVLEHDNDGSGAAVLAALAKLATAVAAQLVAGGLTIIGITGSSGKTSTKDLMAAVLAPLGEVVAPPGSFNNELGHPWTVLRATRRTDYLILEMAARHHGNIAALAEIAPPSIGVVLNVGTAHLGEFGSREVIAQTKAELPQAVPHSGAVVLNADDPAVAAMAKLTAARVVRVSRDNTGDVWAGPVSLDELARPRFTLHAHDAQAEVRLGVCGDHQVTNALCAAAVALECGASVEQVAAALTAAPPVSRHRMQVTTRGDGVTVIDDAYNANPDSMRAGLQALAWIAHQPEATRRSWAVLGEMAELGEDAIAEHDRIGRLAVRLDVSRLVVVGTGRSISAMHHGAVLEGAWGSGEATADHGADRTAVNVADGDAALALLRAELRPGDVVLVKASNAAGLGAVADALVADDTCGSVRP

SEQ ID NO: 64656 - protein, 535 aa, Mycobacterium tuberculosis
MSSLARGISRRRTEVATQVEAAPTGLRPNAVVGVRLAALADQVGAALAEGPAQRAVTEDRTVTGVTLRAQDVSPGDLFAALTGSTTHGARHVGDAIARGAVAVLTDPAGVAEIAGRAAVPVLVHPAPRGVLGGLAATVYGHPSERLTVIGITGTSGKTTTTYLVEAGLRAAGRVAGLIGTIGIRVGGADLPSALTTPEAPTLQAMLAAMVERGVDTVVMEVSSHALALGRVDGTRFAVGAFTNLSRDHLDFHPSMADYFEAKASLFDPDSALRARTAVVCIDDDAGRAMAARAADAITVSAADRPAHWRATDVAPTDAGGQQFTAIDPAGVGHHIGIRLPGRYNVANCLVALAILDTVGVSPEQAVPGLREIRVPGRLEQIDRGQGFLALVDYAHKPEALRSVLTTLAHPDRRLAVVFGAGGDRDPGKRAPMGRIAAQLADLVVVTDDNPRDEDPTAIRREILAGAAEVGGDAQVVEIADRRDAIRHAVAWARPGDVVLIAGKGHETGQRGGGRVRPFDDRVELAAALEALERRA

SEQ ID NO: 64657 - protein, 344 aa, Mycobacterium tuberculosis; identical to SEQ ID NO: 62278

SEQ ID NO: 64658 - protein, 532 aa, Mycobacterium tuberculosis
MSFVIAAPEVMAAAATDLANIGSSISAASAAAAGPTMGILAAGADEVSVAISALFGSHAQGYQTLSAQLAAYHNQFVRALNAGAGSYASAEAANVQQTLLNAINAPTQTLLGRPLIGNGADGGPGQNGGPGGLLYGNGGNGGAGDTANPNGGNGGSAGLIGNGGAGGAGAATGAGGAGGNGGWLYGNGGPGGAAGLGTAGGVSPAGGAGGAAGLWGHGGAGGAGGSASGAPGAGGAGGDGGRGGLLYGDGGAGGAGGNGSNGVTGVHGGNGGAGGAAGLIGNGGAGGDGGNGGLSNTGASGGAGGAGGAALIGNGGDGGHGGNGGHGNSGGAGGAGGAGGAGGAGGHVGLIGNGGNGGAGGNGGNDNSSTLADAGSGGAGAAGGNGGLFYGNGGVGGRGGNGGFSSAGTSGGDGGIGGAGGIGGLIGSGGGGGDGGNGGQAPTPGNAGDGGAGGNARLIGDGGRGGNGGEGGDGPPGVKGDGGNGGNGGNAVVIGNGGNGGAGGFGIPVGSGGAGGSRGVLFGTPGANGADG

SEQ ID NO: 64659 - protein, 679 aa, Mycobacterium tuberculosis
MSRAAPRRASQSQSTRPARGLRRPPGAQEVGQRKRPGKTQKARQAQEATKSRPATRSDVAPAGRSTRARRTRQVVDVGTRGASFVFRHRTGNAVILVLMLVAATQLFFLQVSHAAGLRAQAAGQLKVTDVQPAARGSIVDRNNDRLAFTIEARALTFQPKRIRRQLEEARKKTSAAPDPQQRLRDIAQEVAGKLNNKPDAAAVLKKLQSDETFVYLARAVDPAVASAICAKYPEVGAERQDLRQYPGGSLAANVVGGIDWDGHGLLGLEDSLDAVLAGTDGSVTYDRGSDGVVIPGSYRNRHKAVHGSTVVLTLDNDIQFYVQQQVQQAKNLSGAHNVSAVVLDAKTGEVLAMANDNTFDPSQDIGRQGDKQLGNPAVSSPFEPGSVNKIVAASAVIEHGLSSPDEVLQVPGSIQMGGVTVHDAWEHGVMPYTTTGVFGKSSNVGTLMLSQRVGPERYYDMLRKFGLGQRTGVGLPGESAGLVPPIDQWSGSTFANLPIGQGLSMTLLQMTGMYQAIANDGVRVPPRIIKATVAPDGSRTEEPRPDDIRVVSAQTAQTVRQMLRAVVQRDPMGYQQGTGPTAGVPGYQMAGKTGTAQQINPGCGCYFDDVYWITFAGIATADNPRYVIGIMLDNPARNSDGAPGHSAAPLFHNIAGWLMQRENVPLSPDPGPPLVLQAT

SEQ ID NO: 64660 - protein, 396 aa, Mycobacterium tuberculosis
MQTRAPWSLPEATLAYFPNARFVSSDRDLGAGAAPGIAASRSTACQTWGGITVADPGSGPTGFGHVPVLAQRCFELLTPALTRYYPDGSQAVLLDATIGAGGHAERFLEGLPGLRLIGLDRDPTALDVARSRLVRFADRLTLVHTRYDCLGAALAESGYAAVGSVDGILFDLGVSSMQLDRAERGFAYATDAPLDMRMDPTTPLTAADIVNTYDEAALADILRRYGEERFARRIAAGIVRRRAKTPFTSTAELVALLYQAIPAPARRVGGHPAKRTFQALRIAVNDELESLRTAVPAALDALAIGGRIAVLAYQSLEDRIVKRVFAEAVASATPAGLPVELPGHEPRFRSLTHGAERASVAEIERNPRSTPVRLRALQRVEHRAQSQQWATEKGDS

SEQ ID NO: 64661 - protein, 143 aa, Mycobacterium tuberculosis; identical to SEQ ID NO: 62469

SEQ ID NO: 64662 - protein, 346 aa, Mycobacterium tuberculosis
AEALAAGQRRIAKGERDFKDRVGFLRGRARPASTLITRFIADHQGHREGPDGLRWGVESICTQLTELGVPIAPSTYYDHINREPSRRELRDGELKEHISRVHAANYGVYGARKVWLTLNREGIEVARCTVERLMTKLGLSGTTRGKARRTTIADPATARPADLVQRRFGPPAPNRLWVADLTYVSTWAGFAYVAFVTDAYARRILGWRVASTMATSMVLDAIEQAIWTRQQEGVLDLKDVIHHTDRGSQYTSIRFSERLAEAGIQPSVGAVGSSYDNALAETINGLYKTELIKPGKPWRSIEDVELATARWVDWFNHRRLYQYCGDVPPVELEAAYYAQRQRPAAG

SEQ ID NO: 64663 - protein, 516 aa, Mycobacterium tuberculosis
MTTPSHAPAVDLATAKDAVVQHLSRLFEFTTGPQGGPARLGFAGAVLITAGGLGAGSVRQHDPLLESIHMSWLRFGHGLVLSSILLWTGVGVMLLAWLGLGRRVLAGEATEFTMRATTVIWLAPLLLSVPVFSRDTYSYLAQGALLRDGLDPYAVGPVGNPNALLDDVSPIWTITTAPYGPAFILVAKFVTVIVGNNVVAGTMLLRLCMLPGLALLVWATPRLASHLGTHGPTALWICVLNPLVLIHLMGGVHNEMLMVGLMTAGIALTVQGRNVAGIILITVAIAVKATAGIALPFLVWVWLRHLRERRGYRPVQAFLAAAAISLLIFVAVFAVLSAVAGVGLGWLTALAGSVKIINWLTVPTGAANVIHALGRGLFTVDFYTLLRITRLIGIVIIAVSLPLLWWRFRRDDRAALTGVAWSMLIVVLFVPAALPWYYSWPLAVAAPLAQARRAIAAIAGLSTWVMVIFKPDGSHGMYSWLHFWIATACALTAWYVLYRSPDRRGVQAATPVVNTP

SEQ ID NO: 64664 - protein, 399 aa, Mycobacterium tuberculosis; identical to SEQ ID NO: 62610

SEQ ID NO: 64665 - protein, 645 aa, Mycobacterium tuberculosis
MQGPNVAAMGATGGTQLSFADLAHAQGAAWTPADEMSLRETTFVVVDLETTGGRTTGNDATPPDAITEIGAVKVCGGAVLGEFATLVNPQHSIPPQIVRLTGITTAMVGNAPTIDAVLPMFFEFAGDSVLVAHNAGFDIGFLRAAARRCDITWPQPQVLCTMRLARRVLSRDEAPSVRLAALARLFAVASNPTHRALDDARATVDVLHALIERVGNQGVHTYAELRSYLPNVTQAQRCKRVLAETLPHRPGVYLFRGPSGEVLYVGTAADLRRRVSQYFNGTDRRKRMTEMVMLASSIDHVECAHPLEAGVRELRMLSTHAPPYNRRSKFPYRWWWVALTDEAFPRLSVIRAPRHDRVVGPFRSRSKAAETAALLARCTGLRTCTTRLTRSARHGPACPELEVSACPAARDVTAAQYAEAVLRAAALIGGLDNAALAAAVQQVTELAERRRYESAARLRDHLATAIEALWHGQRLRALAALPELIAAKPDGPREGGYQLAVIRHGQLAAAGRAPRGVPPMPVVDAIRRGAQAILPTPAPLGGALVEEIALIARWLAEPGVRIVGVSNDAAGLASPVRSAGPWAAWAATARSAQLAGEQLSRGWQSDLPTEPHPSREQLFGRTGVDCRTGPPQPLLPGRQPFSTAG

SEQ ID NO: 64666 - protein, 370 aa, Mycobacterium tuberculosis [sequence omitted]

SEQ ID NO: 64667 - protein, 429 aa, Mycobacterium tuberculosis
MSRADDDAVGVPPTCGGRSDEEERRIVPGPNPQDGAKDGAKATAVPREPDEAALAAMSNQELLALGGKLDGVRIAYKEPRWPVEGTKAEKRAERSVAVWLLLGGVFGLALLLIFLFWPWEFKAADGESDFIYSLTTPLYGLTFGLSILSIAIGAVLYQKRFIPEEISIQERHDGASREIDRKTVVANLTDAFEGSTIRRRKLIGLSFGVGMGAFGLGTLVAFAGGLIKNPWKPVVPTAEGKKAVLWTSGWTPRYQGETIYLARATGTEDGPPFIKMRPEDMDAGGMETVFPWRESDGDGTTVESHHKLQEIAMGIRNPVMLIRIKPSDLGRVVKRKGQESFNFGEFFAFTKVCSHLGCPSSLYEQQSYRILCPCHQSQFDALHFAKPIFGPAARALAQLPITIDTDGYLVANGDFVEPVGPAFWERTTT

SEQ ID NO: 64668 - protein, 299 aa, Mycobacterium tuberculosis; identical to SEQ ID NO: 62347

SEQ ID NO: 64669 - protein, 363 aa, Mycobacterium tuberculosis
MTPRGPGRLQRLSQCRPQRGSGGPARGLRQLALAAMLGALAVTVSGCSWSEALGIGWPEGITPEAHLNRELWIGAVIASLAVGVIVWGLIFWSAVFHRKKNTDTELPRQFGYNMPLELVLTVIPFLIISVLFYFTVVVQEKMLQIAKDPEVVIDITSFQWNWKFGYQRVNFKDGTLTYDGADPERKRAMVSKPEGKDKYGEELVGPVRGLNTEDRTYLNFDKVETLGTSTEIPVLVLPSGKRIEFQMASADVIHAFWVPEFLFKRDVMPNPVANNSVNVFQIEEITKTGAFVGHCAEMCGTYHSMMNFEVRVVTPNDFKAYLQQRIDGKTNAEALRAINQPPLAVTTHPFDTRRGELAPQPVG

SEQ ID NO: 64670 - protein, 652 aa, Mycobacterium tuberculosis
MCGLLAFVAAPAGAAGPEGADAASAIARASHLMRHRGPDESGTWHAVDGASGGVVFGFNRLSIIDIAHSHQPLRWGPPEAPDRYVLVFNGEIYNYLELRDELRTQHGAVFATDGDGEAILAGYHHWGTEVLQRLRGMFAFALWDTVTRELFCARDPFGIKPLFIATGAGGTAVASEKKCLLDLVELVGFDTEIDHRALQHYTVLQYVPEPETLHRGVRRLESGCFARIRADQLAPVITRYFVPRFAASPITNDNDQARYDEITAVLEDSVAKHMRADVTVGAFLSGGIDSTAIAALAIRHNPRLITFTTGFEREGFSEIDVAVASAEAIGARHIAKVVSADEFVAALPEIVWYLDEPVADPALVPLFFVAREARKHVKVVLSGEGADELFGGYTIYREPLSLRPFDYLPKPLRRSMGKVSKPLPEGMRGKSLLHRGSLTLEERYYGNARSFSGAQLREVLPGFRPDWTHTDVTAPVYAESAGWDPVARMQHIDLFTWLRGDILVKADKITMANSLELRVPFLDPEVFAVASRLPAGAKITRTTTKYALRRALEPIVPAHVLHRPKLGFPVPIRHWLRAGELLEWAYATVGSSQAGHLVDIAAVYRMLDEHRCGSSDHSRRLWTMLIFMLWHAIFVEHSVVPQISEPQYPVQL

SEQ ID NO: 64671 - protein, 368 aa, Mycobacterium tuberculosis
MTSGSLQFTVLRAVNPATDAQRESMLREPGFGKYHTDHMVSIDYAEGRGWHNARVIPYGPIELDPSAIVLHYAQEVFEGLKAYRWADGSIVSFRADANAARLRSSARRLAIPELPDAVFIESLRQLIAVDKAWVPGAGGEEALYLRPFIFATEPGLGVRPATQYRYLLIASPAGAYFKGGIAPVSVWVSTEYVRACPGGTGAAKFGGNYAASLLAQAEAAENGCDQVVWLDAVERRYIEEMGGMNIFFVLGSGGSARLVTPELSGSLLPGITRDSLLQLAIDAGFAVEERRIDIDEWQKKAAAGEITEVFACGTAAVITPVARVRHGASEFRIADGQPGEVTMALRDTLTGIQRGTFADTHGWMARLG

SEQ ID NO: 64672 - protein, 379 aa, Mycobacterium tuberculosis; identical to SEQ ID NO: 62699

SEQ ID NO: 64673 - protein, 515 aa, Mycobacterium tuberculosis
MTTEPGYLSPSVAVATSMPKRGVGAAVLIVPVVSTGEEDRPGAVVASAEPFLRADTVAEIEAGLRALDATGASDQVHRLAVPSLPVGSVLTVGLGKPRREWPADTIRCAAGVAARALNSSEAVITTLAELPGDGICSATVEGLILGSYRFSAFRSDKTAPKDAGLRKITVLCCAKDAKKRALHGAAVATAVATARDLVNTPPSHLFPAEFAKRAKTLSESVGLDVEVIDEKALKKAGYGGVIGVGQGSSRPPRLVRLIHRGSRLAKNPQKAKKVALVGKGITFDTGGISIKPAASMHHMTSDMGGAAAVIATVTLAARLRLPIDVIATVPMAENMPSATAQRPGDVLTQYGGTTVEVLNTDAEGRLILADAIVRACEDKPDYLIETSTLTGAQTVALGTRIPGVMGSDEFRDRVAAISQRVGENGWPMPLPDDLKDDLKSTVADLANVSGQRFAGMLVAGVFLREFVAESVDWAHIDVAGPAYNTGSAWGYTPKGATGVPTRTMFAVLEDIAKNG

SEQ ID NO: 64674 - protein, 553 aa, Mycobacterium tuberculosis; identical to SEQ ID NO: 62751

SEQ ID NO: 64675 - protein, 301 aa, Mycobacterium tuberculosis
MANAVVAIAGSSGLIGSALTAALRAADHTVLRIVRRAPANSEELHWNPESGEFDPHALTDVDAVVNLCGVNIAQRRWSGAFKQSLRDSRITPTEVLSAAVADAGVATLINASAVGYYGNTKDRVVDENDSAGTGFLAQLCVDWETATRPAQQSGARVVLARTGVVLSPAGGMLRRMRPLFSVGLGARLGSGRQYMSWISLEDEVRALQFAIAQPNLSGPVNLTGPAPVTNAEFTTAFGRAVNRPTPLMLPSVAVRAAFGEFADEGLLIGQRAIPSALERAGFQFHHNTIGEALGYATTRPG

SEQ ID NO: 64676 - protein, 311 aa, Mycobacterium tuberculosis; identical to SEQ ID NO: 62754

SEQ ID NO: 64677 - protein, 250 aa, Mycobacterium tuberculosis
MAKPRNAAESKAAKAQANAARKAAARQRRAQLWQAFTLQRKEDKRLLPYMIGAFLLIVGASVGVGVWAGGFTMFTMIPLGVLLGALVAFVIFGRRAQRTVYRKAEGQTGAAAWALDNLRGKWRVTPGVAATGNLDAVHRVIGRPGVIFVGEGSAARVKPLLAQEKKRTARLVGDVPIYDIIVGNGDGEVPLAKLERHLTRLPANITVKQMDTVESRLAALGSRAGAGVMPKGPLPTTAKMRSVQRTVRRK

SEQ ID NO: 64678 - protein, 446 aa, Mycobacterium tuberculosis; identical to SEQ ID NO: 62694

SEQ ID NO: 64679 - protein, 281 aa, Mycobacterium tuberculosis; identical to SEQ ID NO: 62753

SEQ ID NO: 64680 - protein, 135 aa, Mycobacterium tuberculosis
MNSLFDGIGPLLADLRTAGVRLAVATSKAEPTARRILRHFGIEQHFEVIAGASTDGSRGSKVDVLAHALAQLRPLPERLVMVGDRSHDVDGAAAHGIDTVVVGWGYGRADFIDKTSTTVVTHAATIDELREALGV

SEQ ID NO: 64681 - protein, 163 aa, Mycobacterium tuberculosis
MSDPLHVTFVCTGNICRSPMAEKMFAQQLRHRGLGDAVRVTSAGTGNWHVGSCADERAAGVLRAHGYPTDHRAAQVGTEHLAADLLVALDRNHARLLRQLGVEAARVRMLRSFDPRSGTHALDVEDPYYGDHSDFEEVFAVIESALPGLHDWVDERLARNGPS

SEQ ID NO: 64682 - protein, 115 aa, Mycobacterium tuberculosis; identical to SEQ ID NO: 62355

SEQ ID NO: 64683 - protein, 416 aa, Mycobacterium tuberculosis; identical to SEQ ID NO: 62356

SEQ ID NO: 64684 - protein, 309 aa, Mycobacterium tuberculosis; identical to SEQ ID NO: 62635

SEQ ID NO: 64685 - protein, 312 aa, Mycobacterium tuberculosis; identical to SEQ ID NO: 64450

SEQ ID NO: 64686 - protein, 552 aa, Mycobacterium tuberculosis; identical to SEQ ID NO: 62470

SEQ ID NO: 64687 - protein, 542 aa, Mycobacterium tuberculosis; identical to SEQ ID NO: 62525

SEQ ID NO: 64688 - protein, 323 aa, Mycobacterium tuberculosis
MKYLDVDGIGQVSRIGLGTWQFGSREWGYGDRYATGAARDIVKRARALGVTLFDTAEIYGLGKSERILGEALGDDRTEVVVASKVFPVAPFPAVIKNRERASARRLQLNRIPLYQIHQPNPVVPDSVIMPGMRDLLDSGDIGAAGVSNYSLARWRKADAALGRPVVSNQVHFSLAHPDALEDLVPFAELENRIVIAYSPLAQGLLGGKYGLENRPGGVRALNPLFGTENLRRIEPLLATLRAIAVDVDAKPAQVALAWLISLPGVVAIPGASSVEQLEFNVAAADIELSAQSRDALTDAARAFRPVSTGRFLTDMVREKVSRR

SEQ ID NO: 64689 - protein, 647 aa, Mycobacterium tuberculosis; identical to SEQ ID NO: 62845

SEQ ID NO: 64690 - protein, 282 aa, Mycobacterium tuberculosis; identical to SEQ ID NO: 62842

SEQ ID NO: 64691 - protein, 537 aa, Mycobacterium tuberculosis
MNRTQLLTLIATGLGLFMIFLDALIVNVALPDIQRSFAVGEDGLQWVVASYSLGMAVFIMSAATLADLDGRRRWYLIGVSLFTLGSIACGLAPSIAVLTTARGAQGLGAAAVSVTSLALVSAAFPEAKEKARAIGIWTAIASIGTTTGPTLGGLLVDQWGWRSIFYVNLPMGALVLFLTLCYVEESCNERARRFDLSGQLLFIVAVGALVYAVIEGPQIGWTSVQTIVMLWTAAVGCALFVWLERRSSNPMMDLTLFRDTSYALAIATICTVFFAVYGMLLLTTQFLQNVRGYTPSVTGLMILPFSAAVAIVSPLVGHLVGRIGARVPILAGLCMLMLGLLMLIFSEHRSSALVLVGLGLCGSGVALCLTPITTVAMTAVPAERAGMASGIMSAQRAIGSTIGFAVLGSVLAAWLSATLEPHLERAVPDPVQRHVLAEIIIDSANPRAHVGGIVPRRHIEHRDPVAIAEEDFIEGIRVALLVATATLAVVFLAGWRWFPRDVHTAGSDLSERLPTAMTVECAVSHMPGATWCRLWPA

SEQ ID NO: 64692 - protein, 310 aa, Mycobacterium tuberculosis; identical to SEQ ID NO: 62704

SEQ ID NO: 64693 - protein, 229 aa, Mycobacterium tuberculosis; identical to SEQ ID NO: 62483

SEQ ID NO: 64694 - protein, 639 aa, Mycobacterium tuberculosis; identical to SEQ ID NO: 62843

SEQ ID NO: 64695 - protein, 660 aa, Mycobacterium tuberculosis
MRLVRLLGMVLTILAAGLLLGPPAGAQPPFRLSNYVTDNAGVLTSSGRTAVTAAVDRLYADRRIRLWVVYVENFSGQSALNWAQRTTRTSELGNYDALLAVATTGREYAFLVPSAMPGVSEGQVDNVRRYQIEPALHDGDYSGAAVAAANGLNRSPSSSSRVVLLVTVGIIVIVVAVLLVVMRHRNRRRRADELAAARRVDPTNVMALAAVPLQALDDLSRSMVVDVDNAVRTSTNELALAIEEFGERRTAPFTQAVNNAKAALSQAFTVRQQLDDNTPETPAQRRELLTRVIVSAAHADRELASQTEAFEKLRDLVINAPARLDLLTQQYVELTTRIGPTQQRLAELHTEFDAAAMTSIAGNVTTATERLAFADRNISAARDLADQAVSGRQAGLVDAVRAAESALGQARALLDAVDSAATDIRHAVASLPAVVADIQTGIKRANQHLQQAQQPQTGRTGDLIAARDAAARALDRARGAADPLTAFDQLTKVDADLDRLLATLAEEQATADRLNRSLEQALFTAESRVRAVSEYIDTRRGSIGPEARTRLAEAKRQLEAAHDRKSSNPTEAIAYANAASTLAAHAQSLANADVQSAQRAYTRRGGNNAGAILGGIIIGDLLSGGTRGGLGGWIPTSFGGSSNAPGSSPDGGFLGGGGRF

SEQ ID NO: 64696 - protein, 312 aa, Mycobacterium tuberculosis; identical to SEQ ID NO: 64450

SEQ ID NO: 64697 - protein, 463 aa, Mycobacterium tuberculosis
MHHPVAPVIDTVVNLAKRRGFVYPSGEIYGGTKSAWDYGPLGVELKENIKRQWWRSVVTGRDDVVGIDSSIILPREVWVASGHVDVFHDPLVESLITHKRYRADHLIEAYEAKHGHPPPNGLADIRDPETGEPGQWTQPREFNMMLKTYLGPIETEEGLHYLRPETAQGIFVNFANVVTTARKKPPFGIGQIGKSFRNEITPGNFIFRTREFEQMEMEFFVEPATAKEWHQYWIDNRLQWYIDLGIRRENLRLWEHPKDKLSHYSDRTVDIEYKFGFMGNPWGELEGVANRTDFDLSTHARHSGVDLSFYDQINDVRYTPYVIEPAAGLTRSFMAFLIDAYTEDEAPNTKGGMDKRTVLRLDPRLAPVKAAVLPLSRHADLSPKARDLGAELRKCWNIDFDDAGAIGRRYRRQDEVGTPFCVTVDFDSLQDNAVTVRERDAMTQDRVAMSSVADYLAVRLKGS

SEQ ID NO: 64698 - protein, 296 aa, Mycobacterium tuberculosis
MARDARKRTSSNFPQLPPAPDDYPTFPDTSTWPVVFPELPAAPYGGPCRPPQHTSKAAAPRIPADRLPNHVAIVMDGNGRWATQRGLARTEGHKMGEAVVIDIACGAIELGIKWLSLYAFSTENWKRSPEEVRFLMGFNRDVVRRRRDTLKKLGVRIRWVGSRPRLWRSVINELAVAEEMTKSNDVITINYCVNYGGRTEITEATREIAREVAAGRLNPERITESTIARHLQRPDIPDVDLFLRTSGEQRSSNFMLWQAAYAEYIFQDKLWPDYDRRDLWAACEEYASRTRRFGSA

SEQ ID NO: 64699 - protein, 300 aa, Mycobacterium tuberculosis
MTEFHSGFVCLVGRPNTGKSTLTNALVGAKVAITSTRPQTTRHAIRGIVHSDDFQIILVDTPGLHRPRTLLGKRLNDLVRETYAAVDVIGLCIPADEAIGPGDRWIVEQLRSTGPANTTLVVIVTKIDKVPKEKVVAQLVAVSELVTNAAEIVPVSAMTGDRVDLLIDVLAAALPAGPAYYPDGELTDEPEEVLMAELIREAALQGVRDELPHSLAVVIDEVSPREGRDDLIDVHAALYVERDSQKGIVIGKGGARLREVGTAARSQIENLLGTKVYLDLRVKVAKNWQRDPKQLGRLGF

SEQ ID NO: 64700 - protein, 435 aa, Mycobacterium tuberculosis; identical to SEQ ID NO: 62623

SEQ ID NO: 64701 - protein, 262 aa, Mycobacterium tuberculosis; identical to SEQ ID NO: 62620

SEQ ID NO: 64702 - protein, 1682 aa, Mycobacterium tuberculosis
MWFVQMADPSGALLNICVSYRITGDIDLARLRDAVNAVARRHRILRTTYPVGDDGVAQPTVHADLRPGWTQYDLTDLSQRAQRLRLEVLAQREFCAPFELSRDAPLRITVVRTAADEHVLLLVAHHIAWDDGSWRVFFTDLTQAYSRADLGADLGPEHRPSAASGPDTTEADLNYWRAIMADPPEPLELPGPAGTCVPTSWRAARATLRLPADTAARVATMAKNTGCTPYMVLLAAFGALVHRYTHSDDFLVAAPVLNRGAGTEDAIGYFGNTVAMRLRPQSAMSFRELLTATRDIASGAFAHQRINLDRVVRELNPDRRHGAERMTRVSFGFREPDGGGFNPPGIECERYDLRSNITQLPLGFMVEFDRAGVLVEAEHLVEILEPALAKQMLRHFGVLLDNALAAPDNTLSGLALMDERDAARLREVSRGERFDTPVKTLVDLVNEQTTRTPDATAVVYEGQHFTYHDLNEASNRLGHWLIEQGIGSEDRVAVLLDKSPDLIVTALGVVKSGAVYVPVDPSYPQDRLDFILADCDAKLVLRTPVRELAGYRSDDPTDADRIRPLRPDNTAYLIYTSGTTGLPKGVAVPHRPVAEYFVWFKGEYDVDDTDRLLQVASPSFDVSIAEIFGTLACGARMVIPRPGGLTDIGYLTALLRDEGITAMHFVPSLLGLFLSLPGVSQWRTLQRVPIGGEPLPGEVADKFHATFDALLHNFYGPTETVINASRFKVVGPQGTRIVPIGRPKINTTMHLLDDSLQPVPTGVIGEIYIGGTHVAYGYHRRAGLTAERFVADPFNPGSRMYRSGDLARRNADGDIEFVGRADEQVKIRGFRIELGDVAAAIAVDPTVGQAVVVVSDLPRLGKSLVGYVTPAAGGDGPADVGVDLDRIRARVAAALPEYMLPAAYVVLDEIPITAHGKIDRAALPEPQIASDTEFRAPQTATERRLAQLFGELLGRDRVGADDSFFDLGGHSLLATKLVAAVRNAFGVDVGVREIFEFATVTALAGHIDTLDSDSARPRLTRVDHDGPVRLSSSQMRSWFNYRFDGPNAVNNIPFAAALHGPCDTNAFAAAITDVVARHEILRTVYREIGGVPHQIIQPPAEVPVRCAAGSDAAWLRAELNNERGYVFDLETDWPIRAALLSTPEQTVLSLVVHHIAGDHWSAGVLFTDLLTAYRARSTGQRPSWAPLPVQYADYSVWQSALLDDGAGIVGPQRDYWIRQLGGLAGETGLRPDFPRPALLSGAGDAVEFRLGAAIRDKLAAVSRDLGVTEFMLLQAAVAVVLHKAGGGVDVPIGAPVAGRSEANLDQLIGFFINIVVLRNDLRGNPTLREVLQRTRQMALAAYAHQDLPFDQVVEAVNPQRSLSRNPLFDIVVHVREQMPQDHVIDTGPDGDTTLRVLEPTFDAAQADLSVNFFACGDEYRGHVIYRTELYERATAQRFADWLVRVVEAFADRPDQPLREVEMVSAQARRRILDRSNAGAGTARVYLLDDALKPVPVGVVGDVYYGGGPAVGARLARPSETATRFVADPFAAQPGSRLYRNGERGVWKADGQLELLAEIERLPTAQAAPVPAEPADTETERALAAILADVLEVGEVGRYDDFFNLGGDSILATQVAARARDGGIPLTARMVFEHPVLCELAAAVDAKPHVEAEPDDKHHAPMSTSGLSPDELSALTASWDQWP

SEQ ID NO: 64703 - protein, 565 aa, Mycobacterium tuberculosis
MPPKAADGRRPSPDGGLGGFVPFPADRAASYRAAGYWSGRTLDTVLSDAARRWPDRLAVADAGDRPGHGGLSYAELDQRADRAAAALHGLGITPGDRVLLQLPNGCQFAVALFALLRAGAIPVMCLPGHRAAELGHFAAVSAATGLVVADVASGFDYRPMARELVADHPTLRHVIVDGDPGPFVSWAQLCAQAGTGSPAPPADPGSPALLLVSGGTTGMPKLIPRTHDDYVFNATASAALCRLSADDVYLVVLAAGHNFPLACPGLLGAMTVGATAVFAPDPSPEAAFAAIERHGVTVTALVPALAKLWAQSCEWEPVTPKSLRLLQVGGSKLEPEDARRVRTALTPGLQQVFGMAEGLLNFTRIGDPPEVVEHTQGRPLCPADELRIVNADGEPVGPGEEGELLVRGPYTLNGYFAAERDNERCFDPDGFYRSGDLVRRRDDGNLVVTGRVKDVICRAGETIAASDLEEQLLSHPAIFSAAAVGLPDQYLGEKICAAVVFAGAPITLAELNGYLDRRGVAAHTRPDQLVAMPALPTTPIGKIDKRAIVRQLGIATGPVTTQRCH

SEQ ID NO: 64704 - protein, 643 aa, Mycobacterium tuberculosis
MSVWLRAGALVAAVMLSLSGCGGFHAGAPSTAGPCEIVPNGTPAPKTPPATVPSSRNLATNPEIATGYRRDMTVVRTAHYAAATANPLATQVACRVLRDGGTAADAVVAAQAVLGLVEPQSSGIGGGGYLVYFDARTGSVQAYDGREVAPAAATENYLRWVSDVDRSAPRPNARASGRSIGVPGILRMLEMVHNEHGRTPWRDLFGPAVTLADGGFDISARMGAAISDAAPQLRDDPEARKYFLNPDGSPKPAGTRLTNPAYSKTLSAIASAGANAFYSGDIAHDIVAAASDTSNGRTPGLLTIEDLAGYLAKRRQPLCTTYRGREICGMPSSGGVAVAATLGILEHFPMSDYAPSKVDLNGGRPTVMGVHLIAEAERLAYADRDQYIADVDFVRLPGGSLTTLVDPGYLAARAALISPQHSMGSARPGDFGAPTAVAPPVPEHGTSHLSVVDSYGNAATLTTTVESSFGSYHLVDGFILNNQLSDFSAEPHATDGSPVANRVEPGKRPRSSMAPTLVFDHSSAGRGALYAVLGSPGGSMIIQFVVKTLVAMLDWGLNPQQAVSLVDFGAANSPHTNLGGENPEINTSDDGDHDPLVQGLRALGHRVNLAEQSSGLSAITRSEAGWAGGADPRREGAVMGDDA

SEQ ID NO: 64705 - protein, 86 aa, Mycobacterium tuberculosis
MANIKSQQKRNRTNERARLRNKAVKSSLRTAVRAFREAAHAGDKAKAAELLASTNRKLDKAASKGVIHKNQAANKKSALAQALNKL

SEQ ID NO: 64706 - protein, 514 aa, Mycobacterium tuberculosis
MGFGASRLDVRLVPAALVSWIVTAAGIVWPIGNVCALCCVVVALGGGALWWCVARRSWHAPRLGSISAGLVAVGMVGAGYGLAVALRSEAVDRHPITVAFGTSALVTVTPSESPVSLGRGRLMFRATVQRLRDDETSGRVVVFARALDFGELMVGQPVQFRARISRPARHDLTVAVFNATGRPTVGRAGPVHRAAHIVRHRFAAAVREVLPADQATMLPALVLGDTSTVTALTSREFRAAGLTHLTAVSGANVTIVCAAALVSARLIGPRAAVVCAAVALVAFVILVQPTASVLRAAVMGAIALVGMLSARRRQAIPALSGSVLVLLAAAPHLAVDIGFALSVAATGALVVIAPVWSRRLVDRGCPKVLADALAVAAAAQLVTAPLVAAISGRVSLVAVVANLAVAAVIAPITVLGSVAAVLVVPWPAGAQVLIRFTGPEVWWVLRVAHWASGVPAATVPVAAGLPGVLLVGGATVFTVAQWRWRWFRAAMCKTMAVAVICLLAWSLSGLVGPS

SEQ ID NO: 64707 - protein, 415 aa, Mycobacterium tuberculosis; identical to SEQ ID NO: 62743

SEQ ID NO: 64708 - protein, 195 aa, Mycobacterium tuberculosis; identical to SEQ ID NO: 62742

SEQ ID NO: 64709 - protein, 479 aa, Mycobacterium tuberculosis
MPRFVDRVVIHTRAGSGGNGCASVHREKFKPLGGPDGGNGGRGGSIVFVVDPQVHTLLDFHFRPHLTAASGKHGMGNNRDGAAGADLEVKVPEGTVVLDENGRLLADLVGAGTRFEAAAGGRGGLGNAALASRVRKAPGFALLGEKGQSRDLTLELKTVADVGLVGFPSAGKSSLVSAISAAKPKIADYPFTTLVPNLGVVSAGEHAFTVADVPGLIPGASRGRGLGLDFLRHIERCAVLVHVVDCATAEPGRDPISDIDALETELACYTPTLQGDAALGDLAARPRAVVLNKIDVPEARELAEFVRDDIAQRGWPVFCVSTATRENLQPLIFGLSQMISDYNAARPVAVPRRPVIRPIPVDDSGFTVEPDGHGGFVVSGARPERWIDQTNFDNDEAVGYLADRLARLGVEEELLRLGARSGCAVTIGEMTFDWEPQTPAGEPVAMSGRGTDPRLDSNKRVGAAERKAARSRRREHGDG

SEQ ID NO: 64710 - protein, 86 aa, Mycobacterium tuberculosis; identical to SEQ ID NO: 62747

SEQ ID NO: 64711 - protein, 104 aa, Mycobacterium tuberculosis; identical to SEQ ID NO: 62746

SEQ ID NO: 64712 - protein, 491 aa, Mycobacterium tuberculosis; identical to SEQ ID NO: 62405

SEQ ID NO: 64713 - protein, 953 aa, Mycobacterium tuberculosis
MIDGAPPSDPPEPSQHEELPDRLRVHSLARTLGTTSRRVLDALTALDGRVRSAHSTVDRVDAVRVRDLLATHLETAGVLAASVHAPEASEEPESRLMLETQETRNADVERPHYMPLFVAPQPIPEPLADDEDVDDGPDYVADDSDADDEGQLDRPANRRRRRGRRGRGRGRGEQGGSDGDPVDQQSEPRAQQFTSADAAETDDGDDRDSEDTEAGDNGEDENGSLEAGNRRRRRRRRRKSASGDDNDAALEGPLPDDPPNTVVHERVPRAGDKAGNSQDGGSGSTEIKGIDGSTRLEAKRQRRRDGRDAGRRRPPVLSEAEFLARREAVERVMVVRDRVRTEPPLPGTRYTQIAVLEDGIVVEHFVTSAASASLVGNIYLGIVQNVLPSMEAAFVDIGRGRNGVLYAGEVNWDAAGLGGADRKIEQALKPGDYVVVQVSKDPVGHKGARLTTQVSLAGRFLVYVPGASSTGISRKLPDTERQRLKEILREVVPSDAGVIIRTASEGVKEDDIRADVARLRERWEQIEAKAQETKEKAAGAAVALYEEPDVLVKVIRDLFNEDFVGLIVSGDEAWNTINEYVNSVAPELVSKLTKYESADGPDGQSAPDVFTVHRIDEQLAKAMDRKVWLPSGGTLVIDRTEAMTVIDVNTGKFTGAGGNLEQTVTKNNLEAAEEIVRQLRLRDIGGIVVIDFIDMVLESNRDLVLRRLTESLARDRTRHQVSEVTSLGLVQLTRKRLGTGLIEAFSTSCPNCSGRGILLHADPVDSAAATGRKSEPGARRGKRSKKSRSEESSDRSMVAKVPVHAPGEHPMFKAMAAGLSSLAGRGDEESGEPAAELAEQAGDQPPTDLDDTAQADFEDTEDTDEDEDELDADEDLEDLDDEDLDEDLDVEDSDSDDEDSDEDAADADVDEEDAAGLDGSPGEVDVPGVTELAPTRPRRRVAGRPAGPPIRLD

SEQ ID NO: 64714 - protein, 876 aa, Mycobacterium tuberculosis; identical to SEQ ID NO: 62407

SEQ ID NO: 64715 - protein, 373 aa, Mycobacterium tuberculosis; identical to SEQ ID NO: 62402

SEQ ID NO: 64716 - protein, 418 aa, Mycobacterium tuberculosis; identical to SEQ ID NO: 62403

SEQ ID NO: 64717 - protein, 426 aa, Mycobacterium tuberculosis; identical to SEQ ID NO: 62404

SEQ ID NO: 64718 - protein, 162 aa, Mycobacterium tuberculosis
MSGMRVYLGADHAGYELKQRIIEHLKQTGHEPIDCGALRYDADDDYPAFCIAAATRTVADPGSLGIVLGGSGNGEQIAANKVPGARCALAWSVQTAALAREHNNAQLIGIGGRMHTVAEALAIVDAFVTTPWSKAQRHQRRIDILAEYERTHEAPPVPGAPA

SEQ ID NO: 64719 - protein, 861 aa, Mycobacterium tuberculosis
MALPNLTRDQAVERAALITVDSYQIILDVTDGNGAPGERTFRSTTTVVFDALPGADTVIDISAHTVRRASLNDQDLDVSGYDEAAGIPLRGLAQRNVVVVDADCHYSNTGEGLHRFVDPVDGETYLYSQFETADAKRMFACFDQPDLKATFDVRVTAPAHWKVISNGAPLAAANGVHTFATTPRMSTYLVALIAGPYAAWTDTYIDDHGEIPLGIYCRASLAEYMDAERLFTQTKQGFGFYHKHFGLPYAFGKYDQLFVPEFNAGAMENAGAVTFLEDYVFRSKVTRASYERRAETVLHEMAHMWFGDLVTMTWWDDLWLNESFATFASVLCQSEATEFTEAWTTFATVEKSWAYRQDQLPSTHPIAADIPDLAAVEVNFDGITYAKGASVLKQLVAYVGLERFLAGLRDYFRTHAFGNASFDDLLAALEKASGRDLSNWGEQWLKTTGLNTLRPDFEVDAEGRFTRFAVTQSGAAPGAGETRVHRLAVGIYDDDGSKSSGKLVRVHREELDVSGPITNVPALVGVSRGKLILVNDDDLTYCSLRLDERSLQTALDRIADIAEPLPRTLVWSAAWEMTREAELRARDFVSLVSGGVHAETEVGVAQRLLLQAQTALGCYAEPGWARERGWPQFADRLLELAREAEPGSDHQLAYINSLCSSVLSPRHVQTLGALLEGEPAACGLAGLAVDTDLRWRIVTALATAGAIDADGPETPRIDAEVQRDPTAAGKRHAAQARAARPQFVVKDEAFTTVVEDDTLANATGRAMIAGIAAPGQGELLKPFARRYFQAIPGVWARRSSEVAQSVVIGLYPHWDISEQGITAAEEFLSDPEVPPALRRLVLEGQAAVQRSLRARNFDADG

SEQ ID NO: 64720 - protein, 128 aa, Mycobacterium tuberculosis
MPKSFYDAVGGAKTFDAIVSRFYAQVAEDEVLRRVYPEDDLAGAEERLRMFLEQYWGGPRTYSEQRGHPRLRMRHAPFRISLIERDAWLRCMHTAVASIDSETLDDEHRRELLDYLEMAAHSLVNSPF

SEQ ID NO: 64721 - protein, 546 aa, Mycobacterium tuberculosis
MDQHQRPDPMGPGSPRASARRPEPDPMGEPWWSRAVFYQVYPRSFADSNGDGVGDLDGLASRLDHLQQLGVDAIWINPVTVSPMADHGYDVADPRDIDPLFGGMPAFERLVAAAHRQGIKVTMDVVPNHTSSAHPWFQAALADLPGSPARDRYFFRDGRGPDGSLPPNNWESVFGGPAWTRVREPDGNPGQWYLHLFDTEQPDLNWDNPEILDDFEKTLRFWLDRGVDGFRIDVAHGMAKPPGLPDSPDLGIEVLHHRDDDPRFNHPNVHAIHRDIRTVIDEYPGAVTVGEVWVHDNARWAEYLRPDELHLGFNFRLARTEFDAAEIRDAVANSLAAAALQNATPTWTLANHDVGREVSRYGGGEIGLRRAKAMAVVMLALPGVVFLYNGQELGLPDVDLPDEVLQDPTWERSGRTERGRDGCRVPIPWSGNIPPFGFSTCPDTWLPMPPEWAALTAEKQRADAGSTLSFFRLALRLRRERNEFDGDVDWLAAPDDALIFRRHGGGLVCALNAAERPLALPAGEPILASAPLTDATLPPNAAAWLV

SEQ ID NO: 64722 - protein, 138 aa, Mycobacterium tuberculosis; identical to SEQ ID NO: 62476

SEQ ID NO: 64723 - protein, 1624 aa, Mycobacterium tuberculosis
MTIDPGAKQDVEAWTTFTASADIPDWISKAYIDSYRGPRDDSSEATKAAEASWLPASLLTPAMLGAHYRLGRHRAAGESCVAVYRADDPAGFGPALQVVAEHGGMLMDSVTVLLHRLGIAYAAILTPVFDVHRSPTGELLRIEPKAEGTSPHLGEAWMHVALSPAVDHKGLAEVERLLPKVLADVQRVATDATALIATLSELAGEVESNAGGRFSAPDRQDVGELLRWLGDGNFLLLGYQRCRVADGMVYGEGSSGMGVLRGRTGSRPRLTDDDKLLVLAQARVGSYLRYGAYPYAIAVREYVDGSVVEHRFVGLFSVAAMNADVLEIPTISRRVREALAMAESDPSHPGQLLLDVIQTVPRPELFTLSAQRLLTMARAVVDLGSQRQALLFLRADRLQYFVSCLVYMPRDRYTTAVRMQFEDILVREFGGTRLEFTARVSESPWALMHFMVRLPEVGVAGEGAAAPPVDVSEANRIRIQGLLTEAARTWADRLIGAAAAAGSVGQADAMHYAAAFSEAYKQAVTPADAIGDIAVITELTDDSVKLVFSERDEQGVAQLTWFLGGRTASLSQLLPMLQSMGVVVLEERPFSVTRPDGLPVWIYQFKISPHPTIPLAPTVAERAATAHRFAEAVTAIWHGRVEIDRFNELVMRAGLTWQQVVLLRAYAKYLRQAGFPYSQSYIESVLNEHPATVRSLVDLFEALFVPVPSGSASNRDAQAAAAAVAADIDALVSLDTDRILRAFASLVQATLRTNYFVTRQGSARCRDVLALKLNAQLIDELPLPRPRYEIFVYSPRVEGVHLRFGPVARGGLRWSDRRDDFRTEILGLVKAQAVKNAVIVPVGAKGGFVVKRPPLPTGDPAADRDATRAEGVACYQLFISGLLDVTDNVDHATASVNPPPEVVRRDGDDAYLVVAADKGTATFSDIANDVAKSYGFWLGDAFASGGSVGYDHKAMGITARGAWEAVKRHFREIGIDTQTQDFTVVGIGDMSGDVFGNGMLLSKHIRLIAAFDHRHIFLDPNPDAAVSWAERRRMFELPRSSWSDYDRSLISEGGGVYSREQKAIPLSAQVRAVLGIDGSVDGGAAEMAPPNLIRAILRAPVDLLFNGGIGTYIKAESESDADVGDRANDPVRVNANQVRAKVIGEGGNLGVTALGRVEFDLSGGRINTDALDNSAGVDCSDHEVNIKILIDSLVSAGTVKADERTQLLESMTDEVAQLVLADNEDQNDLMGTSRANAASLLPVHAMQIKYLVAERGVNRELEALPSEKEIARRSEAGIGLTSPELATLMAHVKLGLKEEVLATELPDQDVFASRLPRYFPTALRERFTPEIRSHQLRREIVTTMLINDLVDTAGITYAFRIAEDVGVTPIDAVRTYVATDAIFGVGHIWRRIRAANLPIALSDRLTLDTRRLIDRAGRWLLNYRPQPLAVGAEINRFAAMVKALTPRMSEWLRGDDKAIVEKTAAEFASQGVPEDLAYRVSTGLYRYSLLDIIDIADIADIDAAEVADTYFALMDRLGTDGLLTAVSQLPRHDRWHSLARLAIRDDIYGALRSLCFDVLAVGEPGESSEQKIAEWEHLSASRVARARRTLDDIRASGQKDLATLSVAARQIRRMTRTSGRGISG

SEQ ID NO: 64724 - protein, 558 aa, Mycobacterium tuberculosis; identical to SEQ ID NO: 62473

SEQ ID NO: 64725 - protein, 346 aa, Mycobacterium tuberculosis; identical to SEQ ID NO: 64662

SEQ ID NO: 64726 - protein, 694 aa, Mycobacterium tuberculosis
MSLVIATPQLLATAALDLASIGSQVSAANAAAAMPTTEVVAAAADEVSAAIAGLFGAHARQYQALSVQVAAFHEQFVQALTAAAGRYASTEAAVERSLLGAVNAPTEALLGRPLIGNGADGTAPGQPGAAGGLLFGNGGNGAAGGFGQTGGSGGAAGLIGNGGNGGAGGTGAAGGAGGNGGWLWGNGGNGGVGGTSVAAGIGGAGGNGGNAGLFGHGGAGGTGGAGLAGANGVNPTPGPAASTGDSPADVSGIGDQTGGDGGTGGHGTAGTPTGGTGGDGATATAGSGKATGGAGGDGGTAAAGGGGGNGGDGGVAQGDIASAFGGDGGNGSDGVAAGSGGGSGGAGGGAFVHIATATSTGGSGGFGGNGAASAASGADGGAGGAGGNGGAGGLLFGDGGNGGAGGAGGIGGDGATGGPGGSGGNAGIARFDSPDPEAEPDVVGGKGGDGGKGGSGLGVGGAGGTGGAGGNGGAGGLLFGNGGNGGNAGAGGDGGAGVAGGVGGNGGGGGTATFHEDPVAGVWAVGGVGGDGGSGGSSLGVGGVGGAGGVGGKGGASGMLIGNGGNGGSGGVGGAGGVGGAGGDGGNGGSGGNASTFGDENSIGGAGGTGGNGGNGANGGNGGAGGIAGGAGGSGGFLSGAAGVSGADGIGGAGGAGGAGGAGGSGGEAGAGGLTNGPGSPGVSGTEGMAGAPG

SEQ ID NO: 64727 - protein, 348 aa, Mycobacterium tuberculosis
MTQIADRPARPDETLAVAVSDITQSLTMVQAINRALYDAMAADERVLVFGEDVAVEGGVFRVTEGLADTFGADRCFDTPLAESAIIGIAVGLALRGFVPVPEIQFDGFSYPAFDQVVSHLAKYRTRTRGEVDMPVTVRIPSFGGIGAAEHHSDSTESYWVHTAGLKVVVPSTPGDAYWLLRHAIACPDPVMYLEPKRRYHGRGMVDTSRPEPPIGHAMVRRSGTDVTVVTYGNLVSTALSSADTAEQQHDWSLEVIDLRSLAPLDFDTIAASIQRTGRCVVMHEGPRSLGYGAGLAARIQEEMFYQLEAPVLRACGFDTPYPPARLEKLWLPGPDRLLDCVERVLRQP

SEQ ID NO: 64728 - protein, 367 aa, Mycobacterium tuberculosis
MGEGSRRPSGMLMSVDLEPVQLVGPDGTPTAERRYHRDLPEETLRWLYEMMVVTRELDTEFVNLQRQGELALYTPCRGQEAAQVGAAACLRKTDWLFPQYRELGVYLVRGIPPGHVGVAWRGTWHGGLQFTTKCCAPMSVPIGTQTLHAVGAAMAAQRLDEDSVTVAFLGDGATSEGDVHEALNFAAVFTTPCVFYVQNNQWAISMPVSRQTAAPSIAHKAIGYGMPGIRVDGNDVLACYAVMAEAAARARAGDGPTLIEAVTYRLGPHTTADDPTRYRSQEEVDRWATLDPIPRYRTYLQDQGLWSQRLEEQVTARAKHVRSELRDAVFDAPDFDVDEVFTTVYAEITPGLQAQREQLRAELARTD

SEQ ID NO: 64729 - protein, 273 aa, Mycobacterium tuberculosis; identical to SEQ ID NO: 62419

SEQ ID NO: 64730 - protein, 654 aa, Mycobacterium tuberculosis; identical to SEQ ID NO: 62420

SEQ ID NO: 64731 - protein, 529 aa, Mycobacterium tuberculosis
MTTPSIAIAPSFADEHRRLVAELNNKLAAAALGGNERARKRHVSRGKLLPRERVDRLLDPGSPFLELAPLAAGGMYGDESPGAGIITGIGRVSGRQCVIVANDATVKGGTYYPMTVKKHLRAQEVALQNMLPCIYLVDSGGAFLPRQDEVFPDREHFGRIFYNQATMSAKGIPQVAAVLGSCTAGGAYVPAMSDEAVIVREQGTIFLGGPPLVKAATGEIVSAEELGGGDLHSRTSGVTDHLADDDEDALRIVRAIADTFGPCEPAQWDVRRSVEPKYPQAELYDVVPPDPRVPYDVHEVVVRIVDGSEFSEFKAKYGKTLVTAFARVHGHPVGIVANNGVLFSESALKGAHFIELCDKRKIPLLFLQNIAGFMVGRDYEAGGIAKHGAKMVTAVACARVPKLTVVIGGSYGAGNYSMCGRAYSPRFLWMWPNARISVMGGEQAASVLATVRGEQLSAAGTPWSPDEEEAFKAPIRAQYEDQGNPYYSTARLWDDGIIDPADTRTVVGLALSLCAHAPLDQVGYGVFRM

SEQ ID NO: 64732 - protein, 547 aa, Mycobacterium tuberculosis; identical to SEQ ID NO: 62422

SEQ ID NO: 64733 - protein, 130 aa, Mycobacterium tuberculosis; identical to SEQ ID NO: 62453

SEQ ID NO: 64734 - protein, 156 aa, Mycobacterium tuberculosis
MSDRKPVRGRHQARKRAVALLFEAEVRGISAAEVVDTRAALAEAKPDIARLHPYTAAVARGVSEHAAHIDDLITAHLRGWTLDRLPAVDRAILRVSVWELLHAADVPEPVVVDEAVQLAKELSTDDSPGFVNGVLGQVMLVTPQLRAAAQAVRGGA

SEQ ID NO: 64735 - protein, 401 aa, Mycobacterium tuberculosis
MLRWITAGESHGRALVAVVEGMVAGVHVTSADIADQLARRRLGYGRGARMTFERDAVTVLSGIRHGSTLGGPIAIEIGNTEWPKWETVMAADPVDPAELADVARNAPLTRPRPGHADYAGMLKYGFDDARPVLERASARETAARVAAGTVARAFLRQALGVEVLSHVISIGASAPYEGPPPRAEDLPAIDASPVRAYDKAAEADMIAQIEAAKKDGDTLGGVVEAVALGLPVGLGSFTSGDHRLDSQLAAAVMGIQAIKGVEIGDGFQTARRRGSRAHDEMYPGPDGVVRSTNRAGGLEGGMTNGQPLRVRAAMKPISTVPRALATVDLATGDEAVAIHQRSDVCAVPAAGVVVETMVALVLARAALEKFGGDSLAETQRNIAAYQRSVADREAPAARVSG

SEQ ID NO: 64736 - protein, 139 aa, Mycobacterium tuberculosis; identical to SEQ ID NO: 62389

SEQ ID NO: 64737 - protein, 269 aa, Mycobacterium tuberculosis
MSEGPKKAGVLGSPIAHSRSPQLHLAAYRALGLHDWTYERIECGAAELPVVVGGFGPEWVGVSVTMPGKFAALRFADERTARADLVGSANTLVRTPHGWRADNTDIDGVAGALGAAAGHALVLGSGGTAPAAVVGLAELGVTDITVVARNSDKAARLVDLGTRVGVATRFCAFDSGGLADAVAAAEVLVSTIPAEVAAGYAGTLAAIPVLLDAIYDPWPTPLAAAVGSAGGRVISGLQMLLHQAFAQVEQFTGLPAPREAMTCALAALD

SEQ ID NO: 64738 - protein, 170 aa, Mycobacterium tuberculosis; identical to SEQ ID NO: 62387

SEQ ID NO: 64739 - protein, 904 aa, Mycobacterium tuberculosis
MQTHEIRKRFLDHFVKAGHTEVPSASVILDDPNLLFVNAGMVQFVPFFLGQRTPPYPTATSIQKCIRTPDIDEVGITTRHNTFFQMAGNFSFGDYFKRGAIELAWALLTNSLAAGGYGLDPERIWTTVYFDDDEAVRLWQEVAGLPAERIQRRGMADNYWSMGIPGPCGPSSEIYYDRGPEFGPAGGPIVSEDRYLEVWNLVFMQNERGEGTTKEDYQILGPLPRKNIDTGMGVERIALVLQDVHNVYETDLLRPVIDTVARVAARAYDVGNHEDDVRYRIIADHSRTAAILIGDGVSPGNDGRGYVLRRLLRRVIRSAKLLGIDAAIVGDLMATVRNAMGPSYPELVADFERISRIAVAEETAFNRTLASGSRLFEEVASSTKKSGATVLSGSDAFTLHDTYGFPIELTLEMAAETGLQVDEIGFRELMAEQRRRAKADAAARKHAHADLSAYRELVDAGATEFTGFDELRSQARILGIFVDGKRVPVVAHGVAGGAGEGQRVELVLDRTPLYAESGGQIADEGTISGTGSSEAARAAVTDVQKIAKTLWVHRVNVESGEFVEGDTVIAAVDPGWRRGATQGHSGTHMVHAALRQVLGPNAVQAGSLNRPGYLRFDFNWQGPLTDDQRTQVEEVTNEAVQADFEVRTFTEQLDKAKAMGAIALFGESYPDEVRVVEMGGPFSLELCGGTHVSNTAQIGPVTILGESSIGSGVRRVEAYVGLDSFRHLAKERALMAGLASSLKVPSEEVPARVANLVERLRAAEKELERVRMASARAAATNAAAGAQRIGNVRLVAQRMSGGMTAADLRSLIGDIRGKLGSEPAVVALIAEGESQTVPYAVAANPAAQDLGIRANDLVKQLAVAVEGRGGGKADLAQGSGKNPTGIDAALDAVRSEIAVIARVG

SEQ ID NO: 64740 - protein, 452 aa, Mycobacterium tuberculosis
MPEAVSDGLFDVPGVPMTSGHDLGASAGAPLAVRMRPASLDEVVGQDHLLAPGSPLRRLVEGSGVASVILYGPPGSGKTTLAALISQATGRRFEALSALSAGVKEVRAVIENSRKALLHGEQTVLFIDEVHRFSKTQQDALLSAVEHRVVLLVAATTENPSFSVVAPLLSRSLILQLRPLTAEDTRAVVQRAIDDPRGLGRAVAVAPEAVDLLVQLAAGDARRALTALEVAAEAAQAAGELVSVQTIERSVDKAAVRYDRDGDQHYDVVSAFIKSVRGSDVDAALHYLARMLVAGEDPRFIARRLMILASEDIGMAGPSALQVAVAAAQTVALIGMPEAQLTLAHATIHLATAPKSNAVTTALAAAMNDIKAGKAGLVPAHLRDGHYSGAAALGNAQGYKYSHDDPDGVVAQQYPPDELVDVDYYRPTGRGGEREIAGRLDRLRAIIRKKRG

SEQ ID NO: 64741 - protein, 349 aa, Mycobacterium tuberculosis
MLFAALRDVQWRKRRLVIAIVSTGLVFAMTLVLTGLVNGFRVEAERTVDSMGVDAFVVKAGAAGPFLGSTPFAQIDLPQVARAPGVLAAAPLATAPSTIRQGTSARNVTAFGAPEHGPGMPRVSDGRAPSTPDEVAVSSTLGRNLGDDLQVGARTLRIVGIVPESTALAKIPNIFLTTEGLQQLAYNGQPTISSIGIDGMPRQLPDGYQTVNRADAVSDLMRPLKVAVDAITVVAVLLWIVAALIVGSVVYLSALERLRDFAVFKAIGVPTRSILAGLALQAVVVALLAAVVGGILSLLLAPLFPMTVVVPLSAFVALPAIATVIGLLASVAGLRRVVAIDPALAFGGP

SEQ ID NO: 64742 - protein, 884 aa, Mycobacterium tuberculosis
MAPSASAATNGYDVDRLLAGYRTARAQETLFDLRDGPGAGYDEFVDDDGNVRPTWTELADAVAERGKAGLDRLRSVVHSLIDHDGITYTAIDAHRDALTGDHDLEPGPWRLDPLPLVISAADWEVLEAGLVQRSRLLDAILADLYGPRSMLTEGVLPPEMLFAHPGYVRAANGIQMPGRHQLFMHACDLSRLPDGTFQVNADWTQAPSGSGYAMADRRVVAHAVPDLYEELAPRPTTPFAQALRLALIDAAPDVAQDPVVVVLSPGIYSETAFDQAYLATLLGFPLVESADLVVRDGKLWMRSLGTLKRVDVVLRRVDAHYADPLDLRADSRLGVVGLVEAQHRGTVTVVNTLGSGILENPGLLRFLPQLSERLLDESPLLHTAPVYWGGIASERSHLLANVSSLLIKSTVSGETLVGPTLSSAQLADLAVRIEAMPWQWVGQELPQFSSAPTNHAGVLSSAGVGMRLFTVAQRSGYAPMIGGLGYVLAPGPAAYTLKTVAAKDIWVRPTERAHAEVITVPVLAPPAKTGAGTWAVSSPRVLSDLFWMGRYGERAENMARLLIVTRERYHVFRHQQDTDESECVPVLMAALGKITGYDTATGAGSAYDRADMIAVAPSTLWSLTVDPDRPGSLVQSVEGLALAAQAVRDQLSNDTWMVLANVERAVEHKSDPPQSLAEADAVLASAQAETLAGMLTLSGVAGESMVHDVGWTMMDIGKRIERGLWLTALLQATLSTVRHPAAEQAIIEATLVACESSVIYRRRTVGKFSVAAVTELMLFDAQNPRSLVYQLERLRADLKDLPGSSGSSRPERMVDEMNTRLRRSHPEELEEVSADGLRAELAELLAGIHASLRDVADVLTATQLALPGGMQPLWGPDQRRVMPA

SEQ ID NO: 64743 - protein, 355 aa, Mycobacterium tuberculosis; identical to SEQ ID NO: 62724

SEQ ID NO: 64744 - protein, 596 aa, Mycobacterium tuberculosis
MFVLRSHAAGLLREGDAGQQVTLAGWVARRRDHGGVIFIDLRDASGIAQVVFRDPQDTEVLAQAHRLRAEFCVSVAGVVEIRPEGNANPEIATGEIEVNATSLTVLGECAPLPFQLDEPAGEELRLKYRYLDLRRDDPAAAIRLRSRVNAAARAVLARHDFVEIETPTITRSTPEGARDFLVPARLHPGSFYALPQSPQLFKQLLMVAGMERYYQIARCYRDEDFRADRQPEFTQLDMEMSFVDAEDIIAISEEVLTELWALIGYRIPTPIPRIGYAEAMRRFGTDKPDLRFGLELVECTDFFSDTTFRVFQAPYVGAVVMPGGASQPRRTLDGWQDWAKQRGHRGLAYVLVAEDGTLGGPVAKNLTEAERTGLADHVGAKPGDCIFFSAGPVKSSRALLGAARVEIANRLGLIDPDAWAFVWVVDPPLFEPADEATAAGEVAVGSGAWTAVHHAFTAPKPEWEDRIESDTGSVLADAYDIVCNGHEIGGGSVRIHRRDIQERVFAVMGLDKAEAEEKFGFLLEAFMFGAPPHGGIAFGWDRTTALLAGMDSIREVIAFPKTGGGVDPLTDAPAPITAQQRKESGIDAQPKRVQQA

SEQ ID NO: 64745 - protein, 423 aa, Mycobacterium tuberculosis; identical to SEQ ID NO: 62482

SEQ ID NO: 64746 - protein, 790 aa, Mycobacterium tuberculosis
MAEDQLTAQAVAPPTEASAALEPALETPESPVETLKTSISASRRVRARLARRMTAQRSTTNPVLEPLVAVHREIYPKADLSILQRAYEVADQRHASQLRQSGDPYITHPLAVANILAELGMDTTTLVAALLHDTVEDTGYTLEALTEEFGEEVGHLVDGVTKLDRVVLGSAAEGETIRKMITAMARDPRVLVIKVADRLHNMRTMRFLPPEKQARKARETLEVIAPLAHRLGMASVKWELEDLSFAILHPKKYEEIVRLVAGRAPSRDTYLAKVRAEIVNTLTASKIKATVEGRPKHYWSIYQKMIVKGRDFDDIHDLVGVRILCDEIRDCYAAVGVVHSLWQPMAGRFKDYIAQPRYGVYQSLHTTVVGPEGKPLEVQIRTRDMHRTAEYGIAAHWRYKEAKGRNGVLHPHAAAEIDDMAWMRQLLDWQREAADPGEFLESLRYDLAVQEIFVFTPKGDVITLPTGSTPVDFAYAVHTEVGHRCIGARVNGRLVALERKLENGEVVEVFTSKAPNAGPSRDWQQFVVSPRAKTKIRQWFAKERREEALETGKDAMAREVRRGGLPLQRLVNGESMAAVARELHYADVSALYTAIGEGHVSAKHVVQRLLAELGGIDQAEEELAERSTPATMPRRPRSTDDVGVSVPGAPGVLTKLAKCCTPVPGDVIMGFVTRGGGVSVHRTDCTNAASLQQQAERIIEVLWAPSPSSVFLVAIQVEALDRHRLLSDVTRALADEKVNILSASVTTSGDRVAISRFTFEMGDPKHLGHLLNAVRNVEGVYDVYRVTSAA

SEQ ID NO: 64747 - protein, 198 aa, Mycobacterium tuberculosis; identical to SEQ ID NO: 62362

SEQ ID NO: 64748 - protein, 299 aa, Mycobacterium tuberculosis
MDPAGNPATGTARVKRGMAEMLKGGVIMDVVTPEQARIAEGAGAVAVMALERVPADIRAQGGVSRMSDPDMIEGIIAAVTIPVMAKVRIGHFVEAQILQTLGVDYIDESEVLTPADYAHHIDKWNFTVPFVCGATNLGEALRRISEGAAMIRSKGEAGTGDVSNATTHMRAIGGEIRRLTSMSEDELFVAAKELQAPYELVAEVARAGKLPVTLFTAGGIATPADAAMMMQLGAEGVFVGSGIFKSGAPEHRAAAIVKATTFFDDPDVLAKVSRGLGEAMVGINVDEIAVGHRLAQRGW

SEQ ID NO: 64749 - protein, 692 aa, Mycobacterium tuberculosis
MSAPAQPAPGVDGGDPSQARIRVPAGTTAATAVGEAGLPRRGTPDAIVVVRDADGNLRDLSWVPDVDTDITPVAANTDDGRSVIRHSTAHVLAQAVQELFPQAKLGIGPPITDGFYYDFDVPEPFTPEDLAALEKRMRQIVKEGQLFDRRVYESTEQARAELANEPYKLELVDDKSGDAEIMEVGGDELTAYDNLNPRTRERVWGDLCRGPHIPTTKHIPAFKLTRSSAAYWRGDQKNASLQRIYGTAWESQEALDRHLEFIEEAQRRDHRKLGVELDLFSFPDEIGSGLAVFHPKGGIVRRELEDYSRRKHTEAGYQFVNSPHITKAQLFHTSGHLDWYADGMFPPMHIDAEYNADGSLRKPGQDYYLKPMNCPMHCLIFRARGRSYRELPLRLFEFGTVYRYEKSGVVHGLTRVRGLTMDDAHIFCTRDQMRDELRSLLRFVLDLLADYGLTDFYLELSTKDPEKFVGAEEVWEEATTVLAEVGAESGLELVPDPGGAAFYGPKISVQVKDALGRTWQMSTIQLDFNFPERFGLEYTAADGTRHRPVMIHRALFGSIERFFGILTEHYAGAFPAWLAPVQVVGIPVADEHVAYLEEVATQLKSHGVRAEVDASDDRMAKKIVHHTNHKVPFMVLAGDRDVAAGAVSFRFGDRTQINGVARDDAVAAIVAWIADRENAVPTAELVKVAGRE

SEQ ID NO: 64750 - protein, 461 aa, Mycobacterium tuberculosis
MSFVNVAPQLVSTAAADAARIGSAINTANTAAAATTQVLAAAQDEVSTAIAALFGSHGQHYQAISAQVAAYQQRFVLALSQAGSTYAVAEAASATPLQNVLDAINAPVQSLTGRPLIGDGANGIDGTGQAGGNGGWLWGNGGNGGSGAPGQAGGAGGAAGLIGNGGAGGAGGQGLPFEAGANGGAGGAGGWLFGNGGAGGNGGIGGAGTNLAIGGHGGNGGNAGLIGAGGTGGAGGTGGGEPSAGASGGNGGNGGNGGLLIGNSGDGGAAGNGAGISQNGPASGFGGNGGHAGTTGLIGNGGNGGAGGAGGDVSADFGGVGFGGQGGNGGAGGLLYGNGGAGGNGGAAGSPGSVTAFGGNGGSGGSGGNGGNALIGNAGAGGSAGAGGNGASAGTAGGSGGDGGKGGNGGSVGLIGNGGNGGNGGAGSLFNGAPGFGGPGGSGGASLLGPPGLAGTNGADG

SEQ ID NO: 64751 - protein, 778 aa, Mycobacterium tuberculosis
MSFVIAVPEALTMAASDLANIGSTINAANAAAALPTTGVVAAAADEVSAAVAALFGSYAQSYQAFGAQLSAFHAQFVQSLTNGARSYVVAEATSAAPLQDLLGVVNAPAQALLGRPLIGNGANGADGTGAPGGPGGLLLGNGGNGGSGAPGQPGGAGGDAGLIGNGGTGGKGGDGLVGSGAAGGVGGRGGWLLGNGGTGGAGGAAGATLVGGTGGVGGATGLIGSGGFGGAGGAAAGVGTTGGVGGSGGVGGVFGNGGFGGAGGLGAAGGVGGAASYFGTGGGGGVGGDGAPGGDGGAGPLLIGNGGVGGLGGAGAAGGNGGAGGMLLGDGGAGGQGGPAVAGVLGGMPGAGGNGGNANWFGSGGAGGQGGTGLAGTNGVNPGSIANPNTGANGTDNSGNGNQTGGNGGPGPAGGVGEAGGVGGQGGLGESLDGNDGTGGKGGAGGTAGTDGGAGGAGGAGGIGETDGSAGGVATGGEGGDGATGGVDGGVGGAGGKGGQGHNTGVGDAFGGDGGIGGDGNGALGAAGGNGGTGGAGGNGGRGGMLIGNGGAGGAGGTGGTGGGGAAGFAGGVGGAGGEGLTDGAGTAEGGTGGLGGLGGVGGTGGMGGSGGVGGNGGAAGSLIGLGGGGGAGGVGGTGGIGGIGGAGGNGGAGGAGTTTGGGATIGGGGGTGGVGGAGGTGGTGGAGGTTGGSGGAGGLIGWAGAAGGTGAGGTGGQGGLGGQGGNGGNGGTGATGGQGGDFALGGNGGAGGAGGSPGGSSGIQGNMGPPGTQGADG

SEQ ID NO: 64752 - protein, 126 aa, Mycobacterium tuberculosis; identical to SEQ ID NO: 62327

SEQ ID NO: 64753 - protein, 328 aa, Mycobacterium tuberculosis
KDRVGFLRGRARPASTLITRFIADHQGHREGPDGLRWGVESICTQLTELGVPIAPSTYYDHINREPSRRELRDGELKEHISRVHAANYGVYGARKVWLTLNREGIEVARCTVERLMTKLGLSGTTRGKARRTTIADPATARPADLVQRRFGPPAPNRLWVADLTYVSTWAGFAYVAFVTDAYARRILGWRVASTMATSMVLDAIEQAIWTRQQEGVLDLKDVIHHTDRGSQYTSIRFSERLAEAGIQPSVGAVGSSYDNALAETINGLYKTELIKPGKPWRSIEDVELATARWVDWFNHRRLYQYCGDVPPVELEAAYYAQRQRPAAG

SEQ ID NO: 64754 - protein, 156 aa, Mycobacterium tuberculosis; identical to SEQ ID NO: 62784

SEQ ID NO: 64755 - protein, 220 aa, Mycobacterium tuberculosis
MKVAVAGAGAVGRSVTRELVENGHDITLIERNPDHLDAAAIPEAHWRLGDACELSLLESIHLEEFDVVVAATGDDKVNVVLSLLAKTEFAVPRVVARVNDPRNEWLFNDAWGVDVAVSTPRMLASLIEEAVTIGDLVRLMEFRTGQANLVEITLPDNTPWGGKPVRKLQLPRDAALVTILRGPRVIVPEADEPLEGGDELLFVAVTEAEEELSRLLLPSM

SEQ ID NO: 64756 - protein, 265 aa, Mycobacterium tuberculosis
MTSTGPETSETPGATTQRHGFGIDVGGSGIKGGIVDLDTGQLIGDRIKLLTPQPATPLAVAKTIAEVVNGFGWRGPLGVTYPGVVTHGVVRTAANVDKSWIGTNARDTIGAELGGQQVTILNDADAAGLAETRYGAGKNNPGLVVLLTFGTGIGSAVIHNGTLIPNTEFGHLEVGGKEAEERAASSVKEKNDWTYPKWAKQVIRVLIAIENAIWPDLFIAGGGISRKADKWVPLLENRTPVVPAALQNTAGIVGAAMASVADTTH

SEQ ID NO: 64757 - protein, 528 aa, Mycobacterium tuberculosis
MAATKASTATDEPVKRTATKSPAASASGAKTGAKRTAAKSASGSPPAKRATKPAARSVKPASAPQDTTTSTIPKRKTRAAAKSAAAKAPSARGHATKPRAPKDAQHEAATDPEDALDSVEELDAEPDLDVEPGEDLDLDAADLNLDDLEDDVAPDADDDLDSGDDEDHEDLEAEAAVAPGQTADDDEEIAEPTEKDKASGDFVWDEDESEALRQARKDAELTASADSVRAYLKQIGKVALLNAEEEVELAKRIEAGLYATQLMTELSERGEKLPAAQRRDMMWICRDGDRAKNHLLEANLRLVVSLAKRYTGRGMAFLDLIQEGNLGLIRAVEKFDYTKGYKFSTYATWWIRQAITRAMADQARTIRIPVHMVEVINKLGRIQRELLQDLGREPTPEELAKEMDITPEKVLEIQQYAREPISLDQTIGDEGDSQLGDFIEDSEAVVAVDAVSFTLLQDQLQSVLDTLSEREAGVVRLRFGLTDGQPRTLDEIGQVYGVTRERIRQIESKTMSKLRHPSRSQVLRDYLD

SEQ ID NO: 64758 - protein, 468 aa, Mycobacterium tuberculosis
MREYDIVVIGSGPGGQKAAIASAKLGKSVAIVERGRMLGGVCVNTGTIPSKTLREAVLYLTGMNQRELYGASYRVKDRITPADLLARTQHVIGKEVDVVRNQLMRNRVDLIVGHGRFIDPHTILVEDQARREKTTVTGDYIIIATGTRPARPSGVEFDEERVLDSDGILDLKSLPSSMVVVGAGVIGIEYASMFAALGTKVTVVEKRDNMLDFCDPEVVEALKFHLRDLAVTFRFGEEVTAVDVGSAGTVTTLASGKQIPAETVMYSAGRQGQTDHLDLHNAGLEVQGRGRIFVDDRFQTKVDHIYAVGDVIGFPALAATSMEQGRLAAYHAFGEPTDGITELQPIGIYSIPEVSYVGATEVELTKSSIPYEVGVARYRELARGQIAGDSYGMLKLLVSTEDLKLLGVHIFGTSATEMVHIGQAVMGCGGSVEYLVDAVFNYPTFSEAYKNAALDVMNKMRALNQFRR

SEQ ID NO: 64759 - protein, 397 aa, Mycobacterium tuberculosis; identical to SEQ ID NO: 62633

SEQ ID NO: 64760 - protein, 301 aa, Mycobacterium tuberculosis
MASVEFATILALGAALLAGIGYVTLQRSARQVTAEEYVGHFTLFHLSLRHALWWLGSLAAVASFTLQAIALTMGSVVLVQSLQATALLFALLIDARLTHHRCTPREWMWAVLLAGAVAVIVMSGNPAAGTTRAPFSTWAVVAVVVVPAVVLCVVGARIASGSLSAVLLAVASSATLAVFTVLTKGVVTELGEGFATLIRTPALYAWILVLPIGLMLQQSSLRVGALTASLPTITVARPVIASVLGITVLDEVLHTGRVALVALVAAVVVVVVATVALARDEVAMMTVSAGELGAAGQLAVR

SEQ ID NO: 64761 - protein, 790 aa, Mycobacterium tuberculosis; identical to SEQ ID NO: 62651

SEQ ID NO: 64762 - protein, 149 aa, Mycobacterium tuberculosis; identical to SEQ ID NO: 62320

SEQ ID NO: 64763 - protein, 525 aa, Mycobacterium tuberculosis
MSFVIAAPEFLTAAAMDLASIGSTVSAASAAASAPTVAILAAGADEVSIAVAALFGMHGQAYQALSVQASAFHQQFVQALTAGAYSYASAEAAAVTPLQQLVDVINAPFRSALGRPLIGNGANGKPGTGQDGGAGGLLYGSGGNGGSGLAGSGQKGGNGGAAGLFGNGGAGGAGASNQAGNGGAGGNGGAGGLIWGTAGTGGNGGFTTFLDAAGGAGGAGGAGGLFGAGGAGGVGGAALGGGAQAAGGNGGAGGVGGLFGAGGAGGAGGFSDTGGTGGAGGAGGLFGPGGGSGGVGGFGDTGGTGGDGGSGGLFGVGGAGGHGGFGSAAGGDGGAGGAGGTVFGSGGAGGAGGVATVAGHGGHGGNAGLLYGTGGAGGAGGFGGFGGDGGDGGIGGLVGSGGAGGSGGTGTLSGGRGGAGGNAGTFYGSGGAGGAGGESDNGDGGNGGVGGKAGLVGEGGNGGDGGATIAGKGGSGGNGGNAWLTGQGGNGGNAAFGKAGTGSVGVGGAGGLLEGQNGENGLLPS

SEQ ID NO: 64764 - protein, 209 aa, Mycobacterium tuberculosis; identical to SEQ ID NO: 62800

SEQ ID NO: 64765 - protein, 883 aa, Mycobacterium tuberculosis
MLGPPGTPRVGRRDAARSLVTLLRRPWQRGEQIAVTSVADGVDGVIATRLAVMSSKTVARSGTRTSRSKATSRGASRSARSAVPRKRSRPVKGVGRPSRRHHRSLLVSTGLACGRAMRAVWMMAAKGTGGAARSIGRARDIEPGHRRDGIALVLLGLAVVVAASSWFDAARPLGAWVDALLRTFIGSAVVMLPLVAAAVAVVLMRTSPNPDSRPRLILGASLIGLSFLGLCHLWAGSPEAPESRLRAAGFIGFAIGGPLSDGLTAWIAAPLLFIGALFGLLLLAGITIREVPDAMRAMFGTRLLPREYADDFEDFADFDGDDADTVEVARQDFSDGYYDEVPLCSDDGPPAWPSAEVPQDDTATIPEASAGRGSGRRGRRKDTQVLDRIVEGPYTLPSLDLLISGDPPKKRSAANTHMAGAIGEVLTQFKVDAAVTGCTRGPTVTRYEVELGPGVKVEKITALQRNIAYAVATESVRMLAPIPGKSAVGIEVPNTDREMVRLADVLTARETRRDHHPLVIGLGKDIEGDFISANLAKMPHLLVAGSTGSGKSSFVNSMLVSLLTRATPEEVRMILIDPKMVELTPYEGIPHLITPIITQPKKAAAALAWLVDEMEQRYQDMQASRVRHIDDFNDKVRSGAITAPLGSQREYRPYPYVVAIVDELADLMMTAPRDVEDAIVRITQKARAAGIHLVLATQRPSVDVVTGLIKTNVPSRLAFATSSLTDSRVILDQAGAEKLIGMGDGLFLPMGASKPLRLQGAYVSDEEIHAVVTACKEQAEPEYTEGVTTAKPTAERTDVDPDIGDDMDVFLQAVELVVSSQFGSTSMLQRKLRVGFAKAGRLMDLMETRGIVGPSEGSKAREVLVKPDELAGTLAAIRGDGGE

SEQ ID NO: 64766 - protein, 558 aa, Mycobacterium tuberculosis; identical to SEQ ID NO: 62733

SEQ ID NO: 64767 - protein, 540 aa, Mycobacterium tuberculosis
MPPRKKQAPQAPSTMKELKDTLWKAADKLRGSLSASQYKDVILGLVFLKYVSDAYDERREAIRAELAAEGMEESQIEDLIDDPEQYQGYGVFVVPVSARWKFLAENTKGKPAVGGEPAKNIGQLIDEAMDAVMKANPTLGGTLPRLYNKDNIDQRRLGELIDLFNSARFSRQGEHRARDLMGEVYEYFLGNFARAEGKRGGEFFTPPSVVKVIVEVLEPSSGRVYDPCCGSGGMFVQTEKFIYEHDGDPKDVSIYGQESIEETWRMAKMNLAIHGIDNKGLGARWSDTFARDQHPDVQMDYVMANLPFNIKDWARNEEDPRWRFGVPPANNANYAWIQHILYKLAPGGRAGVVMANGSMSSNSNGEGDIRAQIVEADLVSCMVALPTQLFRSTGIPVCLWFFAKDKAAGKQGSIDRCGQVLFIDARELGDLVDRAERALTNEEIVRIGDTFHAWRGSKSAAVKGIMYEDVPGFCKSATLAEIKATDYALTPGRYVGTPAVEDDGEPIDEKMARLSKALLEAFDESARLERVVREQLGRLR

SEQ ID NO: 64768 - protein, 159 aa, Mycobacterium tuberculosis; identical to SEQ ID NO: 62689

SEQ ID NO: 64769 - protein, 263 aa, Mycobacterium tuberculosis
MTPYEDLLRFVLETGTPKSDRTGTGTRSLFGQQMRYDLSAGFPLLTTKKVHFKSVAYELLWFLRGDSNIGWLHEHGVTIWDEWASDTGELGPIYGVQWRSWPAPSGEHIDQISAALDLLRTDPDSRRIIVSAWNVGEIERMALPPCHAFFQFYVADGRLSCQLYQRSADLFLGVPFNIASYALLTHMMAAQAGLSVGEFIWTGGDCHIYDNHVEQVRLQLSREPRPYPKLLLADRDSIFEYTYEDIVVKNYDPHPAIKAPVAV

SEQ ID NO: 64770 - protein, 245 aa, Mycobacterium tuberculosis
MRVGVLGAKGKVGATMVRAVAAADDLTLSAELDAGDPLSLLTDGNTEVVIDFTHPDVVMGNLEFLIDNGIHAVVGTTGFTAERFQQVESWLVAKPNTSVLIAPNFAIGAVLSMHFAKQAARFFDSAEVIELHHPHKADAPSGTAARTAKLIAEARKGLPPNPDATSTSLPGARGADVDGIPVHAVRLAGLVAHQEVLFGTEGETLTIRHDSLDRTSFVPGVLLAVRRIAERPGLTVGLEPLLDLH

SEQ ID NO: 64771 - protein, 344 aa, Mycobacterium tuberculosis; identical to SEQ ID NO: 62428

SEQ ID NO: 64772 - protein, 438 aa, Mycobacterium tuberculosis; identical to SEQ ID NO: 62429

SEQ ID NO: 64773 - protein, 752 aa, Mycobacterium tuberculosis; identical to SEQ ID NO: 62431

SEQ ID NO: 64774 - protein, 89 aa, Mycobacterium tuberculosis; identical to SEQ ID NO: 62433

SEQ ID NO: 64775 - protein, 331 aa, Mycobacterium tuberculosis
MRRRLAIVQRWRGQDEIPTDWGRCVLTIGVFDGVHRGHAELIAHAVKAGRARGVPAVLMTFDPHPMEVVYPGSHPAQLTTLTRRAELVQDLGIEVFLVMPFTTDFMKLTPDRFIHELLVEHLHVVEVVVGENFTFGKKAAGNVDTLRRAGERFGFAVESMSLVSEHHSNETVTFSSTYIRSCVDAGDMVAAMEALGRPHRVEGVVVRGEGRGAELGFPTANVAPPMYSAIPADGVYAAWFTVLGHGPVTGTVVPGERYQAAVSVGTNPTFSGRTRTVEAFVLDTTADLYGQHVALDFVGRIRGQKKFESVRQLVAAMGADTERARDLLSTG

SEQ ID NO: 64776 - protein, 459 aa, Mycobacterium tuberculosis; identical to SEQ ID NO: 62430

SEQ ID NO: 64777 - protein, 298 aa, Mycobacterium tuberculosis; identical to SEQ ID NO: 62432

SEQ ID NO: 64778 - protein, 118 aa, Mycobacterium tuberculosis; identical to SEQ ID NO: 62458

SEQ ID NO: 64779 - protein, 312 aa, Mycobacterium tuberculosis; identical to SEQ ID NO: 64450

SEQ ID NO: 64780 - protein, 436 aa, Mycobacterium tuberculosis
MDPLNRRQFLALAAAAAGVTAGCAGMGGGGSVKSGSGPIDFWSSHPGQSSAAERELIGRFQDRFPTLSVKLIDAGKDYDEVAQKFNAALIGTDVPDVVLLDDRWWFHFALSGVLTALDDLFGQVGVDTTDYVDSLLADYEFNGRHYAVPYARSTPLFYYNKAAWQQAGLPDRGPQSWSEFDEWGPELQRVVGAGRSAHGWANADLISWTFQGPNWAFGGAYSDKWTLTLTEPATIAAGNFYRNSIHGKGYAAVANDIANEFATGILASAVASTGSLAGITASARFDFGAAPLPTGPDAAPACPTGGAGLAIPAKLSEERKVNALKFIAFVTNPTNTAYFSQQTGYLPVRKSAVDDASERHYLADNPRARVALDQLPHTRTQDYARVFLPGGDRIISAGLESIGLRGADVTKTFTNIQKRLQVILDRQIMRKLAGHG

SEQ ID NO: 64781 - protein, 900 aa, Mycobacterium tuberculosis
MAAGKARVHELAKELGVTSKEVLARLSEQGEFVKSASSTVEAPVARRLRESFGGSKPAPAKGTAKSPGKGPDKSLDKALDAAIDMAAGNGKATAAPAKAADSGGAAIVSPTTPAAPEPPTAVPPSPQAPHPGMAPGARPGPVPKPGIRTPRVGNNPFSSAQPADRPIPRPPAPRPGTARPGVPRPGASPGSMPPRPGGAVGGARPPRPGAPRPGGRPGAPGAGRSDAGGGNYRGGGVGAAPGTGFRGRPGGGGGGRPGQRGGAAGAFGRPGGAPRRGRKSKRQKRQEYDSMQAPVVGGVRLPHGNGETIRLARGASLSDFADKIDANPAALVQALFNLGEMVTATQSVGDETLELLGSEMNYNVQVVSPEDEDRELLESFDLSYGEDEGGEEDLQVRPPVVTVMGHVDHGKTRLLDTIRKANVREAEAGGITQHIGAYQVAVDLDGSQRLITFIDTPGHEAFTAMRARGAKATDIAILVVAADDGVMPQTVEAINHAQAADVPIVVAVNKIDKEGADPAKIRGQLTEYGLVPEEFGGDTMFVDISAKQGTNIEALEEAVLLTADAALDLRANPDMEAQGVAIEAHLDRGRGPVATVLVQRGTLRVGDSVVAGDAYGRVRRMVDEHGEDVEVALPSRPVQVIGFTSVPGAGDNFLVVDEDRIARQIADRRSARKRNALAARSRKRISLEDLDSALKETSQLNLILKGDNAGTVEALEEALMGIQVDDEVVLRVIDRGVGGITETNVNLASASDAVIIGFNVRAEGKATELASREGVEIRYYSVIYQAIDEIEQALRGLLKPIYEENQLGRAEIRALFRSSKVGLIAGCLVTSGVMRRNAKARLLRDNIVVAENLSIASLRREKDDVTEVRDGFECGLTLGYADIKEGDVIESYELVQKERA

SEQ ID NO: 64782 - protein, 347 aa, Mycobacterium tuberculosis; identical to SEQ ID NO: 62665

SEQ ID NO: 64783 - protein, 582 aa, Mycobacterium tuberculosis
MITRMSELFLRTLRDDPADAEVASHKLLIRAGYIRPVAPGLYSWLPLGLRVLRNIERVIRDEMNAIGGQEILFPALLPRAPYETTNRWTQYGDSVFRLKDRRGNDYLLGPTHEELFTLTVKGEYSSYKDFPLTLYQIQTKYRDEARPRAGILRAREFVMKDSYSFDIDAAGLKAAYHAHREAYQRIFDRLQVRYVIVSAVSGAMGGSASEEFLAESPSGEDAFVRCLESGYAANVEAVVTARPDTLPIDGLPEAVVHDTGDTPTIASLVAWANEADLGRTVTAADTLKNVLIKVRQPGGDTELLAIGVPGDREVDDKRLGAALEPADYALLDDDDFAKHPFLVKGYIGPKALRENNVRYLVDPRIVDGTSWITGADQPGRHVVGLVAGRDFTADGTIEAAEVREGDPSPDGAGPLVMARGIEIGHIFQLGSKYTDAFTADVLGEDGKPVRLTMGSYGIGVSRLVAVVAEQHHDELGLRWPSTVAPFDVHLVIANKDAQARAGATALAADLDRLGVEVLLDDRQASPGVKFKDAELLGMPWIVVVGRGWADGVVELRDRFSGQTRELVAGASLATDIAAAVTG

SEQ ID NO: 64784 - protein, 405 aa, Mycobacterium tuberculosis; identical to SEQ ID NO: 62666

SEQ ID NO: 64785 - protein, 493 aa, Mycobacterium tuberculosis
MSDLARTDVVLIGAGIMSATLGVLLRRLEPNWSITLIERLDAVAAESSGPWNNAGTGHSALCEMNYTPEMPDGSIDITKAVRVNEQFQVTRQFWAYAAENGILTDVRSFLNPVPHVSFVHGSRGVEYLRRRQKALAGNPLFAGTEFIESPDEFARRLPFMAAKRAFSEPVALNWAADGTDVDFGALAKQLIGYCVQNGTTALFGHEVRNLSRQSDGSWTVTMCNRRTGEKRKLNTKFVFVGAGGDTLPVLQKSGIKEVKGFAGFPIGGRFLRAGNPALTASHRAKVYGFPAPGAPPLGALHLDLRFVNGKSWLVFGPYAGWSPKFLKHGQISDLPRSIRPDNLLSVLGVGLTERRLLNYLISQLRLSEPERVSALREFAPSAIDSDWELTIAGQRVQVIRRDERNGGVLEFGTTVIGDADGSIAGLLGGSPGASTAVAIMLDVLQKCFANRYQSWLPTLKEMVPSLGVQLSNEPALFDEVWSWSTKALKLGAA

SEQ ID NO: 64786 - protein, 615 aa, Mycobacterium tuberculosis
MLYVVASPDLMTAAATNLAEIGSAISTANGAAALPTVEVVAAAADEVSTQIAALFGAHARSYQTLSTQAAAFHSRFVQALTTAAASYASVEAANASPLQVALDVINAPAQTLLGRPLIGNGADGSTPGQAGGPGGLLYGNGGNGAAGGPNQAGGAGGNAGLIGNGGAGGAGGVGAVGGKRGTGGLLFGNGGAGGQGGLGLAGINGGSGGQGGHGGNAILFGQGGAGGPGGTGAMGVAGTNPTPIGTAAPGSDGVNQIGNGGNTDLTGGAGGDGNAGSTTVNGGNGGTGGAARNSSGGTGNSFGGAGGAGGDGANGGDGGAGGEALTEGGATAVSGAGGKGGNAEASGGAGGNGGKGGFAQATTSVTGGNGGNGGNGHDSNAPGGAGGSGGVGGDGGRGGLLAGNGGTGGAGGNGGTGGAGAPGGAGGAGGKADIANSLGDNATVTGGNGGTGGDGGSALGTGGAGGAGGLGGHGGAGGLLIGNGGAGGAGGLGGAGGAGGAGGEGGAGGAGGEAIPGGASTNSAGGDGGAGGTGGNGGDGGAGGAPGLGGAGGAGGWLIGQSGSTGGGGAGGAGGAGGAGGAGGSGGAGGHGDTTSGKNGSSGTAGFDGNPGQPG

SEQ ID NO: 64787 - protein, 459 aa, Mycobacterium tuberculosis; identical to SEQ ID NO: 62337

SEQ ID NO: 64788 - protein, 387 aa, Mycobacterium tuberculosis
MTVGLGMPQPPAPTLAPRRATRQLMVGNVGVGSDHPVSVQSMCTTKTHDVNSTLQQIAELTAAGCDIVRVACPRQEDADALAEIARHSQIPVVADIHFQPRYIFAAIDAGCAAVRVNPGNIKEFDGRVGEVAKAAGAAGIPIRIGVNAGSLDKRFMEKYGKATPEALVESALWEASLFEEHGFGDIKISVKHNDPVVMVAAYELLAARCDYPLHLGVTEAGPAFQGTIKSAVAFGALLSRGIGDTIRVSLSAPPVEEVKVGNQVLESLNLRPRSLEIVSCPSCGRAQVDVYTLANEVTAGLDGLDVPLRVAVMGCVVNGPGEAREADLGVASGNGKGQIFVRGEVIKTVPEAQIVETLIEEAMRLAAEMGEQDPGATPSGSPIVTVS

SEQ ID NO: 64789 - protein, 306 aa, Mycobacterium tuberculosis; identical to SEQ ID NO: 62583

SEQ ID NO: 64790 - protein, 185 aa, Mycobacterium tuberculosis; identical to SEQ ID NO: 62582

SEQ ID NO: 64791 - protein, 261 aa, Mycobacterium tuberculosis; identical to SEQ ID NO: 62580

SEQ ID NO: 64792 - protein, 271 aa, Mycobacterium tuberculosis
MANFTAADVKRLRELTGAGMLACKNALAETDGDFDKAVEALRIKGAKDVGKRAERATAEGLVAAKDGALIELNCETDFVAKNAEFQTLADQVVAAAAAAKPADVDALKGASIGDKTVEQAIAELSAKIGEKLELRRVAIFDGTVEAYLHRRSADLPPAVGVLVEYRGDDAAAAHAVALQIAALRARYLSRDDVPEDIVASERRIAEETARAEGKPEQALPKIVEGRLNGFFKDAVLLEQASVSDNKKTVKALLDVAGVTVTRFVRFEVGQA

SEQ ID NO: 64793 - protein, 287 aa, Mycobacterium tuberculosis; identical to SEQ ID NO: 62572

SEQ ID NO: 64794 - protein, 779 aa, Mycobacterium tuberculosis; identical to SEQ ID NO: 62581

SEQ ID NO: 64795 - protein, 264 aa, Mycobacterium tuberculosis
MTKTWPPRTVIRKSGGLRGMRTLESALHRGGLGPVAGVDEVGRGACAGPLVVAACVLGPGRIASLAALDDSKKLSEQAREKLFPLICRYAVAYHVVFIPSAEVDRRGVHVANIEGMRRAVAGLAVRPGYVLSDGFRVPGLPMPSLPVIGGDAAAACIAAASVLAKVSRDRVMVALDADHPGYGFAEHKGYSTPAHSRALARLGPCPQHRYSFINVRRVASGSNTAEVADGQPDPRDGTAQTGEGRWSKSSHPATMRATGRAQGT

SEQ ID NO: 64796 - protein, 294 aa, Mycobacterium tuberculosis
MTETTDSPSERQPGPAEPELSSRDPDIAGQVFDAAPFDAAPDADSEGDSKAAKTDEPRPAKRSTLREFAVLAVIAVVLYYVMLTFVARPYLIPSESMEPTLHGCSTCVGDRIMVDKLSYRFGSPQPGDVIVFRGPPSWNVGYKSIRSHNVAVRWVQNALSFIGFVPPDENDLVKRVIAVGGQTVQCRSDTGLTVNGRPLKEPYLDPATMMADPSIYPCLGSEFGPVTVPPGRVWVMGDNRTHSADSRAHCPLLCTDDPLPGTVPVANVIGKARLIVWPPSRWGVVRSVNPQQGR

SEQ ID NO: 64797 - protein, 113 aa, Mycobacterium tuberculosis; identical to SEQ ID NO: 62577

SEQ ID NO: 64798 - protein, 230 aa, Mycobacterium tuberculosis; identical to SEQ ID NO: 62576

SEQ ID NO: 64799 - protein, 176 aa, Mycobacterium tuberculosis; identical to SEQ ID NO: 62573

SEQ ID NO: 64800 - protein, 80 aa, Mycobacterium tuberculosis; identical to SEQ ID NO: 62571

SEQ ID NO: 64801 - protein, 162 aa, Mycobacterium tuberculosis; identical to SEQ ID NO: 62570

SEQ ID NO: 64802 - protein, 525 aa, Mycobacterium tuberculosis; identical to SEQ ID NO: 62585

SEQ ID NO: 64803 - protein, 808 aa, Mycobacterium tuberculosis
MEAESPCAASDLAVARRELLSGNHRELDPVGLRQTWLDLHESWLIDKADEIGIADASGFAIVGVGGLGRRELLPYSDLDVLLLHDGKPADILRPVADRLWYPLWDANIRLDHSVRTVSEALTIANSDLMAALGMLEARHIAGDQQLSFALIDGVRRQWRNGIRSRMGELVEMTYARWRRCGRIAQRAEPDLKLGRGGLRDVQLLDALALAQLIDRHGIGHTDLPAGSLDGAYRTLLDVRTELHRVSGRGRDHLLAQFADEISAALGFGDRFDLARTLSSAGRTIGYHAEAGLRTAANALPRRGISALVRRPKRRPLDEGVVEYAGEIVLARDAEPEHDPGLVLRVAAASADTGLPIGAATLSRLAASVPDLPTPWPQEALDDLLVVLSAGPTTVATIEALDRTGLWGRLLPEWEPIRDLPPRDVAHKWTVDRHVVETAVHAAPLATRVARPDLLALGALLHDIGKGRGTDHSVLGAELVIPVCTRLGLSPPDVRTLSKLVRHHLLLPITATRRDLNDPKTIEAVSEALGGDPQLLEVLHALSEADSKATGPGVWSDWKASLVDDLVRRCRMVMAGESLPQAEPTAPHYLSLAADHGVHVEISPRDGERIDAVIVAPDERGLVSKAAAVLALNSLRVHSASVNVHQGVAITEFVVSPLFGSPPAAELVRQQFVGALNGDVDVLGMLQKRDSDAASLVSARAGDVQAGVPVTRTAAPPRILWLDTAAPAKLILEVRAMDRAGLLALLAGALEGAGAGIVWAKVNTFGSTAADVFCVTVPAELDARAAVEQHLLEVLGASVDVVVDEPVGD

SEQ ID NO: 64804 - protein, 422 aa, Mycobacterium tuberculosis
MWEGLWIATAVIAALVVIAALTLGLVLYRRRRISLSPRPERGVVDRSGGYTASSGITFSQTPTTQPAERIDTSGLPAVGDDATVPRDAPKRTIADVHLPEFEPEPQAPEVPEADAIAPPEGRLERLRGRLARSQNALGRGLLGLIGGGDLDEDSWQDVEDTLLVADLGPAATASVVSQLRSRLASGNVRTEADARAVLRDVLINELQPGMDRSIRALPHAGHPSVLLVVGVNGTGKTTTVGKLARVLVADGRRVVLGAADTFRAAAADQLQTWAARVGAAVVRGPEGADPASVAFDAVDKGIAAGADVVLIDTAGRLHTKVGLMDELDKVKRVVTRRASVDEVLLVLDATIGQNGLAQARVFAEVVDISGAVLTKLDGTAKGGIVFRVQQELGVPVKLVGLGEGPDDLAPFEPAAFVDALLG

SEQ ID NO: 64805 - protein, 1289 aa, Mycobacterium tuberculosis
MGAGSRFPLVDPLPSVGARPDRLRGQPRRRTRAGGRPGSARCVPEAAAAAAGRHDTGPRRQSRRRLVAVDGADHRVQRAVIWPLVYLKSLTLKGFKSFAAPTTLRFEPGITAVVGPNGSGKSNVVDALAWVMGEQGAKTLRGGKMEDVIFAGTSSRAPLGRAEVTVSIDNSDNALPIEYTEVSITRRMFRDGASEYEINGSSCRLMDVQELLSDSGIGREMHVIVGQGKLEEILQSRPEDRRAFIEEAAGVLKHRKRKEKALRKLDTMAANLARLTDLTTELRRQLKPLGRQAEAAQRAAAIQADLRDARLRLAADDLVSRRAEREAVFQAEAAMRREHDEAAARLAVASEELAAHESAVAELSTRAESIQHTWFGLSALAERVDATVRIASERAHHLDIEPVAVSDTDPRKPEELEAEAQQVAVAEQQLLAELDAARARLDAARAELADRERRAAEADRAHLAAVREEADRREGLARLAGQVETMRARVESIDESVARLSERIEDAAMRAQQTRAEFETVQGRIGELDQGEVGLDEHHERTVAALRLADERVAELQSAERAAERQVASLRARIDALAVGLQRKDGAAWLAHNRSGAGLFGSIAQLVKVRSGYEAALAAALGPAADALAVDGLTAAGSAVSALKQADGGRAVLVLSDWPAPQAPQSASGEMLPSGAQWALDLVESPPQLVGAMIAMLSGVAVVNDLTEAMGLVEIRPELRAVTVDGDLVGAGWVSGGSDRKLSTLEVTSEIDKARSELAAAEALAAQLNAALAGALTEQSARQDAAEQALAALNESDTAISAMYEQLGRLGQEARAAEEEWNRLLQQRTEQEAVRTQTLDDVIQLETQLRKAQETQRVQVAQPIDRQAISAAADRARGVEVEARLAVRTAEERANAVRGRADSLRRAAAAEREARVRAQQARAARLHAAAVAAAVADCGRLLAGRLHRAVDGASQLRDASAAQRQQRLAAMAAVRDEVNTLSARVGELTDSLHRDELANAQAALRIEQLEQMVLEQFGMAPADLITEYGPHVALPPTELEMAEFEQARERGEQVIAPAPMPFDRVTQERRAKRAERALAELGRVNPLALEEFAALEERYNFLSTQLEDVKAARKDLLGVVADVDARILQVFNDAFVDVEREFRGVFTALFPGGEGRLRLTEPDDMLTTGIEVEARPPGKKITRLSLLSGGEKALTAVAMLVAIFRARPSPFYIMDEVEAALDDVNLRRLLSLFEQLREQSQIIIITHQKPTMEVADALYGVTMQNDGITAVISQRMRGQQVDQLVTNSS

SEQ ID NO: 64806 - protein, 289 aa, Mycobacterium tuberculosis; identical to SEQ ID NO: 62368

SEQ ID NO: 64807 - protein, 1616 aa, Mycobacterium tuberculosis
MISARSAEALTAQAGRLMAHVQANPGLDPIDVGCSLASRSVFEHRAVVVGASREQLIAGLAGLAAGEPGAGVAVGQPGSVGKTVVVFPGQGAQRIGMGRELYGELPVFAQAFDAVADELDRHLRLPLRDVIWGADADLLDSTEFAQPALFAVEVASFAVLRDWGVLPDFVMGHSVGELAAAHAAGVLTLADAAMLVVARGRLMQALPAGGAMVAVAASEDEVEPLLGEGVGIAAINAPESVVISGAQAAANAIADRFAAQGRRVHQLAVSHAFHSPLMEPMLEEFARVAARVQAREPQLGLVSNVTGELAGPDFGSAQYWVDHVRRPVRFADSARHLQTLGATHFIEAGPGSGLTGSIEQSLAPAEAMVVSMLGKDRPELASALGAAGQVFTTGVPVQWSAVFAGSGGRRVQLPTYAFQRRRFWETPGADGPADAAGLGLGATEHALLGAVVERPDSDEVVLTGRLSLADQPWLADHVVNGVVLFPGAGFVELVIRAGDEVGCALIEELVLAAPLVMHPGVGVQVQVVVGAADESGHRAVSVYSRGDQSQGWLLNAEGMLGVAAAETPMDLSVWPPEGAESVDISDGYAQLAERGYAYGPAFQGLVAIWRRGSELFAEVVAPGEAGVAVDRMGMHPAVLDAVLHALGLAVEKTQASTETRLPFCWRGVSLHAGGAGRVRARFASAGADAISVDVCDATGLPVLTVRSLVTRPITAEQLRAAVTAAGGASDQGPLEVVWSPISVVSGGANGSAPPAPVSWADFCAGSDGDASVVVWELESAGGQASSVVGSVYAATHTALEVLQSWLGADRAATLVVLTHGGVGLAGEDISDLAAAAVWGMARSAQAENPGRIVLIDTDAAVDASVLAGVGEPQLLVRGGTVHAPRLSPAPALLALPAAESAWRLAAGGGGTLEDLVIQPCPEVQAPLQAGQVRVAVAAVGVNFRDVVAALGMYPGQAPPLGAEGAGVVLETGPEVTDLAVGDAVMGFLGGAGPLAVVDQQLVTRVPQGWSFAQAAAVPVVFLTAWYGLADLAEIKAGESVLIHAGTGGVGMAAVQLARQWGVEVFVTASRGKWDTLRAMGFDDDHIGDSRTCEFEEKFLAVTEGRGVDVVLDSLAGEFVDASLRLLVRGGRFLEMGKTDIRDAQEIAANYPGVQYRAFDLSEAGPARMQEMLAEVRELFDTRELHRLPVTTWDVRCAPAAFRFMSQARHIGKVVLTMPSALADRLADGTVVITGATGAVGGVLARHLVGAYGVRHLVLASRRGDRAEGAAELAADLTEAGAKVQVVACDVADRAAVAGLFAQLSREYPPVRGVIHAAGVLDDAVITSLTPDRIDTVLRAKVDAAWNLHQATSDLDLSMFALCSSIAATVGSPGQGNYSAANAFLDGLAAHRQAAGLAGISLAWGLWEQPGGMTAHLSSRDLARMSRSGLAPMSPAEAVELFDAALAIDHPLAVATLLDRAALDARAQAGALPALFSGLARRPRRRQIDDTGDATSSKSALAQRLHGLAADEQLELLVGLVCLQAAAVLGRPSAEDVDPDTEFGDLGFDSLTAVELRNRLKTATGLTLPPTVIFDHPTPTAVAEYVAQQMSGSRPTESGDPTSQVVEPAAAEVSVHA

SEQ ID NO: 64808 - protein, 275 aa, Mycobacterium tuberculosis
MVQTKRYAGLTAANTKKVAMAAPMFSIIIPTLNVAAVLPACLDSIARQTCGDFELVLVDGGSTDETLDIANIFAPNLGERLIIHRDTDQGVYDAMNRGVDLATGTWLLFLGADDSLYEADTLARVAAFIGEHEPSDLVYGDVIMRSTNFRWGGAFDLDRLLFKRNICHQAIFYRRGLFGTIGPYNLRYRVLADWDFNIRCFSNPALVTRYMHVVVASYNEFGGLSNTIVDKEFLKRLPMSTRLGIRLVIVLVRRWPKVISRAMVMRTVISWRRRR

SEQ ID NO: 64809 - protein, 310 aa, Mycobacterium tuberculosis; identical to SEQ ID NO: 62542

SEQ ID NO: 64810 - protein, 1127 aa, Mycobacterium tuberculosis; identical to SEQ ID NO: 62684

SEQ ID NO: 64811 - protein, 282 aa, Mycobacterium tuberculosis
MTGESGAAAAPSITLNDEHTMPVLGLGVAELSDDETERAVSAALEIGCRLIDTAYAYGNEAAVGRAIAASGVAREELFVTTKLATPDQGFTRSQEACRASLDRLGLDYVDLYLIHWPAPPVGKYVDAWGGMIQSRGEGHARSIGVSNFTAENIENLIDLTFVTPAVNQIELHPLLNQDELRKANAQHTVVTQSYCPLALGRLLDNPTVTSIASEYVKTPAQVLLRWNLQLGNAVVVRSARPERIASNFDVFDFELAAEHMDALGGLNDGTRVREDPLTYAGT

SEQ ID NO: 64812 - protein, 237 aa, Mycobacterium tuberculosis
MNRRTLLWLSAIAALALVVAYQTLGSSAGRHADEFAARAGVPTVQPGADVLAGIAVLPKRIHRYDYRRSAFGHPWDDRNDAPGGHNGCDTRDDILDRDLVDKTYVSIKRCPNAVATGTLRDPYTNTTVAFQRGASVGQSVQIDHIVPLSYAWDMGAYRWPNSERMRFANDPANLLAVQGQANQDKGDSPPAQWMPPNKAFACQYAMQFIAVLRGYSLPVDQPSSDVLRQAAATCPTG

SEQ ID NO: 64813 - protein, 333 aa, Mycobacterium tuberculosis; identical to SEQ ID NO: 62544

SEQ ID NO: 64814 - protein, 181 aa, Mycobacterium tuberculosis
MTGESDGPPRAVLIAAAALAAAVIGVILVVAANRQPPERPVVIPAVPAPQATGPGCKALLAALPQRLGEYRRAPVAEPTTAGATAWRTGPNSTPVILRCGLDRPAEFVVGSAIQVVDRVQWFQVAAQNPDEPGRSTWYTVDRPVYVALTLPSGSGPTAIQELSDVIDHTIPAVPIDPAPAR

SEQ ID NO: 64815 - protein, 373 aa, Mycobacterium tuberculosis
MSANDRRDRRVRVAVVFGGRSNEHAISCVSAGSILRNLDSRRFDVIAVGITPAGSWVLTDANPDALTITNRELPQVKSGSGTELALPADPRRGGQLVSLPPGAGEVLESVDVVFPVLHGPYGEDGTIQGLLELAGVPYVGAGVLASAVGMDKEFTKKLLAADGLPVGAYAVLRPPRSTLHRQECERLGLPVFVKPARGGSSIGVSRVSSWDQLPAAVARARRHDPKVIVEAAISGRELECGVLEMPDGTLEASTLGEIRVAGVRGREDSFYDFATKYLDDAAELDVPAKVDDQVAEAIRQLAIRAFAAIDCRGLARVDFFLTDDGPVINEINTMPGFTTISMYPRMWAASGVDYPTLLATMIETTLARGVGLH

SEQ ID NO: 64816 - protein, 334 aa, Mycobacterium tuberculosis
MAGIASTVAVMGAGAWGTALAKVLADAGGEVTLWARRAEVADQINTTRYNPDYLPGALLPPSIHATADAEEALGGASTVLLGVPAQTMRANLERWAPLLPEGATLVSLAKGIELGTLMRMSQVIISVTGAEPPQVAVISGPNLASEIAECQPAATVVACSDSGRAVALQRALNSGYFRPYTNADVVGTEIGGACKNIIALACGMAVGIGLGENTAAAIITRGLAEIIRLGTALGANGATLAGLAGVGDLVATCTSPRSRNRSFGERLGRGETLQSAGKACHVVEGVTSCESVLALASSYDVEMPLTDAVHRVCHKGLSVDEAITLLLGRRTKPE

SEQ ID NO: 64817 - protein, 214 aa, Mycobacterium tuberculosis; identical to SEQ ID NO: 62547

SEQ ID NO: 64818 - protein, 473 aa, Mycobacterium tuberculosis
MALQTGEPRTLAEKIWDDHIVVSGGGCAPDLIYIDLHLVHEVTSPQAFDGLRLAGRRVRRPELTLATEDHNVPTVDIDQPIADPVSRTQVETLRRNCAEFGIRLHSMGDIEQGIVHVVGPQLGLTQPGMTIVCGDSHTSTHGAFGALAMGIGTSEVEHVLATQTLPLRPFKTMAVNVDGRLPDGVSAKDIILALIAKIGTGGGQGHVIEYRGSAIESLSMEGRMTICNMSIEAGARAGMVAPDETTYAFLRGRPHAPTGAQWDTALVYWQRLRTDVGAVFDTEVYLDAASLSPFVTWGTNPGQGVPLAAAVPDPQLMTDDAERQAAEKALAYMDLRPGTAMRDIAVDAVFVGSCTNGRIEDLRVVAEVLRGRKVADGVRMLIVPGSMRVRAQAEAEGLGEIFTDAGAQWRQAGCSMCLGMNPDQLASGERCAATSNRNFEGRQGAGGRTHLVSPAVAAATAVRGTLSSPADLN

SEQ ID NO: 64819 - protein, 490 aa, Mycobacterium tuberculosis
MTATETVRVRFCPSPTGTPHVGLVRTALFNWAYARHTGGTFVFRIEDTDAQRDSEESYLALLDALRWLGLDWDEGPEVGGPYGPYRQSQRAEIYRDVLARLLAAGEAYHAFSTPEEVEARHVAAGRNPKLGYDNFDRHLTDAQRAAYLAEGRQPVVRLRMPDDDLAWNDLVRGPVTFAAGSVPDFALTRASGDPLYTLVNPCDDALMKITHVLRGEDLLPSTPRQLALHQALIRIGVAERIPKFAHLPTVLGEGTKKLSKRDPQSNLFAHRDRGFIPEGLLNYLALLGWSIADDHDLFGLDEMVAAFDVADVNSSPARFDQKKADALNAEHIRMLDVGDFTVRLRDHLDTHGHHIALDEAAFAAAAELVQTRIVVLGDAWELLKFFNDDQYVIDPKAAAKELGPDGAAVLDAALAALTSVTDWTAPLIEAALKDALIEGLALKPRKAFSPIRVAATGTTVSPPLFESLELLGRDRSMQRLRAARQLVGHA

SEQ ID NO: 64820 - protein, 239 aa, Mycobacterium tuberculosis
MTAREIAEHPFGTPTFTGRSWPLADVRLLAPILASKVVCVGKNYADHIAEMGGRPPADPVIFLKPNTAIIGPNTPIRLPANASPVHFEGELAIVIGRACKDVPAAQAVDNILGYTIGNDVSARDQQQSDGQWTRAKGHDTFCPVGPWIVTDLAPFDPADLELRTVVNGDVKQHARTSLMIHDIGAIVEWISAIMTLLPGDLILTGTPAGVGPIEDGDTVSITIEGIGTLTNPVVRKGKP

SEQ ID NO: 64821 - protein, 333 aa, Mycobacterium tuberculosis; identical to SEQ ID NO: 62445

SEQ ID NO: 64822 - protein, 168 aa, Mycobacterium tuberculosis; identical to SEQ ID NO: 62446

SEQ ID NO: 64823 - protein, 618 aa, Mycobacterium tuberculosis; identical to SEQ ID NO: 62448

SEQ ID NO: 64824 - protein, 509 aa, Mycobacterium tuberculosis; identical to SEQ ID NO: 62444

SEQ ID NO: 64825 - protein, 343 aa, Mycobacterium tuberculosis; identical to SEQ ID NO: 62703

SEQ ID NO: 64826 - protein, 494 aa, Mycobacterium tuberculosis
MTDIIRSDAATLAAKIAIKEVSSAEITRACLDQIEATDETYHAFLHVAADEALAAAAAIDKQVAAGEPLPSALAGVPLALKDVFTTSDMPTTCGSKILEGWRSPYDATLTARLRAAGIPILGKTNMDEFAMGSSTENSAYGPTRNPWNLDRVPGGSGGGSAAALAAFQAPLAIGSDTGGSIRQPAALTATVGVKPTYGTVSRYGLVACASSLDQGGPCARTVLDTALLHQVIAGHDPRDSTSVDAEVPDVVGAARAGAVGDLRGVRVGVVRQLHGGEGYQPGVLASFEAAVEQLTALGAEVSEVDCPHFDHALAAYYLILPSEVSSNLARFDAMRYGLRVGDDGTRSAEEVMAMTRAAGFGPEVKRRIMIGTYALSAGYYDAYYNQAQKVRTLIARDLDAAYRSVDVLVSPTTPTTAFRMGEKVDDPLAMYLFDLCTLPLNLAGHCGMSVPSGLSPDDGLPVGLQIMAPALADDRLYRVGAAYEAARGPLLSAI

SEQ ID NO: 64827 - protein, 99 aa, Mycobacterium tuberculosis
MSQISRDEVAHLARLARLALTETELDSFAGQLDAILTHVSQIQAVDVTGVQATDNPLKDVNVTRPDETVPCLTQRQVLDQAPDAVDGRFAVPQILGDEQ

SEQ ID NO: 64828 - protein, 691 aa, Mycobacterium tuberculosis; identical to SEQ ID NO: 62639

SEQ ID NO: 64829 - protein, 434 aa, Mycobacterium tuberculosis
MTAPVWLASPPEVHSALLSAGPGPGSLQAAAAGWSALSAEYAAVAQELSVVVAAVGAGVWQGPSAELFVAAYVPYVAWLVQASADSAAAAGEHEAAAAGYVCALAEMPTLPELAANHLTHAVLVATNFFGINTIPIALNEADYVRMWVQAATVMSAYEAVVGAALVATPHTGPAPVIVKPGANEASNAVAAATITPFPWHEIVQFLEETFAAYDQYLSALLSELPAVAWVWFQLFVDILGFNIIGFIITLASNAQLLTEFAINASYVAVGLLYAIAGVIDIVVEWVIGNLFGVVPLLGGPLLGALAAAVVPGVAGLAGVAGLAALPAVGAAAGAPAALVGSVAPVSGGVVSPQARLVSAVEPAPASTSVSVLASDRGAGALGFVGTAGKESVGQPAGLTVLADEFGDGAPVPMLPGSWGPDLVGVAGDGGLVSV

SEQ ID NO: 64830 - protein, 367 aa, Mycobacterium tuberculosis; identical to SEQ ID NO: 62857

SEQ ID NO: 64831 - protein, 300 aa, Mycobacterium tuberculosis
MNVLSLGSSSGVVWGRVPITAPAGAATGVTSRADAHSQMRRYAQTGPTAKLSSAPMTTMWGAPLHRRWRGSRLRDPRQAKFLTLASLKWVLANRAYTPWYLVRYWRLLRFKLANPHIITRGMVFLGKGVEIHATPELAQLEIGRWVHIGDKNTIRAHEGSLRFGDKVVLGRDNVINTYLDIEIGDSVLMADWCYICDFDHRMDDITLPIKDQGIIKSPVRIGPDTWIGVKVSVLRGTTIGRGCVLGSHAVVRGAIPDYSIAVGAPAKVVKNRQLSWEASAAQRAELAAALADIERKKAAR

SEQ ID NO: 64832 - protein, 573 aa, Mycobacterium tuberculosis; identical to SEQ ID NO: 62858

SEQ ID NO: 64833 - protein, 346 aa, Mycobacterium tuberculosis; identical to SEQ ID NO: 62705

SEQ ID NO: 64834 - protein, 693 aa, Mycobacterium tuberculosis
MLNLYDADGKIQFDKDREAAHQYFLQHVNQNTVFFHNQDEKLDYLIRENYYEREVLDQYSRNFVKTLLDRAYAKKFRFPTFLGAFKYYTSYTLKTFDGKRYLERFEDRVVMVALTLAAGDTALAELLVDEIIDGRFQPATPTFLNSGKKQRGEPVSCFLLRVEDNMESIGRSINSALQLSKRGGGVALLLTNIREHGAPIKNIENQSSGVIPIMKLLEDAFSYANQLGARQGAGAVYLHAHHPDIYRFLDTKRENADEKIRIKTLSLGVVIPDITFELAKRNDDMYLFSPYDVERVYGVPFADISVTEKYYEMVDDARIRKTKIKAREFFQTLAELQFESGYPYIMFEDTVNRANPIDGKITHSNLCSEILQVSTPSLFNEDLSYAKVGKDISCNLGSLNIAKTMDSPDFAQTIEVAIRALTAVSDQTHIKSVPSIEQGNNDSHAIGLGQMNLHGYLARERIFYGSDEGIDFTNIYFYTVLYHALRASNRIAIERGTHFKGFERSKYASGEFFDKYTDQIWEPKTQKVRQLFADAGIRIPTQDDWRRLKESVQAHGIYNQNLQAVPPTGSISYINHSTSSIHPIVSKVEIRKEGKIGRVYYPAPYMTNDNLEYYEDAYEIGYEKIIDTYAAATQHVDQGLSLTLFFKDTATTRDVNKAQIYAWRKGIKTLYYIRLRQMALEGTEVEGCVSCML

SEQ ID NO: 64835 - protein, 150 aa, Mycobacterium tuberculosis; identical to SEQ ID NO: 62855

SEQ ID NO: 64836 - protein, 340 aa, Mycobacterium tuberculosis
MELGSLIRATNLWGYTDLMRELGADPLPFLRRFDIPPGIEHQEDAFMSLAGFVRMLEASAAELDCPDFGLRLARWQGLGILGPVAVIARNAATLFGGLEAIGRYLYVHSPALTLTVSSTTARSNVRFGYEVTEPGIPYPLQGYELSMANAARMIRLLGGPQARARVFSFRHAQLGTDAAYREALGCTVRFGRTWCGFEVDHRLAGRPIDHADPETKRIATKYLESQYLPSDATLSERVVGLARRLLPTGQCSAEAIADQLDMHPRTLQRRLAAEGLRCHDLIERERRAQAARYLAQPGLYLSQIAVLLGYSEQSALNRSCRRWFGMTPRQYRAYGGVSGR

SEQ ID NO: 64837 - protein, 160 aa, Mycobacterium tuberculosis; identical to SEQ ID NO: 62854

SEQ ID NO: 64838 - protein, 308 aa, Mycobacterium tuberculosis; identical to SEQ ID NO: 62853

SEQ ID NO: 64839 - protein, 378 aa, Mycobacterium tuberculosis; identical to SEQ ID NO: 62852

SEQ ID NO: 64840 - protein, 359 aa, Mycobacterium tuberculosis
MSTPTLPDMVAPSPRVRVKDRCRRMMGDLRLSVIDQCNLRCRYCMPEEHYTWLPRQDLLSVKEISAIVDVFLSVGVSKVRITGGEPLIRPDLPEIVRTLSAKVGEDSGLRDLAITTNGVLLADRVDGLKAAGMKRITVSLDTLQPERFKAISQRNSHDKVIAGIKAVAAAGFTDTKIDTTVMRGANHDELADLIEFARTVNAEVRFIEYMDVGGATHWAWEKVFTKANMLESLEKRYGRIEPLPKHDTAPANRYALPDGTTFGIIASTTEPFCATCDRSRLTADGLWLHCLYAISGINLREPLRAGATHDDLVETVTTGWRRRTDRGAEQRLAQRERGVFLPLSTLKADPHLEMHTRGG

SEQ ID NO: 64841 - protein, 389 aa, Mycobacterium tuberculosis; identical to SEQ ID NO: 62567

SEQ ID NO: 64842 - protein, 252 aa, Mycobacterium tuberculosis; identical to SEQ ID NO: 62793

SEQ ID NO: 64843 - protein, 445 aa, Mycobacterium tuberculosis; identical to SEQ ID NO: 62794

SEQ ID NO: 64844 - protein, 633 aa, Mycobacterium tuberculosis
MTTSLGTHYTWLLVALPLAGAAILLFGGRRTDAWGHLLGCAAALAAFGVGAMLLADMLGRDGLERAIHQQVFTWIPAGGLQVDFGLQIDQLSMCFVLLISGVGSLIHIYSVGYMAEDPDRRRFFGYLNLFLASMLLLVVADNYVLLYVGWEGVGLASYLLIGFWYHKPSAATAAKKAFVMNRVGDAGLAVGMFLTFSTFGTLSYAGVFAGVPAASRAVLTAIGLLMLLGACAKSAQVPLQAWLGDAMEGPTPVSALIHAATMVTAGVYLIVRSGPLYNLAPTAQLAVVIVGAVTLLFGAIIGCAKDDIKRALAASTISQIGYMVLAAGLGPAGYAFAIMHLLTHGFFKAGLFLGSGAVIHAMHEEQDMRRYGGLRAALPVTFATFGLAYLAIIGVPPFAGFFSKDAIIEAALGAGGIRGSLLGGAALLGAGVTAFYMTRVMLMTFFGEKRWTPGAHPHEAPAVMTWPMILLAVGSVFSGGLLAVGGTLRHWLQPVVGSHEEATHALPTWVATTLALGVVAVGIAVAYRMYGTAPIPRVAPVRVSALTAAARADLYGDAFNEEVFMRPGAQLTNAVVAVDDAGVDGSVNALATLVSQTSNRLRQMQTGFARNYALSMLVGAVLVAAALLVVQLW

SEQ ID NO: 64845 - protein, 312 aa, Mycobacterium tuberculosis; identical to SEQ ID NO: 64450

SEQ ID NO: 64846 - protein, 312 aa, Mycobacterium tuberculosis; identical to SEQ ID NO: 64450

SEQ ID NO: 64847 - protein, 313 aa, Mycobacterium tuberculosis
MTNVSGVDFQLRSVPLLSRVGADRADRLRTDMEAAAAGWPGAALLRVDSRNRVLVANGRVLLGAAIELADKPPPEAVFLGRVEGGRHVWAVRAALQPIADPDIPAEAVDLRGLGRIMDDTSSQLVSSASALLNWHDNARFSALDGAPTKPARAGWSRVNPITGHEEFPRIDPAVICLVHDGADRAVLARQAAWPERMFSLLAGFVEAGESFEVCVAREIREEIGLTVRDVRYLGSQQWPFPRSLMVGFHALGDPDEEFSFSDGEIAEAAWFTRDEVRAALAAGDWSSASESKLLLPGSISIARVIIESWAACE

SEQ ID NO: 64848 - protein, 231 aa, Mycobacterium tuberculosis; identical to SEQ ID NO: 62691

SEQ ID NO: 64849 - protein, 427 aa, Mycobacterium tuberculosis; identical to SEQ ID NO: 62503

SEQ ID NO: 64850 - protein, 380 aa, Mycobacterium tuberculosis
MSKKHTTLNASIIDTRRPTVAGADRHPGWHALRKIAARITTPLLPDDYLHLANPLWSARELRGRILGVRRETEDSATLFIKPGWGFSFDYQPGQYIGIGLLVDGRWRWRSYSLTSSPAASGSARMVTVTVKAMPEGFLSTHLVAGVKPGTIVRLAAPQGNFVLPDPAPPLILFLTAGSGITPVMSMLRTLVRRNQITDVVHLHSAPTAADVMFGAELAALAADHPGYRLSVRETRAQGRLDLTRIGQQVPDWRERQTWACGPEGVLNQADKVWSSAGASDRLHLERFAVSKTAPAGAGGTVTFARSGKSVAADAATSLMDAGEGAGVQLPFGCRMGICQSCVVDLVEGHVRDLRTGQRHEPGTRVQTCVSAASGDCVLDI

SEQ ID NO: 64851 - protein, 385 aa, Mycobacterium tuberculosis; identical to SEQ ID NO: 62767

SEQ ID NO: 64852 - protein, 1048 aa, Mycobacterium tuberculosis
MHISLHGGKGFANLTRRRRPSSASVLLVAGFGAFLAFLDSTIVNIAFPDIQRSFPSYDIGSLSWILNGYNIVFAAFMVAAGRLADLLGRRRTFLSGVLVFTIASGLCAVAGSVEQLVAFRVLQGIGAAILVPASLALVVEGFDAARRAHAIGLWGAAAAIAAGLGPPIGGLLVEWAGWRWVLLVNVPLGIVAAIATKRMLVESRASGRRRMPDLRGALLLAVTLGLVTLGLVKGPDWGWLSVATVGSFLASVLTSVGFVHSSRSHPAPLVEPALLRSRSFVAGNLLTLVAAAGFYCYGLTHVLYLNYVWHYSLLKAGFAIAPAAVVAAVVAAALGRVAGRHGHRVIVLVGALVWAGSLVWYLQRVGSEPDFLRVWLPGQLLQGIGVGATLPVLSSAALAEVAKGGSYATSSAVVSTTRQLGAVLGVAVMVILIGKPEHGTAEEALRRGWAMAAICFIAVAVAAAVLGRTNRNPVQMPAPEPAIAPRLEPPIPQPAAAPIEHWAAGDADPLGNLPLFAGLDAATLAQLGEHVEDVELEAGCYLFHEGDPSDSLYVIRTGRVQVLQDSIVLKELGRGEVLGELGLLIDAPRSATVRALRDTKLVRLTKAQFDEIADHGALAALVKVLATRLREAPPPATDSTSPEVVVSVIGVSGDAPVPAVAAGLLTALSARLRAVDPGRVDRDGLDRAERVADKVVLHAAVEDAGWRDFCLRVADRIVLVAGDPNPQAARLPARARGADLVLAGPAASREHRRQWEELITPRSVHVVHYRRILENVRPLAARIAGRSIGLVLGGGGARGFAHLGVLDELERVGVTIDRFAGTSMGAVIAVFGACGMDAATADAYAYEYFIRHNPLSDYAFPVRGLVRGRRTLTLLEAAFGDRLVEELPKEFRCVSVDLLARRPVVHRRGRLVDVIGCSLRLPGIYPPQVYNGRLHVDGGVLDNLPVSTRASPDGPLIAVSIGLGGGGPGSARQDGSPKVPGIGDTLMRTMTIGSQRGADAALSLAQVVIRPDTGAVGLLEFHQIDAAREAGRVAAREAMPHIMALLNR

SEQ ID NO: 64853 - protein, 949 aa, Mycobacterium tuberculosis
MLSKLLRLGEGRMVKRLKKVADYVGTLSDDVEKLTDAELRAKTDEFKRRLADQKNPETLDDLLPEAFAVAREAAWRVLDQRPFDVQVMGAAALHLGNVAEMKTGEGKTLTCVLPAYLNALAGNGVHIVTVNDYLAKRDSEWMGRVHRFLGLQVGVILATMTPDERRVAYNADITYGTNNEFGFDYLRDNMAHSLDDLVQRGHHYAIVDEVDSILIDEARTPLIISGPADGASNWYTEFARLAPLMEKDVHYEVDLRKRTVGVHEKGVEFVEDQLGIDNLYEAANSPLVSYLNNALKAKELFSRDKDYIVRDGEVLIVDEFTGRVLIGRRYNEGMHQAIEAKEHVEIKAENQTLATITLQNYFRLYDKLAGMTGTAQTEAAELHEIYKLGVVSIPTNMPMIREDQSDLIYKTEEAKYIAVVDDVAERYAKGQPVLIGTTSVERSEYLSRQFTKRRIPHNVLNAKYHEQEATIIAVAGRRGGVTVATNMAGRGTDIVLGGNVDFLTDQRLRERGLDPVETPEEYEAAWHSELPIVKEEASKEAKEVIEAGGLYVLGTERHESRRIDNQLRGRSGRQGDPGESRFYLSLGDELMRRFNGAALETLLTRLNLPDDVPIEAKMVTRAIKSAQTQVEQQNFEVRKNVLKYDEVMNQQRKVIYAERRRILEGENLKDQALDMVRDVITAYVDGATGEGYAEDWDLDALWTALKTLYPVGITADSLTRKDHEFERDDLTREELLEALLKDAERAYAAREAELEEIAGEGAMRQLERNVLLNVIDRKWREHLYEMDYLKEGIGLRAMAQRDPLVEYQREGYDMFMAMLDGMKEESVGFLFNVTVEAVPAPPVAPAAEPAELAEFAAAAAAAAQQRSAVDGGARERAPSALRAKGVASESPALTYSGPAEDGSAQVQRNGGGAHKTPAGVPAGASRRERREAARRQGRGAKPPKSVKKR

SEQ ID NO: 64854 - protein, 214 aa, Mycobacterium tuberculosis; identical to SEQ ID NO: 62756

SEQ ID NO: 64855 - protein, 495 aa, Mycobacterium tuberculosis
MAGRRRMKSVEQSIADTDEPTTRLRKDLTWWDLVVFGVSVVIGAGIFTVTASTAGDITGPAIWISFLIAAATCALAALCYAEFASTLPVAGSAYTFSYATFGEFLAWVIGWNLVLELAMGAAVVAKGWSSYLGTVFGFGNGTGHLGSLQLDWGALVIVTLVATLIALGTKLSSRFSAVVTAIKVSVVVLVVVVGAFYIRAANYSPFIPEPEVQHHGGGLDQSVFSLLTGAQGSHYGWYGVLAGASIVFFAFIGFDIVATMAEETKRPQRDVPRGILASLGVVTLLYVAVSVVLSGMVPYTQLRTVPGRGPANLATAFQANGVYWASGIISVGALAGLTTVVMVLMLGQCRVLFAMARDGLVPRQLAKTGSRGTPVRVTVLVAVLVATTASVFPITKLEEMVNVGTLFAFILVSAGVVVLRRTRPDLQRGFTAPWVPLLPIAAVCACLWLMLNLTALTWIRFGIWLVAGTAIYVGYGRRHSAQGLRQARESATRRC

SEQ ID NO: 64856 - protein, 408 aa, Mycobacterium tuberculosis; identical to SEQ ID NO: 62778

SEQ ID NO: 64857 - protein, 448 aa, Mycobacterium tuberculosis; identical to SEQ ID NO: 62698

SEQ ID NO: 64858 - protein, 1513 aa, Mycobacterium tuberculosis
MRFAQPSALSRFSALTRDWFTSTFAAPTAAQASAWAAIADGDNTLVIAPTGSGKTLAAFLWALDSLAGSEPMSERPAATRVLYVSPLKALAVDVERNLRTPLAGLTRLAERQGLPAPQIRVGVRSGDTPPALRRQLVSQPPDVLITTPESLFLMLTSAARQTLTGVQTVIIDEIHAIAATKRGAHLALSLERLDDLSSRRRAQRIGLSATVRPPEELARFLSGQSPTTIVAPPAAKTVELSVQVPVPDMANLTDNTIWPDVEARLVDLIESHNSTIVFANSRRLAERLTARLNEIHAARCGIELAPDTNQQVAGGAPAHIMGSGQTFGAPPVLARAHHGSISKEQRAVVEEDLKRGQLKAVVATSSLELGIDMGAVDLVIQVQAPPSVASGLQRIGRAGHQVGEISRGVLFPKHRTDLLGCAVSVQRMLAGEIETMRVPANPLDILAQHTVAAAALEPLDADAWFDTVRRAAPFATLPRSLFEATLDLLSGKYPSTEFAELRPRLVYDRDTGTLTARPGAQRLAVTSGGAIPDRGLFAVYLATERPSRVGELDEEMVYESRPGDVISLGATSWRITEITHDRVLVIPAPGQPARLPFWRGDDAGRPAELGAALGALTGELAALDRTAFGTRCAGLGFDDYATDNLWRLLDDQRTATAVVPTDSTLLVERFRDELGDWRVILHSPYGLRVHGPLALAVGRRLRDRYGIDEKPTASDNGIVVRLPDTVSAGEDSPPGAELFVFDADEIDPIVTTEVAGSALFASRFRESAARALLLPRRHPGRRSPLWQQRQRAARLLEVARKYPDFPIVLETVRECLQDVYDVPILVELMARIAQRRVRVAEAETAKPSPFAASLLFGYVGAFMYEGDTPLAERRAAALALDGTLLAELLGRVELRELLDPDVIAATSRQLQHLAADRVARDAEGVADLLRLLGPLTEDEIAARAGAPEVSGWLDGLRAAKRALVVSFAGRSWWVAVEDMGRLRDGVGAAVPVGLPASFTEAVADPLGELLGRYARTHTPFTTAAAAARFGLGLRVTADVLGRLASDGRLVRGEFVAAAKGSAGGEQWCDAEVLRILRRRSLAALRAQAEPVSTAAYGRFLPAWQHVSAGNSGIDGLAAVIDQLAGVRIPASAIEPLVLAPRIRDYSPAMLDELLASGDVTWSGAGSISGSDGWIALHPADSAPMTLAEPAEIDFTDAHRAILASLGTGGAYFFRQLTHDGLTEAELKAALWELIWAGRVTGDTFAPVRAVLGGAGTRKRAAPAHGGHRPPRLSRYRLTHAQARNADPTVAGRWSALPLPEPDSTLRAHYQAELLLNRHGVLTKDAVAAEGVAGGFATLYKVLSAFEDAGRCQRGYFIESLGGAQFAVASTVDRLRSYLDGVDPEQPDYHAVVLAAADPANPYGAALPWPASSADGTARPGRKAGALVVLVDGELAWFLERGGRSLLTFTDDPEANHAAAIGLADLVTAGRVASILVERADGMPVLQPGGRASAALTALLAAGFVRTPRGLRRR

SEQ ID NO: 64859 - protein, 394 aa, Mycobacterium tuberculosis; identical to SEQ ID NO: 62369

SEQ ID NO: 64860 - protein, 534 aa, Mycobacterium tuberculosis
MTPENWIAHDPDPQTAAELAACGPDELKARFSRPLAFGTAGLRGHLRGGPDAMNLAVVLRATWAVARVLTDRGLAGSPVIVGRDARHGSPAFAAAAAEVLAAAGFSVLLLPDPAPTPVVAFAVRHTGAAAGIQITASHNPATDNGYKVYVDGGLQLLAPTDRQIEAAMATAPPADQIARKTVNPSENRASDLIDRYIQRAAGVRRCAGSVRVALTPLHGVGGAMAVETLRRAGFTEVHTVATQFAPNPDFPTVTLPNPEEPGATDALLTLATDVDADVAIALDPDADRCAVGIPTVSGWRMLSGDETGWLLGDYILSQTDDRASPPETRVVASTVVSSRMLAAIAAHHAAVHVETLTGFKWLARADANLPGTLVYAYEEAIGHCVDPTAVRDKDGISAAVLVCDLVAALKGQGRSVTDALDELARCYGVHEVAALSRPVSGAVETTDLMRRLREDPPRRLAGFPATVTDIGDTLILTGGDDNMLVRVAVRPSGTEPKLKCYLEIRCAVTGDLPAARQLVRARIDELSASVRRWW

SEQ ID NO: 64861 - protein, 207 aa, Mycobacterium tuberculosis; identical to SEQ ID NO: 62371

SEQ ID NO: 64862 - protein, 590 aa, Mycobacterium tuberculosis; identical to SEQ ID NO: 62687

SEQ ID NO: 64863 - protein, 312 aa, Mycobacterium tuberculosis; identical to SEQ ID NO: 64450

SEQ ID NO: 64864 - protein, 502 aa, Mycobacterium tuberculosis
MTTLWQPHRNDYSPIPGRGVHARRGARRPRPRGGRAERPGTGQLTRSGRRALLVGLTAASVGVLYGYDLSAIAGALLSLSEEFELTTREQELLTTTAVLGQIAGALGGGILANAIGRKKSVVLIVAGYAVFALLGATSVSVPMLVVARLLLGVTIGLSVVVVPVYVAESAPAAVRGSLVTAYQLATLSGIVVGYLVGYLLAGSHGWRAMFGLAAAPATLLLPLLWRMPDTARWYLLKGRIADARSALRRIQPEADIDAELADMAAAVDERGGGIGEMVRRPYLRATLFVIALGFLVQITGINAIIYYSPRLFAAMGFAGYFAMLALPAMVQVAGLAAVCASLFLVDRLGRRPILLSGIATMITADAVLITVFANDSDGGTGLVLGFAGVLLFIIGFNFGFGSLVWVYAAESFPSRLRSMGSSPMLTSTLTANAIVAAFSLTMLRVLGGAGVFAVFGTFAVVAFVVVYRFAPETKGRKLEEIRHFWENGGRWPAERSPAADEP

SEQ ID NO: 64865 - protein, 383 aa, Mycobacterium tuberculosis; identical to SEQ ID NO: 62803

SEQ ID NO: 64866 - protein, 336 aa, Mycobacterium tuberculosis; identical to SEQ ID NO: 62649

SEQ ID NO: 64867 - protein, 484 aa, Mycobacterium tuberculosis
AQASPAAHGGSGGAGGNGGAGSAGNGGAGGAGGNGGAGGNGGGGDAGNAGSGGNGGKGGDGVGPGSTGGAGGKGGAGANGGSSNGNARGGNAGNGGHGGAGGSGDTGGAGGAGGQGGFGGTGGSGSGIGGGAGGNGGNGGAGGTGVVLGGKGGDGGNGDHGGPATNPGSGSRGGAGGSGGNGGAGGNATGSGGKGGAGGNGGDGSFGATSGPASIGVTGAPGGNGGKGGAGGSNPNGSGGDGGKGGNGGAGGNGGSIGANSGIVGGSGGAGGAGGAGGNGSLSSGEGGKGGDGGHGGDGVGGNSSVTQGGSGGGGGAGGAGGSGFFGGKGGFGGDGGQGGPNGGGTVGTVAGGGGNGGVGGRGGDGVFAGAGGQGGLGGQGGNGGGSTGGNGGLGGAGGGGGNAPDGGFGGNGGKGGQGGIGGGTQSATGLGGDGGDGGDGGNGGNSGAKAGGAGGKGQAGQPNSGTEPGFGGDGGLGGAGATP

SEQ ID NO: 64868 - protein, 154 aa, Mycobacterium tuberculosis; identical to SEQ ID NO: 62275

SEQ ID NO: 64869 - protein, 588 aa, Mycobacterium tuberculosis
MSFVVAVPEALAAAASDVANIGSALSAANAAAAAGTTGLLAAGADEVSAALASLFSGHAVSYQQVAAQATALHDQFVQALTGAGGSYALTEAANVQQNLLNAINAPTQALLGRPLIGDGAVGTASSPDGQDGGLLFGNGGAGYNSAATPGMAGGNGGNAGLIGNGGTGGSGGAGAAGGAGGSGGWLYGNGGNGGIGGNAIVAGGAGGNGGAGGAAGLWGSGGSGGQGGNGLTGNDGVNPAPVTNPALNGAAGDSNIEPQTSVLIGTQGGDGTPGGAGVNGGNGGAGGDANGNPANTSIANAGAGGNGAAGGDGGANGGAGGAGGQAASAGSSVGGDGGNGGAGGTGTNGHAGGAGGAGGAGGRGGWLVGNGGNGGNGAAGGNGAIGGTGGAGGVPANQGGNSALGTQPVGGDGGDGGNGGTGGTGGRGGDGGSGGAGGASGWLMGNGGNGGNGGTGGSGGVGGNGGIGGDGAGGGNATSTSSIPFDAHGGNGGAGGDAGHGGTGGDGGDGGHAGTGGRGGLLAGQHANSGNGGGGGTGGAGGTHGTPGSGNAGGTGTGNADSTNGGPGSDGLGGDAFNGSRGTDGNPG

SEQ ID NO: 64870 - protein, 294 aa, Mycobacterium tuberculosis; identical to SEQ ID NO: 62727

SEQ ID NO: 64871 - protein, 350 aa, Mycobacterium tuberculosis
MGGVLTLDAAFLGSVPADLGKALLERARADCGPVLHRAIESMREPLATMAGYHLGWWNADRSTAAGSSGKYFRAALVYAAAAACGGDVGDATPVSAAVELVHNFTLLHDDVMDGDATRRGRPTVWSVWGVGVAILLGDALHATAVRILTGLTDECVAVRAIRRLQMSCLDLCIGQFEDCLLEGQPEVTVDDYLRMAAGKTAALTGCCCALGALVANADDATIAALERFGHELGLAFQCVDDLIGIWGDPGVTGKPVGNDLARRKATLPVVAALNSRSEAATELAALYQAPAAMTASDVERATALVKVAGGGHVAQRCADERIQAAIAALPDAVRSPDLIALSQLICRREC

SEQ ID NO: 64872 - protein, 234 aa, Mycobacterium tuberculosis
MFRTVGDQASLWESVLPEELRRLPEELARVDALLDDSAFFCPFVPFFDPRMGRPSIPMETYLRLMFLKFRYRLGYESLCREVTDSITWRRFCRIPLEGSVPHPTTLMKLTTRCGEDAVAGLNEALLAKAASEKLLRTNKVRADTTVVEGDVGYPTDTGLLAKAVGSMARTVARIKAADAGSAPLGGSSGPRDRLQAAVTRRAATRSGAGLRAPDHRGASRDRRAGADRGCRGGT

SEQ ID NO: 64873 - protein, 308 aa, Mycobacterium tuberculosis; identical to SEQ ID NO: 62298

SEQ ID NO: 64874 - protein, 525 aa, Mycobacterium tuberculosis
MVQPADIDVPETPARPVLVVDFGAQYAQLIARRVREARVFSEVIPHTASIEEIRARQPVALVLSGGPASVYADGAPKLDPALLDLGVPVLGICYGFQAMAQALGGIVAHTGTREYGRTELKVLGGKLHSDLPEVQPVWMSHGDAVTAAPDGFDVVASSAGAPVAAFEAFDRRLAGVQYHPEVMHTPHGQQVLSRFLHDFAGLGAQWTPANIANALIEQVRTQIGDGHAICGLSGGVDSAVAAALVQRAIGDRLTCVFVDHGLLRAGERAQVQRDFVAATGANLVTVDAAETFLEALSGVSAPEGKRKIIGRQFIRAFEGAVRDVLDGKTAEFLVQGTLYPDVVESGGGSGTANIKSHHNVGGLPDDLKFTLVEPLRLLFKDEVRAVGRELGLPEEIVARQPFPGPGLGIRIVGEVTAKRLDTLRHADSIVREELTAAGLDNQIWQCPVVLLADVRSVGVQGDGRTYGHPIVLRPVSSEDAMTADWTRVPYEVLERISTRITNEVAEVNRVVLDITSKPPATIEWE

SEQ ID NO: 64875 - protein, 344 aa, Mycobacterium tuberculosis; identical to SEQ ID NO: 62414

SEQ ID NO: 64876 - protein, 408 aa, Mycobacterium tuberculosis
MKRFWENVGKPNDTTDGRGTTSLAMTPISQTPGLLAEAMVDLGAIEHNVRVLREHAGHAQLMAVVKADGYGHGATRVAQTALGAGAAELGVATVDEALALRADGITAPVLAWLHPPGIDFGPALLADVQVAVSSLRQLDELLHAVRRTGRTATVTVKVDTGLNRNGVGPAQFPAMLTALRQAMAEDAVRLRGLMSHMVYADKPDDSINDVQAQRFTAFLAQAREQGVRFEVAHLSNSSATMARPDLTFDLVRPGIAVYGLSPVPALGDMGLVPAMTVKCAVALVKSIRAGEGVSYGHTWIAPRDTNLALLPIGYADGVFRSLGGRLEVLINGRRCPGVGRICMDQFMVDLGPGPLDVAEGDEAILFGPGIRGEPTAQDWADLVGTIHYEVVTSPRGRITRTYREAENR

SEQ ID NO: 64877 - protein, 624 aa, Mycobacterium tuberculosis
MCGIVGYVGRRPAYVVVMDALRRMEYRGYDSSGIALVDGGTLTVRRRAGRLANLEEAVAEMPSTALSGTTGLGHTRWATHGRPTDRNAHPHRDAAGKIAVVHNGIIENFAVLRRELETAGVEFASDTDTEVAAHLVARAYRHGETADDFVGSVLAVLRRLEGHFTLVFANADDPGTLVAARRSTPLVLGIGDNEMFVGSDVAAFIEHTREAVELGQDQAVVITADGYRISDFDGNDGLQAGRDFRPFHIDWDLAAAEKGGYEYFMLKEIAEQPAAVADTLLGHFVGGRIVLDEQRLSDQELREIDKVFVVACGTAYHSGLLAKYAIEHWTRLPVEVELASEFRYRDPVLDRSTLVVAISQSGETADTLEAVRHAKEQKAKVLAICNTNGSQIPRECDAVLYTRAGPEIGVASTKTFLAQIAANYLLGLALAQARGTKYPDEVEREYHELEAMPDLVARVIAATGPVAELAHRFAQSSTVLFLGRHVGYPVALEGALKLKELAYMHAEGFAAGELKHGPIALIEDGLPVIVVMPSPKGSATLHAKLLSNIREIQTRGAVTIVIAEEGDETVRPYADHLIEIPAVSTLLQPLLSTIPLQVFAASVARARGYDVDKPRNLAKSVTVE

SEQ ID NO: 64878 - protein, 448 aa, Mycobacterium tuberculosis; identical to SEQ ID NO: 62417

SEQ ID NO: 64879 - protein, 151 aa, Mycobacterium tuberculosis; identical to SEQ ID NO: 62416

SEQ ID NO: 64880 - protein, 147 aa, Mycobacterium tuberculosis
MPTYAPKAGDTTRSWYVIDATDVVLGRLAVAAANLLRGKHKPTFAPNVDGGDFVIVINADKVAISGDKLQHKMVYRHSGYPGGLHKRTIGELMQRHPDRVVEKAILGMLPKNRLSRQIQRKLRVYAGPEHPHSAQQPVPYELKQVAQ

SEQ ID NO: 64881 - protein, 467 aa, Mycobacterium tuberculosis
MPTSDPGLRRVTVHAGAQAVDLTLPAAVPVATLIPSIVDILGDRGASPATAARYQLSALGAPALPNATTLAQCGIRDGAVLVLHKSSAQPPTPRCDDVAEAVAAALDTTARPQCQRTTRLSGALAASCITAGGGLMLVRNALGTNVTRYSDATAGVVAAAGLAALLFAVIACRTYRDPIAGLTLSVIATIFGAVAGLLAVPGVPGVHSVLVAAMAAAATSVLAMRITGCGGITLTAVACCAVVVAAATLVGAITAAPVPAIGSLATLASFGLLEVSARMAVLLAGLSPRLPPALNPDDADALPTTDRLTTRANRADAWLTSLLAAFAASATIGAIGTAVATHGIHRSSMGGIALAAVTGALLLLRARSADTRRSLVFAICGITTVATAFTVAADRALEHGPWIAALTAMLAAVAMFLGFVAPALSLSPVTYRTIELLECLALIAMVPLTAWLCGAYSAVRHLDLTWT

SEQ ID NO: 64882 - protein, 422 aa, Mycobacterium tuberculosis
MAQGLKLGLHIPLWAGYACSTLIIFPLVVYGMKVLSQLQLWTTPLWLILMAAPFGYLVVSHPDSIGQFFSYAGKDGHGGLSFGSVLLAAGVCLSLIAQIAEQIDYLRFMPPRTPENANRWWTWTLLAGPGWVAFGATKQIIGLFLAVYLMANIPGSSTIANQPVHQFMQIYRTFVPGWLALTLAVILVVLSQIKINVTNAYSGSLAWTNSFTRLTKHYPGRVVFLGVNLAIALILMEANMFDFLNTILGCYANCGMAWVVAVASDIGFNKYLLGLSPKTPEFRRGMLYAINPVGFGSLLLAAGLSIVTFFGGLGAALQPYSPLVAIVTALVMPPILAAATKGKYYLRRTHDGIDLPMYDEHGNPSAAVLTCHVCHQDFERPDMLACQTHGAHVCSLCLSTDKQAEHVLPGLARAHIPGDQVP

SEQ ID NO: 64883 - protein, 180 aa, Mycobacterium tuberculosis; identical to SEQ ID NO: 62324

SEQ ID NO: 64884 - protein, 347 aa, Mycobacterium tuberculosis; identical to SEQ ID NO: 62325

SEQ ID NO: 64885 - protein, 201 aa, Mycobacterium tuberculosis; identical to SEQ ID NO: 62307

SEQ ID NO: 64886 - protein, 139 aa, Mycobacterium tuberculosis
MPPAKKGPATSARKGQKTRRREKKNVPHGAAHIKSTFNNTIVTITDPQGNVIAWASSGHVGFKGSRKSTPFAAQLAAENAARKAQDHGVRKVDVFVKGPGSGRETAIRSLQAAGLEVGAISDVTPQPHNGVRPPKRRRV

SEQ ID NO: 64887 - protein, 124 aa, Mycobacterium tuberculosis; identical to SEQ ID NO: 62309

SEQ ID NO: 64888 - protein, 37 aa, Mycobacterium tuberculosis; identical to SEQ ID NO: 62771

SEQ ID NO: 64889 - protein, 73 aa, Mycobacterium tuberculosis; identical to SEQ ID NO: 61703

SEQ ID NO: 64890 - protein, 364 aa, Mycobacterium tuberculosis
MGTHAATMRVRAGVRSSPLLLHAGTPPTAAAAESGMRTLVTGSSGHLGEALVRTLRARGADIVSLDSRPSRYTNIVGCVSDRALLRDVMAGVEVVFHAAAHHKPQLAFLPRQAFLDTNIIGTQTVLDAAVAANVRAFVMTSSTTVFGDALTPPADQPAAWIDESVTPIPKNIYGVTKASSEDLCQLAHRNDGLACVVLRVARFFVEGDDMPDLYDGRSQDNIKANEYACRRVALEDAVDAHLNAAQRAPQLGFGRYLVSATTPFTRDDLTQLRTDAASVFARRVPLAAAVWTQRGWRFPDRLDRVYVNSRARRDLNWRPRFDLNAVAARLARGQSVHTPLSQLVGSKAYAHSSYHRGVFAPARP

SEQ ID NO: 64891 - protein, 346 aa, Mycobacterium tuberculosis; identical to SEQ ID NO: 64662

SEQ ID NO: 64892 - protein, 393 aa, Mycobacterium tuberculosis; identical to SEQ ID NO: 62455

SEQ ID NO: 64893 - protein, 400 aa, Mycobacterium tuberculosis; identical to SEQ ID NO: 62359

SEQ ID NO: 64894 - protein, 63 aa, Mycobacterium tuberculosis; identical to SEQ ID NO: 62358

SEQ ID NO: 64895 - protein, 1381 aa, Mycobacterium tuberculosis
MSFVLVSPETVAAVATDLKRIGASLAHENASAAASTTAVVSAAADEVSTAVAALFSQHAQGYQAAAAQVAAFHSRFVQALTAGAGAYAFAEAANASPLQSAMGAVSASAQTLLSRPLIGNGANATTPGGNGGDGGWLFGSGGNGAPGAAGQSGGNGGSAGLWGNGGAGGAGGSGGAAGGNGGNGGWLFGAGGTGGIGGTGAPGAMGGTGGNGGNGALLIGGGGLGGAGGMGGTGGGTGGTGGNGGNGALLIGAGGVGGAGGIGGQGTGAGGAAGAGGTGGNGGAGGLFMNGGDGGAGGQGGDGAAGDAAASAGGTGGKGGQGGDGGTGGAGGAGPVLFGHGGAGGMGGQGGTGGMGGAGGDGTTVIAAGTGGEGGTGGAAGAGGAAGARGALTSGGLAGGVGAGGTGGTGGTGGNGADAAAVVGFGANGDPGFAGGKGGNGGIGGAAVTGGVAGDGGTGGKGGTGGAGGAGNDAGSTGNPGGKGGDGGIGGAGGAGGAAGTGNGGHAGNTGDGGDGGTGGNGGNGTGGVNGADNTLNPDTPGGAGEPGGAGGAGGAGGAAGGPGGTGGTGGNGGNGGNGGNGGNGGNGGNGGNAGNNSTNAPVGGEGGAGGDGGAGGAGGAANGGTAGSQGTGGVGGDGGAGGNGGGGKAGTGNSGNFGVDGEAGFSGGAGGNGGVGGAAGANGGTGGSGGNGGDGGAGGIGGAGGNGIPGTGTEPAGGTGAKGGDGGDGGAGGAGGNAGGAGGQGGNAGQGGAGGAGGNAVIPGDGVGKAPHGDAGGSGGDGGKGGQGGSGGTGGSGAPIGGGAGGTGGSGGHAGKGGAGGIGAQGTTITVPGNGGNAGDGGNGGNAGAGGNGGSGDFGGNTTSGASGSGGNGGNAGTAGSGGAGGTGGTGLSGGNGGNGGNGGNGGDGGNGAHGTVGAQFVPATSLPTPNGGAGGNGGTGSNGGAPGPAGAPGPTTGGNAGSQGIGGDGGNGGDGGKGGDGADAVNVVFMPTEPQAATGTAGSAGDPTGGNGGPGTPGSPMVAPPPPTPITQVQQGGDGGAGGTGSTNANDGTATGGKGGEGGVGSILGGPGGNGGTGGNASATGTNGVANAGNGGKGGDGGQFGAGGNGGAGGSVTDGSAGSTAGNGGNGGNATNGTIAGQPAGGNGSAGGKGGDGGNIAAGATGTAGNGGNGGNGNDGAVNAGTGGSGGNGGNAGGGGANGGDGGAGGAGGAGGRGGKGIDGGFGGDGGNGGSNNGTGAGGNGGNGGTGGVGSVGAAGGDGGNGGTGGFAGFGGTAGNGGSGGTGGAGGDGGTGGDGGNGVIAGGGGTGGNGGASGAGGAGGTGGFAGNGNAGGNGGTGGASEDGDNGNAGSGATGGTGGNGGTGGDGGAAGLGGVA

SEQ ID NO: 64896 - protein, 278 aa, Mycobacterium tuberculosis; identical to SEQ ID NO: 62279

SEQ ID NO: 64897 - protein, 386 aa, Mycobacterium tuberculosis
MSTDTSGVGVREIDAGALPTRYARGWHCLGVAKDYLEGKPHGVEAFGTKLVVFADSHGDLKVLDGYCRHMGGDLSEGTVKGDEVACPFHDWRWGGDGRCKLVPYARRTPRMARTRSWTTDVRSGLLFVWHDHEGNPPDPAVRIPEIPEAASDEWTDWRWNRILIEGSNCRDIIDNVTDMAHFFYIHFGLPTYFKNVFEGHIASQYLHNVGRPDVDDLGTSYGEAHLDSEASYFGPSFMINWLHNRYGNYKSESILINCHYPVTQNSFVLQWGVIVEKPKGMSEEMTDKLSRVFTEGVSKGFLQDVEIWKHKTRIDNPLLVEEDGAVYQLRRWYEQFYVDVADIKPEMVERFEIEVDTKRANEFWNAEVEKNLKSREVSDDVPAEQH

SEQ ID NO: 64898 - protein, 359 aa, Mycobacterium tuberculosis
MSPTPRRRATLASLAAELKVSRTTVSNAFNRPDQLSADLRERVLATAKRLGYAGPDPVARSLRTRKAGAVGLVMAEPLTYFFSDPAARDFVAGVAQSCEELGQGLQLVSVGSSRSLADGTAAVLGAGVDGFVVYSVGDDDPYLQVVLQRRLPVVVVDQPKDLSGVSRVGIDDRAAMRELAGYVLGLGHRELGLLTMRLGRDRRQDLVDAERLRSPTFDVQRERIVGVWEAMTAAGVDPDSLTVVESYEHLPTSGGTAAKVALQANPRLTALMCTADILALSAMDYLRAHGIYVPGQMTVTGFDGVPEALSRGLTTVAQPSLHKGHRAGELLLKPPRSGLPVIEVLDTELVRGRTAGPPA

SEQ ID NO: 64899 - protein, 469 aa, Mycobacterium tuberculosis
MTDRARLRLHDTAAGVVRDFVPLRPGHVSIYLCGATVQGLPHIGHVRSGVAFDILRRWLLARGYDVAFIRNVTDIEDKILAKAAAAGRPWWEWAATHERAFTAAYDALDVLPPSAEPRATGHITQMIEMIERLIQAGHAYTGGGDVYFDVLSYPEYGQLSGHKIDDVHQGEGVAAGKRDQRDFTLWKGEKPGEPSWPTPWGRGRPGWHLECSAMARSYLGPEFDIHCGGMDLVFPHHENEIAQSRAAGDGFARYWLHNGWVTMGGEKMSKSLGNVLSMPAMLQRVRPAELRYYLGSAHYRSMLEFSETAMQDAVKAYVGLEDFLHRVRTRVGAVCPGDPTPRFAEALDDDLSVPIALAEIHHVRAEGNRALDAGDHDGALRSASAIRAMMGILGCDPLDQRWESRDETSAALAAVDVLVQAELQNREKAREQRNWALADEIRGRLKRAGIEVTDTADGPQWSLLGGDTK

SEQ ID NO: 64900 - protein, 159 aa, Mycobacterium tuberculosis
MNQLPRVGLGTDVHPIEPGRPCWLVGLLFPSADGCAGHSDGDVAVHALCDAVLSAAGLGDIGEVFGVDDPRWQGVSGADMLRHVVVLITQHGYRVGNAVVQVIGNRPKIGWRRLEAQAVLSRLLNAPVSVSATTTDGLGLTGRGEGLAAIATALVVSLR

SEQ ID NO: 64901 - protein, 231 aa, Mycobacterium tuberculosis
MVREAGEVVAIVPAAGSGERLAVGVPKAFYQLDGQTLIERAVDGLLDSGVVDTVVVAVPADRTDEARQILGHRAMIVAGGSNRTDTVNLALTVLSGTAEPEFVLVHDAARALTPPALVARVVEALRDGYAAVVPVLPLSDTIKAVDANGVVLGTPERAGLRAVQTPQGFTTDLLLRSYQRGSLDLPAAEYTDDASLVEHIGGQVQVVDGDPLAFKITTKLDLLLAQAIVRG

SEQ ID NO: 64902 - protein, 480 aa, Mycobacterium tuberculosis
MANARSQYRCSECRHVSAKWVGRCLECGRWGTVDEVAVLSAVGGTRRRSVAPASGAVPISAVDAHRTRPCPTGIDELDRVLGGGIVPGSVTLLAGDPGVGKSTLLLEVAHRWAQSGRRALYVSGEESAGQIRLRADRIGCGTEVEEIYLAAQSDVHTVLDQIETVQPALVIVDSVQTMSTSEADGVTGGVTQVRAVTAALTAAAKANEVALILVGHVTKDGAIAGPRSLEHLVDVVLHFEGDRNGALRMVRGVKNRFGAADEVGCFLLHDNGIDGIVDPSNLFLDQRPTPVAGTAITVTLDGKRPLVGEVQALLATPCGGSPRRAVSGIHQARAAMIAAVLEKHARLAIAVNDIYLSTVGGMRLTEPSADLAVAIALASAYANLPLPTTAVMIGEVGLAGDIRRVNGMARRLSEAARQGFTIALVPPSDDPVPPGMHALRASTIVAALQYMVDIADHRGTTLATPPSHSGTGHVPLGRGT

SEQ ID NO: 64903 - protein, 584 aa, Mycobacterium tuberculosis
MSFVIVAPEALMSVASEVAGIGSALNAANAAAAAPTTGVLAAAADEVSAAMAALFGAHAQEYQRLSAQAAGFHAQFVQALNAGVNSYASAEAANASPLQAVEQQVLGLINGPAQTLLGRPLIGNGADGAPGTGQPGGPGGLLWGNGGNGGSGVAGVGGPGGSGGAAGLFGHGGNGGAGGSNAAGAGGVGGAGGAGWLVGNGGAGGFGGVGTTVSGNGGAGGAAGAFGNGGVGGAGGAAVIGGLPGNGGAGGNAGLIGAGGDGGVGGVGAPGTNGMNPPPNQTSQAANGSPGANNGAGSGGAGLPGNPGAVPGRAGGAGGLGGSGSDTSEGPVTGGNGGNGGDGGPGAPGGNGAPGGIGVNTGTGWAYGGNGGNGGDGGAGARGGDGGNGGNGLALNGGNGIGGNGGAGGRGGTGAAGGNGGIGGGATGTLTFFGSGGDGGPGGAGANTAGTGGVGGVGGAGGQGGLLFGDGGNGGAGGAGGIGGTGASGGAGGKGGSGLVGGDGGNGGAGGAGGNGGKGGAGGAGGGAGMFSQPGVHGAGGTGGQGGAGGAGGAGGAAGAGTVVAGNPGDPGGFGAAGADGLPG

SEQ ID NO: 64904 - protein, 105 aa, Mycobacterium tuberculosis; identical to SEQ ID NO: 62284

SEQ ID NO: 64905 - protein, 439 aa, Mycobacterium tuberculosis
MSFVIAVPEFLSAAATDLANLGSTISAANAAASIPTTGVLAAGADDVSAAIAALFGAHAQAYQTISAQAATFHAQFVQTLSAGAGAYANAEAANVQQSLLNAINAPTQALLGRPLIGDGADGTAPGQNGGAGGLLYGNGGNGAAGVNAGIAGGSGGAAGLIGNGGSGGAGGAGAAGGSGGQGGLLYGNGGAGGNGGAATIPGGNGGAGGAGGNAWLFGNGGAGGLGAAGAAGAAGVNPLTVPAGQGSMGNNGEPGGPGQPGTEFGQTGGTGGTGGTGLSVGGTGGTGGTGGTGGAGGSGGRGGLLVGDGGAGGIGGTGGEGGIGARGGTGGQGGMGGAGQPGVGGDAGDGGNGGIGGDGGAGGDGGAGGAGGAGGLFGVSGSSGLGGAAGSGGNGGGGGEPGVAGSPGVGPAGRGGDGNLGQFGPEGAPGQPGQPGQPG

SEQ ID NO: 64906 - protein, 848 aa, Mycobacterium tuberculosis; identical to SEQ ID NO: 62599

SEQ ID NO: 64907 - protein, 505 aa, Mycobacterium tuberculosis
MSAADTAEDLPEQFRIRRDKRARLLAQGRDPYPVAVPRTHTLAEVRAAHPDLPIDTATEDIVGVAGRVIFARNSGKLCFATLQDGDGTQLQVMISLDKVGQAALDAWKADVDLGDIVYVHGAVISSRRGELSVLADCWRIAAKSLRPLPVAHKEMSEESRVRQRYVDLIVRPEARAVARLRIAVVRAIRTALQRRGFLEVETPVLQTLAGGAAARPFATHSNALDIDLYLRIAPELFLKRCIVGGFDKVFELNRVFRNEGADSTHSPEFSMLETYQTYGTYDDSAVVTRELIQEVADEAIGTRQLPLPDGSVYDIDGEWATIQMYPSLSVALGEEITPQTTVDRLRGIADSLGLEKDPAIHDNRGFGHGKLIEELWERTVGKSLSAPTFVKDFPVQTTPLTRQHRSIPGVTEKWDLYLRGIELATGYSELSDPVVQRERFADQARAAAAGDDEAMVLDEDFLAALEYGMPPCTGTGMGIDRLLMSLTGLSIRETVLFPIVRPHSN

SEQ ID NO: 64908 - protein, 188 aa, Mycobacterium tuberculosis; identical to SEQ ID NO: 62603

SEQ ID NO: 64909 - protein, 280 aa, Mycobacterium tuberculosis; identical to SEQ ID NO: 62602

SEQ ID NO: 64910 - protein, 760 aa, Mycobacterium tuberculosis
MNRKNVTRTITAIAVVVLLGWSFFYFSDDTRGYKPVDTSVAITQINGDNVKSAQIDDREQQLRLILKKGNNETDGSEKVITKYPTGYAVDLFNALSAKNAKVSTVVNQGSILGELLVYVLPLLLLVGLFVMFSRMQGGARMGFGFGKSRAKQLSKDMPKTTFADVAGVDEAVEELYEIKDFLQNPSRYQALGAKIPKGVLLYGPPGTGKTLLARAVAGEAGVPFFTISGSDFVEMFVGVGASRVRDLFEQAKQNSPCIIFVDEIDAVGRQRGAGLGGGHDEREQTLNQLLVEMDGFGDRAGVILIAATNRPDILDPALLRPGRFDRQIPVSNPDLAGRRAVLRVHSKGKPMAADADLDGLAKRTVGMTGADLANVINEAALLTARENGTVITGPALEEAVDRVIGGPRRKGRIISEQEKKITAYHEGGHTLAAWAMPDIEPIYKVTILARGRTGGHAVAVPEEDKGLRTRSEMIAQLVFAMGGRAAEELVFREPTTGAVSDIEQATKIARSMVTEFGMSSKLGAVKYGSEHGDPFLGRTMGTQPDYSHEVAREIDEEVRKLIEAAHTEAWEILTEYRDVLDTLAGELLEKETLHRPELESIFADVEKRPRLTMFDDFGGRIPSDKPPIKTPGELAIERGEPWPQPVPEPAFKAAIAQATQAAEAARSDAGQTGHGANGSPAGTHRSGDRQYGSTQPDYGAPAGWHAPGWPPRSSHRPSYSGEPAPTYPGQPYPTGQADPGSDESSAEQDDEVSRTKPAHG

SEQ ID NO: 64911 - protein, 395 aa, Mycobacterium tuberculosis
MKAPLRFGVFITPFHPTGQSPTVALQYDMERVVALDRLGYDEAWFGEHHSGGYELIACPEVFIAAAAERTTHIRLGTGVVSLPYHHPLMVADRWVLLDHLTRGRVMFGTGPGALPSDAYMMGIDPVEQRRMMQESLEAILALFRAAPDERIDRHSDWFTLREAQLHIRPYTWPYPEIATAAMISPSGPRLAGALGTSLLSLSMSVPGGYAALETAWGVVREQAAKAGRGEPDRADWRVLSIMHLSDSRDQAIDDCTYGLPDFSRYFGAAGFVPLANTVEGTQSSREFVEQYAAKGNCCIGTPDDAIAHIEDLLHRSGGFGTLLLLGHDWAPPPATFHSYELFARAVIPYFKGQLAAPRASHEWARGKRDQLIGRAGEAVVKAITEHVAEQGEAGS

SEQ ID NO: 64912 - protein, 240 aa, Mycobacterium tuberculosis
MIRLVRHSIALVAAGLAAALSGCDSHNSGSLGADPRQVTVFGSGQVQGVPDTLIADVGIQVTAADVTSAMNQTNDRQQAVIDALVGAGLDRKDIRTTRVTVAPQYSNPEPAGTATITGYRADNDIEVKIHPTDAASRLLALVVSTGGDATRISSVSYSIGDDSQLVKDARARAFQDAKNRADQYAQLSGLRLGKVISISEASGAAPTHEAPAPPRGLSAVPLEPGQQTVGFSVTVVWELT

SEQ ID NO: 64913 - protein, 323 aa, Mycobacterium tuberculosis; identical to SEQ ID NO: 62596

SEQ ID NO: 64914 - protein, 461 aa, Mycobacterium tuberculosis
MGPTRWRKSTHVVVGAAVLAFVAVVVAAAALVTTGGHRAGVRAPAPPPRPPTVKAGVVPVADTAATPSAAGVTAALAVVAADPDLGKLAGRITDALTGQELWQRLDDVPLVPASTNKILTAAAALLTLDRQARISTRVVAGGQNPQGPVVLVGAGDPTLSAAPPGQDTWYHGAARIGDLVEQIRRSGVTPTAVQVDASAFSGPTMAPGWDPADIDNGDIAPIEAAMIDAGRIQPTTVNSRRSRTPALDAGRELAKALGLDPAAVTIASAPAGARQLAVVQSAPLIQRLSQMMNASDNVMAECIGREVAVAINRPQSFSGAVDAVTSRLNTAHIDTAGAALVDSSGLSLDNRLTARTLDATMQAAAGPDQPALRPLLDLLPIAGGSGTLGERFLDAATDQGPAGWLRAKTGSLTAINSLVGVLTDRSGRVLTFAFISNEAGPNGRNAMDALATKLWFCGCTT

SEQ ID NO: 64915 - protein, 211 aa, Mycobacterium tuberculosis; identical to SEQ ID NO: 62600

SEQ ID NO: 64916 - protein, 934 aa, Mycobacterium tuberculosis
MADPKTKGRGSGGNGSGRRLVIVESPTKARKLASYLGSGYIVESSRGHIRDLPRAASDVPAKYKSQPWARLGVNVDADFEPLYIISPEKRSTVSELRGLLKDVDELYLATDGDREGEAIAWHLLETLKPRIPVKRMVFHEITEPAIRAAAEHPRDLDIDLVDAQETRRILDRLYGYEVSPVLWKKVAPKLSAGRVQSVATRIIVARERDRMAFRSAAYWDILAKLDASVSDPDAAPPTFSARLTAVAGRRVATGRDFDSLGTLRKGDEVIVLDEGSATALAAGLDGTQLTVASAEEKPYARRPYPPFMTSTLQQEASRKLRFSAERTMSIAQRLYENGYITYMRTDSTTLSESAINAARTQARQLYGDEYVAPAPRQYTRKVKNAQEAHEAIRPAGETFATPDAVRRELDGPNIDDFRLYELIWQRTVASQMADARGMTLSLRITGMSGHQEVVFSATGRTLTFPGFLKAYVETVDELVGGEADDAERRLPHLTPGQRLDIVELTPDGHATNPPARYTEASLVKALEELGIGRPSTYSSIIKTIQDRGYVHKKGSALVPSWVAFAVTGLLEQHFGRLVDYDFTAAMEDELDEIAAGNERRTNWLNNFYFGGDHGVPDSVARSGGLKKLVGINLEGIDAREVNSIKLFDDTHGRPIYVRVGKNGPYLERLVAGDTGEPTPQRANLSDSITPDELTLQVAEELFATPQQGRTLGLDPETGHEIVAREGRFGPYVTEILPEPAADAAAAAQGVKKRQKAAGPKPRTGSLLRSMDLQTVTLEDALRLLSLPRVVGVDPASGEEITAQNGRYGPYLKRGNDSRSLVTEDQIFTITLDEALKIYAEPKRRGRQSASAPPLRELGTDPASGKPMVIKDGRFGPYVTDGETNASLRKGDDVASITDERAAELLADRRARGPAKRPARKAARKVPAKKAAKRD

SEQ ID NO: 64917 - protein, 352 aa, Mycobacterium tuberculosis
MLGDTEVLANLRVLQTELTGAGILEPLLSADGTTDVLVTAPDSVWVDDGNGLRRSQIRFADESAVRRLAQRLALAAGRRLDDAQPWVDGQLTGIGVGGFAVRLHAVLPPVATQGTCLSLRVLRPATQDLAALAAAGAIDPAAAALVADIVTARLAFLVCGGTGAGKTTLLAAMLGAVSPDERIVCVEDAAELAPRHPHLVKLVARRANVEGIGEVTVRQLVRQALRMRPDRIVVGEVRGAEVVDLLAALNTGHEGGAGTVHANNPGEVPARMEALGALGGLDRAALHSQLAAAVQVLLHVARDRAGRRRLAEIAVLRQAEGRVQAVTVWHADRGMSDDAAALHDLLRSRASA

SEQ ID NO: 64918 - protein, 548 aa, Mycobacterium tuberculosis
MSVPAAPLLSVEGLEVTFGTDAPAVCGVDLAVRSGQTVAVVGESGSGKSTTAAAILGLLPAGGRITAGRVVFDGRDITGADAKRLRSIRGREIGYVPQDPMTNLNPVWKVGFQVTEALRANTDGRAARRRAVELLAEAGLPDPAKQAGRYPHQLSGGMCQRALIAIGLAGRPRLLIADEPTSALDVTVQRQVLDHLQGLTDELGTALLLITHDLALAAQRAEAVVVVRRGVVVESGAAQSILQSPQHEYTRRLVAAAPSLTARSRRPPESRSRATTQAGDILVVSELTKIYRESRGAPWRRVESRAVDGVSFRLPRASTLAIVGESGSGKSTLARMVLGLLQPTSGTVVFDGTYDVGALARDQVLAFRRRVQPVFQNPYSSLDPMYSVFRAIEEPLRVHHVGDRRQRQRAVRELVDQVALPSSILGRRPRELSGGQRQRVAIARALALRPEVLVCDEAVSALDVLVQAQILDLLADLQADLGLTYLFISHDLAVIRQIADDVLVMRAGRVVEHASTEEVFSRPRHEYTRQLLQAIPGAPSAPRKVGNL

SEQ ID NO: 64919 - protein, 266 aa, Mycobacterium tuberculosis
MIAAALILLILVVAAFPSLFTAADPTYADPSQSMLAPSAAHWFGTDLQGHDIYSRTVYGARASVTVGLGATLAVFVVGGALGALAGFYGSWIDAVVSRVTDVFLGLPLLLAAIVLMQVMHHRTVWTVIAILALFGWPQVARIARGAVLEVRASDYVLAAKALGLNRFQILLRHALPNAVGPVIAVATVALGIFIVTEATLSYLGVGLPTSVVSWGGDINVAQTRLRSGSPILFYPAGALAITVLAFMMMGDALRDALDPASRAWRA

SEQ ID NO: 64920 - protein, 308 aa, Mycobacterium tuberculosis; identical to SEQ ID NO: 62502

SEQ ID NO: 64921 - protein, 651 aa, Mycobacterium tuberculosis
MSESTPEVSSSYPPPAHFAEHANARAELYREAEEDRLAFWAKQANRLSWTTPFTEVLDWSGAPFAKWFVGGELNVAYNCVDRHVEAGHGDRVAIHWEGEPVGDRRTLTYSDLLAEVSKAANALTDLGLVAGDRVAIYLPLIPEAVIAMLACARLGIMHSVVFGGFTAAALQARIVDAQAKLLITADGQFRRGKPSPLKAAADEALAAIPDCSVEHVLVVRRTGIEMAWSEGRDLWWHHVVGSASPAHTPEPFDSEHPLFLLYTSGTTGKPKGIMHTSGGYLTQCCYTMRTIFDVKPDSDVFWCTADIGWVTGHTYGVYGPLCNGVTEVLYEGTPDTPDRHRHFQIIEKYGVTIYYTAPTLIRMFMKWGREIPDSHDLSSLRLLGSVGEPINPEAWRWYRDVIGGGRTPLVDTWWQTETGSAMISPLPGIAAAKPGSAMTPLPGISAKIVDDHGDPLPPHTEGAQHVTGYLVLDQPWPSMLRGIWGDPARYWHSYWSKFSDKGYYFAGDGARIDPDGAIWVLGRIDDVMNVSGHRISTAEVESALVAHSGVAEAAVVGVTDETTTQAICAFVVLRANYAPHDRTAEELRTEVARVISPIARPRDVHVVPELPKTRSGKIMRRLLRDVAENRELGDTSTLLDPTVFDAIRAAK

SEQ ID NO: 64922 - protein, 273 aa, Mycobacterium tuberculosis; identical to SEQ ID NO: 62720

SEQ ID NO: 64923 - protein, 154 aa, Mycobacterium tuberculosis
MAELKSQLRSDLTQAMKTQDKLRTATIRMLLAAIQTEEVSGKQARELSDDEVIKVLARESRKRGEAAEIYTQNGRGELAATEHAEARIIDEYLPTPLTEGELADVADTAIAEVAEELGHRPSMKQMGLVMKAATVIAAGKADGARLSAAVKERL

SEQ ID NO: 64924 - protein, 517 aa, Mycobacterium tuberculosis
MSDAILGEQLAESSDFIAAIDQGTTSTRCMIFDHHGAEVARHQLEHEQILPRAGWVEHNPVEIWERTASVLISVLNATNLSPKDIAALGITNQRETTLVWNRHTGRPYYNAIVWQDTRTDRIASALDRDGRGNLIRRKAGLPPATYFSGGKLQWILENVDGVRAAAENGDALFGTPDTWVLWNLTGGPRGGVHVTDVTNASRTMLMDLETLDWDDELLSLFSIPRAMLPEIASSAPSEPYGVTLATGPVGGEVPITGVLGDQHAAMVGQVCLAPGEAKNTYGTGNFLLLNTGETIVRSNNGLLTTVCYQFGNAKPVYALEGSIAVTGSAVQWLRDQLGIISGAAQSEALARQVPDNGGMYFVPAFSGLFAPYWRSDARGAIVGLSRFNTNAHLARATLEAICYQSRDVVDAMEADSGVRLQVLKVDGGITGNDLCMQIQADVLGVDVVRPVVAETTALGVAYAAGLAVGFWAAPSDLRANWREDKRWTPTWDDDERAAGYAGWRKAVQRTLDWVDVS

SEQ ID NO: 64925 - protein, 345 aa, Mycobacterium tuberculosis
MGLSIGIVGATGQVGQVMRTLLDERDFPASAVRFFASARSQGRKLAFRGQEIEVEDAETADPSGLDIALFSAGSAMSKVQAPRFAAAGVTVIDNSSAWRKDPDVPLVVSEVNFERDAHRRPKGIIANPNCTTMAAMPVLKVLHDEARLVRLVVSSYQAVSGSGLAGVAELAEQARAVIGGAEQLVYDGGALEFPPPNTYVAPIAFNVVPLAGSLVDDGSGETDEDQKLRFESRKILGIPDLLVSGTCVRVPVFTGHSLSINAEFAQPLSPERARELLDGATGVQLVDVPTPLAAAGVDESLVGRIRRDPGVPDGRGLALFVSGDNLRKGAALNTIQIAELLTADL

SEQ ID NO: 64926 - protein, 421 aa, Mycobacterium tuberculosis; identical to SEQ ID NO: 62697

SEQ ID NO: 64927 - protein, 413 aa, Mycobacterium tuberculosis
MVTTRARLALAAGAGARWASRVTGRGAGAMIGGLVAMTLDRSILRQLGMGRRTVVVTGTNGKSTTTRMTAAALGTLGAVATNAEGANMDAGLVAALAAHRDAELAVLEVDEMHVPHISDAVDPAVVVLLNLSRDQLDRVGEINVIERTLRAGLARHPDAVVVANCDDVLMTSAAYDSPNVVWVAAGGAWSNDSVSCPRSGEVIVRKAPSQEDHWYSTGADFKRPAPHWWFDDATLYGPDGLALPMRLALPGSVNRGNAAQAVAAAVALGADPAVAVAAVCQVDEVAGRYRTVRIGAHQARILLAKNPAGWQEALAMVDKHADGVVIAVNGRVPDGEDLSWLWDVRFEHFEKTRVVAAGERGTDLAVRLGYAGVEHTLVHDTVAAIASCPPGRVEVVANYTAFLQLQRALARRG

SEQ ID NO: 64928 - protein, 231 aa, Mycobacterium tuberculosis; identical to SEQ ID NO: 62847

SEQ ID NO: 64929 - protein, 203 aa, Mycobacterium tuberculosis; identical to SEQ ID NO: 62846

SEQ ID NO: 64930 - protein, 133 aa, Mycobacterium tuberculosis; identical to SEQ ID NO: 62850

SEQ ID NO: 64931 - protein, 578 aa, Mycobacterium tuberculosis
MALYRKYRPASFAEVVGQEHVTAPLSVALDAGRINHAYLFSGPRGCGKTSSARILARSLNCAQGPTANPCGVCESCVSLAPNAPGSIDVVELDAASHGGVDDTRELRDRAFYAPVQSRYRVFIVDEAHMVTTAGFNALLKIVEEPPEHLIFIFATTEPEKVLPTIRSRTHHYPFRLLPPRTMRALLARICEQEGVVVDDAVYPLVIRAGGGSPRDTLSVLDQLLAGAADTHVTYTRALGLLGVTDVALIDDAVDALAACDAAALFGAIESVIDGGHDPRRFATDLLERFRDLIVLQSVPDAASRGVVDAPEDALDRMREQAARIGRATLTRYAEVVQAGLGEMRGATAPRLLLEVVCARLLLPSASDAESALLQRVERIETRLDMSIPAPQAVPRPSAAAAEPKHQPAREPRPVLAPTPASSEPTVAAVRSMWPTVRDKVRLRSRTTEVMLAGATVRALEDNTLVLTHESAPLARRLSEQRNADVLAEALKDALGVNWRVRCETGEPAAAASPVGGGANVATAKAVNPAPTANSTQRDEEEHMLAEAGRGDPSPRRDPEEVALELLQNELGARRIDNA

SEQ ID NO: 64932 - protein, 1065 aa, Mycobacterium tuberculosis
MHTVATNNAAPVIAAGPVGPSRRRRRVHAPLTRRRQPSSSAVLLVAAFGAFLAFLDSTIVNVAFPDIQRHFHSDISDLSWMLNAYNIVFAAFLVAAGRLADLMGRKRVFILGVALFTVASGLCAIAESVGELVAFRVLQGIGAAVLVPASLGLVVEAFPAERRAHGVNLWGAAGAIAAGLGPPIGGALIEADGWRWVFLVNLPLGVFAVLAARRALVENRAAGRRRVPDVRGAVLLAFALGLLTLGLIKGPDWGWASLPTSGSLLAAAVAMVGFVMSSRHHPAPMVEPTLLRIQSFVAGTGLTAVASAGFYAYLLTHVLFLNYVWGYTLLEAGMAVAPAALVAAVVAAVLGRVADRHGYRFIVGIGALIWAASLLWYLKVVGSQPDFLGEWLPGQILQGIGVGATFPLLGSAALARLAKGGSYATASAVTGTIRQVGAVIGVAVLVILVGTPAPGAAEEALRHGWALAAICFVAVGIGALSLGRIRPVPAAVEPPPGPPVAPLGARRPPRPAPVASPAAAVAPTPKTSREVNLLEALRFARPDTQQIELQAGSYLFHAGDVSDALYVVRSGRLQVLAGDGAKDEVVAELGRGQVVGELGVLLDAPRSASVRAVRDSSLMRVTKAEFAKIADAGVLGALAGVLAKRQHQTRVASQRTTPEVVVAVVGVDANAPVAMVATELCRALSTRLRAVAPGRVDCDGLERAEQTADRVVLHAAVGDARWREFCLRVADRVVLVASNPAVPVAPLPTRATGADLVLAGRPAGREHRRAWEQLITPRSMHVVRREFVADDLRVLATRIAGRSVGLVLSGGAARACAHLGVLEELEAAGVTVDRFAGTSMGAIIAALAASGLDAAGVDAQIYEHFVRKSHGDYTLPSKGLIRGKRTQSTLRTIFGDHLVEELPKHFRCVSVDLLARRPVVHRQGPLADVVGCSMRLPFLYAPLPYGGTLHVDGGVLDNVPVTTLVGKDGPLIAVNVASGGNPSPASGGHRRGKPRVPGLTDTLLRTMTISSAMASEKVLAQADLVIKPNPIGVGLMEYHQIDRAREAGRIAAREALPQIMELVHG

SEQ ID NO: 64933 - protein, 376 aa, Mycobacterium tuberculosis; identical to SEQ ID NO: 62849

SEQ ID NO: 64934 - protein, 273 aa, Mycobacterium tuberculosis; identical to SEQ ID NO: 62731

SEQ ID NO: 64935 - protein, 399 aa, Mycobacterium tuberculosis; identical to SEQ ID NO: 62798

SEQ ID NO: 64936 - protein, 273 aa, Mycobacterium tuberculosis
MKPTVPALVACDVDGTLLDDGETVTKRTRDAVHAAVDAGTHFILATGRPPRWVRPIVDALGFAPMAVCANGAVIYDPGTDRVMSVRTLPVDALATLAEVATRVIPGAGLAVERIGERAHDTATPQFVSSPGYEHAWLNPDNTEVSIDHLLSAPAIKLLIRKAGAASADMAAELAKHVGFEGDITYSTNNGLVEIVPLGISKATGVDEIARPLGISDAEVVAFGDMPNDVPMLLRAGLGVAMGNAHPDALAVADEVTAPNSEDGVARVLERWWS

SEQ ID NO: 64937 - protein, 259 aa, Mycobacterium tuberculosis; identical to SEQ ID NO: 62799

SEQ ID NO: 64938 - protein, 408 aa, Mycobacterium tuberculosis
MMARFEVPEGWCVQAFRFTLDPTEDQARALARHFGARRKAYNWAVATLKADIEAWRVTGIGTVKPSLRVLRKRWNTVKDEVCVNAETGAVWWPECSKEAYADGIGGAVDAYWNWQNSRSGKREGKTMGFPRFKKKGRDQDRVTFTTGAMRVEPDRRHLTLPVVGTVRTHENTRRIERLIATGRARVLAISVRRNGTRLDASVRVLVQRPQQPNVAQPGSRVGVDVGVRRLATVANEAGAVLEEVPNPRPLDTALKELRYASRARSRCTKGSRRYRERTTEISRLHRRVNDVRTHHLHVLTTRLAQTHGHIVVEGLDAAGMLRQKGLPGARARRRGLSDSALGTPRRHLSYKTGWYGSALVVADRWFPSLSVEPTVRPGLARLVAVKRGREAAAWLPNNPETGCKSRDH

SEQ ID NO: 64939 - protein, 263 aa, Mycobacterium tuberculosis
MSENSHHRLATTSLTLPPGARIERHRHPSHQIVYPSAGAVSVTTHAGTWITPVNRAIWIPAGCWHQHKFHGHTQFHGVALDPQRYRGGPATPTVLAVNPLMRELVIACSQADRTDTDEHHRMLAVLQDQLPTTSIREPLWVPSPTDRRLRHACALIADNLTQPLTLQQIGGRIGVSQRTLSRLFSDELGMTFPQWRTQLRLQHALVLLAERHDVTSVASECGWATPSAFIDTYRQAFGHTPGQAAKPMAATRLTRLRRARDRR

SEQ ID NO: 64940 - protein, 419 aa, Mycobacterium tuberculosis; identical to SEQ ID NO: 62797

SEQ ID NO: 64941 - protein, 274 aa, Mycobacterium tuberculosis
MTWADEVLAGHPFVVAHRGASAARPEHTLAAYDLALKEGADGVECDVRLTRDGHLVCVHDRRLDRTSTGAGLVSTMTLAQLRELEYGAWHDSWRPDGSHGDTSLLTLDALVSLVLDWHRPVKIFVETKHPVRYGSLVENKLLALLHRFGIAAPASADRSRAVVMSFSAAAVWRIRRAAPLLPTVLLGKTPRYLTSSAATAVGATAVGPSLPALKEYPQLVDRSAAQGRAVYCWNVDEYEDIDFCREVGVAWIGTHHPGRTKAWLEDGRANGTTR

SEQ ID NO: 64942 - protein, 488 aa, Mycobacterium tuberculosis
MADPGGFLKYTHRKLPKRRPVPLRLRDWREVYEEFDNESLRQQATRCMDCGIPFCHNGCPLGNLIPEWNDLVRRGRWRDAIERLHATNNFPDFTGRLCPAPCEPACVLGINQDPVTIKQIELEIIDKAFDEGWVQPRPPRKLTGQTVAVVGSGPAGLAAAQQLTRAGHTVTVFEREDRIGGLLRYGIPEFKMEKRHLDRRLDQMRSEGTEFRPGVNVGVDISAEKLRADFDAVVLAGGATAWRELPIPGRELEGVHQAMEFLPWANRVQEGDDVLDEDGQPPITAKGKKVVIIGGGDTGADCLGTVHRQGAIAVHQFEIMPRPPDARAESTPWPTYPLMYRVSAAHEEGGERVFSVNTEAFVGTDGRVSALRAHEVTMLDGKFVKVEGSDFELEADLVLLAMGFVGPERAGLLTDLGVKFTERGNVARGDDFDTSVPGVFVAGDMGRGQSLIVWAIAEGRAAAAAVDRYLMGSSALPAPVKPTAAPLQ

SEQ ID NO: 64943 - protein, 1527 aa, Mycobacterium tuberculosis
MTPKRVGLYNPAFEHDSCGVAMVVDMHGRRSRDIVDKAITALLNLEHRGAQGAEPRSGDGAGILIQVPDEFLREAVDFELPAPGSYATGIAFLPQSSKDAAAACAAVQKIAEAEGLQVLGWRSVPTDDSSLGALSRDAMPTFRQVFLAGASGMALERRCYVVRKRAEHELGTKGPGQDGPGRETVYFPSLSGQTLVYKGMLTTPQLKAFYLDLQDERLTSALGIVHSRFSTNTFPSWPLAHPFRRIAHNGEINTVTGNENWMRAREALIKTDIFGSAADVEKLFPICTPGASDTARFDEVLELLHLGGRSLAHAVLMMIPEAWERHESMDPARRAFYQYHASLMEPWDGPASMTFTDGTVVGAVLDRNGLRPSRIWVTDDGLVVMASEAGVLDLHPSTVVRRMRLQPGRMFLVDTAQGRIVSDEEIKADLAAEHPYQEWLDNGLVPLDELPEGKDVRMPHHRIVMRQLAFGYTYEELNLLVAPMARLGAEPIGSMGTDTPVAVLSQRPRMLYDYFHQLFAQVTNPPLDAIREEVVTSLQGTTGGERDLLNPDQNSCHQIVLPQPILRNHELAKLVSLDPNDKVNGRPHGLRSKVIRCLYRVSEGGAGLAAALEEVRGAAAAAIADGARIIILSDRESDEEMAPIPSLLAVAGVHHHLVRERTRTQVGLVVESGDAREVHHMAALVGFGAAAINPYLVFESIEDMLDRGVIEGIDRTAALNNYIKAAGKGVLKVMSKMGISTLASYTGAQLFQAVGISEQVLDEYFTGLTCPTGGITLDDIAADVAARHRLAYLDRPDERAHRELEVGGEYQWRREGEYHLFNPETVFKLQHSTRTGQYKIFKEYTRLVDDQSERMASLRGLLKFRTGVRPPVPLDEVEPASEIVKRFSTGAMSYGSISAEAHETLAIAMNRLGARSNCGEGGEDVKRFDRDPNGDWRRSAIKQVASARFGVTSHYLTNCTDLQIKMAQGAKPGEGGQLPGHKVYPWVAEVRHSTPGVGLISPPPHHDIYSIEDLAQLIHDLKNANPSARVHVKLVSENGVGTVAAGVSKAHADVVLISGHDGGTGATPLTSMKHAGAPWELGLAETQQTLLLNGLRDRIVVQVDGQLKTGRDVMIATLLGAEEFGFATAPLVVAGCIMMRVCHLDTCPVGVATQNPLLRERFTGKPEFVENFFMFIAEEVREYLAQLGFRTVNEAVGQAGALDTTLARAHWKAHKLDLAPVLHEPESAFMNQDLYCSSRQDHGLDKALDQQLIVMSREALDSGKPVRFSTTIGNVNRTVGTMLGHELTKAYGGQGLPDGTIDITFDGSAGNSFGAFVPKGITLRVYGDANDYVGKGLSGGRIVVRPSDDAPQDYVAEDNIIGGNVILFGATSGEVYLRGVVGERFAVRNSGAHAVVEGVGDHGCEYMTGGRVVILGRTGRNFAAGMSGGVAYVYDPDGELPANLNSEMVELETLDEDDADWLHGTIQVHVDATDSAVGQRILSDWSGQQRHFVKVMPRDYKRVLQAIALAERDGVDVDKAIMAAAHG

SEQ ID NO: 64944 - protein, 666 aa, Mycobacterium tuberculosis
MAADYDKLFRPHEGMEAPDDMAAQPFFDPSASFPPAPASANLPKPNGQTPPPTSDDLSERFVSAPPPPPPPPPPPPPTPMPIAAGEPPSPEPAASKPPTPPMPIAGPEPAPPKPPTPPMPIAGPEPAPPKPPTPPMPIAGPAPTPTESQLAPPRPPTPQTPTGAPQQPESPAPHVPSHGPHQPRRTAPAPPWAKMPIGEPPPAPSRPSASPAEPPTRPAPQHSRRARRGHRYRTDTERNVGKVATGPSIQARLRAEEASGAQLAPGTEPSPAPLGQPRSYLAPPTRPAPTEPPPSPSPQRNSGRRAERRVHPDLAAQHAAAQPDSITAATTGGRRRKRAAPDLDATQKSLRPAAKGPKVKKVKPQKPKATKPPKVVSQRGWRHWVHALTRINLGLSPDEKYELDLHARVRRNPRGSYQIAVVGLKGGAGKTTLTAALGSTLAQVRADRILALDADPGAGNLADRVGRQSGATIADVLAEKELSHYNDIRAHTSVNAVNLEVLPAPEYSSAQRALSDADWHFIADPASRFYNLVLADCGAGFFDPLTRGVLSTVSGVVVVASVSIDGAQQASVALDWLRNNGYQDLASRACVVINHIMPGEPNVAVKDLVRHFEQQVQPGRVVVMPWDRHIAAGTEISLDLLDPIYKRKVLELAAALSDDFERAGRR

SEQ ID NO: 64945 - protein, 729 aa, Mycobacterium tuberculosis
MSITRPTGSYARQMLDPGGWVEADEDTFYDRAQEYSQVLQRVTDVLDTCRQQKGHVFEGGLWSGGAANAANGALGANINQLMTLQDYLATVITWHRHIAGLIEQAKSDIGNNVDGAQREIDILENDPSLDADERHTAINSLVTATHGANVSLVAETAERVLESKNWKPPKNALEDLLQQKSPPPPDVPTLVVPSPGTPGTPGTPITPGTPITPGTPITPIPGAPVTPITPTPGTPVTPVTPGKPVTPVTPVKPGTPGEPTPITPVTPPVAPATPATPATPVTPAPAPHPQPAPAPAPSPGPQPVTPATPGPSGPATPGTPGGEPAPHVKPAALAEQPGVPGQHAGGGTQSGPAHADESAASVTPAAASGVPGARAAAAAPSGTAVGAGARSSVGTAAASGAGSHAATGRAPVATSDKAAAPSTRAASARTAPPARPPSTDHIDKPDRSESADDGTPVSMIPVSAARAARDAATAAASARQRGRGDALRLARRIAAALNASDNNAGDYGFFWITAVTTDGSIVVANSYGLAYIPDGMELPNKVYLASADHAIPVDEIARCATYPVLAVQAWAAFHDMTLRAVIGTAEQLASSDPGVAKIVLEPDDIPESGKMTGRSRLEVVDPSAAAQLADTTDQRLLDLLPPAPVDVNPPGDERHMLWFELMKPMTSTATGREAAHLRAFRAYAAHSQEIALHQAHTATDAAVQRVAVADWLYWQYVTGLLDRALAAAC

SEQ ID NO: 64946 - protein, 480 aa, Mycobacterium tuberculosis; identical to SEQ ID NO: 62863

SEQ ID NO: 64947 - protein, 1184 aa, Mycobacterium tuberculosis
MRPSPGEVPTASQRQPELSDAALVSHSWAMAFATLISRITGFARIVLLAAILGAALASSFSVANQLPNLVAALVLEATFTAIFVPVLARAEQDDPDGGAAFVRRLVTLATTLLLGATTLSVLAAPLLVRLMLGTNPQVNEPLTTAFAYLLLPQVLVYGLSSVFMAILNTRNVFGPPAWAPVVNNVVAIATLAVYLAVPGELSVDPVRMGNAKLLVLGIGTTAGVFAQTAVLLVAIRREHISLRPLWGIDQRLKRFGAMAAAMVLYVLISQLGLVVGNRIASTAAASGPAIYNYTWLVLMLPFGMIGVTVLTVVMPRLSRNAAADDTPAVLADLSLATRLTMITLIPTVAFMTVGGPAIGSALFAYGNFGDVDAGYLGAAIALSAFTLIPYALVLLQLRVFYAREQPWTPITIIVVITGVKILGSLLAPHITGDPQLVAAYLGLANGLGFLAGTIVGYYILRRALRPDGGQLIGVGEARTVLVTVAASLLAGLLAHVADRLLGLSELTAHAGSVGSLLRLSVLALIMLPILAAVTLCARVPEARAALDAVRARIRSRRLKTGPQTQNVLDQSSRPGPVTYPERRRLAPPRGKSVVHEPIRRRPPEQVARAGRAKGPEVIDRPSENASFGAASGAELPRPVADELQLDAPAGRDPGPVSRPHPSDLQNGDLPADAARGPIAFDALREPDRESSAPPDDVQLVPGARIANGRYRLLIFHGGVPPLQFWQALDTALDRQVALTFVDPQGVLPDDVLQETLSRTLRLSRIDKPGVARVLDVVHTRAGGLVVAEWIRGGSLQEVADTSPSPVGAIRAMQSLAAAADAAHRAGVALSIDHPSRVRVSIDGDVVLAYPATMPDANPQDDIRGIGASLYALLVNRWPLPEAGVRSGLAPAERDTAGQPIEPADIDRDIPFQISAVAARSVQGDGGIRSASTLLNLMQQATAVADRTEVLGPIDEAPVSAAPRTSAPNSETYTRRRRNLLIGIGAGAAVLMVALLVLASVLSRIFGDVSGGLNKDELGLNAPTASTSAASSAPPGSVVKPTKVTVFSPDGGADNPGEADLAIDGNPATSWKTDIYTDPVPFPSFKNGVGLMLQLPQATVVGTVAIDVASTGTKVEIRSASTPTPATLEDTAVLTSATALRPGHNTISVEAAAPTSNLLVWISTLGTTDGKSQADISEITIYAAS

SEQ ID NO: 64948 - protein, 406 aa, Mycobacterium tuberculosis; identical to SEQ ID NO: 62690

SEQ ID NO: 64949 - protein, 347 aa, Mycobacterium tuberculosis; identical to SEQ ID NO: 62873

SEQ ID NO: 64950 - protein, 224 aa, Mycobacterium tuberculosis
MSPIEPAASAIFGPRLGLARRYAEALAGPGVERGLVGPREVGRLWDRHLLNCAVIGELLERGDRVVDIGSGAGLPGVPLAIARPDLQVVLLEPLLRRTESLREMVTDLGVAVEIVRGRAEESWVQDQLGGSDAAVSRAVAALDKLTKWSMPLIRPNGRMLAIKGERAHDEVREHRRVMIASGAVDVRVVTCGANYLRPPATVVFARRGKQIARGSARMASGGTA

SEQ ID NO: 64951 - protein, 366 aa, Mycobacterium tuberculosis; identical to SEQ ID NO: 62872

SEQ ID NO: 64952 - protein, 125 aa, Mycobacterium tuberculosis; identical to SEQ ID NO: 62679

SEQ ID NO: 64953 - protein, 47 aa, Mycobacterium tuberculosis
MTKGKRTFQPNNRRRARVHGFRLRMRTRAGRSIVSSRRRKGRRTLSA

SEQ ID NO: 64954 - protein, 598 aa, Mycobacterium tuberculosis
MPPLLPPAPPVPPAPNSPPCPPAPPSAPSVPAPPVPPAPKSNPFPPVPPFAPNPPAPPAPPLANSPPVPPAPAVPPAPIKFWERAAWPPVPAAPRNKPASPPRPPAPPVSRPNPPLPPVPPEPISKAAPPVPPVPPWPVVPMPPDPPVPPIPDRIPPAPPDPPSPPSAPVAPWPPLPPLPNNHPPAPPSAPVPGVPLAPLPISGRPVRAWVGSLIALRICCCRVCSGVLAGALNPSRPSSCPPKPPAPAVPAGAPVPPLPPLPPLPISTPLPPAPPLPPLPALPTSPGAPPAPPVPPAPAKDPPPAPPAPPAPLSRPAFPPAPPAPPASKPSPPTPPAPPEPNNVPPSPPIPPAPPPPSGLDPPLPPAPPAAPRLSMPASPPAPPFPPTLIMLVPPLPPVPPAPNSPPEPPSPPAPPPKMPNPPGPPVPPAPNSPPFPPDPPAPPVPASVAPPAPPTPPSANSPPFPPAPPAPPVAPKAAANPPGPPTPAAPNSMPAAPPAPPAPPVPVLALPPAPPAPPLPMSPPAPPLPPAPPLTPAAPDPPAPPLPINQPPSPPLAPVPGAPLVPLPISGRPVFARKNSLIGASSGDTAAASAAA

SEQ ID NO: 64955 - protein, 434 aa, Mycobacterium tuberculosis; identical to SEQ ID NO: 62664

SEQ ID NO: 64956 - protein, 532 aa, Mycobacterium tuberculosis
MSKTREQRLRRVLETMTRQHDRLRDPPAYGSWLLGWVSERPLRRRVRIQIILTIALITANLVGIGLAVLLENVAFPTPSIVSDAPLWITFVAGPAYTVIGMALGSYYVKVQTLAALRWASEEHTPSRADQRNTLLAPLRVAVGTLILWAVGAALFTTLYGLANRLFIPQVMFSTLFCGVLVATACYMLTEFALRPVAAQALEAGLPPGRFALGIIGRTMVVWLLSSGVPLFGIALLGILEMVLQNFTDIQFAYGVLIVSSATLIGGFLLMWIMSWLTAAPVRVVRAALKRVEQGDLRGDLVVFDGTELGELQRGFNAMVNGLRERERVRDLFGRHVGREVAAAAERERPQLGGEDRHAAVVFVDIVGSTQLVDNQPAAHVVKLLNRFFAIVVNEVDRHHGLINKFAGDAALAIFGAPNRLDRPEDAALAAARAIADRLANEMPEVQAGIGVAAGQIVAGNVGAKQRFEYTVVGKPVNQAARLCELAKSHPARLLASSDTLHAASETERAHWSLGETVTLRGHEQPTRLAVPT

SEQ ID NO: 64957 - protein, 1115 aa, Mycobacterium tuberculosis
MPRRTDLHHVLVIGSGPIVIGQACEFDYSGTQACRVLRAEGLQVSLVNSNPATIMTDPEFADHTYVEPITPAFVERVIAQQAERGNKIDALLATLGGQTALNTAVALYESGVLEKYGVELIGADFDAIQRGEDRQRFKDIVAKAGGESARSRVCFTMAEVRETVAELGLPVVVRPSFTMGGLGSGIAYSTDEVDRMAGAGLAASPSANVLIEESIYGWKEFELELMRDGHDNVVVVCSIENVDPMGVHTGDSVTVAPAMTLTDREYQRMRDLGIAILREVGVDTGGCNIQFAVNPRDGRLIVIEMNPRVSRSSALASKATGFPIAKIAAKLAIGYTLDEIVNDITGETPACFEPTLDYVVVKAPRFAFEKFPGADPTLTTTMKSVGEAMSLGRNFVEALGKVMRSLETTRAGFWTAPDPDGGIEEALTRLRTPAEGRLYDIELALRLGATVERVAEASGVDPWFIAQINELVNLRNELVAAPVLNAELLRRAKHSGLSDHQIASLRPELAGEAGVRSLRVRLGIHPVYKTVDTCAAEFEAQTPYHYSSYELDPAAETEVAPQTERPKVLILGSGPNRIGQGIEFDYSCVHAATTLSQAGFETVMVNCNPETVSTDYDTADRLYFEPLTFEDVLEVYHAEMESGSGGPGVAGVIVQLGGQTPLGLAHRLADAGVPIVGTPPEAIDLAEDRGAFGDLLSAAGLPAPKYGTATTFAQARRIAEEIGYPVLVRPSYVLGGRGMEIVYDEETLQGYITRATQLSPEHPVLVDRFLEDAVEIDVDALCDGAEVYIGGIMEHIEEAGIHSGDSACALPPVTLGRSDIAKVRKATEAIAHGIGVVGLLNVQYALKDDVLYVLEANPRASRTVPFVSKATAVPLAKACARIMLGATIAQLRAEGLLAVTGDGAHAARNAPIAVKEAVLPFHRFRRADGAAIDSLLGPEMKSTGEVMGIDRDFGSAFAKSQTAAYGSLPAQGTVFVSVANRDKRSLVFPVKRLADLGFRVLATEGTAEMLRRNGIPCDDVRKHFEPAQPGRPTMSAVDAIRAGEVNMVINTPYGNSGPRIDGYEIRSAAVAGNIPCITTVQGASAAVQGIEAGIRGDIGVRSLQELHRVIGGVER

SEQ ID NO: 64958 - protein, 344 aa, Mycobacterium tuberculosis
MGHLPPPAEVRHPVYATRVLCEVANERGVPTADVLAGTAIEPADLDDPDAVVGALDEITAVRRLLARLPDDAGIGIDVGSRFALTHFGLFGFAVMSCGTLRELLTIAMRYFALTTMHVDITLFETADDCLVELDASHLPADVRGFFIERDIAGIIATTTSFALPLAAKYADQVSAELAVDAELLRPLLELVPVHDVAFGRAHNRVHFPRAMFDEPLPQADRHTLEMCIAQCDVLMQRNERRRGITALVRSKLFRDSGLFPTFTDVAGELDMHPRTLRRRLAEEGTSFRALLGEARSTVAVDLLRNVGLTVQQVSTRLGYTEVSTFSHAFKRWYGVAPSEYSRRG

SEQ ID NO: 64959 - protein, 373 aa, Mycobacterium tuberculosis
MPYVRRPPGHDGRRPAGTGDSRSPSQYPCGRAGKGPTVSPQLCPKVSIVSTTHNQAGYARQAFDSFLDQQTDFPVEIIVADDASTDATPAIIREYAERYPHVFRPIFRTENLGLNGNLTGALSAARGEYVALCEADDYWIDPLKLSKQVAFLDRHPKTTVCFHPVRVIWEDGHAKDSKFPPVRVRGNLSLDALILMNFIQTNSAVYRRLERYDDIPADVMPLDWYLHVRHAVHGDIAMLPDTMAVYRRHAQGMWHNQVVDPPKFWLTQGPGHAATFDAMLDLFPGDPAREELIAVMADWILRQIANVPGPEGRAALQETIARHPRIAMLALQHRGATPARRLKTQWRKLAAATPSRRGLVDVWPSRLRRGCRA

SEQ ID NO: 64960 - protein, 357 aa, Mycobacterium tuberculosis
MVDPTATDSPKVSIVSISYNQEEYIREALDGFAAQRTEFPVEVIIADDASTDATPRIIGEYAARYPQLFRPILRQTNIGVHANFKDVLSAARGEYLALCEGDDYWTDPLKLSKQVKYLDRHPETTVCFHPVRVIYEDGAKDSEFPPLSWRRDLSVDALLARNFIQTNSVVYRRQPSYDDIPANVMPIDWYLHVRHAVGGEIAMLPETMAVYRRHAHGIWHSAYTDRRKFWETRGHGMAATLEAMLDLVHGHREREAIVGEVSAWVLREIGKTPGRQGRALLLKSIADHPRMTMLSLQHRWAQTPWRRFKRRLSTELSSLAALAYATRRRALEGRDGGYRETTSPPTGRGRNVRGSHA

SEQ ID NO: 64961 - protein, 945 aa, Mycobacterium tuberculosis
MTAIGRLIHRYAIWIVGVWALAAIIGNNFAPPLEQVITAEDQPFSPAGTATSRAVERSAAAFSQAPGDNIGYLVLERNGVLNDQDRAYYDALVVALRRDSRHVIEVVDWWGTPAIAEVARSDDHHAVTAALRFGGMVGTSQAGESITAARSIVTQLHPPDGLHVFVTGPGATIVDEFAAIDRQTQLITATTIVVLLILLLIVYRSAITATVPLLSVVVSLAVAKPIVSVLVDRDFIGISLFSLGLSVAVVVGAGTGFAMFLIGRYHERRRQHIAPAAALADAYRGVAPAIAGATFIVVTSLGAVGWLSLARIGMFATTGILCSIGVLAVGLAALTLTPALVALASRANLLKPPQHKRIQRQFRRLGTHVARWPAPILVASGVFVLIMMIALPRVPIGWDEAAATPSAAESNRGYRAADRHFAPNQLLPTQVMIETDHDIRNPAGLTAIERITAAIMAIGGVRMVQSASHPNGMVSKQAALTASAGNLGDQLDEFSDQLTSRQATFTNLEAAVRDVVSALDLVQAGIRQDGYGLGQVSRAVRLMQQAITKLQGSAGDVFDIFDPLRRFVAAIPECRANPVCSVAQEVVQWANTVTESCAKLADAAGQLARGIADVASATSGVSGLPNALDGIGGQLAQVRESAAGVQELLNNVGAAPLRELPDYLRELAAVSQSAPGVDLYAARRILTDPNMRAVLDYFVSPNGHATRLLVYGDGSEWGDDGAQRARAIVTAVAEETDEGTLRPTAVELTGVGPATRDLQDLVGSDLTLLAVITLAVIFAIAALLLRSPLAGLVVVGTIATSYICALGASVVIWKHILGDNLHWSVLPIAFVLLISVGSAYNLLFALRIREESSAGPRTSVIRAFAATGMVVTAAGIVFGTTMFALAASTSLSVAQIGVTVGMGLLLDALVIRGFVLPALMVLLGRWLWWPRRSVSNRQVPEPSPA

SEQ ID NO: 64962 - protein, 157 aa, Mycobacterium tuberculosis
MAPGNQQVYGGRWHRWNTPAVARNFHNVGDVSGEAMGAQGYLRRLTRRLTEDLEQRDVEELSDEVLNAGAQRAIDCQRGQEVTVVGTLRSVETNGKGCSGGVRAELFDGSDTVTLVWLGQRRIPGIDTGRTLRVRGRLGKLENGTKAIYNPHYEIQR

SEQ ID NO: 64963 - protein, 84 aa, Mycobacterium tuberculosis; identical to SEQ ID NO: 62668

SEQ ID NO: 64964 - protein, 321 aa, Mycobacterium tuberculosis
MRAVLIVNPTATATTPAGRDLLAHALESRLQLTVEHTNHRGHGTELGQAAVADGVDLVVVHGGDGTVSAVVNGMLGRPGTTPVRPVPAVAVVPGGSANVLARALGISADPIAATNQLIQLLDDYGRHQQWRRIGLIDCGERWAVFNAGMGVDAEVVAAVEAERDKGGKVTAWRYIRAAVRAVLACTRREPALTLQLPNRDPITGVHFVFVSNSSPWTYANNRPVWTNPDCRFESGLGVFATTSMKVVPTLRVVRQMFAKQPKFEFNHVINNDDVACLRVTSMGPPIASQFDGDYLGVRETMTFRAVPDALAVVAPPARKRI

SEQ ID NO: 64965 - protein, 549 aa, Mycobacterium tuberculosis
MLGYRVLTQLGHLTQHRPAAAGGLGLVRDPGQRLQPGPHGVGVGVVGVVDHRHPVAAGGHLHPMPRHRRRRGQRGRDLFNAGPTLQRDRRGAQRVSDLVVAADPESDLGLGIVGMQRKARPGQFVQRHRPRPNVTGVVPADPHHPGRGQLGHRRHRGVISVEDDRSGMRNSLRQFGFGLCDDLAGAELTQMCGADVEHDSDRRGRDLGERGDVAVMACRHLQNQVVGAPRRAQHRPRVTQLVVERSGRGHHLPQRGQHGGHQVLGRRLARRAGDPDDGEPAGHQLRGHRGGQLGQRGQHRRPRPVVVVLEDAGQYVRRGHWRNHDGRHPHRAGGQHDGGARGYRRRGMVVAVGARPRQGEEQPARADGARVELDGPGDAAVRGVLRGDIGHCAPDDLGDLRDGQLDHARRSRASSAAASSTRSSNGRTRPPPRCPVSWPLPAMSTTSPGRAQATACRIASRRSAISTTWASPPTSAAPARISRRIAVGSSSRGLSSVTTTKSASCAAIRPIGARLPGSRSPPAPNTTASRRSGCAKVVSTDRSASGLCA

SEQ ID NO: 64966 - protein, 425 aa, Mycobacterium tuberculosis
MAFSVQMPALGESVTEGTVTRWLKQEGDTVELDEPLVEVSTDKVDTEIPSPAAGVLTKIIAQEDDTVEVGGELAVIGDAKDAGEAAAPAPEKVPAAQPESKPAPEPPPVQPTSGAPAGGDAKPVLMPELGESVTEGTVIRWLKKIGDSVQVDEPLVEVSTDKVDTEIPSPVAGVLVSISADEDATVPVGGELARIGVAADIGAAPAPKPAPKPVPEPAPTPKAEPAPSPPAAQPAGAAEGAPYVTPLVRKLASENNIDLAGVTGTGVGGRIRKQDVLAAAEQKKRAKAPAPAAQAAAAPAPKAPPAPAPALAHLRGTTQKASRIRQITANKTRESLQATAQLTQTHEVDMTKIVGLRARAKAAFAEREGVNLTFLPFFAKAVIDALKIHPNINASYNEDTKEITYYDAEHLGFAVDTEQGLLSPV

SEQ ID NO: 64967 - protein, 498 aa, Mycobacterium tuberculosis
MMSAQRVVRTVRTARAISTALAVAIVLGTGVAWSSVRSFEDGIFHMSAPSLGHGGDDGAIDILLVGLDSRTDAHGNPLSAEELATLHAGDEEATNTDTIILIRVPNNGKSATAISIPRDSYVAAPGLGKTKINGVYGQTRETKRAGLVQAGASPTEAAAAGTEAGREALIKTVADLTGVTVDHYAEIGLLGFALIADALGGVDVCLKEPVYEPLSGADFPAGRQKLNGPQALSFVRQRHDLPRGDLDRVVRQQAVMAALAHRVISGQTLSSPATLKRLEQAVQRSVVLSSGWDIMDFVRQLQKLAGGNVAFATIPVLDGAGWSDDGMQSVVRVDPRQVQDWVVGLLHEQDQGKTDELAYTPAKTTANVVNDTDINGLAAAVSKVLSSKGFTTGSVGNNDGDHVPGSQVRAAKADDLGAQQVAKELGGLPVVADASIAPGSVRVVLANDYSGPGSGLGGSDPNGVVSPARAFNLGSADDTTPPPSPILTAGSDAPECIN

SEQ ID NO: 64968 - protein, 275 aa, Mycobacterium tuberculosis
MATVAEAFDATQAVARILAEHGPLSEDDIARRLLDSGVADPDAVLRALRLETEWPARQLVDDRWVWLPTLLAGRVFTHRLGADEAVHDMLGVTPDLDPITTLCEHEEYGRLADGSAARIVLAGYDEELLERRGIPDEAIDPGGALLLEPGTLATLGAAAGDLVGVRLTAAGLVLERIGTAGADTSVGARLAELVDPDEPAFFPAAVWTACVDDPAAFTEPVAPLREILDQHGLTHEDDWLAPGGFNFDAWRFENRCELLAFRPTSTPTTRSRCTR

SEQ ID NO: 64969 - protein, 247 aa, Mycobacterium tuberculosis
MSSSIEIFPDSDILVAAAGKRLVGAIGAAVAARGQALIVLTGGGNGIALLRYLSAQAQQIEWSKVHLFWGDERYVPEDDDERNLKQARRALLNHVDIPSNQVHPMAASDGDFGGDLDAAALAYEQVLAASAAPGDPAPNFDVHLLGMGPEGHINSLFPHSPAVLESTRMVVAVDDSPKPPPRRITLTLPAIQRSREVWLLVSGPGKADAVAAAIGGADPVSVPAAGAVGRQNTLWLLDRDAAAKLPS

SEQ ID NO: 64970 - protein, 452 aa, Mycobacterium tuberculosis
MSQAQPRPAAPNPKRNVKAIRTVRFWMAPIATTLALMSALAALYLGGILNPMTNLRHFPIALVNEDAGPAGQQIVDGLVSGLDKNKFDIRVVSPDEARRLLDTAAVYGSALIPPTFSSQLRDFGASAVTPTRTDRPAITISTNPRAGTLAASIAGQTLTRALTVVNGKVGERLTAEVAAQTGGVALAGAAAAGLASPIDVKSTAYNPLPNGTGNGLSAFYYALLLLLAGFTGSIVVSTLVDSMLGYVPAEFGPVYRFAEQVNISRFRTLLVKWAVMVVLALLTSGVYLAIAHGLGMPIPLGWQVWLYGVFAIIAVGVTSSSLIAVLGSMGLLVSMLIFVILGLPSAGATVPLEAVPAFFRWLAQFEPMHQVFLGVRSLLYLNGNADAGLSQALTMTSIGLIIGLLLGGFITHLYDRSSFHRIPGAVEMAIAVEHQAQYQARQSARESSSEQP

SEQ ID NO: 64971 - protein, 384 aa, Mycobacterium tuberculosis
LPAGCPNRGWTLPRVGQINWKWIRRSLYLTAAVVILLPMVTFTMAYLIVDVPKPGDIRTNQVSTILASDGSEIAKIVPPEGNRVDVNLSQVPMHVRQAVIAAEDRNFYSNPGFSFTGFARAVKNNLFGGDLQGGSTITQQYVKNALVGSAQHGWSGLMRKAKELVIATKMSGEWSKDDVLQAYLNIIYFGRGAYGISAASKAYFDKPVEQLTVAEGALLAALIRRPSTLDPAVDPEGAHARWNWVLDGMVETKALSPNDRAAQVFPETVPPDLARAENQTKGPNGLIERQVTRELLELFNIDEQTLNTQGLVVTTTIDPQAQRAAEKAVAKYLDGQDPDMRAAVVSIDPHNGAVRAYYGGDNANGFDFAQAGLQTGSSFKVFAL

SEQ ID NO: 64972 - protein, 1283 aa, Mycobacterium tuberculosis
  MISC_FEATURE (696)..(696): X=any amino acid
  MISC_FEATURE (698)..(698): X=any amino acid
LPTTPWQHTQHWITATSGRLHRPDTHPLLGVGVTDPTNGTRVWESELDPDLLWLADHVIDDLVVLPGAAYAEIALAAATDTFAVEQDQPWMISELDLRQMLHVTPGTVLVTTLTGDEQRCQVEIRTRSGSSGWTTHATATVARAEPLAPLDHEGQRREVTTADLEDQLDPDDLYQRLRGAGQQHGPAFQGIVGLAVTQAGVARAQVRLPASARTGSREFMLHPVMMDIALQTLGATRTATDLAGGQDARQGPSSNSALVVPVRFAGVHVYGDITRGVRAVGSLAAAGDRLVGEVVLTDANGQPLLVVDEVEMAVLGSGSGATELTNRLFMLEWEPAPLEKTAEATGALLLIGDPAAGDPLLPALQSSLRDRITDLELASAADEATLRAAISRTSWDGIVVVCPPRANDESMPDEAQLELARTRTLLVASVVETVTRMGARKSPRLWIVTRGAAQFDAGESVTLAQTGLRGIARVLTFEHSELNTTLVDIEPDGTGSLAALAEELLAGSEADEVALRDGQRYVNRLVPAPTTTSGDLAAEARHQVVNLDSSGASRAAVRLQIDQPGRLDALNVHEVKRGRPQGDQVEVRVVAAGLNFSDVLKAMGVYPGLDGAAPVIGGECVGYVTAIGDEVDGVEVGQRVIAFGPGTFGTHLGTIADLVVPIPDTLADNEAATFGVAYLTAWHSLCEVGRLSPGEXVXIHSATGGVGMAAVSIAKMIGARIYTTAGSDAKREMLSRLGVEYVGDSRSVDFADEILELTDGYGVDVVLNSLAGEAIQRGVQILAPGGRFIELGKKDVYADASLGLAALAKSASFSVVDLDLNLKLQPARYRQLLQHILQHVADGKLEVLPVTAFSLHDAADAFRLMASGKHTGKIVISIPQHGSIEAIAAPPPLPLVSRDGGYLIVGGMGGLGFVVARWLAEQGAGLIVLNGRSAPSDEVAAAIAELNASGSRIEVITGDITEPDTAERLVRAVEDAGFRLAGVVHSAMVLADEIVLNMTDSAARRVFAPKVTGSWRLHVATAARDVDWWLTFSSAAALLGTPGQGAYAAANSWVDGLVAHRRSAGLPAVGINWGPWADVGRAQFFKDLGVEMINAEQGLAAMQAVLTADRGRTGVFSLDARQWFQSFPAVAGSSLFAKLHDSAARKSGQRRGGGAIRAQLDALDAAERPGHLASAIADEIRAVLRSGDPIDHHRPLETLGLDSLMGLELRNRLEASLGITLPVALVWAYPTISDLATALCERMDYATPAAAQEISDTEPELSDEEMDLLADLVDASELEAATR

SEQ ID NO: 64973 - protein, 320 aa, Mycobacterium tuberculosis
IVLTRNPRWWGARPRLDSITYLVLDDAARLPALQNNTIDATGVGTLDQLTIAARTKGISIRRAPGPSWYHFTLNGAPGSILADKALRLAIAKGIDRYTIARVAQYGLTSDPVPLNNHVFVAGQDGYQDNSGVVAYNPEQAKRELDALGWRRSGAFREKDGRQLVIRDLFYDAQSTRQFAQIAQHTLAQIGVKLELQAKSGSGFFSDYVNVGAFDIAQFGWVGDAFPLSSLTQIYASDGESNFGKIGSPQIDAAIERTLAELDPGKARALANQVDELIWAEGFSLPLTQSPGTVAVRSTLANFGATGLADLDYTAIGFMRR

SEQ ID NO: 64974 - protein, 133 aa, Mycobacterium tuberculosis
  MISC_FEATURE (89)..(89): X=any amino acid
  MISC_FEATURE (100)..(100): X=any amino acid
  MISC_FEATURE (130)..(130): X=any amino acid
GTGISTRCPSTTPVGLALGPDSPWADWPGPGTLGLSAGKVLTCLVATHACILTPPPSTTGHPVASLNEGRSPTHTHHKVDVPRLRRCAXAPLHYRRTITXPVSYYALFQGWLLLSQPSGCLCDCTSFPTXHTL

SEQ ID NO: 64975 - protein, 57 aa, Mycobacterium tuberculosis; identical to SEQ ID NO: 62292

SEQ ID NO: 64976 - protein, 341 aa, Mycobacterium tuberculosis
MTERKRNLRPVRDVAPPTLQFRTVHGYRRAFRIAGSGPAILLIHGIGDNSTTWNGVHAKLAQRFTVIAPDLLGHGQSDKPRADYSVAAYANGMRDLLSVLDIERVTIVGHSLGGGVAMQFAYQFPQLVDRLILVSAGGVTKDVNIVFRLASLPMGSEAMALLRLPLVLPAVQIAGRIVGKAIGTTSLGHDLPNVLRILDDLPEPTASAAFGRTLRAVVDWRGQMVTMLDRCYLTEAIPVQIIWGTKDVVLPVRHAHMAHAAMPGSQLEIFEGSGHFPFHDDPARFIDIVERFMDTTEPAEYDQAALRALLRRGGGEATVTGSADTRVAVLNAIGSNERSAT

SEQ ID NO: 64977 - protein, 90 aa, Mycobacterium tuberculosis
LRGSTFTVSNFGALGVDDGVPVINHPEAAILGLGAIKPRPVVVGGEVVARPTMTLTCVFDHRVVDGAQVAQFMCELRDLIESPETALLDL

SEQ ID NO: 64978 - protein, 546 aa, Mycobacterium tuberculosis
  MISC_FEATURE (403)..(403): X=any amino acid
ADPTWFKHAVFYEVLVRAFFDASADGSGDLRGLIDRLDYLQWLGIDCIWLPPFYDSPLRDGGYDIRDFYKVLPEFGTVDDFVALVDAAHRRGIRIITDLVMNHTSESHPWFQESRRDPDGPYGDYYVWSDTSERYTDARIIFVDTEESNWSFDPVRRQFYWHRFFSHQPDLNYDNPAVQEAMIDVIRFWLGLGIDGFRLDAVPYLFEREGTNCENLPETHAFLKRVRKVVDDEFPGRVLLAEANQWPGDVVEYFGDPNTGGDECHMAFHFPLMPRIFMAVRRESRFPISEIIAQTPPIPDMAQWGIFLRNHDELTLEMVTDEERDYMYAEYAKDPRMKANVGIRRRLAPLLDNDRNQIELFTALLLSLPGSPVLYYGDEIGMGDVIWLGDRDGVRIPMQWTPXPNAGFSTANPGRLYLPPSQDPVYGYQAVNVEAQRDTSTSLLNFTRTMLAVRRRHPAFAVGAFQELGGSNPSVLAYVRQVAGDDGDTVLCVNNLSRFPQPIELDLQQWTNYTPVELTGHVEFPRIGQVPYLLTLPGHGFYWFQL

SEQ ID NO: 64979 - protein, 341 aa, Mycobacterium tuberculosis
MTERKRNLRPVRDVAPPTLQFRTVHGYRRAFRIAGSGPAILLIHGIGDNSTTWNGVHAKLAQRFTVIAPDLLGHGQSDKPRADYSVAAYASGMRDFLQRLDIERVTIVGHSLGGGVAMQFAYQFPQLVDRLILVKAGGVTKGRKHRFRLASLPMGSEAMALLRLPLVLPAVQIAGRIVGKAIGTTSLGHDLPNVLRILDDLPEPTASAAFGRTLRAVVDWRGQMVTMLDRCYLTEAIPVQIIWGTKDVVLPVRHAHMAHAAMPGSQLEIFEGSGHFPFHDDPARFIDIVERFMDTTEPAEYDQAALRALLRRGGGEATVTGSADTRVAVLNAIGSNERSAT

SEQ ID NO: 64980 - protein, 448 aa, Mycobacterium tuberculosis
  MISC_FEATURE (320)..(320): X=any amino acid
  MISC_FEATURE (345)..(345): X=any amino acid
PGWFWIGGRAAALTGTPAWEMFKPWAITSMAIAVAVALVLWWRMIRFEYALLVTVATAAVMLAYSSPEPYAAMITVLLPPMLVLTWSGLGARDRQGWAAVVGAGVFLGFAATWYTLLVAYGAFTVVLMALLLAGSRLQSGIKAAVDPLCRLAVVGAIAAAIGSTTWLPYLLRAARDPVSDTGSAQHYLPADGAALTFPHLQFSLLGAICLLGTPVLVMRARSSAPAGALAIGVLAVYLWSLLSMLATLARTTLLSFRLQPTPERLLVAAGAFGFVEAVQALGNGGGGGVIPMAAAIRVCRGIAFNQDIPNVLGPDLTMGXTETEGLRQRGEREPPRFQKIQPAIXCRHPARHGKRRDRTVVLTADYSFLSYYPYWGFQGLTPHYANPLAQFDKRATQIDSWSGLSTADEFIAALDKLPWQPPTVFLMRHGAHNSYTCGGPGRHPTQPF

SEQ ID NO: 64981 - protein, 279 aa, Mycobacterium tuberculosis
MAFSVQMPALGESVTEGTVTRWLKQEGDTVELDEPLVEVSTDKVDTEIPSPAAGVLTKIIAQEDDTVEVGGELAVIGDAKDAGEAAAPAPEKVPAAQPESKPAPEPPPVQPTSGAPAGGDAKPVLMPELGQSVTEGTVIRWLKKIGDSVQVDEPLVEVSNNKVDTNIPSPVAGVLVSFSADEDATVPVGGELARIGVAADIGAAPAPKPAPKPVPEPAPTPNAEPSPSPPAGHPAGGVGGAPDVNTLLQKLLSENNMVSRGVTGTRDGWLSRKLDVLFA

SEQ ID NO: 64982 - protein, 394 aa, Mycobacterium tuberculosis
  MISC_FEATURE (297)..(297): X=any amino acid
MSGEDSIRSFPGLPNFGEGLQEVTGTCWSVAVGQRVEINQTLCSVKHRQPEVEIPSPVCGPIVELGGAEGDVLKVGAELVRIDTGPTAVAQPNGEGAVPTLVGDGADAAIETSRRTSRPLAAPVVRKLAKELAVDLAALQRGSGAGGVITRADVLAAARGGVGAGPDVRPVHGRARADAEKMTLSPQGDSDAKASVEVICAELLRLRDRFVSAAPEITPFALTLRLLVIALKHNVILNSTWVDSGEGPQVHVHRGVHLGFGAATERGLLVPVVTDAQDKNTRELASRVAELNHRRTXRTLTPAELRGSTFTVSNFGALGVDDGVPVINHPEAAILGLGAIKPRPVVVGGEVVARPTMTLTCVFDHRVVDGAQVAQFMCELRDLIESPETALLDL

SEQ ID NO: 64983 - protein, 488 aa, Mycobacterium tuberculosis
  MISC_FEATURE (22)..(22): X=any amino acid
RTARAIPRALAVAIVLGTGVAXSSVRSSKDGIFHMSAPSLGHGGDDGAIDILLVGLDSRTDAHGNPLSAEELATVAPAGDEEATNTDTIILIRVPNNGKSATAISIPRDSYVAAPGLGKTKINGVYGQTRETKRAGLVQAGASPTEAAAAGTEAGREALIKTVADLTGVTVDHYAEIGLLGFALIADALGGVDVCLKEPVYEPLSGADFPAGRQKLNGPQALSFVRQRHDLPRGDLDRVVRQQAVMAALAHRVISGQTLSSPATLKRLEQAVARSVVLSSGWDIMDFVRQLQKLAGGNVAFATIPVLDGAGWSDDGMQSVVRVDPRQVQDWVVRLLHEQDQGKTDELAYTPAKTTANVVNDTDINGLAAAVSKVLSSKGFTTGSVGNNDGDHVPGSQVRAAKADDLGAQQVAKELGGLPVVADASIAPGSVRVVLANDYSGPGSGLGGSDPNGVVSPARAFNLGSADDTTPPPSPILTAGLRAPECIN

SEQ ID NO: 64984 - protein, 252 aa, Mycobacterium tuberculosis
RGDILGTVKNLQVLVDALSKSDEQIVQFAGHVASCSQVLADSSAILDQTPGTLNQALSDIRGFLRENNSTLIETVNQLNDFAQTLSDQSENIEQVLHVAGPGITNFYNIYDPAQGTLNGLLSIPNFANPVQFICGGSFDTAAGPSAPDYYRRAEICRERLGPVLRRLTVNYPPIMFHPLNTITAYKGQIIYDTPATEAQVGTPVPELTWVPAGGGAPVGNPADLQSLLVPPAPGPAPAPPAPGAGPGEHGGG

SEQ ID NO: 64985 - protein, 62 aa, Mycobacterium tuberculosis
PFDKKLSVAEQRYQAVWAVISDGCRISQVPRSFGVSRQTLHTWLARYEAEALDGLRIGTGTA

SEQ ID NO: 64986 - protein, 248 aa, Mycobacterium tuberculosis
  MISC_FEATURE (90)..(90): X=any amino acid
  MISC_FEATURE (111)..(111): X=any amino acid
KGFPLEFCPWGRVLAKIGFFPKNATRCAQGEICTALAIGPGTVSSLLLAVVGRRDIADQVWCGPSPAWGRVENPWAVANRPPAASSRIHXFGRVEKPCRITHRIGVCRSMXPPWFNPRLNYLCKLVAVVGFRAIFGAFLLGLLFFVATTSMIRYVSAVPVRTFFAELRGNLALPVLASALLVPLFITAVDWTRWWVMITLRRGHCYILYAIDNRKIEPPPSRRNVQVFVCVVVVLGGDTDPVRQQHRR

SEQ ID NO: 64987 - protein, 186 aa, Mycobacterium tuberculosis
WKEVHLFWGDERYVPEDDDERNLKQARRALLNHVDIPSNQVHPMAASDGDFGGDLDAAALAYEQVLARSAAQGDPAPNFDVHLLGMGPEGHINSLFPHSPAVSRATRMVVAVDDSPEPPATRITLTLPAIQRSREVWLLVSGPGKADAVAAAIGGADPVSVPAAGAVGRQNTLWLLDRDAAAKLPS

SEQ ID NO: 64988 - protein, 291 aa, Mycobacterium tuberculosis
  MISC_FEATURE (231)..(231): X=any amino acid
  MISC_FEATURE (271)..(271): X=any amino acid
VSPRPGPAGRGPAPCRCADLHSLCVDSHALRRDGMRFLHTADWQLGMTRHFLAGDAQPRYSAARRDAVAGLKALAADVGAEFVVVAGDVFEHNQLAPQIVGQSLEAMRVIGLPVYLLPGNHDPLDASSVYTSTLFRAERPDNVVVLDRAGVHEVRPGVQIVAAPWRSKAPTTDPVAEVLGGLPTDAAIRLLVAHGGVDALDPETRQTVLSGLAALDDALTRQAIHYVAPKXQHSLTQVRSSGRVLVLRCPGSTHLRDVEPDPGYGPNGSNXRKRTRKFPLTVEGPSHWPVG

SEQ ID NO: 64989 - protein, 511 aa, Mycobacterium tuberculosis
  MISC_FEATURE (5)..(5): X=any amino acid
  MISC_FEATURE (214)..(214): X=any amino acid
  MISC_FEATURE (455)..(455): X=any amino acid
AACCXSGAALAAVGGWFLWAASAVVGGRARMAEPKLGQPVEWTPCPVVKPASKDPPPAALCGKLAVPVDYDRPRWDVAALALIRFPATGDKIGSLVINPGGPGESGIEAALGVFQTLPKRVHERFDLVGFDPRGVASSRPAIWCNSDADNDRLRAEPQVDYSPEGVAHIRERDQAIRRSLCGQDGPRPSGPCRDVNVAKDLDAIRAALGRRTSXPYLGYSYRHPDRLAYARGISAAGAAMILDGAVDPNADPIEAELRQAKGFQDAFNNYAADCAKNAGCPLGADPAKAVEVYHSLVDPLVDPDNPRISRPARTKDPRGLSYSDAIVGTIMALSSPNLWHPFTEGLWELFDIRGDTLLVLADMYMRRDSHGRYNNSGDARVAINCVDQPPVTDRDKVIDEDRRAREIAPFMSYGKFTGDAPLGTCAFWPVPPTSQPHAVSAPGLVPTVVVSTNPXPGDAVKAGVDLANQLRGSLLTFDGTQHTVVFQGDSCIDEYVTAYLGGGTTPPRGAK

SEQ ID NO: 64990 - protein, 411 aa, Mycobacterium tuberculosis; identical to SEQ ID NO: 62586

SEQ ID NO: 64991 - protein, 218 aa, Mycobacterium tuberculosis
MGRQRDVVVSGRPRAYTPQRDVVAAGALHDMGTYIGLCFGPTNHPYLVGLQPFVFDGVVAVDQPAKWAPQEMDSDDGSGANQGEHQMPGGGQHSDRGRAPKRGSRVQTADVEPLPQDDPAAQESNSRNHVGRHSGGAAVLGGDRVQHEQGSTGRHQNVGAQPSHPRPPLALEPDNGPATHSDGQPESEIGDSQRLHDAESFPIARRPRQPTTRRLTAV

SEQ ID NO: 64992 - protein, 163 aa, Mycobacterium tuberculosis
MLASPVLSADGSTVYVNGRDHRLWALNAPDGKAKWSAPLGFLAQTPPALTPHGLIVSGGGPDTALAAFRDAGDHAEGAWRRDDVTALSTASLAGTGVGYTVISGPNHDGTPGLSLLVFDPANGHTVNSYPLPGATGYPVGVSVGNDRRVVTATSDGQVYSFAP

SEQ ID NO: 64993 - protein, 223 aa, Mycobacterium tuberculosis; identical to SEQ ID NO: 62810

SEQ ID NO: 64994 - protein, 410 aa, Mycobacterium tuberculosis
MNGADGAAASGISPIPLPDTTGQRLNRIDRAGPSEHLGEELRDALELVFPFHLAIHARGIVGFIPQVPTQHAIVVAELAQHTRDVVVQRAGIAAVIEAFSTRTLHPPGVVHPSPWRPLPTRSGERVPAGVEQDKERFDVVSRRDGDELREPGLETGRVLGPQQVVEEDSHGVEPVKPRKAQLVVDAPGIVCAWLEHLELVDGVRGDVVCTDEPAVRLIPAMCAVGRPPAWFFGGRPAALGPTPCLPPAAAGSFRARSTVHKMTIVSRARGTGLVGDVGRAGIIDSQQFEVGNRYEDASLALKPGPGSGVTLRAGDLLAAVGTDQAWVGVLAPSVGGATDSVGPSGRGKYSSPHCMRTTIAANRSRPASVSRYSCRSGSEEYGTRSKRPTSTSIRSREDSVGRGMPRFRAS

SEQ ID NO: 64995 - protein, 515 aa, Mycobacterium tuberculosis
MPDLLEFAALGLRRKAVHDHERDDGERAEDRENACAAEHTQHGEREGGNDRVGRQCRGEHQARSHRPQPGREALRGVHPDQRAESEVEPDDEQQHAGEPQHQPRATIGVVGEYGDQHGICGDHRRDAGQQDRATAQPIDQKQRGTHRRQAGDLHHRGQGKHREIAREAHGGEKSRTVVDDRVDPGDLDEEAERDDEQRGPQIRPPHHFADTAAAFVDRGRHIGQLGIDVGLRLDPPQRATRVGDPALEQIPAGGIGHAPQQRQQQRGRRGGQPEHRAPAVRSGQQVADQVTDDDAAKRRQLIRGHQRPTHRRRRRLGHIHRHHHHRQADCHTQQQTRHHQHRYGHRGRAEQGEHCVAGDDEHHRFLASDRVGEDAAAKRPGDLAEHRRGGQQLLFSSGEFEFLAERQQRTRDGGKVVPVEDADAGGGEPDEERPAPRSGQLTGTGALSTSTTRSGSSGAPAGVNPASWYRAVVISMRLPQRRHAVNRWSSPDFGADQGRLGCPPANDAEGIGVSS

SEQ ID NO: 64996 - protein, 155 aa, Mycobacterium tuberculosis; identical to SEQ ID NO: 62321

SEQ ID NO: 64997 - protein, 354 aa, Neisseria gonorrhoeae
MKAARFYNKGDIRIEDIPEPTVAPGTVGINVAWCGICGTDLHEFMEGPIFIPPCGHPHPISGESAPVTMGHEFSGVVYAVGEGVDDIKVGQHVVVEPYIIRDDVPTGEGSNYHLSKDMNFIGLGGCGGGLSEKIAVKRRWVHPISDKIPLDQAALIEPLSVGHHAYVRSGAKAGDVALVGGAGPIGLLLAAVLKAKGIKVIITELSKARKDKARESGVADYILDPSEVDVVEEVKKLTNGEGVDVAFECTSVNKVLDTLVEACKPAANLVIVSIWSHPATVNVHSVVMKELDVRGTIAYCNDHAETIKLVEEGKINLEPFITQRIKLDKLVSEGFERLIHNNESAVKIIVNPNL

SEQ ID NO: 64998 - protein, 247 aa, Neisseria gonorrhoeae
MLIIRNLIYWLILCSSLIFLFPFMLLASPFRDGAHKMARVWVGILNWSLKHIVGLKYRIIGAEHIPDRPSVICAKHQSGWETLALQEIFPPQVYVAKRELFKIPFFGWGLKLVKTIGIDRNNRREANEQLIKQGLARKNEGYWITIFPEGTRLAPGKRGKYKLGGARMAKMFEMDIVPVALNSGEFWPKNSFLKYPGEITVIICPTIPHASGSEAELMEKCEHLIETQQPLISGAGPFAAEMPSETA

SEQ ID NO: 64999 - protein, 464 aa, Neisseria gonorrhoeae
  MISC_FEATURE (457)..(457): X=any amino acid
MTVKTRFAPSPTGYLHIGGVRTALFSWAFARHHKGEFLLRIEDTDLARSTAESVNIILDGMKWVGLDYDNADNVVYQTRRFDRYKEVIAELLAKGDAYYCYCSKEELEAMREKAEKEGTATYDRRWRPEAGKTLPEIPAGVQPVVRFKTPLDGVTKWTDLVKGEISIPNEALDDLIIARADGTPTYNFCAVVDDYDMGVTHIIRGDDHVNNTPKQINILKAIGANLPEYGHLPMILNEQGKKISKRSGDTVAITDFGAMGILPEAMLNYLARLGWAHGDDEFFTTEQFIEWFDLKDVSPSPSRMDLKKLYWINGEHIKITPDGKLTELVKPRLALRDIHETEKPALEDVLALVKDRAQDLNALADECLYFYKKQVPAEADVAKHWDDEAAARMLRFAERLEGLEDWNAKAIHDLFKPFCDEEGIKMGKLGMPLRLAVCGTAKTPSVDAVLALISKEXVLKRIRA

SEQ ID NO: 65000 - protein, 856 aa, Neisseria gonorrhoeae
MMQQYLGIKAQHTDKLVFYRMGDFYELFLDDAVEAAKLLDITLTTRGQMDGVPIKMAGVPFHAAEQYLARLVKLGKSVAICEQVGEVGAGKGPVERKVVRIVTPGTLTDSALLEDKETNRIVAVSPDKKYIGLAWASLQSGEFKTKLTTADKLNDELARLQAAEILLPDSKNAPQLQTASGVTRLNAWQFAADAGEKLLTEYFGCQDLRGFGLDSKEHAVSIGAAGALLNYIRLTQNLMPQHLDGLSLETDSQYIGMDAATRRNLEITQTLSGKKTPTLFSILDGCATHMGSRLLALWLHHPLRNRAHIRARQEAVTALESQYEPLQCHLKSIADIERIAARIAVGNARPRDLASLRDSLFELAQIDLSATGSSLLETLKAVFPETLPVAETLKAAVMPEPSVWLKDGNVINHGFHPELDELRRIQNHGDEFLLDLEAKERERTGLSTLKVEFNRVHGFYIELSKTQAEQAPADYQRRQTLKNAERFITPELKAFEDKVLTAQDQALALEKQLFDGVLKNLRTALPQLQKAAKAAAALDVLSTFSALAKERNFVRPEFADYPVVHIENGRHPVVEQQVRHFTANHTDLDHKHRLMLLTGPNMGGKSTYMRQVALIVLLAHTGCFVPADAATIGPVDQIFTRIGASDDLASNRSTFMVEMSETAYILHHATEQSIVLMDEVGRGTSTFDGLALAHAIAEHLLQKNKSFSLFATHYFELTYLPEAHAAAVNMHLSALEQGRDIVFLHQIQPGPAGKSYGIAVAKLAGLPVRALKAAQKHLNGLENQAAANRPQLDIFSTMPSEKGDEPNVDCFVDKAEEKHFEGILAAALENLDPDSLTPREALSELYRLKDLCKSVS

SEQ ID NO: 65001 - protein, 357 aa, Neisseria gonorrhoeae
MECSFISEYNTGIGLYFTTGRQNMSIKVAINGFGRIGRLALRQIEKAHGIEVAAVNDLTPAEMLLHLFKYDSTQGRFQGTAELKDDAIVVNGREIKVFANPNPEELPWGELGVDVVLECTGFFTNKTKAEAHIRAGARKVVISAPGGNDVKTVVYGVNQDILDGSETVISAASCTTNCLAPMAAVLQKEFGVVEGLMTTIHAYTGDQNTLDAPHRKGDLRRARAAALNIVPNSTGAAKAIGLVIPELNGKLDGSAQRVPVATGSLTELVSVLERPATKEEINAAMKAASSESYGYNEDQIVSSDVVGIEYGSLFDATQTRVMTVGGKQLVKTVAWYDNEMSYTCQLVRTLEYFAGKI

SEQ ID NO: 65002 - protein, 226 aa, Neisseria gonorrhoeae
MTYTITPIGTARSPYKQKFGIARQPGLVSAAEACIELNPEFTADSVRGLEDFDYVWISFIFHGVLDEGWAQMVRPPRLGGKQKMGVFATRSPHRPNHLGLSLLKLERIETGKPVRLYCSGSDLLDGTPIVDIKPYIPFIESKPDAASGFVSGKPVELEVVWQENIGAENLSANTKNLISQSIAQDPRPAYQNIPERIYVMNIADYEVRFQIEENRATVINLSPTPL

SEQ ID NO: 65003 - protein, 197 aa, Neisseria gonorrhoeae
MKIANSITELIGNTPLVKLNRLTKGLKAEVAVKLEFFNPGSSVKDRIAEAMIEAAEKAGKINKNTVIVEATSGNTGIGLAMVCAARGYKLAITMPESMSKERKMLLRTFGAELILTPAAEGMAGAIAKAQSLVDAHPDTYFMPRQFDNEANPEVHRKTTAEEIWNDTDGEVDVFVAGVGTGGTITGVGEVLKKYKPN

SEQ ID NO: 65004 - protein, 288 aa, Neisseria gonorrhoeae
MMKTLLPFFGVARVSGEDRQTFLHGQLSNDINNLQTGQACYATYNTPKGRVIANMIVVNRGDDLLLIMAQDLLEATVKRLQMFVLRAKAVFEILEDYAVGAELAASAEPLAAQEPSLAFTSECVSDGICSVILHHRGILHIAPETALPPYDAAAENAWRLHEIRSGYPWICAATKETAVAQMLNQHIIGGVHFKKGCYPGQEIIARAQYRGQVKRGLAVLSGNSAAEAGILLTADGEEAGIVLDSVQDSENFTALAVIKFSAAQKELTVPNGGIFKAVHLFFKTKNAE

SEQ ID NO: 65005 - protein, 339 aa, Neisseria gonorrhoeae
MNTMLMSGAAAALLAGIILYFKSDKKRQENGEWSSGLEYAYILTAVGVFAALSLFMSFTAVFLIFVVLCGTAWGVYKYRLKTHPEISESSHFGDYFGSFFPTVLVLFLIRSFIAEPFQIPSSSMRPGLIKGDFILVGKFSYGLRVPVLNNVFIPTGKIERGDVVVFNYPLQPEMTYIKRIVGIPGDIVEYRDKVLTVNGKPASDIPDGTYRYPDDTDPSEIHNTDMFRSGLDGKSFNILKKEGQPAVSLPVLGKYTSDIMSENGYSIDQSGLNHCQYADDGSGFVCKVPEGRYFAMGDNRDNSADSRYWGFVDDKLVVGKAMFILMNFGDFGRAGTAIR

SEQ ID NO: 65006 - protein, 233 aa, Neisseria gonorrhoeae
MSLKTVAVIGAMEQEIELLREMMENVKAVSFGRFSAYEGELAGKRIVLALSGIGKVNAAVATAWLIRQFAPDCVINTGSAGGLGKGLKVGDVVIGTETEHHDVDVTAFGYARGQVPQLPARFASDGILIETAKRAARTFEGAEVEQGLIVSGDRFVHSSEGVAEIRKHFPEVKAVEMEAAAIAQTCHQLETPFVIIRAVSDSADEKADISFEEFLKTAAASSAKMVAEIVKSL

SEQ ID NO: 65007 - protein, 325 aa, Neisseria gonorrhoeae
MIYPWHQEQWRQIAEHWTSRPNAWLFVGKKGTGKTAFARFAAKALLCETPAPGCKPCGECMSCHLFGRGSHPDFYEITPLADEPENGRKLLRIKIDAVREIIDNVYLTSVRGGLRVILIHPAESMNVQAANSLLKVLEEPPPQVVFLLVSHAADKVLPTIKSRCRKMVLPAPSHGEALAYLRDRGVAEPEERLAFHSGAPLFQEEGELRELRAKLLEILAEPRLLKILDYAALFDKEKLPLAVFVGWMQKWLVDLGLCLQHMKPVYYPAYEDRLLQTASGFRPRNVFAAEDMLKQLAPYGFHTLNVKMQIEHLLINYLELKKENR

SEQ ID NO: 65008 - protein, 502 aa, Neisseria gonorrhoeae
MLPHGQFAQWIAPLTVGEEGGVWVVYGKNQFACNMLKSQFAGKIEAVREELAAGRPAFVFKPGEGVRYEMAAVEGAVEPAEPSLHAGSEEMPVQEVLLDELPSEKPVKPAASKTAADILAERMKNLPHEPRQAAGPASRPESAAVAKARTDAQRDAEEARYEQTNLSPDYTFDTLVEGKGNRLAAAAAQAIAENPGQSYNPFFLYGSTGLGKTHLVQAVGNELLKNRPDAKVRYMHSDDYIRSFMKAVRNNTYDVFKQQYKQYDLLIIDDIQFIKGKDRTMEEFFYLYNHFHNEKKQLILTCDVLPAKIEGMDDRLKSRFSWGLTLELEPPELEMRIAILQKKAEAAGISIEDEAALFIANLIRSNVRELEGAFNRVGASSRFMNRPVIDIDLARTALQDIIAEKHKVITADIIIDAVAKYYRIKISDVLGKKRTRNIARPRQVAMSLTKELTTLSLPSIGDSFGGRDHTTVMHGIRAVAKLREEDPELAQDYEKLLILIQN

SEQ ID NO: 65009 - protein, 367 aa, Neisseria gonorrhoeae
MLILQAERDSLLKPLQAFTGIVERLHTLPILSNVLIEGRGGQTKLLATDLEIQIDTAGPEGGAGDFRITTNAKKFQDILRALPAGALVSLDWDDNRLTLKAGKSRFALQTLPAADFPMMNVGEDISATFSLGQERFKTMLSQVQYSMAVQDIRYYLNGLLMQVEGSQLRLVATDGHRLAYAACAIDADLPRAEVILPRKTVLELFKLLNNPDDPIQIELLDKQVRFQCNGTTIVSKVIDGKFPDFNRVIPLDNDKIFVLSRAELLGALERVSILANEKFRGARLFLQPGLLSVVCSNNEQEEAREEIEIAYQGGELEVGFNIGYLMDVLRNIHSDDMQLAFGDANRSTLFTVPNNPNFKYIVMPMRI

SEQ ID NO: 65010 - protein, 878 aa, Neisseria gonorrhoeae
MTMQEHYQPAAIEPAAQKKWDDARISNVSEDASKPKYYCLSMFPYPSGKLHMGHVRNYTIGDVLSRFKLLNGFNVMQPMGWDAFGMPAENAAMKNNVAPAAWTYDNIEYMKTQLKSLGFAIDWEREVATCKPEYYRWEQWLFTKLFEKGIVYRKNGTVNWDPVDQTVLANEQVIDGRGWRSGALIEKREIPMYYFKITDYAEELLNDLDKLEHWPEQVKTMQRNWIGKSRGMTVRFAVSDDSKQGLEGDYAKFLQVYTTRPDTLMGATYVAVAAEHPLATAAAADKPELQAFIAECKAGSVAEADMATMEKKGVPTGRYVVNPLNGDKLEVWIANYVLWGYGDGAVMAVPAHDERDFEFAAKYNLPKKQVIAVGDNAFDANRWQEWYGDKENGVLVNSGDLDGLDFQTAFDAVAAKLQSQGAGEPKTQYRLRDWGISRQRYWGCPIPIVHCEKCGDVPVPADQLPVVLPENVVPDGMGSPLAKMPEFYETSCPCCGGAAKRETDTMDTFMESSWYFFRYMSPKFSDGMVSAESAKYWGAVDQYIGGIEHAILHLLYARFFTKLMRDEGLVNVDEPFERLLTQGMVVCETYYRENDKGGKDWINPADVELTFDDKGRPVSAVLKADGLPVVISGTEKMSKSKNNGVDPQELINAYGADTARLFMMFAAPPEQSLEWSDSGVEGAHRFLRRLWRTVYEYLKQGGAVKAFAGNQDGLSKELKDLRHKLHSTTAKVSDDYGRRQQFNTAIAAVMELLNQYDKTDTGSEQGRAVAQEVLEAAVRLLWPIVPHICETLWSELNGAKLWEAGWPTVDEAALVKSEIEVMVQVNGKLRGKITVAADASKADLEAAALANEGAVKFMEGKPAKKIIVVPGRLVNIVV

SEQ ID NO: 65011 - protein, 156 aa, Neisseria gonorrhoeae
MNITVLAVGTKMPRWVDEAVAEYAKRFGRDAAYAFKEIKPEKRGAGVNAVQGMAAEEKRILEAIPQGAFLVVLDERGKAPTSVELAEHLKSWRQNGEHVCFVIGGADGMTDRLKQQARMMMRLSSLTLPHGMVRVLLTEQLYRAVSILHNHPYHRE

SEQ ID NO: 65012 - protein, 186 aa, Neisseria gonorrhoeae
MKKIIFAALAAAAVGTASATYKVDEYHANVRFAIDHFNTSTNVGGFYGLTGSVEFDQAKRDGKIDITIPVANLQSGSQPFTGHLKSADIFDAAQYPDIRFVSTKFNFNGKKLVSVDGNLTMRGKTAPVKLKAEKFNCYQSPMAETEVCGGDFSTTIDRTKWGVDYLVNAGMTKNVRIDIQIEAAKQ

SEQ ID NO: 65013 - protein, 259 aa, Neisseria gonorrhoeae
MHIIDSHCHLNFEGLKERLPEVLSNMEANGVGQALAISVSRESFSEVFAVAEAHEHIYCTIGVHPDSKEAEEFSIAEMVEAAAHPKVVGIGETGLDYYWCKGDLSWQHKRFADHIEAANQTGLPVIVHTRDAAADTLAILKECKTNSGVIHCFSEDVGFARAAMDLGLYISFSGIVTFKNAPLVQEAAKYVPDDRILVETDAPFLAPVPKRGRQNEPAFVRHTAEHIAKLRNQTLEQVAAYTTENFYRLFKKVPDMRVV

SEQ ID NO: 65014 - protein, 594 aa, Neisseria gonorrhoeae
MALVELKVPDIGGHENVDIIAVEVNVGDTIAVDDTLITLETDKATMDVPAEVAGVIKEVKVKVGDKISEGGLIVVVEAEGAAAAPKAEAAAAPAQEAPKAAAPAPQAAQFGGAADAEYDVVVLGGGPGGYSAAFAAADEGLKVAIVERYKTLGGVCLNVGCIPSKALLHNAAVIDEVRHLAANGIKYPKPELDIDMLRAYKDGVVSRLTGGLAGMAKSRKVDVIQGDGQFLDPHHLEVSLTAGDAYEQAAPTGEKKIVAFKNCIIAAGSRVTKLPFIPEDPRIIDSSGALALKEVPGKLLIIGGGIIGLEMGTVYSTLGSRLDVVEMMDGLMQGADRDLVKVWQKQNEYRFDNIMVNTKTVAVEPKEDGVYVTFEGANAPKEPQRYDAVLVAAGRAPNGKLISAEKAGVAVTDRGFIEVDKQMRTNVPHIYAIGDIVGQPMLAHKAVHEGHVAAENCAGHKAYFDARVIPGVAYTSPEVAWVGETELSAKASGRKITKANFPWAASGRAIANGCDNGFTKLIFDAETGRIIGGGIVGPNGGDMIGEVCLAIEMGCDAADIGKTIHPHPTLGESIGMAAEVALGVCTDLPPQKKK

SEQ ID NO: 65015 - protein, 208 aa, Neisseria gonorrhoeae
MNVNVINHPLVRHKLTLMREADCSTYKFRTLTTELARLMAYEASRDFEIEKYLIDGWCGQIEGDRIKGKTLTVVPILRAGLGMLDGVLDLIPTAKISVVGLQRDEETLKPISYFEKFVDSMDERPALIIDPMLATGGSMVATIDLLKEKGCRNIKALVLVAAPEGVKAVNDAHPDVTIYTAALDSRLNENGYIIPGLGDAGDKIFGTR

SEQ ID NO: 65016 - protein, 526 aa, Neisseria gonorrhoeae
  MISC_FEATURE (218)..(218): X=any amino acid
VEIKVPDIGGHENVDIIAVEVKAGDTIAVDDTLITLETDKATMDVPADAAGVVKEVKVKVGDKISEGGVILTVETGAAAAEAAPAAAAEAQPAPAAAGGATVQVAVPDIGGHTDVDVIAVEIKVGDTVAEDDTLITLETDKATMDVPCTAAGVVKAVFLKVGDKVSEGSAIIEVETAGSAAAAPAPAAQAAAPAAVPTSAAPAAVPTSCLACRCQNRXSRFRQSTRRSFRTQTGARIGRGFGPSQRSGLKGRIMGDDIKAFVKSVMQGGAAKPAAAGASLGGGLDLLPWPKVDFSKFGNVEVKELSRIKKISGQNLSRNWVVIPHVTVHEEADMTELEEFRKQLNKEWEREGVKLSPLAFIIKASVSALKAFPEFNASLDGDNLVLKNYFNIGFAADTPNGLVVPVIKDVDQKGLKQISQELTELSKKAREGKLKPQEMQGACFTISSLGGIGGTGFTPIVNAPEVAILGVCKSQIKPVWNGKEFAPRLMCPLSLSFDHRVIDGAAGMRFTVFLANLLKDFRRITL

SEQ ID NO: 65017 - protein, 198 aa, Neisseria gonorrhoeae
MSDTDKQAFLTSVSSKEQVKKVIEPRKVTKCPHCQSTHFVKNGKDCGNQRFLCRDCKKSFVEQTGTILYNTQKDIEVWEKYIHCMIEKYPLRKCAEICKINLATAFTWRHKILDALQNMMNEVELDGIVQADETYSTISYKGHHKNFNLPRPAHKRGTRATKRGISKEQVCVPCGINLDGKSVARISNLGKPSLKNIN

SEQ ID NO: 65018 - protein, 252 aa, Neisseria gonorrhoeae
MITIRNVSYRIGTHPILDNVSLDIPEGGITALIGPNGAGKSTLFSFMARLRPLESGSIAYRGKNLAGTPTAELARTLSILTQENSIMSRITVRDLLMFGRYPYHQGRPTAECRRIVNGAIEEFHLQDLSDRYLTELSGGQRQRAMIAMVFCQSTDYVLLDEPLNNLDMYHARSLMQILQKLTHEHKRTTVAVLHDINQAAAYADHVVAMKNGKAALTGTPEEVFTVHNIKELFDMDVDVLDYEGKKLIVHHI

SEQ ID NO: 65019 - protein, 322 aa, Neisseria gonorrhoeae
MTAKPFSLNLANLLLPAVLFAVSLSVGIADFRWSDVFSLSDSQQVMFISRLPRTFAIVLTGASMAVAGMIMQILMRNRFVEPSMAGAGQSAALGLLLMSLLLPAAPLPVKMSVAAVAALIGMLVFMLLIRRLPPTAQLMVPLVGIIFGGVVEAVATFVAYEFEMLQMLGVWQQGDFSSVLLGRYELLWITGGLAVFAYLIADRLTILGLGETVSVNLGLNRTAVLWSGLIIVALITSLVIVTVGNIPFIGLVVPNIVSRLMGDRLRQSLPAVALLGASLVLLCDIIGRMIVFPFEIPVSTVFGVLGTALFLWLLLRKPAYAV

SEQ ID NO: 65020 - protein, 713 aa, Neisseria gonorrhoeae
MNAPFFRLSLLSLTLAAGFAHAAENNANVALDTVTVKGDRQGSKIRTNIVTLQQKDESTATDMRELLKEEPSIDFGGGNGTSQFLTLRGMGQNSVDIKVDNAYSDSQILYHQGRFIVDPALVKVVSVQKGAGSASAGIGATNGAIIAKTVDAQDLLKGLDKNWGVRLNSGFAGNNGVSYGASVFGKEGNFDGLFSYNRNDEKDYEAGKGFRNVNGGKTVPYSALDKRSYLAKIGTTFGDGDHRIVLSHMKDQHRGIRTVREEFAVGGENSRITIKRQAPAYRETTQSNTNLAYTGKDLGFVEKLDANAYVLEKKRYSADDKDNGYAGNVKGPNHTRIATRGMNFNFDSRLAEQTLLKYGINYRHQEIKPQAFLNSQFKIEDKKDATEEDKKKNRENEKIAKAYRLTNPTKTDTGAYIEAIHEIDGFTLTGGLRYDRFKVKTHDGKTVSSSSLNPSFGVIWQPREHWSFSASHNYASRSPRLYDALQTHGKRGIISIADGTKAERARNTEIGFNYNDGTFAANGSYFRQTIKDALANPQNRHDSVAVREAVNAGYIKNHGYELGASYRTGGLTAKVGVSRSKPRFYDTHPKKLLSANPEFGAQTGRTWTASLAYRFKNPNLEIGWRGRYVQKATGSILAAGQKDRDGKLENVVRQGFGVNDVFANWKPLGKDTLNVNLSVNNVFDKFYYPHSQRWTNTLPGVGRDVRLGVNYKF

SEQ ID NO: 65021 - protein, 544 aa, Neisseria gonorrhoeae
MAAKDVQFGNEVRQKMVNGVNILANAVRVTLGPKGRNVVVDRAFGGPHITKDGVTVAKEIELKDKFENMGAQMVKEVASKTNDVAGDGTTTATVLAQSIVAEGMKYVTAGMNPTDLKRGIDKAVAALVEELKNIAKPCDTSKEIAQVGSISANSDEQVGAIIAEAMEKVGKEGVITVEDGKSLENELDVVEGMQFDRGYLSPYFINDAEKQIAGLDNPFVLLFDKKISNIRDLLPVLEQVAKASRPLLIIAEDVEGEALATLVVNNIRGILKTVAVKAPGFGDRRKAMLQDIAILTGGVVISEEVGLSLEKATLDDLGQAKRIEIGKENTTVIDGFGDAAQIEARVAEIRQQIETATSDYDKEKLQERVAKLAGGVAVIKVGAATEVEMKEKKDRVEDALHATRAAVEEGVVAGGGVALLRARAALENLHTGNADQDAGVQIVLRAVESPLRQIVANAGGEPSVVVNKVLEGKGNYGYNAGSGEYGDMIGMGVLDPAKVTRSALQHAASIAGLMLTTDCMIAEIPEEKPAVPDMGGMGGMGGMM

SEQ ID NO: 65022 - protein, 570 aa, Neisseria gonorrhoeae
MKASQFFISTLKEAPAEAAFASHKLMIRAGLIKANASGLYTWMPMGLRVLRKVENVVREEMARAGSVELLMPVVQPAELWQESGRWEFYGKELLRLKDRHERDFCMGPTCEEVIADIVRKEINSYKQLPKNFYHIQTKFRDEVRPRFGVMRAREFVMKDAYSFHADYASLQATYDAMYDAHCRIFTRLGLAFRPVAADTGSIGGTGSHEFQVLAESGEDVIAYSDTSDYAANIELAPTLPLKGERAAAQAVLTKVHTPNVKTIESLVEFLNIPVEQTLKSIVVEGENEGELVLLLLRGDHEFNDIKAEKLAGVKSPLTMASPAAIVEQFGANGGSLGPVGFTGKVYADFATEKGADWVIGANEDDYHYTGFNFGRDAAEPEFVDLRNVVEGDESPDGQGRLKLARGIEVGHVFQLRGKYTQAMNVSFLDNNGKSQIMEMGCYGIGITRVVAAAIEQNNDEKGIIWTKAMAPFEVVIVPMNYKKSDTVREAADRIYAELLAAGADVLLDDRDERAGVLLNDSELLGIPHRIVIGDRALKEGNVEYAERRGNEAQAVAIGEIVARVTASLNA

SEQ ID NO: 65023 - protein, 218 aa, Neisseria gonorrhoeae
MASVFLEGEAVEVGNIFCIGRNYAAHVEELKNEIPSEPVVFMKPSGSILNSGGTILLPEFSRDVQFECELVLLIGRDSDGTGEGEDILGCVAGYGVGLDLTARDIQCRLKAQGLPWLKAKGFRHSACVSDFAAADRIGNQDKVLFSLKQNGVLKQRGETGLMIYPIREILHKLAADYGLGKGDLVFTGTPSGVGAIGAGDNLALELDGLVCASFTIGC

SEQ ID NO: 65024 - protein, 151 aa, Neisseria gonorrhoeae
MHKIPKGTALAFDFGEARIGVAQGDAELGLSHPLATVTGGSNDEKFAAIAKLVQEWQPRYFVVGLPVHADGTEHEMTHLSRKFGRRLNGRFNLPVYWVDERLSSVCAESLLSEAQVLGKKRKSVLDQVAAQAILHGFLEGGPAECFNGREG

SEQ ID NO: 65025 - protein, 459 aa, Neisseria gonorrhoeae
MAKTLKTLYQCTECGGTSPKWQGKCPHCGEWNTLQESFAAPEPKNARFQSWAADASTVQSLSAVTAAEVPRNPTGMGELDRVLGGGLVDGAVILLGGDPGIGKSTLLLQTIAKMAQSRKVLYVSGEESAQQVALRSQRLELHAEGVNLLAEIRMEAIQAALKQHQPEVVVIDSIQTMYSDQITSAPGSVSQVRECAAQLTRMAKQMGIAMILVGHVTKDGAIAGPRVLEHMVDTVLYFEGDQHSNYRMIRAIKNRFGAANELGVFAMTENGLKGVSNPSAIFLASYRDDTPGSCVLVTQEGSRPLLVEIQALVDDAHGFTPKRLSVGLEQNRLAMLLAVLNRHGGIACFDQDVFLNAVGGVKIGEPAADLAVILAMLSSFRNRPMPEKTVVFGEIGLSGEVRPVARGQERLKEAEKLGFKRAIVPKANMPRNAKEFPNLKIHGVSSLQEAIDICRDSRE

SEQ ID NO: 65026 - protein, 930 aa, Neisseria gonorrhoeae
MSNRPTLLLVDGSSYLYRAYHAMGQNLTAPDGAPTGALYGVLNMLRRLRSEYPHDYCAVVFDAKGKNFRHQMFEEYKATRPPMPDDLRPQAEALPDLVRLTGWPVLVIGQVEADDVIGTLAKQGAEHGLRVIVSTGDKDMAQLVDERVTLVNTMSGETLDIEGVKAKFGVRPDQIRDYLALIGDKVDNVPGVEKCGPKTAVKWLEAYGSLQGVMEHAPEIKGKVGENLQAALPQLPLSYDLVTIKTDVDLHTELSDGIESLRRTAPKWAQLAVDFKRWGFRTWLKEAESNMNTGSTDDLFGSDSIGEQAALNAEIPSEKRAEKATAPEKLDYQAVTTEAQFAALLDKLAKADTIGIDTETTSLDAMNAELVGISIAFQAGEAVYIPVGHSLTAAPEQLDLQDVLGRLKPHLENPALKKIGQNLKYDQHVFANYGIALNNIAGDAMLASYIIESHLGHGLDELSGRWLGLETITYESLCGKGAKQISFADVAIGQATEYAAQDADFALRLEARLRAQMDDKQLEMYEKMELPVAQVLFEMECNGVQIDRAELARQSAELGAELMKLEQEAYAAAGQPFNLNSPKQLQEILFDKMGIPTKGLKKTAKGGISTNEAVLEQLAPDYPLPKIILQNRSLAKLKSTYTDKLPEMISPRDNRVHTTYAQAVAITGRLASNNPNLQNIPIRTAEGRRVRRAFTAPPGSVIVSADYSQIELRIMAHLSGDKTLIAAFQSGEDVHRRTAAEVFGTAPENVSPEQRRYAKTINFGLIYGMGQYGLAKSLGIDNLSAKNFIDRYFARYPGVAEYMQRTKEQAAAQGYVETLFGRRLYLPDIRNKNANARAGAERAAINAPMQGTASDLIKRAMINVRNWLSDGIGSKLVMQVHDELVLEVVETELDFVKEKLPQIMAKVDGGLLDVPLVAEVGVGENWEEAH

SEQ ID NO: 65027 - protein, 1468 aa, Neisseria gonorrhoeae
MKTTDKRTTETHRKAPKTGRIRFSPAYLAICLSFGILPQARAGHTYFGINYQYYRDFAENKGKFAVGAKDIEVYNKKGELVGKSMTKAPMIDFSVVSRNGVAALAGDQYIVSVAHNGGYNNVDFGAEGSNPDQHRFSYQIVKRNNYKAGTNGHPYGGDYHMPRLHKFVTDAEPVEMTSYMDGWKYADLNKYPDRVRIGAGRQYWRSDEDEPNNRESSYHIASAYSWLVGGNTFAQNGSGGGTVNLGSEKIKHSPYGFLPTGGSFGDSGSPMFIYDAQKQKWLINGVLQTGNPYIGKSNGFQLVRKDWFYDEIFAGDTHSVFYEPHQNGKYFFNDNNNGAGKIDAKHKHYSLPYRLKTRTVQLFNVSLSETAREPVYHAAGGVNSYRPRLNNGENISFIDKGKGELILTSNINQGAGGLYFEGNFTVSPKNNETWQGAGVHISDGSTVTWKVNGVANDRLSKIGKGTLLVQAKGENQGSVSVGDGKVILDQQADDQGKKQAFSEIGLVSGRGTVQLNADNQFNPDKLYFGFRGGRLDLNGHSLSFHRIQNTDEGAMIVNHNQDKESTVTITGNKDITTTGNNNNLDSKKEIAYNGWFGEKDATKTNGRLNLNYQPEEADRTLLLSGGTNLNGNITQTNGKLFFSGRPTPHAYNHLGSGWSKMEGIPQGEIVWDNDWIDRTFKAENFHIQGGQAVVSRNVAKVEGDWHLSNHAQAVFGVAPHQSHTICTRSDWTGLTSCTEKTITDDKVIASLSKTDIRGNVSLADHAHLNLTGLATLNGNLSAGGDTHYTVTRNATQNGNLSLVGNAQATFNQATLNGNTSASDNASFNLSNNAVQNGSLTLSDNAKANVSHSALNGNVSLADKAVFHFENSRFTGKISGGKDTALHLKDSEWTLPSGTELGNLNLDNATITLNSAYRHDAAGAQTGSAADAPRRRSRRSLLSVTPPTSAESRFNTLTVNGKLNGQGTFRFMSELFGYRSGKLKLAESSEGTYTLAVNNTGNEPVSLEQLTVVEGKDNTPLSENLNFTLQNEHVDAGAWRYQLIRKDGEFRLHNPVKEQELSDKLGKAGETEAALTAKQAQLAAKQQAEKDNAQSLDALIAAGRNATEKAESVAEPARQAGGENAGIMQAEEEKKRVQADKDTALAKQREAETRPATTAFPRARRARRDLPQPQPQPQPQPQRDLISRYANSGLSEFSATLNSVFAVQDELDRVFAEDRRNAVWTSGIRDTKHYRSQDFRAYRQQTDLRQIGMQKNLGSGRVGILFSHNRTGNTFDDGIGNSARLAHGAVFGQYGIGRFDIGISAGAGFSSGSLSDGIRGKIRRRVLHYGIQARYRAGFGGFGIEPHIGATRYFVQKADYRYENVNIATPGLAFNRYRAGIKADYSFKPAQHISITPYLSLSYTDAASGKVRTRVNTAVLAQDFGKTRSAEWGVNAEIKGFTLSLHAAAAKGPQLEAQHSAGIKLGYRW

SEQ ID NO: 65028 - protein, 448 aa, Neisseria gonorrhoeae
MSDNVPTIAAVATAPGRGGVGVIRISGKNLLPMAQALCGKTPEPRVATYADFTDADGQAIDSGLLLFFAAPASFTGEDVIELQGHGGPVVMEMLLNRCLELGARLAEPGEFTKRAFLNDKLDLAQAEGVADLIDASGRSAARLALRSLKGDFSRRIHGLVEGLITLRMLVEAALDFPEEDIDFLEAADARGKLDGLRRAVDDVLANAQQGAILREGLNVVLVGAPNVGKSSLLNALAGDEVAIVTDIAGTTRDAVRERILIDGVPVHIVDTAGLRETDDVVERIGIERSRKAVSEADVALVLVDPREGLNEKTRMILDTLPSDLKRIEIHSKSDLHAHAAGGFGTGAETVIALSAKTGDGLDALKRTLLCEAGWQGESEGLFLARTRHVNALKAAQEELSLAALCGNHQIELFAEHLRLAQVACGEITGEFTADDLLGVIFSRFCIGK

SEQ ID NO: 65029 - protein, 671 aa, Neisseria gonorrhoeae
MMKLNAQQLEAVRYLGGPLFVLAGAGSGKTGVITQKIKHLIVNVGYLPHTVAAITFTNKAAAEMQERVAKMLPKPQTRGLTICTFHSLGMKILREEANHIGYKKNFSILDSTDSAKIIGELLGGTGKEAVFKAQHQISLWKNDLKTPEDVVQTASNVREQQTARVYASYQETLQSYQAVDFDDLIRLPAVLLQQNSEVRNKWQRRLRYLLVDECQDTNTCQFALMKLLTGAEGMFTAVGDDDQSIYAWRGANMENLRKMQENYPQMKVIKLEQNYRSTARILKIANKVIENNPKLFTKKLWSQLGEGEPVKVVACQNEQHEADWVVSQIVKQKLIGGDKTRYADFAVLYRGKHQARIFEEALRGARIPYRLSGGQSFFDKAEIKDVLSYVRLLANPNDDPAFLRAVTTPKRGIGDVTLGKLNAYAHEHECSLYEAAQNEEALATLNNTNRQHLQAFMDMFGNYRAKAEIDEAGEFINSLLEEIDYENHLMQNEEGKAGEIKWRNVGELVSWFARKGERDGKNVIELAQTVALMTLLEGKDEEETDAVSLSTLHAAKGLEYPYVFLVGCEEGVLPHNDSIEEGNVEEERRLMYVGITRAKRQLTLTHCVKRKKQGIWQFPEPSRFIDEMPQEDLKILGRKGGEPIVSKEEGRRNLADIIGRIDNLKKSGPAD

SEQ ID NO: 65030 - protein, 254 aa, Neisseria gonorrhoeae
MHTSLTVKNTVIGSGRTKIAVPLVARDAADLSSVLSQIKNLPFDIVEFRADFLECAGSIGEVLRHTQAVRDALPDKPLLFTFRRHCEGGSFPCSDDYYFELLDALIESRLPDIIDIELFSGETAVRRAVANAQKNGIAALLCNHEFHRTPPQEEIVCRLKQMEDCGADICKIAVMPQSSEDVLTLLSATLEAKRLVAKPVITMSMGQTGAVSRLAGQVFGSSITFGSGTQNSAPGQIGVSALRAALDCLESGAD

SEQ ID NO: 65031 - protein, 375 aa, Neisseria gonorrhoeae
MTDRFIFRAAARVAPQPTYRICSGVTPMSDDKSKALAAALAQIEKSFGKGAIMKMDGSQQEENLEVISTGSLGLDLALGVGGLPRGRIVEIFGPESSGKTTLCLEAVAQCQKNGGVCAFVDAEHAFDPVYARKLGVKVEELYLSQPDTGEQALEICDTLVRSGGIDMVVVDSVAALVPKAEIEGDMGDSHVGLQARLMSQALRKLTGHIKKTNTLVVFINQIRMKIGVMFGSPETTTGGNALKFYSSVRLDIRRTGSIKKGEEVLGNETRVKVIKNKVAPPFRQAEFDILYGEGISWEGELIDIGVKNDIINKSGAWYSYNGAKIGQGKDNVRVWLKENPEISDEIDAKIRALNGVEMHITEGTQDETDGERPEE

SEQ ID NO: 65032 - protein, 111 aa, Neisseria gonorrhoeae
MFGKAGLGGLMKQAQQMQENMKKAQAKLAETEIEGEAGNGLVKITMTCAHEVRKIDISPDLIQEAADDKEMLEDLILAALKSARGKAEETANKTMGAFTQDLPPGVGDFFR

SEQ ID NO: 65033 - protein, 725 aa, Neisseria gonorrhoeae
MQQKIRFQIEGMTCQACASRIEKVLNKKDFVESAGVNFASEEAQVTFDGSKTSVADIAKIIEKTGYGAKEKTEDTLPQPEAEHHIGWRLWLLLTINIPFLIGMVGMMLKGLNWTRHDWMIPPVWQFVLASIVQLWLAIPFYKSAWASIKGGLANMDVLVTIGTVSIYLYSVYMLFFSSHAAHGMAHVYFEAGVMVIGFVSLGKFLEHRTKKSSLNSLGLLLKLTPTQVNVQRNGEWKQLPIDQVQIGDLIRTNHGERIAADGIIESGSGWADESHLTGESNPEEKKAGGKVLAGALMTEGSVVYRAAQLGSQTLLGDMMNALSEAQGSKAPIARVADKAAAVFVPTVVGIALLTFIVAWLIKGDWTVALMHAVAVLVIACPCALGLATPAAIMVGMGKAVKHGIWFKDAAAMEEAAHVDAVVLDKTGTLTEGRPQVAAVYYVPDSGFDEDALYRIAAAVEQNAAHPLARAIVSAAQARGLEIPAAQNAQTVVGAGITAEVEGVGLVKSGKAEFAELTLPKFSDGVWEIASAVTVSVNGKPIGAFALSDALKADTAEAIGRLKKHNIDVYIMSGDNQSTVEYVAKQLGIAHAFGNMSPCDKAAEVQKLKAAGKTVAMVGDGINDAPALAAANVSFAMKGGADVAEHTASATLMQHSVNQLADALLISQATLENIKQNLFFAFFYNILGIPLAALGFLNPVIAGAAMAASSVSVLGNALRLKWVKID

SEQ ID NO: 65034 - protein, 309 aa, Neisseria gonorrhoeae
MADRQLQPFENVELGEKQDQFQVFEKAVLEHEGKGSAEDSGTVPLPENYPCRKRMLRAAYEAEKAKLQIELLKVQSWVKDSGQRIVSLFEGRDAAGKGGTIKRFMEHLNPRGARVVALEKPTTTERGQWYFQRYIQNLPTAGEMVFFDRSWYNRAGVERVTGFCEPNEYMLFMCQAPELERMLVASGIHLFKFWFSVSREEQLRRFISRRDDALKHWKLSPVDIQSLDRWDDYTEAKNAMFFHTHTGDAPWVIIRSDDKKRARLNCIRYFLHQLDYPGKDVKAIGKVDDKIVLVPDTRYKEKTIDIGHD

SEQ ID NO: 65035 - protein, 304 aa, Neisseria gonorrhoeae
  MISC_FEATURE (278)..(278): X=any amino acid
MEKAEHLNSSRFVNLVKSGGGYVEGSYRFDTLSNGISIHGGTVTARCDFCSSRLAEPYVSFVLLLEGRLDFGINRRRFRIDADGGKIVLIAVGEEVLFSRYLYRGGKTVKMTIKGMEQWLPRPEYARFAPLLYREPVRIWDLPPNLRGLAASCLQTVPKGHLGETLRREADVLRLLSDLWDTVSDGIEPAAGQTAEADAMPSEDFSRTLNAAFDGGAHQVNRLTAALNISERTLQRRMRDHFGITASEWLHHKQMQHALYLLQNGGKNVGETAYLCGXRHVSSFIQAFRQYFGSTPAETKKENR

SEQ ID NO: 65036 - protein, 707 aa, Neisseria gonorrhoeae
MAYQVLARKWRPKTFSDLVGQEHVVKALQNALDEGRLHHAYLLTGTRGVGKTTIARILAKSLNCENAQHGEPCGVCQSCTQIDAGRYVDLLEIDAASNTGIDNIREVLENAQYAPTAGKYKVYIIDEVHMLSKSAFNAMLKTLEEPPEHVKFILATTDPHKVPVTVLSRCLQFVLRNMTAQQVADHLAHVLDSEKIAYDPPALQLLGRAAAGSMRDALSLLDQAIALGSGKVAENDVRQMIGAVDKQYLYELLTGIVNQDGEALLAKAQEMAACAVGFDNALGELAILLQQLALIQAVPSALAHDDPDSDILHRLAQTISGEQIQLYYQIAVHGKRDLGLAPDEYAGFMMTLLRMLAFAPLAAASCDANAVIENTELQSPSAQTAEKETAAKKPQPRPEADAAQTPVQTASAAAMPSEGKTAGPVSHQENNDVPPWEDAPDKTETAAGTARTSAKSIQTASEAETPPENQVSKNKAADNETEASLSEVPSENPIQATPNDEAVETETFAHEAPAEPFYGFPDNDCPPEDGVEIPPPDWANVLPADTAGGGTDEEAEAGGIGGNNTPSAPPPEFSTENWAAIVRHFARKLGAAQMPAQHSAWTEYRSDTGLMVLAMTAEARATADKKRLDKIRDTLAQAYGLQLTLQTEDWRDEAGRETPAMQDKRVQAEDRQKAQALLEADPAAQKILQAFGAQWQPESLELAANRP

SEQ ID NO: 65037 - protein, 658 aa, Neisseria gonorrhoeae
MPRIAALPDHLVNQIAAGEVVERPANALKEIVENSIDAGATAVDVELEGGGIRLIRVGDNGGGIHPDDIELALHRHATSKIKTLNDLEHVASMGFRGEGLASIASVSRLTLTSRQEDSSHATQVKAEDGKLSSPTAAAHPVGTTIEAAELFFNTPARRKFLKSENTEYAHCATMLERLALAHPHIAFSLKRDGKQVFKLPAQSLHERIAAIVGDDFQTASLEIDSGNSALRLYGAIAKPTFAKGKTDKQYCFVNHRFVRDKVMLHAVKQAYRDVLHNALTPAFVLFLELPPEAVDVNVHPTKTEIRFRDSRQVHQLVFHTLNKALADTRANLTESVSNAGEVLHDITGVTPAPMPSENDGENLFDSASNHPTGNKPDTRNAFGSSGKTAPMPYQAARAPQQHSLSLRESRAAMDTYAELYKKTDDIDLELSQFEQARFGNMPSETPAHKTDTPLSDGIPSQSELPPLGFAIAQLLGIYILAQAEDSLLLIDMHAAAERVNYEKMKRQRQENGNLQSQHLLIPVTFAASHEECAALADHAETLAGFGLELSDMGGNTLAVRAAPVMLGKSDVVSLARDVLGELAQVGSSQTIASHENRILATMSCHGSIRAGRRLTLPEMNALLRDMENTPRSNQCNHGRPTWVKLTLKELDTLFLRGQ

SEQ ID NO: 65038 - protein, 122 aa, Neisseria gonorrhoeae
MRHYEIVFIVHPDQSEQVPAMVERYKTMITEANGKIHRLEDWGRRQLAYPINKIHKAHYVLMNIETTPEVVGELETAFRFNDAVLRHLTIKTKHAVTEASPMLGGEKAKNLLVGAAEEAAAQ

SEQ ID NO: 65039 - protein, 237 aa, Neisseria gonorrhoeae
MKTKLPLFIIWLSVSASCASVLPVPEGSRTEMPTQENASDGIPYPVPTLQDRLDYLEGKIVRLSNEVEMLNGKVKALEHTKIHPSGRTYVQKLDDRKLKEHYLNTEGGSASAHTVETAQNLYNQALKHYQNGRFSAAAALLKGADGGDGGSIAQRSMYLLLQSRARMGNCESVIEIGGRYANRFKDSPTAPEVIFKIGECQYRLQQKDIARATWRSLIQTYPGSPAAKRAAAAVRKR

SEQ ID NO: 65040 - protein, 100 aa, Neisseria gonorrhoeae
MGFTNLVSLAALIEKAFPIRYTPAGIPVLDIILKHESWQEENGQQCLVQLEIPARILGRQAEEWQYRQGDCATVEGFLAQKSRRSLMPMLRIQNIKEYKG

SEQ ID NO: 65041 - protein, 76 aa, Neisseria gonorrhoeae
MARQSFKRRKFCRFTAEKIQEVDYKQVDLLKDFISENGKIIPARITGTKAFYQRQLAVAVKRARFLALLPYTDQHK

SEQ ID NO: 65042 - protein, 150 aa, Neisseria gonorrhoeae
MQIILLEKIGGLGNLGDIVTVKNGYARNFLIPAGKAKRATEANMKEFEARRAELEAKQAEILADARARQEKLDGQTVTVAQKAGVDGRLFGSVTNADIAAAIVAAGIEAVKANVRLPNGPLKAVGEYEVEVALHTDAVAKITVAVIAAAE

SEQ ID NO: 65043 - protein, 812 aa, Neisseria gonorrhoeae
MTEKSHKKTAKGRAGSPSPTSARNKKADNGARGNKVSERLKAVKELQKTEAKKARPEHVVNLIADALWLMGLAATLYLAISLISFDMGDPSWSHSSPVVEDAANWGGLFGAYVADVGYYLFGWSFWWWIAAACVVLYKNFRLHAKQTENEAYNHKIAAAALFVLTVFSPVLEYFVLGGKYADSLPVGAGGMVGIRVGAVFAWLLGKSGSLLIILVVLLLSLSLLVQISWLEFLNGAGRAVQNRLSALSGKVMALRKRRPNTKTDGVDTQNTRRMVKEAKNITAKPVALPEGSSSNRKSVAVSVAPPPKIQPSLFEDNEVQQNGEYHKPTLNLLRIPDSEPVSINPAELERTAELIESKLAEFGIGVQVVSATSGPVITRYEIEPAQGVKGSQIVALSKDLARSMSLQSVRIVETIAGKNTMGIELPNDKRQDVMLSEILSSPVFAEAKSKLTVALGKDIAGTPVVGDLAKMPHLLVAGMTGSGKSVGVNGMIMSMLFKATPEEVRFIMIDPKMLELSIYDGIPHLLCPVVTDMREAGQALNWCVAEMEKRYRLLSHAGVRNLEGFNQKVEQAKAAGKPLLNPFSLNLDEPEPLEKLPMIVVVIDELADLMMTERKAVEQQIARLAQKARAAGIHMIVATQRPSVDVVTGLIKANIPTRMAFTVQSKIDSRTILDQMGADELLKYGDSLFLQPGSAEPTRLQGTFVSDGEVHQVVNYVKSQAPADYIEGLLSGEAALETANIVNPNADSDELFDQAVAYVLESKKTSISSLQRQLRIGYNRAANLMEALENAGIVSPSDLNGSRKILAHKDHL

SEQ ID NO: 65044 - protein, 589 aa, Neisseria gonorrhoeae
MILPTRFSDGIPLSLRLKLLTGLWVGLAALSVVLTLLLSFRLENAASVIEEAGNLKMQAYRLAYMAGEGSPRAQIDNQIAEFEKSLKRISQSDAIHPLIPSDNPLAYDLIQSMLIIDWQANILPPLQAYRRPTQIELYRFAGNIELFLQALENAGEKNTWWLRRFQWVIMLMTLVSSVLMLFWHQIWVIRPLQALREGAERIGQRHFDIPVPEDGTPEFKQVGRCFNQMALRLKTLYDDLEGQVAEQTHNLEKQNRNLTLLYRTTRDLHQSYTPRQAAEEFLNHILPAVGAQSGNICLENGSDTDISVHTAEHGKKPPLEKYHDETFPIEYQNEKLGMLSLGFSDGTSLTGDDRTLLQTLIRQLGVSLAGAKQEEEKRLLAVLQERNLIAQGLHDSIAQALTFLNLQVQMLETAFAENKREEAAENIGFIKTGVQECYEDVRELLLNFRTKISNKEFPEAVADLFARFTQQTGITVETVWENGSFLPTQDEQLQMIFILQESLSNIRKHARATHVKFTLSEYGGRFTMTIQDNGQGFDTEKIGEPTGSHVGLHIMQERAKRIRAVLEIRSQAQQGTTVSLTGAPKESLP

SEQ ID NO: 65045 - protein, 259 aa, Neisseria gonorrhoeae
MQDRRPARKGKVKAYRAVFARTGGTMPSEGVSDGIFRGEMLQFAPFLPTQGNRIMFTGIVQGLGKLTAIHRPSEAFQTYVVELPQEAAENLQHGASVANNGCCLTITEIEGNRVSFDLMAETLAKTNLGLLKEGDCVNIERAARFGDEIGGHVMSGHIMATVPIVEIERDGFNRTVWFALPHELKPYILTKGFVGLDGCSLTIGKVEDSRFNVHLIPETLERTLFGSRKAGDRINIEIDPNTQAIVDTVERLMAQRYAK

SEQ ID NO: 65046 - protein, 149 aa, Neisseria gonorrhoeae
MSTFFRQTAQAMTAKHIGRFPLSELDQVIDWQPIEQYLIRQKTRYLRDRRGRPAHPLSSMFKAVLPGQWHSLSDPELEHSLITRIGFNLFCRFDGPGIPGCSTLCRYRKFRYARAAYFGLLKVGVQSHLKAMCLNLLKAANRLSAPAAA

SEQ ID NO: 65047 - protein, 144 aa, Neisseria gonorrhoeae
MPLPAPCRFAKPAASFLSMALLSCQLSHAATAYIPPNDFQPNCDIRRLGLTQGQHNELRKIRAAFKMAGDRARLKVMHSEHSRRRSVVEIISSDVFNRNEARDYVESRYHSSMDFAVDELEIQHRFFHILTPQQQQMWLSSCLK

SEQ ID NO: 65048 - protein, 421 aa, Neisseria gonorrhoeae
MNTLQRRKTHQVLIDHITVGSEAPVVIQSMTNTDTADAKATALQIKELSDAGSEMVRITVNSPEAASKVAEIRRRLDDMGYATPLIGDFHFNGERLLAEFPECGKALSKYRINPGNVGKGVKGDEKFAFMIRTAAENDKAVRIGVNWGSLDQSLAKRMMDANLVSSAPKPPEEVMKEALIVSALESAEKAVLLGLPEDKIILSCKVSAVHDLIQVYRELGSRCVYPLHLGLTEAGMGSKGIVASTAALSVLLQEGIGDTIRISLTPEPGSPRTQEVVVGQEILQTMGLRSFTPMVTACPGCGRTTSTVFQELAQDVQNYLRQKMSIWRTLYPGVESLNVAVMGCVVNGPGESKLADIGISLPGTGETPVAPVYVDGERKVTLKGNNIASEFLAIVEEYVKTNYGKNSSKRNKGKVIPIQSL

SEQ ID NO: 65049 - protein, 410 aa, Neisseria gonorrhoeae
MQTYLVGGAVRDYLLGLPVKDRDWVVVGADAQTMLAQGFQPVGKDFPVFLHPKTHEEYALARTERKTAKGYAGFSFHADKDVTLEQDLMRRDLTINAMAQDADGKIIDPFGGQRDLAAGILRHVSPAFAEDPVRILRAARFAARYGFEIAEETIKLMRQMVENGEADALVAERVWQELAKGLMEKNPRKMIEMLRECGALQVLLPEVDALFGVPQRADYHPEIDSGIHTLMTLQRAADMGLSLPERYAALLHDLGKAKTPPDILPRHHGHDINGVEPVREVNQRLRAPRQCAELAELVCRWHIIFHQVGQLKSQTILNVLKKTDAFRRPERFQTALNVCIADTQGRLNREHTPYPQRAHWLALLEAANQADSGKIAAECRAQGKAHFIAEQIDRARLAQIAPLQKTFRGA

SEQ ID NO: 65050 - protein, 542 aa, Neisseria gonorrhoeae
MISTNGITMQFGAKPLFENVSVKFGEGNRYGLIGANGSGKSTFMKILGGDLEQTAGEVAIENGVRLGKLRQDQFAYEDMRVLDVVMMGHTEMWAAMTERDAIYANPEATEDDYMKAAELEAKFAEYDGYTAEARAAELLSGVGISEDLHNAKMAEVAPGFKLRVLLAQALFSKPDVLLLDEPTNNLDINTIRWLEGVLNQYDSTMIIISHDRHFLNEVCTHMADLDYNTITIYPGNYDDYMLASAQSRERALKDNAKAKEKLQELQEFVARFSANKSKARQATSRLKQADKIKSEMVEVKPSTRQNPYIRFEADEKAKLHRQAVEVEKLAKRFETQLFRNLNFILEAGQRLAIIGPNGAGKSTLLKLLAGAYNPEYSDGLLPDEGSIKWAEKASVGYYPQDHENDFDVDMDLSEWMRQWGREGDDEQVIRGTLGRLLFGSNDVVKKVKVLSGGEKGRMLYGKLLLLKPNVLVMDEPTNHMDMESIESLNMALDKYNGTLIFVSHDRQFVSSLATQIIELDGKGGYEHYLGDYESYLEKKGVA

SEQ ID NO: 65051 - protein, 405 aa, Neisseria gonorrhoeae
MALIVHKYGGTSVGSPERIKNVAKRVAKARAEGHDIVVVVSAMSGETNRLVALAHEMQEHPDPRELDVVLATGEQVTIGLLAMALKDIGVDAKSYTGWQVSLKTDTAHTKARIESIDDEKMRADLAAGKVVIVAGFQGISSEGNISTLGRGGSDTSAVALAAALKADECQIYTDVDGVYTTDPRVVPEARRMDTVTFEEMIELASLGSKVLQIRSVEFAGKYKVRLRVLSSLQDGGNGTLITFEEDDNMERAAVTGIAFDKNQARINVRGVPDKPGVAYQILGAVADANIEVDMIIQNVGSEGTTDFSFTVPRGDYKQTLEILSERKDSIGAASIDGDDTVCKVSAVGLGMRSHVGVAAKIFRTLAEEGINIQMISTSEIKVSVLIDEKYMELATRVLHKAFDLG

SEQ ID NO: 65052 - protein, 206 aa, Neisseria gonorrhoeae
MMNSKKQDAFQRLIGALKVLPNVGPKSAQRMAYHLLQQKRKEAEELVDALQTALRQVCHCARCNTFCEGGLCDICADETRDGRRLMVVHMPADVSNIEAANCHDGLYFVLMGQINTALGMDVSAIALDRLAQRLDGGEIEEIIIATAFTAEGNATAYVLSEFFKNLPYKVSRLSQGIPLGGELEYVDAGTLAQAVYERRLIKEGGA

SEQ ID NO: 65053 - protein, 402 aa, Neisseria gonorrhoeae
MTGIIHSLLDTDLYKFTMLQVVLHQFPQTHSLYEFRCRNVSTVYPLADIREDLEAELDALCRLRFTHDELGYLRSLRFIKSDFVDYLELFQLQRRFVEVGTDDKGRLNIRIEGPMIQAMFFEIFILAIVNELYFRRLETPAVIEEGERRLQAKAARLKEIAAAQNPDEPPFLISDFGTRRRYKLAWQEHVIRTLLEAAPSIVRGTSNVYLAKKLGITPIGTMAHEFLQAFQALDVRLRNFQKAALESWVHEYRGDLGVALTDVVGMDAFLRDFDLYFAKLFDGLRHDSGDPYVWGDKAYAHYQKLKIDSRTKMLTFSDGLDIERSWALHQYFKGRFKTGFGIGTNLTNDMGHTPLNIVLKLVECNGQSVAKLSDSPGKTMTNNSTFLAYLRQVFGIPEPRTP

SEQ ID NO: 65054 - protein, 572 aa, Neisseria gonorrhoeae
MNLHQTVEHEAAAAFAAAGIAGSPVVLQPTKNAEHGDFQINGVMGAAKKAKQNPRELAQKVADALAGNAVIESAEVAGPGFINLRLRHEFLAQNIHAALNDARFGVAKTAQPQTVVIDYSSPNLAKEMHVGHLRSSIIGDSISRVLEFTGNTVIRQNHVGDWGTQFGMLVAYLVEQQKDNAAFELADLEQFYRAAKVRFDEDPAFADTAREYVVKLQGGDETVLALWKQFVDISLSHAQAVYDTLGLKLRPEDVAGESKYNDDLQPVADDLVQKGLAVEDDGAKVVFLDEFKNKEGEPAAFIVQKQGGGFLYASTDLACLRYRIGRLKAGRLLYVVDHRQALHFEQLFTTSRKAGYLPEDAKAEFIGFGTMMGKDGKPFKTRSGDTVKLVDLLTEAVERATALVKEKNPELGADEAAKIGKTVGIGAVKYADLSKNRTSDYVFDWDAMLSFEGNTAPYLQYAYTRVQSVFRKAGEWDATAPTVLTEPLEKQLAAELLKFENVLQSVADTAYPHYLAAYLYQAATLFSRFYEACPILKAEGASRNSRLQLAKLTGNTLKQGLDLLGIDVLDVM

SEQ ID NO: 65055 - protein, 592 aa, Neisseria gonorrhoeae
MPSDGISTRNTMELQTDEFAQAAARAAIRFLERYAGSGNEVLANCTERLFQALQNGHSFIRLSGDEADALSALAPVVGTSAAPLILEGRRLFLGRMWQLEYDLAAEIKRLAAAGTSAPDAAGARQNLAKWFQGAGSEGQRDAAALALLQFFMVITGGPGTGKTTTVAKLLALICGENENLPHIALAAPTGKAAAHMARALHRSINGFDAPEAVRRHLLKLEGQTVHRLLKLSPPKMQAAFDHIRPLPFDVLIVDEASMLDTALMLQLLKAVKTGARVILLGDENQLPSVGIGAVLSVLSQKTVLDGETHQRLAGFLPEHGFSVSANPPVLAQNTAHLSFSHRFGDNSGIGCLARAAVSGDEGAWALFDRFPDELEHSECSPNARVERLYRAHKAYWQAVKDGNIEAAYAGISDIVVLAAWRQDAEDFNEAYCSYVRRKMNIPEHLAYFAGEPIMIRQNDYALELFNGDIGLIMEDVGRQGSLAAYFADADGFKKVAVSCLPEFEPAFAMTVHKSQGSEYREVWLLPPSDAPSDEGDDALSGLSKELLYTAITRAREKFVFFGGKKTFCQAVNTVKVRQTALGSMLERVFSQE

SEQ ID NO: 65056 - protein, 559 aa, Neisseria gonorrhoeae
MENFAQLLEESFTLQEMNPGEVITAEVVAIDQNFVTVNAGLKSESLIDVAEFKNAQGEIEVKVGDFVTVTIESVENGFGETKLSREKAKRAADWIALEEAMENGNILSGIINGKVKGGLTVMISSIRAFLPGSLVDVRPVKDTSHFEGKEIEFKVIKLDKKRNNVVVSRRAVLEATLGEERKALLENLQEGSVIKGIVKNITDYGAFVDLGGIDGLLHITDLAWRRVKHPSEVLEVGQEVEAKVLKFDQEKQRVSLGMKQLGEDPWSGLTRRYPQATRLFGKVSNLTDYGAFVEIEQGIEGLVHVSEMDWTNKNVHPSKVVQLGDEVEVMILEIDEGRRRISLGMKQCQANPWEEFAANHNKGDKISGAVKSITDFGVFVGLPGGIDGLVHLSDLSWTESGEEAVRKYKKGEEVEAVVLAIDVEKERISLGIKQLEGDPFGNFISVNDKGSLVKGSVKSVDAKGAVIALSDEVEGYLPASEFAADRVEDLTTKLKEGDEVEAVIVTVDRKNRSIKLSVKAKDAKESREALNSVNAAANANAGTTSLGDLLKAKLSGEQE

SEQ ID NO: 65057 - protein, 248 aa, Neisseria gonorrhoeae
MDFRFDIIYEYRWMFLYGALTTLGLTVVATAGGSVLGLLLALARLIHLEKAGAPMRVLAWALRKVSLLYVTLFRGTPLFVQIVIWAYVWFPFFVHPSDGILVSGEAAIALRRGYGPLIAGSLALIANSGAYICEIFRAGIQSIDKGQMEAACSLGLTYPQAMRYVILPQALRRMLPPLASEFITLLKDSSLLSVIAVAELAYVQNTITGRYSVYEEPLYTAALIYLLMTTFLGWIFLRLEKRYNPQHR

SEQ ID NO: 65058 - protein, 218 aa, Neisseria gonorrhoeae
MNRQKVIAIDGPGASGKGTVAARVAAALGYDYLDTGALYRLTALYAQKQGVEWHDEENVSALAKKLPAVFSGNRILLDGEDVSDGIRTEAIGMGASAVAQWPKVRAALLQRQRDFLTEKGLVADGRDTGSVVFPQAELKIFLTAESKIRAERRAKQIGIPCEGFTFERILSDIETRDEADRNRKVAPLKQQPDALLLDTSRLTIEETVKKVLDWYRKV

SEQ ID NO: 65059 - protein, 230 aa, Neisseria gonorrhoeae
MKLIKYLQYQGIGSRKQCQWLIRGGYVSINGTCMDDTDADIDSSYVETLDIDGEAVTVVPEPYFYILLNKPEDYETSHKPKHYRSVFSLFPDNMRNIDMQAVGRLDADTTGVLLITNDGKLNHNLTSPSRKIPKLYEVTLKHPTGETLCETLKNGVPLHDENETVCAADAVLENPTTLLLTITEGKYHQVKRMVAAAGNRVQHLHRRRFAHLETENLKPGEWKFIECPKF

SEQ ID NO: 65060 - protein, 160 aa, Neisseria gonorrhoeae
MTNIRIGQGYDVHQLTEGRKLILGGVEIPFEKGLLGHSDADALLHAVTDALLGAAGLGDIGSHFPDTAAEFKDADSRVLLRAAYQSVQAQGWQVVNVDTTVIAQKPKLAPHIPQMRANIAADLGIDISCVNIKGKTNEKLGYLGRMEGIEAQAAVLLVRI

SEQ ID NO: 65061 - protein, 820 aa, Neisseria gonorrhoeae
MTQKEKHFEEYAALATLPLRDVVVYPHMVLPLFVGRPKSIAALENAITREEPVFLLAQTDAAVEEPVATDLYQTGTVAQVLQVLKLPDGTVKVLVEGLYRGRVLTIEDTGGLFVSHIEAVVEEDTGGNTDLEAVRRTLLAQFEQYAKLNKKIPAEIIGSINGIAENSRLTDTVAAHLQLKLAQRQQILEIPEIGKRMEFLLAKLESELDIMQAEKRIRGRVKRQMEKSQREYYLNEQIKAIHKELGEEDENGELDALEAGIKKAGMTKEAEEKCLSELKKLKMMPPMSAESTVVRNYIDTLLGLPWKKKSRVSKDIAKAGLVLDADHYGLEKVKERILEYLAVQKRMDKLKGPILCLVGPPGVGKTSLGESIAKATGRKYVRMALGGVRDESEIRGHRRTYIGSMPGKILQNMAKAGVRNPLFLLDEIDKLGSDFRGDPASALLEVLDHEQNNKFADHYAEVDYDLSDVMFIATSNSLNIPTPLLDRMEIIRLSGYTEDEKINIAMQYLVPKQMKRNGVKEGELVVEESAVRDIIRYYTREAGVRSLDREIAKICRKVVMQITLNEDKKRLSETKKTSKAKPRAVKVNEKNLHDYLGVRRFDYGVAESENRIGQVTGLAWTEVGGELLTVEAAALPGKGMIQCTGQLGDVMKESVSAAWSVVRSRAESVGLAPDFYEKKDIHVHVPEGATPKDGPSAGIAMTLAMVSAFTKIPVRADVAMTGEITLRGEVLPIGGLKEKLLAALRGGIKHVLIPKDNVKDLEEIPENVKTGLTIHPVKWIDEVLALGLESRPESWAEPSAAEAAAESASKPKPRSRAIKH

SEQ ID NO: 65062 - protein, 229 aa, Neisseria gonorrhoeae
MKRKNIALIPAAGIGVRFGADKPKQYVEIGSKTVLEHVLGIFERHEAVDLTVVVVSPEDTFADKVQTAFPQVRVWKNGGQTRAETVRNGVAKLLETGLAAETDNILVHDAARCCLPSEALARLIEQAGNAAEGGILAVPVADTLKRAESGQISATVDRSGLWQAQTPQLFQAGLLHRALAAENLGGITDEASAVEKLGVRPLLIQGDARNLKLTQPQDAYIVRLLLNAV

SEQ ID NO: 65063 - protein, 89 aa, Neisseria gonorrhoeae
MNKSELIEAIAQEADISKAAAQKALDATTNAVTNALKQGDTVTLVGFGTFYVGERAERQGRNPKTGEPLTIAAAKTLKFRAGKALKDAL

SEQ ID NO: 65064 - protein, 275 aa, Neisseria gonorrhoeae
MPELPEVETTLRGIAPHIEGKTVEAVILRQLKLRWQINPDLGEILSGRQVLSCGRRAKYLIVRFQTGILLIHLGMSGSLRIFTPSDGRIGRPDRHDHVDIVFSDGTVMRYRDPRKFGAILWYEGIEERHPLLEKLGPEPLSEAFCTDYLYAGLKAQKRAVKLALMDNTVVVGVGNIYANESLFRAGISPHRPANRLKKKECAVLVETVKAVLQRAIETGGSTLRDFVDSDGKSGYFQQEYTVYGRHNQPCLRCGGLVVKETLGQRGTFYCTNCQK

SEQ ID NO: 65065 - protein, 744 aa, Neisseria gonorrhoeae
MEAIDLDKIHRVVTWAAEGLENVSVSQVELKSHIQFYNGIRTDDIHETIIKAAADLISEDTPDYQYLAARLAIFHLRKIAYGEYEPPHLYNHVKKLTDAGKYDRHILEDYSREEFDELNAYIDHERDMSFSYAAVKQLEGKYLVQNRVTRQIYETPQFLYVLVAMCLFSKYPKEARLDYVKRFYDAVSTFKVSLPTPIMSGVRTPTRQFSSCVLIECDDSLDSINATTSAIVKYVSQRAGIGINAGRIRGLDSEIRGGEARHTGCIPFFKMFQAAVKSCSQGGVRGGAATLFYPLWHIEAESLLVLKNNRGVEDNRIRQLDYGVQINRLLYTRLIKGGNITLFSPNEVSGLYEAFFADQDEFERLYTKYEQDPNIRKRIIPAADLFSTLMQERAGTGRIYIQNVDHCNTHSPFDPRVAPVHQSNLCMEIALPTKPLDNINDPDGEIALCTLSAFNLGALNSLDELEGLADLTVRALDALLDYQGYPVEAARTSTMDRRSLGIGVINYAYYLAKNGVRYSDGSALGLTHRTFEAIQYYLLKASANLAKEYGACTLFNQTVYSQGKLPIDTYKKDLDAVCGEPLHYDWESLRADIVKYGLRNSTLTALMPSETSSQIANATNGIEPPRGLVTVKASKDGILKQVVPEFETLKNAYETLWQLPGNEGYLKLVGVMQKFVDQAISANTAYDPGKFEGNKVSMKQMLKDLLTAYKYGVKTLYYHNTRDGADDTQTDIQDDGCAGGACKI

SEQ ID NO: 65066 - protein, 384 aa, Neisseria gonorrhoeae
MSCEHLVMSYSTFPKTKNDALKEPMFFGQPVNVARYDQQKYEVFEKLIEKQLSFFWRPEEIDVSRDRIDYANLPEHEKHIFISNLKYQTLLDSIQGRSPNVALLPLVSIPELETWVETWSFSETIHSRSYTHIIRNIVNDPSVVFDDIVENEYITARAEDIACYYDDLIEYTQYYNLLGEGVHNVGGKPVTVSLRGLKKKLYLCLMCVNVLEAIRFYVSFACSFAFAERELMEGNAKIIKLIARDEALHLTGTQHMLNLMRSGVDDPEMAEIAAELQDECFQLFKKAAEQEKEWAAYLFKDGSMIGLNKEILSQYVEYITNLRMQAVGLPAGFEGANQNPIPWINAWLSSDNVQVAPQEVEISSYLIGQIDSEVNTDDLGDFEL

SEQ ID NO: 65067 - protein, 327 aa, Neisseria gonorrhoeae
MSEIKTDDPKRGIKLRGADKTARIPIKVVPLQEKLKKPEWIRAKLPSRKFFEIKDILREQKMHTVCEEASCPNIGECFSKGTATFMIMGDICTRRCPFCDVGHGRPNMLDPDEPKNLAESVKAMNLRYVVITSVDRDDLRDGGAQHFADCIKAIRETSPNTKIEILVPDFRGRLDIALKILAETPPDVMNHNLETHPSLYRKARPGANYQHSLDLLKRYKEMMPHIPTKSGIMVGLGETDEDVREIMRDMRAHNIEMITIGQYLQPSDGHLPVLRYVTPEQFKIFEKEAYELGFTNAAIGAMVRSSYHADEQAAEALRESHGGCGHH

SEQ ID NO: 65068 - protein, 314 aa, Neisseria gonorrhoeae
MQERDDIAIYAQQAQAANTLFALRLNDKNSDIFDRTLPRKGLWLRVIDGHSNQWVQGKTAPVEGYRKGVQLGGEVFTWQNESNQLSIGLMGGQAEQRSTFRNPDTDNLTTGNVKGFGAGVYATWHQLQDKQTGAYVDSWMQYQRFRHRINTEYATERFTSKGITASIEAGYNALLAEHFTKKGNSLRVYLQPQAQLTYLGVNGKFSDSENAQVNLLGSRQLQSRVGVQAKAQFAFTNGVTFQPFVAVNSIYQQKPFGVEIDGDRRVINNKTVIETQLGVAAKIKSHLTLQASFNRQTSKHHHAKQGALNLQWTF

SEQ ID NO: 65069 - protein, 150 aa, Neisseria gonorrhoeae
MFMAIANNKKAFHDFFIEDRIEAGLVLEGWEVKAIRAARVQLKESYIYWKKDAFYLVGCHITALPTASTHIKPDAVRPRKLLLKQSEINKLIGKTERAGYTIVPLDLHFSRGKIKMEIGLAKGKKQHDKRQSMKEADWKREKQRLIKHTR

SEQ ID NO: 65070 - protein, 148 aa, Neisseria gonorrhoeae
MQHEEGNRQRPQGELLLRTVAMPRDTNPNQDIFGGWIMSQMDLGGGILAAEIARGRIVTVAVQEMNFIRPVKVGNVVCCYGHCVRVGNTSLQLKVEVWVKTLMNDCVTEDRHLVTEAVFTYVAIDAEGNPRPIPKEGNPKLSGLLPTP

SEQ ID NO: 65071 - protein, 852 aa, Neisseria gonorrhoeae
MPENLSSALETFKQQRNAAEAHYLKANRVSVFFREYTAAVETLLAALWAEHFQNSALCLMAVGGFGRGEPYPCSDVDLAVVSPAPLSDGIQEQIARFIQTLWDCKLMPSVKSGSVDELCESVRDDITGDTAFLEARFLFGNRQTADELAEKMNVQRNVAAFIEAKLVEMEHRHAKSQGSGAVLEPNIKSCPGGLRDIHTLLWIAKAQGLAANLPDLLKQRILTRAEAGMLSHGYRRLAHIRIRLHLNAKRAEDRLLFDLQPQVAESMGYQDENRRRQSEELMRVFYRAVKTVKQLGGILTPMLRSRVSSTPVRVTLRIDDDYIQVNNQIAARHTDIFFRRPEHIFKIVEIMQQRNDITALEPQTLRAWWGATRKINRSFYQNSENRRRFAGFFRSGNGLTQTLRFLNLYGVLGRYLPAWEKIVGLLQHDLFHIYPVDDHILAVVRNVRRLALDMHSHELPYASALMQSFEKQDILYLAAFFHDIAKGRGGDHAVQGIADARQFAADHFLTEEESDLLAWLVENHLLMSAVAQKEDIQDPGVLDAFCKRVQTHERLSALYLLTISDIRGTNPKLWNAWRASLLESLFHAAGRCLAGNDGNPHALFGRRRQEAADLLTRAAVPEKQQKKLWNALGSAYFARHQSREILWHAANLVHDFEPPIVRSRILPQSDSFQVMVFMPNGPRLFARLCRIFSRHGFDILAARAFITEHDYILDTFIVQIPSQHAPEDYPDIQSALEAELNSFIHGHTVAETQSCNRRISRRSRYMPIAPSITITPEEDYPDRYSVEITAVNRPFLLADMAEVFFAHNVSLRYAKISTLDERVEDSFTVFSPDLKNPKIQSSLKQALLEQLA

SEQ ID NO: 65072 - protein, 289 aa, Neisseria gonorrhoeae
MPQPDPQGFRRSLFLYRRAGMAEIGDFAVKFMIGIRSKRMITLPSLNNLPSKWDEIRHCLETRVFECGVMPYPNLTECEAGQFERDFWDNIGCAPEEYVRIRRAIRLLELRYPDSLNELVCAAIATPLGEMLAVFGVKGLCLLEFVGQKYLEQEIAAVQKALRGRFVFREDGRMQFLRQELDLYFKGHLKTFATPLEQIGTEFQKQAWDALLAIPYGETRSYKEQAQRLGNPKAVRAVAAANGQNKVSVMIPCHRVIGSDGKLTGYAGGLNRKQFLLALERGEVQTALF

SEQ ID NO: 65073 - protein, 603 aa, Neisseria gonorrhoeae
MKQIRNIAIIAHVDHGKTTLVDQLLRQSGTFRANQQVDERVMDSNDLEKERGITILAKNTAIDYEGCHINIVDTPGHADFGGEVERVLGMVDCVVLLVDAQEGPMPQTRFVTKKALALGLKPIVVINKIDKPSARPSWVIDQTFELFDNLGATDEQLDFPIVYASGLSGFAKLEETDESSDMRPLFDTILKYTPAPSGSADEPLQLQISQLDYDNYTGRLGIGRILNGRIKPGQTVAVMNHEQQIAQGRINQLLGFKGLERVPLEEAEAGDIVIISGIEDIGIGVTITDKDNPKGLPMLSVDEPTLTMDFMVNTSPLAGTEGKFVTSRQIRDRLQKELLTNVALRVEDTADADVFRVSGRGELHLTILLENMRREGYELAVGKPRVVYRDIDGQKCEPYENLTVDVPDDNQGAVMEELGRRRGELTNMESDGNGRTRLEYHIPARGLIGFQGEFMTLTRGVGLMSHVFDDYAPVKPDMPGRHNGVLVSQEQGEAVAYALWNLEDRGRMFVSPNDKIYEGMIIGIHSRDNDLVVNPLKGKKLTNIRASGTDEAVRLTTPIKLTLEGAVEFIDDDELVEITPQSIRLRKRYLSELERRRHFKKLD

SEQ ID NO: 65074 - protein, 916 aa, Neisseria gonorrhoeae
MLTNIAKKIFGSRNDRLLKQYRKSVARINALEEQMQALSDADLQAKTAEFKQRLADGQTLDGILPEAFAVCREASRRVLGMRHFDVQLIGGMVLHDGKIAEMRTGEGKTLVATLAVYLNALAGKGVHVVTVNDYLASRDAGIMEPLYNFLGLTVGVIISDMQPFDRQNAYAADITYGTNNEFGFDYLRDNMVTDQYDKVQRELNFAVVDEVDSILIDEARTPLIISGQADDNIQLYQIMNTVPPHLVRQETEEGEGDYWVDEKAHQVILSETGHEHAEQILTQMGLLAENDSLYSAANISLMHHLMAALRAHSLFHKDQHYVIQDGEIVIVDEFTGRLMSGRRWSEGLHQAVEAKEGVEIKRENQTLASITFQNYFRLYTKLSGMTGTADTEAFEFQSIYNLETVIIPTNRPVQRKDLNDQIFRSAEEKFEAVVKDIEECHKRGQPVLVGTTSIENSELVSRLLQKAGLPHNVLNAKEHEREALIVAQAGKVGAITVATNMAGRGTDIVLGGNLKHQTDAIRADETLSDEEKQAQIAALENGWQAEHDKVMEAGGLHIIGTERHESRRIDNQLRGRSGRQGDPGSSRFYLSFEDPLLRLFALDRAAAILNRLAPERGVAIEHNLLTRQIEGAQRKVEGRNFDMRKQVLEYDDVANEQRKVIYSQRNEILTSKDIGDLMQEIRSDAVSDLVDTYMPPDSMEEQWDIPTLENRLAAEFRLQEDIQSWLKADNAIDGQDIKERLIERIENEYAAKTELVGKQAMADFERNVMLQAIDNQWREHLAAMDYLRQGIHLRSYAQKNPKQEYKREAFTMFQDLWNGIKFHIASLLTSVQIEQNPVAAVEEQPVGNIQSIHSESPDIEELLGQSQTDLVTEAFNPDGTDFSPEALEARGQIVHRNDPCPCGSGLKYKQCHGKLA

SEQ ID NO: 65075 - protein, 590 aa, Neisseria gonorrhoeae
MIPSDFIDELLAKTDIVGIIDEQVPLKKGGANYMACCPFHKEKTPSFSVSPTKQFYHCFSCGAHGSAIGFVMEHQGLSFPEAVQFLADRVGMIVPKVRGQNDNPEVRAERKKKQQTLEETTAAAADFYAQQLKFNPAAKAYLDKRGLSAEVIAHYGLGYAPDGWQPLAQVFQPYPNTALVDTGMVIDNEGRHYDRFRHRIMFPIRNPRGQVIGFGGRVLDDSKPKYLNSPDTPLFDKGKNLYGLYEGRAAVKEAERILVVEGYMDVVALAQFGVGYGVAALGTATTAEHVKILMRQADSIYFCFDGDSAGRKAAWRALENALPQLKDDKSLHFLFLPEEHDPDSYIRAYGKAQFEDALLNQSKPLSEYFWEHLSDGIHLNTQEGKAELVKTSSPLLVQITAPALAYLLKQRLSELVGIDPDNLAQLLGQEAPKRHVKQKNYKLPPISVKQPVMPTLVQRQIRSLLINPDWAAYIDLPDYLALDGDFACLANLAETIKNHPSVPATAQVLEHMRGSPYEETINRIFRSALQSEEMEGGGEEDCENFQIGIKKLLNELKYSQIETLKQKSLQSGLNESEKKLLLSLLTAKQN

SEQ ID NO: 65076 - protein, 642 aa, Neisseria gonorrhoeae
MSKNQNHEEYQDDARPLTIEEQRARLRQLIIMGKERGYITYSEINDALPDDMSDADQIDNIVSMISGLGIQVTEHAPDAEDILLSDNAAVTDDDAVEEAEAALSSADSEFGRTTDPVRMYMREMGQVDLLTREDEIIIAKKIENALKNMVQAISACPGSIAEILELIEKICKDEIRVDEVVEAIIDPNEVLLNELGLGHLETTAPEKPSNDNSDENEDDEESEEDADEISAANLAELKQKVIGHFAQIEKDYKKMIGCLEKHHSRHKDYLAYRDAIANKLLEVRFATRQIDSLSSSLRGKVENIRKLEREIRDICLDRVHMERDYFIQNFLPEITNLQWIEEEIAKGRVWSNALDRFRHAILEKQTELADMEKETRISIEELKEINKNMVSSEKETAAAKQEMIQANLRLVISIAKKYTNRGLQFLDLIQEGNIGLMKAVDKFEYRRGYKFSTYATWWIRQAITRSIADQARTIRIPVHMIETINKMNRISRQHLQETGEEPDSAKLAELMQMPEDKIRKIMKIAKEPISMETPIGDDDDSHLGDFIEDANNVAPADAAMYTSLHEVTKEILESLTPREAKVLRMRFGIDMNTDHTLEEVGRQFDVTRERIRQIEAKALRKLRHPTRSDRLRSFLDSEDSKL

SEQ ID NO: 65077 - protein, 619 aa, Neisseria gonorrhoeae
MPEYRSKTSTHGRNMAGARALWRATGVMETDFGKPIIAVANSFTQFVPGHVHLHNMGQLVAREIEKAGAIAKEFNTIAIDDGIAMGHSGMLYSLPSRDLIADSIEYMVNAHCADALVCISNCDKITPGMLIAAMRLNIPTIFVSGGPMEAGKVIGVANIQPERRLDLIDAMIESADDNVSNRQVEEVEQNACPTCGSCSGMFTANSMNCLTEALGLSLPGNGSYLATHAGRKELFLEAGRMIVEITKRYYEQDDETVLPRSIATKKAFENAMTMDIAMGGSTNTILHLLAVANEAGVDFKMADIDRLSRVVPCICKTAPNNHDYYMEDVHRAGGIFAILKELDKAGKLHTDVYTIHAPTLKDAIEKWDVTNPENTRAIERFKAAPGGVRTTQAFSQNRIWKTLDLDREKGCIRDVAHAYSQDGGLAVLFGNIAERGCVVKTAGVDESILKFTGRARVFESQEAAVEGILGNQIVAGNIVIIRYEGPKGGPGMQEMLYPTSYLKSKGLGKACALLTDGRFSGGTSGLSIGHASPEAAEGGAIGLVHEGDTIEIDIPKRSIRLVISDEELAARRAEMEARGSKAWKPENRDRYVSAALRAYGAMATSADKGAVRDVSQIER

SEQ ID NO: 65078 - protein, 350 aa, Neisseria gonorrhoeae
MTVSPVALRRKTECKPHPTARYWKKCDVEALFGLPFLELVYQAAEVHRQNFNPREIQLSTLLSIKTGGCPEDCAYCPQSAHHNTNLGKEQMMDVDEIVEKAKIAKSRGASRFCMGAAWRGPKPKDVETVSAIIKAVKGLGMETCGTFGMLEEGMAEDLKEAGLDYYNHNLDTDPDRYNDIIHTRRHEDRMDTLGKVRNAGLKVCCGGIVGMNETRAERAGLIASLANLDPQPESVPINRLVKVEGTPLADAEDLDWTEFVRTVSVARITMPQSYVRLSAGRSNMPEAMQAMCFMAGANSIFYGDKLLTTGNPDEDGDRILMEKLNLYPLQFEPEGEVAEVEKASGIKADY

SEQ ID NO: 65079 - protein, 261 aa, Neisseria gonorrhoeae
MKHISSTNNEHIRHLHRLLSQGKFRRQYAQTVLEGVHLLQVFLQSGRKPVGVYIPEAKMPSEEVLKLTAVLPEDGIFSVSDGILKKISSLSCADDILTLIDIPLGGTLPDKGDCAVLDGVQDPGNVGTVLRSAAAAGVGTVVLGRGCADAWSPKVLRAGMGAHFLLDIYSQADLEIWLAHYEDRVFATALREEKQAVLYGEDLCEPTAWVFGNEGAGVGKAVLDRADKCVRIPMHDATESLNVAMAATICLFEQMRQRAAY

SEQ ID NO: 65080 - protein, 319 aa, Neisseria gonorrhoeae
MKPVFLDFEQPIAELTNKIDELRFVQDESAVDISDEIHRLQKKSNDLTKSIFSKLTPAQISQVSRHPQRPYTLDYIDALFTDFEELHGDRHFADDHAIVGGLARFNGQSVVVVGHQKGRDTKEKIRRNFGMPRPEGYRKALRLMKTAEKFGLPVMTFIDTPGAYPGIGAEERGQSEAIGKNLYELTRLRVPVLCTVIGEGGSGGALAVAVGDYVNMLQYSTYSVISPEGCASILWKTAEKAADAAQALGITADRLQKLDLVDTVIKEPLGGAHRDFGQTMKNVKAVLEKQLHEAQSIPLADLLSRRFDRIMAYGKFSEQ

SEQ ID NO: 65081 - protein, 391 aa, Neisseria gonorrhoeae
MQNIFDPLIIRGKSLIPIVQGGMGVGVSASGLSSAVARENGIGTIASVDLRHLHEDLLAESQINPSEEKYTSLNCTALDREIQKAKSASEGKGLIAVNVMKAVKDHAAYVRQACESGADAVVMGAGLPLDLPEMTEGYHKDVALLPILSESRGINIVLKRWMKKGILPDAIVVEHPAHAAGHLGASTVEGVNDAKFDFKRVIEETFEVFKNLGLEGEKIPLILAGGMANFEKVKTALKNWGASAVQIGTAFAVTEEGDAHLNFKKTLASAETEKVVEFMSVAGLPARGIRTKFLDSYIRREGKLQANAKADPRRCTQGLNCLTSCGLRDGLSKAGQFCIDIQLAAAFRGEVDKGLFFRGKDQLPFGNAIRTVRETIQYLLTGSEPVATLGR

SEQ ID NO: 65082 - protein, 256 aa, Neisseria gonorrhoeae
  MISC_FEATURE (9)..(9): X=any amino acid
VRQNAKIHXTVKPKGQPMPTLTDKTILVTGASQGLGEQVAKAYAAEGATVILVARHQKKLEKAYDAIVEAGHPEPFAIRFDLMSAEEKEFERFAATIAEATQGKLDGIVHCAGYFYALSPLDFQTVAEWVNQYRINTVAPMGLTRALFPLLKQSPDASVIFVGESHGETPKAYWGGFGASKAALNYLCKVAADEWERFGNLRANVLVPGPINSPQRIKSHPGEAGSERKSYGDVLPAFVWWASAESKGRSGEIVYL

SEQ ID NO: 65083 - protein, 434 aa, Neisseria gonorrhoeae
MSGVGKLVRQGAKFGTRAVPYVGTALLAHDVYETFKEDIQARGCRYDPETDKFVKGYEYANCLWYEDERRINRTYGCYGVDSSIMRLMPDRSRFPEVKQLMESQMYRLARPFWNWRKEELNKLSSLDWNNFVLNRCTFDWNGGGCAVNKGDDFRAGASFSLGRNPKYKEEMDAKKPEEILSLKVDADPDKYIEATGYPGYSEKVEVAPGTKVNMGPVTDRNGNPVQVAATFGRDAQGNTTADVQVIPRPDLTPASAEAPHAQPLPEVSPAENPANNPDPDENPGTRPNPEPDPDLNPDANPDTDGQPGTSPDSPAVPDRPNGRHRKERKEGEDGGLSCDYFPEILACQEMGKPSDRMFHDISIPQVTDDKTWSSHNFLPSNGVCPQPKTFHVFGRQYRASYEPLCVFAEKIRFAVLLAFIIMSAFVVFGSLGGE

SEQ ID NO: 65084 - protein, 659 aa, Neisseria gonorrhoeae
MSQLANVIRFLSADAVQKANSGHPGAPMGMAEMAETLWTKFLNHNPANPKFYNRDRFVLSNGHASMLLYSLLHLTGYNLSIEDLKNFRQLHSKTPGHPEYGYTDGVETTTGPLGQGIANAVGMALAEKILAAEFNKDGLNIVDHYTYVFMGDGCLMEGVSHEACSLAGTLGLGKLIVLYDDNNISIDGKVDGWFTENIPQRFESYGWHVVPNVNGHDTAAIQTAIEAARAETGKPSIICCKTLIGKGSANKEGSHKTHGAPLGADEIEATRKHLGWAYPAFEIPQEIYDAWNAKEKGAKLEAGWNELFAQYQAKYPAEAAEFVRRMDKKLPENFDEYVQTALKEVCAKAETVATRKASQNSIEILAKELPELVGGSADLTPSNLTDWSNSVSVTRDKGGNYIHYGVREFGMGAIMNGLVLHGGVKPFGATFLMFSEYERNALRMAALMKINPVFVFTHDSIGLGEDGPTHQPIEQTATLRLIPNMDVWRPCDTAESLVAWAEAAKAEDHPSCLIFSRQNLKFQARSEQQLNDIKRGAYVISEAQGNAQAVIIATGSEVGLAVEAQKVLAGQGIAVRVVSMPSTSVFDRQDAAYQAAVLPEGLPRIAVEAGHTNGWYKYVGLNGAVVGINRFGESAPADLLFKAFGFTVDNVVDTVKSVL

SEQ ID NO: 65085 - protein, 174 aa, Neisseria gonorrhoeae
MSLNKVILIGRLGRDPEVRYMPNGEAVCNFSVATSETWNDRNGQRVERTEWHNITMYRKLAEIAGQYLKKGGLVYLEGRIQSRKYQGKDGIERTAYDIVANEMKMLGGRNENSGGAPYDEGYGQSQEAYQRPAQQSRQPAPDAPSHPQEAPAAPRRQPVPAAAPVEDIDDDIPF

SEQ ID NO: 65086 - protein, 216 aa, Neisseria gonorrhoeae
MLSALISSELSYPAMQLALQPVHQRFVHSGPLVLGAAPVKLPTPTADRDQTVSRRFKPSSRTTLNGEQPYPWDRLQPQDVMSRHRGAKLRRRYELLGGISLLSPEYLLSVERWPFHTEPPDHYVLLSHLPDLSVSQLSYLLPLHYQSDFRPDLGNLRTPPLRFGRRPPQSNCLPCTVPDPDDGSGLEPQRHQGGISRTTPQRLASLLPSLPPILHK

SEQ ID NO: 65087 - protein, 268 aa, Neisseria gonorrhoeae
MNMKKWIAAALACSALALSACGGQGKDAAAPAANPGKVYRVASNAEFAPFESLDSKGNVEGFDVDLMNAMAKAGNFKIEFKHQPWDSLFPALNNGDADVVMSGVTITDDRKQSMDFSDPYFEITQVVLVPKGKKVSSSEDLKKMNKVGVVTGHTGDFSVSKLLGNDNPKIARFENVPLIIKELENGGLDSVVSDSAVIANYVKNNPAKGMDFVTLPDFTTEHYGIAVRKGDEATVKMLNDALEKVRESGEYDKIYAKYFAKEGGQAAK

SEQ ID NO: 65088 - protein, 204 aa, Neisseria gonorrhoeae
  MISC_FEATURE (91)..(91): X=any amino acid
  MISC_FEATURE (93)..(93): X=any amino acid
  MISC_FEATURE (168)..(168): X=any amino acid
  MISC_FEATURE (175)..(175): X=any amino acid
  MISC_FEATURE (185)..(185): X=any amino acid
  MISC_FEATURE (194)..(194): X=any amino acid
GRRQCGHRYAIRAGRNLPDKEFRYLRTVIVTAAVYRGFDPMLAHLQLTFRHRAGVTPYTSTFVLAECCVFNKQSQPPILCDPPGLTEQSPXPXRAYLLPKLRYQFAEFLLPSSLKRLRILILPTCVGLRYGSIQTEASGFSWKRGIGCFVSVDTRHHFSVLRKPGFAXVFHLPAXTSYSNSLPTXPSPSPHRIXIKYRNINLFP

SEQ ID NO: 65089 - protein, 305 aa, Neisseria gonorrhoeae
MTVIKQEDFIQSICDAFQFISYYHPKDYIDALYKAWQKEENPAAKDAMTQILVNSRMCAENNRPICQDTGIATVFLKVGMDVQWDADMSVEKMVNEGVRRAYTWEGNTLRASVLADPAGKRQNTKDNTPAVIHMSIVPGGKVEVTCAAKGGGSENKSKLAMLNPSDNIVDWVLKTIPTMGAGWCPPGILGIGIGGTPEKAVLMAKESLMSHIDIQELQEKAASGAELSTTEALRLELFEKVNALGIGAQGLGGLTTVLDVKILDYPTHAASKPIAMIPNCAATRHVEFELDGSGPVELTPPRVED

SEQ ID NO: 65090 - protein, 122 aa, Neisseria gonorrhoeae
  MISC_FEATURE (72)..(72): X=any amino acid
  MISC_FEATURE (74)..(74): X=any amino acid
  MISC_FEATURE (95)..(95): X=any amino acid
  MISC_FEATURE (115)..(115): X=any amino acid
FCLALGADSPYADERCVGTLGFAASGLFTRFIATHVNIRTSDTSSTLYNAPSSAYERSPTMPVNRHTQLGLXIXAPLHLPRRTTRPVSYYAFFKXWLLLSQHPGCLCLPTSFTTXSIIWDLS

SEQ ID NO: 65091 - protein, 470 aa, Neisseria gonorrhoeae
MKILILGNGQVGSTVAQNLAAITNNDVTVIDIDEKALQETGSRLDVQTVFGNGASPFTLERAGAEDADLLLALSRSDETNIVACKVAADLFNIPGRIARVRSSEYLEYLSPKLENNENGSLSIFGITETISPEQLVTEQLAGLIDCPGALQVLRFADDRVRMVIIQARRGGLLVGRSIADIAQDLPDGADCQICAVYRNNRLIVPAPQTVIIEGDEILFAAAAENIGAVIPELRPKETSTRRIMIAGGGNIGYRLAKQLEHAYNVKIIECRPRRAEWIAENLDNTLVLQGSATDETLLDNEYIDEIDVFCALTNDDESNIMSALLAKNLGAKRVIGIVNRSSYVDLLEGNKIDIVVSPHLITIGSILAHIRRGDIVAVHPIRRGTAEAIEVVAHGDKKTSAIIGRRISGIKWPEGCHIAAVVRAGTGETIMGHHTETVIQDGDHIIFFVSRRRILNELEKLIQVKMGFFG

SEQ ID NO: 65092 - protein, 55 aa, Neisseria gonorrhoeae
MTSSPHGPYDQGFTRHTMVGTEGSQAARRSQSHKTDRSPDCTLQLECMKSESLVI

SEQ ID NO: 65093 - protein, 718 aa, Neisseria gonorrhoeae
MPAPQPSAPYDPLTAEARTLLFHTASYLKPEQQAELEKAVAYAFRAHDGQTRKSGDPYITHPIAVATQLALWHMDIQGLCAGVMHDVLEDTGVTKGEMAAVFGNTVAEMVDGLSKLEKLKFEDHAEHQAESFRKLILAMTKDVRVIVVKLADRLHNMRTLGSMRPDKRRRIARETLEIYAQIANRIGLNNAYRELQDLSFQNLHPNRYETLKKAMDKSRKNRQDVVGKVLRAFGQRLVGANIEAKIKGREKNLYGIHQKMMAKKLRFAEVMDIYGFRVIVNSIPACYAALGTLHTLYQPKPGRFKDYIAIPKSNGYQSLHTILVGPYGLPIEVQIRTREMDAVAEGGIVGHWSYKSDSKTVDQAVLHTNQWLKNILDLQASSANAIEFLEHVKVDLFPNEIYILTPKGKILTLPKGATPVDFAYAVHTDIGHKTVAARVNNVMMPLRTKLKTGDSVEIITSEHAKPNPAWLNFAVSGRARSAIRQYIKNLNRHDAVVLGESLLQKALSSLLPKDVLLSDGIKEKYLADLNDKQTSFEEVLYNVGMGHTLPVYVAMHIAELAGEHFGSEVRLSSIKVDGQESGHIHFAECCHPVPGDSIRLLLVKGKGMIIHRDTCPTLLKSDPEQQLDADWENMNGQNYRVGLQVQSEDSHGLLALMAQAISDSGADIESVETPSKSQSGTEGFVEFKFLLKVKNLDQLNQIIQNLHSIPYIRKVIRS

SEQ ID NO: 65094 - protein, 336 aa, Neisseria gonorrhoeae
MSKKRVLTGVTTTGTPHLGNYVGAIRPAVRAAQNPDTESFLFLADYHGIIKCHEQEMIHQSTQAVAATWLACGLDPERTTFYRQSDIPEVMELNWILTCITAKGLMNRAHAYKAAVQANAENGQEDPDFGVEMGLFSYPILMTADILMFNANEVPVGRDQIQHVEMARDIAGRFNHRFQELFTLPEVKIDENVELLVGLDGRKMSKSYGNTIPLWENDKKTQKSVNKIITNMKEPGEPKQPDESPLFEIYKAFSTPSETAEFTQMLADGLAWGEAKKLSAAKINAELAELRERYNALTSNPSQIEEILQAGAQKARKEARELLDKVRDAVGIRPLK

SEQ ID NO: 65095 - protein, 859 aa, Neisseria gonorrhoeae
MRYDKLTAKFQQALAEAQSLALAADSSYLEAGFVLKALLDDQNSGAAALLAHAGVNVPQVKQRLQQHLNSLPKVSGQGGEILPSRELQAVLNLMDKAATKRGDAYIASELFLLALVQQNDAAGKILKEAGATEQNINAAIDAVRGGQNVNDANAEDQRDALKKYTLDLTQRARDGKLDPVIGRDDEIRRAIQVLQRRTKNNPVLIGEPGVGKTAIVEGLAQRIVNGEVPESLRNKRLLVLDLAALIAGAKYRGEFEERLKGVLNDLAKDDGNTLIFIDEIHTLVGAGKTDGAMDAGNMLKPALARGELHCIGATTLDEYRQYIEKDAALERRFQKVLVGEPSVEDTIAILRGLQERYEIHHGIDITDPAIVAAAELSDRYITDRFLPDKAIDLIDEAASRVKMEKETKPEAMDKIDRRLIQLRMEKAHVEKEKDDASKKRLELIDEEIDGLQKEYADLDEIWKAEKAISDGAANIKKQIDEVKIKIEQAKRQGDLALASKLMYEDLEHLEKQRAAAERADTDSTKPANKLLRNNVGAEEIAEVVSRMTGIPVSKMMEGERDKLLKMEEVLHRRVVGQNEAVRAVSDAIRRSRSGLADPNKPYGSFLFLGPTGVGKTELCKALAGFLFDSEDHLIRIDMSEYMEKHAVARLIGAPPGYVGYEEGGYLTEQVRRKPYSVILLDEVEKAHPDVFNILLQVLDDGRLTDGQGRTVDFKNTVIVMTSNIGSQHIQQMGTQDYEAVKEVVMEDVKEHFRPEMINRIDEVVVFHGLDQANIRSIAKIQLKGLEKRLEKQNLRLTVSDAALDIIAKAGFDPIYGARPLKRAIQSEIENPLAKALLAGNYAPESEIKVEADGDRLKFA

SEQ ID NO: 65096 - protein, 434 aa, Neisseria gonorrhoeae; identical to SEQ ID NO: 65083

SEQ ID NO: 65097 - protein, 451 aa, Neisseria gonorrhoeae
MKAPELLLPAGGLERMRAAYDYGADAVYAGSPRYSLRARNNEFAKLDVLEQGIKEAHERNKKFFLTVNTLPHNSKLKTFVADMEPLIAMKPDALIMADPGLIMTVREKWPEMPIHLSVQANTTNYWGVKFWQNIGVERIILSRELGMEEIAEIRQECPDIELEVFIHGALCIAYSGRCLLSGYFNHRDPNQGTCTNSCRWDYKVHNATESEAGDAQLLQGFNFEKAQEEANQNFEGINGQKRHPYADKVFLIEESNRPGEMMPIMEDEHGTYIMNSKDLRGIEVVEKLAKIGVDSLKVEGRTKSLYYVARVAQSYRKAIHDAVAGRPFDYSLLSELEGLANRGYTSGFLERHQTQDYQNYLSGHSTAKQSQYVGHVTEIDENGWATIEVKNRFAVGDSLEIIHPSGNQTIKLEQMTRKGQPVDVAPGNGIQVKIPNMQGKEKALIARVLNP

SEQ ID NO: 65098 - protein, 153 aa, Neisseria gonorrhoeae
MKPQKSLRARAMDILSRQEVSRIGLKRKLAPHAESEEELENVLNEFAERNWQSDLRYAEAYIRSKSRKHGSLRLKQALAQQGIDEKTSRNLLPDRSSEKQAAIAVLRKKFKHPAANLKEKQKQARFLAYRGFDADTVQTALKHAWDENWEDSC

SEQ ID NO: 65099 - protein, 489 aa, Neisseria gonorrhoeae
MKAVIPYTGGHEMNEYSQLIKHPDISLSPISDGIGVGNPATGEILAYVRNTGSDKLKNLIQKAAAAQKLWAAKTALERADILWRWYFLVKENKEALARLMTMEQGKSLTEARGEIDYAASFVRWFAEEARRIDGDVLTSVKASQKLVVLKQPVGVTAAITPWNFPSAMIARKAAPALAVGCAMIVKPASLTPLSAYALAVLAYEAGVPQDLLPVVSGRASEISHEFATNPTVRKISFTGSTEVGAKIFAGSAADIKKLSLELGGNAPFIVFDDADLDKAVEGALASKFRNSGQTCVCTNRVYVQSGIYDVFCRKLSEKAAALKLGDGLDEGVNQGPLIEEKAVEKVEQHIADALSKGAVCLTGGKRSALGGTFFEPTVLSGVTAQMAVAREETFGPLCPVFRFETEAEVIEAANNTEYGLAAYLFTSDTARQWRVGEVLEYGMVGINTGLISNEAAPFGGVKRSGLGREGSKYGADEYLELKYLCIDAG

SEQ ID NO: 65100 - protein, 297 aa, Neisseria gonorrhoeae
MLIISNVRKGENMSEEKLKMSFEPTVIEHLGVKMYSHTVPAIAELIANAYDACATEVEVRLFDKPEHKIVIKDNGIGMSFDEINDFYLRIGRNRREEKQASPCGRIPTGKKGLGKLALFRLGNKIEISTIQGNERVTFTLDYAEIKKSERIYQPEFQKESVKPNTENGTTITLTELTKKQGYPLDNYVGHLSRLFDFPAQDFKIKVSLNGSEPRIIDGNLKYNLVTPQFEWEYQDLATNISSLSSKFEQYEYSGLIQGKFITTEKPLKNNMKGITLFANGRMVNMPEFFTDSESSHF

SEQ ID NO: 65101 - protein, 122 aa, Neisseria gonorrhoeae
MLSALISSELSYPAMQLALQPVHQRFVHSGPLVLGAAPVKLPTPTADRDQTVSRRFKPNSRTTLKGEQPYPWDRLQPQDVMSRHRGAKLRRRYELLGGIKLLSPEYLLSVERWPFHTEPPDH

SEQ ID NO: 65102 - protein, 205 aa, Neisseria gonorrhoeae
  MISC_FEATURE (92)..(92): X=any amino acid
  MISC_FEATURE (94)..(94): X=any amino acid
  MISC_FEATURE (169)..(169): X=any amino acid
  MISC_FEATURE (176)..(176): X=any amino acid
  MISC_FEATURE (186)..(186): X=any amino acid
  MISC_FEATURE (195)..(195): X=any amino acid
GRRQCGHRYAIRAGRNLPDKEFRYLRTVIVTAAVYRGFDPMLAHLQLTFRHRAGVTPYTSTFVLARVLVFLINKSQPPILCDPPGLTEQSPXPXRAYLLPKLRYQFAEFLLPSSLKRLRILILPTCVGLRYGSIQTEASGFSWKRGIGCFVSVNTRHHFFGLRKPGFAXVFHLPAXTSYSNSLPTXPSPSPHRIXIKYRNINLFP

SEQ ID NO: 65103 - protein, 64 aa, Neisseria gonorrhoeae
MKHKLASWWKTIKLTANLMAGVPDYENYVAQQRKHNPNAPVMNKLQFQDYCRKRRCGANGGRCC

SEQ ID NO: 65104 - protein, 213 aa, Neisseria gonorrhoeae
MPSEKPMNRRTFLLGAGALLLTACGRKSARTHAKIPEGSTVLALGDSLTFGYGANPGESYPAQLQKLTGWNIVNGGVSGDTSAQALSRLPALLARKPKLVIVGIGGNDFLRKVPEEQTRANIAKIIETVQKENIPAVLVGVPHITLGALFGHLSDHPLYEDLSEEYGIPLFGGAWAEILGNNNLKSDQIHANGKGYRKFAENLNQFLRKHGFR

SEQ ID NO: 65105 - protein, 950 aa, Neisseria gonorrhoeae
MKLSELFNPNEFAARHLSFGDEAALLAAVGEKSMDEFVGNTLPQSIRMPSELDLPEALTEADALAKLKGIASKNVINKSYIGLGYYPTRVPNVILRNVLENPGWYTAYTPYQAEIAQGRLEALLNFQQVCIDLTGFPVAGASLLDEATAAAEAMAMAHRVGKVKSERFFVDARVYPQTLDVMKTRAKYFGFELVVSDFAQADEGEYFGALFQYVGKDGDVQDLQDVIGRLKAKGTIVAVAADIMSLVLLKSPAELGADIALGNTQRFGVPMGFGGPHAAYFAFKDEFKRSAPGRIIGVSKDASGKPALRMALSTREQHIRREKATSNICTAQALLANLAGMYAVYHGPKGVKRIANRIHTLASVFADALVSDGLKVVHEVFFDTVTVDFGSKEKADQVFAAALESGYNLRSVNNTQVAAAFHETSVYEDLADLYRAFTGKDTFTFADDVKGRLNAELLRQDDILQHPVYNSYHTEHEMLRYLKKLEDRDLAMNRSMISLGSCTMKLNATAEMLPITWTEFSDIHPYAPEAQTAGYRELLADMENSLKAITGFDAISFQPNSGAQGEYSGMLAIRRYQEAQGEAHRNICLIPKSAHGTNPATAAMLGLKVVVVDTDEHGNVNIDDLKAKAEQHRDALSAIMITYPSTHGVYEEGIRDICRIIHENGGQVYMDGANLNAQIGIMQPAEVGADVLHMNLHKTFCIPHGGGGPGMGPIGLKAHLAPFAPGHTLTDTHSASAGQTSVAAAAFGSASILPITWMYLTMMGKQGMEQATRWALLNANYVAKRLSEDYPILYTGKNGRIAHECIVDLRPLKAESGITETDIAKRLMDYGFHAPTVSFPVAGTLMIEPTESESKAELDRFIAALKSIRREVQKVIDGEWPKDDNPLVNAPHTAADITGEWAHPYSREEAVFPLPFVREHKFWPFVNRVDDVYGDRNLVCSCPPMENYED

SEQ ID NO: 65106 - protein, 122 aa, Neisseria gonorrhoeae
  MISC_FEATURE (95)..(95): X=any amino acid
  MISC_FEATURE (115)..(115): X=any amino acid
FCLALGADSPYADERCVGNLGLSASGLFTRFIATHVNIRTSDTSSTLYNAPSSAYRTLPYHAGKPASAASVIDLSPVHLPRRTTRPVSYYAFFKXWLLLSQHPGCLCLPTSFTTXSIIWDLS

SEQ ID NO: 65107 - protein, 55 aa, Neisseria gonorrhoeae; identical to SEQ ID NO: 65092

SEQ ID NO: 65108 - protein, 114 aa, Neisseria gonorrhoeae
MNLPFRAMVSDLGGTLLTPEHLVGDLTIDTLRVLEQKGVDIILATGRNHTDMSSILGKIGAERAVMITSNGARVRDLQGNLLYSNSLPEELVLELYKTSYVGNLIQTPRFCRHQ

SEQ ID NO: 65109 - protein, 1318 aa, Neisseria gonorrhoeae
MSVVLPLRGVTALSDFRVEKLLQKAAALGLPEVKLSSEFWYFAGSEKALDAATVEKLQALLAAQSVEQTPEAREGLHLFLVTPRLGTISPWASKATNIAENCGLAGIERIERGMAVWLEGALTDEQKQQWAALLHDRMTESVLPDFQTASKLFHHLKSETFSTVDVLGGGKEALVKANTETGLALSADEIDYLVENYQALQRNPSDVELMMFAQANSEHCRHKIFNADFILNGEKQPKSLFGMIRDTHNAHPEGTVVAYKDNSSVIKGAKIERFYPNAAENQGYRFHEEDTHIIMKVETHNHPTAIAPFAGAATGAGGEIRDEGATGKGSRPKAGLTGFTVSNLNIPDLKQPWEQDYGKPEHISSPLDIMIEGPIGGAAFNNEFGRPNLLGYFRTFEEKFDGQVRGYHKPIMIAGGLGSIQAQQTHKDEIPEGALLIQLGGPGMLIGLGGGAASSMDTGTNDASLDFNSVQRGNPEIERRAQEVIDRCWQLGDQNPIISIHDVGAGGLSNAFPELVNDAGRGAVFELREVPLEEHGLTPLQIWCNESQERYVLSILEKDLDTFRAICERERCPFAVVGTATDDGHLKVRDDLFSNNPVDLPLNVLLGKPPKTTRTDKTVTPSKKPFHAGDIDITEAAYRVLRLPAVAAKNFLITIGDRSVGGMTHRDQMVGKYQTPVADCAVTMMGFNTYRGEAMSMGEKPAVALFDAPASGRMCVGEAITNIAAVNIGDIGNIKLSANWMAACGNEGEDEKLYRTVEAVSKACQALDLSIPVGKDSLSMKTVWQDGEEKKSVVSPLSLIISAFAPVKDVRKTVTPELKNVEGSVLLFIDLGFGKARMGGSAFGQVYNNMSGDAPDLDDAGRLKAFYSVIQQLVAEDKLLAYHDRSDGGLFATLAEMAFAARCGISADIDCLMDKFLPIHLPDFQGDPAEDLSDELYNHAAIKILFNEELGAVIQIRQKDRDYVDAAFETAGLTDAVSRIGSPDFDNEFISFFGYGYFLEQNRADLQRAWQETSHAIQRLRDNPACADSEFALIGDNERSALFADVKFDVNEDIAAPFINSGAKPKIAILREQGVNGQIEMAAAFTRAGFDAYDVHMSDLMAGRFRLADFKMLAACGGFSYGDVLGAGEGWAKSILFHPALRDQFAAFFADPNTLTLGVCNGCQMVSNLAEIIPGAETWPKFKRNLSEQFEARLNMVHVPKSASLILNEMQDSSLPVVVSHGEGRADFALHGGNISADLGIALQYVDGQNQVTQTYPLNPNGSPQGIAGITNADGRVTIMMPHPERVYRAAQMSRKPEGWTELSGWYRLFAGARKALG

SEQ ID NO: 65110 - protein, 366 aa, Neisseria gonorrhoeae
MAGNTFGQIFTVTTFGESHGAGLGCIIDGCPPGLELSEADIQFDLDRRKPGTSRHVTQRREADQVEILSGVFEGKTTGTPIALLIRNTDQRSKDYGNIATAFRPGHADYTYWHKYGTRDYRGGGRSSARETAARVAAGAVAKKWLKEKFGTEITAYVTQVGEKKIRFEGSEHISQNPFFAANQSQIAELEHYMDGVRKSLDSVGAKLHIEAANVPVGLGEPVFDRLDAEIAYAMMGINAVKGVEIGAGFDSVTQRGSEHGDELTPQGFLSNHSGGILGGISTGQDICVNIAIKPTSSIATPRRSIDIHGNPVELATRGRHDPCVGLRTAPIAEAMLALVLIDHALRHRAQNADVAADTPDISRSDK

SEQ ID NO: 65111 - protein, 484 aa, Neisseria gonorrhoeae
MSIEHTPPTHDGETGQNHAERPSADFDRVHSLCEILEPAFEQIENGTPLEDAPLRDKLTELTVLLAELHPADVADVLESLPPRERNIVWLLVKPEDDGEVLLEVSDAVRETLIESMDKDELLAAVDDLDADELAELADDLPHQVVYEALQTRDEEERAQVKAAMSYEDNQVGAIMDFELVSIRADVACEVVLRYLRRFDSLPDHTDKIFVVDENDVLQGVLPIRKLLVADPEDLVENVMAKDVVRFRAEDDVEEAAQAFERYDLVTAPVVDENKKLIGRITIDEMVDVIREESEADMLNMAGLQEEEDLFAPVLDSVKNRWMWLAVNLCTAFLASRVIGAFEGSIEKIVALAALMPIVAGIGGNSGNQTITMIVRAMAMGQLTDMQAGRLLKKEVGVALVNGIIWGTVMGAVSWLLYGSLGIGLVMVAAMTLNLLLAATVGVLIPVVMEKFGRDPALGSSVLITAVTDSGGFLIFLSLATLFLL

SEQ ID NO: 65112 - protein, 302 aa, Neisseria gonorrhoeae
MNQTAINRADARTRFIFDDMPVRGLHVRLENVWHHIVKQKNYPAAIRCALGELLAAGVLLSGNLKNEGTLIVQVQGQGKLKMLVAEATSDRTVRATARWDETAEIADDESLGDLLGGNGVFVLTLQPKDGEPWQGVVPLEGGSIAQMLVNYMKRSEQLDTHIALSASDEAAGGLLVQRLPEEVLDEEAWEHVSTLARTLTAEELAELDAQHVLYRLFHETPPRVFEPETFESSCTCSRGKVSDMLLMLGGEEVGGVVAEQGSIEVDCDFCHSKYVFDETDVNALFGEDVVGVAKGLPRHTVQ

SEQ ID NO: 65113 - protein, 431 aa, Neisseria gonorrhoeae
MLDIQLLRSNTAAVAERLARRGYDFDTARFDALEERRKSVQVKTEELQASRNSISKQIGALKGQGKHEEAQAAMDQVAQIKTDLEQAAADLDAVQKELDAWLLSIPNLPHESVPPGKDETENVEVRKVGTPREFDFEIKDHVDLGEPLGLDFEGGAKLSGARFTVMRGQIARLHRALAQFMLDTHMLQHGYTEHYTPYIVDDTTLQGTGQLPKFAEDLFHVTRGGDETKTTQYLIPTAEVTLTNTVAGSIIPSEQLPLKLTAHSPCFRSEAGSYGKDTRGLIRQHQFDKVEMVQIVHPEKSYGALEEMVGHAENILKALELPYRVITLCTGDMGFSAAKTYDLEVWVPAQNTYREISSCSNCEDFQARRMKARFKDENGKNRLVHTLNGSGLAVGRTLVAVLENHQNADGSINIPAALQPYMGGVTKLEVK

SEQ ID NO: 65114 - protein, 358 aa, Neisseria gonorrhoeae
MKPSILEKLQQLGDRLEEVTHLLGQPEATSDMDNYRKLTREHAELTPVVEVFQNYRLAQSDLADAEEMLSDPEMKDFAAEEIEAAKAKIDELDTELQKLLLPKDADDDKNIFIEIRAGTGGDEAALFAGDLLRMYSRYAERNRWQVEIVSANESELGGYKEVIARIVGLGAYSRLKFESGGHRVQRVPATESQGRIHTSACTVAVMPEADELEDIELNPADLRTDTFRASGAGGQHINKTDSAVRITHLPTGMVVECQDGRSQHANKAQAMKVLAARLNDAQKREVQAKEAAERKSLIGSGDRSERIRTYNYPQGRVTDHRINLTLHKLDFVMDGDLAEITDALIAEHQAELLAAMGD

SEQ ID NO: 65115 - protein, 445 aa, Neisseria gonorrhoeae
MMAKKYFGTDGVRGEVGQFPITPDFVLKLGYAAGQVLVQHDTDQKPTVLIGKDTRISGYMLEAALVAGFTAAGVNVVQTGPLPTPGVAYLTRALRLSAGVMISASHNTYSDNGIKFFAEGGVKLSDEVELEIEAKIDEEMKTQPSARLGRARRISGADDRYIEFCKSTFPGHSDLRGLKLVIDTANGAGYGVAPKVFHELGAQVVSIGNEPNGYNINEKCGATHTKTLQAAVLQNEADYGIALDGDGDRLMMVDKNRQVYDGDSLIYVIAKARAREGINIGGVVGTVMTNMAMEIALKEQGVDFCRAKVGDRYVLEQLNQRGWLIGGEASGHILCMDKHNTGDGIISALQVLAALQILNQDLATVCADWQPYPQTMINVRIQKGQKWQEASKDVLAEVEKELEGKGRVVLRASGTEPVVRVMVEARQADWARDGAERIAAAIGGI

SEQ ID NO: 65116 - protein, 284 aa, Neisseria gonorrhoeae
MARHVWRAGRFEIGLDKPKIMGIVNLTPDSFSDGGAYSQNAQTALAHAERLLKEGADILDIGGESTRPGADFVPPEEEEWARVEPVLAEAAGWGVPVSLDTRRTVVMEKALALGGIDIINDVAALTDEGAVELLARQADTGICLMHMRGLPETMQDNPKYQDVVGEVARYLKTRSETCVAAGIAPQRITLDPGFGFGKNLQHNIALMRHLPELMAETGLPLLIGVSRKRMIGELTGEADAAARVHGSVAAALASVARGAQIVRVHDVKATADALKVWEALGVNR

SEQ ID NO: 65117 - protein, 382 aa, Neisseria gonorrhoeae
MTETTQTPTFKPKKSVALSGVAAGNTALCTVGRTGNDLSHRGYDILNLAQKCEFEEVAHLLIHGHLPNKFELAAYKTKLKSMRGLPIRVIKVLESLPAHTHPMDVMRTGVSMLGCVHPERESHPDSEARDIADKLIASLGSILLYWYQYSHNGKRIEVESDEETVGGHFLHLLHGKRPSESHIKAMHVSLILYAEHEFNASTFTARVIAGTGSDMYSCITGAIGALKGPKHGGANEVAYDIQKRYRNADEADIRERIGRKEIVIGFGHPVYTISDPRNVVIKEVARGLSREAGDMRLFDIAERLESVMWEEKKMFPNLDWFSAVSYQKLGVPTAMFTPLFVISRSTGWAAHVLEQRKDGKIIRPSANYAGPEDLAFVEIEER

SEQ ID NO: 65118 - protein, 149 aa, Neisseria gonorrhoeae
MSTFFRQTAQAMTAKHIGRFPLSELDQVIDWQPIEQYLIRQKTRYLRDRRGRPAHPLSSMFKAVLPGQWHSLSDPELEHSLITRIGFNLFCRFDGPGIPGCSTLCRYRKFRYARAAYFGLLKVGAQSHLKAMCLNLLKAANRLSAPAAA

SEQ ID NO: 65119 - protein, 342 aa, Neisseria gonorrhoeae
MITPQQAIERLISNNELFYDEMTDLMRQMMSGKVPPEQIAAILTGLRIKVETVSEITAAAAVMCEFASKVPLEDADGLVDIVGTGGDGAKTFNISTTSMFVAAAAGAKVAKHGGRSVSSSSGAADVMEQMGANLNLTPEQIAQSIRQTGIGFMFAPNHHSAMRHVAPVRRSLGFRSIFNILGPLTNPAGAPNQLLGVFHTDLCGILSRVLQQLGSKHVLVVCGEGGLDEITLTGKTRVAELKDGKISEYDIRPEDFGIETRRNLDEIKVANTQESLLKMNEVLDGKEGAARDIVLLNTAAALYAGNIAASLSDGISAAREGIDSGRAKAKKEEFVGFTRQFA

SEQ ID NO: 65120 - protein, 392 aa, Neisseria gonorrhoeae
MEFVYDVAESAVSPAVIKVIGLGGGGCNAINNMVANNVRSVEFISANTDAQSLAKNHAAKRIQLGTNLTRGLGAGANPDIGRAAAQEDREAIEEAIRGANMLFITTGMGGGTGTGSAPVVAEIAKSLGILTVAVVTRPFSYEGKRVHVAQAGLEQLKEYVDSLIIIPNDKLMTALGEDVTMREAFRAADNVLRDAVAGISEVVTCPSEIINLDFADVKTVMSNRGIAMMGSGYAQGIDRARMATDQAISSPLLDDVTLDGARGVLVNITTAPGCLKMSELSEVMKIVNQSAHPDLECKFGAAEDETMSEDAIRITIIATGLKEKGAVDPTPAREVEAVAPSKQEQSHNVEGMIRTNRGIRTMNLTAADFDNQSVLDDFEIPAILRRQHNSDK

SEQ ID NO: 65121 - protein, 414 aa, Neisseria gonorrhoeae
MEQQKRYISVLDIGTSKVLALIGEVQDDDKINIIGLGQAPSRGLRAGMVTNIDATVQAIRQAVNDAELMADTKITHVTTGIAGNHIRSLNSQGVVKIKDGEVTQADIDRAIETAKAINIPPDQKILDAVVQDYIIDTQLGVREPIGMSGVRLDTRVHIITGASTAVQNVQKCIELCGLKSDQIMLQPLASGQAVLTEDEKDLGVCVIDIGGGTTDIAVYMNGAIRHTSVIPAGGNLITKDLSKSLRTPLDAAEYIKIHYGVASCDTEGLGEMIEVPGVGDRTSRQVSSKVLAAIISARIQEIFGVVLGELQKSGFPKEVLNAGIVLTGGVSMMTGIVEFAEKIFDLPVRTGAPQEMGGLSDRVRTPRFSTAIGLLHAACKLEGNLPQPENGTVQEREGGGGLLARLKRWIENNL

SEQ ID NO: 65122 - protein, 242 aa, Neisseria gonorrhoeae
MWDNAEAMERLTRWLLVMMAMLLAASGLVWFYNSNHLPVKQVSLKGNLVYSDKKALGSLAKEYIHGNILRTDINGAQEAYRRYPWIASVMVRRRFPDTVEVVLTERKPVARWGDHALVDGEGNVFEARLDRPGMPVFRGAEGTSAEMLRRYDEFSTVLAKQGLGIKEMTYTARSAWNVVLDNGITVRLGRENEMKRLRLFTEAWQHLLRKNKNRLSYVDMRYKDGFSVRHAPDGLPEKESEE

SEQ ID NO: 65123 - protein, 304 aa, Neisseria gonorrhoeae
MQNFGKVAVLMGGFSSEREISLDSGTAILNALKSKGIDAYAFDPKETPLSELKERGFQTAFNILHGTYGEDGAVQGALELLGIPYTGSGVAASAIGMDKYRCKLIWQALGLPVPEFAVLYDDTDFDAVEEKLGLPMFVKPAAEGSSVGVVKVKEKGRLKSVYEELKHLQGEIIAERFIGGGEYSCPVLNGKGLPGIHIIPATEFYDYEAKYNRDDTIYQCPSEDLTEAEESLMRELAVRGAQAIGAEGCVRVDFLKDTDGKLYLLEINTLPGMTGHSLVPKSAAVTGVGFADLCIEILKAAHVG

SEQ ID NO: 65124 - protein, 469 aa, Neisseria gonorrhoeae
MMKNRVSNIHFVGIGGVGMSGIAEVLHNLGFKVSGSDQARNAATEHLSSLGIQVYPGHTAEHVNGADVVVASTAVKKENPEVVAALERQIPVIPRALMLAELMRFRDGIAIAGTHGKTTTTSLTASILGAAGLDPTFVIGGKLNAAGTNARLGKGEYIVAEADESDASFLHLTPIMSVVTNIDEDHMDTYGHSVEKLHQAFIDFIHRMPFYGKAFLCVDSEHVRAILPKVSKPYATYGLDDTADIYATDIENVGAQMKFTVHVQMKGHEQGSFEVVLNMPGRHNVLNALAAIGVALEVGASVEAIQKGLLGFEGVGRRFQKYGDIKLPNGGTALLVDDYGHHPVEMAATLAAARGAYPEKRLVLAFQPHRYTRTRDLFEDFTKVLNTVDALVLTEVYAAGEEPVAAADSRALARAIRVLGKLEPIYCENVADLPQMLMNVLQDGDVVLNMGAGSINRVPSALLELSKQI

SEQ ID NO: 65125 - protein, 355 aa, Neisseria gonorrhoeae
MGGKTFMLMAGGTGGHIFPALAVADSLRVRGHHVIWLGSKDSMEERIVPQYGIRLETLAIKGIRGNGIKRKLMLPFTLYKTVREAQRIIRKHRVECVIGFGGFVTFPGGLAAKLLGVPIVIHEQNAVAGLSNRHLSRWAKRVLYAFPKAFSHEGGLVGNPVRADISNLPVPAERFQGREGRLKILVVGGSLGADVLNKTVPQALALLPEEVRPQMYHQSGRNKLGNLQADYDALGVKAECVEFITDMVSAYRDADLVICRAGALTIAELTAAGLGALLVPYPHAVDDHQTANARFMVQAEAGLLLPQTQLTAEKLAEILGSLNREKCLKWAENARTLALPHSADDVAEAAIACAA

SEQ ID NO: 65126 - protein, 423 aa, Neisseria gonorrhoeae
MGDGVHTLLLDRPIVRDGRKFDAPLLWMVVLMTAFGLLMIYSASVYLASKEGGDQFFYLTRQAGFVVAGLIASGFLWFLCRMRTWRRLVPWIFALSGLLLVAVLIAGREINGATRWIPLGPLNFQPTELFKLAVILYLASLFTRREEVLRSMESLGWQSIWRGTANLIMSATNPQARRETLEMYGRFRAIILPIMLVAFGLVLIMVQPDFGSFVVITVITVGMLFLAGLPWKYFFVLVGSVLGGMVLMITAAPYRVQRVVAFLDPWKDPQGAGYQLTHSLMAIGRGEWFGMGLGASLSKRGFLPEAHTDFIFAIIAEEFGFFGMCVLIFCYGWLVVRAFSIGKQSRDLGLTFNAYIASGIGIWIGIQSFFNIGVNIGALPTKGLTLPLMSYGGSSVFFMLISMMLLLRIDYENRQKMRGYRVE

SEQ ID NO: 65127 - protein, 445 aa, Neisseria gonorrhoeae
MTFQNKKILVAGLGGTGISMIAYLRKNGAEVAAYDAELKAERVAQIGKMFDGLVFYTGRLKDALDNGFDILALSPGISERQPDIEAFKQNGGRVLGDIELLADIVNRRGDKVIAITGSNGKTTVTSLVGYLCIKCGLDTVIAGNIGTPVLEAELQREGKKADVWVLELSSFQLENTESLRPTAATVMNISEDHLDRYDDLLDYAHTKAEIFRGDGVQVLNADDVFCRAMKRAGREVKRFSLEHEADFWLERGTGCLKQGNEDLISTQDIPLQGLHNAANVMAAVALCEAVGLPREALLEHVKTFQGLPHRVEKIGEKNGVVFIDDSKGTNVGATAAAIAGLQNPLFVILGGMGKGQDFTPLRDALKDKAKGVFLIGVDAPQIRRDLDGCGLNLTDCVTLEEAVQTAYAQAEAGDIVLLSPACASFDMFKGYAHRSEVFIEAFKAL

SEQ ID NO: 65128 - protein, 266 aa, Neisseria gonorrhoeae
MMMKAYLDLMRHVLDNGTDKSDRTGTGTRSVFGYQMRFDLGKGFPLLTTKKLHLRSIIHELLWFLKGDTNIKYLKDNNVSIWDEWADENGDLGPVYGYQWRSWPAPDGRHIDQIANVVEQIKKNPDSRRLIVSAWNPALVDEMALPPCHALFQFYVADGKLSCQLYQRSADIFLGVPFNIASYALLTMMMAQVCGLEAGEFVHTFGDAHLYRNHFEQAALQLEREPRALPVMKINPEVKDLFAFKFEDFELEGYDPHPHIKAVVSV

SEQ ID NO: 65129 - protein, 444 aa, Neisseria gonorrhoeae
MTDLNTLFANLKQRNPNQEPFHQAVEEVFMSLDPFLAKNPKYTQQSLLERIVEPERVVMFRVTWQDDKGQVQVNRGYRVQMSSAIGPYKGGLRFHPTVDLGVLKFLAFEQVFKNALTTLPMGGGKGGSDFDPKGKSDAEVMRFCQAFMTELYRHIGADTDVPAGDIGVGGREIGYLFGQYKKIRNEFTSVLTGKGLEWGGSLIRPEATGYGCVYFAQAMLQTRNDSFEGKRVLISGSGNVAQYAAEKAIQLGAKVLTVSDSDGFVLFPDIGMTEAQLAALIELKEVRRERVATYAKEQGLQYFENQKPWGVAAEIALPCATQNELDEEAAKTLLANGCYVVAEGANMPSTLGAVEQFIKAGILYAPGKASNAGGVATSGLEMSQNAIRLSWAREEVDSRLFGIMQSIHESCLKYGKVGDKVNYVNGANIAGFVKVADAMLAQGF

SEQ ID NO: 65130 - protein, 360 aa, Neisseria gonorrhoeae
MFLWLAHFSNWLTGLNIFQYTTFRAVMAALTALAFSLMFGPWTIRRLTALKCGQAVRTDGPQTHLVKNGTPTMGGSLILTAITVSTLLWGNWANPYIWILLGVLLATGALGFYDDWRKVVYKDPNGVSAKFKMVWQSSVAVIAGLALFYLAANSANNILIVPFFKQIALPLGVVGFLVLSYLTIVGTSNAVNLTDGLDGLAAFPVVLVAAGLAIFAYVSGHYQFSQYLQLPYVAGANEVAIFCTAMCGACLGFLWFNAYPAQVFMGDVGALALGAALGTVAVIVRQEFVLVIMGGLFVVEAVSVMLQVGWYKKTKKRIFLMAPIHHHYEQKGWKETQVVVRFWIITIVLVLIGLSTLKIR

SEQ ID NO: 65131 - protein, 259 aa, Neisseria gonorrhoeae
MKLVRPQKISDQVLSVLEGRIVEGVYAEGGKIPPERVLAEEFGVSRPSVRSALNILVARQILEARQGDGYYVSVKPQQDFLQSWQELLGKHSNWEQDVFDFSCHIEGCMAALAAERRTDADLKRIRFWLEKFEEACGSGNLEHQGEADVSFHQTIADAAHNLLFSHLSGGLLKMLYRQTRSSLIYLNQEEDPRPKLMAQHRVLYEAISNRRPGEASEAAKAHLNYVASSILKDREYQSRNRHADTLAQNDLKRVQDWEV

SEQ ID NO: 65132 - protein, 436 aa, Neisseria gonorrhoeae
MPSENKPVSRIVTDSRDIREGDVFFALAGGRFDAHDFVGGVLSAGAAAVVVSREDCAALGGALKVDDTLAALQTLAKAWRDNVNPFVFGITGSGGKTTVKEMLAAVLRRRFGDDAVSATAGNFNNHIGLPLTLLKLNEKHRYAVIEMGMNHFGELAVLTQIAKPDAALVNNALRAHVGCGFDGVGDIAKAKSEIYAGLCSDGMALIPQEDANMAVFKTATFNLNTCTFGVDSGDVRAENIVLKPLSCEFDLVCGDERTAVVLPVPGRHNVHNAAAAAALALAAGLSLNDVAEGLQGFSNIKGRLNVKAGIKGATLIDDTYNANPDSMKAAVDVLARMPAPRIFVMGDMGELGEDEAAAMHAEVGAYARDQGIEAAYFVGDNSVEAAEKFGADGLWFAAKDPLIQVLSHDLPERATVLVKGSRFMQMEEVVEALEDK

SEQ ID NO: 65133 - protein, 176 aa, Neisseria gonorrhoeae
MHLMGSHSDFCTRLDKDARRFQYQTEKISCYVSTIAQTDKFLEDTVKILNENKESWSLVYFSDHGLMHVGKGGERTLTHGEWKRQSYGVPLVKISSDDTRREMIKVRRSAFNFLRGFGSWTGIETDELPDDGYDFWGNVPDVPGEGNNLAFIDRQSDDPAPWYAGKGKSAKNTSKK

SEQ ID NO: 65134 - protein, 492 aa, Neisseria gonorrhoeae
MFSKLSPLAETGIPTLSCANAAGRLLHSDSRQIKQGDIFVACPGEYADGRSYIPAAVANGAAFVFWDDDGRFAWNPEWKVPNQGIKDLKHRAGILAAQVYGNVSDGLKVWGVTGTNGKTSITQWLAQAADLLGEKTAIIGTVGNGFWGALEETAHTTPAPVDVQTLLYRFRQQGATAAAMEVSSHGLDQSRVNGVPFRSAIFTNLTRDHLDYHGTMEAYGAIKSRLFYWHGLKHAVINTDDGYGAELAGRLKKDCPDLAVYSYGFSEHADIRITDFTASSDGMEAVFQTPWGEGKCRTRLLGRFNAQNLAACIALLCANGYPLDKVLDVLAKIRPASGRMDCIMNSGKPLVVVDYAHTPDALEKALSTLQEIKPQGAALWCVFGCGGNRDCGKRPLMGAAAVQGADKVVVTSDNPRLENPHDIINDILPAVPAPECVEADRAAAIRYAVEQAAANDIILIAGKGHENYQDVQGVKHRFSDLEIVGQALLTRK

SEQ ID NO: 65135 - protein, 1067 aa, Neisseria gonorrhoeae
MAKFFIDRPIFAWVISIFIIAAGIFGIKSLPVSQYPSVAAPTITLHAIYPGASAQVMEGSVLSVIERNMNGVEGLDYMSTSADSSGSGSVSLTFTPDTDENLAQVEVQNKLSEVLSTLPATVQQYGVTVSKARSNFLMIVMLSSDVQSTEEMNDYAQRNVVPELQRIEGVGQVRLFGAQRAMRIWVDPKKLQNYNLSFADVGSALSAQNIQISAGSIGSLPAVRGQTVTATVTAQGQLGTAEEFGNVILRANTDGSNIYLKDVAKVGLGMEDYSSSTRLNGVNTTGMAVMLSNSGNAMATAKAVKERLAVLEKYFPQGMSWKTPYDTSKFVEISIEKVIHTLIEAMVLVFVVMYLFLQNIRYTLIPTIVVPISLLGGFAFISYMGMSINVLTMFAMILVIGIVVDDAIVVVENVERIMAGEGLPPKEATKKAMGQISGAVIGITAVLISVFVPLAMFSGAAGNIYKQFALTMASSIAFSAFLALTLTPALCATMLKTIPKGHHEEKKGFFGWFNKKFDSWTHGYEGRVAKVLRKTFRMMVVYIGLAVVGVFLFMRLPTSFLPTEDQGFVMVSVQLPAGATKERTDATLAQVTQLAKSIPEIENIITVSGFSFSGSGQNMAMGFAILKDWNERTASGSDAVAVAGKLTGMMMGTLKDGFGISVVPPPILELGNGSGLSINLQDRNNTGHTALLAKRNELIQKMRASGLFDPSTVRAGGLEDSPQLKIDINRAAAAAQGISFADIRTALASALSSSYVSDFPNQGRLQRVMVQADEDARMQPADILNLTVPNKSGVAVPLSTIATVSWENGTEQSVRFNGYPSMKLSASPATGVSTGQAMAAVQKMVDELGGGYSFEWGGQSREEAKGGSQTLILYGLAVAAVFLVLAALYESWSIPLAVILVIPLGLIGAAAGVTGRNLFEGLLGSVPSFANDIYFQVGFVTVMGLSAKNAILIIEFAKDLQAQGKSAVEAALEAARLRFRPIIMTSFAFILGVVPLYIAAGASSASQRAIGTTVFWGMLVGTLLSVFLVPLFYVVVRKFFKETAHEHEMAVRHASKAGITGSDDKQY

SEQ ID NO: 65136 - protein, 522 aa, Neisseria gonorrhoeae
MSQTDARRSGRFLRTVEWLGNMLPHPVTLFIIFIVLLLIASAVGAYFGLSVPDPRPVGAKGRADDGLIHVVSLLDADGLIKILTHTVKNFTGFAPLGTVLVSLLGVGIAEKSGLISALMRLLLTKSPRKLTTFMVVFTGILSNTASELGYVVLIPLSAVIFHSLGRHPLAGLAAAFAGVSGGYSANLFLGTIDPLLAGITQQAAQIIHPDYVVGPEANWFFMAASTFVIALIGYFVTEKIVEPQLGPYQSDLSQEEKDIRHSNEITPLEYKGLIWAGVVFVALSALLAWSIVPADGILRHPETGLVAGSPFLKSIVVFIFLLFALPGIVYGRITRSLRGEREVVNAMAESMSTLGLYLVIIFFAAQFVAFFNWTNIGQYIAVKGAVFLKEVGLGGSVLFIGFILICAFINLMIGSASAQWAVTAPIFVPMLMLAGYAPEVIQAAYRIGDSVTNIITPMMSYFGLIMATVIKYKKDAGVGTLISMMLPYSAFFLIAWIALFCIWVFVLGLPVGPGTPTFYPVP

SEQ ID NO: 65137 - protein, 154 aa, Neisseria gonorrhoeae
MLTIVLYQPEIPPNTGNIIRLCANTGADLHLVKPLGFPLDSAKMKRAGLDYHEFASLTVHENFDDCLKSLAGRRIFALTTKGTARPDETAFQKGDVLLFGPETRGLPADILDSLPAAQKIRLPMRPGSRSMNLSNTVSVILFEAWRQHGYAGGV

SEQ ID NO: 65138 - protein, 318 aa, Neisseria gonorrhoeae
MSGAESYRHITVLLNEAVDALAVREDGVYVDGTFGRGGHSRLILSRLGDAGRLIVFDKDPQAIAVAEELARSDKRVGVVHGGFASFQTALDGLGIGKVDGALFDLGISSPQIDDGSRGFSFRFDAPLDMRMDTTRGMSAAEWIAVASEQDLHEVIKNYGEERFSRQIVRAIVAQRAESPIDTTRKLAQIVAQNVRTRERGQDPATRTFQAIRIFINRELEEVGAVLPQVMCRLKEGGRLAVIAFHSLEDRIVKQFVKKYSQHEPLPSWAAVREADLPDPPLKIVGRALKPGEAEIAANPRARSAVLRVAERTAGPIPE

SEQ ID NO: 65139 - protein, 151 aa, Neisseria gonorrhoeae
MFGGAHELSIDSKGRLAVPAKFRDILSRLYTPAVVATLESKHKLLMYPVAEWEKVAAQLLNLKVADNPVLRRFQNLLLHNAEILEWDSAGRVLVPAGLRKRVDFDREVVLVGRANRLELWGREQWEAEMVQALDDDPDELAFQLSQTDLQL

SEQ ID NO: 65140 - protein, 298 aa, Neisseria gonorrhoeae
MNPTNDLKAWQQRAQAQTELLLERFLPSGNEIPHTLHEAMRYAALDGGKRLRPMLVLAASELGGAMADAVGQAMAAIEMIHVYSLVHDDMPAMDNDSLRRGKPTCHIKYGEATALLTGDALQTQAFDVLSRPTELPAARQLAMLSVLAKAGGSAGMAGGQAIDLANVGKQMVQADLERMHSLKTGALIRAAVLLGATACPDLSDAELAVLDAYAAKLGLAFQVIDDVLDCEADTATLGKTAGKDADNDKPTYVKLMGLEAARSYAHKLVAEAVALLEPFGDKALRLRQLAEFAVARKY

SEQ ID NO: 65141 - protein, 477 aa, Neisseria gonorrhoeae
MDTQTYNYKVVRQFAIMTVVWGIVGMLVGVIVAAQLFAPALDLSNIGPWFHFGRLRPLHTNAVIFAFGGCGLIGTSYYVVQRTCNTRLFGGWLPAFTFWGWQAVIVAAVVSFPMGWTQGKEYAELEWPIDILITLVWVAYAIVFFGTIAKRKVKHIYVANWFYGGFILAVALLHIVNNISIPAGLMKSYPVYSGAIDAMVQWWYGHNAVGFFLTAGFLGMMYYFVPKQAARPVYSYRLSVVHFWALIFTYMWAGPHHLHYTALPDWTQSLGMVLSLILFAPSWGGMINGIMTLSGAWDKLRTDPILKFLIVSLSFYGMSTFEGPMMSIKTVNALSHYTDWTVAHVHAGALGWVGFVTIGSVYYMIPRLFGKEQMHSTKLVEAHFWIATIGVVLYIAAMWIAGVMQGLMWSSLNDDGTLTYSFVESVKRTMPYYMIRFAGGLLYLSGMCIMAYNVYRTAIGGKAVDAEIPAVSQTQHH

SEQ ID NO: 65142 - protein, 674 aa, Neisseria gonorrhoeae
MNDMTLYLIIALVPLAGSLIAGLFGNKIGRAGAHTVTILGVAVSAVLSAYVLWGFLNGSRTKFDENVYTWLTMGGLDFSVGFLVDTMTAMMMVVVTGVSLMVHIYTIGYMHDEKVGYQRFFSYISLFTFSMLMLIMSNNFIQLFFGWEAVGLVSYLLIGFYFKRPSATFANLKAFLINRVGDFGFLLGIGLVLAYFGGSLRYQDVFAYLPNVQNATIQLFPGVEWSLITVTCLLLFVGAMGKSAQFPLHVWLPDSMEGPTPISALIHAATMVTAGLFMVSRMSPIYEMSSTALSVIMVIGAITALFMGFLGVIQNDIKRVVAYSTLSQLGYMTVALGASAYSVAMFHVMTHAFFKALLFLAAGSAIIGMHHDQDMRHMGNLKKYMPITWLTMLIGNLSLIGTPFFSGFYSKDSIIEAVKYSTLPGSGVAYFAVLASVFVTAFYAFRQYFMVFHGEEKWRSLPEHHSDGHGEEHHGLGKNDNPHESPLVVTLPLILLAIPSVIIGYIAIEPMLYGDFFKDVIFVNADAHPTMHIMKEEFHGALAMVSHSLTSPVLYLAAAGVAAAWLLYVKLPHLPAKIAQAFRPVYVLFENKYYLDALYFNVFAKGTRALGNFFWKVGDTAIIDNGIVNGSAKLVGAIAAQVRKAQTGFIYTYAAAMVFGVLVLLGMTFWGLFR

SEQ ID NO: 65143 - protein, 753 aa, Neisseria gonorrhoeae
MLQIEIDGKQVSVEQGATVIEAAHKLGTYIPHFCYHKKLSIAANCRMCLVDVEKAPKPLPACATPVTDGMIVRTHSAKAREAQEGVMEFLLINHPLDCPTCDQGGECQLQDLAVGYGKTTSRYTEEKRSVVGKDMGPLVSAEEMSRCIHCTRCVRFTEEIAGLQEIAMVNRGEHSEIMPFIGKAVETELSGNVIDLCPVGALTSKPFRFNARTWELNRRKSVSAHDALGSNLIVQTKDHTVRRVLPLENEAINECWLSDRDRFAYEGLYHESRLKNPKIKQGGEWMDVDWKTALEYVRSAIECIAKDGNQNQVGVWANPMNTVEELYLAKKFADGLGVKNFATRLRQQDKRLSDGLKGAQWLGQSIESLADNDAVLVVGANLRKEQPLLTARLRRAAKDRMALSVLAGSKEELFMPLLSQEAAHPDEWAGRLKNLSADAEHAVTASLKNAEKAAVILGAEVQNHPDYAAIYAAAQELADATGAVLGILPQAANSVGADVLGVNSGESVAEMANTPKQAVLLLNVEPEIDTVDGAKAVAALKQAKSVMAFTPFVSETLLDVCDVLLPIAPFTETSGSFINMEGRLQSFHGVVQGFGDSRPMWKVLRVLGNLFDLKGFEYHDTAAILKDALDAESLPSKLDNRSTWAGEGVQTASNRLVRVGGVGIYHTDSIVRRSAPLQETSHAAVPAARVNPNTLARLGLQDGQTAVAKQNGASVSVAVKADAGLPENVVHLPLHTENAALGALMGIIELAGA

SEQ ID NO: 65144 - protein, 433 aa, Neisseria gonorrhoeae
MAIYQSGVIFDQVDTANPDCWTLDEYVKRGGYTALRKILSENISQTDVIDEVKTSGLRGRGGAGFPTGLKWSFMPRSFPGEKYVVCNTDEGEPGTFKDRDIIMFNPHALIEGMIIAGYAMGAKAGYNYIHGEIFEGYQRFEAALEQARAAGFLGKNILGSDFEFELFAHHGYGAYICGEETALLESLEGKKGQPRFKPPFPASFGLYGKPTTINNTETFSSVPFIIRDGGQAFADKGIPNAGGTKLFCISGHVERPGNYEVPLGTPFAEVLKMAGGMRGGKKLKAVIPGGSSAPVLPADIMMQTNMDYDSISKAGSMLGSGAIIVMDEDVCMVKALERLSYFYYDESCGQCTPCREGTGWLYRIVRRIVEGKGRMEDLDLLDSVGNQMAGRTICALADAAVFPVRSFTKHFRDEFAHYIEHGGPMKEHKWGGW

SEQ ID NO: 65145 - protein, 157 aa, Neisseria gonorrhoeae
MLSAKSLKQIDIELAKYPADQRRSAIMGALRIAQTEKGWLAPETIAFVADYIGITPAQAYEVATFYNMYDLEPVGKYKLTVCTNLPCALRGGMATGEYLKQKLGIGYGETTPDGKFTLVEGECMGACGDAPVMLVNNHSMCSFMTEEAIEKKLAELE

SEQ ID NO: 65146 - protein, 93 aa, Neisseria gonorrhoeae
MNTIPLHTILKLMAHPERMAILIQLLDSERNIVELAKSLSLTATAVSCHLNRLRAGGLVDFTRYHRIIEYRLVSEDAATILRTIRDLENKRAA

SEQ ID NO: 65147 - protein, 737 aa, Neisseria gonorrhoeae
MTAISPIQDTQSATLQELREWFDSYCAALPDNDKNLIGTAWSLAQEHYPADAATPYGEPLPDHFLGAAQMVDELDLLPDAVAATLLADIGRYVPDWNLLVSERCNSTVAELVKGVDEVQKLTHFARVDSLATPEERAQQAETMRKMLLAMVTDIRVVLIKLAMRTRTLQFLSNAPDSPEKRAVAKETLDIFAPLANRLGVWQLKWQLEDLGFRHQEPEKYREIALLLDEKRTERLEYIENFLDILRTELKKYNIHFEVAGRPKHIYSIYKKMVKKKLSFDGLFDIRAVRILVDTVPECYTTLGIVHSLWQPIPGEFDDYIANPKGNGYKSLHTVIVGPEDKGVEVQIRTFDMHQFNEFGVAAHWRYKEGGKGDSAYEQKIAWLRQLLDWRENMAESGKEDLAAAFKTELFNDTIYVLTPHGKVLSLPTGATPIDFAYALHSSIGDRCRGAKVEGQIVPLSTPLENGQRVEIITAKEGHPSVNWLYEGWVKSGKAIGKIRAYIRQQNADTVREEGRVQLDKQLAKLTPKPNLQELAENLGYKKPEDLYTAVGQGEISNRAIQKACGTLNEPPPVPVSATTIVKQSKIKKGGKTGVLIDGEDGLMTTLAKCCKPAPPDDIAGFVTRERGISVHRKTCPSFRHLAEHAPEKVLDASWAALQEGQVFAVDIEIRAQDRSGLLRDVSDALARHKLNVTAVQTQSRDLEASMRFTLEVKQVNDLPRVLAGLGDVKGVLSVTRL

SEQ ID NO: 65148 - protein, 149 aa, Neisseria gonorrhoeae; identical to SEQ ID NO: 65118

SEQ ID NO: 65149 - protein, 735 aa, Neisseria gonorrhoeae
MFPDQSAPNLLQGLNPEQLSAVTWPPQSALVLAGAGSGKTRVLTTRIAWLLQSGQASVHSIMAVTFTNKAAKEMQTRLGAMIPINVRAMWLGTFHGLCHRFLRLHHRDAGLPSSFQILDSGDQLSLIKRLLKSLNIAEEIIAPRSLQGFINAQKESGLRASVLGAPDPHTSRMIGCYAEYDKICQREGVVDFAELMLRSYEMLQSNEILRRHYQNRFNHILVDEFQDTNKLQYAWLKLMAGGNAAVFAVGDDDQSIYRFRGANVGNMTALMEEFHIDAPVKLEQNYRSVGNILAAANAVIENNDERLGKNLRTDAEAGDKIRYYSAFTDLEEARFIVDETKALEREGWDLDEIAVLYRSNAQSRVIEQSLFRSGIPYKIYGGLRFYERQEIKHALAYLRLAVNPDDDNALLRVINFPPRGIGARTVENLQTASNEQGITLWQAACNAGAKAAKVVAFVRLIEALRNQVGQMHLSEIIVGILKDSGLTEHYRTQKGDNQDRLDNLDELVNAAIEFKPEDSNFETLPENISDDPAFPILAFLSNAALESGENQAGAGEKAVQLMTVHAAKGLEFNAVFLTGMEEGRFPSEMSLAERGGLEEERRLMYVAITRARKRLYITMAQQRMLHGQTQFGIASRFVEEIPPEVLHYLSVKKPAFDSYGNTRQTTVQRDKIIDDFKQPQTYAGFRIGQNVRHAKFGTGVIIDAADKGESARLTINFGKQGVKELDTKFAKLEAM

SEQ ID NO: 65150 - protein, 78 aa, Neisseria gonorrhoeae
MSNIEQQVKKIIAEQLGVNEADVKNESSFQDDLGADSLDTVELVMALEEAFGCEIPDEDAEKITTVQLAIDYINAHNG

SEQ ID NO: 65151 - protein, 558 aa, Neisseria gonorrhoeae
MSQQYVYSMLRVSKVVPPQKTIIKDISLSFFPGAKIGLLGLNGTGKSTVLRIMAGVDKEFEGEAVPMGGIKIGYLPQEPELDPEKTVREEVESGLGEVAAAQKRLEEVYAEYANPDADFDALAEEQGRLEAIIAAGSSTGGGAEHELEIAADALRLPDWDAKIGNLSGGEKRRVALCKLLLSKPDMLLLDEPTNHLDAESVEWLEQFLVRFPGTVVAVTHDRYFLDNAAEWILELDRGHGIPWKGNYSSWLEQKEKRLENEAKSEAARVKAMKQELEWVRQNAKGRQAKPKARLARFEEMSNYEYQKRNETQEIFIPVAERLGNEVIEFVNVSKSFGDKVLIDGLSFKVPAGAIVGIIGPNGAGKSTLFKMIAGKEQPDSGEVKIGQTVKMSLIDQSREGLQNDKTVFDNIAEGRDILQVGQFEIPARQYLGRFNFKGSDQSKIARQLSGGERGRLHLAKTLLGGGNVLLLDEPSNDLDVETLRALEDALLEFAGSVMVISHDRWFLDRIATHILACEGDSKWVFFDGNYQEYEADKKRRLGKEGAKPKRIKYKPVTR

SEQ ID NO: 65152 - protein, 318 aa, Neisseria gonorrhoeae
MKEFDFIKRYLQTGTDKDVVLGIGDDAAIVRPREGFDLCFSADMLLKDRHFFADVKPEGLAWKVLAVNISDMAAMGAIPRWVLLSAALPELDEVWLERFCGSFFGLAKKFGVTLIGGDTTKGDMAFNVTIIGELPKGRALRRDAAVAGDDIWVSGRVGMAAAALNCRLKRCVLPDDVFAECEQKLLRPEPRVGLGLALLPFARAAQDVSDGLAQDLGHILTASGVGAEIWADSLPSLSVLKDILPRAQWLSYTLAGGDDYELVFTAPESCRSRVLDAAERCGVPVTCIGKINGGCRLKVLDAGGRELELHSLGFDHFG

SEQ ID NO: 65153 - protein, 447 aa, Neisseria gonorrhoeae
MANCLNPCRKLQTASARQPHMPPIPTTNSEVIMSQRRVVITGLGQVSPVGNTAAEAWDNLLAGKSGIGAITRFDASDINSRVAGEVRGFDIGQYISAKEARRMDVFIHYGIAAALQAIADSGLDDVENLDKDRIGVNIGSGIGGLPSIEATGKAVIEGGARKINPFFIPGSLINLISGHVTILKGYRGPSYGMVSACTTGAHAIGDSARLIKYGDADIMVAGGAEGAISTLGVGGFAAMKALSTRNDDPATASRPWDKGRDGFVIGEGAGILVLEELEHAKKRGAKIYAEIVGFGMSSDAYHITAPNEEGPALAVTRALKDAGINPEDVDYVNAHGTSTPLGDANETKALKRAFGEHACKTVISSTKSMTGHLLGAAGGVEAVYSILAIHDGKIPPTINIFEQDVEAGCDLDYCANEARDAEIDVAISNSFGFGGTNGTLVFKRFKG

SEQ ID NO: 65154 - protein, 504 aa, Neisseria gonorrhoeae
MTTSKCPVTHLTMNNGAPVADNQNSLTAGPRGPLLTQDLWLNEKLADFVREVIPERRMHAKGSGAFGTFTVTHDITKYTRAKIFSEVGKKTEMFARFTTVAGERGAADAERDIRGFALKFYTEEGNWDVVGNNTPVFFLRDPRKFPDLNKAVKRDPRTNMRSATNNWDFWTLLPEALHQVTIVMSDRGIPASYRHMHGFGSHTYSFWNEAGERFWVKFHFRSQQGIKNLTNEEAAKIIADDRESHQRDLYEAIERGEFPKWTMYIQVMPEADAEKVPYHPFDLTKVWPKKDYPLIEVGEFELNRNPENFFADVEQSAFAPSNLVPGIGASPDKMLQARLFNYADAQRYRLGVNFRQIPVNRPRCPVHSNQRDGQGRADGNYGSLPHYEPNSFGQWQQQPDFAEPPLKINGDAAHWDYRQDDDDYFSQPRALFNLMNDAQKQALFDNTAAAMGDAPDFIKYRHIRNCYRCDPAYGEGVAKALGLTVEDAQAVRATDPALGQAGLL

SEQ ID NO: 65155 - protein, 524 aa, Neisseria gonorrhoeae
MAQIQMSANVKTINAVFAAMLVGTVGYFIYWGLGYTHYNYAALFIIATMFGVFMAFNIGGNDVANSFGTSVGAGTLTIPQALLIAAVFEVSGAVIAGGEVTDTIRKGIVDLKGVDFEPIQFVFIMMSALLAAALWLLFASRKGLPVSTTHAIIGGIVGSALCMAFTHNADGVALIRWGKLGEIGMSWVLSPVLGGAVSYFLFSRVKKNVLDYNAWAEGTLKGIKQEKKAYKERHRLFFEGLSEAEKVEYATKMAHDAQIYDEPEFDPQELQSEYYRGLYAFDNRKNNVDSYKALHSWIPFIASFGTMMISAMLIFKGLKNLHLGMSNVNSFLTIFMIGAAVWMGTFVFAKSLKRKDLGKSTFQMFSWMQVFTACGFAFSHGANDIANAIGPFAAIMDVLRTNSVAAQSAVPPIAMLTFGIALIVGLWFVGKEVIKTVGTSLAEMHPASGFTAELSAASVVMGASLMGLPVSSTHILVGAVLGIGLVNRNANWKLMKPIGLAWVITLPAAAVLSMASYLILQAVF

SEQ ID NO: 65156 - protein, 871 aa, Neisseria gonorrhoeae
MAKKRFCHFAGKFRARTGRKCAARPFRRHPDADNAESGGEIGYNTQLYAPSRPLFPQGADCFGGIAKSFQNPAKNMTEQKHEEYGADSIQVLEGLEAVRKRPGMYIGDTQDGSGLHHMVFEVLDNAIDEALAGHCDKITVTIHADHSVSVADNGRGMPTGIHPKEGRSAAEVIMTVLHAGGKFDNNSYKISGGLHGVGVSVVNALSDWVTLTIYRDGKEHFVRFVRGETEEPLKIVGDSDKKGTTVRFLAGTETFGNIEYSFDILAKRIRELSFLNNGVDIELTDERDGKHESFALSGGVAGFVQYMNRKKTPLHEKIFYAFGEKDGMSVECAMQWNDSYQESVQCFTNNIPQRDGGTHLTALRQVMTRTINSYIEANEVAKKAKVETAGDDMREGLTCVLSVKLPDPKFSSQTKDKLVSGEIGPVVNEVINQALTDFLEENPNEAKIITGKIVDAARAREAARKAREITRRKGVMDGLGLPGKLADCQEKDPALSELYLVEGDSAGGSAMQGRDRKFQAILPLKGKILNVEKARFEKMLASQEVATLITALGAGIGKEEFNPEKLRYHRIIIMTDADVDGAHIRTLLLTFFYRQMPELVERGYIYIAQPPLYKAKYGKQERYLKDELEKDQWLLGLALEKAKIVSDGRTIEGAELADTAKQFLLAKTVIEQESRFVDELVLRAMLHASPIDLTSSENADKAVAELSGLLDEKEAALERIEGHEGHRFIKITRKLHGNVMVSYIEPKFLNSKAYQTLTQTAAALKGLVGEGAKLYKGENEYDADSFETALDILMSVAQKGMSIQRYKGLGEMNPEQLWETTMDPAVRRLLKVRIEDAIAADEVFVTLMGDEVEPRRAFIENNALIAQNIDA

SEQ ID NO: 65157 - protein, 149 aa, Neisseria gonorrhoeae
MSTFFRQTAQAMTAKHIGRFPLSELDQVIDWQPIEQYLIRQKTRYLRDRRGRPAHPLSSMFKAVLPGQWHSLSDPELEHSLITRIGFNLFCRFDEPGIPGCSTLCRYRKFRYARAAYFGLLKVGAQSHLKAMCLNLLKAANRLSAPAAA

SEQ ID NO: 65158 - protein, 89 aa, Neisseria gonorrhoeae
MALTVEQKAQIVKDFQRKEGDTGSSEVQVALLTFRINDLTPHFKANPKDHHSRRGLLKMVSQRRRLLAYLRRTQPDTYRALITRLGLRK

SEQ ID NO: 65159 - protein, 295 aa, Neisseria gonorrhoeae
MQKSKLSWFLKLMLALSLAFLYIPLVVLVIYSFNESKLVTVWGGFSTKWYGALLENDTILEAAWLSLRIAVVSSLAAVVLGTLAGYAMARIKRFRGSTLFAGMISAPMVMPDVITGLSMLLLIIQVQIFLQGSEWLQHLYFDRGFFTIFLGHTTLCMAYITVVIRSRLVELDQSLEEAAMDLGARPLKIFFVITLPLIAPAIASGFLLGITLSLDDLVITSFLSGPGSSTLPQVIFSKIKLGLDPQMNVLATILIGIIGTLVIIVNYWMMRQATKRNREAAEAYRQEKLAAEKAN

SEQ ID NO: 65160 - protein, 322 aa, Neisseria gonorrhoeae
MKILLVRLSSMGDLIHTLPAIEDLARQCSDVELHWLCEAGFAGIARLHPFVKKVHVMKWRQWRKHLFQAETWREMGRLKQALLQEAFDFVLDSQGLIKSACFAKMAKSPIYGLDKHSAREGVAALAYDKKYVVPKGRNAVWRNRDLFAQVFGYAMPETQVFGLSVPEASRLKNLAQPYYAALHATSRDSKLWPMENWRELLQKLNQKQQCNVYLPWGNEAEKVRAEQIADGLPFTIVCAKMNLLQAAYLLKHAVGIVGVDTGLLHLANALEKPVVGIYTDTDPIKTGVQVSAIAKNVGNIGQIPTADLVYQTLMDCVSADKG

SEQ ID NO: 65161 - protein, 249 aa, Neisseria gonorrhoeae
MKALVAVKRVVDYNVKVRVKADGSDVDIGNVKMSMNPFDEIAVEEAVRLKEAGKVSEIVAVSLGEKKCEETLRTALAMGADRAIHIETDVKLEPLAVAKLLKAVADKENPQIFFLGKQAIDDDANQVAQMLAALLNAAQGTFVSKVQIEGDEVQIVREIDGGEETIALKLPAVISADLRLNEPRFVKLPNIMVAKKKPLEKLDSADLATDISPRLKTVKFAEPKARQAGVKVASVAELVEKLKNEAKVI

SEQ ID NO: 65162 - protein, 461 aa, Neisseria gonorrhoeae
MISIFDIFKIGIGPSSSHTVGPMKAAAAFAAGLDAQTARIAIDIYGSLALTGYGHGTFDALMLGLEGSLPHDIPLAGIPERLGRIRTQHILRLNGQEIRFIPDRDLNIRGNQVLPKHPNGLRFTAYASDGTVLKEQVYYSVGGGFVVTEEDFEWQSETEKAVPYPYNSCAGLLARCRLNRLDISEVVLANEAALAGCGEAEIRRRVAGVAEIMEECIKRGLNAGGELPGGLNVRRRAPQLAAKLKVLRETEIVNTRLWPMVYAMAVNEENAAGGRVVTAPTNGAAGIIPAVLHYFRKFNPHATQERVENFLLTAGAIGILYKTNASISGADVGCQGEVGVACSMAAGAYAEVIGGTPKQVENAAEMAMEHHLGLTCDPVGGLVQIPCIERNGIAAEKALKLGTLALLEDGTDKKVSLDEVIRTMLQTGRDMKATYKETSLAGLAATLRKKAVPVSVRVVEC

SEQ ID NO: 65163 - protein, 311 aa, Neisseria gonorrhoeae
MSVLIIAEHDNKQLNPATLHAVAAAAKLGKVDLLVVGNGASSVVEFAKQVAGVEKVLVADAAHYAEGLAEELAPLVVKLAADYRYVAATATTFGKNLLPRVAALLDVPQISDLTEIVDNTTFVRPIYAGNAFETVQADSEKLVLTFRVTAFDAVAAQGGNAEVINVKTTPAQNLSRFVNRQLSHSDRPELTQAKVIVSGGRALGSVEKFSEVLTPLADVLGAAIGASRAAVDAEYAPNDAQVGQTGKVVAPQLYFAIGISGAIQHVAGMQDSKVIVAINKDADAPIFNVADYGLVGDLFEIVPQLIELLKN

SEQ ID NO: 65164 - protein, 343 aa, Neisseria gonorrhoeae
MGIKVAINGYGRIGRQVLRAIYDYQIQDQLQIVAVNASGSLETNAHLTKFDTVHGRFEADVSHDGGNLIVNGDKIPFFSTRNPAELPWKELGVDLVMECTGAFTSKEKAKIHLESGAKKVLISAPGGDDVDATVVYGVNDSVLTADMTVVSNASCTTNCLSPVAKVLSESVGIVKGAMTTIHALTNDQTVTDVRHKDLRRARSGVENMIPTKTGAAKAVGLVLPELKGRLDGLAIRVPTVNVSLVDLSFQAARDTTVEEINALMKAVSEAGALKGVLGYNTLPLVSMDFNHTTEASHFDATLTKVVDGNMVKVFAWYDNEWGFSCQMLNTARRMFGLEVRPLK

SEQ ID NO: 65165 - protein, 269 aa, Neisseria gonorrhoeae
MIPLKIAIAGANGRMGRVLVEAVNNHPDTVLSGALEHSGSEALGLDAGYAVGLKTGIAISDDVDAVLAQSDVLIDFTRPEPTLKHLQKCVEKQVNIIIGTTGFDDAGKAAIRAAAEKTGIVFAANFSVGVNLTFHILDTVARVLNEGYDIEIIEGHHRHKVDAPSGTALRMGEVIAGALGRDLKQCAVYGREGHTGPRDPSTIGFATVRAGDIVGDHTALFATDGERVEITHKAGSRMTFAAGAVRAAVWVNGKTGLYDMQDVLGLNNR

SEQ ID NO: 65166 - protein, 384 aa, Neisseria gonorrhoeae
MVDKKSPLIAVSVGEASGDLLGAHLIRAIRKRCPQARLTGIGGELMKAEGFESLYDQERLAVRGFVEVVRRLPEILRIRRELVRDLLSLKPDVFVGIDAPDFNLGVAEKLKRAGIPTLHYVSPSVWAWRRERVGKIVHQVNRVLCLFPMEPQLYLDAGGRAEFVGHPMAQLMPLEDDRETARKTLGADVGIPVFALLPGSRVSEIDYMAPVFFQTALLLLERYPAARFLLPAATEATKRRLAEVLQRPEFAGLALTVTDRQSETVCRAADAVLVTSGTATLEVALCKRPMVISYKISPLTYAYVKRKIKVPHVGLPNILLGKEAVPELLQSEAKPEKLAAALADWYEHPDKVAALQQDFGALHLLLKKDTADLAARAVLEEAGC

SEQ ID NO: 65167 - protein, 419 aa, Neisseria gonorrhoeae
MHVSELQTLHISKLLELAEEHGIENANRFRKQDLVFAIVRQMMKKGEGFTCSGTLEILPDGFGFLRSADTSYLAGPDDIYVSPTQIRRFNLHTGDTIEGSVRVPKDNERYFALVRLDSINGDHPEVCRHKILFENLTPLFPTEQLKLERDLKSEENLTGRAIDLISPIGKGQRALLVAPPKIGKTVMLQNIAHAVTANYPEVELIVLLIDERPEEVTEMSRSVRGEVVSSTFDEPAQRHVQVAEMVLEKAKRMVEHKKDVVILLDSITRLARAYNTVVPASGKILTGGVDANALHRPKRFFGAARNVEEGGSLTIIATALVETGSRMDDVIYEEFKGTGNMELHLDRRMAEKRLFPAININKSGTRREELLVPNDQLQRMWLLRKFLHPMDEIEATEFLNGKIKASKNNDDFFELMRGK

SEQ ID NO: 65168 - protein, 273 aa, Neisseria gonorrhoeae
MSSPRQVFYISDRTGLTAENIGEALLNQFGNLSFKRHTHPFVDTPEKARAVVEKVNRSRQENGQRPIAFVSVVDDEIRRIIKGADAFQINFFETFLGLLEKELNTEATVSGQGHHSIGNTKRYDARMEAVNFSLNHDDGVSDKNLQEADVILMGVSRSGKTPTCLYLALQYGIRAANYPLIPDDLESADLPRMVKPYKDKLFGLTIQPERLQAIRQERRPNSAYARIDTCRSEVADAQSMFRRHGIPFANTTDKSVEELAVHILQACKLKRRF

SEQ ID NO: 65169 - protein, 288 aa, Neisseria gonorrhoeae
MPSEPGKNMIQHAGLGYRRDLAEDFLSLSENSPICFIEAAPENWLKMGGRARKQFDRVAERLPLALHGLSMSLGGQAPLDTDLIDGIKEMMCRYDCTFFSDHLSYCHDGGHLYDLLPLPFTEEMVHHTARRIREVQDRLGCRIAVENTSYYLHSPLAEMNEVEFLNAVAREADCGIHLDVNNIYVNAVNHGLLSPEAFLENVDAGRVCYIHIAGHDAETPELLIDTHGAAVLPTVWDLLELAYTKLPTIPPTLLERDFNFPPFAELEAEVAKIADYQTRAGKEYRRAA

SEQ ID NO: 65170 - protein, 511 aa, Neisseria gonorrhoeae
MEFDAKPVSDGIGVVKSCRLCVKPPRSAYFAISLFQELKMSIKNAVKLIEESEARFVDLRFTDTKGKQHHFTVPARIVLEDPEEWFENGPAFDGSSIGGWKGIEASDMQLRPDASTAFVDPFYDDVTVVITCDVIDPADGQGYDRDPRSIARRAEAYLKSSGIGDTAYFGPEPEFFVFDGVEFETDMHKTRYEITSESGAWASGLHMDGQNTGHRPAVKGGYAPVAPIDCGQDLRSAMVNILEGLGIEVEVHHSEVGTGSQMEIGTRFATLVKRADQTQDMKYVIQNVAHNFGKTATFMPKPIMGDNGSGMHVHQSIWKDGQNLFAGDGYAGLSDTALYYIGGIIKHAKALNAITNPSTNSYKRLVPHFEAPTKLAYSAKNRSASIRIPSVNSSKARRIEARFPDPTANPYLAFAALLMAGLDGIQNKIHPGDPADKNLYDLPPEEDALVPTVCASLEEALAALKADHEFLLRGGVFSKDWIDSYIAFKEEDVRRIRMAPHPLEFEMYYSL

SEQ ID NO: 65171 - protein, 631 aa, Neisseria gonorrhoeae
MTHMIYPKTYDVIVVGGGHAGTEAALAAARMGAQTLLLTHNIETLGQMSCNPSIGGIGKGHLVRELDALGGAMALATDKSGIQFRRLNASKGAAVRATRAQADRILYKASIREMLENQENLDLFQQAVEDVTLEGERISGVITAMGVEFKARAVVLTAGTFLSGKIHIGLENYEGGRAGDPAAKSLGGRLRELKLPQGRLKTGTPPRIDGRTIDFSQLTEQPGDTPVPVMSVRGNAEMHPRQVSCWITHTNTQTHDIIRSGFDRSPMFTGKIEGVGPRYCPSIEDKINRFADKDSHQIFLEPEGLTTHEYYPNGISTSLPFDIQIALVRSMKGLENAHILRPGYAIEYDYFDPRNLKASLETKTIEGLFFAGQINGTTGYEEAAAQGLLAGANAVQYVRGQDPLLLRREQAYLGVLVDDLITKGLNEPYRMFTSRAEYRLQLREDNADMRLTEDGYKIGLVGEAQWRMFNEKREAVEREIQRLKTTWYTPQKLAEDEQIRVFGQKLSREANLHDLLRRPNLDYAALMTLEGAMPSENLSAEVIEQVEIQVKYQGYIDRQNEEIDSRRDIETLKLPDGIDYGRVKGLSAEVQQKLNQHKPETVGQASRISGVTPAAVALLMVHLKRGFKDAK

SEQ ID NO: 65172 - protein, 279 aa, Neisseria gonorrhoeae
MTAPPLWNMTMHALPRYAVFGNPAAHSKSPQIHQQFALQEGVDIEYGRICADIGGFAQAVSTFFETGGCGANVTVPFKQEAFHLADEHSDRALAAGAVNTLVWLEDGRIRGDNTDGIGLANDITQVKNIAIEGKTILLLGAGGAVRGVIPVLKEHRPARIVIANRTRAKAEELARLFGIEAVPMADVNGGFDIIINGTSGGLSGQLPAVSPKIFRDCRLAYDMVYGEAAKPFLDFARQSGAKKTADGLGMLVGQAAASYALWRGFKPDIRPVIEHMKAL

SEQ ID NO: 65173 - protein, 194 aa, Neisseria gonorrhoeae
MHILTAGVDEAGRGPLVGSVFAAAVILPETFDLPGLTDSKKLSEKKRDALAEMIKEQAVAWHVAASTPEEIASLNILHATMLAMKRAVYGLAARPEKIFIDGNRIPEHLGIPAEAVVKGDSKIIEISAASVLAKTARDAEMYALAQRRPQYGFDKHKGYGTKQHLEALKQYGVLPEHRRDFAPVRNLLAQQALF

SEQ ID NO: 65174 - protein, 233 aa, Neisseria gonorrhoeae
MFRIVKWLIALPVGIFIFFNAYVYGNIITYRAVAPHRTAFMSMRMKQFEQEGRDVALDYRWVPYNRISTNLKKALIASEDVRFAGHGGFDWDGIQNAIRRNRNSGEVKAGGSTISQQLAKNLFLNESRNYLRKGEEAAITAMMEAVTDKNRIFELYLNSIEWHYGVFGAEAASRYFYKKPAADLTKQQAAKLTALVPAPLYYADHPKSKRLRNKTNIVLRRMGSAELPESDTD

SEQ ID NO: 65175 - protein, 367 aa, Neisseria gonorrhoeae
MEAEVINQLNNTLNDLEKRSEDIRVYMDYQGKKDRLEEVIGLSEDPELWNDPKRAQEIGKESKILEGIVLTLDNIASGIEDNRMLIEMAVEENDEEGFAAVKEDVAGLEKQMADLEFKRMFNQPADPNNCFIDITAGAGGTEAEDWAGMLFRMYSRYAERKGFKIEILEEDDGEIAGINRATIRVEGEYAYGLLRTETGVHRLVRYSPFDSNNKRHTSFASVFVYPEIDDSIEIEINPADLRIDTYRASGAGGQHINKTDSAVRITHEPTGIVVQCQNDRSQHANKAAAMEMLKSKLYELEMRKRNEEKQALEEGKSDVGWGSQIRSYVLDSSRIKDLRTGYEVGNTKAVLDGDLDGFIEASLKQGV

SEQ ID NO: 65176 - protein, 257 aa, Neisseria gonorrhoeae
MSANILAIANQKGGVGKTTTTVNLAASLASRGKRVLVVDLDPQGNATTGSGIDKAGLQSGVYQVLLGDADVQSAAVRSKEGGYGVLGANRALAGAEIELVQEIAREVRLKNALKAVAEDYDFILIDCPPSLTLLTLNGLVAAGGVIVPMLCEYYALEGISDLIATVRKIRQAVNPDLDITGIVRTMYDSRSRLVAEVSEQLRSHFGDLLFETAIPRNIRLAEAPSHGMPVMAYDAQAKGAKAYLALADELAARVSGK

SEQ ID NO: 65177 - protein, 207 aa, Neisseria gonorrhoeae
MERKERLRAGIAAMGPDISETAQDRLLAYVDLLKKWNKTYNLTALRDEEKMIVHHLLDSLTLLPYIEGAQTMLDVGSGGGQPGIPAAVCRPDVQITLLDANTKKTAFLRQAAIELGLDNVRVVSGRVEAVSDVRADVVTSRAFAELADFVSWTAHLLKDGGYWAAMKGVYPQGEIGRLPQDVCVEKVQRLDVPGLDAERHIVILSKR

SEQ ID NO: 65178 - protein, 409 aa, Neisseria gonorrhoeae
MSGVRFPSPAPIPSTDPPSGSLCFFTFPLQTASDMNSSQRKRLSGRWLNSYERYRHRRLIHAVRLGGTVLFATALARLLHLQHGEWIGMTVFVVLGMLQFQGAIYSKAVERMLGTVIGLGAGLGVLWLNQHYFHGNLLFYLTIGTASALAGWAAVGKNGYVPMLAGLTMCMLIGDNGSEWLDSGLMRAMNVLIGAAIAIAAAKLLPLKSTLMWRFMLADNLADCSKMIAEISNGRRMTRERLEQNMVKMRQINARMVKSRSHLAATSGESRISPSMMEAMQHAHRKIVNTTELLLTTAAKLQSPKLNGSEIRLLDRHFTLLQTDLQQTAALINGRHARRIRIDTAINPELEALAEHLHYQWQGFLWLSTNMRQEISALVILLQRTRRKWLDAHERQHLRQSLLETREHG

SEQ ID NO: 65179 - protein, 329 aa, Neisseria gonorrhoeae
MDMNLSIVVPIYNVESYLEACLNSIEPILSNENVELILVNDGSKDGSEDICYKYIDKISNTKHQTPNTKYIYQDNQGLSEARNTGIKNSNGKYIAFIDSDDFINCQVLLDFLGKDDSDMPDVVFLNAVKYDKGRVSYFGEDYQPEKILNQSKVEVLKGLCRFRKFPGSAWNKIIKRELIIREKLFFEKGIYSEDIEWSMRLFNAATTFSYLDGCYYYYRQGRKDSITGTVSEKGIKSLLYILEKNAKMEFNRDISSYLYSFLSYEYLVLLFIMTSKNIACDSDIKRRAYHLRFMLLKSNKLIYKLIFPIITLFGVDITGRILKAIRGNI

SEQ ID NO: 65180 - protein, 351 aa, Neisseria gonorrhoeae
MTILSDVKALGQQIWLDNLSRSLVQSGELAQMLKQGVCGVTSNPAIFQKAFAGDALYADEVAALKRQNLSPKQRYETMAVADVRAACDVCLAEHESTGGKTGFVSLEVSPELAKDAQGTVEEARRLHAAIARKNAMIKVPATDAGIDALETLVSDGISVNLTLLFSRAQTLKAYAAYARGIAKRLAAGQSVAHIQVVASFFISRVDSALDATLPDRLKGKTAIALAKAAYQDWEQYFTAPEFAALEAQGANRVQLLWASTGVKNPAYPDTLYVDSLIGVHTVNTVPDATLKAFIDHGTAKATLTESADEARARLAEIAALGIDVETLAARLQEDGLKQFEEAFEKLLAPLV

SEQ ID NO: 65181 - protein, 531 aa, Neisseria gonorrhoeae
MSQEILDQVRRRRTFAIISHPDAGKTTLTEKLLLFSGAIQSAGTVKGKKTGKFATSDWMDIEKQRGISVASSVMQFDYKDHTVNLLDTPGHQDFSEDTYRVLTAVDSALMVIDAAKGVEAQTIKLLNVCRLRDTPIVTFMNKYDREVRDSLELLDEVEDILQIRCAPVTWPIGMGKNFKGVYHILNDEIYLFEAGGERLPHEFDIIKGINNPELEQRFPLEIQQLRDEIELVQAASNEFNLDEFLAGELTPVFFGSAINNFGIQEILNSLIDWAPAPKPRDATMRMVGPDEPKFSGFIFKIQANMDPKHRDRIAFLRVCSGKFERGMKMKHLRINREIAASSVVTFMSHDRELAEEAYAGDIIGIPNHGNIQIGDSFSEGEQLAFTGIPFFAPELFRSVRIKNPLKIKQLQKGLQQLGEEGAVQVFKPMSGADLILGAVGVLQFEVVTSRLANEYGVEAVFDSASIWSARWVSCDDKKKLAEFEKANAGNLAIDAGGNLAYLAPNRVNLGLTQERWPDIVFHETREHSVKL

SEQ ID NO: 65182 - protein, 500 aa, Neisseria gonorrhoeae
MAKVLVVPVSAGLNTSAAAQAFAKALDAQVFQAVDATAETLLAQGKSDDWFDALVGKVAALDAANLVIEGIAPDADKIYLAGKNVELALSLDAAAVFAVRSDNTDADALAHQLNLAKQFFAAAPGVLEGFVVDGAAASVAEAAAEKTGLTFFGSSDALKDVSVLAGREAKRLSPAQFRYNLIDFARQAGKRIVLPEGAEPRTVQAAAICHEKGIARCVLLAKREEVEAVAKERGISLPDSLEIIDPASLVEQYVEPMCELRKSKGLTPEDARKQLQDTVVLGTMMMAQNDVDGLVSGAVHTTANTIRPALQLIKTAPGASLVSSVFFMLLPNQVLVFGDCAVNPNPTAQQLADIAIQSADSAKAFGIDPKVAMISYSTVNSGSGPDVDTVIEATKLAREKRPDLAIDGPLQYDAATVPGVGKSKAPGSPVAGQATVLVFPDLNTGNCTYKAVQRSANVLSVGPLLQGLRKPVNDLSRGALVEDIVFTIALTAVQAKQMEG

SEQ ID NO: 65183 - protein, 1389 aa, Neisseria gonorrhoeae
MTDTTPTDTDPTENGTRKMPSEHRPAPPAKKRRPLLKLSAALLSVLILAVCFLGWIAGTEAGLRFGLYQIPSWFGVNISSQNLKGTLLDGFDGDNWSIETEGADLKISRFRFAWKPSELMRRSLHITDISAGDIAIVTKPTPPKEERPPQGLPDSIDLPAAVYLDRFETGKISMGKTFDKQTVYLERLNAAYRYDRKGHRLDLKAADTPWSSSSGSASVGLKKPFALDTAIYTKGGFEGETIHSTARLSGSLKDVRAELTIDGGNIRLSGKSVIHPFAESLDKTLEEVLVKGFNINPSAFVPSLPDAGLNFDLTAIPSFSDGIALEGSLDLENTKAGFADRNGIPVRQVLGGFVIRQDGTVHIGNTSAALLGRGGIRLSGKIDTEKDILDLNIGINSVGAEDVLQTAFKGRLDGSIGIGGTTASPKISWQLGTGTARTDGSLAIASDPANEQRKLVFDTVNISAGEGSLTAQGYLELFKDRLLKLDIRSRAFDPSRIDPQFPAGNINGSIHLAGELAKEKFTGKMRFLPGTFNGVPIAGSADIVYESRHLPRAAVDLRLGRNIVKTDGGFGKKGDRLNLNITAPDLSRFGFGLAGSLNVRGHLSGDLDGGIRTFETDLSGTARNLHIGKAADIRSLDFTLKGSPGTSRPMRADIKGGRLSLSGGAAVVDTAGLTLEGTGAQHRIRTHAAMTLDGKPFKLDLDASGGINRELTRWKGSIGILDIGGAFNLKLQNRMTLEAGAEHVAASAANWQAMGGSLNLQHFSWDRKTGISAKGGARGLHIAELHNFFKPPFEHNLVLNGDWDVAYGHNARGYLNISRQSGDAVLPGGQALGLNAFSLKTRFQNDRIGILLDGGARFGRINADLGIGNAFGGNMANTPLGGRITASLPDLGALKPFLPAAAQNITGSLNASAQIGGRVGSPSVNAAVNGSSNYGKINGNITVGQSRSFDTAPLGGRLNLTVADAEAFRNFLPVGQTVKGSLNAAVTLGGSIADPHLGGSINGDKLYYRNQTQGIILDNGSLRSHIAGRKWVIDSLKFRHEGTAELSGTVSMENSVPDVDIGAVFDKYRILSRPNRRLTVSGNTRLRYSPQKGISVTGMIKTDQGLFGSQKSSMPSVGDDVVVLGEVKKEAAASLPVNMNLTLDLNDGIRFSGYGADVTIGGKLTLTAQPGGNVRGVGTVRVIKGRYKAYGQDLDITKGTVSFVGPLNDPNLNIRAERRLSPVGAGVEILGSLNSPRITLTANEPMSEKDKLSWLILNRAGSGSSGDNAALSAAAGALLAGQINDRIGLVDDLGFTSKRSRNAQTGELNPAEQVLTVGKQLTGKLYIGYEYGISSAEQSVKLIYRLTRAIQAVARIGSRSSGGELTYTIRFDRLFGSDKKDSAGNGKGK

SEQ ID NO: 65184 - protein, 185 aa, Neisseria gonorrhoeae
MINDIQKTAEGKMQRSVEVLKENLAKVRTGRAHTGLLDQVEVEYWGSMVPVSQVANVTLLDARTIGVKPFEGNMAAKVEKAIRDSNLGLNPAAVGDLIRVPMPMLTEERRKDLIKVVRGEAEEGRVSIRNVRRDANDHIKKLLKDKEISEDEARRGEEAVQKLTDKYIAEADKVLAAKEEDLMAV

SEQ ID NO: 65185 - protein, 248 aa, Neisseria gonorrhoeae
MKSSTQTILEHTAIPRHIAVIMDGNGRWAKKRFLPRIMGHKRGLDALENMVKHCAKLGVQYLTVFAFSTENWRRPEDEVSFLMGLFLQALQKQVRRLHENNMRLKILGSRERFNRQILQGIEEAEALTANNTGLTLSIAADYGGRWDILQAANKLIAEGVSEITEDTLAKHLMLGDAPEPDLFIRTGGETRISNFLLWQMAYAELYFTDILWPDFDETALDAAVASFQKRERRFGRTSEQLPIGQQRN

SEQ ID NO: 65186 - protein, 265 aa, Neisseria gonorrhoeae
MLKQRVITAMWLLPLMLGMLFYAPQWLWAAFCGLIALTALWEYARMAGLCKTETNHYLAATLVFGVVAYAGGWMLPNLVWYVVLAFWLAVMPLWLRFKWRLNGGWQVYAVGWLLLMPFWFALVSLRPHPDDALPLLAVMGLVWVADVCAYFSGKALGKHKIAPAISPGKSWEGAIGGAVCVAVYMTAVRSAGWLAFDTGWFDTVLIGLVLTVVSVCGDLLESWLKRAAGIKDSSNLLPGHGGVFDRTDSLIAVISVYAAIMSVLN

SEQ ID NO: 65187 - protein, 347 aa, Neisseria gonorrhoeae
MIPATCTLSQITARLGGEWRGEDISVTAVRPLADAQAEHISFLANPKYKAEVHDSSAGAIIVSAKAADGFEGRNLIVADDPYLYFAKVARLFSPVVKARGGIHPTAVVEPGATVPASCEIGANAYIGANTVLGEGCRILANAVVQHDCKLGDEVVLHPNAVVYYGCTLGRHVEIHSGAVIGADGFGLAFAGDSWFKIPQTGAVTLGDDVEIGSNTNIDRGAMSDTTVGNGTKIDNQVQIGHNCKIGSHTVIAAKTGISGSVTIGSYCIIGGGVGTVGHIEIADKTTIGGGTSVTHSITESGKHLAGIFPMSEHKEWARNAVYIHRLSEMNKRLKTLEQQLSDSKDTQ

SEQ ID NO: 65188 - protein, 458 aa, Neisseria gonorrhoeae
MHDKTWSGRFNEPVSELVKQYTASIGFDQRLAEWDIQGSLAHAQMLTRSGVLSENDLTDIRRGMSEILEEIRSGKIEWPLDLEDVHMNIERRLTDKIGDAGKRLHTGRSRNDQVATDIRLWLRDQITVIQNLIQNLQTALLDLAEQNAEAVMPGFTHLQVAQPVSFGHHMLAYVEMLGRDFERMTDCRKRVNRMPLGAAALAGTTYPIQREITAELLGFEQICQNSLDAVSDRDFAIEFTAAASLVMVHLSRLSEELILWMSPRFGFIDIADRFCTGSSIMPQKKNPDVPELVRGKSGRVIGHLIGLITLMKSQPLAYNKDNQEDKEPLFDTADTLIDTLRIYADMMRGVTVKPGNMRAAVMQGFATATDLADYLVKKGMPFRDAHEVVAQAVRHADEAGVDLSELPLEALQGFSKLISDDVYGVLTPEGSLNARNHLGGTAPEQVRLQVKRWREMSA

SEQ ID NO: 65189 - protein, 289 aa, Neisseria gonorrhoeae
MKPIKKAVFPVAGMGTRFLPATKANPKEMLPIVDKPLIQYAVEEAVEAGCTEMVFVTGRNKRSIEDHFDKAYELETKLEMRHKDKLLEHVRNILPPNITCLYIRQAEALGLGHAVLCARAAIGDEPFAVILADDLIDAPKGALKQMVEVYGRSGNSILGVETVEPSQTGSYGIVETEQLKQFQRITGIVEKPKPEDAPSNLAVVGRYILTPRIFDLLTGLPRGAGNEIQLTDGIAKLLDHEFVLAHPFEGTRYDCGSKLGYLEATVAYGLKHPETGEPFRRLLEKYRTE

SEQ ID NO: 65190 - protein, 199 aa, Neisseria gonorrhoeae
MSEKPEKIVLASGNAGKLKEFGNLFKPYGITVLPQSAFGIPECPEPYPTFVENALAKARHAAGHSGLPALADDSGICAAALNGAPGIHSARYAGSNPKSDTANNLKLAAELAGKADKSCSYVCVLVFVRHKDDPRPIIAEGIWHGQWHDTPLGQNGFGYDPYFYLPEHGKTAAELDSEVKNRESHRAQALADLIRKLAL

SEQ ID NO: 65191 - protein, 149 aa, Neisseria gonorrhoeae
MDVQLPIEAKDIQKLIPHRYPFLQLDRITAFEPMKTLTAIKNVTINEPQFQGHFPDLPVMPGVLIIEAMAQACGTLAILSEGGRKENEFFFFAGIDEARFKRQVIPGDQLVFEVELLTSRRGIGKFNAVAKVDGQVAVEAVIMCAKRVV

SEQ ID NO: 65192 - protein, 942 aa, Neisseria gonorrhoeae
LDKYSPAEIESKHYQNWESQGYFRPDMDLTKPSFSIQLPPPNVTGTLHMGHAFNQTIMDGLTRYYRMKGCNTAWIPGTDHAGIATQIVVERQLAAQNVSRHDLGREKFLEKVWEWKEVSGGTITQQMRRVGCSADWTREYFTMDGVRAETVTEVFVRLYEQGLIYRGKRLVNWDPVLGTAVSDLEVESMEEQGSMWHIRYPLADNPTEAVIVATTRPETLLGDAAVAVNPEDERYTHLIGKELILPLTGRTIPVIADEYVEKDFGTGCVKITPAHDFNDYEVGKRHDTRLINVFDLEAKVLANAEVFNFKGEAQPGFSLPEKYAGLDRFAARKQMVADLQEQGFLVEIKPHTLMTPKGDRTGSVIEPMLTSQWFVAMSATPNGGEPDNEFKGLSLADKAKKAVDSGAVRFIPENWVNTYNQWMNNIQDWCISRQLWWGHQIPAWYDEAGNVYVARNQAEAEKQAGKTGLTREEDVLDTWFSSALVPFSTLGWPSETDELKAFLPSNVLVTGYEIIFFWVARMIMMTTHFTGKVPFKAVYIHGIVRDHEGKKMSKSEGNVIDPVDLIDGIGLDKLLMKRTTGLRKPETAPKVEEATKKLFPEGIPSMGADALRFTMASYASLGRSVNFDFKRAEGYRNFCNKIWNATNFVLMNTENQDCGYGATAAEPRGHSFPDMWIIGRLNQTIEQVTQAYETYRFDLAAETLYSFVWNDYCDWYLELAKVQLQTGCASRQRATRHTLLRVLEAALRLLHPIIPFITEELWQTVAPMCDAKTADSIMLARFPETDGGEIVQTAFGQMTVLQDLIGAVRNLRGETGIQPNVKAPLFVESADDLADYLKYLPMMTRLTEARQVAALPESGDAPVAVCNGARLMLKVEIDKAAETARLSKEAEKLQKALDKLNAKLSKPGYTEKAPAHLVEKDKADLAELEDKMAKVQNQLAKL

SEQ ID NO: 65193 - protein, 655 aa, Neisseria gonorrhoeae
MGNTFKSILVWVALGIGLMAAFNALDGKKEDNGQIEYSQFIRQVNNGEVSGVNIEGSVVSGYLIKGERTDKSTFFTNAPLDDNLIQTLLNKNVRVKVTPEEKPSALTALFYSLLPVLLLIGAWFYFMRMQAGGGGKGGAFSFGKSRARLLDKDANKVTFADVAGCDEAKEEVQEIVDYLKAPNRYQSLGGRVPRGILLAGSPGTGKTLLAKAIAGEAGVPFFSISGSDFVEMFVGVGASRVRDMFEQAKKNAPCIIFIDEIDAVGRQRGAGLGGGNDEREQTLNQLLVEMDGFESNQTVIVIAATNRPDVLDPALQRPGRFDRQVVVPLPDIRGREQILNVHSKKVPLDESVDLLSLARGTPGFSGADLANLVNEAALFAGRRNKVKVDQSDFEDAKDKIYMGPERRSMVMHEDEKRATAYHESGHAIVAESLPFTDPVHKVTIMPRGRALGLTWQLPERDRISMYKDQMLSQLSILFGGRIAEDIFVGRISTGASNDFERATQMAREMVTRYGMSDKMGVMVYAENEGEVFLGRSVTRSQNISEKTQQDIDAEIRRILDEQYQVAYKILDENRDKMETMCKALMEWETIDRDQVLEIMAGKQPSPPKDYSHNLRENADAAEDNAPHAPTREKTEAPAPADTASTESGQQPENKA

SEQ ID NO: 65194 - protein, 265 aa, Neisseria gonorrhoeae
MDTAQKQRWAITLSYDGSRFYGWQKQAGGVPTVQAALETALARIAGESVATTVAGRTDTGVHATAQVVHFDTAAVRPAQAWIRGVNAHLPEGIAVLHARQVAPGFHARFDASGRHYRYLLESAPVRSPLLKNRAGWTHLELDIGPMRRAAALLVGEQDFSSFRAAGCQAKSPVKTIYRADLTQSAGLVRLDLHGNAFLHHMVRNIMGALVYVGSGRLSVEGFAALIQERSRLKAPPTFMPDGLYLTGVDYPGAYGIVRPQIPEWL

SEQ ID NO: 65195 - protein, 338 aa, Neisseria gonorrhoeae
MIGGLMQFPYRNVPASRMRRMRRDDFSRRLMREHMLTADDLIYPVFVLEGAAREEDVPSMPGVKRQSLDRLLFTAEEAVKLGIPMLALFPVVTANKTGRAQEAYNPEGLVPSTVRALRERFSELGIMTDVALDPYTVHGQDGLTDENGYVMNDETVEVLVKQALCHAEAGTQVVAPSDMMDGRIGAIREALEDAGHIHTRIMAYSAKYASAFYGPFRDAVGSSGNLGKADKKTYQMDPANTDEALHEVALDIQEGADMVMVKPGLPYLDVVRRVKDEFGVPTYAYQVSGEYAMLQAAVANGWLDGGKVVLESLLAFKRAGADGILTYYAIEAAKMLKR

SEQ ID NO: 65196 - protein, 257 aa, Neisseria gonorrhoeae
MNAIADVQSSRDLRNLPINQVGIKDLRFPITLKTAEGTQSTVARLTMTVYLPAEQKGTHMSRFVALMEQHTEVLDFAQLHRLTAEMVALLDSRAGKISVSFPFFRKKTAPVSGIRSLLDYDVSLTGEMKDGAYGHSMKVMIPVTSLCPCSKEISQYGAHNQRSHVTVSLTSDAEVGIEEVIDYVETQASCQLYGLLKRPDEKYVTEKAYENPKFVEDMVRDVATSLIADKRIKSFVVESENFESIHNHSAYAYIAYP

SEQ ID NO: 65197 - protein, 296 aa, Neisseria gonorrhoeae
MNSPFHNIGIVTRPNTPDIQDTAHTLITFLKQHGFTVYLDEVGVRECCIYTQDTDGCHIVNKTELGQYCDLVAVLGGDGTFLSAAREITPRAVPIIGINQGHLGFLTQIPREYMTDKLLPVLEGKYLAEERILIEAALIREGKTAERALALNDAVLSRGGAGQMIEFEVFVNQEFVYTQRSDGLIVSTPTGSTAYSLAAGGPIMQAGLHAFTLVPICPQSMTNRPIAIPDTSEIEILVTQGGDARVHFDGQSFIDVQNLDRIIIRRYHNPLRILHPTDYQYFKTLRQKLHWGEQLV

SEQ ID NO: 65198 - protein, 485 aa, Neisseria gonorrhoeae
MHKILPIAHVLSRLGMLFSFILLIPAALSYAFSDGAYTAFATTATVTLSGSCIVRLATLRFRRELRPRDGFTLVLMLWLAFAAMAAMPMYLYFPNMGFTDAFFESMSGLTTTGATVIPHVDGLAPSVNFWRHMLNWLGGMGIIVLAVAILPMLGVGGTQLFKAEIPGIDKESKMSPRISQVAKKLWFGYTLITILAAACLHFAGMGWFDAVCHALATLSLGGFSTHDASIGYYNSPLIEAVIIVFTIFGGINFASHFAALNSRSLKTYWKDEECRTMLLLLSGSILASALYLWHTGHYAGFGESLRYTAFNFVSIGLANGLSNTDFAQWPLLISLWMFFLANILASSGSTGGGIKTIRALVLFKFSLREMMVLLHPKAVRTVKISGKAIPDRLALTVMSFIFIYFMTVVLFSFLLMASGMEFTTAFTAVIACITNAGPGLGEVGPAGNYAGLDVMQKWICVTAMLLGRLEIFTVFILFTPAYWKK

SEQ ID NO: 65199 - protein, 122 aa, Neisseria gonorrhoeae
MRHRNGNRKLNRTSSHRAAMLRNMANSLLTHETIVTTLPKAKELRRVVEPLITLGKKPSLASRRLAFDRTRDRDVVVKLFGDLGPRFTARNGGYVRVLKYGFRKGDNAPLALVELVDKPAAE

SEQ ID NO: 65200 - protein, 328 aa, Neisseria gonorrhoeae
MQNSTTEFLKPRQIDVNTFSATRAKVSMQPFERGFGHTLGNALRRILLSSMNGFAPTEVAIAGVLHEYSTVGGVQEDVVDILLNIKGIVFKLHGRSQVQLVLKKSGSGVVSAGDIELPHDVEILNPGHVICHLADNGQIEMEIKVEQGRGYQSVSGRQVVRDENRQIGAIQLDASFSPISRVSFEVEPARVEQRTDLDKLVLDIETDGSIDPEEAVRSAARILIDQMSIFADLQGTPVEEVEEKSPPIDPVLLHPVDDLELTVRSANCLKAEDIYYIGDLIQRTETELLKTPNLGRKSLNEIKEVLASKGLTLGSKLEAWPPVGLEKP

SEQ ID NO: 65201 - protein, 206 aa, Neisseria gonorrhoeae
MARYIGPKCKLARREGTDLFLKSARRSLDSKCKIDSAPGQHGAKKPRLSDYGLQLREKQKIRRIYGVLERQFRRYFAEADRRKGSTGELLLQLLESRLDNVVYRMGFGSTRAEARQLVSHKAIVVNGQVVNIPSFQVKAGDVVSVREKAKKQVRIQEALGLATQIGLPGWVSVDADKLEGVFKNMPDRSELTGDINEQLVVEFYSK

SEQ ID NO: 65202 - protein, 239 aa, Neisseria gonorrhoeae
MTQQIKYKRVLLKLSGESLMGSDPFGINHDTIVQTVGEIAEIVKMGVQVGIVVGGGNIFRGVSAQAGSMDRATADYMGMMATVMNALALKDAFETLGIKARVQSALSMQQIAETYARPKAIQYLEEGKVVIFAAGTGNPFFTTDTAAALRGAEMNCDVMLKATNVDGVYTADPKKDPSATRYETITFDEALNKNLKVMDATAFALCRERKLNIVVFGIAKQGSLKRVITGEDEGTLVHC

SEQ ID NO: 65203 - protein, 131 aa, Neisseria gonorrhoeae
MAKANTASRVRKKVRKTVSEGIVHVHASFNNTIITITDRQGNALSWATSGGAGFKGSRKSTPFAAQVAAEAAGKVAQEYGVKNLEVRIKGPGPGRESSVRALNALGFKITSITDVTPLPHNGCRPPKKRRI

SEQ ID NO: 65204 - protein, 284 aa, Neisseria gonorrhoeae
MAEITAKMVADLRAATGLGMMECKKALVEAEGNFDKAEEILRIKSGAKAGKLAGRTAAEGVLAYAINGNVGALVEVNCETDFVAKDAGFVEFANFVAKTAAEKKPASVEELSELVESERKAIIAKLGENMSVRRFQVIDTANQLVAYIHGALATEGVLVEYKGSEDVARKIGMHIVAAKPQCVSEAEVDAETVEKERHIYTEQAIASGKPADIAAKMVEGRIRKFLAEITLNGQAFVMNPDQTVAQFAKENDTEVVSFIRYKVGDGIEKAVVDYAAEVAAAAKV

SEQ ID NO: 65205 - protein, 120 aa, Neisseria gonorrhoeae
MARIAGVNIPNNAHIVIGLQAIYGIGATRAKLICEAANIAPDTKAKDLDETQLDALRDQVAKYEVEGDLRREVTMSIKRLMDMGCYRGFRHRRGLPCRGQRTRTNARTRKGPRKAIAGKK

SEQ ID NO: 65206 - protein, 242 aa, Neisseria gonorrhoeae
MSQITMRQMIEAGVHFGHQTRFWNPKMAQYIFGARNKIHIVNLEKTLPMFQEAQEAVRRLVANKGTVLFVGTKRQARDIIREEATRAGMPFVDHRWLGGMLTNYKTVKQSIKRLEEKTAALENAAESGFSKKEILEMQRDVEKLERSLGGIKNMKGLPDAIFVIDTGYQKGTLVEAEKLGIPVIAVVDTNNSPDGVKYVIPGNDDSAKAIRLYCRGIADAVLEGKNQALQETVAAAQETAAE

SEQ ID NO: 65207 - protein, 72 aa, Neisseria gonorrhoeae
MAKEDTIQMQGEILETLPNATFKVKLENDHIVLGHISGKMRMHYIRISPGDKVTVELTPYDLTRARIVFRAR

SEQ ID NO: 65208 - protein, 436 aa, Neisseria gonorrhoeae
MANQQTSSGSSKFGDLKKRLLFLFGALIVFRIGAHIPVPGVDAVALAKLYESAGNGILGILNMFSGGSLERFSIFAIGIMPYISASIIVQLASEILPSLKALKKEGEAGRKVITKYTRYGTVLLAILQSLGVASFVFQQGIVVTSSFEFHVSTVVSLVTGTMFLMWLGEQITERGIGNGISLIITAGIASGIPSGIAKLVTLTNQGSMSMLTALLIVFGALLLIYLVVYFESAQRKIPIHYAKRQFNGRAGSQSTHMPFKLNMAGVIPPIFASSIILFPSTLLGWFGSADTNSVLHKIAGLLQHGQLLYMALFAATVIFFCYFYTALVFSPKEMAENLKKSGAFVPGIRPGEQTSRYLEKVVLRLTLFGAFYITTICLIPEFLTTILNVPFYLGGTSLLILVVVTMDFSTQINSYRLTQQYDKLMTRSEMKSFSRK

SEQ ID NO: 65209 - protein, 346 aa, Neisseria gonorrhoeae
MQPIRYRTDLTPYNTFGLHAQARAFIALKHADELRDIVRLPEFDRDTVLWLGGGSNILLMQDYDGLVVHMENKGIREIARSDGMVLIEAQAGEIWHDFVLHTVALGLSGLENLSLIPGTVGASPVQNIGAYGVEAKDVIHSVRCFDLDTETFVTLSNADCRFAYRESLFKQEGKGRYVIVSVVFALKTHFVPNLGYGDLAAKVAELSAGREATAKDVSDAVSAIRNSKLPDPKVLGNVGSFFKNPVVSAEKAATLLQRHPDMPRYPQPDGSVKLAAGWLIDQCRLKGFQIGGAAVHDKQALVLVNKNNASANDVRQLAQHIKFTVFARFQVELHAEPNWLPTSFSL

SEQ ID NO: 65210 - protein, 144 aa, Neisseria gonorrhoeae
MFLNTIQPAVGATHAGRRVGRGIGSGLGKTGGRGHKGQKSRSGGFHKVGFEGGQMPLQRRLPKRGFKSLTVSANAQLRLSELESIAVNEIDILVLKQAGLIASTVSNVKVIASGEISKAVALKGIKVTKGARAAIEDVGGKIEM

SEQ ID NO: 65211 - protein, 823 aa, Neisseria gonorrhoeae
MNPTAQRIHELTDLLNRYAYEYYTLDAPSIPDAEYDRLFRELEALERNHPELKLPDSPTQRVGGEPLAGFAEVRHEVPMLSLTNAFSPQDENGVFDHAEMYAFDQRVRDGLDGGNPEYVIEPKFDGLAISLLYRDGVLVQAATRGDGTTGEDVTRNVKTVSNIPLRLHGENVPELIEVRGEVLMLKADFAALNQRQTENGQKPFANPRNAAAGSLRQLDSRITAQRKLHFFPYSVARQQGGLIAEEHIQELAYFQALGFSLPNGNFGCFKNIGEVLAFYEHMQQKRPELPYEIDGTVVKVNSLAQQHELGFISRAPRWAVAHKFPAEEALTIVEAIDVQIGRTGAVTPVARLQPVFVGGVTVTNATLHNQDEVSRKDVRVGDTVVVRRAGDVIPEVVRVIFERRPMQETAVAVSDGIGHQQDDLFAETPSAKQTESVPLHKPYRLPARCPICRSEIEREEGEAVARCSGGMLCQAQRAQGLIHFASRKAMDIDGLGEKQIEQLVAQDLVRHFADLYRIDIPTLQKMKETADKGSSENENGDAETVSGDLSKYNTQNGKKQPTKWAQNILAGIESGKTPELARFLFALGIRHVGERTAKTLAQAFGTLERVRRAPEPVLACLPDIGTVVARSIAHFFAQAEQQAMIDELLAAGVAPQAQAVSLPAAQYAGPQRWITRLPGFKISENKAQALWELAGQSIEGLQNDKALPADWQAWRSKAQNTALLENLKTFFAQMPSEDEAAQGSDGINKAVAGKTFVLTGTLPTFKRDQAQALIEAAGGKVSGSVSKKTDYVVAGETAGSKLEKANALGVSVLSEAELLTLLC

SEQ ID NO: 65212 - protein, 432 aa, Neisseria gonorrhoeae
MAKNVVVIGAQWGDEGKGKIVDWLAEEAGGVVRFQGGHNAGHTLVVGGKKTILRLIPSGILHEGLDCFIGSGVVVSPEALLGEIDELNAAGVKNVEGRLKIAPTCPLILPYHIALDQAREASRGKGKIGTTGRGIGPAYEDKVARRAIRAADLLHPEKLREKLDAVLAYYNVQLQYLHNAGPVKAEDVMAVIEKVAPRIAPMIADVSRVLNEKNKNGEKLLFEGAQGALLDIDYGTYPFVTSSNCLAGAASAGAGVGPQMLDYVLGIVKAYTTRVGSGPFPTELFDEVGAGLAERGHEFGSVTGRARRCGWFDAAALKRSIQINGISGMCITKLDVMDGVETINICVGYELPGGGKTDILPCGSDAVETCKPIYETMPGWRESTVGVKSYDALPANAKAYLKRIEEVCGAPVAIVSTGPDREETIVLHHPFA

SEQ ID NO: 65213 - protein, 215 aa, Neisseria gonorrhoeae
MKALLLGAPGAGKGTQAQFITAAFGIPQISTGDMLRAAIKAGTPLGLEAKKIIDEGGLVRDDIIIGMVKERIAQDDCKNGFLFDGFPRTLAQAEAMVEAGVGLDAVVEIDVSDSVIVDRMSGRRVHLASGRTYHVTYNPPKTEGKDDVTGEDLIQRDDDKEETVKKRLAVYHEQTEVLVDFYSKLEGEHAPKYIKVDGTQAVEAVKAEVLGALGK

SEQ ID NO: 65214 - protein, 206 aa, Neisseria gonorrhoeae
MKPQFITLDGIDGAGKSTNLAVIKAWFERRGLPVLFTREPGGTPVGEALREILLNPETKAGLRAETLMMFAARMQHIEEVILPALSDGIHVVSDRFTDATFAYQGGGRGMPSEDIEILEHWVQGGLRPDLTLLLDVPLEVSMARIGQAREKDRFEQEQADFFMRVRGVYLDRAAACPERYAVIDSNRSLDEVRNSIEKVLDGHFGC

SEQ ID NO: 65215 - protein, 193 aa, Neisseria gonorrhoeae
MRNEEKRALRRELRGRRSQMGRDVRAAAAVKINRLLKRYIKRGRKIGVYWPMGKELRLGGFVRAAQKRGAKLYLPYIEPHTRRMWFTPYPERGMERERKRGRAKLHVPQFAGRKIRVHGLSVLLVPLVGIDREGYRLGQAGGYYDATLSAMKYRLQAKTVGVGFACQLVDRLPREAHDLPLDGFVSEAGILCF

SEQ ID NO: 65216 - protein, 172 aa, Neisseria gonorrhoeae
MAKHEIEERGDGLIEKMVAVNRVTKVVKGGRIMAFSALTVVGDGDGRIGMGKGKSKEVPVAVQKAMDQARRSMIKVPLKNGTIHHEVIGRHGATKVFMQPAKEGSGVKAGGPMRLVFDAMGIHNISAKVHGSTNPYNIVRATLDGLSKLHTPADIAAKRGLTVEDILGVNHG

SEQ ID NO: 65217 - protein, 488 aa, Neisseria gonorrhoeae
MAEATDVVLVGGGIMSATLGVLLKELEPSWEITLIERLEDVALESSNAWNNAGTGHSALCELNYAPLGADGVINPARALNIAEQFHVSRQFWATLVAEGKLEDNSFINAVPHMSLVMNEDHCRYLQKRYDVFKTQKLFENMEFSTDRNKISDWAPLIMRGRDENQPVAANYSAEGTDVDFGRLTRQMVKYLQGKGVKTEFNRHVEDIKRESDGAWVLKTADTRNPDWQLTLRTRFLFLGAGGGALTLLQKSGIPEGKGYGGLPVSGLFFRNSNPETAEQHNAKVYGQASVGAPPMSVPHLDTRNVDGKRHLMFGPYAGFRSNFLKQGSFMDLPLSIHMDNLYPMLRAGWANMPLTKYLLGELRKTKEERFASLLEYYPEANPDDWELITAGQRVQIIKKDSEKGGVLQFGTEIVAHADGSLAALLGASPGASTAVPLMIRLMHQCFPERAPSWEGRLKELVPGYGIKLNENPERADEIIAYTAKVLDI

SEQ ID NO: 65218 - protein, 117 aa, Neisseria gonorrhoeae
MDKHTTRLRRARKTRARIADLKMVRLCVFRSNNHIYAQVISAEGDKVLAQASTLEAEVRGSLKSGSNVEAAAIVGKRIAEKAKAAGVEKVAFDRSGFQYHGRVKALAEAARENGLSF

SEQ ID NO: 65219 - protein, 177 aa, Neisseria gonorrhoeae
MSRVAKNPVTVPAGVEVKFGTEALVIKGKNGELSFPLHSDVAIEFNDGKLTFVANNSSKQANAMSGTARALVSNMVKGVSEGFEKKLQLMGVGYRAQAQGKILNLSLGFSHPIVYEMPEGVSVQTPSQTEIVLTGSDKQVVGQVASEIRAFRAPEPYKGKGVRYVGEVVVMKEAKKK

SEQ ID NO: 65220 - protein, 130 aa, Neisseria gonorrhoeae
MSMHDPISDMLTRIRNAQRANKAAVAMPSSKLKCAIAKVLKEEGYIEDFAVSSDVKSILEIQLKYYAGRPVIEQIKRVSRPGLRIYKASSEIPSVMNGLGIAIVSTSKGVMTDRKARSQGVGGELLCIVA

SEQ ID NO: 65221 - protein, 101 aa, Neisseria gonorrhoeae
MAKKALINRDLKRQALAKKYAAKRAAIKAVINDSNATEEERFEARLRFQSIPRNAAPVRQRRRCALTGRPRGTFRKFGLGRIKIREIAMRGEIPGVVKASW

SEQ ID NO: 65222 - protein, 179 aa, Neisseria gonorrhoeae
MARLREFYKETVVPELVKQFGYKSVMEVPRIEKITLNMGVGEAVADKKVMEHAVSDLERIAGQRPVVTVARKSIAGFKIRDNYPVGCKVTLRRDQMFEFLDRLITIALPRVRDFRGVSGKSFDGRGNYNMGVREQIIFPEIEYDKIDALRGLNITITTTAKTDEEAKALLSLFKFPFKG

SEQ ID NO: 65223 - protein, 107 aa, Neisseria gonorrhoeae
MNKIIKGDRVVVIAGKDKGKQGQVVRVLGGKVVVEGVNVVKRHQKPNPMRGIKGGIITKEMPLDISNIAILNPETNKADRVGIKLIENEGKVKRVRFFKSNGSIIGA

SEQ ID NO: 65224 - protein, 320 aa, Neisseria gonorrhoeae
MPAKFQQETLKSRFAQAKVLVVGDVMLDRYWFGDVSRISPEAPVPVAKIGRIDQRAGGAANVARNIASLGGRAGLLSVTGDDEAAAALDALMVQDGVASYLMRDKQIATTVKLRVVARNQQLIRLDFEEHPNREVLEQIKRKYREILPEYDAIIFSDYGKGGLSHISDMIDWAKHVGKTVLIDPKGDDYEKYVGATLITPNCAELKEVVGSWKNEGDLTEKAQNLRRHLDLTAVLLTRSEEGMTLFSEGEPIYQPTRAQEVYDVSGAGDTVIAGMGLGLAAGCTMPEAMYLANTAAGVVVAKLGTAVCSFAELVEALDGQ

SEQ ID NO: 65225 - protein, 122 aa, Neisseria gonorrhoeae
MIQMQTILDVADNSGARRVMCIKVLGGSKRRYASVGDIIKVAVKDAVPRGRVKKGDVYNAVVVRTAKGVRRPDGALIKFDNNAAVLLNNKLEPLGTRIFGPVTRELRTERFMKIVSLAPEVL

SEQ ID NO: 65226 - protein, 138 aa, Neisseria gonorrhoeae
MLQPTRLKYRKQQKGRNTGIATRGNKVSFGEFGLKAVGRGRLTARQIEAARRAMTRHIKRGGRIWIRVFPDKPITEKPIQVRMGGGKGNVEYYIAEIKPGKVLYEMDGVPEELAREAFELAAAKLPIPTTFVVRQVGQ

SEQ ID NO: 65227 - protein, 514 aa, Neisseria gonorrhoeae
MMTEMQQRAQLHRQIWKIADEVRGAVDGWDFKQYVLGTLFYRFISENFTDYMQAGDSSIDYAAMPDSIITPEIKDDAVKVKGYFIYPGQLFCNIAAEAHQNEELNTKLKEIFTAIESSASGYPSEQGIKGLFDDFDTTSSRLGSTVADKNKRLAAVLKGVAELDFGNFEDHRIDLFGDAYEYLISNYAANAGKSGGEFFTPQSVSKLIARLAVHGQEKVNKIYDPACGSGSLLLQAKKQFDEHIIEEGFFGQEINHTTYNLARMNMFLHNVNYNKFHIELGDTLTNPKLKDSKPFDAVVSNPPYSIDWIGSDDPTLINDDRFAPAGVLAPKSKADFAFILHALNYLSGRGRAAIVSFPGIFYRGGAEQKIRQYLVEGNYVETVIALAPNLFYGTCIAVNILVLSKHKDNTDIQFIDASGFFKKETNNNVLTEEHIAEIVKLFADKADVPHIAQNAAQQTVKDNGYNLAVSSYVEAEDTREVIDIRQLNAEISETVAKIERLRREIDEVIAEIET

SEQ ID NO: 65228 - protein, 230 aa, Neisseria gonorrhoeae
MGQKINPTGFRLAVTKDWASKWFAKSTDFSTVLKQDIDVRNYLRQKLANASVGRVIIERPAKSARITIHSARPGVVIGKKGEDIEVLKRDLQVLMGVPIHVNIEEIRRPELDAQIIADGIAQQLEKRVQFRRAMKRAMQNAMRSGAKGIKIMTSGRLNGADIARSEWYREGRVPLHTLRANVDYATSEAHTTYGVLGLKVWVYTEGNIKSSKPEHESKQRKAGRRNAAAN

SEQ ID NO: 65229 - protein, 1032 aa, Neisseria gonorrhoeae
MNLETKPIAETPNFIVLDQYEKIEQSGSYQSENRLEAELIADLQNQGYEYRKDLNSQSRLLENLRAQLQRLNDVAFSDGEWARFLTEYLDRPAENITDKTRKIHDDHIYDFAFDDGRLKNIYLLDKKNLARNHVQLINQFEQTGTHANRYDVTVLVNGLPLVQIELKKRGVAVREAFNQVHRYSKESFNSGNSLFKFLQIFVISNGTDTRYFANTTKRDKNSFDFTMNWARSDNHPIKDLKDFTATFLQKSVLLSVLLHYSVFDANDTLLIMRPYQIAAAERILWKINSSAQAKNWSGPESGGYVWHTTGSGKTLTGFKAARLATESAFIDKVFFVVDRKDLDYQTMKEYQRFSPDSVNGSESTAGLKRNLEKDGNKIIVTTIQKLNNLMKSEDNLPVYHRQVVFIFDECHRSQFGEAQKNLKKKFKKFCQFGFTGTPIFPENALGAETTAGVFGRELHSYVITDAIRDEKVLKFKVDYNDVRPQFKAVEAEQDEKELSAAENRQALLHPERIREITQYILSRFRQKTHRLNAGGKGFNAMFAVSSVDAAKCYYEAFKTQQAGSLHPLKTATIFSFAANEEQNAVGEIVDETFEPEAMDSSAKEFLQAAINDYNACFKTNFGTDSKAFQNYYRDLAKRVKNREVDLLIVVGMFLTGFDAPTLNTLFVDKNLRYHGLMQAFSRTNRIYDATKTFGNIVCFRDLEQATIDAITLFGDKNTKNVVLEKSYEEYMNGYTDSQTGEARRGYLDVAKELHERFPDPDKIETEKDKKDFAKLFGEYLRAENVLQNYDEFAALRELQNVDAADEDAMKAFQEKYYLSDEDVQEMRKVPMPSERAVQDYRSAYNDIRDWLRRQKAGEQKEQSKIDWDDVVFEVDLLKSQEINLDYILQLVFEHHKKIKGKAELVEEIRRIIRASIGHRAKEGLIVDFINDTDLDKVPDVPAILETFYTYAQEVMRHEAAGLIAAEGLNETAAKRYLTGSLKRGYASENGTELTETLPKMSPLNPQYLTKKQSVFQKIAAFVEKFAGIGADI

SEQ ID NO: 65230 - protein, 290 aa, Neisseria gonorrhoeae
MSWLDKILPPKIKNRGKDGASNVPEGLWRKCPSCSATVYSTELQQNNQVCPKCNHHNPLSARQRLNLLLDEEGREEVAGNVKPTDPLKFKDSKKYPDRLSAARKLTGEDDALVVMKGMMNGLPVVVAAFEFRFIGGSMGSVVGERFVQGVRRAVADNCPFVCVAASGGARMQEGVNSLMQMTKTSAALHLLTEKRLPFISVLTDPTMGGVSASFAFLGDVVLAEPNALIGFAGPRVIEQTVRETLPEGFQRAEFLLEKGAIDQIVDRRDMKRRISDLITLLCRQDKVSAT

SEQ ID NO: 65231 - protein, 291 aa, Neisseria gonorrhoeae
MFQKHLQKASDSVVGGTLYVVATPIGNLADITLRALAVLQKADIICAEDTRVTAQLLSAYGIQGRLVSVREHNERQMADKVIGFLSDGLVVAQVSDAGTPAVCDPGAKLARRVREAGFKVVPVVGASAVMAALSVAGVAESDFYFNGFVPPKSGERRKLFAKWVRAAFPVVMFETPHRIGATLADMAELFPERRLMLAREITKTFETFLSGTVGEIQTALAADGNQSRGEMVLVLYPAQDEKHEGLSESAQNAMKILAAELPTKQAAELAAKITGEGKKALYDLALSWKNK

SEQ ID NO: 65232 - protein, 384 aa, Neisseria gonorrhoeae
MKFIDEAKIEVAAGKGGNGATSFRREKFVPRGGPDGGDGGKGGSVWAEADENTNTLVEYRFVKRYQAKNGEKGHGSDRYGAGADDIVLKMPVGTLIRDLDTDEIVADLTYHGQRVCLAKGGKGGLGNIHFKSSVNRAPKQSTPGEEGETRSLQLELKVLADVGLLGMPNAGKSTLITAVSAARPKIANYPFTTLHPNLGVVRIDENHSFVMADIPGLIEGAAEGAGLGHRFLKHLSRTGLLLHVVDLAPFDETVNPAEEALAIINELRKYDEELYGKPRWLVLNKLDMLDEEEARARTAAFLEAVGWDYPEPDDRFQFDMETPRLFQISALTHQGTQELVHQINQYLAEKKRIEAEKAEAEKAAANVEIIEQQPKTDTGVFKPE

SEQ ID NO: 65233 - protein, 473 aa, Neisseria gonorrhoeae
MTAIYNTLTRQKEPFAPIDPENVRMYVCGMTVYDYCHLGHARVMVVFDMIARWLRECGYPLTYVRNITDIDDKIIARAAENGETIGELNARFIQAMHEDADALGVLRPDIEPKATENIPQMIAMIETLIQNGKAYPAANGDVYYAVREFAAYGQLSGKSLDDLRAGERVEVDGFKRDPLDFVLWKAAKAGEPAWESPWGNGRPGWHIECSAMSENLFGDTFDIHGGGADLQFPHHENEIAQSVGASGHTCGHDHAQTHHGQSIASHVKYWLHNGFIRVDGEKMSKSLGNFFTIREVLKQYDPEVVRFFILRAHYRSPLNYSDAHLDDAKGALTRLYTTLKNTPAAEFDLSENANGYTRRFYAAMNDDFGTVEAVAVLFELAGEVNKTNDAHLAGCLKALGGIIGLLQRNPIEFLQGGAVSDGLSNEEIEDLIARRKQARADKNWAESDRIRDLLNEHKIILEDSAGGTTWRRG

SEQ ID NO: 65234 - protein, 168 aa, Neisseria gonorrhoeae
MFEQEDEWISKTQMKKQMNGLQDLGMELTRLSNDTLKKIGLDEDLYEAVVTYKKITSNGALKRQAQFIGRLMRDTDPAPIEAFLAKLRGDDAAHNAFLQRVEQARVRLLADEGALTQFMSDFPNAGAGRLRTLVRNTKKEQEQDKPPKNFRALFQELKTVMENGGAEI

SEQ ID NO: 65235 - protein, 566 aa, Neisseria gonorrhoeae
MSVKIQTRPVNTDVFNHLLAAGADPLIARLCASRGVQSPAELDDKLASLLPYQSLTNCEAAAGRLADAVERKEKILIVADYDADGATACAVGLDGLAAMGAKVDFLVPNRFEHGYGLTPELAEIAAAQGVDLLITVDNGIASIAGVARAQALGLDVIVTDHHLPADTVPDCIIVNPNQKGCGFPSKSLAGVGVIFYVLTALRAELRRRNYFSDGIKEPNLGGLLDLVALGTVADVVPLDHNNRILVSQGLKRMRSGKMRPGIRALFEVARRDWRKAQPFDMGFALGPRINAAGRLDDMSVGIACLLARDDSEAQELAARLNNLNIERREIEQSMLRDALNAFPETLPSGQTTLVAYRDDFHQGVVGIVASRLKDRFYRPTIVFAPADNGEVRGSGRSIPNLHLRDALDLVSKRHPDLILKFGGHAMAAGLSILEHNIPAFQTAFEEAVREMVCEDDLSQTYITDGSLPACDITLEQAQNLACHVWGQGFAPPSFTDEFHVVRQQPLGAEGKHKKAWLQKDGCEFEAMFWRCSEDIPEYIRTVYRPVANEWRNNLELQLYIDYWEAA

SEQ ID NO: 65236 - protein, 445 aa, Neisseria gonorrhoeae
MLKKWLNKMLPSGRSSKKAESKTVIPAERHNISAEMLSFAAENVIRRLKGAGFQAYVVGGAVRDLLLGIEPKDFDVATDATPEQVHKLFRRSRIIGRRFQIVHVMNGAEIIEVTTFRGGAKVHQNAHGRIMKDNTYGSIEEDAMRRDFTCNALYYDPEKEEILDFHNGIADVAARRLVMIGNAAERYQEDPVRILRAIRLSGKLGFELSEETAAPIAESICRLKHEPVARLFDEIMKLLFSGHARECLKRLNGFDIPDIHPLLNALRVSDGIAGKMTALALKNTDERLRADKSVSVGFVLAALMWPELDRHWKSNLQQGLKPTPALSDAINTMRETVERGWGVPQRFSATMREIWMFQPQFENRKGARPHKLFAQARFRAAYDFLLLRAETGNADRALAEWWTAFQTASAEQRTEMTKNEAAARHEKNEGQAKKRRRRGANPSRR

SEQ ID NO: 65237 - protein, 334 aa, Neisseria gonorrhoeae
  MISC_FEATURE (325)..(325): X=any amino acid
MAQHVFLPPLSVYRHRPHPLGARRFESLQTLHPRKRTARPDSRPLHELCRHTCPKNFRKIRHSLRFNRTQQHHHARSDPSPPMAADGKSSGARLRTSRRQPPFRTRPATQIRLRMAVPPQTYRVEYSSKHLNKKKKINKPHFVFCTVSHLRRLKGHDVLLTAFARALAQCPQLRLNIGGSGQEEQRLKQQAADLGIAHAVTFLGALQPEAILDLMRNSDAFILASRTETFGVVYIEALSQGLPVIAIHCGGAESIVSDGNGYLVSVDDADVLALLKIYEHHADFSAEQLRTDCLATFGEDAVIGRLIAVFRQAARNTGAKTPEKXIKMTQNNLR

SEQ ID NO: 65238 - protein, 344 aa, Neisseria gonorrhoeae
MQTLTIIRPDDMHLHLRDGDALKAVAPYTARQMGRAVIMPNLKPPVVSVADALAYKARIMAALPEGSAFEPLMTLYLTDQATPELVREAKAAGIVAFKLYPAGATTNSDSGVTDLFKLIPVLEEMAKQGILFLVHGEVTDPEIDIFDREAAFIGRVMKPVLAQVPNLKVVFEHITTAEAARLVLEAGDNVAATVTPQHLLLNRNDLLVGGVRPHHFCLPVLKRETHRQALVAAVTGEKAHKFFLGTDSAPHAKSAKENACGCAGMFSAMTAIELYAEVFEKAGALDKLEAFASKNGARFYGIPENADTITLVKQSQTVPASVPYGDGELVPMRAGGEIGWTVQY

SEQ ID NO: 65239 - protein, 141 aa, Neisseria gonorrhoeae
MKTARRRSRELAVQAVYQSLINRTAAPEIAKNIREMSDFAKADEELFNKLFFGTQTNAADYIQKIRPLLDRDEKDLNPIERAVLLTACHELSAMPETPYPVIINEAIEVTKTFGGTDGHKFVNGILDKLAAQIRPDEPKRR

SEQ ID NO: 65240 - protein, 158 aa, Neisseria gonorrhoeae
MNTIAPNLDGKHLRIGIVQARFTNEIGSQMLKVCCRTLQELGVADENITVATVPGALEIPIALMNFASSEKFDALIAIGVVIRGETYHFELVANESGAGIGRVALDYNIPIANAVLTTENDAQAIERIGEKASDAAKVAVECANLVNLLLEEQFEDEE

SEQ ID NO: 65241 - protein, 371 aa, Neisseria gonorrhoeae
MKVGFVGWRGMVGSVLMQRMKEENDFAHIPEAFFFTSSNVGGAAPDFGQAAKTLLDANDVAELAKMDIIVTCQGGDYTKSVFQALRDSGWNGYWIDAASSLRMKDDAIIALDPVNRNVIDNGLKNGVKNYIGGNCTVSLMLMALGGLFQNDLVEWATSMTYQAASGAGAKNMRELISGMGAIHAQVADELADPSSAILDIDRKVSDFLRSEDYPKANFGVPLAGSLIPWIDVDLGNGQSKEEWKGGVETNKILGRSGNPTVIDGLCVRIGAMRCHSQAITLKLKKDLPVSEIEAILAGANDWVKVVPNEKEAGIRELTPAKVTGTLSVPVGRIRKLGMGGEYISAFTVGDQLLWGAAEPMRRVLRIVLGSL

SEQ ID NO: 65242 - protein, 168 aa, Neisseria gonorrhoeae
MVDAWSVPDFESKICPPEALAARLALLPRPLVFTNGCFDILHRGHVTYLAQARSAGAALVLALNTDASVRRLGKGGDRPVNPLENRAAVAAALESVDLVTWFDEDTPAALIEAVKPEVLVKGGDWVVDKIVGAAETLARGGQVFSIPFLHQTSTTKTLAKIRAAEGGK

SEQ ID NO: 65243 - protein, 428 aa, Neisseria gonorrhoeae
MSAIVDIFAREILDSRGNPTVECDVLLESGVMGRAAVPSGASTGQKEALELRDGDKSRYSGKGVLKAVEHVNNQIAQALIGIDANEQSYIDQIMIELDGTENKGNLGANATLAVSMAVARAAAEDSGLPLYRYLGGAGPMSLPVPMMNVINGGEHANNSLNIQEFMIMPVGAKSFREALRCGAEIFHALKKLCDSKGFPTTVGDEGGFAPNLNSHKEALQLMVEAAEAAGYKAGEDVLFALDCASSEFYKDGKYHLEAEGRSYTNAEFAEYLEGLVNEFPIISIEDGMDENDWEGWKLLTEKLGKKVQLVGDDLFVTNPKILAEGIEKGVANALLVKVNQIGTLSETLKAVDLAKCNRYASVMSHRSGETEDSTIADLAVATNCMQIKTGSLSRSDRMAKYNQLLRIEEELAEAAYYPGKAAFYQLGK

SEQ ID NO: 65244 - protein, 262 aa, Neisseria gonorrhoeae
MLTLYGETFPSRLLLGTAAYPTPEILKQSVRTARPAMITVSLRRTGCGGEAHGQGFWSLLQETGVPVLPNTAGCQSVQEAVTTAQMAREVFETDWIKLELIGDDDTLQPDVFQLVEAAEILIKDGFKVLPYCTEDLIACRRLLDAGCQALMPWAAPIGTGLGAVHAYALKILRERLPDTPLIIDAGLGLPSQAAQVMEWGFDGVLLNTAVSRSGDPVNMARAFALAVESGRLAFEAGPVEARTKAQASTPTVGQPFWHSAEY

SEQ ID NO: 65245 - protein, 280 aa, Neisseria gonorrhoeae
MDIKINDITLGNNSPFVLFGGINVLEDLDSTLQTCAHYVEVTRKLGIPYIFKASFDKANRSSIHSYRGVGLEEGLKIFEKVKAEFGIPVITDVHEPHQCQPVAEVCDVIQLPAFLARQTDLVAAMAETGNVINIKKPQFLSPSQMKNIVEKFREAGNGKLILCERGSSFGYDNLVVDMLGFGVMKQTCGNLPVIFDVTHSLQTRDAGSAASGGRRAQALDLALAGMATRLAGLFLESHPDPKLAKCDGPSALPLHLLENFLIRIKALDDLIKSQPILTIE

SEQ ID NO: 65246 - protein, 485 aa, Neisseria gonorrhoeae
MKPTIALIGRPNVGKSTLFNRLTRTKDALVHDLPGLTRDRHYGHGKVGSKPYFVIDTGGFEPVVDSGILHEMAKQTLQAVDEADAVVFLVDGRTGLTPQDKIIADRLRQSPRPVYLAVNKGEGGDRAVLAAEFYELALGEPHVISGAHGDGVYYLIEEILENFPEPEAEEADAKHPVFAVIGRPNVGKSTLVNAILGEKRVIAFDMAGTTRDSIHIDFEREGKPFTIIDTAGVRRRGKVDEAVEKFSVIKAMQAVEAANVAVLVLDAQQDIADQDATIAGFALEAGRALVVAVNKWDGISEERREQVKRDISRKLYFLDFAKFHFISALKERGIDGLFESIQAAYNAAMIKMPTPKITRVLQTAVERQQPPRAGLVRPKMRYAHQGGMNPPVIVVHGNSLHAISDSYTRYLTQTFRKAFNLQGTPLRIQYNVSENPYENAEDKPKKKPLRRVSLSNRIEKREGRKEEKNRFKKKTKVSVKKQFSK

SEQ ID NO: 65247 - protein, 324 aa, Neisseria gonorrhoeae
MRRRVNMPSENVDMKANMDIETFLAGERAAGGYRCGFVAIVGRPNVGKSTLMNHLIGQKISITSKKAQTTRNRVTGIYTDDTAQFVFVDTPGFQTDHRNALNDRLNQNVTEALGGVDVVVFVVEAMRLTDADRVVLKQLPKHTPVILVINKIDKDKAKDRYALEAFVAQVRAEFEFAAAEAVSAKHGLRIANLLELLKPYLPESVPMYPEDMVTDKSARFLAMEIVREKLFRYLGEELPYAMNVEVEQFEEGDGLNRIYIAVLVDKESQKAILIGKGGERLKKISTEARLDMEKLFDNKVFLKVWVKVKSGWADDIRFLRELGL

SEQ ID NO: 65248 - protein, 1222 aa, Neisseria gonorrhoeae
PSPNPVKNPVGSIFRKARCPWLWRVICRTSGLKAVLTQDAEQALRLQTAWRFFRPHDTAVFLPDWETLPYERFSPHQDLVSERLSALWQIKSGAADVLFVPVATAMQKLPPVPFLAGRTFWLKTGQTLDIGRLKTDLVDAGYNHVSHVVAAGEFAVRGGIVDLFPMGSETPYRIDLFDDEIDSIKTFDTDTQRTISPVSEIRLLPAHEFPTDSEAQKIFRSRFREEVDGNPNDAAVYKAVSNGHFGAGVEYYLPLFFENELETLFDYIGEDALFVSLGDVHAEANRFWNDVKSRYAMAQGDETYPPLLPQHLYLSADVFAGRLKNYGQVLPDVSGKAHSLPDLAVNRQSDDPLQALKDFQTAFDGRILLCAESLGRRETMLGFLQQNGLKAKPVSDWQGFLSAHEPLMITVAPLAYGFKLGGLQSSSQQQTVPASEGEGKAVTDQTEFSASATNPLPSPLPQEREQSAAAVSDGLKAAAVSTESSLYLVASDLHGQTRQQSAPSPVGEGWGEGKAVAAQSAIAVITESDLYQYVARSRVHNRRKKHAAVSDGLLRDLAEINIGDPVVHEEHGIGRYTGLVTMDLGGETNEMMLLEYAGEAQLYVPVSQLHLISRYSGQAHESVALHKLGSGAWNKAKRKAAEKARDTAAELLNLYAQRAAQSGHKFEINESDYQAFADGFGYEETEDQAAAIAAVIKDLTQAKPMDRLVCGDVGFGKTEVALRAAFVAVMGGKQVAVLAPTTLLVEQHAQNFADRFADFPVKVASLSRFNNSKATKATLEGMADGTVDIVIGTHKLVQDDIKFKNLGLLIIDEEHRFGVRQKEQLKRLRANVDILTMTATPIPRTLSMALEGLRDFSLITTAPSRRLAVKTFVKPFSEGSVREAVLRELKRGGQVFFLHNEVDTIENMRERLETLLPEARIGVAHGQLRERELEQVMRDFLQQRFNVLLCSTIIETGIDIPNANTIIINRADKFGLAQLHQLRGRVGRSHHQAYAYLLTPEYITKDAEKRLDAIAAADELGAGFTLAMQDLEIRGAGEILGEGQSGEMMQVGFTLYTEMLKQAVRDLKKGRQPDLDAPLGITTEIKLHSPALLPEDYCPDIHERLVLYKRLAVCETVQKINAIHEELVDRFGLTEQPVKTLIESHHLRLAAKELGIDAIDATSEAVTVTFGKHHCIDPTGIILLIQTDKKYRLAGADKLRFAAEMENIEVRINTVKTVLKTL

SEQ ID NO: 65249 - protein, 431 aa, Neisseria gonorrhoeae
MAQKIQSVKGMNDLLPVGQKDFKLTAVFWQAFEDTVNRWTRAYGYQQIRTPIVEQTGLFVRSIGEETDVVGKEMYTFSDSNDSLSLSLRPEGTASCLRAVVEHNLLYNSPQKLWYMGPMFRRERPQKGRYRQFHQVGIEALGFEGPDIDAEIIAMSADLWEKLGIREYLTLEINSLGNREERAAHRAALVEYLTRYEAQLDEDSKRRLKTNPLRVLDTKNPDLQEICNAAPRLVDYLGEASQNHYARFKAMLDGLGIQYIENSRLVRGLDYYNQTVFEWTTDKLGAQATVCGGGRYDGLIEELGGKPAPSIGFAMGIERLLLLVSEYGSLEVNAAPDVYAMHQGEGADLQVMKYAQALRAQGFNVIQHSGYQSLKAQMKKADNSGARFALIVAQDELADGTVTLKDMNGAHGQQTVSATDLTDTLQQWKNA

SEQ ID NO: 65250 - protein, 342 aa, Neisseria gonorrhoeae
MEARTPRANEAQAPRADEMKKESRPAFDAAAVPVSDSGFAANANVRRFVDDEVGKGDFSQAEWQDFFDKAAYKADIVKIMHRPSTSRPWYVFRTGNSGRAKFHGARRFYAENRAVIDDVAQKYGVPAELIVAIIGIETNYGKNTGSFRVADALATLGFDYPRRAGFFQKELVELLKLAKEEGGDVFAFKGSYAGAMGMPQFMPSSYRKWAVDYDGDGHRDIWGNVGDVAASVANYMKQHGWRTGGKMLVSATLAPGADVQAIIGEKTALTRTVADLKAYGIIPGETLADDEKAVLFKLETAPGVFEYYLGLNNFYTVWQYNHSRMYVTAVRDIANSLGGPGL

SEQ ID NO: 65251 - protein, 346 aa, Neisseria gonorrhoeae
MSENKQNEVLTGYEQLKRRNRRRLVTASSLVAASCILLAAALSSDPADSNPAPQAGETGATESQTANTAQTPALKSAAENGETAADKPQDLAGEDKPSAADSEISEPENVGAPLVLINDRLEDSNIKGLEESEKLQQAETAKTEPKQAKQRAAEKVSATADSTDTVAVEKPKRTAEPKPQKAERTAEAKPKAKETKTAEKVADKPKTAAEKTKPDTAKSDSAVKEAKKADKAEGKKTAEKDRSDGKKHETAQKTDKADKTKTAEKEKSGKAGKKAAIQAGYAEKERALSLQRKMKAAGIDSTITEIMTDNGKVYRVKSSNYKNARDAERDLNKLRVHGIAGQVTNE

SEQ ID NO: 65252 - protein, 205 aa, Neisseria gonorrhoeae
MTFPPLKSLLKFYAVVPTADWVGRMVKAGADTVQLRCKTLHGNELKREIARCVAACQGSRTQLFINDHWREAIEAGAYGVHLGQEDMDTADLAAIAAAGLRLGLSTHSVAELDRALFVHPGYIASGAIFQTTTKQMPTAPQGLDKLREYVEQARGTPVVAIGGIDLNNARAVLATGVSSLAAVRAVTEAANPEAVVKAFQALWDG

SEQ ID NO: 65253 - protein, 916 aa, Neisseria gonorrhoeae
MTDATIRHDHKFALETLPVSLEDEMRKSYLDYAMSVIVGRALPDVRDGLKPVHRRVLYAMHELKNNWNAAYKKSARIVGDVIGKYHPHGDSAVYDTIVRMAQNFAMRYVLIDGQGNFGSVDGLAAAAMRYTEIRMAKISHEMLADIEEETVNFGPNYDGSEHEPLVLPTRFPTLLVNGSSGIAVGMATNIPPHNLTDTINACLRLLDEPKTEIDELIDIIQAPDFPTGATIYGLGGVREGYKTGRGRVVIRGKTHIEPIGKNGEREAIVIDEIPYQVNKAKLVEKIGDLVREKTLEGISELRDESDKSGMRVVIELKRNENAEVVLNQLYKLTPLQDSFGINMVVLVDGQPRLLNLKQILSEFLRHRREVVTRRTLFRLKKARHEGHIAEGKAVALSNIDEIIKLIKESPNAAEAKEKLLARPWRSSLVEEMLTRSGLDLEMMRPEGLAANIGLKKQGYYLSEIQADAILRMSLRNLTGLDQKEIIESYKNLMGKIIDFVDILSKPERITQIIRDELEEIKTNYGDERRSEINPFGGDIADEDLIPQREMVVTLTHGGYIKTQPTTDYQAQRRGGRGKQAAATKDEDFIETLFVANTHDYLMCFTNLGKCHWIKVYKLPEGGRNSRGRPINNVIQLEEGEKVSAILAVREFPEDQYVFFATAQGMVKKVQLSAFKNVRAQGIKAIALKEGDYLVGAAQTGGADDIMLFSNLGKAIRFNEYWEKSGNDEAEDADIETEISDDLEDETADNENTLPSGKNGVRPSGRGSGGLRGMRLPADGKIVSLITFAPETEESGLQVLTATANGYGKRTPIADYSRKNKGGQGSIAINTGERNGDLVAATLVGETDDLMLITSGGVLIRTKVEQIRETGRAAAGVKLINLDEGETLVSLERVAEDESELSGASVISNVTEPEAEN

SEQ ID NO: 65254 - protein, 288 aa, Neisseria gonorrhoeae
AGKNVQAASAADGTKMTFDEWLGLSKLPKIEARMLLQYVSEYTRVQLLTRGGEEMPDEIRQRADRLAQRRLNGEPVAYILGVREFYGRRFTVNPNVLIPRPETEHLVEAVLARLPENGRVWDLGTGSGAVAVTVALERPDAFVRASDISTPALETARKNAADLGARVEFAHGSWFDTDMPSERQWDIIVSNPPYIENGDKHLSQGDLRFEPQIALTDFSDGLSCIRTLAQGAPDRLAEGGFLLLEHGFDQGAAVRGVLAENGFSGVEILPDLAGLDRVTLGKYMKHLK

SEQ ID NO: 65255 - protein, 128 aa, Neisseria gonorrhoeae
MAYSDKVIDHYENPRNVGTFDKNDESVGTGMVGAPACGDVMRLQIKVNDEGIIEDAKFKTYGCGSAIASSSLITEWVKGKSLDDALAIKNSEIAEELELPPVKIHCSILAEDAVKAAVADYRKRQENR

SEQ ID NO: 65256 - protein, 183 aa, Neisseria gonorrhoeae
GEDVIYMNDGVFRNKLAIQDHLNLKKVERDISAISAQNLLLQPITGNFDLAHLQTIHRELFGNVYDWAGKIRRVDISKGNTRFANFAFIENESRKLLEKLKNENYLRVLDKDKFAERAAYYLDELNVLHPFREGNGRTLRLFMTQLAIKNGFQIHWQNISAEQMIQACIQAYHADSSLLARLI

SEQ ID NO: 65257 - protein, 259 aa, Neisseria gonorrhoeae
MKEHKARKRFGQNFLQDTRIIGDIVNAVRPQADDVVIEIGPGLAAITEPLAKKLNRLHVVEIDRDIVCRLKTLPFADKLVIHEGDVLQFDFNGISGKKKIVGNLPYNISTPLLFKLAEVADDVADMHFMLQKEVVERMVAAPKSNDYGRLGVMLQYFFDMELLIDVPPESFDPAPKIDSAVVRMIPVKHRIGKADDFDHFAKLVKLAFRQRRKTIRNNLKELADDDDLQAVGISPQDRAEHIAPEKYVALSNYLADKAV

SEQ ID NO: 65258 - protein, 148 aa, Neisseria gonorrhoeae
MRLTTKGRFAVTAMLDLAMNAQTGAVKLSAISERQNISLSYLEQLFGKLRRAGLVESLRGPGGGYILAAPPAQINIAQIISAAEDRLDATQCGSKANCHHGAPCLTHDLWENLNKTINDYLGSVTLQSIIEQKNNGDGSRVVQFTHIH

SEQ ID NO: 65259 - protein, 390 aa, Neisseria gonorrhoeae
MKRDLSKMTCIEDLHRVAKRKMPRMFYDYIDSGSWTETTYRENTSDFKDIRFRQKVLVNMEGRSLETKMIGGDVKMPVAIAPTGFTGMAHADGEILAARAAEKFGIPFTLSTMSICSIEDVAENTSAPFWFQLYVMRDREFMENLIKRAKDAKCSALVLTADLQVLGQRHKDIKNGLSAPPKPTIANLINLATKPEWCMKMLNTERRTFRNIVGHAKNVGDLSSLSSWTAEQFDPRLSWDDVARIKDLWGGKLIIKGIMEPEDAEKAAKSGADALVVSNHGGRQLDDTVSAIKALPDIVSAVGSDIEVWMDSGIRSGQDILKAWALGAKGTMIGRAFLYGLGAYGEEGVTRALEILYKEMDVSMAFTGHRDIQDVDASILRSKDWGRETV

SEQ ID NO: 65260 - protein, 400 aa, Neisseria gonorrhoeae
MKNYHAPDEKGFFGEHGGLYVSETLIPALKELEQAYNEAKNDPEFWAEFRRDLKHYVGRPSPVYHAARLSEHLGGAQIWLKREDLNHTGAHKVNNTIGQALLARRMGKKRVIAETGAGQHGVASATVAARFGMTCDVYMGADDIQRQMPNVFRMKLLGANVIGVDSGSRTLKDAMNEAMREWVARVDDTFYIIGTAAGPAPYPEMVRDFQCVIGNEAKAQMQEATGRQPDVAVACVGGGSNAIGLFYPYIEEENVRLVGVEAGGLGVDTPDHAAPITSGAPIGVLHGFRSYLMQDENGQVLGTHSVSAGLDYPGIGPEHSHLHDIKRVEYTVAKDDEALEAFDLLCRFEGIIPALESSHAVAWAVKNAPKMGKDQVILVNLSGRGDKDINTVAKLKGIEL

SEQ ID NO: 65261 - protein, 263 aa, Neisseria gonorrhoeae
MITVNTLQKMKAAGEKIVMLTAYESSFAALMDDAGVDVLLVGDSLGMAVQGRQSTLPVSLRDMCYHTECVARGAKNAMIVSDLPFGAYQQSKEQAFAAAAELMAAGAHMVKLEGGVWMAETTEFLQMRGIPVCAHIGLTPQSVFAFGGYKVQGRGGKAQALLNDAKAHDEAGAAVVLMECVPAELAKKVTETVSCPTIGIGAGADCDGQVLVMHDMLGIFPGKTAKFVKNFMRGQSSIQAAVRAYVAEVKAKTFPAAEHIFAD

SEQ ID NO: 65262 - protein, 1593 aa, Neisseria gonorrhoeae
MKAKRFKINAISLSIFLAYALTPYSEAALVRDDVDYQIFRDFAENKGKFFVGATDLSVKNKRGQNIGNALSNVPMIDFSVADVNKRIATVVDPQYAVSVKHAKAEVHTFYYGQYNGHNDVADKENEYRVVEQNNYEPHKAWSASNLGRLEDYNMARFNKFVTEVAPIAPTDAGGGLDTYKDKNRFSSFVRIGAGRQLVYEKGVYHQEGNEKGYDLRDLSQAYRYAIAGTPYKDINIDQTMNTEGLIGFGNHNKQYSAEELKQALSQDALTNYGVLGDSGSPLFAFDKQKNQWVFLGTYDYWAGYGKKSWQEWNIYKKEFADKIKQHDNAGTVKGNGEHHWKTTGTNSHIGSTAVRLANNEGDANNGQNVTFEDNGTLVLDQNINQGAGGLFFKGDYTVKGANNDITWLGAGIDVADGKKVVWQVKNPNGDRLAKIGKGTLEINGTGVNQGQLKVGDGTVILNQKADSNQKVQAFSQVGIVSGRGTLVLNSPDQINPNNLYFGFRGGRLDANGNDLTFEHIRNVDEGARIVNHNTDHASTITLTGKSLITNPNSLSVHSIQNDYDEDNYSYYYRPRRPIPQGKDLYYKNYRYYALKSGGSVNAPMPENGQTENNDWILMGSTQEEAKKNAMNHKNNQRISGFSGFFGEENGKGHNGALNLNFNGKSAQNRFLLTGGANLNGKISVTQGNVLLSGRPTPHARDFVNKSSARKDAHFSKNNEVVFEDDWINRTFKAAEIAVNQSASFSSGRNVSDITANITATDNAKVNLGYKNGDEVCVRSDYTGYVTCNTGNLSDKALNSFDATRINGNVNLNQNAALVLGKAALWGQIQGQGNSRVSLNQHSKWHLTGDSQVHNLSLADSHIHLNNASDAQSANKYHTIKINHLSGNGHFHYLTDLAKNLGDKVLVKESASGHYQLHVQNKTGEPNQEGLDLFDASSVQDRSRLFVSLANHYVDLGALRYTIKTENGITRLYNPYAGNRRPVKPAPSPAANTASQAQKATQTDGAQIAKPQDIVVAPPSPQANQAEEAKRQQAKAEQVKRQQAEAGRKSAELSAKQRAGEEERRQTAQSQPQRRKRRAAPQDYMAVSQDRPKRRGHRSVQQNNVEIAQAQAELARRQQEERKAAELLAKQRAEAEREAQALAARRKAEAEEAKHQAAELAHRQEAKRKAAESAKRKAEEEEHRQTAQSQPQRRKRRAAPQDYMAVSQDRPKRRGRRSTLPAPPSPSFDSSAYAAPRALHNPDWYENDYEEIPLDALEDEDVSESVDTSDKQPQDNTELHEKVEAVSLQPRAAQPRTQAAAQADAVSTNTNSALSDAMASTQSILLDTGASLTRHIAQKSRADAEKNSVWMSNTGYGRDYASAQYRRFSSKRTQTQIGIDRSLSENMQIGGVLTYSDSQHTFDQAGGKNTFVQANLYGKYYLNDAWYVAGDIGAGSLRSRLQTQQKANFNRTSIQTGLTLGNTLKINQFEIVPSAGIRYSRLSSADYKLGDDSVKVSSMAVKTLTAGLDFAYRFKVGNLTVKPLLSAAYFANYGKGGVNVGGKSFAYKADNQQQYSAGAALLYRNVTLNVNGSITKGKQLEKQKSGQIKIQIRF

SEQ ID NO: 65263 - protein, 256 aa, Neisseria gonorrhoeae
MTATEHDNDDALLLRYSRHILLDEIGIEGQQKLSAAHILVVGCGGLGAAALPYLAASGVGTLTIADSDTVELHNLQRQVAFDEGDVGKPKAETLAGRLKRINHTVDVRAVNEKLDGCRLTGLVQTADIVLDCCDNYATRQAVNRACVQTKTPLVSGAAVRFEGQLAAYRPDLPDSPCYACLFDGGSASDGICSLFGVLSPLVGIVGCTQAAEALKILLEAGEPSHGRLAVYRALEGGWQYFDLPRNPECPVCGAAR

SEQ ID NO: 65264 - protein, 329 aa, Neisseria gonorrhoeae
MKITVIGAGSWGTALALHFSQHGNRVSLWTRNADQVRQMQEARENKRGLPGFSFPETLEVCADLAEALKDSGLVLIVTSVAGLRSSAELLKQYGAGHLPVLAACKGFEQDTGLLTFQVLKEVLPDNKKIGVLSGPSFAQELAKQLPCAVVLASENQEWIEELVPQLNTTVMRLYGSTDVIGVAVGGSVKNVMAIATGLSDGLEYGLNARAALVTRGLAEITRLASAMGAQPKTMMGLAGIGDLILTCTGALSRNRRVGLGLAEGKELHQVLVEIGHVSEGVSTIEEVFNTACKYQIDMPITQTLLQLIRKEMTPQQVVERLMERSARFE

SEQ ID NO: 65265 - protein, 143 aa, Neisseria gonorrhoeae
MKTFSAKPHEVKREWFVIDAQDKVLGRVATEVASRLRGKHKPEYTPHVDTGDYIIVINADKLRVTGAKFEDKKYFRHSGFPGGIYERTFREMQDQFPGRALEQAVKGMLPKGPLGYAMIKKLKVYAGAEHAHAAQQPKVLELK

SEQ ID NO: 65266 - protein, 306 aa, Neisseria gonorrhoeae
MTNKPAKRPVNGVLLLDKPEGLSSNTALQKARRLFHAEKAGHTGVLDPLATGLLPVCFGEAAKFAQYLLDADKAYTATLKLGEASSTGDAEGEIIAAARADISLAEFQTACQALTGNIRQVPPMFSALKHEGKPLYEYARKGIVIERKPRDITVYSIDIAEFDAPKAVISVRCSKGTYIRTLSEGIAKHIGTFAHLTALRRTETAGFTIAQSHTLEALANLNETERDGLLLPCDVLVSHFPQTVLNDYAVHMLQCGQRPRFEEDLPSDTPVRVYTENGRFVGLAEYQKEICRMKALRLMNTAASSA

SEQ ID NO: 65267 - protein, 327 aa, Neisseria gonorrhoeae
MAAYDSLMVFTGNANPELAQRVVRHLDISLGNASVSKFSDGEVAVELLENVRGRDVFILQPTCAPTNDNLMEILTMADALKRASAGRITTAIPYFGYARQDRRPRSVRVPISAKLVANMLYSAGIDRVLTVDLHADQIQGFFDIPVDNIYATPILLNDIKQQRIENLTVVSPDIGGVVRARAVAKSLNADLAIIDKRRPKANVAEVMNIIGDIQGKTCLIVDDMIDTANTLCKAAVALKERGAERVLAYASHAVFSGEAVSRIASSEIDQVVVTDTIPLSEAAKNCDRIRQVTIAGLLAETVRRISNEESVSYLFNEEVMTGSMLLP

SEQ ID NO: 65268 - protein, 414 aa, Neisseria gonorrhoeae
MSNENRTCSFCGKSKSHAKHLIEGKNAYICDECVANCLEILYEGDNGGTPPENAGGEPEESGKLPTPAEIVANLDDYVIGQGQAKKALAVAVYNHYKRLRHPKADGGVELSKSNILLIGPTGSGKTLLAQSLARKLDVPFVMADATTLTEAGYVGEDVEQIITKLLGKCDFDVEKARHGIVYIDEIDKISRKSDNPSITRDVSGEGVQQALLKLIEGTVASVPPQGGRKHPNQEFINVDTANILFICGGAFAGLEKVIRQRTEKGGIGFGASVHSKDENAGITKLFGIVEPEDLIKFGLIPELIGRLPVIATLEELDEDALINILTEPKNALVKQYQALFGIENVGLEFEEGALRSIARQAMERKTGARGLRSIVERCLLDTMYRLPDLQGLKKVVVGKAVIEEGREPELVFES

SEQ ID NO: 65269 - protein, 190 aa, Neisseria gonorrhoeae
MTYEIQASVREAQGTGASRRLRREGQIPGILYGEGQEPVAIAVDHKTVFYALEKESFHTALIKLSLNGETKDVIVRDFQMHPFRREVQHIDFQAVKADQLVRIRVPLHIVNAENSQAVKLQGGRVSLLNTAVEVLALPANIPAFLDLDCAEVVAGDILHLSDIKLPEGVESVSLKRNENLAVATVTGKKR

SEQ ID NO: 65270 - protein, 397 aa, Neisseria gonorrhoeae
MQNYLTPNFAFAPMIPERASGSRVWDTEGREYIDFSGGIAVNALGHCHPALVDALNAQMHKLWHISNIYTTRPAQELAQKLVKHSFADKVFFCNSGAEANEAALKLARKYARDRFGGGKSEIVACINSFHGRTLFTVSVGGQPKYSKDYAPLPQGITHVPFNDIAALEAAVGEQTCAVIIEPIQGESGILPATAEYLQAARRLCDRHNALLILDEVQTGMGHTGRLFAYEHYGVVPDILSSAKALGCGFPIGTMLATEKIAAAFQPGTHGSTFGGNPMACAVGSRAFDIINAPETLHNVRSQGQKLQTALLDLGRKTGLFSQVRGMGLLLGCALDTPYRGRSSEIAATSLKHGVMILVAGADVLRFAPSLLLNDEDIAEGLRRLEHVLTEFAAANRP

SEQ ID NO: 65271 - protein, 315 aa, Neisseria gonorrhoeae
MTDITPFANRLGKNIKHLMKWAKRNGIEAWRIYDRDIPQFPFAADVYGDRIHLQEYDTGWLMRPGEYEAWLAEVLEAVAFVTGFEPEQIRLKRRERQKGLQQYEKTGKAGDDFVIAENGRKFWVNLDKYLDTGFFLDHRNTRKKVGETAAGKRFLNLFSYTGSFTVYAATGGAASSETVDLSNTYLDWARRNFELNGIDMERHKIVRADVFQYLQTAYGEGRQFDLIVMDPPSFSNSKKMPGILDIQRDHQKLIDGAVNLLASDGILYFSNNLRSFVLDDSVSEQYAVKDISKQSVPEDFRNKKIHRCWEIRHKS

SEQ ID NO: 65272 - protein, 157 aa, Neisseria gonorrhoeae
MTDFSVWEAAPFGATVDHILQRYHNVHRAQFEELVPLAQKVAQVHADTFPAEIAGLLADMRDELLMHMMKEERMLFPMINQGVGRGAAMPISVMMHEHEEHDRAIARLKELTGNFHAPEGACGSWTRLYALAKEMADDLNDHIHLENDILFARVLDS

SEQ ID NO: 65273 - protein, 263 aa, Neisseria gonorrhoeae
MDTQAVITHIVRWLDEYAAQANAKGFVVGVSGGIDSAVVSTLAARTGRTTLLLDMPIRQHPGQLERARRHIRNLQGQYANVSAQTANLTDTFQTFEQTVGVHQTAFANQPLSLANARSRLRMLTLYYYGQIHGLLVTGTGNKVEDFGVGFFTKYGDGGVDISPIADLTKTQVYRLAEALGVDEAIQKAPPTDGLWDTERTDEEQMGASYPELEWAMGVYGTRKPEDFEGRRREVLEIYTRLHRAMQHKINPIPVCRIPPELLG

SEQ ID NO: 65274 - protein, 443 aa, Neisseria gonorrhoeae
MLSVSELNAFAKSILENHLAGLWIAGEVSNLTRAASGHYYFSLKDSRAQVRCAMFKGAAARLAQPLKEGDHIEVAGKISIYEARGEFQITVNEVRLKGLGQLYEAYERLKAQLQAEGAFAAERKKPLPVRPQCIGIVTSLAAAALRDVVTTLKRRAPEIPVIVYPAAVQGAGSGFQIAQAIKTASQRAECDVLIVCRGGGSIEDLRAFNEEPVVRAIEACTIPVVSGVGHETDFTLADFVADVRAPTPTGAAELVSPNRQESLHRLVQAQGRLKTVLEQRYFDASQKLDWLARQIRHPRQKLDEQRASIGKLAQTLSYSMTQNLRAHTARFERQTQALQHCRPDVSVYRQDIVRLQTALPAAFSRLLARRRQSLTAQAALLEAVSPQHILERGFSVVKNTRGQVIRNADVLKQGQKLHITFSDGETDVRVSKEQGQQDLFDCI

SEQ ID NO: 65275 - protein, 468 aa, Neisseria gonorrhoeae
MNDYAAMPPEGREVGALSLPPHSMEAEQSVLGGLMLENPAWDRIADVVSGEDFYRHEHRLIFRSIAKLINEGRPADVITVQEDLQRNEELEAAGGFEYLITLAQNTPSAANIRRYAEIVRERSIMRQLAEVGTEIARSAYNPQGRDAGRLLDEAENKVFQIAESTAKSKQGFLEMPDLLKEVVQRIDMLYSRDNPDEVTGVPTGFIDLDKKTSGLQPGDLIIVAGRPSMGKTAFSINIAEYVAIEKHLPVAVFSMEMGGAQLVMRMLGSVGRLDQSVLKTGRLEDEHWGRLNEAVVKLSDAPVYIDETPGLTALELRARARRLARQFNNKLGLIVIDYLQLMAASGRSDNRASELGEISRSLKALAKELQVPIIALSQLSRTVEQRTDKRPMMSDLRESGAIEQDADLIMFMYRDEYYNQDSPMKGLAECIIGKHRNGPVGKIFLTWTGQFTKFDNAAYIPEEAKIED

SEQ ID NO: 65276 - protein, 350 aa, Neisseria gonorrhoeae
MMSKQPTSKRQWRDGAAPSAKKTAKPFKSKARPKDETRKTAAQAYGQKASDGIKLQNAPKQRAAKAKKLVVRNPNQKIMEHARDLKERRSDLSRMEPERLQKVLAASGVGSRREMEEWINNGWVTVNGKTAQLGDKVTPDDHVTVKGSIIKLKWADRLPRIILYYKQEGEIVSRDDPQGRVSIFDRLPQAASSRWVAIGRLDINTSGLLILTTSGELVQRFAHPSFEVEREYAVRVLGGLTTEQMRSLTEEGVMLEDGLAKVERIYEQGGEGANKWYNIVIKEGRNREVRRIFESQGLTVSRLVRVAFGPIGLPNRLKRGQFYELNPAEVANILKWADMLLPGERRRKKA

SEQ ID NO: 65277 - protein, 336 aa, Neisseria gonorrhoeae
MNHTVTLPDQTTFAAGDGETVLSAAARQNLNLPHSCKNGVCGQCKAELASGDIQMGGHSEQALSEAEKAQGKILMCRTTAQSDININIPGCKADALPVRTLPARIESMVFKHDVAFLKLALPKAPPFAFYAGQYIDLLLPGNVSRSYSIANSPDQEGILELHIRRRENGVCSEMIFGSEPKVKEKGIVRVKGPLGSFTLQEDSGKPVILPATDTGYAPIRSILLDLIRQNSSRAAHFYWGARHQDDLYALEEAQGLACRLKNTCFTPVLSRPGEGWQGRKGHVQDIAAQDHPDLSEYEVFACGSPAMTEQAKNLFVQQHKLPENLFFSDAFTPSAS

SEQ ID NO: 65278 - protein, 476 aa, Neisseria gonorrhoeae
MTWETVIGLEIHVQLNTKSKIFSGASTAFGAEPNAHASVVECALPGVLPVMNREVVEKAIKLGLALDAKINRKNVFDRKNYFYPDLPKGYQISQLDLPIVEHGKLEIVVGGDVKTINVTRAHMEEDAGKSVHEGLNGATGIDLNRAGTPLLEVVSEPEMRSAAEAVAYAKALHSLVTWLDICDGNMAEGSFRIDANVSVRPKGQAEFGTRREIKNLNSFRFLDQAINYEAEAQIEILEDGGTVQQATMLFDPEKGETRVMRLKEDAHDYGYFPDPDLLPVIISDAQMQKAKAEMPELPKEMAARFVADYGVSEYDARLLTASRVQAAYFEEAAKESGQGKPTANWMNGELAATLNKEGMELADSPITAPRLAALVGKIADGTLSGKLAKKAFEAMWAEPETSIAEIIEKHSLQQMTDTGAVEAMVDEVLANNAKAVEQFKSGNEKALNAIVGQVMKTSKGKANPAQVQELIKAKLA

SEQ ID NO: 65279 - protein, 401 aa, Neisseria gonorrhoeae
MKPCDTGGKIAVYPVRETGDSKDFPMIKISTRFDAGSVVVKDLTDPSNIRLALRPDNASDFAQWFYFRLQGAAYQNCIMHFENAAEAAYPKGWEGYQACASYDRRNWFRVPTSYENGVLTVNHTPLSNSVYYAYFEPYSEEQHLNLLGDAQGSGLCRIDDLGSTVQGRDINLLTIGNQVESDMKIWITARQHPGETMAEWFVEGLLGRLLDSQDPTARTLLDRATFYIVPNMNPDGSALGNLRTNAAGANLNREWENPTLEKSPEVFFVRGKMLETGVDLFLDIHGDEGLPFVFVAGTEGVPNYNPRISALEAQFKTALLNASPDFQDEYGYEKDAPGKANMTLATNWVGNRFNCLAYTLEMPFKDNANLPDDDFGWNGQRSLRLGEAVLSAILNVAGDLR

SEQ ID NO: 65280 - protein, 481 aa, Neisseria gonorrhoeae
MTQYTLKQAGSLLQSKQISAVELASAYLAAIAEKNPALNGYITIDQDKTLAEARAADERIAQGNASALTGVPVAYKDIFCQTGWRSACASKMLDNFIFPYTATVVQNLLDEGMVTLGRTNMDEFAMGSTNENSFYGAAKNPWNPEHVPGGSSGGSAAVVAARLAPAALGSDTGGSIRQPASHCGITGIKPTYGTVSRFGMVAYASSFDQAGPMAQTAEDCAILLNAMAGFDPKDSTSFEREKEDYTRDLDKPLKGVKIGLPKEYFSEGNSTDVQTALQNTIDLLKAQGAELVEVSLPQTKLSIPAYYVLASAEAGTNLSRYDGVRYGHRAAQFGDLEEMYGKTRAEGFGSEVKRRIMIGTYVLSHGYYDAYYLKAQKLRRLVADDFQTAFARCDLILAPTAPSAAPKIGADTSPVETYLSDIYTIAVNLAGLPALTLPAGFSGGGLPVGVQLVGNYFAEAKILGAAHQIQLNSDWHGKRPE

SEQ ID NO: 65281 - protein, 96 aa, Neisseria gonorrhoeae
MALTLADVDKIARLSRLQLTAEEKEKSLQELNDIFTMVEQMQNINTDGIEPMAHPHEVALRLREDEVTETDRAAEYQAVAPEVRNRLYIVPQVIEE

SEQ ID NO: 65282 - protein, 395 aa, Neisseria gonorrhoeae
MNTLLKQLKPYPFARLREAMQGISAPEGMEAVPLHIGEPKHPTPKVITDALTASLRELEKYPLTAGLPELRQACANWLKRRYDGLTVNPDNEILPVLGSREALFSFVQTVLNPVSDGLKPVIVSPNPFYQIYEGATLLGGGEIHFANCPAPSFNPDWRSISEEVWERTKLVFVCSPNNPSGSVPDLDGWREVFDLQDKYGFIIASDECYSEIYFDGNKPLGCLQAAAQSGRSRQKLLMFTSLSKRSNVPGLRSGFVAGDAELLKNFLLYRTYHGSAMSIPVQRASIAAWNDEQHVIDNRRMYQEKFERVIPILQQVFDVKLPDASFYIWLKVPNGDDLAFARNLWQKAAIQVLPGRFLARDTEQGNPGEGYVRIALVADVATCVKAAETIVSLYR

SEQ ID NO: 65283 - protein, 420 aa, Neisseria gonorrhoeae
MSNTQKQLALAKAAKKSVNTADAEEKNRALLAMADSLEAAAEDILAANRLDLKAAAGKIPDSMTDRLLLDGKRICAMADGIRAVAALPDPVGEILETSTLPNGLEIVKKRVAMGVIGIIYESRPNVTSDAAALALKSGSAVVLRSGKDAFQSARAIVAALKTGLAQTRIDPEAVQLIEDTGREGSYEMMRAKDYLDLLIPRGGAGLIRAVVENAVVPVIETGTGIVHIYIDKDADWDKALRIVYNAKTGRPSVCNSMEVLLVHEGIAADFLPKLERLLVRGRIEAGLPPVRFRLDPQAARYIGGEAAGADDFDTEFLDYILAVKTVASVEEAVGHIEARGTHHSDGIVTENRHAADYFTTHIDSAAVYINASTRFTDGGEFGLGCEMGISTQKLHARGPMGLKELTSYKYIVQGTGQVRE

SEQ ID NO: 65284 - protein, 200 aa, Neisseria gonorrhoeae
MFNIPAVAVSYLIGSLSFAVIVSKYYGMDDPRTYGSGNPGATNVLRSGKKKAAALTLLGDAAKGLVAVLLARVLQEPLGLSDSAIAAVALAALVGHMWPVFFGFKGGKGVATALGVLLALSPATALVCALIWLVMAFGFKVSSLAALVATTAAPLAALFFMPHTSWIFATLAIAILVLLRHKSNILNLIKGKESKIGEKR

SEQ ID NO: 65285 - protein, 303 aa, Neisseria gonorrhoeae
MPSETMFPRSDGISAQTAFIHTMLSYRHAFHAGNHADMLKHFTLFLVLQYFNRKDKPYWYIDTHGGAGVYNLEGSEAQKVGEYRQGIALLRQAQNLPAELSDFAAHIQKILPSPELYCGSPWLAQSLTCVGDKLRLFELHPTDFVHLQNNMGEAGLGKRGQVLREDGYKGLISLLPPPPRRAAVLIDPPYEEKQDYRRVTETLKAALKRFESGCYLIWYPCLSREESRKLPEELKKLLPDNYLYAELHVHAPKTDGFGMHGSGMFVINPPYLLAEQLAANLPALTRLLAQDEGARYLLDSKIR

SEQ ID NO: 65286 - protein, 469 aa, Neisseria gonorrhoeae
MTAQTLYDKLWNSHVVREEGDGTVLLYIDRHLVHEVTSPQAFEGLKMAGRKLWRIDSVVSTADHNTPTGDWDKGIQDPISKLQVDTLDQNIKEFGALAYFPFMDKGQGIVHVMGPEQGATLPGMTVVCGDSHTSTHGAFGALAHGIGTSEVEHTMATQCITAKKSKSMLIAADGKLKAGVTAKDVALYIIGQIGTAGGTGYAVEFGGEAIRSLSMEGRMTLCNMAIEAGARSGMVAVDQTTIDYVKGKPFAPEGEAWDKAVEYWRTLVSDEGAVFDKEYRFNAEDIEPQVTWGTSPEMVLNIGGKVPNPAEETDPVKRSGIERALEYMGLKAGTPLNEIPVDIVFIGSCTNSRIEDLREAAAIAKGHKKAGNVQRVLIVPGSGLVKEQAEKEGLDKIFIEAGFEWREPGCSMCLAMNADRLAPRQRCASTSNRNFEGRQGNGGRTHLVSPAMAAAAAVTGHFTDIRTMA

SEQ ID NO: 65287 - protein, 225 aa, Neisseria gonorrhoeae
MSIKQWPEGERPREKLLERGAAALSDAELLAILLRVGTRGMSAVDLARYLLQEFGSLGRLMSAEVGKLSAYKGMGTASFTQFAVVREIGRRILEEELQEEITLSDPDTVADYLRFHLGQEKVEVSVALLLNRQNQLIAVRELSRGTVAENTIYIREIVKLALDEYADSLIIAHNHPGGSPEPSQEDIMFTRRLAQAMSLVDVSLLDHFIVTSQTVRSFRQLGLMP

SEQ ID NO: 65288 - protein, 580 aa, Neisseria gonorrhoeae
  MISC_FEATURE (145)..(145): X=any amino acid
VAKTYLLTALIMSMVISGCQVIHANQGKVNTNSAVIAGADAHTPEHVTGLTEQKQVIASDFIVASANPLATQAGYDILKQGGSAADAMVAVQTTLSLVEPQSSGLGGGAFVLYWDNTAKTLTTFDGRETAPMRATPELFLDKDGXPLKFMEAGGRSVGTPAIPKLTETIHQRYGVLPWGKLFDTPIHLAKQGFEVSPRLAISVEQNQQHLARYPKTAAYFLPNGVPLQAGSLLKNLEFADSVQALAAQGAKALHTGKYAQNIVSVVQNAKDNPGQLSLQDLSDYQVVERPPVCVTYRIYEVCGMGAPSSGGIAMGQILGILNEFSPNRVGYDAEGLRLADRDVYLGDPDFVPVPIRQLISKDYLKHRSQLLEQSDKALPSVSAGDFIHEWASSQAIELPSTSHISIVDKAGNVLSMTTSIENAFGSTLMANGYLLNNELTDFSFEPIKQGKQVANRVEPGKRPRSSMAPTIVFKAGKPYMAIGSPGGSRIIGYVAKTIVAHSDWNMDIQDAISAPNLLNRFGSYELETGTTAVQWQQTLNDLGYKTDVRELNSGVQAIIIEPSRLVGGVDPRREGRVTGD

SEQ ID NO: 65289 - protein, 416 aa, Neisseria gonorrhoeae
MFSKSVTLAQYDPDLAAAIAQEDRRQQDHVELIASENYVSCAVMEAQGSQLTNKYAEGYPAKRYYGGCEYVDIVEQLAIDRVKELFGAAYANVQPHSGSQANQAVYASVLKPGDTILGMSLAHGGHLTHGASVNISGKLYNAVTYGLDENEVLDYAEVERLALEHKPKMIVAGASAYALQIDWAKFREIADKVGAYLFVDMAHYAGLVAGGEYPNPVPFCDFVTTTTHKTLRGPRGGVILCRDNTHEKALNSSIFPSLQGGPLMHVIAAKAVAFKEALQPEFKQYAKQVKINAAVMAEELVKRGLRIVSGRTESHVFLVDLQPMKITGKAAEAALGKAHITVNKNAIPNDPEKPFVTSGIRIGSAAMTTRGFNETDARVLSNLVADVLANPEDEANLAKVRGQVTALCDKYPVYGT

SEQ ID NO: 65290 - protein, 469 aa, Neisseria gonorrhoeae
MRYISTRGETAHKPFSEVLLMGLAPDGGLMLPEHYPQIGRETLDKWRGLAYPELAFEIMCLFVTDIPEDDLRDILNRTYTEAAFGTKEITPVRTLSDGIKIQALSNGPTLAFKDMAMQFLGNAFEYVLNKEGKKLNILGATSGDTGSAAEYALRGKKGVNVFMLSPDGKMSAFQRAQMYSLQDGNIHNIAVKGMFDDCQDIVKAVQNDAAFKEKYHIGTVNSINWGRIVAQVVYYFAGYFNATSSNDETVSFCVPSGNFGNVCAGHIAKQMGLPVRCLIVATNENDVLDEFFKTGAYRPRNSAHTYVTSSPSMDISKASNFERFVFDLMDRDPQEINTLWAEVAAGKGFDLRFALDKVGGKYGFTSGKSTHADRLATIRQVYEQDKELIDPHTANGVKVAREVREAGETVVCLETALAAKFDATIREAVGDVAIPRPAALEGLENLPQRVQTVPNSADAVKGIIEQTLA

SEQ ID NO: 65291 - protein, 642 aa, Neisseria gonorrhoeae
MLEIDIMNILSVENASFAVGHVALLDKTSFQLDSGEKVGLIGRNGAGKSSFLKILTGVQKLDDGQIIVQNNLKIVYVPQESFFDKDATVFDTVAEGLGEIRDLLRRYHHVSHELENGSSELLLKELNELQLEIEAKDGWKLDAAVKQTLGELGLPENKKIGNLSGGQKKRVALAQAWVQKPDVLLLDEPTNHLDIDAIIWLENLLKAFEGSLVVITHDRRFLDNIATRIVELDRGILRSYPGSFSKYSEKKAQELAVEAEHNRLFDKFHAQEEAWIRKGIEARRTRNEGRVRRLEELRRQRAERRNVQGQVNFKLDSGKKSGKIIAELEHASFAYDDKVIMDKFSAILQRGDKIGLIGPNGIGKTTFLKLILGELQPTYGRIRIGSKQEVAYFDQFRSALNENDTVFYTLGQGNDYVEVGGKKKHVMSYLEDFLFPPARAQSPVSSLSGGERNRLLLAKLFTRPANILVLDEPTNDLDIDTQELLEDLLRDYQGTVFLVSHDRMFLDNVITQSIVFEGQGRLKEYIGGYQDYIDAKSREDKIQTASAPKASDVEPAKEKPKANRTVKLSYKEQRELDALPDEIAALETEQAEINAQLSDPGIFKDYEKAGALQNRAEEIEMLLLEKLERWELLETKQNGNAV

SEQ ID NO: 65292 - protein, 436 aa, Neisseria gonorrhoeae
MTDLFVREPDAPLAERLRPHTLDDVIGQQHLIGEGKPLRVAVEGGKPHSMLLWGPPGVGKTTLARILAQSFNAQFLPVSAVFSGVKDIRGAIDKAEIALQQGRATILFVDEVHRFNKAQQDAFLPHVESGLLTFIGATTENPSFEVNPALLSRAQVYVLQSLSSDDLKKLIAKVLALPEYRDFTIEADVQELLVNTADGDARRLLNLLEQLLRAADTRRLKILTTEFLADSLGAQIRRFDKGGESFYNQISALHKSVRGSHPNAALYWFCRMLDGGTDPRYLARRIVRIAWEDIGLADPRAFQIANDAAATFERLGSPEGELALAQAVLYLAAAAKSNAGYKAYNQMRRFVKENASDEVPVHLRNAPTKLMKELGYGREYRYAHDEPNAYAAGESYMPDGLDEPDFYQPVPRGLEIKIGEKLAWLKSLDEEALKAK

SEQ ID NO: 65293 - protein, 349 aa, Neisseria gonorrhoeae
MKTYAQALYTAALLTACSPAADSNHPSGQNAPANTESDGKNITLLNASYDVTRYFYKEYNHLFIKTYQSEHPGTSVSIQQSHGGFSKQALSVANGLQADVVTMNQSSDIDLLEKKGLVEKGWQQALPDHAAPYTSTMVFLVRKNNPKQIRDWNDLAKDGVNIVIAKTSGNGRYAFLGAYGYGLKANNGNEQEAQKLVASILKNTPVFENGGRAAATTFTQRNIGDVLITFENEANYVSKKLTQGQFEIVYPSYTISAESPVAVVNSVVAKKGTQKTARAYLEYLWSEPAQELAASLYLRPRNPEVLARHKADFPDLDTFPPEEKFGGWDNIMKTYFADGGVFDRLTAQK

SEQ ID NO: 65294 - protein, 273 aa, Neisseria gonorrhoeae
MPSVELLLGIVGLPRSTFYYQLAVQSAEGKYADLKRHIHDIYQRYKGRYGYRRIAAAIRHAGIPVNHKKVSRLMAKTGLKAVIRRRKYRSFKGEVGKVAPNILQRCFHSEKPNEKWVTDVTKFDVGGEKIYLSPIMDLFNGEIVSYRIQTRPTFDLAGEILKGAPEKPGPSEKPMLHSDQGWQYQMFFYQKQLKGNGLVQSLSRKGNCLDNAAMESFFGTLKSECFHTCKYDSVTESEAALHEYIRYYNNDRIKLKLKGLSPVQYRIQSLKAA

SEQ ID NO: 65295 - protein, 400 aa, Neisseria gonorrhoeae
MNHFKKQQIQNIADFNPREQLAKGALAKSVPMAMLKEFQRQITGYEIKAFNGGAKFRNGDTLLAKITPCLENGKTAFVDILDDGEVAFGSTEFIVLRAKNETNPEFLYYFAISPDFRKRAIECMEGTSGRQRVNENALKTLELPIPEPQIQQSIAAVLSALDKKIALNKQINARLEEMAKTLYDYWFVQFDFPDANGKPYKSSGGDMVFDETLKREIPKGWGSIELQSCLAKIPNTTKILNKDIKDFGKYPVVDQSQDFICGFTNDEKSILNPQDAHIIFGDHTRIVKLVNFQYARGADGTQVILSNNERMPNYLFYQIINQIDLSSYGYARHFKFLKEFKIILPSKDISQKYNEIANTFFVKVRNNLKQNHHLTQLRDFLLPMLMNGQVSVRCSGARDG

SEQ ID NO: 65296 - protein, 172 aa, Neisseria gonorrhoeae
MERRANRFRTIRTAAVRRLVLIFVNSLYFSISDSLVRKWVARYRLHGESGIKRRKHTTKYSVEYKLEAIRPVTGQGMSQKAAADQLNLPDCSVLPQWLRLYRLNGINGLKPKPKGRKPVKKQYPPQTKKADYLKTKEELFAELAYLKAEAAVLKKLDALKEVRQKERNSSQG

SEQ ID NO: 65297 - protein, 445 aa, Neisseria gonorrhoeae
MTDTAGLRRRNLRQWIAEHYGGLQNRFAEAVALNTGELSALLKNKSFGEKKARKIEQAAKMPAFWLDTEHTGRPPGHTGKHTMSHISPIPEILADIKAGKMVIITDAEDRENEGDLLMAAQFVTPEAVNFMIKHARGLVCLPMEGAMVEKLGLPMMTQKNGAQYGTNFTVSIEAAHGITTGISAADRALTIQTAVSPTAKPADIVQPGHIFPLRAQKGGVLVRAGHTEAGVDLAQMNGLIPAAVICEIINDDGTMARMPELMKFAEEHKLKIGTIADLIEYRSRTESLLEDMGDAPVQTPWGEFQQHVYVDKLSGETHLALVKGTPSADTETLVRVHEPFSVMDFIQANPRHSWSLPKALERVQQAESGVVILLHHTEDGASLLDRTLPKGANQAYKWDSKSYGIGAQILAGLHVKKLRVLGQPSSFTGLTGFGLEVVGFEEAEK

SEQ ID NO: 65298 - protein, 694 aa, Neisseria gonorrhoeae
MNKTLYRVIFNRKRGAVVAVAETTKREGKSCADSGSGSVYVKSVSFIPTHSKAFCFSALGFSLCLALGTVNIAFADGIITDKAAPKTQQATILQTGNGIPQVNIQTPTSAGVSVNQYAQFDVGNRGAILNNSRSNTQTQLGGWIQGNPWLTRGEARVVVNQINSSHPSQLNGYIEVGGRRAEVVIANPAGIAVNGGGFINASRATLTTGQPQYQAGDFSGFKIRQGNAVIAGHGLDARDTDFTRILVANKITLISTAEQAGIRNQGQLFASSGNVAIDANGRLVNSGTMAAANVQDMNNTAEHKVNIRSQAFENSGTAVSQQGTQIHSQSIQNTGKLLSAGTEDLAVSGSLNNQNGEIATNQQLIIHDGQQSTVVIDNTNGTIQSGRDVAIQAKSLSNNGTLAADNKLDIALQDDFYVERKIVAGNELSLSTRGSLKNSHTLQAGKRIRIKANNLDNAVQGNIQSGGTTDIGTQHNLTNRGLIDGQQTKIQAGQMNNIGTGRIYGDNIAIAATRLDNQDENGTGAAIAARENLNLGIEQLNNRENSLIYSGNDMAVGGALDTNDQATGKAQRIHNAGAIIEAAGKMRLGVEKLHNTNEHLKTQLVETGRERIVDYEAFGRHELLREGTQHELGWFVYNNESDHLRTPDGVAHENWHKYDYEKVTQETQVTGTAPAKIIAGSDLIIDSKAVFNSD

SEQ ID NO: 65299 - protein, 1229 aa, Neisseria gonorrhoeae
  MISC_FEATURE (1228)..(1228): X=any amino acid
WRARRKGHDETGHREQNYTLPEEITRDISLGSFAYESHSKALSRHAPSQGTELPQSNRDNIRTAKSNGISLPYTPNSFTPLPGSSLYIINPANKGYLVETDPRFANYRQWLGSDYMLGSLKLDPNNLHKRLGDGYYEQRLINEQIAELTGHRRLDGYQNDEEQFKALMDNGATAARSMNLSVGIALSAEQAAQLTSDIVWLVQKEVKLPDGGTQTVLMPQVYVRVKNGGIDGKGALLSGSNTQINVSGSLKNSGTIAGRNALIINTDTLDNIGGRIHAQKSAVTATQDINNIGGILSAEQTLLLNAGNNINNQSTAKSSQNAQGSSTYLDRMAGIYITGKEKGVLAAQAGKDINIIAGQISNQSDQGQTRLQAGRDINLDTVQTGKYQEIHFDADNHTIRGSTNEVGSSIQTKGDVTLLSGNNLNAKAAEVGSAKGTLAVYAKNDITISSGIHAGQVDDASKHTGRSGGGNKLVITDKAQSHHETAQSSTFEGKQVVLQAGNDANILGSNVISDNGTRIQAGNHVRIGTTQTQSQSETYHQTQKSGLMSAGIGFTIGSKTNTQENQSQSNEHTGSTVGSLKGDTTIVASKHYEQTGSNVSSPEGNNLISTQSMDIGAAQNQLNSKTTQTYEQKGLTVAFSSPVTDLAQQAIAVAHKAAKQVGQSKNDRVNAMAAANAGWQAYQTGKGAQNLANGTTNAKQVSISITYGEQQNRQTTQVQANQAQASQIQAGGKTTLIAEGAAEQSNINITGSGVSGRAGTGLIADKQIHLQSAEQSNTERSQNKSAGWNAGAAVSFGQGGWSLGVAAGGNVGKGYGYGDSVTHRHSHIGDKGSQTLIQSGGDTIIKGAQVRGKGVQVNAKNLSIQSVQDRETYQSKQQNAGAQVTVGYGFSASGDYSQSKIRADHASVTEQSGIYAGEDGYQIKVGNHTGLKGGIITSSQSAKDKGKNRFSTGTLAGSDIQNYSQYEGKSFGLGASVAVSGKTLGQGAKNKPQDKHLTSIADKNGASSSVGYGSDSDSQSSITKSGINTQKHQITDEAAQIRLTGKIAAQTKADIDTNVTTDTAERHSGSLKNIFDKDRVQSELDLQRTVSQDFSKNVQQTNTEINQHLDKLKADKEAAETAAAEALANGDMETAKRKAHEAQDAAAKADNWQQGKVILNMLASGLAEPTQSGAGIAAATASPDVSYAIGQHFKDLAGQNANGKLTASQETAHVLAHAVLGAAVAAAXG

SEQ ID NO: 65300 - protein, 481 aa, Neisseria gonorrhoeae
MSTQTNFDLVLFGATGDLAMRKLLPCLYQAHVAGLLHPEGRILGVSRSELDTEGFLAKVETSSKIHVKENFSGEAWASFVERLAYLKVDVTQPDDFAALGDLVKARKETDNVVIYLSTAPKFFAQACENLAAIGLNADNVRVVLEKPLGTDLASSQQINTDVARYFKEGQIYRIDHYLGKESLQNLLALRFANVMFEPLWNNKYIESVQLTIAEQLGVEERGEFYDITGALRDMVQNHLMQMLCMTAMEAPAGLDADAVRDEKVKVIKSLKPLTIESVNENVVRGQYTAAKGMNGYLEEINVPQDSFTETYVAIKAEIENERWKGVPFYLRTGKRMAGKVAEIVLNFRPLQNHIFDNSQTAPNRLVIELQPNESVRLYTQVKTPGAGNKVEVTPLGVDLGKAVEGRRAEAYERLLLDVINGKLALFNRRDELEAAWEYVMPILENWANNTTPPHGYGAHSWGPEAARELLARDGNKWHEEQ

SEQ ID NO: 65301 - protein, 259 aa, Neisseria gonorrhoeae
MSATIPPKIIRYDSNPTDVYFFGTCVLDLFMPEAGMDAIALIEQQGIRVHFPMAQSCCGQPAYSSGHPTEAFDVAKVQLDLFPENWPIVVPSGSCGGMMKHHWPTLFKNTEYESKAVDCANRIIEFTHFLLAIGYKPEDKGEPVKVAVHTSCAARREMNVHLSGWQLIDGMENVERIVHDHESECCGFGGTFSVKQADISGAMVTDKVAALKETGATEIISADCGCMMNIGGKIAKDEPDMPRPKHIASFLLERTGGKV

SEQ ID NO: 65302 - protein, 568 aa, Neisseria gonorrhoeae
  MISC_FEATURE (216)..(216): X=any amino acid
MRIDVRKRPPSRKTSIGSIQMKHLHDLPAWSKLWNHFDDSKTLHMREMFEQDPQRAERYWLQVGGLTLDYSKNRINDETMSLLFELAREAGVPERMRQMFHGEKINTTENRAVLHVALRNRTNSPIMVDGEDVMPKVNRVLQRMGEFAHEVRSGSWLGYTNQVITDVVNIGIGGSDLGPLTMCTALKPFGHPRLNMHFVSNVDGSQLRDVLSKVHXETTLFIIASKTFTTQETLTNALTAREWFLNHAGDEEAVAKHFAAVSTNRKAVAEFGIDIANMFEFWDWVGGRYSLWSAIGLPIMLYLGEENFIEMLNGAHLMDQHFINTPLERNLPVILALIGIWYINYYGGGSHVIAPYDQHLHRLPKFIQQLDMESNGKQVTLDGKAVGHETSPIIWGETGINGQHAFFQLLHQGTHITPIDLIASLEKRSNLPGHHEILLANVFAQAEAFMCGKTPDEVRAELKAQGMDEARIEELVPHKTFSGNRPTNLILMDKVNPRNMGSLIAMYEHKTFVQGIIWGINSFDQWGVELGKQLAKTILGELTGETEPQKHDSSTERLINLYLQTNRK

SEQ ID NO: 65303 - protein, 267 aa, Neisseria gonorrhoeae
MPSVELLLGIVGLPRSTFYYQLAVQSAEGKYADLKRHIHDIYQRYKGRYGYRRIAAAIRHAGIPVNHKKVSRLMAKTGLKAVIRRRKYRSFKGEVGKVAPNILQRCFHSEKPNEKMVTDVTKFDVGGEKIYLSPIMDLFNGEIVSYRIQTRPTFDLAGEILKGAPEKPGPSEKPMLHSDQGWQYQMFFYQKQLKGNGLVQSLSRKGNCLDNAAMESFFGTLKSECFHTCKYDSVTESEAALHEYIRYYNNDRIKLKLKGLSPVQYRI

SEQ ID NO: 65304 - protein, 172 aa, Neisseria gonorrhoeae
MKHRANRFRTICTAAVRRLVLIFVNSLYFSISDSLVRKWVARYRLHGESGIKRRKHTTKYSVEYKLEAIRPVTGQGMSQKAAADQLNLPECSVLPQWLRLYRLNGINGLKPKPKGRKPVKKQYPPQTKKADYLKTKEELFAELAYLKAEAAVLKKLDALKEVRQKERNSSQG

SEQ ID NO: 65305 - protein, 296 aa, Neisseria gonorrhoeae
MSVLINKDTKVLVQGFTGKNGTFHSEQALAYGTKVVGGVTPGKGGQTHLDLPVFNTMKEAVKETGADASVIYVPAPFVLDSIVEAVDSGVGLVVVITEGVPTLDMLKAKRYLETNGNGTRLVGPNCPGVITPGECKIGIMPGHIHTPGRIGIISRSGTLTYEAVAQTTNLGLGQSTCIGIGGDPIPGMNQIDALKLFQEDPDTDAIIMIGEIGGTAEEEAAEYIQSNVTKPVVGYIAGVTAPKGKRMGHAGAIISGGKGTAEEKFAAFEKAGIAYTRSPAELGTTMLEVLKAKGLA

SEQ ID NO: 65306 - protein, 982 aa, Neisseria gonorrhoeae
RSADKCRLNAASDGIRESATISVFLYFFRRHPLCATIIPDHSHDNDTIRIRGARTHNLKNIDLDIPRHKLVVVTGLSGSGKSSLAFDTLYAEGQRRYVESLSAYARQFLQMMDKPDVDLIEGLSPAISIEQKSTSHNPRSTVGTVTEIHDYLRLLYARVGTPYCPEHKLPLSSQTVSQMVDAVLKLPEDTRVMILGPAVRERKGEFVDFFADLQAQGFARVRVDGEVYQLDEVPKLEKNIKHNIDVVIDRVKVKADIKQRLAESFETALRHGNERALAMEMDSGEEHWFSARFACPVCSYSLPELEPRLFSFNNPMGSCPTCDGLGNTNFFDPEKVVAHPELSLATGAIDGWDKRNQFYFQMIQSLAHHYKFDVNVAWETLPEKVKKVVLHGSGKEVIDFTYLSERGTTFNRSHAFEGIIPNLERRYRETDSETVREKLREYQNHRACPSCGGARLRKEARYVYVGGEPLHEVSAWPLTKTHRFFETLDLDGNKKQIAEKILKEITERLGFLINVGLDYLNLSRSAETLSGGEAQRIRLASQIGSGLTGVMYVLDEPSIGLHQRDNDRLLATLKRLRDLGNSVIVVEHDEDAIREADFVVDMGPGAGEHGGNVLIADTPENVAKCEKSVTGQYLGGKKSIAVPSERTPVNPGRMLVLKGARGNNLKNVTLELPLGLITCITGVSGSGKSTLINDTLAKITARELNRAQEEPAPYDDIRGLEHLDKVINVDQSPIGRTPRSNPATYTGLFTPIRELFAGVPLSRERGYNVGRFSFNVKGGRCEACQGDGVIKVEMHFLPDVYVPCEVCHGKRYNRETLEIQYKGKNISQVLDMTVEEAREFFDAVPTVSRKLQTLMDVGLGYIRLGQSATTLSGGEAQRVKLALELSKRDTGRTLYILDEPTTGLHFADIALLLEVIGRLKGKGNSIVIIEHNLDVIKTADWIVDLGPEGGDGGGKVIAKGSPEEVAKVKGSYTGKYLKVVLK

SEQ ID NO: 65307 - protein, 156 aa, Neisseria gonorrhoeae
MYKQYADWNRLSYNAPIYVGKAVPKGWRQARNSDNALNQSTELFHRLKEHSRSIAAVSDLDPSDFMCRFVIFEGAGSDMIGTIEAALIKLHKPLWNSCVDGFGNHDPGKGRYEQAKSDWDVLHSGRVWADRLNGIPNSYESILENINTHLEIIKRK

SEQ ID NO: 65308 - protein, 942 aa, Neisseria gonorrhoeae
MMDEKLNFSYLFGSNAPYIEELYEAFLENPDAVDEKWKQYFTDLSKQPGTVAVDVAHTPIRESFVTLAKKKIASAVAGGADEAMLKKQVSVLRLISAYRIQGVGAAQLDPLKRIPPRDIEALDPKFHGLSDADMALRFNMGEGDFANRGKLLLSQIISNLKQTYCGHIALEYIYIPNTEERRWVRNYFESVLSTPHYNADQKRRILKEMTAAETLERYLHTKYVGQKRFGVEGGESAIAGLNYLIQNAGKDGVEEVIIGMAHRGRLNVLVNILGKKPGDLFAEFEGRAEIKLPSGDVKYHMGFSSDIATPHGPMHVSLAFNPSHLEIVNPVVEGSARAKQKRLGENGRDKVLPVLIHGDSAFIGLGVNQATFNLSKTRGYTTGGTVHIVINNQIGFTTSDIRDTRSTVHCTDIAKMVSAPVIHVNGDDPERVCFAIQAALDYRKKFHKDIVIDVVCYRKWGHNEGDDPTLTQPMMYKKVSQHPGARALYTEQLIAEGVVTQVEADGYIQAYRDALDKGEHVEQTTLSNFQRTQIDWSKYQGKDWREKIETGLPAADIERLTEKFTAVPEGFALHPTAKRVIEARKAMASGKQAIDWGMAETLAYASLLTKGHGVRISGEDSGRGTFSHRHAVLHDQKREKWDDGTYVPLRNMGEGLGEFLVIDSILNEEAVMAFEYGFACSAPDKLTIWEAQFGDFANGAQVTIDQFLSSGETKWGRLCGLTTILPHGYDGQGPEHSSARVERWLQLCSENNMQVIMPSEASQMFHLLQRQVLGSYRKPLVIFMSKRLLRFKGAMSPLENFTEGSTFRPVIGDTAERASNDSVKRVVLCAGQVYYDLEAGRAERKLEDDVAIVRVEQLYPFPYDEVKAELAKYPNAKSVVWAQEEPKNQGAFYQIRHRIEDVISEEQKLSYAGRPSSASPAVGYSSKHIAQLKQLVEDALAL

SEQ ID NO: 65309 - protein, 544 aa, Neisseria gonorrhoeae
MTKFIFVTGGVVSSLGKGIAAASIAAILESRGLNVTMLKLDPYINVDPGTMSPFQHGEVFVTDDGAETDLDLGHYERFIDSTMTRRNSFSTGQVYENVIAKERRGDYLGGTVQVIPHITDEIKRRIHEGAAGYDVAIVEIGGTVGDIESLPFLEAIRQMRSQLGRNNTLFAHLSYVPYIAAAGEIKTKPTQHTVKEMLSIGLQPDILICRMDRKMPADERRKIALFCNVEERAIVGSYDVDSIYECPEMLHDQGIDNIITEQLQLNVQQADLTAWKKIVHAVKNPKHTVKIAMVGKYVDLTESYKSLIEALKHAGIHTETDVQITFVDSESIEKNKGDVSVLKDMDAILVPGGFGSRGVEGKIAAVRYARENNVPYLGICLGMQIALIEYARDVAGLKGANSTEFDLKCAAPVVALIDEWQTADGSVETRDESADLGGTMRLGAQEVELKAGSLAVKIYGSGHIRERHRHRYEVNNNYVSALEQAGLVIGGVSAGRERLVETIELPNHPWFFACQFHPEFTSNPRKGHPLFTAFVKAALNNKKA

SEQ ID NO: 65310 - protein, 383 aa, Neisseria gonorrhoeae
MLKSAFKNRRFQAILRMNTTSNTSNIIVGLSGGVDSSVTAALLKQQGYQVRGVFMQNWENDDNDEYCSIKQDSFDAIAVADIVGIDIDIVNFAAQYKDKVFAYFLQEYSAGRTPNPDVLCNAEIKFKCFLDYAVGQGADTIATGHYARKEARNGVHYLLKGLDRNKDQSYFLYRLKPFQLERAIFPLGGLEKPEVRRLAAEFNLPTAAKKDSTGICFIGERPFREFLQKYLPTDNGKMVTPEGKTIGEHVGLMFYTLGQRKGLGIGGAGEPWFVAAKDLTKNELIVVQGHDHPLLYTRSLVMNDLSFTLPERPKAGRYTCKTRYRMADAPCELCYLDDETAELVFDEPQWAVTPGQSAVLYDVDICLGGGIIQTTDKPVIITR

SEQ ID NO: 65311 - protein, 427 aa, Neisseria gonorrhoeae
MSKSIKLNVPGRAGLELPVLEASIGHDVVDIRGLTKNTGLFAFDPGFVSTASCESKITYIDGDQGLLYYRGYPIEQLAEKSDYLEVCYLLIYGELPTPEQKAEFDNTVRRHTMVHEQLTWFFRGFRRDAHPMAMMVGVVGALSAFYQDSLDITNPEHRKIAIYRLISKIPTIAAMCYRYSNGLPFNYPKNNLSYSENFLHMMFATPCEDYKPNPVLARALDRIFILHADHEQNASTSTVRLAGSSGANPFACIAAGIACLWGASHGGANEAVLKMLDEIGDVSNVAAYMEGVKQRKYRLMGFGHRVYRNMDPRASIMRETCYEVLKELGLEDSPKFKLAMELEQIALKDPFFIERKLYPNVDFYSGIVLSALGIPTEMFTVIFALSRSVGWISHWHEMISDPSLKIGRPRQLYTGSERRDYVPAGER

SEQ ID NO: 65312 - protein, 82 aa, Neisseria gonorrhoeae
MMVFDDIAKRKIRFQTRRGLLELDLIFGRFMEKEFEHLSDKELSEFSEILEFQDQELLALIHGHSETDKGHLIPMLEKIRRA

SEQ ID NO: 65313 - protein, 587 aa, Neisseria gonorrhoeae
MGFPVRKFDAVIVGGGGAGLRAALQLSKSGLNCAVLSKVFPTRSHTVAAQGGISASLGNVQEDRWDWHMYDTVKGSDWLGDQDAIEFMCRAAPEAVIELEHMGMPFDRVESGKIYQRPFGGHTAEHGKRAVERACAVADRTGHAMLHTLYQQNVRANTQFFVEWTAQDLIRDENGDVVGVTAMEMETGEVYIFHAKAVMFATGGGGRIYASSTNAYMNTGDGLGICARAGIPLEDMEFWQFHPTGVAGAGVLITEGVRGEGGILLNADGERFMERYAPTVKDLASRDVVSRAMAMEIYEGRGCGKNKDHVLLKIDHIGAEKIMEKLPGIREISIQFAGIDPIKDPIPVVPTTHYMMGGIPTNYHGEVVVPQGDEYEVPVKGLYAAGECACASVHGANRLGTNSLLDLVVFGKAAGDSMIKFIKEQSDWKPLPANAGELTRQRIERLDSQTDGENVDALRRELQRSVQLHAGVFRTDEILSKGVQEIMAIAERVKRTEIKDKSKVWNTARIEALELDNLIEVAKATLVSAEARKESRGAHASDDHPERDDENWMKHTLYHSDTNTLSYKPVHTKPLSVEYIKPAKRVY

SEQ ID NO: 65314 - protein, 277 aa, Neisseria gonorrhoeae
MKKTAYAILLLIGFASAPAFAETRPADPYEGYNRAVSKFNDQADRYIFAPAARGYRKVTPKPVRAGVSNFFNNLRDVVSFGSNILRLDIKRASEDLVRVGINTTFGLGGLIDIAGAGGVPDNKNTLGDTFASWGWKNSNYFVLPVLGPSTVRDALGTGITSVYPPKNIVFHTPAGRWGTTAAAAVSTREGLLDLTDSLDEAAIDKYSYTRDLYMKVRARQTGATPAEGTEDNIDIDIDELVESAETGAAEPAVHEDSVSETQAEAAGEAETQPGTQP

SEQ ID NO: 65315 - protein, 127 aa, Neisseria gonorrhoeae
MEPSSYAAEKKGKSGIRRVINAFGYSIDGIAAAYRYEVAFRQVLWLNALLVCAAFFWVSETAVRLPLIIASFVSVIVELFNTAVEAAVDHTSTEKHELAKRAKDAGSAAQLVAMLMLAAVWLSALFG

SEQ ID NO: 65316 - protein, 127 aa, Neisseria gonorrhoeae
MKLTVRNYHLDGYGHVNNARYLEFLEEARWAFFEKRGLMHELAGLILIVARIDIRYSRPAVEGDVLQFSCRLKTPGMRRIVLTQTITLPNGKTAAEADITLMPVHAATQRTVSLPATLARALEALSE

SEQ ID NO: 65317 - protein, 562 aa, Neisseria gonorrhoeae
MLNKDQFADNHFIRTIIEDDLKSGKHEAVQTRFPPEPNGYLHIGHAKSICLNFGLAYIYDGLCNLRFDDTNPEKENDEYVNAIKEDVEWLGFHWAGEPRFASDYFDRLYDYAVGLIKDGKAYVDDLTPEEMREYRGTLTEAGKNSPYRDRSIEENLDLFTRMKNGEFPDGSKTLRLKIDMAAGNINMRDPVIYRIRRAHHHNTGDKWCIYPMYDYTHCISDAIEGITHSLCTLEFEAHRPLYDWVLDNIPALHATRPRQYEFSRLELLYTITSKRKLNQLVVEKHVSGWDDPRMPTISGMRRRGYTPEGVRLFAKRAGISKSENIVDMSVLEGAIREELENSAPRLMAVLNPLKVTLTNFQAGKTQSRRAAFHPNHEEMGDREVPVSQTIYIEADDFAENPPKGFKRLIPGGEVRLRHGYVIKCGEVVKDEAGNVVELKCSIDHDTLGKNPEGRKVKGVIHWVSAEHAAEIKVRLYDRLFTVERPGAVRGEDGEYLPFTDFLNPESVKEITAYAEPAAKDLPAESRWQFERIGYFVTDRQDHGKDTPVFNRTVTLKDSWQPK

SEQ ID NO: 65318 - protein, 172 aa, Neisseria gonorrhoeae
MMESKFFFLLLRFAGSVLPPSYMRGIGIVGRRVRGFLARRVSPHIGRGVNIERGAYVFPDTVLGDGSGIGANCEICRGLVVGKNVMMGPECLLYSTNHKFDRENKRFEGYTEIRPITLEDDVWPGRRVIVMAGVTVGRGSVVGAGAVVTKDIPPYSLAAGNPAVVKKNLPEG

SEQ ID NO: 65319 - protein, 300 aa, Neisseria gonorrhoeae
MSSLMTLFSVLVPMFAGFFIRVPKPYLPASDKVLSVLVYAVLLLIGVSLSRVEDLGSRLGDMALTVLWLFVCTVGANLLALAVLGKLSPWRIGGKGKGVSVGVSGSVRQLGCVLLGFVSGKLMCDIWMPSENAGMYCLMLLVFLIGVQLKSSGVSLRQVLLNRRGIRLSVWFILSSLSGGLLFAASADGVSWTKGLAMASGFGWYSLSGLVMTEAYGAVWGSIMLLNDLARELFALAFIPLLMKRFPDAAVGVGGATSMDFTLPVIQGAGGLEVVPVAVSFGVVVNIAAPFLMVVFSTLG

SEQ ID NO: 65320 - protein, 213 aa, Neisseria gonorrhoeae
MGCFMIQNVVTSIILYSGTAVDLLLILMLFFAKKKSRKDIINIYLGQFLGSVSLILLSLLFAFVLDYIPSKEILGLLGLIPIFLGLKVLLLGDSDGESIAKEGLRKDNKNLIFLVAMITFASCGADNIGVFVPYFTTLNLANLIVALLTFLVMIYLLVFSAQKLAQVPSVGETLEKYSRWFVAVVYLGLGIYILIENNSFDMLWTVSGQEKIL

SEQ ID NO: 65321 - protein, 292 aa, Neisseria gonorrhoeae
MNYAKEINALNNSLSDLKGNINVSFEFFPPKNEQMETMLWDSIHRLQTLHPKFVSVTYGANSGERDRTHGIVKRIKQETGLEAASHLTGIDASHDELRQIAKDYWDSGIRRIVALRGDEPAGYEKKPFYAEDLVKLLRSVADFDISVAAYPEVHPEAKSAQADLINLKRKIDAGANHVITQFFFDVERYLRFRDRCVMLGIDVEIVPGILPVTNFKQLGKMAQVTNVKIPKWLSQMYEGLDDDQGTRNLVAASIAIDMVKVLSREGVKDFHFYTLNRSELTYAICHILGARP

SEQ ID NO: 65322 - protein, 55 aa, Neisseria gonorrhoeae [sequence omitted]

SEQ ID NO: 65323 - protein, 41 aa, Neisseria gonorrhoeae
MQVLSSLKTAKQRHRDCQIVRRRGKVYVICKSNPRFKSRQR

SEQ ID NO: 65324 - protein, 201 aa, Neisseria gonorrhoeae
MMTLYSGITCPFSHRCRFVLYEKGMDFEIKDIDIYNKPEDLAVMNPYNQVPVLVERDLVLHESNIINEYIDERFPHPQLMPGDPVMRGRGRLVLYRMEKELFNHVQVLENPAAANKEQAKAREAIGNGLTMLSPSFSKSKYILGEDFSMIDVALAPLLWRLDHYDVKLGKSAAPLLKYAERIFQREAFIEALTPAEKAMRK

SEQ ID NO: 65325 - protein, 180 aa, Neisseria gonorrhoeae
MKTHRKTCSAVCFAFQTASKPAVSIRHPSEDIMSLKTRLTEDMKTAMRAKDQVSLGTIRLINAAVKQFEVDERTEADDAKITAILTKMVKQRKDGAKIYTEAGRQDLADKENAEIDVLHRYLPQMLSAGEIRTAVEAAVAETGAAGMADMGKVMVVLKTRLAGKADMGEVNKILKTVLTA

SEQ ID NO: 65326 - protein, 146 aa, Neisseria gonorrhoeae
MPKVTFYTHVDQIPLFTCRLIARAIRDGGRILVWSDSFGRLQELDKMLWQYEAESFIPHEIWETEEAMPSDTSVLLACDGNLPRIPEGMAVLNLSDGFWNTASVLPARVLEIVGNSLEDLADARERFTAYRRSGFAIEHHGMEGKA

SEQ ID NO: 65327 - protein, 468 aa, Neisseria gonorrhoeae
MEFSTKTEILQEQQAGAQLFVCADKAPEHNTAAHALFSALEEGQNFSDTKIPTDNGLQAVAVVRLEKTDRAALNKAAAEAAKWAQNQETVNVDVHAFDEAQAAAVAEAFAIAFGNAAYRFDRYKKEAKPAKFSQAVFHSAHEAAVKEALRVAEAQVYGQSLCRDLGNAAPNECTPEFLARTAKAEAEKLGAHAKIIEKDYIKENMGSFWSVAKGSVEDPYLVELSYFGAADKEAAPVVLVGKGITFDTGGISLKPGLNMDEMKFDMCGAATVISTFCAAVKLQLPINLIAIVATCENMPSGAANKPGDVVKSMKGLTIEVLNTDAEGRLILCDALTYAEQFKPKAVIDVATLTGACIVALGHDVSGVMGNNQDLIDSLLAASYNVDDKAWQLPLFETYKDQLKSNFADIPNIGTPGAGTITAATFLSYFTEGYPWAHLDIAGTAWKSGAEKGATGRPVPLLMNYLRNL

SEQ ID NO: 65328 - protein, 228 aa, Neisseria gonorrhoeae
MADLTFEQAVSTIVGMKDEIVRALGETFVMVGLSTTFAVIFGTLLGVLLFVTSSRQLHYNKPVNFLLDNLVNLMRAFPFVILMIAMIPATRAIVGSTIGPVAASLVLSVSGLFYFARLVEQNLREVPKGVIEAAAAMGAPPIAIVLKVLLNEARAGMVSSITVLAIGLLSYSAAAGMIGGGGLGDLAIRYGYYRYQTEVIVFIVALLVLLVILIQSTGNALARKLDKR

SEQ ID NO: 65329 - protein, 288 aa, Neisseria gonorrhoeae
MKTFFKTLSAAALALILAACGGQKDSAPAASAAAPSADNGAAKKEIVFGTTVGDFGDMVKEQIQAELEKKGYTVKLVEFTDYVRPNLALAEGELDINVFQHKPYLDDFKKEHNLDITEAFQVPTAPLGLYPGKLKSLEEVKDGSTVSAPNDPSNFARALVMLNELGWIKLKDGINPLTASKADIAENLKNIKIVELEAAQLPRSRADVDFAVVNGNYAISSGMKLTEALFQEPSFAYVNWSAVKTADKDSQWLKDVTEAYNSDAFKAYAHKRFEGYKYPAAWNEGAAK

SEQ ID NO: 65330 - protein, 861 aa, Neisseria gonorrhoeae
MLEAYRKAAAERAALGIPALPLNAQQTADLVELLKNPPAGEGEFLVELLAHRVPPGVDDAAKVKASFLAAVAEGSASSPLVSPKYATELLGTMLGGYNIHALIELLDDDKLAPIAAKGLKHTLLMFDSFHDVQEKAEKGNKYAQEVLQSWADAEWFASRAKVPEKITVTVFKVDGETNTDDLSPAPDAWSRPDIPLHALAMLKNPRDGITPDKPGEVGPIKLLEELKAKGHPVAYVGDVVGTGSSRKSATNSVIWHTGEDIPFVPNKRFGGVCLGGKIAPIFFNTQEDSGALPIEVDVSALKMGDVVNILPYEGKIVKNGETVAEFELKSQVLLDEVQAGGRINLIIGRGLTAKAREALKLPASTAFRLPQAPAESKVGFTLAQKMVGRACGLPEGQGVRPGTYCEPRMTTVGSQDTTGPMTRDELKDLACLGFSADMVMQSFCHTAAYPKPVDVKTHKELPAFISTRGGVSLRPGDGVIHSWLNRLLLPDTVGTGGDSHTRFPIGISFPAGSGLVAFAAATGVIPLDMPESVLVRFSGKLQPGVTLRDLVNAIPLYAIKQGLLTVAKAGKKNIFSGRILEIEGLPDLKVEQAFELTDASAERSAAGCTVKLNKEPIIEYMKSNVVLMKNMIANGYQDPRALERRIKAMEKWLANPELLEADKDAEYAAVIEINMDDIKEPIIACPNDPDDVCFMSERSGTKIDEVFIGSCMTNIGHFRAASKLLEGKSDIPVRLWVAPPTKMDAKELSDEGHYGVLGRAGARMEMPGCSLCMGNQAQVREGATVMSTSTRNFPNRLGKNTFVYLGSAELAAICSKLGKIPTVEEYQANIGIINEQGDKIYRYMNFNEIDSYNEVAETVNV

SEQ ID NO: 65331 - protein, 288 aa, Neisseria gonorrhoeae
MAGETITAADYIKHHLQSLTSLSDVTQGQGLKNIADFSFINLDAVFFAVLLGVIGSFLLWRGAKKATAGVPGRFQAAVEILFEFVDDMCKSIIHSEKSKKAVAPLGLTLFVWIFLMNAMDMLPVDLLPMVWQGITGNHHALLRIVPTADLNTALALAVGVLLICIYYNIKIKGLGGWFHELFSAPFGAKLAPANFLLNLVEFLSKTVSHGMRLFGNMYAGELVFLLIALLVGAWAASGSVEVMDPILFVFHIIAGLAWAIFHILVITLQAFIFMALAFVYIGQAHDAH

SEQ ID NO: 65332 - protein, 337 aa, Neisseria gonorrhoeae
MQVYYDKDADLSLIKGKTVAIIGYGSQGHAHAANLKDSGVNVVIGLRHGSSWKKAEAAGHVVKTVAEATKEADVVMLLLPDETMPAVYHAEVAANLKEGATLAFAHGFNVHYNQIVPRADLDVIMVAPKGPGHTVRSEYKRGGGVPSLIAVYQDNSGKAKDIALSYAAANGGTKGGVIETTFREETETDLFGEQAVLCGGVAELIKAGFETLTEAGYAPEMAYFECLHEMKLIVDLIFEGGIANMNYSISNNAEYGEYVTGPEVVNASSKEAMRNALKRIQTGEYAKMFIQEGNVNYASMTARRRLNADHQVEKVGARLRAMMPWITANKLVDQDKN

SEQ ID NO: 65333 - protein, 515 aa, Neisseria gonorrhoeae
MQLNPAEISDLIKAKIENLSVNAEVSTRGTVISVTDGIVRIHGLSDAMQGEMLEFPGNTLGLAMNLERDSVGAVVLGEYEHIKEGDTVTCTGRILEVPVGRELVGRVVDALGRPIDGKGPINTTLTAPVEKIAPGVIARKSVDQPMQTGLKAIDSMIPVGRGQRELIIGDRQTGKTAVALDAIVNQKGTGVICIYVAIGQKASSIANVVRKLEEHGAMEHTIVVAATASEAAALQYIAPYSGCTMGEFFRDRGEDALIVYDDLSKQAVAYRQISLLLRRPPGREAYPGDVFYLHSRLLERAARVNEHEVEKLTNGEVKGKTGSLTALPIIETQAGDVSAFVPTNVISITDGQIFLETDLFNAGIRPAINAGISVSRVGGAAQTKVIKKLGGGIRLALAQYRELAAFSQFASDLDEATRKQLEHGEVVTELMKQKQFSTLNTAEMALTLWAINNGSYSDVPVAKALAFESEFLSFVRTQHPEVLEAVNASGAMSDESEKTLEAAMKSFKSSYAYQA

SEQ ID NO: 65334 - protein, 163 aa, Neisseria gonorrhoeae
MRHILSVLIENESGAMSRVVGLFSARDYNIDSLAVAPTEDKTLSRMTIVTHGDEQVIEQITKQLNKLIEVIKVVDLNESRFVERELMLVKVRAAGKDRDEFLRLTEIYRGSIIDVTDRSYTIEITGSTDKLDSFLETVGRAQILETVRTGAAGIGRGERILKI

SEQ ID NO: 65335 - protein, 575 aa, Neisseria gonorrhoeae
MQLSGAQIIVQSLKAEGVEYVFGYPGGAVIEIYDALFQLNKFKHILTRHEQAAVHAADAYARVSGKVGVALVTSGPGVTNALTGIATAYTDSIPMVVISGQVGNSLIGTDAFQEVDTVGITRPCVKHNFLVTDINELVETIKKAFQIAASGRPGPVVLDVPKDVTQAMAKFSYPQEDIFIRSYQPVVQGHIGQIKKAVQMLASAKRPVVYFGGGVVLGNASEELTRFVRMTGAPCTGTLMGLGAYPSGDRQFLGMLGMHGTYEANLAMQNADVVLAVGARFDDRVVSVPSKFFEKAKKVIHIDVDPSSIAKRVKADIPIVGDVKNILSEMVALWQKQESVPSEDALGKWWKTIEEWRSRDCLWFDNGSEIIKPQYVIQKLAEITGNSAIITSDVGQHQMFAAQYYPFERPRQWLNSGGLGTMGVGLPYAIGAKLAAPDQDVFCITGDGSIQMNIQELSTCFQYRIPVNVITLNNGYLGMVRQWQEIYYGGRESETYFDSLPDFVKLAEAYGHIGIRVDNKSDVEGALLEALNQKDRLVFIDFLTDQKQNVMPMVGNGKGLDEMVLPPHMRTDGKA

SEQ ID NO: 65336 - protein, 298 aa, Neisseria gonorrhoeae
MLTFQQIIFKLQTFWADKGCTVIQPFDMEVGAGTSHPATCLRALGPEPWFAAYVQPSRRPKDGRYGDNPNRLQHYYQFQVALKPAPANIQDLYLDSLRELGIDPKVHDIRFVEDDWENPTLGAWGLGWEVWLNGMEVTQFTYFQQVGGIDCTPVLGEITYGIERLAMYLQGVENVYDLVWAKTPDGNTVSYGDVYHQNEVEQSTYNFEYSDADWLLRQFNDYEAQAKRLFAEENAGLALPAYELVLKAGHTFNLLDARGAISVTERATYIGRIRALSRAVAQKYIESREKLGFPLIKK

SEQ ID NO: 65337 - protein, 221 aa, Neisseria gonorrhoeae
MQDNALTIALSKGRIFEETLPLLAAAGIAPTEEPEKSRKLIIGTNHENIRLVIVRATDVPTYVRYGAADFGIAGKDVLIEHGGTGLYRPLDLEIAKCRMMVAVRKGFDYEAASQPGCRLKIATKYPEIAASHFAGKGVHVDIIKLYGSMELAPLVGLSDAIVDLVSTGNTLKANGLEAVEHIVDISSYLVVNKAALKTKYALLEPIIQSFGGAVKAKWAFI

SEQ ID NO: 65338 - protein, 687 aa, Neisseria gonorrhoeae
MTTQTLLIELLTEELPPKALNNLGNHFAASVAEGLEKAQLVDGAAEFTAYASPRRLAVQVKNVKAVQADQKIVKKGPAVANAVKDGTPTKALEGFARGAGAKIEDLTIVHDGRQDVYAYEYVQTGRPLGGLLENIINQAVKKLPIPKVMRWGSSTFTFVRPVHGLIVLHGGDVVNVSVLGLQSGNQTLGHRFLSDGEIIIENADSYAAQMRGQGKVVASFAGRKAAIQTALEGQARRLNATVAADEALLDEVTALVEWPVVLEAGFEEHFLAVPQECLILTMQQNQKYFPLLDQNGKLMNRFLLVSNLQTEDPSHIIRGNERVLRARLSDAEFFYKQDQKATLESRLPKLANVVYHNKIGSQAERIERLQSIAAHIAKALGADAAAAERAARLAKADLVTEMVGEFPELQGTMGKYYARLDGETEEIAEAIEQHYQPRFAGDKLPESKIAAAVALADKLETLVGIWGIGLIPTGDKDPYALRRAALGILRMLMQYGLDVNELIQTAFDSFPQGLLNEKTPSETADFMQARLAVLLQNDYPQDIVAAVLAKQPRRLDDLTAKLQAVAVFKQLPEAAALAAANKRVQNLLKKADAELGAVNESLLQQDEEKALYAAAQGLQPKIAAAVAEGNFQTALSELASVKPQVDAFFDGVMVMAEDAAVKQNRLNLLNRLAGQMNAVADIALLGE

SEQ ID NO: 65339 - protein, 241 aa, Neisseria gonorrhoeae
MPRFYLPENLSVGQTVDLPDNIVRHLNVLRVRPNENITLFDGKGKAHTARLTVLEKHRAEAEILHEDTTDNESPLNITLIQSISSGDRMDFTLQKSVELGVTAIQPVISERCIVRLDGERAAKRLARWQEIVISACEQSGRNTVPPVLPIIGYREALDKMPSENTKLIMSINRACKLGDIRHPSGAIVFMVGPEGGWTEQEEQQAFEAGFQAVTLGKRILRTETAPLAAIAAMQTLWGDFT

SEQ ID NO: 65340 - protein, 602 aa, Neisseria gonorrhoeae
MVACLLKFRQRSSENRKHGFRRPLLYLVTICSRCIITDLQFNNKYTGTAMTESITRDSMQYDVVIVGAGPSGLSAAIKLKQLAEQNGREISVCVVEKGSEAGAHSLAGAVIDPIALNELIPDWKEKGAPLTRTVTQDKVLFLTEKKAFNLPITPNFDNHGNYIVSLGEVVRWLAEQAENMGVEIYPGFAAAEVLYHEDGSVKGIATGNMGVGKDGGPTDSFQPGMELWARQTLFAEGCRGSLSKQIIERFQLDQNSQPQTYGLGIKEVWEVPSEQHQPGLVVHSAGWPLDSKTYGGAFIYHFDDNKVAVGFVVGLDYQNPYLSPFEEFQRFKTHPEIRKTFEGGRRIAYGARSLIEGGLQSLPKLSFKGGVLIGDAAGFLNMPRIKGIHTSMKSAMLAAEAVFPLLENFEEVESFDSGKEAGNYQKLFEQSWLYQELYAARNVRPSFKWGVYLGSLYTGIDQMIFRGKAPWTLKHHGKDNEQLKKAAVCKPIDYPKPDGVLTFDRLSSVFLANLAHEENQPDHLVLNNPQTMIDVNYKEYASPETRYCPAGVYEIIEENGSPRLQINAANCVHCKTCDIKDPTQNITWICPEGASGPNYGGM

SEQ ID NO: 65341 - protein, 248 aa, Neisseria gonorrhoeae
MSTQDLSGKIALVTGASRGIGAAIADTLAAAGAKIIGTATGESGAAAISKRLAQWGGEGRVLNSAEPETVENLIADIEKTFGKLDILVNNAGITRDNLLMRMKEEEWDDIMQVNLKSVFRASKAVLRGMMKQRAGRIINITSVVGVMGNAGQTNYAAAKAGLIGFAKSMAREVGSRGITVNCVAPGFIDTDMTRALPEETRQTFTAQTALGRFGDAQDIADAVLFLASDQAKYITGQTLHVNGGMLMP

SEQ ID NO: 65342 - protein, 521 aa, Neisseria gonorrhoeae
MTQDKILILDFGSQVTRLIARRVREAHVYCELHSFDMPLDEIKAFNPKGIILSGGPNSVYESDYQADTGIFDLGIPVLGICYGMQFMAHHLGGEVQPGNQREFGYAQVKTIDSGLTRGIQDDAPNTLDVWMSHGDKVSKLPDGFAVIGDTPSCPIAMMENAEKQFYGIQFHPEVTHTKQGRALLNRFVLDICGAQPGWTMPNYIEEAVAKIREQVGSDEVILGLSGGVDSSVAAALIHRAIGDQLTCVFVDHGLLRLNEGKMVMDMFARNLGVKVIHVDAEGQFMAKLAGVTDPEKKRKIIGAEFIEVFDAEEKKLTNAKWLAQGTIYPDVIESAGAKTKKAHAIKSHHNVGGLPENMKLKLLEPLRDLFKDEVRELGVALGLPREMVYRHPFPGPGLGVRILGEVKKEYADLLRQADDIFIQELRNTTDENGTSWYDLTSQAFAVFLPVKSVGVMGDGRTYDYVVALRAVITSDFMTAHWAELPYSLLGRVSNRIINEVKGINRVVYDVSGKPPATIEWE

SEQ ID NO: 65343 - protein, 308 aa, Neisseria gonorrhoeae
MPSENTKGTTMTTHHVELRKVTKRFGAQKAVSQVDLVLKAGESVGLAGHNGAGKSTIMKLILGLITPTEGEVMLLGERTGSKAGARLRSQIGYLPETVALHPSLTGIETLDFYAKLKKQPLTQNRGLLERVGISQTAHRRVGTYSKGMRQRLALAQALLGEPKVLLFDEPTTGPDPASRQMFYEVVRELNGRGATILLSTHALAELDGHADRIVVMKNGVKVADGSMDELHVQSGLPLTVNIRLNAPRTLSSRWQPLSDGISYRAQCQAEERMELLGELGSLSDLAYFDIHTPTLDEMYARFLKREDV

SEQ ID NO: 65344 - protein, 187 aa, Neisseria gonorrhoeae
MPWNIPIFLTWLRVLLIPVLIVLFYLPFSWFSEEAVNVAAAVIFAVAALTDWFDGFLARLWKQTSDFGAFLDPVADKLMVAVSLLLLVKLDRTYVLFAMIIIGREITISALREWMAQMGKRSSVAVATVGKFKTAAQMLAIFFLLLNFPDFYGFNLVVIGNILMFIASLLTVWSMLYYLKMAWKEIA

SEQ ID NO: 65345 - protein, 622 aa, Neisseria gonorrhoeae
MIEKLTFGLFKKEDARSFMRLMAYVRPYKIRIVAALIAIFGVAATESYLAAFIAPLINHGFSAPAAPPDLSAAAGILSTLQNWREQFTYMVWGTENKIWTVPLFLIILVVIRGICRFTSTYLMTWVSVMTISKIRKDMFAKMLTLSSRYHQETPSGTVLMNMLNLTEQSVSNASDIFTVLTRDTMIVTGLTIVLLYLNWQLSLIVVLMFPLLSLLSRYYRDRLKHVISDSQKSIGTMNNVIAETHQGHRVVKLFNGQAQAANRFDAVNRTIVRLSKKITQATAAHSPFSELIASIALAVVIFIALWQSQNGYTTIGEFMAFIVAMLQMYAPIKSLANISIPMQTMFLAADGVCAFLDTPPEQDKGTLAPQRVEGRISFRNVDVEYRSDGIKALDNFNLDIRQGERVALVGRSGSGKSTVVNLLPRFVEPSAGNICIDGIDIADIKLDCLRAQFALVSQDVFLFDDTLFENVRYSRPDAGEAEVLSALQAANLQSLIDASPLGLHQPIGSNGSNLSGGQRQRVAIARAILKDAPILLLDEATSALDNESERLVQQALERLMENRTGIIVAHRLTTVESADRIIVMDGGKIIEQGTHDQLMFQNGYYTMLRNISGKDTAAVQTA

SEQ ID NO: 65346 - protein, 308 aa, Neisseria gonorrhoeae
MSFAFFFPGQGSQSLGMMNGFAEHVIVKNTFDEASAILGQDLWAMINGSDAEIIGQTVNTQPIMLAAGVAVYRAYLEVGGKTPAAVAGHSLGEYTALVAAEALDFADAVKLVRLRAELMQSAVPQGVGAMAAILGLEDEQVRQICAESAQGEVVEAVNFNSPGQVVIAGNAAAVGRTMAAAKEAGAKRALPLPVSVPSHCSLMKPAADKLAETLKTVEIKQPQIRVIHNADVAAYDDAGKIKDALVRQLYSPVRWTETVNALVSDGIAESAECSPGKVLAGLAKRINKAAACSALTDAGQITAFIEAH

SEQ ID NO: 65347 - protein, 297 aa, Neisseria gonorrhoeae
  MISC_FEATURE (27)..(27): X=any amino acid
MDILDKLVDLAQLTGSADVQCLLGGQXETLQREGLVHIVTAGSGYLCIDGETSPRPVGTGDIVFFPRGLGHVLSHDGKYGESLQPDIRQNGTFMVKQCGNGLDMSLFCARFRYDTHADLMNGLPETVFLNIAHPSLQYVVSMLQLESEKPLTGTVSVVNALPSVLLVLILRAYLEQDKDVELSGVLKGWQDKRLGHLIQKVIDKPEDEWNIDKMVAAANMSRAQLMRRFKSQVGLSPHAFVNHIRLQKGALLLKKTPDSVLEVALSVGFQSETHFGKAFKRQYHVSPGQYRKEGGQK

SEQ ID NO: 65348 - protein, 320 aa, Neisseria gonorrhoeae
MQYAKISGTGSYLPANRVSNDDLAQKVDTSDEWITARTGIKFRHIAAENEKTSDLAAEAARRALADAKLNINDIDLIIVATATPDMQFPSTATIVQQKLGITNGCPAFDVQAVCAGFMYALTTANAYIKSGMAKNALVIGAETFSRIVDWNDRTTCVLFGDGAGAVVLSASDKPGIIHSKLKADGNYLKLLNVPGQIACGKVSGSPYISMDGPGVFKFAVKMLSKIADDVIEEAGYTAEQIDWIVPHQANRRIIESTAKHLGLSMDKVVLTVQDHGNTSAASIPLALDAGIRSGQIKRGQNLLLEGIGGGFAWGAVLLQY

SEQ ID NO: 65349 - protein, 415 aa, Neisseria gonorrhoeae
MQLTAVGLNHQTAPLSIREKLAFAAAALPEAVRNLARSNAATEAVILSTCNRTELYCVGDSEEIIRWLADYHSLPIEEIRPYLYTLDMQETVRHAFRVACGLDSMVLGEPQILGQIKDAVRAAQEQESMGAKLNALFQKTFSVAKEVRTDTAVGENSVSMASASVKLAEQIFPDIGDLNVLFIGAGEMIELVATYFAAKNPRLMTVANRTLARAQELCDKLGVNAEPCLLSDLPAILHDYDVVVSSTASQLPIVGKGMVERALKQRQSMPLFMLDLAVPRDIEAEVGDLNDAYLYTVDDMVNIVQSGKEARQKAAAAAETLVSEKVAEFVRQQQGRQSVPLIKALRDEGEKARKQVLENAMKQLAKGATAEEVLERLSVQLTNKLLHSPTQTLNKAGEEDKDLVHAVAQIYHLDK

SEQ ID NO: 65350 - protein, 366 aa, Neisseria gonorrhoeae
MTALKTTPFHQAHQDAGAKPVDFAGWELPIHYGSQIAEHEAVRTDAGMFDVSHMLVTDVVGANAKAFFRKLIANDVAKLAFVGKALYSALLNDNGGVIDDLIVYRTNEAETQYRIVSNGATREKDTAQFHKVGQEFGVAFNPRYDLGMLAVQGPKAIEKLLTVKPEWADVIHGLKPFQGADLGNDWFVARTGYTGEDGVEVILPDTEAVAFFKALQTAGVQPCGLGARDTLRMEAGMNLYGNDMDDDTSPLEAGMGRTVDLKDESRDFVGKAALLALKEKGVAVKQVGLLLEKGGILRAHMEVLTDKGKGETTSGVFSPSLKQSIAIARVPKDFDGDTAKVLIRGKEADVRVLKLPFVRSGQKQFD

SEQ ID NO: 65351 - protein, 874 aa, Neisseria gonorrhoeae
MKTSELRQKFLKFFETKGHTVVRSSSLVPHDDPTLLFTNAGMNQFKDVFLGFDKRPYSRATTAQKCVRAGGKHNDLENVGYTARHHTFFEMMGNFSFGDYFKRDAIHFAWEFLTSPEWLNIPKDKLLATVYAEDDEAYNIWLNEIGMPSERIVRIGDNKGAKYASDNFWQMGDTGPCGPCSEIFYDHGKEIWGGIPGSPEEDGDRWIEIWNCVFMQFNRDEQGNMNPLPKPSVDTGMGLERMAAVMQHVHSNYEIDLFQDLLKAVARETGAPFSMEEPSLKVIADHIRSCSFLIADGVLPSNEGRGYVLRRIIRRAVRHGYKLGQSKPFFHKLVADLVQEMGGAYPELKEKQAQIEEALKNEESRFAQTLETGMALLENALAKGGKTLGGEIIFKLYDTYGFPYDLTADICRERNIEPDEAGFEREMEAQRARARAAQSFKANAQLPYDGQDTEFKGYSERQTESKVLALYKDGEQVVELNEGDSGAVVIDFTPFYAESGGQVGDVGYIFAGENRFEVRDTQKIKAAVFGQFGVQTSGRLKVGDSITAKVDDEIRNANMRNHSATHLMHKALRDVLGGHVEQKGSLVTAESTRFDISHPQAVTAEEIAEVERRVNEAILANVAVNAAIMSMEDAQKTDAMMLFGEKYGDEVRVLQMGGFSTELCGGTHVSRTGDIGLFKIISEGGIAAGVRRIEAITGLNALKWAQEQERLVKDIIAETKAQTEKDVLAKIQAGAAHAKALEKELARAKAELAVHAGAKLLDDAKDLGAAKLVAAQIEADAAALRETVTDLTGKSDNAVILLAAVNEGKVSLCAGVSKALTGKVKAGDLVKFAAEQVGGKGGGRPDLAQAGGTDADKLPEMLASAEGWLCQKLS

SEQ ID NO: 65352 - protein, 196 aa, Neisseria gonorrhoeae
MGLELPLVLGTSSVFRREQMERLGIAFQAASPDFDETPMLGESAPQTALRLAEGKARSLTGRFPGALIVGADQVAWCDGRQWGKPMNLANAQKMLMHLSGREIEFYSAVVLLNTVTGRMHRHIDKTVVVMRQLDELHILRYLEREPDAVYCSCAAKSEGLGALLIERIESTDPNALIGLPVFRLVDFLKNEGVDVL

SEQ ID NO: 65353 - protein, 545 aa, Neisseria gonorrhoeae
MDFKRLTAFFAIALVIMIGWEKMFPTPKPVPAPQQAAQKQAATASAEAALAPATPITVTTDTVQAVIDEKSGDLRRLTLLKYKATGDENKPFVLFGDGKEYTYVAQSELLDAQGNNILKGIGFSAPKKQYTLNGDTVEVRLSAPETNGLKIDKVYTFTKDSYLVNVRFDIANGSGQTANLSADYRIVRDHSEPEGQGYFTHSYVGPVVYTPEGNFQKVSFSDLDDDAKSGKSEAEYIRKTPTGWLGMIEHHFMSTWILQPKGGQSVCAAGDCRIDIKRRSDKLYSASVSVPLAAIQAGAKAETAVNLYAGPQTTSVIANIADNLQLAKDYGKVHWFASPLFWLLNQLHNIIGNWGWAIVVLTIIVKAVLYPLTNASYRSMAKMRAAAPKLQTIKEKYGDDRMAQQQAMMQLYKDEKINPLGGCLPMLLQIPVFIGLYWALFASVELRQAPWLGWITDLSRADPYYILPIIMAATMFAQTYLNPPPTDPMQAKMMKIMPLVFSVMFFFFPAGLVLYWVVNNLLTIAQQWHINRSIEKQRAQGEVVS

SEQ ID NO: 65354 - protein, 121 aa, Neisseria gonorrhoeae
MDYRFGRQYRLLKTDDFSSVFAFRNRRSRDLLQVSRSNGNGLDHPRIGLVVGKKTAKRANERNYMKRVIRDWFRLNKNRLPPQDFVVRVRRKFDRATAKQARAELAQLMFGNPATGCGKQV

SEQ ID NO: 65355 - protein, 434 aa, Neisseria gonorrhoeae; identical to SEQ ID NO: 65083

SEQ ID NO: 65356 - protein, 272 aa, Neisseria gonorrhoeae
MKKNHLNTTGFDLWHTIREETAAAAAAEPMLASFLHQTVLRHESLGSVLAYHLSSKLGSPIMDVRALFEIYQQALGSDTQISKCVEADLKAIYERDPACDEYSLPLLYFKGFHAIQAHRINHRLYLDGRKTLAYFLQNRMSEVFGVDIHPAARLGYGLMLDHATGFVAGETAVLGNNISILHGVTLGGSGKEGGDRHPKIGDGVMIGANASILGNIRIGSNAKIGAGSVVVSDVPPSITVVGVPAKPVARSLKTPSADMDQNIQFAEIDFMI

SEQ ID NO: 65357 - protein, 642 aa, Neisseria gonorrhoeae
MAKVIGIDLGTTNSCLAISENGQTKVIENAEGARTTPSIIAYLDGGEILVGAPAKRQAVTNAKNTIYAAKRLIGHKFEDKEVQRDIESMPFEIIKADNGDAWVKAQGKELSPPQISAEVLRKMKEAAEAYLGEKVTEAVITVPAYFNDSQRQATKDAGRIAGLDVKRIINEPTAAALAFGMDKGDNKDRKIAVYDLGGGTFDISIIEIANLDGDKQFEVLATNGDTFLGGEDFDQRLIDYIIDEFKKEQGIDLKQDVMALQRLKEAAEKAKIELSSGQQTEINLPYITMDATGPKHLAMKITRAKFESLVEDLIARSIEPCRTALKDAGLSTGDIDDVILVGGQSRMPKVQEAVKDFFGKEPRKDVNPDEAVAVGAAIQGEVLSGGRSDVLLLDVTPLSLGIETMGGVMTKLIQKNTTIPTKASQVFSTAEDNQSAVTIHVLQGERERASANKSLGQFNLGDIAPAPRGMPQIEVTFDIDANGILHVSAKDKGTGKAANITIQGSSGLSEEEIERMVKDAEANAEEDKKLTELVASRNQAEALIHSVKKSLADYGDKLDAAEKEKIEAALKEAEEAVKGDDKTAIDAKAEALGTASQKLGEMVYAQAQAEAQAGEGAQANASAKKDDDVVDADFEEVKDDKK

SEQ ID NO: 65358 - protein, 261 aa, Neisseria gonorrhoeae
MKTKLIKILTPFTVLPLLACGQTPVSNANAESAVKAESAGKSVAASLKARLEKTYSAQDLKVLSVSETPVKGIYEVVVSGRQIIYTDAEGGYMFVGELINIDTRKNLTEERAADLNKIDFASLPLDKAIKEVRGNGKLKVAVFSDPDCPFCKRLEHEFEKMTDVTVYSFMMPIAGLHPDAARKAQILWCQPDRAKAWTDWMRKGKFPVGGSICDNPVAETTSLGEQFGFNGTPTLVFPNGRTQSGYSPMPQLEEIIRKNQQ

SEQ ID NO: 65359 - protein, 295 aa, Neisseria gonorrhoeae
MYTGRFAPSPTGLLHIGSLLTAVASYADARSNGGKWLVRMEDLDPPREMPGAASHILHTLEAFGFKWDGEVTYQSRRYALYEETLYRLKTAGLVYPCHCNRKDWQAGARRGTDGFVYNGRCRHPGQRPALQGKQPSWRIRVPDRDIGFSDGIVGSYAQNLARDIGDFVLFRADGYWAYQLAVVADDAEQGVTHIVRGQDLLVSTPRQIYLQQCLGVPTPQYAHLPLLTNAQGQKWSKQTLAPALDLNRREQLLRQVFRYLKLPEAPETDRPAELLDWAVAHWDMDKVPKHAITAP

SEQ ID NO: 65360 - protein, 319 aa, Neisseria gonorrhoeae
MLDWTDRHYRYLARQITRNAWLYSEMVNAGAIVYGDKDRFLMFNEGEQPVALQLGGSDPSDLAKAAKAAEEYGYNEVNLNCGCPSPRVQKGAFGACLMNEVGLVADCLNAMHDAVGIPVTVKHRIGVDRQTEYQTVADFVGTLRDKTACKTFIVHARNAWLDGLSPKENRDVPPLKYDYVYRLKQEFPELEIIINGGITTNEAIAGHLQHVDGVMVGREAYHNPMVMREWDRLFYGDNRAPIEYADLVQRLYTYSQVQIQAGRGTILRHIVRHSLGLMHGLKGARTWRRMLSDATLLKDNDGGLIFEAWKEVERANTRE

SEQ ID NO: 65361 - protein, 348 aa, Neisseria gonorrhoeae
MKMQAVVVNKNVAGDVEVVEREVRPLEYGEALVEVEYCGVCHTDLHVAAGDYGEKPGRVLGHEGIGLVKEVADGVKNLKVGDRVSIAWLFQSCGSCEYCNTGRETLCRSVLNAGYTADGGMATHCIVSADYAVKVPEGLDPAQASSITCAGVTTYKAIKVSGVRPGQWIAIYGAGGLGNLGVQYAKKVFGTHVVAIDINDDKLAFAKETGADLVVNAAKEDAAKVIQEKTGGAHAAVVTAVSAAAFNSAVNCVRAGGRVVAVGLPPESMDLSIPRLVLDGIEVVGSLVGTRKDLEEAFQFGAEGLVVPKVQLRALDEAPAIFQEMREGKITGRMVIDMKKECGCDHHH

SEQ ID NO: 65362 - protein, 185 aa, Neisseria gonorrhoeae
MDALKLLTNRRSSKKLKHPAPDAAELEQILQAATQVSDHGNMRPFRFTVIQGEVGLQRFRDVLKQTVAELNFGDDAMKKAEKVGNMAPMVIGVTFVPNRDVPKPKPEWEQMLTAGCAAYALQLAATAQGFDNVWITGMWVNSPLLREAFGCEDKDKIIGLMMVGTPTEEVHKPKNTDLEAFVSHW

SEQ ID NO: 65363 - protein, 1161 aa, Neisseria gonorrhoeae
MRLTHIKLSGFKSFTDPTTIHVPGQLVAVIGPNGCGKSNVIDAVRWVLGEASAKQLRGESMQDVIFNGAATRRPAPRASVELVFDNSDHSLQGAWGQYAEVSIKRQLTRQGESTYFINNQTVRRRDITDLFLGTGVGARGYAVIEQGMISRIIEARPEELRAYIEEAAGVSKYKERRKETEGRLKDTREHLQRLGDLQNELARQVEKLEKQAETAERYKSLTAQLNQQQDLLDYAQWQQSLAAADKATAQHQSLQAQQDETAAQVQALNNEVHALQTAEQSQQQAVHELSNKRGVLREQIARLEEQIRHRQNLHQRIERDKQAAQAQLQRIRQEQQQIRVQLEENELQVEEKQTELAEWAMQVAEHEERLPELEEVQATLNAAFQTQQDEANRIRRELALKQQQLAHAEQTVAKHEERKGRLKQENQALNLPDEAETAAAQEAAALLQSRQEHYEEQIIAAEEALHAAREAFQTASNRFQSLKQQHITLQAQQQALSQILSQQQEAADFWQATDHAAAPQLWQHITAPAEWQHALSVILAERLHARSVPNSFVPPAPLPQGQAAWLSDGLSGGIKKSLPVQALLNQIQAQPPFQTALHHWLDGVLCAPDLSYALAHQNDLGTHQIWLTPEGHQVDKVSVLLYAKPAQESLIAQKARLDGIAAELENLAPGLSAAEAAFKQTEAAVCSSEVQHKNLMQQQQQHTRQYSQAQQRTAELLARTNQGQIRREHIERELAQLAEEQTVLQHTSDGLSDDIATLQEAAAELEHQQQTTAHSRQEQQGRLKQAQLALLEANRQYGLAEVAVHKLNQQKQNYRQQIARLEQQTLDWQERRQELALAYETEFQNDEQHIKLDELTETVHTLDEEYIAVQEKLAQIQEQGREQYARVQTLQTKLPQLQAATQTALLQQQEALINAKRYHQNLTERAADLDVLEALAKESAKVLNSSIGSLTRQIEALGAVNLAALQELEEARERDGYYRSQSEDVQAAIALLEEAIAQIDDKTKARFKETFDAVNGKVQTFFPTLFGGGEATLKMIGDDLLTAGVSIMARPPGKKNSTIHLLSGGEKALTAMSLVFALFSLNPAPFCLLDEVDAPLDDANTSRFCKLVKEMSVQTQFLYISHNRLTMEMAEQLVGVTMQEKGVSRVVAVDIKQALEMAEAV

SEQ ID NO: 65364 - protein, 496 aa, Neisseria gonorrhoeae
MLQLAEALASEKNVDAEVVFQALEFALSTAAKKKADREHMDVRVQINRDTGEYQTFRRWLIVADEDYTYPDVEKTIEEIQEEIPDTTIQIGEYYEEQLPNEGFGRQAAQTAKQIILQRIRDAEREQNLNEFLAVKEDIVSGTVKRVERHGIIVEVVAGKLDALIPRDQMIPRENFRSGDRIRALFLRVEEIGNTGRKQIILSRTSGDFLVKLYANEVPEIADGMLEIRAVARDPGQRAKVAVKANDQRIDPQGTCIGVRGSRVNAVSNELSGERIDVVLWSPEPAQFVMSALSPAEVSRIVIDEDKHAVDVIVAEDRLALAIGRGGQNVRLASDLTGWQLNIMTSAEADERNAAEDAAIRRLFMNHLNVDEETADVLVQEGFATLEEVAYVPAAELLAIEGFDEEIVDMLRNRARDAILTMAIAAEEKLGEVSDDMRNLEGVDADMLLSLAEAGITTRDDLAELAVDELIEITGVNEETAKAVILTAREHWFTEDK

SEQ ID NO: 65365 - protein, 771 aa, Neisseria gonorrhoeae
  MISC_FEATURE (133)..(133): X=any amino acid
  MISC_FEATURE (150)..(150): X=any amino acid
KPAEPKEKAVKPKHERNGKGKDAKKPAKPAAPAVPQPVVSAEEQAQRDEEARRAAALRAHQEALLKEKQERQARREAMKQQAEQQAKAAQEAKTGRQRPAKPAEKPQAAAPAVENKPVNPAKAKKEDRRNRRXRRSRPQRQRQRCKRRAXPQQCPQRRDERVRGGKKGKKLKLEPNQHAFQAPTEPVVHEVLVPETITVADLAHKMAVKGVEMVKALMKKGMMVTINQSIDQDTALIVVKKLGHIGKPAAADDPEAFLGEGAEAEEAEALPRPPVVTVMGHVDHGKTSLLDYIRRAKVVQGEAGGITQHIGAYHVKTPRGVITFLDTPGHEAFTAMRARGAKATDIVILVVAADDGVMPQTIEAIAHAKAAGVPIVVAVNKIDKDTANPERIRQELTQHEVIPDDWGGTVQFIDVSAKKGTNIDALLEAVLLEAEVLELTAPVDAPAKGIIVEARLDKGRGAVATLLVQNGTLKKGDMLLAGTAFGKIRAMVDENGKSITEAGPSIPVEILGLSDVPNAGEDAMVLADEKKAREIALFRQGKYRDVRLAKQQAAKLENMFNNMGETQAQSLSVIIKADVQGSYEALAGSLKKLSADEVKVNVLHSGVGGITESDVNLAIASGAFIIGFNVRADASSRKLAENENVEIRYYNIIYDAIDDVKAAMSGMLSPEKKEQVTGTVEIRQVISVSKVGNIAGCMVTDGVVKRDSHIRLIRNNVVIHTGELASLKRYKDDVKEVRMGFECGLMLKGYNEIMEGDQLECFDIVEVARTL

SEQ ID NO: 65366 - protein, 208 aa, Neisseria gonorrhoeae
MYAGERFNTYSHLSGLILAAAGLMLMLLKTIGHGDGYRIFSVSVYGISLLLLYLSSSLYHGIAAGKLKSILKKTDHCMIYVLIAGSYTPFALVSLRNGPGWTVFSLSWLLAAAGIAQELTIGRKSEKRLLSIAIYIVMGWMVLAVMKSLTASLPPAGLAWLAAGGMLYSVGIYWFVNDEKIRHGHGIWHLFVLGGSITQFVSVYGYVI

SEQ ID NO: 65367 - protein, 314 aa, Neisseria gonorrhoeae
  MISC_FEATURE (6)..(6): X=any amino acid
  MISC_FEATURE (279)..(279): X=any amino acid
  MISC_FEATURE (283)..(283): X=any amino acid
  MISC_FEATURE (290)..(290): X=any amino acid
LAKVAXLDWNNFVLNRCTFDWNGGGCAVNKGDDFRAGASFSLGRNPKYKEEMDAKKPEEILSLKVDADPDKYIEATGYPGYSEKVEVAPGTKVNMGPVTDRNGNPVQVAATFGRDAQGNTTADVQVIPRPDLTPASAEAPHAQPLPEVSPAENPANNPDPDENPGTRPNPEPDPDLNPDANPDTDGQPGTSPDSPAVPDRPNGRHRKERKEGEDGGLSCDYFPEILACQEMGKPSDRMFHDISIPQVTDDKTWSSHNFLPSNGVCPQPKTFHVFGRQYXASYXPLCCFAXKIRFAVLLALYIMSAFVVFGFVGG

SEQ ID NO: 65368 - protein, 503 aa, Neisseria gonorrhoeae
MSEQNHPQTEPQLDENQIIALRREKLNNIRQQRNAYPNDFKRDSFAADLQAQYGEIGKEELDPQAVPVKIAGRMMLKRQMGKASFATIQDVTGQIQLYLNNKGVSQEVLDDFNHWDLGDIVGAEGTLFKTNHGELTVRVSDIRLLSKSLRPLPDKHKGLSDQETKYRQRYVDLIANEESRNTFIKRSQIIQSVRNFMVGEHYLEVETPMMHPIPGGATAKPFVTHHNALDIPLYLRIAPELYLKRLVVGGLERVFEINRSFRNEGMSVRHNPEFTMIEFYEAFSDYERMMQMAEDIIRNASRTVNGTANITYNGKEVDLESPFERLTILEAIKKYNPHYTDEQLNDAEWLKKEIVKHGESLPPSPGIGSLQLALFEGCAEGKLWNPTFIVDYPVEVSPLARASDTKQGLTERFELFVVGRELANGYSELNDPEDQAERFKSQVAQKDAGDDEAMHYDADYIRAMEFGLPPTGGCGIGIDRLVMLLTDLQTIRDVILFPQMRPE

SEQ ID NO: 65369 - protein, 417 aa, Neisseria gonorrhoeae
MSEQHISTWKSKINALGPGIMMASAAVGGSHLIASTQAGALYGWQLALIIILTNLFKYPFFRFSAHYTLDTGKSLIEGYAEKSCVYLWVFLILCIASATINAGAVAIVTAAIVKMAIPSLMFDAGTVAALIMASCLIILVSGRYRALDRVSKIIIVTLSIATLAAAGIAMSRGMQMQPDFIEPTPWTLAGLGFLIALMGWMPAPIEISAINSLWVTEKQRINPSEYRDGIFDFNVGYIASAVLALVFLALGAFVQYGNGEAVQMAGGKYIGQLINMYAVTIGGWSRPLVAFIAFACMYGTTITVVDGYARAIAEPVRLLRGRDKTGNAELFAWNIWVAGSGLAVIFWFDGAMAELLKFAMIAAFVSAPVFAWLNYRLVKGDKRHRLTAGMNALAIVGLLYLAGFAVLFLLNLTGLLA

SEQ ID NO: 65370 - protein, 352 aa, Neisseria gonorrhoeae
MRPLNVQIRLGNLRHNYRILKEMHGGKLLAVVKADAYGHGAVRCAFALADLADGFAVATIDEGIRLRESGITHPIVLLEGVFEASEYEAVEQYSLWPAVGNQWQLEALLSRHWKKPVKVWLKMDSGMHRTGFFPHDYTSAYAALKQSEYVDSIVKFSHFSCADEPESGMTEIQMEAFDLGTKGLEGEESLANSAAILNIPEARRDWGRAGLALYGISPFGGSDDRLKPVMRLSTRIFGERVLQPHSPIGYGATFYTSKSTRVGLIACGYADGYPRRAPSNSPVAVDGKLTRVIGRISMDMMTIELDASQEGLGHEVELWGDTVNINTVAEAAGTIPYELMCNIKRAKFTYIE

SEQ ID NO: 65371 - protein, 725 aa, Neisseria gonorrhoeae
MTRFKYSLLFAALLPVYAQADVSVSDDPKPQESTELPTITVTADRTASSNDGYTVSGTHTPFGLPMTLREIPQSVSVITSQQMRDQNIKTLDRALLQATGTSRQIYGSDRAGYNYLFARGSRIANYQINGIPVADALADTGNANTAAYERVEVVRGVAGLPDGTGEPSATVNLVRKHPTRKPLFEVRAEAGNRKHFGLGADVSGSLNAEGTLRGRLVSTFGRGDSWRQLERSRDAELYGILEYDIAPQTRVHAGMDYQQAKETADAPLSYAVYDSQGYATAFGPKDNPATNWSNSRNRALNLFAGIEHRFNQDWKLKAEYDYTRSRFRQPYGVAGVLSIDHSTAATDLIPGYWHADPRTHSASMSLTGKYRLFGREHDLIAGINGYKYASNKYGERSIIPNAIPNAYEFSRTGAYPQPSSFAQTIPQYDTRRQIGGYLATRFRAADNLSLILGGRYSRYRAGSYNSRTQGMTYVSANRFTPYTGIVFDLTGNLSLYGSYSSLFVPQLQKDEHGSYLKPVTGNNLEADIKGEWLEGRLNASAAVYRARKNNLATAAGRDQSGNTYYRAANQAKTHGWEIEVGGRITPEWQIQAGYSQSKPRDQDGSRLNPDSVPERSFKLFTAYHLAPEAPSGRTIGAGVRRQGETHTDPAALRIPNPAAKARAVANSRQKAYAVADIMARYRFNPRTELSLNVDNLFNKHYRTQPDRHSYGALRTVNAAFTYRFK

SEQ ID NO: 65372 - protein, 176 aa, Neisseria gonorrhoeae
MKFVSDLLSVILFFATYTVTKNMIAAAAVALVAGVVQAAFLYWKHKRLDTMQWVGLVLIVVFGGATIVLGDSRFIMWKPTVLFWCGALFLLGSHLAGKNGLKASIGREIQLPDAVWGKLTYMWVGFLIFMGIANWFVFTRFEAQWVNYKMFGSTALMLFFFIIQGIYLSTYLKKED

SEQ ID NO: 65373 - protein, 801 aa, Neisseria gonorrhoeae
  MISC_FEATURE (549)..(549): X=any amino acid
LMTKFTDCTRSNRIQPPTHRGYILKNNRQIKLIAASIAVAASFQAHARLGGLNIRSNLDEPFSGSITVTGEEAKALLGGGSVTVSEKGLTAKVHKLDGKAVIAVSSAQAVRDPVLVFRIGAGAQVREYTAILDPVGCSPKTKSALSDGKTHRKTAPKAESQENQNAKALRKTDKKDSANSAVKPAHNGKTHTVRKGETLKQIAAAIRPKHLTLEQVADVLLKANPNVSAHGRLRAGSVLHIPNLNRIKAAAPKKIKAEQPKPQTAKPKAETASMPSEPSKQATVEKPIEKPVEKPVEKPEAKVAAPEAKAEKPAVRPEPKPAVSETPASATERQPGPVPAANTAASETAAESAPPEAAASAIDTPTDETGNTVSEPVAETASEVAAEPVAEPVEQVSAEEETESGLFDGLFGGSYTLLLAGGGTALIALLLLLLRLAQSKRARRTEESVPEEEPDLDDAADDGIKITFAEVETPATPEPAPKNDVNDTLALGGESEEELSAKQTFDVETDTPSNRIDLDFDSLAAAQNGILSGALTQDEETQKRADADXNAIESTDSVYEPETFNPYNPVEIVIDTPEPESVAQTAENKPETVDTDFYNNLFSNNHIGTEETASAKPAAPSGLAGFLKASSPETILEKTVAEVQTPEELHDFLKVYETGAVAETAPETPDFNAAADDLSALLQPAEAPAVEENAAEITLETPDSNTSEADALPDFLKDSEEETVDWSIYLSEENIPNNADTCFPSESVGSDAPSEAKYDLAEMYLEIGDRDAAAETVQKLLEEAEGDVLKRAQALAQELGI

SEQ ID NO: 65374 - protein, 512 aa, Neisseria gonorrhoeae
MKIGIPRESLSGETRVACTPATVALLGKLGFETVVESGAGLAASLDDAAYQTAGATVADKAAVWACPLIYKVNAPSEGELPLLKEGQTIVSFLWPRQNEALVEALRAKKVNALAMDMVPRISRAQALDALSSMANISGYRAVIEAANAFGRFFTGQITAAGKVPPAQVLVIGAGVAGLAAIGTANSLGAVVRAFDTRLEVAEQIESMGGKFLKLDFLQESGGSGDGYAKVMSDEFIAAEMKLFAEQAKEVDIIITTAAIPGKPAPKLITKEMVESMKSGSVIVDLAATGGNCELTRPGELSVTGNGVKIIGYTDMANRLAGQSSQLYATNLVNLTKLLSPNKDGEITLDFEDVIIRNMTVTRDGEITFPPPPIQVSARPQQTPSEKAAPAAKPEPKPVPLWKKLAPAAIAAVLVLWVRAVAPAAFLNHFIVFVLACVIGYHVVWNVSHSLHTPLMSVTNAISGIIVVGALLQIGQGNGFVSLLSFVAILIAGINIFGGFAVTRRMLNMFKKG

SEQ ID NO: 65375 - protein, 135 aa, Neisseria gonorrhoeae
MRLLHTILRVGNLEKSLDSYQNVLGMKLLRRKDYPEGRFTLAFVGYGDETDSTVLELTHNWDTKRYDLGDAYGHIAVEVDDAYEACERVKRQGGNVVREAGLMKHGTTVIAFVEDPDGCKIEFVQKKSGDDSVAY

SEQ ID NO: 65376 - protein, 354 aa, Neisseria gonorrhoeae
MALVSMRQLLDHAAENSYGLPAFNVNNLEQMRAIMEAADQVNAPVIVQASAGARKYAGAPFLRHLILAAVEEFPHIPVVMHQDHGASPDVCQRSIQLGFSSVMMDGSLLEDGKTPSSYEYNVNATRTVVNFSHACGVSVEGEIGVLGNLETGEAGEEDGVGAAGKLSHDQMLTSVEDAVRFVKDTGVDALAIAVGTSHGAYKFTRPPTGDVLRIDRIKEIHQALPNTHIVMHGSSSVPQEWLKVINEYGGNIGETYGVPVEEIVEGIKHGVRKVNIDTDLRLASTGAVRRYLAENPSDFDPRKYLGKTIEAMKQICLDRYLAFGCEGQAGKIKPVSLEKMASRYAKGELNQIVK

SEQ ID NO: 65377 - protein, 305 aa, Neisseria gonorrhoeae
MVLDGFAAYFDAYLENIVREGKSEHTVAAYRRDLEELFALLAQMPSEDAGGVPQDLSRRDFTAALRRLSQRGLDGRTLARKLSAWRQYCAWLVKRGLMRADPTADIKPPKQPERVPKALPQEWLNRMLDLPVDGGDPLAVRDHALFELMYGSGLRVSEIHGLNADDVYLDEAWVHVTGKGRKQRQVPLTGKSVEALKNYLPLRQTASDGKALFTGRNGTRLSQRQIQKRLESWAAQYGDGRHVSPHMMRHSYAGHLLQASRDIRAVQELLGHSSLSTTQIYTKLDFDHIARLYDEAHPRAKRQDE

SEQ ID NO: 65378 - protein, 637 aa, Neisseria gonorrhoeae
MNPSPLLHLIDSPQDLRRLDKKQLPRLAGELRAFLLESVGQTGGHFASNLGAVELTIALHYVYDTPEDKLVWDVGHQSYPHKILTGRKNQMHTMRQYGGLAGFPKRCESEYDAFGVGHSSTSIGAALGMAAADKLLGGDRRSVAIIGDGAMTAGQAFEALNCAGDMDVDLLVVLNDNEMSISPNVGALPKYLASNVVRDMHGLLSTVKAQTGKVLDKIPGAMEFAQKVEHKIKTLAEEAEHAKQSLSLFENFGFRYTGPVDGHNVENLVDVLKDLRSRKGPQLLHVITKKGNGYKLAENDPVKYHAVANLPKEGGAQMPSEKEPKPAAKPTYTQVFGKWLCDRAAADSRLVAITPAMREGSGLVEFEQRFPDRYFDVGIAEQHAVTFAGGLACEGMKPVVAIYSTFLQRAYDQLVHDIALQNLPVLFAVDRAGIVGADGPTHAGLYDLSFLRCVPNMIVAAPSDENECRLLLSTCYQADAPAAVRYPRGTGTGAPVSDGMETVEIGKGIIRREGEKTAFIAFGSMVATALAVAEKLNATVADMRFVKPIDEELIVRLARSHDRIVTLEENAEQGGAGGAVLEVLAKHGICKPVLLLGVADTVTEHGDPKKLLDDLGLSAEAVERRVREWLPDRDAAN

SEQ ID NO: 65379 - protein, 332 aa, Neisseria gonorrhoeae
MSRPVPAVFGSVFHSQMPVLAYREGKWQPTEWQSSQDLTLAPGAHALHYGSECFEGLKAFRQADGKIVLFRPTANIARMRQSADILHLPRPETQAYLDALVELVKRAADEIPDAPAALYLRPTLIGTDPVIGKAGSPSETALLYILASPVGDYFKVGSPVKILVETEHIRCAPHMGRVKCGGNYASAMHWLLKAKAEYGANQVLFCPNGDVQETGASNFILINGDEIITKPLTDEFLHGVTRDSVLTVAKDLGYTVSERNFTVDELKAAVENGAEAILTGTAAVISPVTSFVIGGKEIEVKNQERGYAIRKAITDIQYGLAEDKYGWLVEVC

SEQ ID NO: 65380 - protein, 261 aa, Neisseria gonorrhoeae
MGFLQGKKILITGMISERSIAYGIAKACREQGAELAFTYVVDKLEERVRKMAAELDSELVFRCDVASDDEINQVFADLGKHWDGLDGLVHSIGFAPKEALSGDFLDSISREAFNTAHEISAYSLPALAKAARPMMRGRNSAIVALSYLGAVRAIPNYNVMGMAKASLEAGIRFTAACLGKEGIRCNGISAGPIKTLAASGIADFGKLLGHVAAHNPLRRNVTIEEVGNTAAFLLSDLSSGITGEITYVDGGYSINALSTEG

SEQ ID NO: 65381 - protein, 273 aa, Neisseria gonorrhoeae
MSLQNIIETAFENRADITPTTVAPEVKEAVLETIRQLDSGKLRVAERLGVGEWKVNEWAKKAVLLSFRIQDNEVLNDGVNKYFDKVPTKFADWSEDEFKNAGFRAVPGAVARRGSFVAKNAVLMPSYVNIGAYVDEGAMVDTWATVGSCAQIGKNVHLSGGVGIGGVLEPLQAAPTIIEDNCFIGARSEIVEGAIVEEGSVISMGVFIGQSTKIFDRTTGEIYQGRVPAGSVVVSGSLPSKDGSHSLYCAVIVKRVDAQTRAKTSVNELLRGI

SEQ ID NO: 65382 - protein, 294 aa, Neisseria gonorrhoeae
MEELVAQRFQRESALLFNSGYHANLGILPALTTTKSLILADKFVHASMIDGIRLSRCAFFRYRHNDYEHLKNLLEKNVGKFDRTFIVTESVFSMDGDVADLKQLVQLKKQFPNTYLYVDEAHAIGVYGQNGLGIAERDNLIAEIDLLVGTFGKALASVGAYAVCNQVLKECLINQMRPLIFSTALPPFNVAWTYFIFERLPQFSKERSHLEQLSAFLRREVAHRTQIMPSETCIVPYILGGNEATLAKAEYLQGQGYYCLPIGPPTVPKNTSRIRLSLTADMTTDEVRQFAACL

SEQ ID NO: 65383 - protein, 413 aa, Neisseria gonorrhoeae
MSKAVKRLFDIIASASGLIVLSPVFLVLIYLIRKNLGSPVFFIRERPGKDGKPFKMVKFRSMRDALDSDGIPLPDSERLTDFGKKLRATSLDELPELWNVLKGEMSLVGPRPLLMQYLPLYNKFQNRRHEMKPGITGWAQVNGRNALSWDEKFSCDVWYTDNFSFWLDMKILFLTVKKVLIKEGISAQGEATMPPFAGNRKLAVIGAGGHGKVVAELAAALGTYGEIVFLDDRTQGSVNGFPVIGTTLLLENSLSPEQFDITVAVGNNRIRRQITENAAALGFKLPVLIHPDATVSPSAIIGQGSVVMAKAVVQAGSVLKDGVIVNTAATVDHDCLLDAFVHISPGAHLSGNTRIGEESRIGTGACSRQQTTVGSGVTAGAGAVIVCDIPDGMTVAGNPAKPLTGKNPKTGTA

SEQ ID NO: 65384 - protein, 307 aa, Neisseria gonorrhoeae
MQYSTLAGQTDNSLVSNNFGFLRLPLNFMPYESHADWVITGVPYDMAVSGRSGARFGPEAIRRASVNLAWEHRRFPWTFDVRERLNIIDCGDLVFSFGDSRDFVEKMEAHAGKLLSFGKRCLSLGGDHFITLPLLRAHARYFGKLALIHFDAHTDTYDNGSEYDHGTMFYTAPKEGLIDPSRSVQIGIRTEHSKKLPFTVLSAPKVNEDSVEETVRKIKETVGNMPVYLTFDIDCLDPSFAPGTGTPVCGGLSSDRALKILRGLTDLDIVGMDVVEVAPSYDQSDITALAGATIALEMLYLQGAKKD

SEQ ID NO: 65385 - protein, 369 aa, Neisseria gonorrhoeae
MFSDTNISMMENALRLAALGRFSTSPNPRVGCVIAHGSQIVGQGFHVKAGEPHAEVHALRQAGEMAKGATAFVTLEPCSHYGRTPPCAEALLRSGVTRVVAAMRDPNPPVAGKGLVLLKAAGIKTECGLLENKARELNRGFLSRIERRRPFVRLKCAVSLDGKTALSDGSSFWITGEEARADVQVLRAESCAVLTGIGTVLADNPRLNVRAFPTLRQPARIVLDSRLRLPPNSHLVTDGQSPTYIATLERDEDKLRPYREHAHIRILMPSETADGKIDLHHLMRLLADEGFGEIMVEAGSELTSAFLAENLADEIVLYRSPKILGGGKDLFSLPENRAALSAPPLWTPVSSEILGHDIKTVFRKNGNAF

SEQ ID NO: 65386 - protein, 277 aa, Neisseria gonorrhoeae
MAIVKMKPTSAGRRGMVRVVTEGLHKGAPYAPLLEKKNSTAGRNNNGHITTRHKGGGHKHHYRVVDFKRNKDGISAKVERIEYDPNRTAFIALLCYADGERRYIIAPRGIQAGVVLVSGAEAAIKVGNTLPIRNIPVGTTIHCIEMKPGKGAQIARSAGASAVLLAKEGAYAQVRLRSGEVRKINVDCRATIGEVGNEEQSLKKIGKAGANRWRGIRPTVRGVVMNPVDHPHGGGEGRTGEAREPVSPWGTPAKGYRTRNNKRTDNMIVRRRYSNKG

SEQ ID NO: 65387 - protein, 206 aa, Neisseria gonorrhoeae
MELKVIDAKGQVSGSLSVSDALFAREYNEALVHQLVNAYLANARSGNRAQKTRAEVKHSTKKPWRQKGTGRARSGMTSSPLWRKGGRAFPNKPDENFTQKVNRKMYRAGMATILSQLARDERLFVIEALTAETPKTKVFAEQVKNLALEQVLFVTKRLDENVYLASRNLPNVLVLEAQQVDPYSLLRYKKVIITKDAVAQLEEQWV

SEQ ID NO: 65388 - protein, 453 aa, Neisseria gonorrhoeae
MLKKVLIANRGEIALRVLRACREMGIATVAVHSETDKGSLHVKLADESVCIGPAASAQSYLNIPAIIAAAEVTCADAVHPGYGFLAENADFAEQVEQSGFTFIGPKPDTIRLMGDKVSAKHAMIAAGVPCVPGSDGALPDDDAEILKIADKVGYPVIIKASGGGGGRGMRVVEKKEDLLQSVEMTKAEAGAAFGNPMVYMERYLQRPRHVEIQVLADEHGNAVYLAERDCSLQRRHQKVIEEAPAPFIDEKARKKIGKACTDACKRIGYRGAGTFEFLYEDGEFFFIEMNTRVQVEHPVTELITGVDIVQEQLRIASGLPLQYKQKDIKIEGHAFECRINAEDPYNFIPSPGPIESCHLPGGFGIRVDSHIYQGYRIPPYYDSLIGKICVHGKTREQAMAKMRVALAELAVTGIKTNTPLHRDLFADAGFQEGGVSIHYLEHWLEARKTKQDK

SEQ ID NO: 65389 - protein, 214 aa, Neisseria gonorrhoeae
MTLGLVGRKVGMTRVFDEQGVSVPVTVLDMSANRVTQVKSKDTDGYTAVQVTFGQKKANRVNKAEAGHFAKAGVEAGRGLIEFALTEEKLAELKAGDEITVSMFEVGQLVDVTGTSKGKGFSGTIKRHNFGAQRTSHGNSRSHRVPGSIGMAQDPGRVFPGKRMAGQYGNTKATVQKLEVVRVDAERQLLLVKGAVPGAVNSDVVVRPSVKVGA

SEQ ID NO: 65390 - protein, 153 aa, Neisseria gonorrhoeae
MDLRKLKKLIDLVEESGIAEIEVTEGEEKVRITRTIAAAAAPVYAAPVPAAAPAVTPAAAPVAASAPAAAPAARDLSDAQKSPMVGTFYRAPGPNAAAFVEVGQQVKAGDTLCIIEAMKLMNEIEAEKSGTVKEILVENGTPVEFGEPLFIIG

SEQ ID NO: 65391 - protein, 394 aa, Neisseria gonorrhoeae
MAKEKFERSKPHVNVGTIGHVDHGKTTLTAALTTILAKKFGGAAKAYDQIDNAPEEKARGITINTSHVEYETETRHYAHVDCPGHADYVKNMITGAAQMDGAILVCSAADGPMPQTREHILLARQVGVPYIIVFMNKCDMVDDAELLELVEMEIRDLLSSYDFPGDDCPIVQGSALKALEGDAAYEEKIFELATALDSYIPTPERAVDKPFLLPIEDVFSISGRGTVVTGRVERGIIHVGDEIEIVGLKETQKTTCTGVEMFRKLLDEGQAGDNVGVLLRGTKREDVERGQVLAKPGTITPHTKFKAEVYVLSKEEGGRHTPFFANYRPQFYFRTTDVTGAVTLEKGVEMVMPGENVTITVELIAPIAMEEGLRFAIREGGRTVGAGVVSSVIA

SEQ ID NO: 65392 - protein, 701 aa, Neisseria gonorrhoeae
MARKTPISLYRNIGISAHIDAGKTTTTERILFYTGLTHKLGEVHDGAATTDYMEQEQERGITITSAAVTSYWSGMAKQFPEHRFNIIDTPGHVDFTVEVERSMRVLDGAVMVYCAVGGVQPQSETVWRQANKYQVPRLAFVNKMDRQGANFFRVVEQMKTRLRANPVPIVIPVGAEDSFTGVVDLLKMKSIIWNEADKGTTFTYGDIPAELVETAEEWRQNMIEAAAEASEELMDKYLGGEDLAEEEIVGALRQRTLAGEIQPMLCGSAFKNKGVQRMLDAVVELLPAPTDIPPVQGVNPNTEEADSRQASDEEKFSALAFKMLNDKYVGQLTFIRVYSGVVKSGDTVLNSVKGTRERIGRLVQMTAADRTEIEEVRAGDIAAAIGLKDVTTGETLCAESAPIILERMEFPEPVIHIAVEPKTKADQEKMGIALNRLAKEDPSFRVRTDEESGQTIISGMGELHLEIIVDRMKREFGVEANIGAPQVAYRETIRKAVKAEYKHAKQSGGKGQYGHVVIEMEPMEPGGEGYEFIDEIKGGVIPREFIPSVDKGIRDTLPNGIVAGYPVVDVRIRLVFGSYHDVDSSQLAFELAASQAFKEGMRQASPALLEPIMAVEVETPEEYMGDVMGDLNRRRGVVLGMDDDGIGGKKVRAEVPLAEMFGYSTDLRSATQGRATYSMEFKKYSEAPAHIAAAVTEARKG

SEQ ID NO: 65393 - protein, 346 aa, Neisseria gonorrhoeae
MDISDFDFTLPEHLIAQHPPEVRGSSRLLVALSDMPLQDRVFGDLPDYVEAGDVLVFNNTKVMKARLFGQKDSGGRIEALIERVLDNHTALAHIRSSKSPKPGMGLVFEGGIRAVMVGREGELFCLRFEGGQTVYELLEQNGHLPLPPYIERAADADDDSRYQTVYAKYQGAVAAPTAGLHFTEELLRRLKDKGAVTAEVTLHVGAGTFQPVRVDKIEEHKMHSEWFEVPSETVAAVEAAKARGNKAWAVGTTSMRALESAARATGYLKDGQGDTDIFITPGYRFNVVDRLVTNFHLPKSTLLMLVGAFSGMGHIRAVYRHAIEREYRFFSYGDAMVLGRNEGGGL

SEQ ID NO: 65394 - protein, 156 aa, Neisseria gonorrhoeae
MPRRREVPKRDVLPDPKFGSVELTKFMNVLMIDGKKSVAERIVYGALEQIEKKTGKAAIEVFNEAIANSKPIVEVKSRRVGGANYQVPVEVRPSRRLALAMRWVRDAARKRGEKSMDLRLAGELIDASEGRGGALKKREEVHRMAEANKAFSHFRF

SEQ ID NO: 65395 - protein, 324 aa, Neisseria gonorrhoeae
MLENLPYFQRHLPEDLAKVNEVINRAVQSDVALISQIGTYIISAGGKRLRPIMTILAGKAVGYDDEKLYSLAAMVEFIHTSTLLHDDVVDESDLRRGRATANNLFGNAAAVLVGDFLYTRAFQLMVASGSMRVLEVMADATNIIAEGEVMQLMNIGNTDITEEQYIRVIQYKTAKLFEAAAQVGAILGKASPGHEQALKDYGMYVGTAFQIIDDVLDYSGETEETGKNVGDDLAEGKPTLPLIYLMRQGSEQVANDVRTALENADRGYFEKIRDYVVRSDALAYSIGEARKAVDCAVAALDALSDSEVKDAMIQLAKESLVRVS

SEQ ID NO: 65396 - protein, 1071 aa, Neisseria gonorrhoeae
MPKRTDLKSILIIGAGPIVIGQACEFDYSGAQACKALREEGYKVILVNSNPATIMTDPEMADVTYIEPIMWQTVEKIIAKERPDAILPTMGGQTALNCALDLARNGVLAKYNVELIGATEDAIDKAEDRGRFKEAMEKIGLSCPKSFVCHTMNEALAAQEQVGFPTLIRPSFTMGGSGGGIAYNKDEFLAICERGFDASPTHELLIEQSVLGWKEYEMEVVRDKADNCIIICSIENFDPMGVHTGDSITVAPAQTLTDKEYQIMRNASLAVLREIGVDTGGSNVQFAVNPENGEMIVIEMNPRVSRSSALASKATGFPIAKVAAKLAVGFTLDELRNDITGGRTPASFEPSIDYVVTKIPRFAFEKFPAADDRLTTQMKSVGEVMAMGRTIQESFQKALRGLETGLCGFNPRSEDKAEIRRELANPGPERMLFVADAFRAGFTPEEIHEICAIDPWFLAQIEDLMKEEKSVSDGQLQDLDYAALRRLKRKGFSDKRLAQLLNVSEKEVREHRYALKLHPVYKRVDTCAAEFATETAYLYSTYEEECESRPSDRKKVMILGGGPNRIGQGIEFDYCCVHAALALRESGFETIMVNCNPETVSTDFDTSDRLYFEPLTLEDVLEIVRTENPWGVIVHYGGQTPLKLANALVENGVNIIGTSADSIDAAEDRERFQKVLNDLGLRQPPNRIAHNEEEALVKAEEIGYPLVVRPSYVLGGRAMQIIHSAEQLQKYMREAVQVSEDSPVLLDFFLNNAIEVDVDCVSDGKDVVIGGIMQHVEQAGIHSGDSGCSLPPYSLSEEIQDEIRRQTKAMAYALGVVGLMNVQFAVQDGVVFVLEVNPRASRTVPFVSKATGVPLAKVGARCMAGISLKEQGVEKEVVPDFYAVKEAVFPFIKFPGVDTILGPEMRSTGEVMGVGASFGEAYYKAQLGAGERLNPTGKIFLSVREEDKERVIKTAKNFQALGYGICATRGTAQYLTEHGLIVQAINKVPEGRPHIGDALKNGEIALVVNTVSSDPQSVSDSHIIRQSALQQRVPQYTTTAGGEAMSEGAKSRDYLGVYSVQELHGRLKNRN

SEQ ID NO: 65397 - protein, 123 aa, Neisseria gonorrhoeae
MPTINQLVRKGRQKPVYVNKVPALEACPQKRGVCTRVYTTTPRKPNSALRKVCKVRLTNGFEVISYIGGEGHNLQEHSVVLIRGGRVKDLPGVRYHTVRGSLDTAGVKDRKQARSKYGAKRPK

SEQ ID NO: 65398 - protein, 114 aa, Neisseria gonorrhoeae
MRILTITLMELSMYAVVKTGGKQYKVSVGEKLKVEQIPAQLDSQIELTEVLMIADGESVKVGAPFIEGAKVTAKVVAHGRGEKVRIFKMRRRKHYQKRQGHRQNFTQIEIVAIA

SEQ ID NO: 65399 - protein, 594 aa, Neisseria gonorrhoeae
GDFMRTNYCGLISEQYLCQTVTVKGWVHRRRDHGGVIFIDLRDREGIVQVVIDPDTPEAFAAADSARNEYVLGIAGRVRNRPKTTNDKMISGKIEILAKEIEVLNAAATPPFQIDDENISENVRLTNRVIDLRRPVMQRNLRLRYQVATGVRRYLDAQGFIDIETPMLTRSTPEGARDYLVPSRVHPGEFFALPQSPQLFKQLLMVAGFDRYYQITKCFRDEDLRADRQPEFTQIDLETSFLNEDEIMDITEGMAKQVFKDALNVDLGDFPRMPYSEAMFYYGSDKPDMRINLKFTELTDLMKTEEFKVFRGAADMKGGRVVALRVPNGAKFSRKEIDEYTKFVGIYGAKGLAYIKVNDAGNLSNGEDSGLQSPIVKFLSENALKEIIERTAAQNGDIIFFGADKAKVVNEAVGALRIKVGLEHGKDNGYFTDEWKPLWVVDFPMFEYDEEADRYVAVHHPFTAPKEGHEDLMVSDPANCLARAYDMVLNGWEIGGGSIRIHRADVQGKVFAALKISPEEQQEKFGFLLDNLKFGAPPHGGLAFGLDRLVTLMTGAESIRDVIAFPKTQRAQCLLTDAPNSVDDKQLRELSLRL

SEQ ID NO: 65400 - protein, 90 aa, Neisseria gonorrhoeae
MASKKAGGSTRNGRDSEAKRLGVKAYGNELIPAGSIIVRQRGTKFHAGDNVGMGKDHTLFAKIDGYVEFKTKGALNRKTVSIRPYTGSEE

SEQ ID NO: 65401 - protein, 2425 aa, Neisseria gonorrhoeae
  MISC_FEATURE (1393)..(1393): X=any amino acid
  MISC_FEATURE (1400)..(1400): X=any amino acid
  MISC_FEATURE (1415)..(1415): X=any amino acid
  MISC_FEATURE (1421)..(1421): X=any amino acid
  MISC_FEATURE (1445)..(1445): X=any amino acid
  MISC_FEATURE (1448)..(1448): X=any amino acid
MNYSFTEKKRIRKSFAKRENVLEVPFLLATQIDSYAKFLQLENAFDKRTDDGLQAAFNSIFPIVSHNGYARLEFVYYTLGEPLFDIPECQLRGITYAAPLRARIRLVILDKEASKPTVKEVRENEVYMGEIPLMTPSGSFVINGTERVIVSQLHRSPGVFFEHDKGKTHSSGKLLFSARIIPYRGSWLDFEFDPKDLLYFRIDRRRKMPVTILLKALGYNNEQILDIFYDKETFYLSSNGVQTDLVAGRLKGETAKVDILDKEGNVLVAKGKRITAKNIRDITNAGLTRLDVEQESLLGKALAADLIDSETGEVLASANDEITEELLAKFDINGVKEITTLYINELDQGAYISNTLRTDETAGRQAARVAIYRMMRPGEPPTEEAVEQLFNRLFFSEDSYDLSRVGRMKFNTRTYEQKLSEAQQNSWYGRLLNETFAGAADKGGYVLSVEDIVASIATLVELRNGHGEVDDIDHLGNRRVRSVGELTENQFRSGLARVERAVKERLNQAESENLMPHDLINAKPVSAAIKEFFGSSQLSQFMDQTNPLSEVTHKRRVSALGPGGLTRERAGFEVRDVHPTHYGRVCPIETPEGPNIGLINSLSVYARTNDYGFLETPYRRVIDGKVTEEIDYLSAIEEGRYVIAQANADLDSDGNLIGDLVTCREKGETIMATPDRVQYMDVATGQVVSVAASLIPFLEHDDANRALMGANMQRQAVPCLRPEKPMVGTGIERSVAVDSATAIVARRGGVVEYVDANRVVIRVHDDEATAGEVGVDIYNLVKFTRSNQSTNINQRPAVKAGDVLQRGDLVADGASTDLGELALGQNMTIAFMPWNGYNYEDSILISEKVAADDRYTSIHIEELNVVARDTKLGAEDITRDIPNLSERMQNRLDESGIVYIGAEVEAGDVLVGKVTPKGETQLTPEEKLLRAIFGEKASDVKDTSLRMPTGMSGTVIDVQVFTREGIQRDKRAQSIIDSELKRYRLDLNDQLRIFDNDAFDRIERMIVGQKANGGPMKLTKGSEITTEYLAGLPSRHDWFDIRLTDEDLAKQLELIKLSLQQKREEADELYEIKKKKLTQGDELQPGVQKMVKVFIAIKRRLQAGDKMAGRHGNKGVVSRILPVEDMPYMADGRPVDIVLNPLGVPSRMNIGQILEVHLGWAAKGIGERIDRMLKERRKAGELREFLNKLYNGSGKKEDLDSLTDEEIIELASNLRKGASFASPVFDGAKESEIREMLNLAYPSEDPEVEKLGFNDSKTQITLYDGRSGEAFDRKVTVGVMHYLKLHHLVDEKMHARSTGPYSLVTQQPLGGKAQFGGQRFGEMEVWALEAYGAAYTLQEMLTVKSDDVNGRTKMYENIVKGEHKIDAGMPESFNVLVKEIRSLGLDIDLERYXYGFQTAXGELFCRYAGQPDNVXKRNAVXKHCTFIHIENPPRGKNISFKEQKXICXTYLIRCKPQVWKKEFDAIKIGIASPETIRSWSYGEVKKPETINYRTFKPERDGLFCAKIFGPVKDYECLCGKYKRLKFKGVTCEKCGVEVTLSKVRRERMGHIELAAPVAHIWFLKSLPSRLGMVLNMTLRDIERVLYFEAFVVTDPGMTPLQRRQLLTEDDYYNKLDEYGDDFDAKMGAEGIRELLRTLDVAGEIEILRQELESTGSDTKIKKIAKRLKVLEAFHRSGMKLEWMIMDVLPVLPPDLRPLVPLDGGRFATSDLNDLYRRVINRNNRLKRLLELHAPDIIVRNEKRMLQEAVDSLLDNGRRGKAMTGANKRPLKSLADMIKGKGGRFRQNLLGKRVDYSGRSVITVGPYLRLHQCGLPKKMALELFKPFIFHKLEKQGLASTVKAAKKLVEQEVPEVWDILEEVIREHPIMLNRAPTLHRLGIQAFEPILIEGKAIQLHPLVCAAFNADFDGDQMAVHVPLSLEAQMEARTLMLASNNVLSPANGEPIIVPSQDIVLGLYYMTRDRINAKGEGSLFADVKEVHRAYHTKQVELGTKITVRLREWVKNEAGEFEPVVNRYETTVGRALLSEILPKGLPFEYVNKALKKKEISKLINASFRLCGLRDTVIFADHLMYTGFGFAAKGGISIAVDDMEIPKEKAALLAEANAEVKEIEDQYRQGLVTNGERYNKVVDIWGRAGDKIAKAMMDNLSKQKVIDRDGNEVDQESFNSIYMMADSGARGSAAQIKQLSGMRGLMAKPDGSIIETPITSNFREGLTVLQYFIATHGARKGLADTALKTANSGYLTRRLVDVTQDLVVVEDDCGTSDGFVMKAVVQGGDVIEALRDRILGRVTASDVVDPSSGETLVEAGTLLTEKLVDMIDQSGVDEVKVRTPITCKTRHGLCAHCYGRDLARGKLVNAGEAVGVIAAQSIGEPGTQLTMRTFHIGGAASRAAAASQVEAKSNGTARFSSQMRYVANNKGELVVIGR

SEQ ID NO: 65402 - protein, 394 aa, Neisseria gonorrhoeae
MSLHSDILVVGAGPAGLSFAAELAGSGLKVTLIERSPLTVLQNPPYDGREIALTHFSREIMQRLGMWDKIPENEIYPLRDAKVLNGRSDYQLHFPQPTEARGEPADCLGYLISNHNIRRAAYEVVSQLDNVSILTDTAVKEVKTSDNEAQVFLENGDILTARLLLAADSRFSQTRRQLGISSDMHDYSRTMFVCRMKHTLSNQHTAYECFHYGRTIALLPLEKRLTNTVITVDTDKINSVQNLSPEELAASVKEQLKGRLGDMELVSSIHHYPLVGMIAKRFYGKRSALIGDAAVGMHPVTAHGFNLGLSSADILAKLILEAEQRGQDIGAASLLEKYSSKHMLHAHPLYHGTNMMLKLFTNETAPAKLLRGLVLRAGNNFPPLKKLITKQLTG

SEQ ID NO: 65403 - protein, 123 aa, Neisseria gonorrhoeae
MAITKEDILEAVGSLTVMELNDLVKAFEEKFGVSAAAVAVAGPAGAGAADAEEKTEFDVVLASAGDQKVGVIKVVRAITGLGLKEAKDIVDGAPKTIKEGVSKAEAEDIQKQLEAAGAKVEIK

SEQ ID NO: 65404 - protein, 51 aa, Neisseria gonorrhoeae
MRDKIKLESGAGTGHFYTTTKNKRTMPGKLEIKKFDPVARKHVVYKETKLK

SEQ ID NO: 65405 - protein, 87 aa, Neisseria gonorrhoeae
MANSAQARKRARQSVKQRAHNASLRTAFRTAVKKVLKAVEAGDKAAAQAVYQESVKVIDRIADKGVFHKNKAARHKSRLSAKVKALA

SEQ ID NO: 65406 - protein, 77 aa, Neisseria gonorrhoeae
MARVCKVTGKRPMSGNNVSHANNKTKRRFLPNLQSRRFWVESENRWVRLRVSNAALRTIDKVGIDVVLADLRARGEA

SEQ ID NO: 65407 - protein, 805 aa, Neisseria gonorrhoeae
MVNYYSAMIKKILTTCFGLFFGFCVFGVGLVAIAILVTYPKLPSLDSLQHYQPKMPLTIYSADGEVIGMYGEQRREFTKIGDFPEVLRNAVIAAEDKRFYRHWGVDVWGVARAAVGNVVSGSVQSGASTITQQVAKNFYLSSEKTFTRKFNEVLLAYKIEQSLSKDKILELYFNQIYLGQRAYGFASAAQIYFNKNVRDLTLAEAAMLAGLPKAPSAYNPIVNPERAKLRQKYILNNMLEEKMITVQQRDQALNEELHYERFVRKIDQSALYVAEMVRRELYEKYGEDAYTQGFKVYTTVRTDHQKAATEALRKALRNFDRGSSYRGAENYIDLSKSEDVEETVSQYLSGLYTVDKMVPAVVLDVTKKKNVVIQLPGGRRVALDRRALGFAARAVDNEKMGEDRIRRGAVIRVKNNGGRWAVVQEPLLQGALVSLDAKTGAVRALVGGYDFHSKTFNRAVQAMRQPGSTFKPFVYSAALSKGMTASTVVNDAPISLPGKGPNGSVWTPKNSDGRYSGYITLRQALTASKNMVSIRILMSIGVGYAQQYIRRFGFRPSELPASLSMALGTGETTPLKVAEAYSVFANGGYRVSSHVIDKIYDRDGRLRAQMQPLVAGQNAPQAIDPRNAYIMYKIMQDVVRVGTARGAAALGRTDIAGKTGTTNDNKDAWFVGFNPDVVTAVYIGFDKPKSMGRAGYGGTIAVPVWVDYMRFALKGKQGKGMKMPEGVVSSNGEYYMKERMVTDPGLMLDNSGIAPQPSRRAKEDDEAAVENEQQGRSDETRQDVQETPVLPSNTDSKQQQLDSLF

SEQ ID NO: 65408 - protein, 207 aa, Neisseria gonorrhoeae
MRRLTLLAFVLAAGAVSASPKADVEKGKQVAATVCAACHAADGNSGIAMYPRLAAQHTAYIYHQTIGIRDGKRTHGSAAVMKPVVMNLSDQDILNVSAFYAKQQPKSGEANPKENPELGAKIYRGGLSDKKVPACMSCHGPSGAGMPGGGSEIQAYPRLGGQHQAYIVEQMNAYKSGQRKNTIMEDIANRMSEEDLKAVANFIQGLR

SEQ ID NO: 65409 - protein, 166 aa, Neisseria gonorrhoeae
MSLNIETKKVAVEEISAAIANAQTLVVAEYRGISVSSMTELRANARKEGVYLRVLKNTLARRAVQGTSFVELADQMVGPLVYAASEDAVAAAKVLHQFAKKDDKIVVKAGSYNGEVMNAAQVAELASIPSREELLSKLLFVMQAPVSGFARGLAALAEKKAGEEAA

SEQ ID NO: 65410 - protein, 231 aa, Neisseria gonorrhoeae
MAKVSKRLKVLRSSVEANKLYAIDEAIALVKKAATAKFDESVDVSFNLGVDSRKSDQVIRGSVVLPKGTGKTTRVAVFTQGVNAEAAKEAGADVVGFEDLAAEIKAGNLNFDVVIASPDAMRIVGQLGTILGPRGLMPNPKIGTVTPNVAEAVKNAKAGQVQYRTDKAGIVHATIGRASFAEADLKENFDALLDAIVKAKPAAAKGQYLKKVAVSSTMGLGVRVDTSSVNN

SEQ ID NO: 65411 - protein, 144 aa, Neisseria gonorrhoeae
MAKKIIGYIKLQIPAGKANPSPPVGPALGQRGLNIMEFCKAFNAATQGMESGLPIPVVITAFADKSFTFVMKTPPASILLKKAAGLQKGSSNPLTNKVGKLTRAQLEEIAKTKEPDLTAADLDAAVRTIAGSARSMGLDVEGVV

SEQ ID NO: 65412 - protein, 178 aa, Neisseria gonorrhoeae
MSKKWYVVQAYSGFEKNVQRILEERIAREEMGDYFGQILVPVEKVVDIRNGRKTISERKSYPGYVLVEMEMTDDSWHLVKSTPRVSGFIGGRANRPTPISQREAEIILQQVQTGIEKPKPKVEFEVGQQVRVNEGPFADFNGVVEEVNYERNKLRVSVQIFGRETPVELEFSQVEKIN

SEQ ID NO: 65413 - protein, 377 aa, Neisseria gonorrhoeae
MNTPALLVLADGSVFHGTSIGYEGSASGEVVFNTSMTGYQEILTDPSYCKQIVTLTYPHIGNTGTNAEDEESRSVYAAGLIIRDLPLLHSSFRASESLHDYLVRNETVAIADIDTRRLTMLLREKGAQGGAILTGADATVEKAQELIAAFGSMVGKDLAKEVSCTETYEWTEGEWELGKGFVTPDKQPYHVVAYDFGVKTNILRMLASRGCRLTVVPAQTSAEDVLALNPDGVFLSNGPGDPEPCTYAIEAVQKLMESGKPIFGICLGHQLISLAIGAKTLKMRFSHHGANHPVQDLDSGKVVITSQNHGFAVDADTLPANARITHKSLFDNTLQGIELTDKPVFCFQGHPEASPGPQDVGYLFDKFIGNMKAAKQA

SEQ ID NO: 65414 - protein, 394 aa, Neisseria gonorrhoeae; identical to SEQ ID NO: 65391

SEQ ID NO: 65415 - protein, 228 aa, Neisseria gonorrhoeae
MYALTAAQQQKALFRLVLFHILIIAASNYLVQFPFRIFGIHTTWGAFSFPFIFLATDLTVRIFGSHLARRIIFWVMFPALLLSYVFSVLFHNGSWTGLGALSQFNTFVGRIALASFAAYALGQILDIFVFDKLRRLKAWWIAPAASTVIGNALDTLVFFAVAFYASSDEFMAANWQGIAFVDYLFKLTVCTLFFLPAYGVILNLLTKKLTALQTKQAQDRPVPSLQNP

SEQ ID NO: 65416 - protein, 270 aa, Neisseria gonorrhoeae
MENIGRQRPIGVFDSGIGGLTNVRALMERLPMENIIYFGDTARVPYGTKSKATIENFSMQIVDFLLGHDVKAMVIACNTIAAVAGRKIRQKTGNMPVLDVISAGAKAALATTRNNKIGIIATNTTVNSNAYARAIHRDNPDTLVRTQAAPLLVPLVEEGWLEHEVTRLTVCEYLKPLLADGIDTLVLGCTHFPLLKPLIGREAHNVALVDSAITTAEETARVLAQEGLLDTGNNNPDYRFYVSDIPLKFRTIGERFLGRTMEQIEMVSLG

SEQ ID NO: 65417 - protein, 416 aa, Neisseria gonorrhoeae
MTKLTRRQIIRRTAGTLFALSPIASAVAKTVRAPQFTAARIWPSHTYTRLTLESTAALKYQHFALDNPGRLVVDIQNANINTVLHGLSQKVMADDPFIRSIRAGQNTPTTVRLVIDLKQPTHAQVFALPPVGGFKDRLVVDLYPHGMDADDPMMALLNGSLNKTLRGSPEADPAQNTTPRPGRGKNGRRPVIMLDPGHGGEDPGAVSPGGLQEKHVVLSIARETKKQLEALGYNVFMTRNEDVFIPLGVRVAKGRARRADVFVSIHADAFTSPSARGTGVYMLNTKGATSSAAKFLEQTQNNADAVGGVPTSGNRNVDTALLDMTQTATLRDSRKLGKLVLEELGRLNHLHKGRVDEANFAVLRAPDMPSILVETAFLSNPAEEKLLGSESFRRQCAQSIASGVQRYINTSVLKRG

SEQ ID NO: 65418 - protein, 768 aa, Neisseria gonorrhoeae
MAKNLLIVESPSKAKTLKKYLGGDFEILASYGHVRDLVPKSGAVDPDNGFAMKYQLISRNGKHVDAIVAAAKEAENIYLATDPDREGEAISWHLLEILKSKRGLKNIKPQRVVFHEITKNAVLDAVAHPREIEMDLVDAQQARRALDYLVGFNLSPLLWKKIRRGLSAGRVQSPALRLICERENEIRAFEAQEYWTVHLDSHKGRSKFTAKLAQYNGAKLEQFDLPNEAAQADVLKELEGKEAVVTAIEKKKRSRNPAAPFTTSTMQQDAVRKLGFTTDRTMRTAQQLYEGIDVGQGAIGLITYMRTDSVNLADEALTEIRHYIENKIGKEYLPSAAKQYKTKSKNAQEAHEAIRPTSVYRTPESVKPFLSADQFKLYQMIWQRTVACQMTPAKFDQTTVDITVGKGVFRVTGQVQTFAGFLSVYEESSDDEESEDSKKLPEMSEGDKLPVDKLYGEQHFTTPPPRYNEATLVKALEEYGIGRPSTYASIISTLKDREYVTLEQKRFMPTDTGDIVNKFLTEHFAQYVDYHFTAKLEDQLDEIADGKRRWIPVMDKFWKPFIKQVEEKEGIERAKFTTQELDETCPKCGEHKLQIKFGKMGRFVACAGYPECSYTRNVNETAEEAAERIAKAEAEQVELDGRECPKCGGRLVYKYSRTGSKFIGCANYPKCKHVEPLEKPKDTGVQCPQCKKGNLVERKSRYGKLFYSCSTYPDCNYATWNPPVAEECPNCHWPVLAIKTTKRRGVEKVCPQKECGWKEQIEPPAPQE

SEQ ID NO: 65419 - protein, 125 aa, Neisseria gonorrhoeae
MIYGIGTDIVSLKRIIRLNKKFGQAFAGRILTPEELLEFPQAGKPVNYLAKRFAAKEAFAKAVGTGIRGAVSFCNIGIGHDALGKPEFFYGPALSEWLEEQGISRVSLSMADEGDTVLAFAVAEK

SEQ ID NO: 65420 - protein, 354 aa, Neisseria gonorrhoeae
MLVLGIESSCDETGVALYDTERGLRSHCLHTQMAMHAEYGGVVPELASRDHIRRLVPLTEGCLAQAGASYGDIDAVAFTQGPGLGGALLAGSSYANALALALDKPVIPVHHLEGHLLSPLLAEEKPDFPFVALLVSGGHTQIMAVRGIGDYELLGESVDDAAGEAFDKTAKLLGLPYPGGAKLSELAESGRPEAFVFPRPMIHSDDLQMSFSGLKTAVLTAVEKVREANGSETIPEQTRNNICRAFQDAVVEVLEAKVKKALLQTGFRTVVVAGGVGANRKLRETFGNMTVQIPTPKGKPKHPSEKVSVFFPPMAYCTDNGAMIAFAGAMHLGKGREVGAFNVRPRWSLSEIVK

SEQ ID NO: 65421 - protein, 389 aa, Neisseria gonorrhoeae
MSEYLFTSESVSEGHPDKVADQVSDAILDAILAQDPKARVAAETLVNTGLCVLAGEITTTAQVDYIKVARETIKRIGYNSSELGFDANGCAVGVYYDQQSPDIAQGVNEGEGIDLNQGAGDQGLMFGYACDETPTLMPFAIYYSHRLMQRQSELRKDGRLPWLRPDAKAQLTVVYDSETGKVKRIDTVVLSTQHDPAISQEELSKAVIEQIIKPVLPPELLTDETKYLINPTGRFVIGGPQGDCGLTGRKIIVDTYGGAAPHGGGAFSGKDPSKVDRSAAYACRYVAKNIVAAGLATQCQIQVSYAIGVAEPTSISIDTFGTGKISEEKLIALVCEHFDLRPKGIVQMLDLLRPIYGKSAAYGHFGREEPEFTWERTDKAASLKAAAGL

SEQ ID NO: 65422 - protein, 469 aa, Neisseria gonorrhoeae
MNFPKTAASLLLLLASLAAHALDTGRIPQNEIAVYVQELDSGKVIIDHRAGIPVNPASTMKLVTAFAAFKTFGSNYRWATEFKSNGTVNDGTLDGNLYWAGSGDPVFNQENLLAVQRQLRDKGIRNITGRLMLDHSLWGEVGSPDHFEADSGSPFMTPPNPTMLSAGMVMVRAERNAAGSTDILTDPPLPHIFAQNNLKITASQAACPSVKKLMRASFSGNTLKLRGNIPESCLGKPVGVRMFALDELIRQSFTNRWLLGGGRISDGIGIADTPEGAQTLAVAHSKPMKEILTDMNKRSDNLIARSVFLKLGGDGKLPAVSEQAASAVRRELAVSGIDVADLVLENGSGLSRKERVTARMMAQMLETAYFSPFAQDFIDTLPIAGTDGTLRNRFKQSGGLLRLKTGTLNNVRALAGYWLGDKPMAVVVIINSGRAVSLLPDLDNFVAKNIISGGDGWLDAKLMCKERRA

SEQ ID NO: 65423 - protein, 706 aa, Neisseria gonorrhoeae
MRRFLPIAAICAVVLLYGLTAATGSTSSLADYFWWIVSFSAMLLLVLSAVLARYVILLLKDRRNGVFGSQIAKRLSGMFTLVAVLPGLFLFGISAQFINGTINSWFGNDTHEALERSLNLSKSALDLAADNAVSNAVPVQIDLIGTASLSGNMGSVLEHYAGSGFAQLALYNAASGKIEKSINPHQFDQPLPDKEHWEQIQQTGSVRSLESIGGVLYAQGWLSAGTHNGRDYALFFRQPIPENVAQDAVLIEKARAKYAELSYSKKGLQTFFLVTLLIASLLSIFLALVMALYFARRFVEPILSLAEGAKAVAQGDFSQTRPVLRNDEFGRLTKLFNHMTEQLSIAKEADERNRRREEAARHYLECVLDGLTTGVVVFDEKGRLKTFNKAAEQILGMPLAPLWGSSRHGWHGVSAQQSLLAEVFAAIGAAAGTDKPVQVEYAAPDDAKILLGKATVLPEDNGNGVVMVIDDITVLIRAQKEAAWGEVAKRLAHEIRNPLTPIQLSAERLAWKLGGKLDDQDAQILTRSTDTIIKQVAALKEMVEAFRNYARAPSLKLENQDLNALIGDVLALYEAGPCRFEAELAGEPLMMAADTTAMRQVLHNIFKNAAEAAEEADMPEVRVKSETGQDGRIVLTVCDNGKGFGKEMLHNAFEPYVTDKPAGTGLGLPVVKKIIGEHGGRISLSNQDAGGACVRIILPKTVETYA

SEQ ID NO: 65424 - protein, 419 aa, Neisseria gonorrhoeae
MSMALAQKLAADSIAAVAEGRNLQDVLAHIRAAHPQLTAQENGALQDIAYGCQRYLGSLKHMLAQMLKKPIDNPQLESLLLAALYQLHYTRNAPHAVVNEAVESIAKIGRGQYRSFANAVLRRFLREREKLAASCKKDDVAKHNLPLWWVAYLKNHYPKHWHNIAAALQSHPPMTLRVNRRHGNAESYLEKLVAEGIAAKALDEYAVTLEEAVPVNRLPGFAEGLVSVQDFGAQQAAYLLNPKDGERILDACAAPGGKTGHILELADCRVTALDIDAGRLKRVEDNIARLGFQTASAACADARDLAAWYDGKPFDAILADVPCTASGVARRNPDVKWLRRPTDALKTARQQEALLDALWQALKQGGRMLLATCSVFVEENDGQLQKFLNRHADAEPIESRVLLPNKHQDGFYYALIQKH

SEQ ID NO: 65425 - protein, 162 aa, Neisseria gonorrhoeae
MLKITIIAACAENLCIGAGNAMPWHIPEDFAFFKAYTLGKPVIMGRKTWESLPVKPLPGRRNIVISRQADYCAAGAETVASLEVALALCAGAEEAVIMGGAQIYGQAMPLATDLRITEVDLSVEGDAFFPEIDRTHWREAERTERRVSSKGVAYTFVHYLKG

SEQ ID NO: 65426 - protein, 445 aa, Neisseria gonorrhoeae
MLKCGTFVITRHIPRGCRRFFQPNQARQTEIYQIRGTVMQRRIITLLCAAGMAFSTQTLAANLEVRPDAPQRYTVKQGDTLWGISGKYLYSPWQWCRLWGANRDQIHNPDLIYPGQVLVLRYVGGEPRLGLEQTDGIPVVKISPDKEVSGYGIPAIDVNFYRVFMQHPQIVSRKETAAAPRLLSGPEGRLLYTKGARVYTKGLKEPGRYLTYRINKNITDPDTGKFLGQEVAFSGIVRSLDYTDSALEQRSKQAEERLKDNEYYTRTHPLITPVRTRSIQPLVVETAISEIQQGDYLMKMPEDTDRFNMVPHEPSRPVQAKIVSVFEGVGVGGQFKTITIDKGGDDGLDKGAVLSLYKRKKTMQVNLSNNLTEEPKSRDTVELISTPAEEVGLAMVYHTAPKLAYAIILENISDISEGDTAANPGRDLDNMPDQGRARVDSDPFQ

SEQ ID NO: 65427 - protein, 216 aa, Neisseria gonorrhoeae; identical to SEQ ID NO: 65086

SEQ ID NO: 65428 - protein, 204 aa, Neisseria gonorrhoeae; identical to SEQ ID NO: 65088
  MISC_FEATURE (91)..(91): X=any amino acid
  MISC_FEATURE (93)..(93): X=any amino acid
  MISC_FEATURE (168)..(168): X=any amino acid
  MISC_FEATURE (175)..(175): X=any amino acid
  MISC_FEATURE (185)..(185): X=any amino acid
  MISC_FEATURE (194)..(194): X=any amino acid

SEQ ID NO: 65429 - protein, 85 aa, Neisseria gonorrhoeae
MQTVTMYTGPFCPYCAMAKRLLHAAGVGHIDEIRVDASPEAFAEMQRLSGQRSVPQIFIGETHVGGFTDLYRLQQEGGLDGLLNP

SEQ ID NO: 65430 - protein, 363 aa, Neisseria gonorrhoeae
MSLKCGIVGLPNVGKSTLFNALTQSGIEAANYPFCTIEPNVGIVEVPDPRMAELAKIVNPQKMQPAIVEFVDIAGLVAGASKGEGLGNRFLANIRETDAIVNVVRCFDDDNIVHVSGKVDPIADIETIGTELALADLASVEKAIVREEKRARSGDKDAQKLVDLCKKLLPHLDEGKPVRSFGLDAEERALLKPLFLLTAKPAMYVGNVAEDGFENNPHLDRLKELAAKENAPVVAVCAAMESEIAELEDGEKAEFLAEMGLEEPGLNRLIRAGYDLLGLQTYFTAGVKEVRAWTIHKGDTAPQAAGVIHTDFERGFIRAQVIAYDDFVSLGGEAKAKEAGKMRVEGKEYVVQDGDVMHFLFNV

SEQ ID NO: 65431 - protein, 122 aa, Neisseria gonorrhoeae; identical to SEQ ID NO: 65106
  MISC_FEATURE (95)..(95): X=any amino acid
  MISC_FEATURE (115)..(115): X=any amino acid

SEQ ID NO: 65432 - protein, 624 aa, Neisseria gonorrhoeae
MSQALPYRPDIDTLRAAAVLSVIVFHIEKDWLPGGFLGVDIFFVISGFLMTAILLREMSGGRFFLKTFYIRRIKRILPAFFAVLAATLAGGFFLFTKDDFFLLWKSALTALGFASNLYFARGKDYFDPAQEEKPLLHIWSLSVEEQFYFVFPILLLLVARKSLRVQFGFLAALCALSLAASFMPSALDKYYLPHLRACEMLVGSLTAVRMRYRQQRNPAVGKRYAAVGALFSACILSACLFAYSEQTAYFPGPAALIPCLAVAALIYFNHYEHPLKKFFQWKITVAAGLISYSLYLWHWPILAFMRYIGPDNLPPYSPAAAIVLTLAFSLISYHCIEKPFKKWKGSFAQSVLWIYALPMLVLGAGSFFAMRLPFMAQYDRLGLTRSNTSCHNNTGKQCLWGDTEKQPELLVLGDSHADHYKTFFDAVGKKEKWSATMVSADACAYVEGYASRVFQNWAACRAVYRYAEEHLPRYPKVVLAMRWGSQMPENSRSLAYDAGFFQKFDRMLHKLSSEKQAVYLMADNLASSYNVQRAYILSSRIPGCRQTLRPDDESTLKANARIRELAAKYPNVYIIDAAAYIPADFQIGGLPVYSDKDHINPYGGTELAKRFSEKQRFLDTRHNH

SEQ ID NO: 65433 - protein, 55 aa, Neisseria gonorrhoeae; identical to SEQ ID NO: 65092

SEQ ID NO: 65434 - protein, 431 aa, Neisseria gonorrhoeae
MSVIQDLQSRGLIAQTTDIEALDALLNEQKIALYCGFDPTADSLHIGHLLPVLALRRFQQAGHTPIALVGGATGMIGDPSFKAAERSLNSAETVAGWVGSIRSQLTPFLSFEGGNAAIMANNADWFGSMNCLDFLRDIGKHFSVNAMLNKESVKQRIDRDGAGISFTEFAYSLLQGYDFAELNKRHGAVLEIGGSDQWGNITAGIDLTRRLNQKQVFGLTLPLVTKSDGTKFGKTEGGAVWLNAKKTSPYQFYQFWLKVADADVYKFLKYFTFLSIEEIGVVEAKDKASGSKPEAQRILAEEMTRLIHGEEALAAAQRISESLFAEDQSRLTESDFEQLALDGLPAFEVSDGINAVEALVKTGLAASNKEARGFVNAKAVLLNGKPAEANNPNHAAERPDDAYLLIGEYKRFGKYTILRRGKRNHALLVWK

SEQ ID NO: 65435 - protein, 319 aa, Neisseria gonorrhoeae
MSEWRGFNRKGNTMKIRPGRHNAPDFPHGAAVTIGNFDGVHLGHKHILQKLRLEADARGLPVVAVVFEPQPKEFFALRTGKTPPCRISPLRTKLELLEGTGCVDAAWVLRFDRNFSEISAQAFIDRLLRQTLNTRYLLVGDDFRFGAGREGCFELLAQQPDMQTERTPSVIVEDIRTSSTAVRQALSDGNLAYAKKLLGHDYVLGGRVVHGRKLGRTLNAPTANIRLPGHRYALGGVFVVEADGAFGTRRGVASFGFNPTVDGGCSQKLEVHLFDFQGDLYGQRLNVRFLHKLRDEEKFDGMEELKRRIEADMEAAKCW

SEQ ID NO: 65436 - protein, 268 aa, Neisseria gonorrhoeae
MPTVFIFLTAVYAGLGAFAWHCQQQGRGRDYPWKTELPVLGAALTVHGAALLMPVIQDKIIIMGFGYSGSLIVWMMLFIYFAGSFFYPLRGVQLLLYPCAALMLLSGLVFPGKFSGYEITDFPFMLHIGTSLLAYGLFGIATLLSVLSLLLHRSLHRRNFSKLAGFLPSLLSLEKLMFQAMWAGFILLTYSVVSGTFFAEAVFGKPMTFTHKTVFGILSWLIYGGLLLKHSMTAWRGKKAAVWTIIGFVSLMIAYMGSKFVLEIILKR

SEQ ID NO: 65437 - protein, 456 aa, Neisseria gonorrhoeae
MLDNLTGRFSNVFKNIRGQAKLTEDNIKEALREVRLALLEADVALPVVKEFVNNVKEKALGQEVAGSLTPDQAFIGVVNQALVELMGKENKTLDLSVSPPAIILMAGLQGAGKTTTVGKLARLLKNDQKKKVLVVSADVYRPAAIEQLRLLAEQVGVDFFPSDTNQKPVEIATAAVDYAKKHFYDVLMVDTAGRLAIDEEMMNEIKALHAVVNPVETLFVIDAMLGQDAVNTAQAFNEALPLNGVVLTKMDGDSRGGAALSVRHVTGKPIKFIGVGEKINGLEPFHPDRLASRILGMGDVLTLIEDVQKGIDEEAAAKMAKKLQKGKGFDLNDFKEQIQQMRNMGGLENLMSKMPGELGQISKQIPEGTAEKAMGKVEAIINSMTPKERANPALLKAGRKRRIAMGAGTTVQEVNKLLKQFEQMQQMMKMFSGNGLGKLMRLAKGMKGIKGMFPGL

SEQ ID NO: 65438 - protein, 490 aa, Neisseria gonorrhoeae
MNQTSRDLTRISHNTKIVATLGPGSNNVELLEDMIRVGGLNVVRFNFSHGTPEFHQENARIVREAAKRAGQEIAIIADLQGPKIRVGKIAGGGIELNKGETLVLDAALEGEGTREAVGLDYRDLPDDVAAGDVLWLDDGLLTLTVESVEGSRIITRVENSHILKSNKGINKRGGGLSAGALTEKDFRDLKTAIAIGCDYLAISFVKSAEDLHIARAKVEEEMKGSTAVRPGLVSKIERVEAIENLDEIILAGDGIMVARGDLAVEVGHAAVPALQKRMIRRARELRRFSITATQMMESMITNPVPTRAEVSDVANAVLDGTDAVMCSAETAVGAYPFETVSQMAIICAAAEKEQDSLNGVAEQTEYPEAVSTNLAIAGGAVSVARAVHAKAIVALTESGSTAFEISRHNITLPIFALTPSVSAQRRMAMYRGVRPLILATSTDHDTALNEVETMLVEHNILHSGDQYIITSGSQMRESGSTNTLEVLRVK

SEQ ID NO: 65439 - protein, 268 aa, Neisseria gonorrhoeae
MLQATPSNPTAAAQIKADGHADVKGSDWGVGYQLAWMWDINDRARVGVNYRSKVSHTLKGDAEWAADGAAAKQQWNDNMLTPLGYTANEKASVKIVTPESLSVHGMYKVSDKADLFGDVTWTRHSRFNKAELFFEKEKNIANGKKSDRTTITPNWRNTYKVGLGGSYQISEPLQLRVGIAFDKPPVRNADYRMNSLPDGNRIWFSAGMKYHIGKNHVVDAAYTHIHINDTSYRTAKASGNDVDSKGASCARFKNHADIIGLQYTYKFK

SEQ ID NO: 65440 - protein, 294 aa, Neisseria gonorrhoeae
MSSGNIRIHSMTGFANAAAECGSKRINLDIRAVNHRFLDIQIRMPDDLRHLENGIREQISSHLARGKVECKIQIQDAENGNQSLELNRVLVGQLAEINKNLRKHYDLAKLGVADILRFPGVLASQKENTEALAKTIVELADKALKDFTAARRREGKKLGEHLLQRIKNMEEIIDALSEIFPALVEAHKEKIRTRLAEAVGSIDNDRLQQEFALFIQKSDIDEEFSRLRTHIAEVRRIVTEHKGSSGKRLDFLMQELNREANTLGSKSIATECTQASVELKVLIEQMREQVQNIE

SEQ ID NO: 65441 - protein, 926 aa, Neisseria gonorrhoeae
MTDYSKTVNLLESPFPMRGNLAKREPAWLKSWYEQKRYQKLREIAKGRPKFILHDGPPYANGDIHIGHAVNKILKDIIIRSKTQAGFDAPYVPGWDCHGLPIEVMVEKLHGKDMPKARFRELCREYAAEQIARQKKDFIRLGVLGDWDNPYLTMDFKTEADTVRMLGEIYKSGYLYRGAKPVQFCLDCGSSLAEAEVEYKDKVSPAIDVAYPFKNTVALAAAFGLAGIEGKAFAVIWTTTPWTLPASQAVSAGADVVYQLIDTPKGKLVLAKDLAEGALKRYGFSDGIAILAETTGDKLEKLHMNHPFLERDIPMLNGEHVTTDAGTGLVHTAPAHGLEDYAVCNKYGIELYNPVNAEGKYISETPRVAGMSVWEANPVILQWPEETGNLLASSKIEHSYAHCWRHKTPLIYRATGQWFVGMDKAGSDGKTLRDKAIKAVDDTEFFPPWGRARLESMIEGRPDWVVSRQRYWGTPMTFFVHKETGELHPNSAELLEKVAQRIEEKGIEAWFSLDKSELLSAEDCEHYDKLPDTMDVWFDSGSTHYSVVKQREELEWPADLYLEGSDQHRGWFQSSMLTGCASSMGRAPYKQLLTHGFVVDQNGRKMSKSIGNVVAPQEVYNEFGADILRLWAASTDYSGELAISKEILKRVTESYRRIRNTLSFLFANLSDFNPIEDAVQQADMVEIDRYALVLARRLQERLAGGYYPRYAFHFAVKDIVSFCSEDLGAFYLDILKDRLYTTKADSRARRSAQTALYHITRSLVLLIAPILCFTGEEAWDIIGGGEEDSVLFHTWHEFPAINEKAEAELVKKWTAIREAREAVTAAIEPLRADKTVGSSLQAEAEITAPEEMAGYLNALGEELRFALLVSKAEVKVGDELAVAAKASDGEKCERCWHYTRDVGAVAGYETVCKRCAENVGGEGETR

SEQ ID NO: 65442 - protein, 149 aa, Neisseria gonorrhoeae; identical to SEQ ID NO: 65157

SEQ ID NO: 65443 - protein, 145 aa, Neisseria gonorrhoeae
MIGLLIITHETIGEAYRKLAHHFFPGGLPENVRILGVQPTEDQDDIINNAISALQEFPENHGVLIMTDIFGATPCNAARRLVRENKSAILTGLNAPMMIKAVQYSPAAEDLAAFTECVREAAVKGIFAITSAPEDLVCRRSGDAV

SEQ ID NO: 65444 - protein, 591 aa, Neisseria gonorrhoeae
MSIVLHGVAAGKGIAVGCAHLIARGTEEVPQYDVAQADTDAEAERFDAAVKATRKELEQLRSAIPENAPTELGAFISLHLMLLTDVTLSREPVDILREQKINAEWALKQQSDKLAAQFDNMDDAYLRERKQDMLQVVRRIHNNLIGQGNELEVADNLFDETVLIANDLSPADTVLFKEQRIAAFVTDAGGPTGHTAILGRSLDIPSVVGLHNARKLITEGETVIVDGINGVLIISPDESVLNEYRRRAREYRSHKRDLNKLKKTAAATADGVCIELVGNIESAEDVKPLHNLGADGIGLFRSEFLYLNRDTMPSEDEQYEVYSAIVKKMKGKSVTIRTVDLGVDKNPRWFGKNSTPNGSLNPALGMTGIRLCLAEPVMFRTQMRAILRAAVHGPVRMMWPMITSVSEVRQCLIHLDTAQRQLAERGDAFGEVGIGCMIEIPSAALTVGSILKLVDFISVGTNDLIQYILSVDRGDDSVSHLYQPGHPSVLKMLQHVIRTANRMDKDVSVCGEMAGDTAFTRVLLGMGLRRFSMNPNNILPVKNIILHSNAGQLEGDIAKVIRCEDEEKSEKLIKQINSVSVAEEAEVKGRK

SEQ ID NO: 65445 - protein, 623 aa, Neisseria gonorrhoeae
MMQAVRYRPEIDGLRAVAVLSVIIFHLNNRWLPGGFLGVDIFFVISGFLITNIILSEIQNGSFSFRDFYTRRIKRIYPAFIAAVSLASVIASQIFLYEDFNQMRKTIELSTVFLSNIYLGFRLGYFDLSADENPVLHIWSLAVEEQYYLLYPLLLIFCYKKTKSLRVLRNISIILFLILTASSFLPAGFYTDILNQPNTYYLSTLRFPELLVGSLLAVYGQTQNGRRQTENGKRQLLSLLCFGALLVCLFVIDKHDPFIPGITLLLPCLLTALLIRSMQYGTLPTRILSASPIVFVGKISYSLYLYHWIFIAFAHYITGDKQLGLPAVSAVAALTAGFSLLSYYLIEQPLRKRKMTFKKAFFCLYLAPSLMLVGYNLYSRGILKQEHLRPLPGTPVAAENNFPETVLTLGDSHAGHLRGFLDYVGGREGWKAKILSLDSECLVWVDEKLADNPLCRKYRDEVEKAEAVFIAQFYDLRMGGQPVPRFEAQSFLIPGFKARFRETVKRIAAVKPVYVFANNTSISRSPLREEKLKRFAINQYLRPIRAMGDIGKSNQAVFDLVKDIPNVHWVDAQKYLPKNTVEIHGRYLYGDQDHLTYFGSYYMGREFHKHERLLKHSRGGALQ

SEQ ID NO: 65446 - protein, 456 aa, Neisseria gonorrhoeae
MINPIASLSPLDGRYAQSVEALRPIFSEYGLMKARVKVELNWLKALAAEPEIAEVPPFSAETLAEIDKVIENFSLEDAAAVKAIEATTNHDVKAIEYWLKKRFAEVPEVAAVSEFIHFACTSEDINNLSHALMLQEARETVILPKLAEIIGKLTAMAHDLAAVPMMSRTHGQPATPTTLGKETANVVYRLQRQFKILQAQEFLGKINGAVGNYNAHMAAYPDVDWETHCRNFVEISLGLTFNPYTIQIEPHDYMAEFFQTLSRINTILIDFSRDVWGYISLGYFKQKVKAGEVGSSTMPHKVNPIDFENSEGNLGMANAVLGFLAEKLPVSRWQRDLTDSTVLRNMGVGVGYAVLGFAAHLRGLNKLEPNPAALAADLDVTWELLAEPIQTVMRRYGVANPYEKLKDLTRGKGGITPEVLKGFIGSLEIPAEAKAKLLELTPALYVGKAEALAKRI

SEQ ID NO: 65447 - protein, 210 aa, Neisseria gonorrhoeae
MENVNRVPEQARYDAECRQADEALADVFPAVSIFGSARTPQDHADYAFACRLARRLSDSGIAVISGGGPGIMEAANKGAFAGKSVSVGLNIALPHEQKPNPYQDIALRFSRFAERKAVFFRYSQAYVVMPGGFGTLDELFEILTLVQTGKVPPRPVVLVGKAFWSGLAEWINAQLLARGMISEGAASLFSISDDEDEIIAYLSEHGLQTA

SEQ ID NO: 65448 - protein, 512 aa, Neisseria gonorrhoeae
MFSKLDKYWQHPALYWPLLILFAAATPFAFAPYYHFWLMPLIFGAFVRLIELRPRFAASSAYLFGLTAYTAQFYWIHTALHDVSGLPDLYAVPLTFLLPAYLALYPALCFWLWKKFTLPQGIKTGLVLPILWTLTEFARERFLTGFGWGAIGYSQITPDSPLAGFAPLGGIHMVTLATAFLGVWLVLAIDNTARSGKRLLPAILIAALLAAGYTAQQTDFTRPDGSRSTVALLQGNIAQTLKWREDQVIPTIQKYYEQVGKTTADIVILPETAIPIMRQNLPENILAQFAEQAQNNGSALAVGISQYTSDGNGYENAVINLTGYQENNQDGIPYYAKNHLVPFGEYKPLPLLTTPLYKMMDMPLSDFRKGGGKQSAMMMKNQKIAFNICYEDGFGDELIAAAKDATLLANVSNMAWYGKSNAMYQHLQQSQARAMELGRYMVRATNTGATAIISPKGNIIAQAQPDTETVLEGHIKGYIGETPYMKTGSSWWLMGILTLAALILFIFRNKEH

SEQ ID NO: 65449 - protein, 576 aa, Neisseria gonorrhoeae
MDWMNSLFLLGGALLFLSVVSTTLSARLGMPLLLVFLAVGMLAGEEGVGGIAFNNVVMANFISQLALAVILLDGGLRTQLSSFRIALKPASVLASWGVFATVLPLGLFATFYLGLDWKFGVLMAAIVGSTDAGAVFSLLRNSGVRLNERVQATLEIESGANDPMAVFLVTALITMIMQPAESGAAAFVRMLALQIGFGLLTGWAGGKILAKLVRRLNLAEGLYALMIVSGGLLVFAFTNTIGGSGFLAVYLAGIIVGNQRNRATEHVLRVMDGLAWLAQATLFVMLGLLVSPAGVLDRAAEALAIAAFLMLVARPLAVFGGLWKFNYSLREKAYISWLGLRGAVPISLAMMPLVMGVPNSHLLFDVAFAVVVLSLLIQGTTIPVMARLLKVAMPNKPEPKDTHDIWLAEKEIVRMSAFKVVAESEAEGHHPDTVEPISDSFDARCFALIRNGSRIEMQSDTVLQAEDLAWYILADGKVDKMAKYFTETGIGVRENFDFFGEFVVSPAARSGDLALAYGLKLEAGEEGLSLAELFDKRSDSQEPVEGDRIDIGGFMLTAKEVDGGGNIGSMGLKVPR

SEQ ID NO: 65450 - protein, 140 aa, Neisseria gonorrhoeae
MKITKIFTFDSSHMLDGHDGKCQNLHGHTYKLEITVSDGIVRGGPKDGMVMDFTDLKAIVKQHITDPFDHAFIYHGGNGRESQIAALLEGWNMKTLRLPCRTTAENMAVEMYCRLKNAGLNVCRVKLWETPTSCAEYEGE

SEQ ID NO: 65451 - protein, 371 aa, Neisseria gonorrhoeae
MLKFTLHKKDGLARRGTLELNHGKIETPVFMPVGTYGSVKAMNPQNLHDIKAQIILGNTYHLWLRPGLEVVEQFGGLHGFIGWDKPILTDSGGFQVFSLSDMRKLTEEGCTFKSPINGDKLFLSPEISMKIQTVLNSDIAMQLDECTPGETTREQARKSLQMSLRWAERSKKAFEDLKNPNALFGIVQGAMYEDLREESLRGLEEFDFPGLAVGGLSVGEPKPEMYRMLHAVGPMLPERKPHYLMGVGTPEDLVYGVAHGIDMFDCVMPTRNARNGWLFTRFGDLKIKNAKHKPDKRPIDESCTCYACQNFSRAYLHHLHRAGEILGAQLNTIHNLHFYQVIMAEMRDAVEQGKFADWQAQFHENRARGVD

SEQ ID NO: 65452 - protein, 648 aa, Neisseria gonorrhoeae
MPLFFNLSERLMLNITLPDCSVRQYESPVTVAQIAASIGAGLAKAAVAGKVNGKLVDACDPIVEDSAVQIITPKDQEGIEIIRHSCAHLVGHAVKQLYPNAKMVIGPVIEEGFYYDIATEKPFTPEDVAAIEARMKELIAQDYDVVKIMTPRAEAIKIFQERGEEYKLRLIDDMPEVEAMGIYHHQEYVDMCRGPHVPNTRFLKNFKLTKLAGAYWRGDSNNEMLQRIYGTAWATKDELKDYIQRIEEAEKRDHRKLGKQLDLFHLQDEAPGMVFWHPKGWALWQTIEQHMRKELNAAGYKEVKTPQIMDKTFWEKSGHWDNYKDNMFVTSSEKREYAVKPMNCPGHVQIFNNGLRSYRDLPMRLAEFGSCHRNEPSGALHGLMRVRGFVQDDAHIFCTEDQIVSEARAFNELLVRIYKQFGFHDVSVRLSLRPEKRAGSDDVWDKAEQGLREALTACGVEWGELPGEGAFYGPKIEYHVKDALGRSWQCGTLQLDFVLPERLDAEYVTENNDRARPVMLHRAILGSLERFIGILIENHAGSFPLWLAPVQMVIMNITENQADYCREVAAKLQAAGFRAELDLRNEKIGYKIRDNSQYRFPYQIVIGDKEKQENKVAVRRKAEDLGSLDLDDFIAQLQQEITDALVNH

SEQ ID NO: 65453 - protein, 361 aa, Neisseria gonorrhoeae
MTVPHIPRGPVMADIAAFRLTEEEKQRLLDPAIGGIILFRRNFQNIEQLKTLTAEIKALRTPELIIAVDHEGGRVQRFIEGFTRLPAMNVLGQIWDKDGASAAETAAGQVGRVLATELSACGIDLSFTPVLDLDWGNCAVIGNRSFHRNPEAVARLALALQKGLAKGGMKSCGKHFPGHGFVEGDSHLVLPEDGRSLDELEAADLAPFRIMSREGMAAVMPAHVVYPQVDTKPAGFSEIWLKQILRRDIGFKGVIFSDDLTMEGACGAGGIKERARISFEAGCDIVLVCNRPDLVDELRDGFTIPDNQDLAGRWQYMENSLGHEAVQAVMQTMGFQAAQAFVAGLASPQDTAGGVKVGEAF

SEQ ID NO: 65454 - protein, 155 aa, Neisseria gonorrhoeae
MRLISESGEQLGVVSVREALAMAEGQDVDLVEISPTAKPPVCKLMDYGKYKYQQAKKRDEAKKNQKQVQIKEIKFRPGTDEGDYQIKMRNINRFLADGDKVKVTLRFRGREMAHQQLGAQLLERVKEDLAEVAQIESFPKMEGRQMVMMIAPKKK

SEQ ID NO: 65455 - protein, 65 aa, Neisseria gonorrhoeae
MPKMKTKSSAKKRFKVLGNGGVKRAHAFKRHILTKKTTKNKRQLRGTSMVNDRDLASVAKMLPYA

SEQ ID NO: 65456 - protein, 499 aa, Neisseria gonorrhoeae
  MISC_FEATURE (453)..(453): X=any amino acid
  MISC_FEATURE (454)..(454): X=any amino acid
  MISC_FEATURE (455)..(455): X=any amino acid
  MISC_FEATURE (456)..(456): X=any amino acid
  MISC_FEATURE (457)..(457): X=any amino acid
  MISC_FEATURE (458)..(458): X=any amino acid
  MISC_FEATURE (459)..(459): X=any amino acid
  MISC_FEATURE (460)..(460): X=any amino acid
  MISC_FEATURE (461)..(461): X=any amino acid
MFKKYQYFALAALCAALLAGCEKAGSFFGADKKEASFVERIEHTKDDGSVSMLLPDFAQLVQSEGPAVVNIQAAPAPRTQNGSGNAETDSDPLADSDPFYEFFKRLVPNMPEIPQEEADDGGLNFGSGFIISKNGYILTNTHVVAGMGSIKVLLNDKREYTAKLIGSDVQSDVALLKIDATEELPVVKIGNPKNLKPGEWVAAIGAPFGFDNSVTAGIVSAKGRSLPNESYTPFIQTDVAINPGNSGGPLFNLKGQVVGINSQIYSRSGGFMGISFAIPIDVAMNVAEQLKNTGKVQRGQLGVIIQEVSYGLAQSFGLDKASGALIAKILPGSPAERAGLQAGDIVLSLDGGEIRSSGDLPVMVGAITPGKEVSLGVWRKGEEITIKAKLGNAAEHTGASSKTDEAPYTEQQSGTFSVESAGITLQTHTDSSGKHLVVVRVSDAAERAGLRRXXXXXXXXXVPVNDEAGFRKAMDKAGKNVPLLVMRRGNTLFIALNLQ

SEQ ID NO: 65457 - protein, 119 aa, Neisseria gonorrhoeae
MPRVKRGVTARARHQKIFALAKGYRGRRKNVYRVAKQAVMKAGQYAYRDRRQRKRQFRQLWIVRINAGARENGLSYSKFMNGLKRASIEIDRKVLADLAVFDKAAFAQLVEKAKAALAA

SEQ ID NO: 65458 - protein, 426 aa, Neisseria gonorrhoeae
MSISIFLKRAIFRHHERQIMSAQSQNNHTSPLVVLTTLFFMMGFITCMNDILIPHLKEIFDLSYVQAMLIQFCFFTAYAVMSIPMGAFVGKVGYKNGVIGGFLLTAVGCLLFYPAAGSHSYAVFLGALFILASGVTLLQVAGNPYVTLLAKPGKESATLTLVQAFNALGTTIAPQIGAFLILADATQTVSKAEQISSVQIPYLGLAGLLIILAVFVKMIRLPDARKIAAEESAHNHDGKTGVWQYKHLVFGTAGIFCYVGAEVSIGSLMVNVLGYLKGLDHASAAHYLSFYWGGAMVGRFLGSAVMAKFAPNRYLAFNASAAVVLLAVAMATGSGNADVAMWSLLAIGFFNSIMFPTIFSLATKGLGKFTNAASGVLCTAIVGGAVVPVIQGWAADTYTLMSSFVVSVICYLYIVFFAVYGYRADK

SEQ ID NO: 65459 - protein, 1144 aa, Neisseria gonorrhoeae
MTEPTYIPLRLHTEFSITDGMVRIKKLIAKAQEYGLPALGISDLMNEFGLVKFYKACRGAGIKPVGAADVWIGNPNAPDKPFRAMLVIRNDAGYLRLSELLTEAYVGQDRNIHHAELNPEWLENGDNSGLICLSGAHYGEVGVNLLNGNEDAARAAALKYAAWFPDTFYLELQRLPERPEWEACVSGSVKLAEELGLPVVATHPTQFMNRDDFNAHEARVCIAGGWVLTDKKRPRDFTPSQFFIPPETMLERFADLPEALENTVEIAKRCNLHITLGKNFLPLFPTPDGLSLDDCLIKLSNEGLQERMVQLYPDEAERAAKMPEYQERLDFELNIIIQMKFPGYFLIVQDFINWAKTHGCPVGPGRGSGAGSLVAYSLKITDLDPLKYALLFERFLNPERVSMPDFDVDFCQANRGRVIEYVREKYGAQAVSQIVTFGTMSSKAVIRDVGRVLELPFMLCDKLSKLIPLEANKPLSLDDAMKAQPQIQELLEAEEADELITLAKKLEDLTRGLGMHAGGVLIAPGKISDYSPVYQADESASPVSMYDKGDVEDVGLVKFDFLGLRNLTIIEMAQNNIKNTAGDIVDVGKIPLDDQTAYQIFRDANTTAVFQFESTGMKKMLKTAHTTKFEELIAFVSLYRPGPMDNIPDFVARMKGQEFQYIHPLLEGILAPTYGIMVYQEQVMQAAQIIGGYSLGGADLLRRAMGKKKPEEMVKHREIFAEGAAKQGISREKSDEIFNYMEKFAGYGFNKSHAAAYALISYQTAWLKAHYPAEFMAATMSSELDNTDQLKHFYDDCRANGIEFLPPDINESDYRFTPYPDMKIRYALGAIKGTGEAAVESIIAARQSGGKFTGLLDFCERVGKEHMNRRTLEALIRGGAFDSIEPNRAMLLANIDLAMDNADQKAANANQGGLFDMMEDAIEPVRLIDAPMWSESEKLAEEKTVIGFYLSGHPFGPYAQEVRQIAPTKLGRLKPQDSVRLAGFVTAVRTMMGKRGKIAFVSLEDSSGQAEIMVGGQTLENCADCLKADQVLIIESKVSRDDYGGGDGLRIMANQVMTLQTARERYARSLSLALAPHHDIGGLVRLLAAHQLPDTPRIPLQLSYANEKASGRLQVPPKWTVTPSSALFGELETLLGSRSVRVNW

SEQ ID NO: 65460 - protein, 141 aa, Neisseria gonorrhoeae
MPTDPDSRLRGNDEAILLAEGQKSAVTGYYLNNGKWPADNGAAGVASPATDIKGKYVKEVKVENGVVTAQMASTGVNNEIKGKKLSLWAKRQDGSVKWFCGQPVKRDAGAKTGADDVKADGNNGINTKHLPSTCRDKHDAK

SEQ ID NO: 65461 - protein, 278 aa, Neisseria gonorrhoeae
MIDLHCHSTVSDGMLPPAEVVRLAHQNGCTLLALTDHDHTGGISEARAEADRLGLRLINGVEISVTWRGRTIHVVGLDFDEQDENLQNLLADVRKGRLKRLEAIAAKLEKKGIGGAYDGALALAANKEMVSRTHVAEFLIKNGHVKNKQQAFTKYLGDGKSCAVRHEWATLADCVSAVNGAGGMAVIAHPMRYDLSATAKRNLFEEFKNLGGAGIEVHSGNCCKNDRLNYALLADRFGLLASAGSDFHRLDDFSGGILGACPDLPENCKPVRAHFSRH

SEQ ID NO: 65462 - protein, 757 aa, Neisseria gonorrhoeae
MNITRILSQELSATTVQINAAIELLDDGATVPFIARYRKEATGGLDDTQLRQLAERLQYLRELEERKAVVLKSIEEQGKLSDDLRAQIEAADNKTALEDLYLPYKPKRRTKAQIAHEHGLQPLADVLLAEQPQDVEAAAQGYLNENIPDAKAALDGARAILMEQFAEDAELIGTLRDKLWNEAEIHTQVVEGKETEGEKFSDYFDRREPVRAMPSHRALAVLRGRNEGVLNIALKYQPDDTPITQQSEYEQIIARRFKVSDGHKWLRDTVRLTWRAKIFLSLELEALNRLKEAADTDAITVFARNLKDLLLAAPAGRLTTLGLDPGYRNGVKCAVVDDTGKLLDTVIVYLHQENNMLATLSRLIKQHGVKLIAIGNGTASRETDKIAGELVRGMPESSLHKIVVSEAGASIYSASELAAREFPDLDVSLRGAVSIARRLQDPLAELVKIDPKSIGVGQYQHDVNQSRLAKSLDAVVEDCVNAVGVDANTASAPLLARISGLNQTLAQNIVAYRDENGAFDSRKKLLKVPRLGEKTFEQAAGFLRINGGKEPLDASAVHPEAYPVVAKMLAQQGITAAELIGNRERVKQIKASDFTDERFGLPTILDILSELEKPGRDPRGAFQTASFAEGIHEISDLQVGMILEGVVSNVANFGAFVDIGVHQDGLVHISALSNKFVQDPREVVKAGDVVKVKVLEVDAARKRIALTMRLDDEPGGAKHKMPSENRSRERTAGRKPQRNDRAPTNSAMADAFAKLKR

SEQ ID NO: 65463 - protein, 430 aa, Neisseria gonorrhoeae
MQFSAFGEKFTQHSGILQLMDDLGDALKSDKPVNMLGGGNPARIPEIDRAFADIFSKLAAEHAVENIGNYSNPQGDAALIDALTAFPNREYGWNLTVGNIALTNGSQNAFFYLFNLFGGKFKLSDGTSAEKAILLPLAPEYIGYADVHVEGRHFVSVKPKIENVEHEGEAGFFKYRVDFDALENLPELKAGKIGAICCSRPTNPTGNVLTDGEMARLDALAREHGIPPIIDNAYGMPFPNIIDSGVTLNWHENIILCFSLSKVGLPGVRTGIIVAAPEAVKAVSSLNAIVNLAPTRFGAAIAAPLLESGEMKRLADQVIRPFYRNQAQTAVSLLKRELGAYPMKIHKPEGAIFLWLWFENLPVSSQTLYEMLKAEGTLIIPGEHFFVGIDTQDYPHAGECIRMSIAQDAQTLEKGIAAIGKTVRKPYDNV

SEQ ID NO: 65464 - protein, 636 aa, Neisseria gonorrhoeae
MNLETLIALPRNIKKICFLIHDFLMIFTAFWFTQSLKADYSDEWFDFANWQSFLLTALLTITLFIRMGLYRAVTRFVSFHVLTTAFAGSLASAVLFFLNTLIFEERLRLALPIVYFLLLFVSVTGSRMVLRGLLSDHQKKTHDPVIIYGAGRSGRQLLEAVKQMREYSAAAFVDDNPKLWHTVIYDLAVYQPDAIAFLIERYGVEKILLAIPSATQEQRRRIISKLKAYPCEVLTIPGMKDLMDGKISIGTLKKISVSDLLGRDSVAPDDRLMNADTEGKTVMVTGAGGSIGSELCRQIIRRRPERLLLFELSEFALYTVEKELCEYCARNGIAAEILPFLGSVQNRTLLTHIMTAFSVATVYHAAAYKHVPMVEFNTVEGIRNNIFGTLECALAATASGVETFVLISTDKAVRPANTMGAGKRMAELCLQALAAEPGQKTRFSMVRFGNVLGSSGSVVPLFEKQIAEGGPITLTHPDITRYFMTIPEAAQLVIQAGAMGRGGDVFVLDMGESVKITDLARQMITLSGLKPKTPEQPDGDIEILITGLRPGEKLYEELLIGDNVRKTGHPRIMTADETMLPWHELSALLDRIRTACDRYDQQAIRDLLVNAPTGFTPTGGICDLLWVCETHRKNAV

SEQ ID NO: 65465 - protein, 512 aa, Neisseria gonorrhoeae
MNMLGALAKVGSLTMVSRVLGFVRDTVIARAFGAGMATDAFFVAFKLPNLLRRVFAEGAFAQAFVPILAEYKETRSKEATEAFIRHVAGMLSFVLIVVTALGILAAPWVIYVSAPGFTKDADKFQLSISLLRITFPYILLISLSSFVGSILNSYHKFGIPAFTPTFLNISFIVFALFFVPYFDPPVTALAWAVFVGGILQLGFQLPWLAKLGFLKLPKLNFKDAAVNRVMKQMAPAILGVSVAQISLVINTIFASYLQSGSVSWMYYADRMMELPGGVLGAALGTILLPTLSKHSANQDTEQFSALLDWGLRLCMLLTLPAAAGLAVLSFPLVATLFMYREFTLFDAQMTQHALIAYSFGLIGLIMIKVLASGFYARQNIKTPVKIAIFTLICTQLMNLAFIGPLKHAGLSLAIGLGACINAGLLFFLLRKHGIYRPGRGWAAFLAKMLLALAVMCGGLWAAQACLPFEWAHAGGMRKAGQLCILIAVGGGLYFASLAALGFRPRHFKRVES

SEQ ID NO: 65466 - protein, 684 aa, Neisseria gonorrhoeae
MTRKILVTSALPYANGSIHLGHMVEHIQTDVWVRFQKLRGHECYYCCADDTHGTPVMLAAQKQGIAPEDMIAKVRKEHLADFTGFFIGYDNYYSTHSTENKQFSQDIYRALKANGKIESRVIEQLFDPEKQMFLPDRFVKGECPKCHAQDQYGDNCEVCGTTYSPTELINPYSAVSGAKPELRESEHFFFKLGECADFLKAWTSGNNPHDGKPHLQPEALNKMKEWLGEGEETTLSDWDISRDAPYFGFEIPDAPGKYFYVWLDAPVGYMASFKNLCDRIGIDFDEYFKADSQTEMYHFIGKDILYFHALFWPAMLHFSGHRAPTGVYAHGFLTVDGQKMSKSRGTFITAKSYLEQGLNPEWMRYYIAAKLNGKIEDTDLNLQDFISRVNSDLVGKYVNIAARASGFIAKRFEGRPKDVSGSALLAKLAAESDTIAEQYENREYARALRDIMALADIVNEYVDANKPWELAKQEGQDERLHEVCSELINAFTMLTAYLAPVLPQTAANAARFLNLDAITWKNTRETLGEHAINKYEHLMQRVEQKQVDDLIEANKQSIQTASAPVEEGKYEKVAEQAGFDDFMKIDMRVAKVLNCEAVEGSTKLLKFDLDFGFEKRIIFSGIAASYPNPAELNGRMVIAVANFAPRKMAKFGVSEGMILSAATADGKLKLLDVDAGAQPGDKVG

SEQ ID NO: 65467 - protein, 612 aa, Neisseria gonorrhoeae
MCGIVGAIRAHHNVVDFLTDGLKRLEYRGYDSSGIAVYSDGKIKRVRRVGRVQLMEDAAREKGISGGIGIGHTRWATHGGVTEPNAHPHISGGMIAVVHNGIIENFESERKRLEGLGYRFESQTDTEVIAHSINHEYAQNGGRLFEAVQEAVKRFHGAYAIAVIAQDKPDELVVARMGCPLLVALGDDETFIASDVSAVIAFTRRVAYLEDGDIALLASDGIKRLTDKNGLPAERKVKVSELSPASLEPGPHSHFMQKEIHEQPRAIADTAEVFLDGGFIPENFGKNAKSVFESIRSVKILACGTSYYAALTAKYWLESIAKIPADVEIASEYRYRSVIADPDQLVITISQSGETLDTMEALKYAKSLGHRHSLSVCNVMESALPRESSLVLYTRAGAEIGVASTKAFTTQLVVLFGLAVTLAKVRGVVSGEDEARYTEELRQLPGSVQHALNLEPQIAAWAQQFAKKTSALFLGRGIHYPIALEGALKLKEITYIHAEAYPAGELKHGPLALVDENMPVVVIAPNDSLLDKVKANMQEVGARGGELFVFADLDSNFNATEGVHVIRAPRHVGELSPVVHTVPVQLLAYHTALARGTDVDKPRNLAKSVTVE

SEQ ID NO: 65468 - protein, 260 aa, Neisseria gonorrhoeae
MTDILNKILATKAQEVAAQKAAVNAEHIRALAAEAAPVRSFIDSIRGKHRLNLPAVIAEIKKASPSKGLIRPDFRPAEIARAYENAGAACLSVLTDEPYFQGSPEYLKQAREAVLLPVLRKDFIIDEYQVYQARAWGADAVLLIAAALEQGQLERFEALAHELGMTVLLELHDETELEKCRNLTTPLWGVNNRNLRTFEVSLDQTLSLLPALEGKTVVTESGITGKADVEFMRARGVHTFLIGETFMRADDIGAEVGKLF

SEQ ID NO: 65469 - protein, 626 aa, Neisseria gonorrhoeae
RPTARQILHEVFGYPEFRGRQEDVINTLAGGGSLTVLMPTGGGKSLCYQIPALMREGVAVVVSPLIALMNDQVASLHVAGIEAAAVNSGTSADEAREIADKLAQGRLKLLYVAPERLVTDRFLRFLDQQTVSLFAIDEAHCVSRWGHDFRPEYQQLGMLAERYPNIPRIALTATADAATRADIKHYLHLDDASEFVSSFDRTNIYYQVIEKNNGKKQLLDFIRKEMTGQSGIVYCLSRKKVEDAAQFLRENGLNAIPYHAGLSMDVREENQRRFTHEDNIIVVATVAFGMGIDKPDVRFVAHLDMPQSVEHFYQESGRAGRDGLPAVSWLCYGLNDWVLLRERIAEGNSDEVQKQIEMQKLDAMLSVCETAACRRVLLLKHFGEASEPCGHCDNCLHPPVRFDGTVLVQKLLSCVYRAGQRFAAGYITNLLRGKSDDWIRGNRHEQLSTFGIGAELSDKEWRSVIRQCISLGYLTVNIARYQALQLTEAAKKVLKGETEVMLRPLKRDKPATRTLKDNWLRTEREERLWQALRVWRMKQAEAEGIPAYMIFGDKTLRDLVEKMPQNLNGLHDIYGLGEAKTERFGHGILKVCQNAPTLATMPSSVRKPNANNNCVKNSKPGGMNRQ

SEQ ID NO: 65470 - protein, 329 aa, Neisseria gonorrhoeae
MENVNRIVAEGIAAVEAAQDFNALEQIKARYLGKTGELTGLLKTLGQMSPEERKTIGAHINECKNRFQTAFNAKRDALNEAKLQARLAAEALDITLPGRAQEGGSLHPVTLTLQRVVELFHGMGFEVADGPEIEDDFHNFQALNIPANHPARAMQDTFYVENGDVLRTHTSPIQIRYMLDKKEPPIRIIAPGRVYRVDSDATHSPMFHQAEGLWVEEGVTFADLKAVFTDFIRRFFERDDLQVRFRPSFFPFTEPSAEIDIMGENGKWLEVGGCGMVHPNVLKNVNIDPEKYTGFAFGIGLDRFAMLRYNVNDLRLFFDNDLNFLKQFE

SEQ ID NO: 65471 - protein, 149 aa, Neisseria gonorrhoeae
MSTFFRQTAQAMTAKHIGRFPLLELDQVIDWQPIEQYLNRQKTRYLRDRRGRPAYPLSSMFKAVLPGQWHSLSDPELEHSLITRIGFNLFCRFDGPGIPGCSTLCRYRKFRYARAAYFGLLKVGAQSHLKAMCLNLLKAANRLSAPAAA

SEQ ID NO: 65472 - protein, 249 aa, Neisseria gonorrhoeae
MPDAAKKVYLIHGWGANRHAFDDLMPRLPATWPVSAVDLPGHGDAPFAQPFDIEAAADGIAAQIDTSADILGWSLGGLVALYLAARHPDKVRSLCLTASFARLTAAEDYPEGLAAPALGKMVGAFRTDYAKHIKQFLQLQLLHTPDAAEIIGRILPDLARCGTPQALQEALDAAERADARHLLDKIDVPVLLVFGGKDAITPLRMGEYLHRHLKGSRLVVMEKAAHAPFLSHAEAFAALCRDFVEGGLT

SEQ ID NO: 65473 - protein, 787 aa, Neisseria gonorrhoeae
MQFSYSWLKTQANPDLSADKLEHLLTMAGLEVEEIDTAAPAFSGVVVAEVKSVEKHPDADRLNVTQVDAGTGELVQIVCGAPNVKPGIKVPCSLPVAVLPGNFKIKPTKMRGVPSNGMLCSTNELGLPDDGVDGLHILPEDAPVGTNIREYLDLDDMLFTLKITPNRADCLSVKGIAREVSALTQCAFTPVEIQTAPIGSEKKQAVRIDAPADCGRFISRVIENVNAKAATPDWMKQRLERSGIRSISALVDIGNYVMLEIGQPMHVFDADKLSGSLIVRRAQNGETLACLNEKTVTLADNTLVVADEKGALSLAGLMGGAASAVSDGTQNIVLEAAWFEPEIIVGKSRQYGFGSDSSFRFERGVDYRLQADAIERATELVLQICGGAAGEMVEAQGKLPEAKQVGLRLGRLKTVLGVDIPAEQVETILQHLGLQPEKTAEGFRITAPSFRFDIEIEADLIEEIGRVYGYENIPDDYTSGRLKMSELPETRRPRFAVYNEMAARGYREVISYAFVDEQWELDFAANAAPIRLQNPLAAQYAVMRSTLIGGLVEILQNNLNRKQNRVRVFEIACVFGKGSDGRFVQNERIGGLWYGAAMPEQWGEKTRNADFYDIKADVENLLKNKAVEFVKTGHPALHPGRAANIVSDGKVIGFVGELHPKWLQKYDLPQAPLVFEIDMAAVLECGKTRYRAVSKFQPVRRDLAFVMPEVMNHDDLLLVLKGAANKLVQEISVFDVYRGTGLPEGMKSVAVKVILQDMENTLTDEAVEPLIGKLIGVATEAGARLRS

SEQ ID NO: 65474 - protein, 274 aa, Neisseria gonorrhoeae
MDGAQPKTNFFERLIARLAREPDSAEDVLNLLRQAHEQEVFDADTLTRLEKVLDFAELEVRDAMITRSRMNVLKENDSIERITAYVIDTAHSRFPVIGEDKDEVLGILHAKDLLKYMFNPEQFHLKSVLRPAVFVPEGKSLTALLKEFREQRNHMAIVIDEYGGTSGLVTFEDIIEQIVGDIEDEFDEDESADNIHSVSAERWRIHAATEIEDINAFFGTEYGSEEADTIGGLVIQELGHLPVRGEKVLIGGLQFTVARADNRRLHTLMATRVK

SEQ ID NO: 65475 - protein, 311 aa, Neisseria gonorrhoeae
MNPKKLVIASRESLLAMWQAKHIQGRLKALYPDCEVEILGMTTRGDRILDRTLSKVGGKGLFVKELEQSLQDGRADLAVHSIKDVPMDLPEGFALAAISERANPFDAFVSNRYARLEEMPEGAVVGTSSLRREAQLRARYPHLVIKPLRGNVQTRLSKLDNGEYDAIILAAAGLQRLELDERIRMILSESDSLPAAGQGALGIEIATHREDLYEVLKPLNHDTTHACVTAERALARALGGSCQVPLAAYCTEENGLLILRGLVGHPDGSIVLQADAQAPAGYADALGRAVAKKLADDGAQELIGAVLNTEN

SEQ ID NO: 65476 - protein, 408 aa, Neisseria gonorrhoeae
MTDPLPVYPVKRAEGVFIELADGTRLIDGMSSWWCAIHGYNHPVLNQAVENQMKQMAHVMFGGLTHEPAVELGKLLVGILPQGLDRIFYADSGSVSVEVALKMAVQYQQARGLTAKQNIATVRRGYHGDTWNAMSVCDPETGMHHIFGSALPQRYFVDNPKNRFDDEWDGADLQPVRALFEAHHVDIAAFILEPVVQGAGGMYFYHPQYLRGLRDLCDEFDIVLIFDEIATGFGRTGKMFACEHAEVVPDIMCIGKGLSGGYMTLAAAITSQKVTETISRGEAGVFMHGPTFMANPLACAVACASVKLLLSQDWQANIRRIESILKGRLKAAWDIRGVKDVRVLGAIGVIELEKGVDMARFQADCVAQGIWVRPFGRLVYLMPPYIISDGILTKLADKTVQILKEHSK

SEQ ID NO: 65477 - protein, 421 aa, Neisseria gonorrhoeae
FSSLGLGTELVSALTAQGYENPTPIQAAAIPKALAGHDLLAAAQTGTGKTAAFMLPSLERLKRYATASTSPAMHPVRMLVLTPTRELADQIDQNVQGYIKNLPLRHTVLFGGVNMDKQTADLRAGCEIVVATVGRLLDHVKQKNISLNKAEIVVLDEADRMLDMGFIDDIRKIMQMLPRQRQTLLFSATFSAPIRKLAQDFMNAPETVEVAAQNTTNANVEQHIIAVDTFQKRNLLERLIVDLHMNQVIVFCKTKQSVDRVTRELVRRNLSAQAIHGDRSQQSRLETLNAFKDGSLRVLVATDIAARGLDIAELPFVINYEMPAQPEDYIHRIGRTGRAGADGVAISLMDESEQKMFEAIKELTGNKLLIERIEGFEPRWWEQEGSKPEKTETSEPRQRQPLRIRQGSARKKYPAGNHGKR

SEQ ID NO: 65478 - protein, 334 aa, Neisseria gonorrhoeae
MHIGGYFIDNPIALAPMAGIADKPFRRLCRAFGAGWAVCEMLASDPTLRNTGKTLHRSDFADEGGIVAVQIAGSDPEQMADAARYNVGLGAQVIDINMGCPAKKVCNVQAGSALMQDEPLVAAILEAVVKAAGVPVTLKTRLGWHDDHQNLPAIAKIAEDCGIAALAVHGRARTQMYKGEARYELIAETKSRLNIPAWVNGDITSPQKAAAVLKQTAADGIMIGRGAQGRPWFFRDLKHYAEHGVLPPALSLAECRAAILNHIRAMHAFYGETVGVRIARKHIGWYIGEMPDGEQARREINRLDNAAAQYDTLAGYLERLAGKTDRWACGYREG

SEQ ID NO: 65479 - protein, 278 aa, Neisseria gonorrhoeae
LVAFLIMLREGIEAALIVGIVAGFLKQSGHSKLMPKVWFGVVLASLMCLGIGYGIHSATGEIPRKQQEFVVGIIGLVAVAMLTCVVLWMKKAARSMKRQLRDSVQAALNRGSGQGWALVGMAFLAVAREGLESVFFPLAVFKQSPTWQMPAGAVAGVLAAAVIGALIYQGGMRLNLAKFFRWTGAFLIIVAAGLLAGSLRALHEAGIWNALQDIVFDPSKYLHEDSPLGVLLGGFFGYTDHPAQGGALVWLLYLIPVMIWFLRGSRPSETLTRKEELK

SEQ ID NO: 65480 - protein, 421 aa, Neisseria gonorrhoeae
MSQNQPAQPTKRNLFKTALAVGAIGAIGGYFGGKKQGETAERTAESQHSPQAYPCYGEHQAGIVTPRQAFSIMCAFDVTAQSAKQLENLFRTLTARIEFLTQGGEYQDGDDKLPSAGSGILGKAFNPDGLTVTVGVGSSLFDGRFGLKDKKTVHLQEMRDFPNDKLQKSWCDGDLSLQICAFTPETCQTALRDIIKHTAQTAVIRWSIDGWQPKSEPGAMAARNLLGFRDGTGNPKVSDPKTADEVLWTGVAANSLDEPEWAKNGSYQAVRLIRRFVEFWDRTPLQEQTDIFGRRKYSGAPMDGKKEADQPDFAKDPEGDITPKDSHMRLANPRDPEFLKKHCLFRRAYSYSRGPASSGQLDVGLVFVCYQANLADGFIFVQNLLNGEPLEEYISPFGGGYFFVLPGVGKGGFLGQGLPGV

SEQ ID NO: 65481 - protein, 216 aa, Neisseria gonorrhoeae; identical to SEQ ID NO: 65086

SEQ ID NO: 65482 - protein, 471 aa, Neisseria gonorrhoeae
MPSETASDGMAQENAMPQNTLNTVILAAGKGTRMYSQMPKVLHCIGGKPMVERVIDTAAALNPQNICVVVGHGKEQVLDTVKRDAVWVEQTEQLGTGHAVKTALPHLASEGRTLVLYGDVPLIDVETLETLLEAAGNEVGLLTDVPADPAGLGRIIRDGSGSVTAIVEEKDASATQKTIREINTGILVLPNAKLENWLNSLSSNNAQGEYYLTDLIAKAVADGIKVRPVRVRASHLAAGVNNKRQLAELERIFQTEQAQELLKAGVTLRDPARFDLRGRLKHGQDVVIDVNVVIEGEVELGDNVEIGANCVIKNAKIGANSKIAPFSHLEGCEVGENNRIGPYARLRPQAKLADNVHVGNFVEIKNAAIGKGTKANHLTYIGDAEVGSKTNFGAGTIIANYDGVHKHKTVIGDEVRIGSNCVLVAPVTLGNKVTTGAGSTITRNIEDNKLALARARQTVIEGWMRPEKDKQ

SEQ ID NO: 65483 - protein, 204 aa, Neisseria gonorrhoeae; identical to SEQ ID NO: 65088
  MISC_FEATURE (91)..(91): X=any amino acid
  MISC_FEATURE (93)..(93): X=any amino acid
  MISC_FEATURE (168)..(168): X=any amino acid
  MISC_FEATURE (175)..(175): X=any amino acid
  MISC_FEATURE (185)..(185): X=any amino acid
  MISC_FEATURE (194)..(194): X=any amino acid

SEQ ID NO: 65484 - protein, 122 aa, Neisseria gonorrhoeae; identical to SEQ ID NO: 65106
  MISC_FEATURE (95)..(95): X=any amino acid
  MISC_FEATURE (115)..(115): X=any amino acid

SEQ ID NO: 65485 - protein, 55 aa, Neisseria gonorrhoeae; identical to SEQ ID NO: 65092

SEQ ID NO: 65486 - protein, 333 aa, Neisseria gonorrhoeae
MKRKIWLLPLLAVSAYLQAQTEVRLAVHKSFSLPKGLIARFERANDAKVSIIQAGGANEMLNKLILSRANPIADAVYGLDNANIGKAREMGILAAAQPESAPVAVGLPSALAVDYGYVSVNYDKKWFEGKKLPLPQTLQDLTRPEYKNLLVVPSPATSSPGLGFLMANIGGLGEEGAFKWWAQMRQNGVKVAKGWSEAYYTDFSHNGGAYPLVVGYAASPAAEVYFSKGKYSEPPTGNLFLKGGVFRQVEGAAVLKGAKQPKLAAKLVQWLQSLEVQQAVPSEMWVYPAVKNTRLPDVFRFAQAPAHTTAPAQRDIDANQRGWVSRWIRTVLK

SEQ ID NO: 65487 - protein, 282 aa, Neisseria gonorrhoeae
MDFKQFDFLHLISVSGWGHLAEKAWAFGLNLAAALLIFLVGKWAAKRIVAVMRAAMTRAQVDATLISFLCNVANIGLLILVIIAALGRLGVSTTSVTALIGGAGLAVALSLKDQLSNFAAGALIILFRPFKVGDFIRVGGFEGYVREIKMVQTSLRTTDNEEVVLPNSVVMGNSIVNRSSLPLCRAQVIVGVDYNCDLKVAKEAVLKAAAEHPLSVQNEERQPAAYITALGDNAIEITLWAWANEADRWTLQCDLNEQVVENLRKVNINIPFPQRDIHIINS

SEQ ID NO: 65488 - protein, 138 aa, Neisseria gonorrhoeae
MVKLTEQDILNWIGPEDDYMNDDHLAFFRELLVKMQDELIENASVTTGHLQEHESAPDPADRATQEEEYALELRTRDRERKLLSKIQATIRNIDEGDYGFCADTGEPIGLKRLLARPTATLSVEAQERRERMKKQFAD

SEQ ID NO: 65489 - protein, 149 aa, Neisseria gonorrhoeae
MSLIGEILPLSHIVLDMEVGSKKRLFEEAGLLLERESSLSHADVFECLFAREKLGSTGLGQGVAIPHGRHASVKQATGAFIRTREPVGFDAPDGKPVSLVFILLVPENATGEHLEVLSKLAGKFSQKSIRESLMTVASAEEARAILTEE

SEQ ID NO: 65490 - protein, 320 aa, Neisseria gonorrhoeae
MPSISVRRLFDDNQYKLQLAWAAGNSGADNRIGVEADKPVLALVGHLNFIHPNQIQVVGLAESEYLNRLESGETGYQFGDLFDISMSLVIVANDLPVSPGLRDYCHKNDIPLLTSKLESPYLMDVLRIYLQRTLAASSVKHGVFLDVFEIGVLITGHSGLGKSELALELISRGHSLIADDAVELFRIGPETLEGRCSPMLRDFLEVRGLGILNIRHIFGETSIRPKKILQLIINLVEADDEYMKQLDRLSIRTETESILNVNVRSVTLPVAVGRNLAVLVEAAVRNYILQLRGKDSTREFLERHQTQLKENEQNHENRPD

SEQ ID NO: 65491 - protein, 284 aa, Neisseria gonorrhoeae
MKIVLISGLSGSGKSVALRQMEDLGYFCVDNLPLEMLPSLVSYHIERADETELAVSVDVRSGIDIAQAREQIAYLRGLGHRVEVLFVEAEEAVLVRRFSETRRGHPLSNQDMTLLESLKKEREWLFPLKEIAYCIDTSKMNAQQLRHAVRQWLKVERTGLLVVLESFGFKYGVPNNADFMFDMRSLPNPYYDPELRPYTGMDKPVWDYLDGQPLAQEMVDGIERFVTRWLPRLEDESRSYVTVAIGCTGGQHRSVYIVEKLARRLKGRYELLIRHRQAQNLSGR

SEQ ID NO: 65492 - protein, 313 aa, Neisseria gonorrhoeae
MAIQWFPGHMNKARKAIAERAKSVDMVIEMLDARMPASSENPLLAQLSKGKPKLKILNKQDLADPERTKVWLDHYNSRPDTRAIALDSSETGAHGKITQACRAMIPHRQGIDKPLRVLICGIPNVGKSTLINGMIGKKSAKTGNEPGITKAEQRLFLADDFWLYDTPGMLWPKIIVEESGYNLAAGGAVGRNALDEEEVALELLDYLRRHYLPMLQERYQADKDPSSHWDDNSWLEWIAKKRGAVLSGGRVNYQKAAENILTDFREGKIGRITLETPNQWETWLKKARQKEAELKAIREARKAERKGQKPSEA

SEQ ID NO: 65493 - protein, 874 aa, Neisseria gonorrhoeae
SNQTILKEKNEQNVRYLKDYQTPAYRILETELHFDIAEPQTVVKSRLTVEPQRAGEPLVLDGSAKLLSVKINGAAADYVLEGETLTIADVPSERFTVEVETEILPAENKSLMGLYASGGNLFTQCEPEGFRKITFYIDRPDVMSKFTTTIVADKKRYPVLLSNGNKIDGGEFSDGRHWVKWEDPFAKPSYLFALVAGDLAVTEDRFTTMSGRNVKIEFYTTEADKPKVGFAVESLKNAMKWDETRFGLEYDLDIFMVVAVGDFNMGAMENKGLNIFNTKFVLADSRTATDTDFEGIESVVGHEYFHNWTGNRVTCRDWFQLSLKEGLTVFRDQEFSGDRAGRAVRRIENIRLLRQNQFPEDAGPTAHPVRPVSYEEMNNFYTMTVYEKGAEVVRMYHTLLGEEGFQKGMKLYFQRHDGQAVTCDDFRAAMADANGINLDQFALWYSQAGTPVLEAEGRLKNNVFELTIKQTVPPTPDMADKQPMMIPVKVGLLNRNGEAVAFDYQGKRATEAVLLMTEAEQAFPLEGVTEAVVPSLLRGFSAPVYLNYPYSDDDLLLLLAHDSDAFTCWEAAQTLYRRAVAANLAALSDGIGLPKHEKLLAAVEKVISDDLLDNAFKALLLGVPSEAELWDGTENIDPLRYHQAREALLDTLAVRFLPKWHELDRQAAKQENQSYEYSPETADWRTLRNVCRAFVLRADPAHIETVAEKYGEMAQNMTHEWGILSAVNGNESDTRNCLLAQFADKFSDDALVMDKYFALIGSSRRSDTLQQVQTALQHPKFSLENPNKARSLIGSFSRNVPHFHAQDGSGYRFIADKVIEIDRFNPQVAARLVQAFNLCNKLEPHRKNLVKQELQCIRAQEGLSKDVGEIVGKI

SEQ ID NO: 65494 - protein, 360 aa, Neisseria gonorrhoeae
MFSFFRRKKKQETPALEEAQVQETAAKVESEVAQIVGNIKEDVESLAESVKGRAESAVETVSGAVEQVKETVAEMPSEAGEAAEKAVERVESAKEAVAETVGEAVGQVQEAVATTEEHKLGWAARLKQGLAKSRDKMAKSLAGVFGGGQIGEDLYEELETVLITGDMGMEATEYLMKDVRGRVSLKGLKDGNELRGALKEALYDLIKPLEKPLVLPETKEPFVIMLAGINGAGKTTSIGKLAKYFQAQGKSVLLAAGDTFRAAAREQLQAWGGRNNVTVISQTTGDSAAVCFDAVQAAKRAGRHRACRHRRPPAHAASFDGRNQKSEARAAKSHSRRAARNHRRTRCQYRAKRRQPSQSL

SEQ ID NO: 65495 - protein, 228 aa, Neisseria gonorrhoeae
MTVLQERYREVSDRIGKLVLQAGREPHSVSLIAVSKTFPSDGIREVYAAGQRDFGENYIQEWYGKTEELADLTDIVWHVIGDVQSNKTKFVAERAHWVHTVCRLKTAVRLSRQRRSLMPPLQVCVEVNIAGEAAKHGVAPEEAVALAVEVAKLPNLVVRGLMCVAKANSSETELKTQFQTMQKLLADLNAAGVKADVLSMGMSDDMPAAIECGATHVRIGSAIFGKRG

SEQ ID NO: 65496 - protein, 347 aa, Neisseria gonorrhoeae
MQITDLLAFGAKNKASDLHLSSGISPMIRVHGDMRRINLPEMSAEEVGNMVTSVMNDHQRKIYQQNLEVDFSFELPNVARFRVNAFNTGRGPAAVFRTIPSTVLSLEELKAPSIFQKIAESPRGMVLVTGPTGSGKSTTLAAMINYINETQPAHILTIEDPIEFVHQSKKSLINQRELHQHTLSFANALSSALREDPDVILVGEMRDPETIGLALTAAETGHLVFGTLHTTGAAKTVDRIVDVFPAGEKEMVRSMLSESLTAVISQNLLKTHDGDGRVASHEILIANPAVRNLIRENKITQINSVLQTGRASGMQTMDQSLQSLVRQGLIAPEATRRRAQNSESMSF

SEQ ID NO: 65497 - protein, 716 aa, Neisseria gonorrhoeae
MKTPLLKPLLITSLPVFASVFTAASIVWQLGEPKLAMPFVLGIIAGGLVDLDNRLTGRLKNIIATVALFTLSSLTAQSTLGTGLPFILAMTLMTFGFTILGAVGLKYRTFAFGALAVATYTTLTYTPETYWLTNPFMILCGTVLYSTAIILFQIILPHRPVQESVANAYEALGGYLEAKADFFDPDEAAWIGNRHIDLAMSNTGVITAFNQCRSALFYRLRGKHRHPRTAKMLRYYFAAQDIHERISSAHVDYQEMSEKFKNTDIIFRIRRLLEMQGQACRNTAQAIRSGKDYVYSKRLGRAIEGCRQSLRLLSDGNDSPDIRHLSRLLDNLGSVDQQFRQLRHSDSPAENDRMGDTRIAALETGSFKNTWQAIRPQLNLESCVFRHAVRLSLVVAAACTIVEALNLNLGYWILLTALFVCQPNYTATKSRVYQRIAGTVLGVIVGSLVPYFTPSVETKLWIVIAGTTLFFMTRTYKYSFSTFFITIQALTSLSLAGLDVYAAMPVRIIDTIIGASLAWAAVSYLWPDWKYLTLERTAALAVCSSGTYLQKIAERLKTGETGDDIEYRITRRRAHEHTAALSSTLSDMSSEPAKFADSLQPGFTLLKTGYALTGYISALGAYRSEMHEECSPDFTAQFHLAAEHTAHIFQHLPDMGPDDFQTALDTLRGELGTLRTRSSGTQSHILLQQLQLIARQLEPYYRAYRQIPHRQPQNAA

SEQ ID NO: 65498 - protein, 115 aa, Neisseria gonorrhoeae
MYIPERGDIFHLAFDPAAGTEMKGGHYAIALSPRAYNRATGLVYACPISQGRAAAARSGGMISTLLGTGTATQGNVHCHRMKALDWKIRRAAFRETVPDYVIEDVLARIGAVLFD

SEQ ID NO: 65499 - protein, 307 aa, Neisseria gonorrhoeae
MLQRTLAKSIGVTGVGLHSGERVALTLHPAPENSGISFRRTDLDGEMGEQIKLNPYLINDTRLSSTIVTDKGLRVGTIEHIMSALSAYGIDNALIELNAPEIPIMDGSSLPFIYLLQDAGVVDQKAQKRFLKILKPVEIKEAGKWVRFTPYDGFKVTLTIEFDHPVFNRSPPTFEIDFAGKSYIGEIARARTFGFMHEVEMMRAHNLGLGGNLNNAIVIGDTDVLNPEGLRYPDEFVRHKILDAIGDLYIVGHPIVGAFEGYKSGHAVNNALLRAVLADETAYEWVEFADSDDLPDAFHELNIRNCG

SEQ ID NO: 65500 - protein, 245 aa, Neisseria gonorrhoeae
MGGQKTHFGFSTVNEDEKAGKVAEVFHSVAKNYDIMNDVMSAGLHRVWKHFTIHTAHLKKGDKVLDIAGGTGDLSRGWAKRVGKEGEVWLTDINSSMLTVGRDRLLNEGMILPVSLADAEKLPFPDNYFNLVSVAFGLRNMTYKDAALKEMYRVLKPGGTLLVLEFSKIYKPLEGAYDFYSFKLLPVMGRLIAKDADSYQYLAESIRMHPDQETLKQMMLDAGFDSVDYHNMSAGIVALHKGVKF

SEQ ID NO: 65501 - protein, 164 aa, Neisseria gonorrhoeae
MNNRHFAVIALGSNLDNPAQQIRGALDALSSHPDIRLEQASSLYMTAPVGYDNQPDFINAVCTVSTTLDGIALLAELNRIEADFGRERSFRNAPRTLDLDIIDFDGISSDDPRLTLPHPRAHERSFVIRPLAEILPDFILGKYGKVVELSKRLGNQGIRLLPDR

SEQ ID NO: 65502 - protein, 124 aa, Neisseria gonorrhoeae
MQYLIVKYSHQIFVTITILVFNIRFFLLWKNPEKPLVGFWKALPHLNDTMLLFTGLWLMKITHFSPFNAPWLGTKILLLFAYIALGMVMMRARPRSTKFYTVYLLAMCCIACIVYLAKTKVLPF

SEQ ID NO: 65503 - protein, 288 aa, Neisseria gonorrhoeae
MKNILLVFVSFVPLCVRTDLPLNIEDIMTDKGKWKLETSLTYLNSENSRAALASPVYIQTGSASFIPVPTEIQENGSNTDMLAGTLGLRYGLTGNTDIYGSGSYLWHEERKLDGNGKTRNKRMSDISAGISHTFLKDGKNPALIAFLESTVYEKSRNKASSGKSWLIGATTYKAIDPIVLSLTAAYRINGSKTLSDDVKYKAGNYWMLNPNISFAANDRISLTGGIQWLGKQPDRIDGKKESARNTSTYAHFGAGFGFTKTAALNASARFNVSGQSSSELKLGVQHTF

SEQ ID NO: 65504 - protein, 291 aa, Neisseria gonorrhoeae
MENGLIDRLLETLWLDRRLSRNTLDSYRRDLEKIARRLSLCGRTLKDADEADLAAAVYVDGEQRSSQARALSACKRLYVWMEREGMRADNPTRLLKPPKIDRNIPTLITEQQISRLLAAPDTDTPHGLRDKALLELMYATGLRVSEAVGLNFGNVDLDRGCITTLGKGDKQRMVPMGQESAYWVERYYTEARPLLLKGRSCDALFVSQKKTGISRQLAWMIVKEYAGRAGIGHISPHSLRHAFATHLVRHGLDLRVVQDMLGHADLNTTQIYTHVANVRLHSVVKEHHSRN

SEQ ID NO: 65505 - protein, 121 aa, Neisseria gonorrhoeae
MNLIQQLEQEEIARLNKEIPEFAPGDTVVVSVRVVEGTRSRLQAYEGVVIARRNRGLNSNFIVRKISSGEGVERTFQLYSPTVEKIEVKRRGDVRRAKLYYLRGLTGKAARIKEKLPARKG

SEQ ID NO: 65506 - protein, 249 aa, Neisseria gonorrhoeae
MLIQAVTIFPEMFDSITRYGVTGRANRQGIWQFEAVNPRKFADNRLGYIDDRPFGGGPGMIMMAPPLHAAIEHAKAQSSQTAKVIYLSPQGKPLTHQKAAELAELTHLILLCGRYEGIDERLLQSSVDEEISIGDFVVSGGELPAMMLMDAVLRLVPGILGDIQSAEQDSFSSGILDCPHYTKPLEFQGMAVPEVLRSGNHGLIAEWRLEQSLRRTLERRPDLLEKRVLIPKESRLLNKILQEQREIQS

SEQ ID NO: 65507 - protein, 169 aa, Neisseria gonorrhoeae
MTDTQNRVAMGYIKGVFGIKGWLKIAANTEYSDSLLDYPEWHLAKDGKTVSVTLEAGKVVNGELQVKFEGIDDRDSAFSLRGYTIEIPREAFAPTEEDEYYWADLVGMTVVNKDDTVLGKVSNLMETGANDVLMIDGEHGQILIPFVSQYIETVDTGSKTITADWGLDY

SEQ ID NO: 65508 - protein, 81 aa, Neisseria gonorrhoeae
MVVIRLARGGSKHRPFYNVIVTDSRSRRDGRFIERVGFYNPVANEKQERVRLNADRLNHWIAQGAQVSDSVAKLIKEQKAV

SEQ ID NO: 65509 - protein, 482 aa, Neisseria gonorrhoeae
MKGDIGVIGLAVMGQNLILNMNDCGFKVVAYNRTIGKVDEFLNGAAKETGIIGAYSLQDLVDKLAKPRKIMMMVRAGSVVDDFVEQLLPLLEEGDIIIDGGNANYPDTTRRTHYLAGKGILFVGAGVSGGEEGARRGPSIMPGGDKRAWEAVKPIFQAIAAKTPQGEPCCDWVGKDGAGHFVKMVHNGIEYGDMQLICEAYQFMKDGLGLSYDEMHRVFAEWNKTELDSYLIEITAAILGYKDEGGEPLAEKILDTAGQKGTGKWTGINALDLGIPLTLISEAVFARCVSSFKEQRVQTGKLFARTATPVEGGKQEWVEALRQALLASKIISYAQGFMLIREAGESYGWGLDYGNTALLWREGCIIRSAFLGNIRDAYEANPDLVFLGADPYFKNILENCLPAWRKVVAKAVECGIPMPCMASAITFLDGYTTERLPANLLQAQRDYFGAHTYERTDKPRGEFFHTNWTGKGGDTASTTYDI

SEQ ID NO: 65510 - protein, 324 aa, Neisseria gonorrhoeae
MTEYPGIGSPLFYGVFFAAVLVMIALDMFSLKKNGSHKVGIKETLAWSGLWVAVSCLFAGWLYFELAGNPGYGAAAAKEKVLEFFTGYILEKSLAVDNIFVFLMIFGYFKVAPQFQHRVLLYGVLGALVLRTVMIFVGAALVRQFEWILYLFGAFLLYTGIHMMKPEGDEEEDLANSRLLNAVKKVVPVGTAFHGEKFFTVENGKKIATPLFLVLIMIELSDVVFAVDSIPAVFAVTTDPFIVLTSNIFAILGLRAMYFLLADVAERFIFLKYGLAFVLGFIGVKMLVMHWVHIPISVSLSVVFGALGASILTSLIYTKKQPDK

SEQ ID NO: 65511 - protein, 417 aa, Neisseria gonorrhoeae
MDKLKISANGPLNGEITVSGAKNAALPLMCAGLLTSGTLRLKNVPMLADVATTQKLLQGMGARVLTDNISEFEINGGTVNNTCAPYELVRTMRASILVLGPTLARFGEAQVSLPGGCAIGSRPVNQHLKGLEAMGAEIAIEHGYVKAKGKLKGARVAMDVVTVGGTENLLMAATLAEGTTVLENCAIEPEVVDLAECLVKMGAKISGIGTSTMIVEGAGELYGCEHSVVPDRIEAGTFLCAVAITGGRVVLRNAAPKTMEVVLDKLVEAGAVIEAGDDWIAIDMRQRPKAVDIRTVVHPGFPTDMQAQFMALNAVAEGSCRVVETIFENRFMHVPELNRMGANITTEGNTAFVQGVERLSGAVVKATDLRASASLVIAGLAARGETVVERIYHLDRGYENIEKKLGSVGANIERVSG

SEQ ID NO: 65512 - protein, 397 aa, Neisseria gonorrhoeae
MAFLKLTEQNVRGKTVLIRADMNVPFKGGKISDDTRIRASLASVKYCLDNGASVIVMTHLGRPTEGEFHPEDDVAPVAAHLGGLLGKDVKVLNDWRENKPALNAGDVVMLQNVRINKGEKKNDLELGKAYAALCDVFVNDAFGTAHRAQASTEAVAQAAPVACAGVLMAGELDALGKALKQPARPMVAIVAGSKVSTKLTILESLADKVDQLIVGGGIANTFLLAEGKAIGKSLAEHDLVEESKKIMAKMAAKGGSVPLPTDVVVAKAFAADAEAVVKDIADVAEDEMILDIGPKSAAALADLLKAAGTVVWNGPVGVFEFDQFAGGTKALAEAIAQSKAFSIAGGGDTLAAIAKFGVTEQIGYISTGGGAFLEFLEGKELPAVAALEKTRRVNGLI

SEQ ID NO: 65513 - protein, 372 aa, Neisseria gonorrhoeae
  MISC_FEATURE (346)..(346): X=any amino acid
WLSIVALAIGAFIFNTAEYIPIALLSDIGRSFGMAATETGVMITVYAWIVALTSLALPLMLLTRNMERRGLLLVLFALYYCSHILSFASWRFEILLASRVGIVLTHAVFWSITASLAVRIAPVGKGNQALGLLSTGTVMAMVAGIPLGRMVGQYLGWQASFLLIGLCSAAVMAVLAKSLPRLPSVNTGSLSSLPLLLKRKKLMLLYAVTVPVITAHFTAYSYIEPFVIQIGGFSARQVTVVPGLYGLAGFAASYLFGKWFAKHPRAFLAGAVSLIALSSGLLLPLAHFPAAIYALVFVWGTAIVVVSLGMVAKVLDFASDAADLANSIYSELYNVGIGGGALLGHXVTQYSGISCIGVAGMLTAAAGLRVCL

SEQ ID NO: 65514 - protein, 70 aa, Neisseria gonorrhoeae
METLLLDIGGMSCGGCVKSVTRILESVKGVASVEVSLENKSATVGYDPAQTAAEALIEAVEDGGYDAALK

SEQ ID NO: 65515 - protein, 185 aa, Neisseria gonorrhoeae
MFWQVLPYAVTINRPMPSERVSASGGIALEQGWDMKKPKILFVCLGNICRSPMAEYILRRRAAEAGIPLETDSAGTSGWHDGEDMHRETAKILKKYGIDASGFTSRKIRQSDATAFDYIIAMDGKNLSELEKTFGRRPEKIFKLTDLIPESGYDHVPDPWYMGDFEETYRLADAGCRALLEKISK

SEQ ID NO: 65516 - protein, 707 aa, Neisseria gonorrhoeae
MMFNKYVKTFQYGNQTVTLETGEIARQAAAAVKVSMGDTVVFVAVTTNKEVKEGQDFFPLAVDYLERTYAAGKIPGGFFKREGKQSEKEILTSRLIDRPIRPLFPEGFYHDIQIVAMVVSVDPEIDSDIPAMLGASAALVLSGVPFAGPIGAARVGYINGVYVLNPTKAELAKSQLDLVVAGTSKAVLMVESEAKILPEDVMLGAVVYGHDQMQVAINAINEFADEVNPEVWDWKAPETNEELVAKVRGIAGETIKEAFKIRQKQARSAKLDEAWNAVKEALITEETDTLAANEIKGIFKRLEADVVRSQILDGQPRIDGRDTRTVRPLNIQTGVLPRTHGSALFTRGETQALAVATLGTSRDEQIIDALSGEYTDRFMLHYNFPPYSTGEVGRMGAPKRREIGHGRLAKRALLAVLPKPEDFSYTMRVVSEITESNGSSSMASVCGGCLSLLSAGVPLKAHVAGIAMGLILEGNKFAVLTDILGDEDHLGDMDFKVAGTTEGVTALQMDIKIQGITKEIMQIALAQAKEARLHILDQMKAAVAGPQELSAHAPRLFTMKISQDKIRDVIGKGGETIRSITAETGTEINIAEDGTITIAATTQEAGDAAKKRIEEITAEVEVGKVYEGTVVKILDNNVGAIVSVMPGKDGLVHISQIAHERVRNVGDYLQVGQVVNVKALEVDDRGRVRLSIKALLDAPVREENAAE

SEQ ID NO: 65517 - protein, 240 aa, Neisseria gonorrhoeae
RTAGNCPFSRQTSDHEPSMNHDITFLTLFLLGFFGGTHCIGMCGGLSSAFALQLPPHINRFWLILLLNTGRISSYTAIGLMLGLIGQLGISLDQTRVLQNILYTASNLLLLFLGLYLSGISSLAAKIEKIGKPIWRNLNPILNRLLPIKSIPACLAVGILWGWLPCGLVYSASLYALGSGSATTGGLYMLAFALGTLPNLLAIGIFSLQLKKIMQNRYIRLCTGLSVSLWALWKLAVLWL

SEQ ID NO: 65518 - protein, 411 aa, Neisseria gonorrhoeae
MALSGGLDSVVLLHLLVCAGKRAGFVPEALHIHHGLSPRADDWADFCRNYCDMLGVGLETVKVCVEKNGLGIEAAARQKRYAEFAEKGFDVLALAHHRDDQIETFMLAVARGGGLRALAAMPAVRPLGENGIIWRPLLPFSRQDIWDYARKHGLPNIEDESNTDTAYLRNRFRHRILPELSAQIPHFGRHVLNNVRALQEDLALLEEVVVQDCRWVCGAGYFDTARWLTFSPRRKTHILRNFLKENGIPVPNQNALADIARVLTEAKTGRWNLQGFELHHYAGRLFVFASEQLAKPAFLKDGTISGNLKKILTEHRFVLKRHPFGLPEAMLEQDGILRTVAASDTLAVGGIHKNVKKILQGKRVLPFLRPIWPLVADSGNRPLALANCCADFQISVSDGILPVHPDFPILF

SEQ ID NO: 65519 - protein, 87 aa, Neisseria gonorrhoeae
MSETKNVRTLQGKVVSDKMDKTVTVLVERKVKHSLYGKIIRLSTKIHAHDENNQYGIGDVVVISESRPLSKTKSWVVSELVEKARSI

SEQ ID NO: 65520 - protein, 103 aa, Neisseria gonorrhoeae
MPQQTMNLMRECIPIFTVLSDENRHQILHVLWKHGRMNVNELTEHLHLSRPAVSHHLKIMLQAGAVAVEQVGKERFYSIAMADAVARLKQLADLMAQNCPLSK

SEQ ID NO: 65521 - protein, 572 aa, Neisseria gonorrhoeae
MLPKEEQVKKPMTSNGRISFVLMAMAVLFACLIARGLYLQTVTYNFLKEQGDNRIVRTQALPATRGTVSDRNGAVLALSAPTESLFAVPKDMKEMPSAAQLERLSELVDVPVDVLRNKLEQKGKSFIWIKRQLDPKVAEEVKALGLENFVFEKELKRHYPMGNLFAHVIGFTDIDGKGQEGLELSLEDSLYGEDGAEVVLRDRQGNIVDSLDSPRNKAPQNGKDIILSLDQRIQTLAYEELNKAVEYHQAKAGTVVVLDARTGEILALANTPAYDPNRPGRADSEQRRNRAVTDMIEPGSAIKPFVIAKALDAGKTDLNERLNTQPYKIGPSPVRDDTHVYPSLDVRGIMQKSSNVGTSKLSARFGAEEMYDFYHELGIGVRMHSGFPGETAGLLRNWRRWRPIEQATMSFGYGLQLSLLQLARAYTALTHDGVLLPLSFEKQAVAPQGKRIFKESTAREVRNLMVSVTEPGGTGTAGAVDGFDVGAKTGTARKFVNGRYADNKHVATFIGFAPAKNPRVIVAVTIDEPTAHGYYGGVVAGPPFKKIMGGSLNILGISPTKPLTAAAVKTPS

SEQ ID NO: 65522 - protein, 76 aa, Neisseria gonorrhoeae
MSIQKAVDYFGNESRLARAIGVKQPTVWAWNKKGTPPPIIRCVQIEKLTGGAVNRKDLRPDDWHLIWPELAGDQPK

SEQ ID NO: 65523 - protein, 61 aa, Neisseria gonorrhoeae
MAEQKKIRVTLVKSLIGTIESHRACARGLGLRRREHTVEVLDTSENRGMINKISYLLKVES

SEQ ID NO: 65524 - protein, 60 aa, Neisseria gonorrhoeae
MVEHLLCKQGVIGSIPFASTKTLQMKASLLFLAAYFDLRSRITTHRSLTNWKAEINKQRQ

SEQ ID NO: 65525 - protein, 700 aa, Neisseria gonorrhoeae
MDLLSVFHKYRLKYAVAVLTMLLLAAVGLHASVYRTFTPENIRSRLQQSIAHTHRKISFDADIRRRLLPRPTVILKNLTITEPDGGRVAVSVKETKIGLSWKNLWSDRIQVEKWVVSGADLALTRDRNGAWNIQDLFDGAKHSASVNRIIVENSTVRLNFLQQQLILKEISLNLQSPDSSGQQFESSGILVWRKLSVPWKSRGLFLSDGIGTPEISPFHFEASTSLDGHGITISTTGSPSVRFNAGGADAAGLGLRADTSFRNLHLTAQIPALALKNNSIKTGTVNGTFTAGGEYARWDGSFKLDKANLHSGIANIGNAEISGSFKTPRLQTNFSLGSPLVWSRDNGLDAPRLHISTLQDTVDRLPQPRFISRLDGSLSIPNLQNWNAELNGTFDRQPVAAKFKYTREGAPHLEAAAALQKLNLAPYLDEFRQQNGKIFPDILGRLSGNVEAHLKIGSIQLPGLQLDDMETYLHADKDHIALSRFKSGLYGGHTEGGISIANTRPATYRLQQNASNIQIQPLLQDLFGFHSFSGNGDAVIDLTASGENRKQLIRSLQGSLSLNISNGAWHGIDMDSILKNGLSGKISGSTPFYRFTLNSEISDGISRHIDTELFSDSLYVTSNGYTNLDTQELSEDVLIRNAVHPKNKPIPLKITGTVDKPSITVDYGRLTGGINSRKEKQKILEDTLLEQWQWLKPKEP

SEQ ID NO: 65526 - protein, 60 aa, Neisseria gonorrhoeae; identical to SEQ ID NO: 65524

SEQ ID NO: 65527 - protein, 103 aa, Neisseria gonorrhoeae
MANQKIRIRLKAYDYALIDRSAQEIVETAKRTGAVVKGPIPLPTKIERFNILRSPHVNKTSREQLEIRTHLRLMDIVDWTDKTTDALMKLDLPAGVDVEIKVQ

SEQ ID NO: 65528 - protein, 166 aa, Neisseria gonorrhoeae
MSNTTVEQFAAELKRPVEDLLKQLKEAGVSKNSGSDSLTLDDKQLLNAYLTKKNGSNGGTISIRRTKTEVSTVDGVKVETRKRGRTVNIPSAEELAAQVKAAQTQAAPVQPEQTAEDAVKARAEAAARAEARAKAEAEAAKLKAAKAGNKAKPAAQKPTEAKAETA

SEQ ID NO: 65529 - protein, 130 aa, Neisseria gonorrhoeae
MNGKYYYGTGRRKSSVARVFLTKGTGQIIVNGRPVDEFFARETSRMVVRQPLVLTENAESLDIKVNVVGGGETGQSGAIRHGITRALIDFDAALKPALSQAGFVTRDAREVERKKPGLRKARRAKQFSKR

SEQ ID NO: 65530 - protein, 89 aa, Neisseria gonorrhoeae
MLKQSIEIINKLGLHARASSKFTQTASQFKSEVWVTKNGSRVNGKSIMGLMMLAAAKGTVIELETDGLDEAAAMKALTDLINDYFGEGE

SEQ ID NO: 65531 - protein, 3074 aa, Neisseria gonorrhoeae
  MISC_FEATURE (20)..(20): X=any amino acid
  MISC_FEATURE (113)..(113): X=any amino acid
  MISC_FEATURE (117)..(117): X=any amino acid
  MISC_FEATURE (131)..(131): X=any amino acid
  MISC_FEATURE (137)..(137): X=any amino acid
  MISC_FEATURE (201)..(201): X=any amino acid
  MISC_FEATURE (343)..(343): X=any amino acid
  MISC_FEATURE (362)..(362): X=any amino acid
  MISC_FEATURE (374)..(374): X=any amino acid
  MISC_FEATURE (411)..(411): X=any amino acid
  MISC_FEATURE (425)..(425): X=any amino acid
  MISC_FEATURE (464)..(464): X=any amino acid
  MISC_FEATURE (507)..(507): X=any amino acid
  MISC_FEATURE (516)..(516): X=any amino acid
  MISC_FEATURE (622)..(622): X=any amino acid
  MISC_FEATURE (685)..(685): X=any amino acid
  MISC_FEATURE (734)..(734): X=any amino acid
  MISC_FEATURE (783)..(783): X=any amino acid
  MISC_FEATURE (862)..(862): X=any amino acid
  MISC_FEATURE (889)..(889): X=any amino acid
  MISC_FEATURE (901)..(901): X=any amino acid
  MISC_FEATURE (939)..(939): X=any amino acid
  MISC_FEATURE (1008)..(1008): X=any amino acid
  MISC_FEATURE (1021)..(1021): X=any amino acid
  MISC_FEATURE (1119)..(1119): X=any amino acid
  MISC_FEATURE (1120)..(1120): X=any amino acid
  MISC_FEATURE (1135)..(1135): X=any amino acid
  MISC_FEATURE (1146)..(1146): X=any amino acid
  MISC_FEATURE (1149)..(1149): X=any amino acid
  MISC_FEATURE (1151)..(1151): X=any amino acid
  MISC_FEATURE (1188)..(1188): X=any amino acid
  MISC_FEATURE (1190)..(1190): X=any amino acid
  MISC_FEATURE (1212)..(1212): X=any amino acid
  MISC_FEATURE (1273)..(1273): X=any amino acid
  MISC_FEATURE (1339)..(1339): X=any amino acid
  MISC_FEATURE (1354)..(1354): X=any amino acid
  MISC_FEATURE (1496)..(1496): X=any amino acid
  MISC_FEATURE (1502)..(1502): X=any amino acid
  MISC_FEATURE (1625)..(1625): X=any amino acid
  MISC_FEATURE (1651)..(1651): X=any amino acid
  MISC_FEATURE (1892)..(1892): X=any amino acid
  MISC_FEATURE (1894)..(1894): X=any amino acid
  MISC_FEATURE (1913)..(1913): X=any amino acid
  MISC_FEATURE (1927)..(1927): X=any amino acid
  MISC_FEATURE (1946)..(1946): X=any amino acid
  MISC_FEATURE (1953)..(1953): X=any amino acid
  MISC_FEATURE (1996)..(1996): X=any amino acid
  MISC_FEATURE (2005)..(2005): X=any amino acid
  MISC_FEATURE (2006)..(2006): X=any amino acid
  MISC_FEATURE (2013)..(2013): X=any amino acid
  MISC_FEATURE (2094)..(2094): X=any amino acid
  MISC_FEATURE (2167)..(2167): X=any amino acid
  MISC_FEATURE (2236)..(2236): X=any amino acid
  MISC_FEATURE (2238)..(2238): X=any amino acid
  MISC_FEATURE (2307)..(2307): X=any amino acid
  MISC_FEATURE (2355)..(2355): X=any amino acid
  MISC_FEATURE (2481)..(2481): X=any amino acid
  MISC_FEATURE (2569)..(2569): X=any amino acid
  MISC_FEATURE (2573)..(2573): X=any amino acid
  MISC_FEATURE (2659)..(2659): X=any amino acid
  MISC_FEATURE (2671)..(2671): X=any amino acid
  MISC_FEATURE (2715)..(2715): X=any amino acid
  MISC_FEATURE (2718)..(2718): X=any amino acid
  MISC_FEATURE (2735)..(2735): X=any amino acid
  MISC_FEATURE (2812)..(2812): X=any amino acid
  MISC_FEATURE (2867)..(2867): X=any amino acid
  MISC_FEATURE (2874)..(2874): X=any amino acid
  MISC_FEATURE (2881)..(2881): X=any amino acid
  MISC_FEATURE (2988)..(2988): X=any amino acid
  MISC_FEATURE (2995)..(2995): X=any amino acid
  MISC_FEATURE (3051)..(3051): X=any amino acid
  MISC_FEATURE (3055)..(3055): X=any amino acid
  MISC_FEATURE (3065)..(3065): X=any amino acid
  MISC_FEATURE (3067)..(3067): X=any amino acid
STCSSVMEASFSASALPLKXSGGPSEAVWSRPAGISDSVLGVFFPAGGFSAGFSGSAADFAALNISNAPMTSAAVPSLSASLNALRTSGFCPASHSSSSRLSTIESASGCAVXISRXCAFAASCRFMSASXPASFSXISFSTPFFTSSSEKSPNNELSEPSAVSTPGFSAPFSSSSMRSLKAWASAFADFSASRASTSFSXGDSVFAVLGTDDLVRTPSAAPIPAPTTAPVLPTTSDSAHFLPSKPSWISGKTNWFKPKRPDTSSGVRRLKPLANTSPALSPKASANILRNAASASHGSSSSLPNIEATASSVTQTAAPRCPKPSHARPTAPPASYAPPYPPXTQGTHCAPAHTGYSANTAXTERPPSPHCPSXSADGFAPHSQNARHTSPFSPVSKAASLSAPARFAKRXAATNVTWRLNFSAXWNSQAALSITFCQADPANPGSPLATPAKSCACDKSITPXSAAFRNAAFSSPFKLSSIVLNFSPNLSPICFEARSNSRAAPAXPHFAAITGXATIAVCDGSQPQKRATSPSSTKSRSPSKPAPAWKDSDSSPPRGVSSSHPPHAATDAGRNPPHICARPQNPASHPTVPPYGPHSATSPDNSHRCPYSAHMRASHHRXSPARPCGGCRVSPKTYRAASSNKAASAYRSIGPVAPDPNSNIPTASPSSLIKPLPTASRLRIXSRDFITGETLNPAPKSAFSASRSFSASLKVSARDTFALFPSASLTTTRXSPKRAKGKYTPPSSLSKRSFRRRTVSASCPARANRSASASRTCPKCALXSSRALRYTLCAASGSPAKRRFSKASPSKAFCAPTSSFSKRFTSARACSNIRTASVLARLSAATSAPARLNARFASESAXNRRRRRISASSAKISRPCFSCAFSSAXAALSAARCALLXAASARAIRAPAEATAASAFSILPSAISKAVRMPSKRFXASFRISGSASTFASVASCIRSASAFASSSFNLPHSLTTLSASVTALFASAPKSSDKRPYSFRPSKTPPXMSSICRLPKNWSXIPLEASQRSFSAFLKSDFLPVIRPIAASMFAAREKRTASVSKSAMPPLPASLSCKICNRRLSSMPDKGDLLSEAPVVDTRSSNESKLPFSIFVSLWSXXRLPFLLTATAALTVXSAPPTFSPETXYSXPXISPFLAKSSFGSVSIYTAFSIICGIAAILCKCSASLXSXRNISVMPERPKLISRPVSLFTXGPRKDLPYSSALRLYSRKLPPSGTSLPEIRMVSARRSFSRLSDLERSAAPSSARANITARXLPPQGASRAPSTFPCKSASIANTSASDIAPPALPARRCSTRRNRAPIRANTPAMPRFKPLPTFTPXRFSMPAQPPVRCAAXSSATASSTAAGRTEAAASPVPSRPSCTASAMRRIRPLPSARSNSSRYLAKPSAAKPLCPSSCHAAHTARSGVRFSATSVILPVLPSNQPSTRCDNSICALSGAVSDTAATSTRSASPPMLSARRFLMLSACSRNALKPCGAXRSFTVXTGPPCNTRALRRASSGLSEAVFANVSGLALPVFSDGFSVAAPCAAADLPFPPSKRDFPASIFRTLSEDGFSVAAFFAAAALPATGVSFARAGCALPAGLPSAAASRGRAITLAGALASCVGRXSRPGSDGTASDKPPARKVSASRPFKXRRPSETRPSELEGPAISANSSGMPPLPGLPGTPASASICLRSVCSKRYSPPPKGTPAFSGLRLSAAKRRVKSAAASAIRFLGDTLPADSATCGFNTGNTVSGRLPATGARFPPSVPARFSDADRPGAAPSARARTCKFCRRAGALPDATADPGKPCKAAAFASAPASGVKPLPPWVKPCRTSCRTSCAKPLSSVGKARVKPLPPPTTASDAPSSGNAVRTPCKRSPSRLNSGTLQPLLRRXPXTARLSLSNTSADSGCCARXARTAPADSAKPSGXCPRISAIPASRRIIPSAVXSATVCAXRRTHSGSASNRLRDSLSNASAGTENPFLGTGTASAIRTGGGRXPCLASEAAXXSASIRAXYACSIFRRTGAAICPKSATPLISRPASFAKALRPRVSKPSKYWPAGSGATRAIPPEAAAAEPPGATEAAPRGAPPGRTLPXADGTPPLSASADRPDGASSATDRASISSDTADGTAAPESAAKAAAAETAPSSGSIPTASDGLARYLAAMSAYXRAKPSGITPVSKNSAPSSDGIPETSGCFSVPRANSSACGVLPSAGPLKNRPASSCFVRSANCRKAGCDXSXCAVSKPAPPCSAPPSAAACAAVRSRLAAARNACAPSGAGLPAFLLPPIPPAHPPSVRPGGLSGSVTAAXAFVPANPTAECPKEEKASKAAPFSSHSPFASPVPKYSPANSPADSVAXAAACRAAPPKPPLADSFASAANSGVPLAAATAALSAAATPIFSNAAFPAAFLPIFKILPPSFIAAISAAPTTAPLTAAFFNAPGAPRPINAITASLSAGSTPAASAALSSCPPYSISVLPKVAPAXAPTAALPPAKAPNMPPAVAVAIGTSALGACSSTAPAISPTSSKAPSKPFSRQSFLSSPHTFDRPPPTPPPFSQASPNSLRAWDLRPSXIFRXSISSALSRPSSSLSPVRAFHPIRAERIEFLNPRVNAVSSAAARASFCVKPRYSFKPPTSRPCSNGSYLTKSLIAQPSSHPSHSHKXFYRRPFSDRSAXSPTPHNASRALPQTPHPKACPSANRQSPRASPSSPYPGRQPHNXQSXTHSGQSPSPLAAQTSRXAHQSAAQSPRAARPTSQNHKPASNRRCASYPQAPAHPPHASSQTPAASSPARPAAHQTPCPHSSAPSRGSTHPRSPXPPHQTAPSATPPHGSPHFSAAAAASLSLPNSLTAAFLLCSATIPRAALSCAAVNXPFKAPAXGVVALLXSSRSSGDSASGPADTKGRCASKSRTGLPPRYTFPSNPKGGGVRPPASVGRVSRRAKSAPARASGESALSPPENPKPASAPRSKAPARRNRRAPSSILLRLKSITFRXRAGPASXFATVRRTASARCACAAARSRSSAPFRAFSFSSFSFISQKSPADGSNKPIANPPNKXSPKXAKTQAQSNAXSXEQTKIAT

SEQ ID NO: 65532 - protein, 109 aa, Neisseria gonorrhoeae
MRVNAQHKNARISAQKARLVADLIRGKDVAQALNILAFSPKKGAELIKKVLESAIANAEHNNGADIDELKVVTIFVDKGPSLKRFQARAKGRGNRIEKQTCHINVTVGN

SEQ ID NO: 65533 - protein, 104 aa, Neisseria gonorrhoeae
MNQQRLTQVILVPVVSEKSNVLAEKCNQMTFKVLANATKPEIKAAVELLFGVQVASVTTVTTKGKTKRFGRILGRRSDVKKAYVSLVDGQELDLEAAAAAADKE

SEQ ID NO: 65534 - protein, 83 aa, Neisseria gonorrhoeae
MSLFITDECINCDVCEPECPNDAISQGEEIYEINPNLCTQCVGHYDEPQCQQVCPVDCILIDEEHPETHDELMAKYEKIIQFK

SEQ ID NO: 65535 - protein, 228 aa, Neisseria gonorrhoeae
MAGILTVFGFDIPHGIVWFVFIFMILAIFIAMWIGNPLIRYNYENKKLNGDYRYSLILVRDHAESVAFYSGEQHEHGRLSDRFKAIIRNRWRIARQSVCLSGFNDMFTNGIKLFLIILQAPRLFAGQIKIGDIQQTVQAFARLQNALSFFRMFYNKFTACHARLERLYVFLLSTEEQHGAQQPEISEVSDGIALENVALFRHNGEVLLDGINIKLKSGDSLLIRGPSG

SEQ ID NO: 65536 - protein, 92 aa, Neisseria gonorrhoeae
MARSLKKGPYVDLHLLKKVDAVRASNDKRPIKTWSRRSTILPDFIGLTIAVHNGRTHVPVFISDNMVGHKLGEFSLTRTFKGHLADKKAKKK

SEQ ID NO: 65537 - protein, 60 aa, Neisseria gonorrhoeae; identical to SEQ ID NO: 65524

SEQ ID NO: 65538 - protein, 133 aa, Neisseria gonorrhoeae
MKDKHDSSAMRLDKWLWAARFFKTRSLAQKHIELGRVQVNGSKVKNSKTIDIGDIIDLTLNSLPHKIKVKGLNHQRRPAPEARLLYEEDAKTAALREECKQLDQFSRITSAHPDGRPTKRDRRQLDRLKKGDW

SEQ ID NO: 65539 - protein, 60 aa, Neisseria gonorrhoeae; identical to SEQ ID NO: 65524

SEQ ID NO: 65540 - protein, 92 aa, Neisseria gonorrhoeae
MTEHTPEKKNVKVNQLVVQDKESASNSGKEGFFAYFSNSWSEFKKVVWPKREDAVRMTVFVIVFVAVLSIFIYAADTAISWLFFDVLLRREG

SEQ ID NO: 65541 - protein, 63 aa, Neisseria gonorrhoeae
MKANELKDKSVEQLNADLLDLLKAQFGLRMQNATGQLGKPSELKRVRRDIARIKTVLTEKGAK

SEQ ID NO: 65542 - protein, 284 aa, Neisseria gonorrhoeae
MSNGARWTVTNDSMLKELDLSEDAQVEFSDNNKFVKVSVSKLKGDGGVFKMYGDIVKGESDKLITRKGSEGTHIIEYMDDAKAKTTGREYLKLVENKGNQEDNKASNKASYKLNVRCTEQGGWCFALGESGASKKVNISTDGKRDFYLYPDTLTPGASSSVLFGEALYQLNAVSDETLVQRMGEIHADGMPQEDNNVWIKRVGGKFSGSRSDYRVGGYGNRYWGFAGGFNRTGFGDKWIHYKGLMLRHLQSSYASEDYVGSGKILRQGGRCLFRLAQPGKQGLL

SEQ ID NO: 65543 - protein, 55 aa, Neisseria gonorrhoeae
MRRFKRAVEKTGLLTELRAREAYEKPTTERKRKKAAAVKRLQKRLRSQQLPPKMY

SEQ ID NO: 65544 - protein, 192 aa, Neisseria gonorrhoeae
MLNYVNYSDIHDNIINKAGKCVFAYNANYDKLSANHFENCQIGMHFTAAIEGTSLHDNSFINNGSQVKYVSTRFLDWSEGGHGNYWSDNSPFDLNGDGFGDSAYRPDGIIDQIIWRAPVSRLLMNSPAISIVKWAQAQFPAVLPGGVVDSKPLMKPYAPKIQTRYQAMKDELLKEAETRQSERGRAENGSLN

SEQ ID NO: 65545 - protein, 78 aa, Neisseria gonorrhoeae
MGLIAIACGLIVALGALGASIGIAMVGSKYLESSARQPELIGPLQTKLFLIAGLIDAAFLIGVAIALLFAFVNPFAGA

SEQ ID NO: 65546 - protein, 156 aa, Neisseria gonorrhoeae
MNINATLFAQIIVFFGLVWFTMKFVWPPIAKALDERAAKIAEGLAAAERGKSDFEQAEKKVAELLAEGRNQVSEMVANAEKRAAKIVEEAKEQASSEAARIAAQAKADVEQELFRARESLRDQVAVLAVKGAESILRSEVDASKHAKLLDTLKQEL

SEQ ID NO: 65547 - protein, 177 aa, Neisseria gonorrhoeae
MAEFATIARPYAKALFGLAQEKNQIESWLGGLEKLAAVVQEGKVASLIDRPETNASEKADILIDLVGLKDKELKNFVIVLAGQKRLSILPEVYAQYQDLTLSFNHIKSAVIYSAYPLTDKQVGELAQMLNKRFDSELKISVEIEPELIGGIKVEVGDQVLDLSVQGKLSALYTTMTN

SEQ ID NO: 65548 - protein, 161 aa, Neisseria gonorrhoeae
MNTHHHPPCPCGSGTSYAGCCRPLHLRQILPPTAEALIRSRYGAYVLHLIDYIIATTVPAQQTFLDAAELMQWSREAEWLGLNVIAHRNLGKQHAQVEFEAYFQDGGNRTVHHELSAFVKIAEQWYFIDPTVPLPTMKQPCICGSGKKFKACCGKYLQPVA

SEQ ID NO: 65549 - protein, 44 aa, Neisseria gonorrhoeae
MKRTYQPSVTKRKRTHGFLVRSKTRGGRAVLAARRAKGRKRLAV

SEQ ID NO: 65550 - protein, 210 aa, Neisseria meningitidis
MNTSQRNRLVSRWLNSYERYRYRRLIHAVRLGGAVLFATASARLLHLQHGEWIGMTVFVVLGMLQFQGAIYSKAVERMLGTVIGLGAGLGVLWLNQHYFHGNLLFYLTVGTASALAGWAAVGKNGYVPMLAGLTMCMLIGDNGSEWFDSGLMRAMNVLIGAAIAIAAAKLVPLKSTLMWRFMLADNLTDCSKMIAEISNGRRMTRERLEE

SEQ ID NO: 65551 - protein, 163 aa, Neisseria meningitidis
MKPAAQPPVQSAPQPAAPAAENKAVPAPAPQSPAASPSGTRSVGGIVWQRPTQGKVVADFGGNNKGVDIAGNAGQPVLAAADGKVVYAGSGLRGYGNLVIIQHNSSFLTAYGHNQKLLVGEGQQVKRGQQVALMGNTDASRTQLHFEVRQNGKPVNPNSYIAF

SEQ ID NO: 65552 - protein, 471 aa, Neisseria meningitidis
MPSEALSDGIAQETVMPQNTLNIVILAAGKGTRMYSKMPKVLHRIGGKPMLGRVIDTAAALNPQNICVVIGHGKDQVLNAVKRDVVWVEQTEQLGTGHAVKTALPHLAAEGRTLVLYGDVPLIDVETLETLLEAAGNEVGLLTDVPADPSGLGRIIRDGSGSVTAIVEEKDADAAQKAVKETNTGILVLPNAKLENWLNSLSSNNAQGEYYLTDLIAKAVADGIKVHPVRVRASHLAAGVNNKRQLAELERIFQTGQAQELLKAGVTLRDPARFDLRGRLKHGQDVVIDVNCIFEGEVEIGDNVEIGANCVIKNAKIGANSKIAPFSHLEDCEVGENNRIGPYARLRPQARLADDVHVGNFVEIKNAAIGKGTKANHLTYIGDAEVGSKTNFGAGTIIANYDGVHKHKTVIGDEVRIGSNCVLVAPVTLGNKVTTGAGSTITRNIEDNKLALARARQTVIEGWVRPEKDKQ

SEQ ID NO: 65553 - protein, 789 aa, Neisseria meningitidis
LNGVNTTGMAVMLSNSGNAMATAKAVKERMATLEKYFPQGMSWKTPYDTSKFVEISIEKVIHTLIEAMVLVFVVMYLFLQNIRYTLIPTIVVPISLLGGFAFISYMGMSINVLTMFAMVLVIGIVVDDAIVVVENVERIMAGEGLPPKEATKKAMGQISGAVIGITAVLISVFVPLAMFSGATGNIYKQFALTMASSIAFSAFLALTLTPALCATMLKTIPKGHHEEKKGFFGWFNKKFDNWTHGYEGWVAKVLRKTLRMMVVYVGLAVVGVFLFMRLPTSFLPTEDQGFVMVSVQLPAGATQERTNATLAQVTQLAKSIPEIENIITVSGFSFSGSGQNMAMGFAILKDWNERTAPGSDAVAIAGKLTGMMMGTLKDGFGIAVVPPPILELGNGSGLSINLQDRNNTGHTALLAKRNELIQKMRASGLFDPSTVRAGGLEDSPQLKIDINRAAAAAQGISFADIRTALASALSSSYVSDFPNQGRLQRVMVQADEDARMQPADILNLTVPNKSGVAVPLSTIATVSWENGTEQSVRFNGYPSMKLSASPATGVSTGQAMAAVQKMVDELGGGYSLEWGGQSREEAKGGSQTLILYGLAVAAVFLVLAALYESWSIPLAVILVIPLGLIGAAAGVTGRNLFKGLLGSVPSFANDIYFQVGFVTVMGLSAKNAILIIEFAKDLQAQGKSAVEAALEAARLRFRPIIMTSFAFILGVVPLYIAGGASSASQRAIGTTVFWGMLIGTLLSVFLVPLFYVVVRKFFKETAHEHEMAVKHAAEAGITGSDDSQH

SEQ ID NO: 65554 - protein, 55 aa, Neisseria meningitidis; identical to SEQ ID NO: 65092

SEQ ID NO: 65555 - protein, 594 aa, Neisseria meningitidis
MNKIYRIIWNSALNAWVAVSELTRNHTKRASATVATAVLATLLFATVQASTTDDDDLYLEPVQRTAVVLSFRSDKEGTGEKEVTEDSNWGVYFDKKGVLTAGTITLKAGDNLKIKQNTNENTNASSFTYSLKKDLTDLTSVGTEKLSFSANSNKVNITSDTKGLNFAKKTAETNGDTTVHLNGIGSTLTDTLLNTGATTNVTNDNVTDDEKKRAASVKDVLNAGWNIKGVKPGTTASDNVDFVRTYDTVEFLSADTKTTTVNVESKDNGKRTEVKIGAKTSVIKEKDGKLVTGKDKGENDSSTDKGEGLVTAKEVIDAVNKAGWRMKTTTANGQTGQADKFETVTSGTNVTFASGKGTTATVSKDDQGNITVMYDVNVGDALNVNQLQNSGWNLDSKAVAGSSGKVISGNVSPSKGKMDETVNINAGNNIEITRNGKNIDIATSMTPQFSSVSLGAGADAPTLSVDDEGALNVGSKDANKPVRITNVAPGVKEGDVTNVAQLKGVAQNLNNHIDNVDGNARAGIAQAIATAGLVQAYLPGKSMMAIGGGTYRGEAGYAIGYSSISDGGNWIIKGTASGNSRGHFGASASVGYQW

SEQ ID NO: 65556 - protein, 196 aa, Neisseria meningitidis
MSGININLKNGDSLLIRGPSGCGKTSLLRAPAGLWPFGSSGKVSRPPHQDILFLPQRPYTAQGSLRDAVCYPDIDKQHPELAEAMNTCRLGYLIDKLDKTDDWQHKLSPGELQRVAFVRALLSQPKVILLDEATAALDEPAEAALYRALKQKLPDSIIISIGHRSTLNAFHNMRLDVGNVAAVERCRLKPFSDGIV

SEQ ID NO: 65557 - protein, 1205 aa, Neisseria meningitidis
MMWCASNRVGNKLPTLRLLDRMAGIYITGKEKGVLAAQAGKDINIIAGQISNQSEQGQTRLQAGRDINLDTVQTSKHQATHFDADNHVIRGSTNEVGSSIQTKGDVTLLSGNNLNAKAAEVSSANGTLAVSAKNDINISAGINTTHVDDASKHTGRSGGGNKLIITDKAQSHNETAQSSTFEGKQVVLQAGNDANILGSNVISDNGTRIQAGNHVRIGTTQTQSQSETYHQTQKSGLMSAGIGFTIGSKTNTQENQSQSNEHTGSTVGSLKGDTTIVAGKHYEQIGSTVSSPEGNNIIHAQSIDIQAAHNKLNSNTTQTYEQKGLTVAFSSPVTDLAQQAIAVAQSSKQVGQSKNGRVNAMAAANAGWQAYQTGKSAQNLANGTTNAKQVSISITYGEQQNRQTTQVQASQAQASQIQAGGKTTLIATGAAEQSNINIAGSDIAGKAGTILIADNDITLQSAEQSNTERSQNKSTGWNAGAAVSFGQGGWSLGVTAGGNVGKGYGNGDSVTHRHSHIGDKGSQTLIQSGGDTTIKGAQVRGKGVQVNAKNLSIQSVQDSETYQSKQQNASAQVTVGYGFSASGDYSQSKIRANHASVTEQSGIYAGEDGYQIKVGNHTDLKGGIITSTQSAGDKGKNRFQTATLTHSDIKNHSQYKGESFGLGASASISGKTLGQGAQNKPQNKHLTSVADKNGASSSVGYGSDSDSQSSITKSGINTQNIQITDEAAQIRLTGKTAAQTKADIGTNVTTDTAERHSGSLKNTFNREAVQNELDLQREVTQEFDKTRQGVKQELYAVVDSKRAQATQERLKNGGYDNDKSRALNKEANELDEKIRWLDAGLGLVWGAGSSDMAWSMFATTQADRAVRSATAPKEMWFHKKIIDEKTGKVSFDTRQIWSLNDLSKEELASIQDTNGKVITVSNPGIFNNREDSLSNAAKQNRNSTNGSGVIAVMNPPTGKYKSDSNNKIKDFLWLSSSLVSELMYVGYDQLNNKVFQGYLPKTNSEKLNQDIYREVQKMGNGWSVDTSNHSRGGITASVSLKDWVNNQKQNGIAPIRKARFYGTATNVQNDYADVLQKNGYTYTGADGKTYNSGAYSIVHDKDFVGNKWIPFLLGTNDTTQGTCKGFCYSHSSYFAEVPEQYKRDKNGNFVTDNEGNKIETKDWDSYTKIWGIPKKGTDGKDINHAIPKLVNPNKPNGEKYEENPF

SEQ ID NO: 65558 - protein, 548 aa, Neisseria meningitidis
MKQSARIKNMDQTLKNTLGICALLAFCFGAAIASGYHLEYEYGYRYSAVGALASVVFLLLLARGFPRVSSVVLLIYVGTTALYLPVGWLYGAPSYQIVGSILESNPAEAREFVGNLPGSLYFVQALFFIFGLTVWRYCVSGGVFADVKNYKRRSKIWLTILLTLILSCAVMDKIASDKDLREPDAGLLLNIFDLYYDLASAPAQYVAKRAHILEAAKKASTWHIRHVAPKYKNYVVVIGESARSDYMNVYGFPLPDTPFLSQTKGLLINGYQSTAHATNLSLPQTLGLPGEPNNNIVSLAEQAGFRTAWLSNQGMLGHFANEISTYALRSDYPWFTQRGDYGKSAGLSDRLLLPAFKRVLIGNAGTKPRLIVMHLMGSHSDFCTRLDKDARRFQYQTEKISCYVSTIAQTDKFLEDTVKILNENKESWSLVYFSDHGLMHVGKGGERTLTHGAWKRQSYGVPLVKISSDDTRREMIKVRRSAFNFLRGFGSWTGIETDELPDDGYDFWGNVPDVQGEGNNLAFIDGLPDDPAPWYAGKGKSTKNTSKK

SEQ ID NO: 65559 - protein, 389 aa, Neisseria meningitidis
MPLLSVAVTQQLYAQPNESLPTVELEPVVITIDKSGMALANRITQMPHTTKVIYEEQIQEQATGSRQLADVMAQLIPSLGVSSGTTSNFGQTMHGRQVQFLLNGVPLTGSRDISRQLNSINPNQVARIEVLSGATSIYGSGATGGLINIVTKSDLEEEQFETRIGVHGSKLSSEGIGYQVGQSVAGVSENGNVLARLDVDYRTTGGAFDANGKRIAPEPAQTDKQDSKSLSVNTNVDWQLDDKQNINLALTHYNDKQDTDYAPDYGNRLAVLFGEKPSLNAIKGLSLSEQPKTTKSTFNINYHHDDLWGNTINTNAYYRREKGRFYPFVAPFSIAKALPILQSMNLPSATLDAYTKAPQARAYGVLQSESKAEVLGRVPNLNKPKRALF

SEQ ID NO: 65560 - protein, 402 aa, Neisseria meningitidis
  MISC_FEATURE (215)..(215): X=any amino acid
  MISC_FEATURE (266)..(266): X=any amino acid
  MISC_FEATURE (273)..(273): X=any amino acid
  MISC_FEATURE (276)..(276): X=any amino acid
SKAKKLIEMIQTAPVEWKPLGEVGLLVRGNGLQKKDFTESGVPAIHYGQIYTYYGNQTDKTLSFVSPELAEKLKKVDKGDVVITNTSENIEDVGKALLYLGEEQAVTGGHATIFKPSKEIVGKFFVYFTQTEIFDKAKRKFAKGTKVIDVSATDMAKIKIPIPSLETQQKIVKILDKFTELEDTQEAELALRKRQYRYYRDFLLDFDNQIGGDSXWLSMPSERVVWKTLGEVFNIFAGGDVPKDAFSEVETEEFCIPILSKGIGKXGTVWLDXCCXNQQPSLTISARGTIGWASFQNKPFFPIVRLLVLTPKIELNLKYAYYFMKSIESNYKVPESGIPQLTKPMIKDISIPIPPLPEQEKIVAILDKFDTLTHSISEGLPHEIALRRKQYEYYREQLLAFR

SEQ ID NO: 65561 - protein, 721 aa, Neisseria meningitidis
MNTPLFRLSLLSLTLAAGFAHAAENNANVALDTVTVKGDRQGSKIRTNIVTLQQKDESTATDMRELLKEEPSIDFGGGNGTSQFLTLRGMGQNSVDIKVDNAYSDSQILYHQGRFIVDPALVKVVSVQKGAGSASAGIGATNGAIIAKTVDAQDLLKGLDKNWGVRLNSGFASNEGVSYGASVFGKEGNFDGLFSYNRNDEKDYEAGKGFRNVNGGKTVPYSALDKRSYLAKIGTTFGDDDHRIVLSHMKDQHRGIRTVREEFTVGSEDSRINIKRQAPAYRETTQSNTNLAYTGKNLGFVEKLDANAYVLEKERYSADDSGTGYAGNVKGPNHTRITTRGMNFNFDSRLAEQTLLKYGINYRHQEIKPQAFLNSKFEISDKKKGADGKEVDVDDAQKEKNRANEKIVHAYKLSNPTKTDTGAYIEAIHEIDGFTLTGGLRYDRFKVKTHDGKTVSSSNLNPSFGVIWQPHEHWSFSASHNYASRSPRLYDALQTHGKRGIISIADGTKAERARNTEIGFNYNDGTFAANGSYFWQTIKDALANPQNRHDSVAVREAVNAGYIKNHGYELGASYRTGGLTAKVGVSHSKPRFYDTHKDKLLSANPEFGAQVGRTWTASLAYRFQNPNLEIGWRGRYVQKAVGSILVAGQKDRSGKLENVVRQGFGVNDVFANWKPLGKDTLNVNLSVNNVFNTFYYPHSQRWTNTLPGVGRDVRLGVNYKF

SEQ ID NO: 65562 - protein, 495 aa, Neisseria meningitidis
MLKKIKKALFQPKKFFQDSMWLTTSPFYLTPPRNNLFVISNLGQLNQVQSLIKIQKLTNNLLVILYTSKNLKMPKLVHQSANKNLFESIYLFELPRSPNNITPKKLLYIYRSYKKILNIIQPAHLYMLSFTGHYSYLISIAKKKNITTHLIDEGTGTYAPLLESFSYHPTKLERYLIGNNLNIKGYIDHFDILHVPFPEYAKKIFNAKKYNRFFAHAGGISINNNIANLQKKYQISKNDYIFVSQRYPISDDLYYKSIVEILNSISLQIKGKIFIKLHPKEMGNNYVMSLFLNMVEINPRLVVINEPPFLIEPLIYLTNPKGIIGLASSSLIYTPLLSPSTQCLSIGELIINLIQKYSMVENTEMIQEHLEIIKKFNFINILNDLNGVISNPLFKTEETFETLLKSAEFAYKSKNYFQAIFYWQLASKNNITLLGHKALWYYNALYNVKQIYKMEYSDIFYIDNISVDFHSKDKLTWEKIKHYYYSADNRIGRDR

SEQ ID NO: 65563 - protein, 223 aa, Neisseria meningitidis
MQILKAFKFELMPNGAQIRRLKQFCGCSRFVFNRALAYQNEQYEADKSFKFSYNKIANLLPEWKRELTWLKDCHSQVLQQSLEDLESSFKNFFAKRSDFPKFKRKGEKDSFRFPQGFKLEQQNNRIYLPKIGWIRYRNSRAIVGEMKNVTVSRKCGKWYISVQTEFEQKTPQPKGGEIGIDIGIVRFATLSSSEYFEPINAFKNLKGKLAKLQRRLKNKVKFS

SEQ ID NO: 65564 - protein, 2799 aa, Neisseria meningitidis
MNRTLYKVVFNKHRNCMIAVAENAKREGKNTADTQAVGILPNDIAGFAGFIHSISVISFSLSLLLGSALILTSSSANAQGIVADKSAPAQQQPTILQTGNGIPQVNIQTPTSAGVSVNQYTQFDVGNRGAILNNSRSNTQTQLGGWIQGNLWLARGEARVVVNQINSSHSSQMNGYIEVGGRRAEVVIANPAGIAVNGGGFINASRATLTTGQPQYQAGALTGFQVRSGHVAITGQGLDARDTDFTQILSHAVKIDGPVWGKDVRVSAGKNNVSADGSIRSSHSPATNINSDNSLYAIDTGALGGMYAGKITLISTDRDASVRNQGQWFASAGNVAVNAEGKLVNTGMIAATGENHAVSLHARNVHNSGTVASQDDANIHSQTLDNSGTVLSSGQLTVRNLGRLKNHNNGTIQAARLDMSTGGLDNTGNITQTGSQALDLVSAGKFDNSGKIGVSDVPQTGLNPNPSVIPQIPSTATGSGSSTVSASKPGSNNPVSPTAPAKNHAGGRIQTTGAFDNAGSINAGGQIDIAAQNGLENSGSLNAAKLRVSGDSFNNTVKGKLQAHDLAVNTQTAKNSGHLLTQTGKIDNRELHNAGEIAANNLTLIHSGRLSNDKKGNIRAAYLQLDTAGLHNAGNILADSGTVTTKNNLRNTGKVSVARLNTEGQTLDNTHGHIEAETVNIQSQQLTNQSGHITATEQLTINSRNVDNQNGKLLSANQAQLAVSDGLYNQHGEIATNRQLSIHDKNQNTLALNNADGTIQSAGNVSLQAKSLANNGTLTAGNKLDIALADDFVVERDLTAGKQLNLSIKGRLKNTHTLQAGHTLKLNAGNIDNQVTGKIIGGEQTDITSEQHVDNRGLINSDGLTHIGAGQTLTNTGTGKIYGNHIALDAQILLNREETTEGSTKAGAIAARKHLDIGAKEIHNQEGALLSSEGIFAVGNRLDEQHHAAGMADTFVNGSAGLEVQGDALMSVRNMQNINNHFKTETYLAKAEKQVRDYTVLGQNTYYQAGKDGLFDNSQGQKDQTTATFHLKNGSRIEANQWHVRDYHIETYKERIIENRPAHITVGGNLTASGQNWLNKDSRIVVGGRIITDDLNQKEITNQSTTGKGRTDAVGTQWDSVTKKGWYSGRKRQRRTEKNHTSYHDTQLFTHDFDTPVSVIQQNAASPSFQPAASAAKLIDGASTAAVNGQRIHTGNVVSLNNATVTLPNSSLYTTHPDNKGWLIETDPQFADYRRWLGSDYMLQQLKLDTNHLHKRLGDGYYEQKLVNEQIHQLTGYRRLDGYKSDEEQFKALMDNGLTAAKTFGLTPGIALSAEQVARLTSDIVWMENQTVTLSDGSTQTVLVPKVYALARKGDLNTSGGLISAEQVLLKLQNGNLTNSGTIAGRQAVLIQARNINSNGNIQADQIGLKAEKSINIDGGQVQAGRLLTAQAQNINLNGTTQTSGNERNGNTAIDRMAGINVVGSHTEQVDNRTSDGILSLHAGNDINLNAATVSNQVKGGTTQITAGNNLNLGTIHTEHREAYGTLDDENHRHVRQSTEVGSSIRTQNGAMLRAGNDLKIRQGELEADEGKTVLAAGRDVNISEGRQITELDASVSGKSKGILSSTKTHDPYRFSHDEAVGSNIGGGKMIVAAGQDINVRGSNLISDKGTVLKAGNDIDISTAHNRYTGNEYHESKKSGVMGTGGLGFTIGNRKTTDDTDRTNIVHTGSIIGSLNGDTVTVAGNRYRQTGSTVSSPEGRNTVTAKSIDVESANNRYATDYVHTREQKGLTVALNVPVVQAAQNFVQAAQNVGKSKNKRVNAMAAANAAWQGYQAAQQMQQFAPSSSAGQGQNNNQSSGISVSVTYGEQKSRNEQKSRYTEAAASQIIGKGQTTLAATGSGEQSNINITGSDVIGHAGTALIADNHIRLQSAKQDGSEQSKNKSSGWNAGVAVKIGNGIRFGITAGGNIGKGKEQGGNTTHRHTHVGSTAGQTTIRSGGDTTLKGAQLIGKGIQADTRNLHIESVQDTETYQSKQQNGNVQVTVGYGFSASGSYRQSKVKADHASVTGQSGIYAGEDGYQIKVRDNTDLKGGIITSSQSAEDKGKNLFQTATLTHSDIQNHSRYEGKSFGIGGSFDLNGGWDGTVTDKQGRPTDRISPAAGYGSDGDSKNSTTRSGINTRNIHITDEAGQLARTGRTAKETEARIYTGIDTETADQHTGRLKNSFDKDAVAKEINLQREVTKEFGRNAAQAVAAVADKLGNTQSYERYQEARTLLEDELQNTDSEAEKAAIRASLGQVNAYLAENQSRYDTWKEGGIGRSILHGAAGGLTTGSLGGILAGGGTSLAAPYLDKAAENLGTAGKAAVNALGGAAIGYATGGSGGAVVGANVDWHNRQLHPSERDWIRKNAQAFAKQEVGGREPTIDEIALAEKRLAQQAAKETDLFWMLTLEKVTDLSAQKFLRQAKGTFTNENGTQQQFFTTQGKQFMRPELFANEVYDLSFYKNHLQSPKNSSISKGTGELARRVTSSTWDKAKQDPILTGLQIAASPVHLVRDVGKASWQCVSGFGQCLQQGKENFVETGSAIGTGTASFQLNDLKPIYGQDVRGAQAGLVALQTADGITTALGAAKALNVAGKGSRYFINEWASSPPSGSRAAQRGAVGNLTHSQQVLTDGSHIQRGGKLLPNIRYKAGEFDYLYETDTLGRIKSFETDNLQLTQRDRLKHNSKTPDKVKGQDHAGHLIGDRFGGSPNLDNLVSQHKDVNLSAYKVLENKWAEAIKSGKNVKIQMQIEYAAGTRRPTRFVGYYWIDGKPTRININNL

SEQ ID NO: 65565 - protein, 204 aa, Neisseria meningitidis
  MISC_FEATURE (90)..(90): X=any amino acid
  MISC_FEATURE (92)..(92): X=any amino acid
  MISC_FEATURE (138)..(138): X=any amino acid
  MISC_FEATURE (168)..(168): X=any amino acid
  MISC_FEATURE (175)..(175): X=any amino acid
  MISC_FEATURE (185)..(185): X=any amino acid
  MISC_FEATURE (194)..(194): X=any amino acid
RRQCGHRYAIRAGRNLPDKEFRYLRTVIVTAAVYWGFDPMLSHLQLTFQHRAGVTPYTSTFVLAECCVFNKQSQPPILCDPPGLTEQSPXPXRAYLLPKLRYQFAEFLSPEFSQAPLEFSSCPPCVGLRYGSIQTEAXWLSWKRGIGYFVSVDTRRHFSVLRRPGFAXVFHLPAXTSYSNSLPTXPSPSPHRIXIKYRNINLFP

SEQ ID NO: 65566 - protein, 305 aa, Neisseria meningitidis
MEKAEHLNSSRFVNLVKSGGGSYVEGSYRFDTLSNGISIHGGTVTARCDFCSSRLAEPYVSFVLLLEGSLDFGINRCRFQIDADGGKIVLIAVGEEVLFSRYLYRGGKTVKMTIKGMEQWLLRPEYARFAPLLYREPVRIWDLPPNLRGLAASCLKAVPKGHLGETLRREADVLRLLSDLWDTVSDGIGPAAGQTAEADAMPSEDFSRTLNAAFADGAHQVNRLTDALNISERTLQRRMRDHFGITASEWLHHKQMQHALYLLQNEGKSIGETAYLCGYRHVSSFTQAFRQYFGSTPAETKKENR

SEQ ID NO: 65567 - protein, 543 aa, Neisseria meningitidis
  MISC_FEATURE (64)..(64): X=any amino acid
  MISC_FEATURE (134)..(134): X=any amino acid
  MISC_FEATURE (191)..(191): X=any amino acid
  MISC_FEATURE (224)..(224): X=any amino acid
ARLSTSPSASSSNFCTVSAAASRSPISRYISARSYFASEGASEPTDSEGKLVSALFGIFSSERXMLQSTVSSSPSFRKSGKASASEVLESGVSKVISAAFSSTAGASAGCNSADKSSATVSAAFSSTAGTSEGXSNADKSSAVALKSGISATVFVTFSSTAGASAGCNSADKSSATISAAFSSTAGTSEGXSNADKSSAVALKSGVSATVSVTFSSTDGASAGXSNADKSSAAALKSGVSGAVSATASVSYTFRKSCNSSGVWTSATVFSKMVSGEEAFRKPASPEGEAGFAEAVSSVPIWLFEGRLSEKSVSTVSGLFSAVWATDSGSGVSMTISTGLYGLKVSGSYTLSVDSMAFQSASARFWVSSSCVSAPDKMPFCAAARLSKSKSMRLEGVSVSTSNVCFADNSSSDSPSKASVSFTSFFGAGSGVAGVSTSAKVISMPSSAASSRSGSSSGTDSSVRRARLDWARRKSSSRAINAAPPPASSKVYEPPNRPSNSPLSVSSSAETCSTGSETALPVSSVGVSMAEAAASWGADSAAVS

SEQ ID NO: 65568 - protein, 122 aa, Neisseria meningitidis
  MISC_FEATURE (19)..(19): X=any amino acid
MLSALISSELSYPAMPLAXQPVHQRFVHSGPLVLGAAPVKLPTPTADRDQTVSRRFKPSSRTTLNGEQPYPWDRLQPQDVMSRHRGAKLRRRYELLGGISLLSPEYLLSVERWPFHTEPPDH

SEQ ID NO: 65569 - protein, 295 aa, Neisseria meningitidis
MCIEMKFIFFVLYVLQFLPFALLHKLADLTGLLAYLLVKPRRRIGEINLAKCFPEWDGKKRETVLKQHFKHMAKLMLEYGLYWYAPAGRLKSLVRYRNKHYLDDALAAGEKVIILYPHFTAFEMAVYALNQDVPLISMYSHQKNKILDAQILKGRNRYDNVFLIGRTEGVRALVKQFRKSSAPFLYLPDQDFGRNDSVFVDFFGIQTATITGLSRIAALANAKVIPAIPVREADNTVTLHFYPAWESFPSEDAQADAQRMNRFIEEPCANIPSSIFGCTSVSKPVRKAAPIFTDT

SEQ ID NO: 65570 - protein, 1491 aa, Neisseria meningitidis
MNKTLYRVIFNRKRGAVVAVAETTKREGKSCADSDSGSAHVKSVPFGTTHAPVCRSNIFSFSLLGFSLCLAVGTANIAFADGIIADKAAPKTQQATILQTGNGIPQVNIQTPTSAGVSVNQYAQFDVGNRGAILNNSRSNTQTQLGGWIQGNPWLARGEARVVVNQINSSHSSQMNGYIEVGGRRAEVVIANPAGIAVNGGGFINASRATLTTGQPQYQAGDLSGFKIRQGNVVIAGHGLDARDTDFTQILSHAVKIDGPVWGKDVRVVAGQNDVVATGNAHSPILNNAAANTSNNTANNGTHIPLFAIDTGKLGGMYANKITLISTAEQAGIRNQGQLFASSGNVAIDANGRLVNSGTMAAANAKDTDNTAEHKVNIRSQGVENSGTAVSQQGTQIHSQSIQNTGTLLSSGEILIHNSGSLKNETSGTIEAARLAIDTDTLNNQGKLSQTGSQKLHIDAQGKMDNRGRMGLQDTAPTASNGSSNQTGNSYNASFHSSTTTPTTATGTGTATVSISNITAPTFADGTIRTHGALDNSGSIIANGQTDVSAQQGLNNAGQIDIHQLNAKGSAFDNHNGTIISDAVHIQAGSLNNQNGNITTRQQLEIETDQLDNAHGKLLSAEIADLAVSGSLNNQNGEIATNQQLIIHDGQQSTAVIDNTNGTIQSGRDVAIQAKSLSNNGTLAADNKLDIALQDDFYVERNIVAGNELSLSTRGSLKNSHTLQAGKRIRIKANNLDNAAQGNIQSGGATDIGTQHNLTNRGLIDGQQTKIQAGQMNNIGTGRIYGDNIAIAATRLDNQDENGTGAAIAARENLNLGIGQLNNRENSLIYSGNDMAVGGALDTNGQATGKAQRIHNAGATIEAAGKMRLGVEKLHNTNEHLKTQLVETGREHIVDYEAFGRHELLREGTQHELGWSVYNDESDHLRTPDGAAHENWHKYDYEKVTQKTQVTQTAPAKIISGNDLTIDGKEVFNTDSQIIAGGNLLVQTEKDGLHNEQTFGEKKVFSENGKLHSYWREKHKGRDSTGHSEQNYTLPEEITRNISLGSFAYESHRKALSHHAPSQGTELPQSNGISLPYTSNSFTPLPSSSLYIINPVNKGYLVETDPRFANYRQWLGSDYMLDSLKLDPNNLHKRLGDGYYEQRLINEQIAELTGHRRLDGYQNDEEQFKALMDNGATAARSMNLSVGIALSAEQVAQLTSDIVWLVQKEVKLPDGGTQTVLVPQVYVRVKNGDIDGKGALLSGSNTQINVSGSLKNSGTIAGRNALIINTDTLDNIGGRIHAQKSAVTATQDINNIGGILSVEQTLLLNAGNNINSQSTAASSQNTQGSSTYLDRMAGIYITGKEKGVLAAQAGKDINIIAGQISNQSEQGQTRLQAGRDINLDTVQTSKHQATHFDADNHVIRGSTNEVGSSIQTKGDVTLLSGNNLNAKAAEVSSANGTLAVSAKNDINISAGINTTHVDDASKHTGRSGGGNKLIITDKAQSHNETAQ

SEQ ID NO: 65571 - protein, 503 aa, Neisseria meningitidis
NTAASETAAESAPQEAAASAIDTPTDETGNAVSEPVEQVSAEEETESGLFDGLFGGSYTLLLAGGGAALIALLLLLRLAQSKRARRTEESVPEEEPDLDDAADDGIEITFAEVETPATPEPAPKNDVNDTLALDGESEEELSAKQTFDVETDTPSNRIDLDFDSLAAAQNGILSGALTQDEETQKRADADWNAIESTDSVYEPETFNPYNPVEIVIDTPEPESVAQTAENKPETVDTDFSDNLPSNNHIGTEETASAKPASPSGLAGFLKASSPETILEKTVAEVQTPEELHDFLKVYETDAVAETAPETPDFNAAADDLSALLQPAEAPSVEENVTETVAETPDFNATADDLSALLQPSEVPAVEENAAEIVADDLSALLQPAEAPAVEENVTKTVAEIPDFNATADDLSALLQPSEVPAVEENAAETVADDLSALLQPAEAPAVEENAAEITLETPDSNTSEADALPDFLKDGEEETVDWSIYLSEENIPNNADTSFLRNL

SEQ ID NO: 65572 - protein, 328 aa, Neisseria meningitidis
MFGKFTAVPVILHRGKIQERFPVGFETSRYAAQELFRRRVGVGMFGIISRIDLTHSLCHQPLFCLPLGNAGMEFGKFSGIIFNFSDLAVVQLPIVPIDIRPYCRRTDIPARRIADGRPAQCVDRRFARRTEVFRRFVQIRCSKGSAAAGQYAAEAAGRQSACRPVQYAPAYAAFFPGVVAALVFGKIGVYLAEGCADGGFFGFAVRVLQFVLQQGSGFLIPFVTLGIAEFVGNGRYGLGGVSAELLRYFPLQVDLFGDRVFVEAVFQTACVLIRSFGVDAGVDTRFGFFCSPACSGKLSRFVGDVYVAGVDAAFRDAALTVLVAAITH

SEQ ID NO: 65573 - protein, 674 aa, Neisseria meningitidis
MNDMTLYLIIALVPLAGSLIAGLFGNKIGRAGAHTVTILGVAVSAVLSAYVLWGFLNGSRAKFDENVYTWLTMGGLDFSVGFLVDTMTAMMMVVVTGVSLMVHIYTIGYMHDEKVGYQRFFSYISLFTFSMLMLIMSNNFIQLFFGWEAVGLVSYLLIGFYFKRPSATFANLKAFLINRVGDFGFLLGIGLVLAYFGGSLRYQDVFAYLPNVQNATIQLFPGVEWSLITVTCLLLFVGAMGKSAQFPLHVWLPDSMEGPTPISALIHAATMVTAGLFMVSRMSPIYEMSSTALSVIMVIGAITALFMGFLGVIQNDIKRVVAYSTLSQLGYMTVALGASAYSVAMFHVMTHAFFKALLFLAAGSAIIGMHHDQDMRHMGNLKKYMPITWLTMLIGNLSLIGTPFFSGFYSKDSIIEAAKYSTLPGSGFAYFAVLASVFVTAFYAFRQYFMVFHGEEKWRSLPEHHSDGHGEEHHGLGKNDNPHESPLVVTLPLILLAVPSVIIGYIAIEPMLYGDFFKDVIFVNADAHPTMHIMKEEFHGALAMVSHSLHSPVLYLAIAGVLSAWLLYVKLPHLPAKIAQAFRPVYVLFENKYYLDALYFNVFAKGTRALGTFFWKVGDTAIIDNGIVNGSARLVGAVAAQVRKVQTGFIYTYAAAMVFGVLVLLGMTFWGLFR

SEQ ID NO: 65574 - protein, 191 aa, Neisseria meningitidis
MPSENPIGKTMKSIDEQSLHNARRLFESGDIDRIEVGTTAGLQQIHRYLFGGLYDFAGQIREDNISKGGFRFANAMYLKEALVKIEQMPERTFEEIIAKYVEMNIAHPFLEGNGRSTRIWLDLVLKKNLKKVVNWQNVSKTLYLQAMERSPVNDLELRFLLKDNLTDDVDNREIIFKGIEQSYYYEGYEKG

SEQ ID NO: 65575 - protein, 753 aa, Neisseria meningitidis
MLQIEIDGKQVSVEQGATVIEAAHKLGTYIPHFCYHKKLSIAANCRMCLVDVEKAPKPLPACATPVTDGMIVRTHSAKAREAQEGVMEFLLINHPLDCPTCDQGGECQLQDLAVGYGKTTSRYTEEKRSVVGKDMGPLVSAEEMSRCIHCTRCVRFTEEIAGLQEIAMVNRGEHSEIMPFIGKTVETELSGNVIDLCPVGALTSKPFRFNARTWELNRRKSVSAHDALGSNLIVQTKDHTVRRVLPLENEAINECWLSDRDRFAYEGLYHESRLKNPKIKQGGEWMDVDWKTALEYVRSAIECIAKDGNQNQVGIWANPMNTVEELYLAKKLADGLGVKNFATRLRQQDKRLSDGIKGAQWLGQSIESLADNDAVLVVGANLRKEQPLLTARLRRAAKDRMALSVLAGSKEELFMPLLSQEAAHPDEWAGRLKNLSANAEHAVTASLKNAEKAAVILGAEVQNHPDYAAIYAAVQELADATGAVLGILPQAANSVGADVLGVNSGESVAEMANAPKQAVLLLNVEPEIDTVDGAKAVAALKQAKSVMAFTPFVSETLLDVCDVLLPIAPFTETSGSFINMEGRLQSFHGVVQGFGDSRPMWKVLRVLGNLFDLKGFEYHDTVAILKDALDAESLPSKLNNRAASTQKDFQTASSRLVRVGGVGIYHTDAIVRRSAPLQETSHAAVPAARVNPNTLARLGLQDGQTAVAKQNGASVSVAVKADAGLPENVVHLPLHTENAALGALMDTIELAGA

SEQ ID NO: 65576 - protein, 433 aa, Neisseria meningitidis
MAIYQSGVIFDQVDTANPDCWTLDEYVKRGGYTALRKILSGNISQTDVIDEVKTSGLRGRGGAGFPTGLKWSFMPRSFPGEKYVVCNTDEGEPGTFKDRDIIMFNPHALIEGMIIAGYAMGAKAGYNYIHGEIFEGYQRFEAALEQARAAGFLGKNILGSDFEFELFAHHGYGAYICGEETALLESLEGKKGQPRFKPPFPASFGLYGKPTTINNTETFSSVPFIIRDGGQAFADKGIPNAGGTKLFCISGHVERPGNYEVPLGTPFAEVLKMAGGMRGGKKLKAVIPGGSSAPVLPADIMMQTNMDYDSISKAGSMLGSGAIIVMDEDVCMVKALERLSYFYYDESCGQCTPCREGTGWLYRIVHRIVEGKGRMEDLDLLDSIGNQMAGRTICALADAAVFPVRSFTKHFRDEFVHYIEHGGPMKEHKWGGW

SEQ ID NO: 65577 - protein, 157 aa, Neisseria meningitidis
MLSAESLKQIDIELAKYPADQRRSAIMGALRIAQTEKGWLAPETIAFVADYIGISPAQAYEVATFYNMYDLEPVGKYKLTVCTNLPCALRGGMATGEYLKQKLGISYGETTPDGKFTLVEGECMGACGDAPVMLLNNHKMCSFMTEEAIEKKLAELE

SEQ ID NO: 65578 - protein, 735 aa, Neisseria meningitidis
MFPDQSAPNLLQGLNPEQLSAVTWPPQSALVLAGAGSGKTRVLTTRIAWLLQTGQASVHSIMAVTFTNKAAKEMQTRLGAMIPVNVRAMWLGTFHGLCHRFLRLHHRDAGLPSSFQILDSGDQLSLIKRLLKSLNIAEEIIAPRSLQGFINAQKESGLRASVLSAPDPHTRRMIECYAEYDKICQREGVVDFAELMLRSYEMLQSNEILRRHYQNRFNHILVDEFQDTNKLQYAWLKLMAGGNTAVFAVGDDDQSIYRFRGANVGNMTALMEEFHIDAPVKLEQNYRSVGNILASANAVIENNDERLGKNLRTDAEAGDKIRYYSAFTDLEEAQFIVDETKALEREGWDLDEIAVLYRSNAQSRVIEQSLFRSGIPYKIYGGLRFYERQEIKHALAYLRLAVNPDDDNALLRVINFPPRGIGARTIENLQTASQEQGITLWQAACNAGAKATKIAAFVRLIEALRNQVGQMSLSEIIVGILKDSGLTEHYRTQKGDNQDRLDNLDELVNAAIEFKPEDSNFETLPDNISDDPAFPILAFLSNAALESGENQAGAGEKAVQLMTVHAAKGLEFNAVFLTGMEEGRFPSEMSLAERGGLEEERRLMYVAITRARKRLYITMAQQRMLHGQTQFGIVSRFVEEIPPEVLHYLSVKKPAYDRYGNTRQTAAPKDKIIDDYKQPQTYAGFRIGQNVRHAKFGTGVIIDAADKGESARLTINFGKQGVKELDTKFAKLEAM

SEQ ID NO: 65579 - protein, 245 aa, Neisseria meningitidis
MKQVDLNADLAEGCGSDEALLQLITSANIACAQHAGSIADIRAALAYAQQNGVRIGAHPGYPDRENFGRTEMNLSEADLRACLNYQLGALQALCRDQGLEMAYVKPHGAMYNQAAKNRALADTVARIVADFDPKLKLMALSGSLLLEAGKAAGLGVISEVFADRRYMPDGTLVPRSRPDAQVDSDEEAIAQVLQMVRDGQVKAVDGSLVAVQADSICLHGDGPHAVVFAEKIRQELLAAGIKVSA

SEQ ID NO: 65580 - protein, 78 aa, Neisseria meningitidis
MSNIEQQVKKIVAEQLGVNEADVKNESSFQDDLGADSLDTVELVMALEEAFGCEIPDEDAEKITTVQLAIDYINAHNG

SEQ ID NO: 65581 - protein, 415 aa, Neisseria meningitidis
MSQRRVVITGLGQVSPVGNTVAEAWDTLLAGKSGIGAITRFDASDINSRVAGEVRGFDIGQYISAKEARRMDVFIHYGIAAALQAIADSGLDDVENLDKDRIGVNIGSGIGGLPSIEVTGKAVIEGGARKINPFFIPGSLINLISGHVTILKGYRGPSYGMVSACTTGAHAIGNSARLIKYGDADIMVAGGAEGAISTLGVGGFAAMKALSTRNDDPATASRPWDKGRDGFVIGEGAGILVLEELEHAKKRGAKIYAEIVGFGMSSDAYHITAPNEEGPALAVTRALKDAGINPEDVDYVNAHGTSTPLGDANETKALKRAFGEHAYKTVVSSTKSMTGHLLGAAGGVEAVYSILAIHDGKIPPTINIFEQDVEAGCDLDYCANEARDAEIDVAISNSFGFGGTNGTLVFKRFKG

SEQ ID NO: 65582 - protein, 504 aa, Neisseria meningitidis
MTTSKCPVTHLTMNNGAPVADNQNSLTAGPRGPLLAQDLWLNEKLADFVREVIPERRMHAKGSGAFGTFTVTHDITKYTRAKIFSEVGKKTEMFARFTTVAGERGAADAERDIRGFALKFYTEEGNWDVVGNNTPVFFLRDPRKFPDLNKAVKRDPRTNMRSATNNWDFWTLLPEALHQVTIVMSDRGIPAGYRHMHGFGSHTYSFWNEAGERFWVKFHFRTQQGIKNLTNEEAAKIIADDRESHQRDLYEAIERGEFPKWTMYIQVMPEADAEKVPYHPFDLTKVWPKKDYPLIEVGEFELNRNPENFFADVEQSAFAPSNLVPGVGASPDKMLQARLFNYADAQRYRLGVNFRQIPVNRPRCPVHSNQRDGQGRADGNYGSLPHYEPNSFGQWQQQPDFAEPPLKINGDAAHWDYRQDDDDYFSQPRALFNLMNDAQKQALFGNTAAAMGDAPDFIKYRHIRNCYRCDPAYGEGVAKALGLTVEDAQAARATDPALGQAGLL

SEQ ID NO: 65583 - protein, 796 aa, Neisseria meningitidis
MTEQKHEEYGADSIQVLEGLEAVRKRPGMYIGDTQDGSGLHHMVFEVLDNAIDEALAGHCDKITVTIHADHSVSVADNGRGMPTGIHPKEGRSAAEVIMTVLHAGGKFDNNSYKISGGLHGVGVSVVNALSDWVTLTIYRDGKEHFVRFVRGETEEPLKVVGDSDKKGTTVRFLASTETFGNVEYSFDILAKRIRELSFLNNGVDIELTDERDGKHESFALSGGVAGFVQYMNRKKTPLHEKIFYAFGEKDGMSVECAMQWNDSYQESVQCFTNNIPQRDGGTHLTALRQVMTRTINSYIEANEVAKKAKVETAGDDMREGLTCVLSVKLPDPKFSSQTKDKLVSGEIGPVVNEVISQALTDFLEENPAEAKIITGKIVDAARAREAARKAREITRRKGVMDGLGLPGKLADCQEKDPALSELYLVEGDSAGGSAMQGRDRKFQAILPLKGKILNVEKARFEKMLASQEVAALITALGAGIGKEEFNAEKLRYHRIIIMTDADVDGAHIRTLLLTFFYRQMPELVERGYIYIAQPPLYKAKYGKQERYLKDELEKDQWLLGLALEKAKIISDGRTIEGAELADTAKQFLLAKTVIEQESRFVDELVLRAMLHASPIDLTSSENADKAVAELSGLLDEKEVALERIEGHEGHRFIKITRKLHGNVMVSYIEPKFLNSKAYQTLTQTAAALKGMVGEGAKLYKGENGYDADSFETALDILMSVAQKGMSIQRYKGLGEMNPEQLWETTMDPAVRRLLKVRIEDAIAADEVFVTLMGDEVEPRRAFIENNALIAQNIDA

SEQ ID NO: 65584 - protein, 439 aa, Neisseria meningitidis
MKAAAAFATGLDAQAVRIVIDIYGSLALTGYGHGTFDALMLGLEGSLPHDIPLAGIPERLERIRTQHILRLNGQEIRFIPDRDLNILGNQVLPKHPNGLRFTAYASDGTVLKEQVYYSVGGGFVVTEEDFDRQAETEKAVPYPYTSCAELLARCRLNRLDISEVVLANEAALAGCGEAEIRRRAAAVAEVMEGCIKRGLGADGELPGGLNVRRRAPQLAAKLKVLRETEIVNTQLWPMVYAMAVNEENAVGGRVVTAPTNGAAGIIPAVLHYFRKFNPHATQERVENFLLTAGAIGILYKTNASISGADVGCQGEVGVACSMAAGAYAEVIGGTPKQVENAAEMAMEHHLGLTCDPVGGLVQIPCIERNGIAAEKALKLGTLALLEDGTDKKVSLDEVIRTMLQTGRDMKSTYKETSLAGLAATLRKKAVPVSVRVVEC

SEQ ID NO: 65585 - protein, 343 aa, Neisseria meningitidis
MGIKVAINGYGRIGRQVLRAIYDYQIQDQLQIVAVNASGSLETNAHLTKFDTVHGRFEADVSHDGGNLIVNGDKIPFFSTRNPAELPWKELGVDLVMECTGAFTSKEKAKVHLESGAKKVLISAPGGDDVDATVVYGVNDSILTADMTVVSNASCTTNCLSPVAKVLSESVGIVKGAMTTIHALTNDQTVTDVRHKDLRRARSGVENMIPTKTGAAKAVGLVLPELKDKLDGLAIRVPTVNVSLVDLNFQAARDTTIEEINALMKAASEAGALKGVLGYNTLPLVSMDFNHTTEASHFDATLTKVVDGNMIKVFAWYDNEWGFSCQMLNTARRMFGLEVRPLK

SEQ ID NO: 65586 - protein, 269 aa, Neisseria meningitidis
MTPLKIAIAGANGRMGRVLVEAVNNHPDTVLSGALEHSGSEALGLDAGYAVGLKTGIAISDDVDTVLAQSDVLIDFTRPEPTLKHLQKCVEKQVNIIIGTTGFDDAGKAAIRAAAEKTGIVFAANFSVGVNLTFHILDTVALVLNEGYDIEIIEGHHRHKVDAPSGTALRMGEVIAGALGRDLKQCAVYGREGHTGPRDPSTIGFATVRAGDIVGDHTALFATDGERVEITHKASSRMTFAAGAVRAAVWVNGKTGLYDMQDVLGLNNR

SEQ ID NO: 65587 - protein, 384 aa, Neisseria meningitidis
MADKKSPLIAVSVGEASGDLLGAHLIRAIRKRCPQARFVGIGGELMKAEGFESLYDQERLAVRGFVEVVRRLPEILRIRRGLVRDLLSLKPDVFVGIDAPDFNLGVAERLKRSGIPTVHYVSPSVWAWRRERVGKIVHQVNRVLCLFPMEPQLYLDAGGRAEFVGHPMAQLMPLEDDRETARKTLGVDAGIPVFALLPGSRVSEIDYMAPVFFQTALLLLKRYPAARFLLPAATEATKRRLAEILQRSEFAGLPLTVTDRQSETVCRAADAVLVTSGTATLEVALCKRPMVISYKISPLTYAYVKRKIKVPHVGLPNILLGKEAVPELLQHDAVPEKLAAALADWYEHPDKVAALQQDFRVLHLLLKKDTADLAARAVLEEAGC

SEQ ID NO: 65588 - protein, 628 aa, Neisseria meningitidis
MIYPKTYDVIVVGGGHAGTEAALAAARMGAQTLLLTHNIETLGQMSCNPSIGGIGKGHLVRELDALGGAMALATDKSGIQFRRLNASKGAAVRATRAQADRILYKAAIREMLENQENLDLFQQAVEDVTLDGERISGVITAMGVEFKARAVVLTAGTFLSGKIHIGLENYEGGRAGDPAAKSLGGRLRELKLPQGRLKTGTPPRIDGRTIDFSQLTEQPGDTPVPVMSVRGNAEMHPRQVSCWITHTNTQTHDIIRSGFDRSPMFTGKIEGVGPRYCPSIEDKINRFADKDSHQIFLEPEGLTTYEYYPNGISTSLPFDIQIALVRSMKGLENAHILRPGYAIEYDYFDPRNLKASLETKTIEGLFFAGQINGTTGYEEAAAQGLLAGANAVQYVRGQDPLLLRREQAYLGVLVDDLITKGVNEPYRMFTSRAEYRLQLREDNADMRLTEDGYKIGLVGEAQWRMFNEKREAVEREIQRLKTTWYTPQKLAEDEQIRVFGQKLSREANLHDLLRRPNLDYAALMTLEGAMPSENLSAEVIEQVEIQVKYQGYIDRQNEEIDSRRDIETLKLPDGIDYGKVKGLSAEVQQKLNQHKPETVGQASRISGVTPAAVALLMVHLKRGFKDAK

SEQ ID NO: 65589 - protein, 194 aa, Neisseria meningitidis
MHILTAGVDEAGRGPLVGSVFAAAVILPETFDLPGLTDSKKLSEKKRDALAEMIKNQAVAWHVAAAGPEEIASLNILHATMLAMKRAVDGLAVRPEKIFIDGNRIPEHLNIPAEAVVKGDSKIIEISAASVLAKTARDAEMYALAQRHPQYGFDKHKGYGTKQHLEALEKYGVLPEHRRDFAPVRNLLAQQALF

SEQ ID NO: 65590 - protein, 257 aa, Neisseria meningitidis
MSANILAIANQKGGVGKTTTTVNLAASLASRGKRVLVVDLDPQGNATTGSGIDKASLQSGVYQVLLGDADVKSAAVRSKEGGYGVLGANRALAGAEIELVQEIAREVRLKNALKAVAEDYDFILIDCPPSLTLLTLNGLVAAGGVIVPMLCEYYALEGISDLIATVRKIRQAVNPDLDITGIVRTMYDSRSRLVAEVSEQLRSHFGDLLFETVIPRNIRLAEAPSHGMPVMAYDAQAKGAKAYLALADELMARVSGK

SEQ ID NO: 65591 - protein, 207 aa, Neisseria meningitidis
MERKERLRAGIAAMGLDISETAQDRLLAYVDLLKKWNKTYNLTALRDEEKMIVHHLLDSLTLLPHIEGVQTMLDVGSGGGQPGIPAAVCRPDVQITLLDANTKKTAFLQQAVIELGLDNVRVVSGRVEAVSDVRADVVTSRAFAELADFVSWTAHLLKDGGYWAAMKGVYPQGEIGRLPQDVCVEKVQRLDVPGLDAERHIVILSKR

SEQ ID NO: 65592 - protein, 185 aa, Neisseria meningitidis
MINDIQKTAEGKMQRSVEVLKENLAKVRTGRAHTGLLDQVEVEYWGSMVPVSQVANVTLLDARTIGVKPFEGNMAAKVEKAIRDSNLGLNPAAVGDLIRVPMPMLTEERRKDLIKVVRGEAEEGRVSIRNVRRDANDHIKKLLKDKEISEDEARRGEEAVQKLTDKYITEADKLLTAKEEDLMAI

SEQ ID NO: 65593 - protein, 248 aa, Neisseria meningitidis
MKSSTQAVLEHTAIPKHIAVIMDGNGRWAKKRFLPRIMGHKRGLDALENMVKHCAKLGVQYLTVFAFSTENWRRPEDEVSFLMGLFLQALQKQVRRLHENNMRLKILGSRERFNRQILKGIEEAEALTANNTGLTLSIAADYGGRWDILQAANKLIAEGVSEITEDTLAKYLMLGDAPEPDLFIRTGGETRISNFLLWQMAYAELYFTDILWPDFDGKALDDAVASFQKRERRFGRTSEQLPIEQQRN

SEQ ID NO: 65594 - protein, 265 aa, Neisseria meningitidis
MLKQRVITAMWLLPLMLGMLFYAPQWLWAAFCGLIALIALWEYARMGGLCKIKTNHYLAATLVFGVVAYAGGWMLPNLVWYVVLAFWLAVMPLWLRFKWRLNGGWQVYAVGWLLVMPFWFALVSLRPHPDDALPLLAVMGLVWVADICAYFSGKAFGKHKIAPAISPGKSWEGAIGGAVCVAVYMTAVRSAGWLAFDTGWFDTVLIGLVLTVVSVCGDLLESWLKRAAGIKDSSNLLPGHGGVFDRTDSLIAVISVYAAMMSVLN

SEQ ID NO: 65595 - protein, 347 aa, Neisseria meningitidis
MIPATYTLSQITARLGGEWRGEDTSVTAVRPLADAQAEHISFLANPKYKAEVHDSSAGAVIVSAKAADGFEGRNLIVADDPYLYFAKVARLFSPVVKARGGIHPTAVVEESATVPASCEIGANAYIGANTVLGEGCRILANAVVQHDCRLGDEVVLHPNAVVYYGCTLGRRVEIHSGAVIGADGFGLAFAGDSWFKIPQTGAVTLGDDVEIGSNTNIDRGAMSDTTVGNGTKIDNQVQIGHNCKIGSHTVIAAKTGISGSVTIGSYCIIGGGVGTVGHIEIADKTTIGGGTSVTHSITESGKHLAGIFPMSTHKEWARNAVYIHRLSEMNKRLKTLEQQLSDGKDTQ

SEQ ID NO: 65596 - protein, 149 aa, Neisseria meningitidis; identical to SEQ ID NO: 65191

SEQ ID NO: 65597 - protein, 945 aa, Neisseria meningitidis
MLDKYSPAEIESKHYQNWEEQGYFQPDMDLTKPSFSIQLPPPNVTGTLHMGHAFNQTIMDGLTRYYRMKGCNTAWIPGTDHAGIATQIVVERQLAAQNVSRHDLGREKFLEKVWEWKEVSGGTITQQMRRVGCSADWTREYFTMDDVRAETVTEVFVRLYEQGLIYRGKRLVNWDPVLGTAVSDLEVESVEEQGSMWHIRYPLADNPAEAVIVATTRPETLLGDVAVAVNPEDERYTHLIGKELILPLTGRTIPVIADEYVEKDFGTGCVKITPAHDFNDYEVGKRHDTRLVNVFDLEAKVLANAEVFNFKGEAQPSFALPEKYAGLDRFAARKQMVADLQEQGFLVEIKAHTLMTPKGDRTGSVIEPMLTSQWFVAMSATPNGGEPDSEFKGLSLADKAKKAVDSGAVRFIPENWVNTYNQWMNNIQDWCISRQLWWGHQIPAWYDNEGNVYVARNQEEAEKQAGKTGLTREEDVLDTWFSSALVPFSTLGWPSETDELKAFLPSNVLVTGYEIIFFWVARMIMMTTHFTGKVPFKDVYIHGIVRDHEGKKMSKSEGNVIDPVDLIDGIDLEKLLVKRTTGLRKPETAPKVEEASRKLFPEGIPSMGADALRFTMASYASLGRSVNFDFKRAEGYRNFCNKIWNATNFVLMNTENQDCGYGATATEPRGYSFPDMWIVDRLNQTIEQVTQAYETYRFDLAAETLYSFMWNDYCDWYLELAKVQLQTGCASRQRATRHTLLRVLEAALRLLHPIIPFITEELWQTVAPMCDAKTADSIMLARFPEADSGEIVQTAFEQMTVLQDLIGAVRNLRGEMGIQPNVKAPLFVESTDDLADYLKYLPMMTRLTEAQQVATLPESEDAPVAVCNGARLMLKVEIDKATETARLSKEAEKLQKALDKLNAKLSKPGYTEKAPAHLVEKDKADLAELEDKMAKVQTQLSKLKD

SEQ ID NO: 65598 - protein, 122 aa, Neisseria meningitidis
MRHRNGNRKLNRTSSHRAAMLRNMANSLLTHETIVTTLPKAKELRRVVEPLITLGKKPSLANRRLAFDRTRDRDVVVKLFGDLGPRFTARNGGYVRVLKYGFRKGDNAPLALVELVDKPAAE

SEQ ID NO: 65599 - protein, 328 aa, Neisseria meningitidis
MQNSTTEFLKPRQIDVNTFSATRAKVSMQPFERGFGHTLGNALRRILLSSMNGFAPTEVAIAGVLHEYSTVDGIQEDVVDILLNIKGIVFKLHGRSQVQLVLKKSGSGVVSAGDIELPHDVEILNPGHVICHLADNGQIEMEIKVEQGRGYQSVSGRQVVRDENRQIGAIQLDASFSPISRVSFEVEPARVEQRTDLDKLVLDIETDGSIDPEEAVRSAARILIDQMSIFADLQGTPVEEVEEKAPPIDPVLLRPVDDLELTVRSANCLKAEDIYYIGDLIQRTETELLKTPNLGRKSLNEIKEVLASKGLTLGSKLEAWPPVGLEKP

SEQ ID NO: 65600 - protein, 206 aa, Neisseria meningitidis; identical to SEQ ID NO: 65201

SEQ ID NO: 65601 - protein, 131 aa, Neisseria meningitidis; identical to SEQ ID NO: 65203

SEQ ID NO: 65602 - protein, 120 aa, Neisseria meningitidis; identical to SEQ ID NO: 65205

SEQ ID NO: 65603 - protein, 37 aa, Neisseria meningitidis
MRVQPSVKKICRNCKIIRRNRVVRVICTDLRHKQRQG

SEQ ID NO: 65604 - protein, 72 aa, Neisseria meningitidis; identical to SEQ ID NO: 65207

SEQ ID NO: 65605 - protein, 436 aa, Neisseria meningitidis
MANQQTSSGSSKFGDLKKRLLFLFGALIVFRIGAHIPVPGVDAVALAKLYESAGNGILGILNMFSGGSLERFSIFAIGIMPYISASIIVQLASEILPSLKALKKEGEAGRKVITKYTRYGTVLLAILQSLGVASFVFQQGIVVTSSFEFHVSTVVSLVTGTMFLMWLGEQITERGIGNGISLIITAGIASGIPSGIAKLVTLTNQGSMSMLTALFIVFGALLLIYLVVYFESAQRKIPIHYAKRQFNGRAGSQNTHMPFKLNMAGVIPPIFASSIILFPSTLLGWFGSADTNSVLHKIAGLLQHGQLLYMALFAATVIFFCYFYTALVFSPKEMAENLKKSGAFVPGIRPGEQTSRYLEKVVLRLTLFGALYITTICLIPEFLTTVLNVPFYLGGTSLLILVVVTMDFSTQINSYRLTQQYDKLMTRSEMKSFSRK

SEQ ID NO: 65606 - protein, 144 aa, Neisseria meningitidis
MFLNTIQPAVGATHAGRRVGRGIGSGLGKTGGRGHKGQKSRSGGFHKVGFEGGQMPLQRRLPKRGFKSLTASANAQLRLSELESIAVNEIDILVLKQAGLIASTVSNVKVIAFGEISKAVALKGIKVTKGARAAIEAVGGKIEM

SEQ ID NO: 65607 - protein, 61 aa, Neisseria meningitidis
MAEQKKIRVTLVKSLIGTIESHRACARGLGLRRREHTVEVLDTPENRGMINKISYLLKVES

SEQ ID NO: 65608 - protein, 172 aa, Neisseria meningitidis; identical to SEQ ID NO: 65216

SEQ ID NO: 65609 - protein, 117 aa, Neisseria meningitidis; identical to SEQ ID NO: 65218

SEQ ID NO: 65610 - protein, 177 aa, Neisseria meningitidis
MSRVAKNPVTVPAGVEVKFGTEALVIKGKNGELSFPLHSDVAIEFNDGKLTFVANNSSKQANAMSGTARALVSNMVKGVSEGFEKRLQLIGVGYRAQAQGKILNLSLGFSHPIVYEMPEGVSVQTPSQTEIVLTGSDKQVVGQVAAEIRAFRAPEPYKGKGVRYVGEVVVMKEAKKK

SEQ ID NO: 65611 - protein, 130 aa, Neisseria meningitidis; identical to SEQ ID NO: 65220

SEQ ID NO: 65612 - protein, 101 aa, Neisseria meningitidis; identical to SEQ ID NO: 65221

SEQ ID NO: 65613 - protein, 179 aa, Neisseria meningitidis
MARLREFYKETVVPELVKQFGYKSVMEVPRIEKITLNMGVGEAIADKKVMEHAVSDLEKIAGQKPVVTVARKSIAGFKIRDNYPVGCKVTLRRDQMFEFLDRLITIALPRVRDFRGVSGKSFDGRGNYNMGVREQIIFPEIEYDKIDALRGLNITITTTAKTDEEAKALLSLFKFPFKG

SEQ ID NO: 65614 - protein, 107 aa, Neisseria meningitidis
MNKIIKGDRVVVIAGKDKGKQGQVVRVLGDKVVVEGVNVVKRHQKPNPMRGIEGGIITKEMPLDISNIAILNPETNKADRVGIKLIENEGKVKRVRFFKSNGSIIGA

SEQ ID NO: 65615 - protein, 122 aa, Neisseria meningitidis
MIQMQTILDVADNSGARRVMCIKVLGGSKRRYASVGDIIKVAVKDAAPRGRVKKGDVYNAVVVRTAKGVRRPDGALIKFDNNAAVLLNNKLEPLGTRIFGPVTRELRTERFMKIVSLAPEVL

SEQ ID NO: 65616 - protein, 87 aa, Neisseria meningitidis
MSETKNVRTLQGKVVSDKMDKTVTVLVERKVKHPLYGKIIRLSTKIHAHDENNQYGIGDVVVISESRPLSKTKSWVVSELVEKARSI

SEQ ID NO: 65617 - protein, 63 aa, Neisseria meningitidis; identical to SEQ ID NO: 65541

SEQ ID NO: 65618 - protein, 138 aa, Neisseria meningitidis; identical to SEQ ID NO: 65226

SEQ ID NO: 65619 - protein, 230 aa, Neisseria meningitidis
MGQKINPTGFRLAVTKDWASKWFAKSTDFSTVLKQDIDVRNYLRQKLANASVGRVVIERPAKSARITIHSARPGVVIGKKGEDIEVLKRDLQVLMGVPVHVNIEEIRRPELDAQIIADGIAQQLEKRVQFRRAMKRAMQNAMRSGAKGIKIMTSGRLNGADIARSEWYREGRVPLHTLRANVDYATSEAHTTYGVLGLKVWVYTEGNIKSSKPEHESKQRKAGRRNAAAN

SEQ ID NO: 65620 - protein, 109 aa, Neisseria meningitidis; identical to SEQ ID NO: 65532

SEQ ID NO: 65621 - protein, 92 aa, Neisseria meningitidis
MARSLKKGPYVDLHLLKKVDAARASNDKRPIKTWSRRSTILPDFIGLTIAVHNGRTHVPVFISDNMVGHKLGEFSLTRTFKGHLADKKAKKK

SEQ ID NO: 65622 - protein, 277 aa, Neisseria meningitidis
MAIVKMKPTSAGRRGMVRVVTEGLHKGAPYAPLLEKKNSTAGRNNNGHITTRHKGGGHKHHYRVVDFKRNKDGIPAKVERIEYDPNRTAFIALLCYADGERRYIIAPRGIQAGAVLVSGAEAAIKVGNTLPIRNIPVGTTIHCIEMKPGKGAQIARSAGASAVLLAKEGAYAQVRLRSGEVRKINVNCRATIGEVGNEEQSLKKIGKAGANRWRGIRPTVRGVVMNPVDHPHGGGEGRTGEAREPVSPWGTPAKGYRTRNNKRTDNMIVRRRYSNKG

SEQ ID NO: 65623 - protein, 106 aa, Neisseria meningitidis
MGMNQQRLTQVILAPIVSEKSNVLAEKRNQMTFKVLANATKPEIKAAVELLFGVQVASVTTVTTKGKTKRFGRTLGRRSDVKKAYVSLAAGQELDLEAAAAAADKE

SEQ ID NO: 65624 - protein, 206 aa, Neisseria meningitidis
MELKVIDAKGQVSGSLSVSDALFAREYNEALVHQLVNAYLANARSGNRAQKTRAEVKHSTKKPWRQKGTGRARSGMTSSPLWRKGGRAFPNKPDENFTQKVNRKMYRAGMATILSQLTRDERLFAIEALTAETPKTKVFAEQVKNLGLEQVLFVTKQLDENVYLASRNLPNVLVLEAQQVDPYSLLRYKKVIITKDAVAQLEEQWV

SEQ ID NO: 65625 - protein, 214 aa, Neisseria meningitidis; identical to SEQ ID NO: 65389

SEQ ID NO: 65626 - protein, 351 aa, Neisseria meningitidis
MMFYSQVNKGKMMSLLNVFKDILNNKELNSEERHDLERAVKILQDTHVNILITGATGCGKSSTINALFSIDQATGKSDGLVKEVAKVGVGVDPETMDIAKYELENMTIWDSPGLGDGEKADQKHRRNIINKLLEKDSNGNAVIDLVLVLLDGGSRDLGTSYELINNVIINTLKKSGEGRTDRLLVAINQCDMAMKGRNWDAEAGRPNAALENFLEEKVCSTRKRIQEATGVTVNPIYFSAGFKSEDEEQRPYNITRLLRYIITAMPSEKRVIVAEKINVEEIERDTSRRKQEERQEIDSSIGSALEKILGAAGGVVKDVVSTIASGVGTLIGGAAKAIGGAISTVASFFGW

SEQ ID NO: 65627 - protein, 103 aa, Neisseria meningitidis; identical to SEQ ID NO: 65527

SEQ ID NO: 65628 - protein, 394 aa, Neisseria meningitidis
MAKEKFERSKPHVNVGTIGHVDHGKTTLTAALTTILAKKFGGAAKAYDQIDNAPEEKARGITINTSHVEYETETRHYAHVDCPGHADYVKNMITGAAQMDGAILVCSAADGPMPQTREHILLARQVGVPYIIVFMNKCDMVDDAELLELVEMEIRDLLSSYDFPGDDCPIVQGSALKALEGDAAYEEKIFELAAALDSYIPTPERAVDKPFLLPIEDVFSISGRGTVVTGRVERGIIHVGDEIEIVGLKETQKTTCTGVEMFRKLLDEGQAGDNVGVLLRGTKREDVERGQVLAKPGTITPHTKFKAEVYVLSKEEGGRHTPFFANYRPQFYFRTTDVTGAVTLEEGVEMVMPGENVTITVELIAPIAMEEGLRFAIREGGRTVGAGVVSSVIA

SEQ ID NO: 65629 - protein, 701 aa, Neisseria meningitidis
MARKTPISLYRNIGISAHIDAGKTTTTERILFYTGLTHKLGEVHDGAATTDYMEQEQERGITITSAAVTSYWSGMAKQFPEHRFNIIDTPGHVDFTVEVERSMRVLDGAVMVYCAVGGVQPQSETVWRQANKYQVPRLAFVNKMDRQGANFFRVVEQMKTRLRANPVPIVIPVGAEDNFSGVVDLLKMKSIIWNEADKGTTFTYGDIPAELVETAEEWRQNMIEAAAEASEELMDKYLGGDELTEEEIVGALRQRTLAGEIQPMLCGSAFKNKGVQRMLDAVVELLPAPTDIPPVQGVNPNTEEADSRQASDEEKFSALAFKMLNDKYVGQLTFIRVYSGVVKSGDTVLNSVKGTRERIGRLVQMTAADRTEIEEVRAGDIAAAIGLKDVTTGETLCAESAPIILERMEFPEPVIHIAVEPKTKADQEKMGIALNRLAKEDPSFRVRTDEESGQTIISGMGELHLEIIVDRMKREFGVEANIGAPQVAYRETIRKAVKAEYKHAKQSGGKGQYGHVVIEMEPMEPGGEGYEFIDEIKGGVIPREFIPSVDKGIRDTLPNGIVAGYPVVDVRIRLVFGSYHDVDSSQLAFELAASQAFKEGMRQASPALLEPIMAVEVETPEEYMGDVMGDLNRRRGVVLGMDDDGIGGKKVRAEVPLAEMFGYSTDLRSATQGRATYSMEFKKYSEAPAHIAAAVTEARKG

SEQ ID NO: 65630 - protein, 156 aa, Neisseria meningitidis
MPRRREVPKRDVLPDPKFGSVELTKFMNVLMIDGKKSVAERIVYGALEQIEKKTGKVAIEVFNEAIANAKPIVEVKSRRVGGANYQVPVEVRPSRRLALAMRWVRDAARKRGEKSMDLRLAGELIDASEGRGGALKKREEVHRMAEANKAFSHFRF

SEQ ID NO: 65631 - protein, 123 aa, Neisseria meningitidis
MPTINQLVRKGRQKPVYVNKVPALEACPQKRGVCTRVYTTTPKKPNSALRKVCKVRLTNGFEVISYIGGEGHNLQEHSVVLIRGGRVKDLPGVRYHTVRGSLDTAGVKDRKQARSKYGAKRPK

SEQ ID NO: 65632 - protein, 1391 aa, Neisseria meningitidis
MNLLNLFNPLQTAGMEEEFDAIKIGIASPETIRSWSYGEVKKPETINYRTFKPERDGLFCAKIFGPVKDYECLCGKYKRLKFKGVTCEKCGVEVTLSKVRRERMGHIELAAPVAHIWFLKSLPSRLGMVLDMTLRDIERVLYFEAFVVTDPGMTPLQRRQLLTEDDYYNKLDEYGDDFDAKMGAEGIRELLRTLNVAGEIEILRQELESTGSDTKIKKIAKRLKVLEAFHRSGMKLEWMIMDVLPVLPPDLRPLVPLDGGRFATSDLNDLYRRVINRNNRLKRLLELHAPDIIVRNEKRMLQEAVDSLLDNGRRGKAMTGANKRPLKSLADMIKGKGGRFRQNLLGKRVDYSGRSVITVGPYLRLHQCGLPKKMALELFKPFIFHKLEKQGLASTVKAAKKLVEQEVPEVWDILEEVIREHPIMLNRAPTLHRLGIQAFEPILIEGKAIQLHPLVCAAFNADFDGDQMAVHVPLSLEAQMEARTLMLASNNVLSPANGEPIIVPSQDIVLGLYYMTRDRINAKGEGSLFADVKEVHRAYHTKQVELGTKITVRLREWVKNEAGEFEPVVNRYETTVGRALLSEILPKGLPFEYVNKALKKKEISKLINASFRLCGLRDTVIFADHLMYTGFGFAAKGGISIAVDDMEIPKEKAALLAEANAEVKEIEDQYRQGLVTNGERYNKVVDIWGRAGDKIAKAMMDNLSKQKVIDRDGNEVDQESFNSIYMMADSGARGSAAQIKQLSGMRGLMAKPDGSIIETPITSNFREGLTVLQYFIATHGARKGLADTALKTANSGYLTRRLVDVTQDLVVVEDDCGTSDGFVMKAVVQGGDVIEALRDRILGRVTASDVVDPSSGETLVEAGTLLTEKLVDMIDQSGVDEVKVRTPITCKTRHGLCAHCYGRDLARGKLVNAGEAVGVIAAQSIGEPGTQLTMRTFHIGGAASRAAAASQVEAKSNGTARFSSQMRYVANNKGELVVIGRSCEVVIHDDIGRERERHKVPYGAILLVQDGMAIKAGQTLATWDPHTRPMITEHAGMVKFENVEEGVTVAKQTDDVTGLSTLVVIDGKRRSSSASKLLRPTVKLLDENGVEICIPGTSTPVSMAFPVGAVITVREGQEIGKGDVLARIPQASSKTRDITGGLPRVAELFEARVPKDAGMLAEITGTVSFGKETKGKQRLIVTDVDGVAYETLISKEKQILVHDGQVVNRGETIVDGAVDPHDILRLQGIEALARYIVQEVQEVYRLQGVKISDKHIEVIIRQMLRRVNIADAGETGFITGEQVERGDVMAANEKALEEGKEPARYENVLLGITKASLSTDSFISAASFQETTRVLTEAAIMGKQDELRGLKENVIVGRLIPAGTGLTYHRSRHQQWQGVEQETAETQVTDE

SEQ ID NO: 65633 - protein, 1392 aa, Neisseria meningitidis
MSYSFTEKKRIRKSFAKRENVLEVPFLLATQIDSYAKFLQLENAFDKRTDDGLQAAFNSIFPIVSHNGYARLEFVHYTLGEPLFDIPECQLRGITYAAPLRARIRLVILDKEASKPTVKEVRENEVYMGEIPLMTPSGSFVINGTERVIVSQLHRSPGVFFEHDKGKTHSSGKLLFSARIIPYRGSWLDFEFDPKDLLYFRIDRRRKMPVTILLKALGYNNEQILDIFYDKETFYLSSNGVQTDLVAGRLKGETAKVDILDKEGNVLVAKGKRITAKNIRDITNAGLTRLDVEPESLLGKALAADLIDSETGEVLASANDEITEELLAKFDINGVKEITTLYINELDQGAYISNTLRTDETAGRQAARVAIYRMMRPGEPPTEEAVEQLFNRLFFSEDSYDLSRVGRMKFNTRTYEQKLSEAQQNSWYGRLLNETFAGAADKGGYVLSVEDIVASIATLVELRNGHGEVDDIDHLGNRRVRSVGELTENQFRSGLARVERAVKERLNQAESENLMPHDLINAKPVSAAIKEFFGSSQLSQFMDQTNPLSEVTHKRRVSALGPGGLTRERAGFEVRDVHPTHYGRVCPIETPEGPNIGLINSLSVYARTNDYGFLETPYRRVIDGKVTEEIDYLSAIEEGRYVIAQANADLDSDGNLIGDLVTCREKGETIMATPDRVQYMDVATGQVVSVAASLIPFLEHDDANRALMGANMQRQAVPCLRPEKPMVGTGIERSVAVDSATAIVARRGGVVEYVDANRVVVRVHDDEATAGEVGVDIYNLVKFTRSNQSTNINQRPAVKAGDVLQRGDLVADGASTDLGELALGQNMTIAFMPWNGYNYEDSILISEKVAADDRYTSIHIEELNVVARDTKLGAEDITRDIPNLSERMQNRLDESGIVYIGAEVEAGDVLVGKVTPKGETQLTPEEKLLRAIFGEKASDVKDTSLRMPTGMSGTVIDVQVFTREGIQRDKRAQSIIDSELKRYRLDLNDQLRIFDNDAFDRIERMIVGQKANGGPMKLAKGSEITTEYLAGLPSRHDWFDIRLTDEDLAKQLELIKVSLQQKREEADELYEIKKKKLTQGDELQPGVQKMVKVFIAIKRRLQAGDKMAGRHGNKGVVSRILPVEDMPYMADGRPVDIVLNPLGVPSRMNIGQILEVHLGWAAKGIGERIDRMLKEQRKAGELREFLNRLYNGSGKKEDLDALTDEEIIELASNLRKGASFASPVFDGAKESEIREMLNLAYPSDDPEVEKLGFNDSKTQITLYDGRSGEAFDRKVTVGVMHYLKLHHLVDEKMHARSTGPYSLVTQQPLGGKAQFGGQRFGEMEVWALEAYGAAYTLQEMLTVKSDDVNGRTKMYENIVKGEHKIDAGMPESFNVLVKEIRSLGLDIDLERY

SEQ ID NO: 65634 - protein, 123 aa, Neisseria meningitidis
MAITKEDILEAVGSLTVMELNDLVKAFEEKFGVSAAAVAVAGPAGAGAADAEEKTEFDVVLASAGDQKVGVIKVVRAITGLGLKEAKDIVDGAPKTIKEGVSKAEAEDIQKQLEEAGAKVEIK

SEQ ID NO: 65635 - protein, 166 aa, Neisseria meningitidis
MSLNIETKKVAVEEISAAIANAQTLVVAEYRGISVSSMTELRANARKEGVYLRVLKNTLARRAVQGTSFAELADQMVGPLVYAASEDAVAAAKVLHQFAKKDDKIVVKAGSYNGEVMNAAQVAELASIPSREELLSKLLFVMQAPVSGFARGLAALAEKKAGEEAA

SEQ ID NO: 65636 - protein, 231 aa, Neisseria meningitidis
MAKVSKRLKALRSSVEANKLYAIDEAIALVKKAATAKFDESVDVSFNLGVDPRKSDQVIRGSVVLPKGTGKITRVAVFTQGANAEAAKEAGADIVGFEDLAAEIKAGNLNFDVVIASPDAMRIVGQLGTILGPRGLMPNPKVGTVTPNVAEAVKNAKAGQVQYRTDKAGIVHATIGRASFAEADLKENFDALLDAIVKAKPAAAKGQYLKKVAVSSTMGLGIRVDTSSVNN

SEQ ID NO: 65637 - protein, 144 aa, Neisseria meningitidis
MAKKIIGYIKLQIPAGKANPSPPVGPALGQRGLNIMEFCKAFNAATQGMEPGLPIPVVITAFADKSFTFVMKTPPASILLKKAAGLQKGSSNPLTNKVGKLTRAQLEEIAKTKEPDLTAADLDAAVRTIAGSARSMGLDVEGVV

SEQ ID NO: 65638 - protein, 178 aa, Neisseria meningitidis; identical to SEQ ID NO: 65412

SEQ ID NO: 65639 - protein, 92 aa, Neisseria meningitidis
MTEHTPEKKNVKVDQLVVQDKESASNSGKEGFFAYFSNSWFEFKKVVWPKREDAVRMTVFVIVFVAVLSIFIYAADTAISWLFFDVLLRREG

SEQ ID NO: 65640 - protein, 394 aa, Neisseria meningitidis; identical to SEQ ID NO: 65628

SEQ ID NO: 65641 - protein, 83 aa, Neisseria meningitidis
MSLFITDECINCDVCEPECPNDAISQGEEIYEINPNLCTQCVGHYDEPQCQQVCPVDCILIDEEYPETHDELMAKYEKIIQFK

SEQ ID NO: 65642 - protein, 768 aa, Neisseria meningitidis
MAKNLLIVESPSKAKTLKKYLGGDFEILASYGHVRDLVPKSGAVDPDNGFAMKYQLISRNGKHVDAIVAGAKEAENIYLATDPDREGEAISWHLLEILKSKRGLKNIKPQRVVFHEITKNAVLDAVANPREIEMDLVDAQQARRALDYLVGFNLSPLLWKKIRRGLSAGRVQSPALRLICERENEIRAFEAREYWTVHLDSHKGRSKFTAKLAQYNGAKLEQFDLPNEAAQADVLKELEGKEAVVTAIEKKKRSRNPAAPFTTSTMQQDAVRKLGFTTDRTMRTAQQLYEGIDVGQGAIGLITYMRTDSVNLADEALTEIRHYIENKIGKEYLPSAAKQYKTKSKNAQEAHEAIRPTSVYRTPESVKPFLSADQFKLYQMIWQRTVACQMTPAKFDQTTVDITVGKGVFRVTGQVQTFAGFLSVYEESSDDEEGEDSKKLPEMSEGDKLPVDKLYGEQHFTTPPPRYNEATLVKALEEYGIGRPSTYASIISTLKDREYVTLEQKRFMPTDTGDIVNKFLTEHFAQYVDYHFTAKLEDQLDEIADGKRQWIPLMDKFWKPFIKQVEEKEGIERAKFTTQELDETCPKCGEHKLQIKFGKMGRFVACAGYPECSYTRNVNETAEEAAERIAKAEAEQAELDGRECPKCGGRLVYKYSRTGSKFIGCANYPKCKHVEPLEKPKDTGVQCPQCKKGNLVERKSRYGKLFYSCSTYPDCNYATWNPPVAEECPNCHWPVLTIKTTKRWGVEKVCPQKECGWKEQIEPPAPKE

SEQ ID NO: 65643 - protein, 706 aa, Neisseria meningitidis
MRRFLPIAAICAVVLLYGLTAATGSTSSLADYFWWIVAFSAMLLLVLSAVLARYVILLLKDRRDGVFGSQIAKRLSGMFTLVAVLPGVFLFGVSAQFINGTINSWFGNDTHEALERSLNLSKSALNLAADNALGNAIPVQIDLIGAASLPGDMGRVLEHYAGSGFAQLALYNAASGKIEKSINPHKLDQPFPGKARWEKIQQAGSVRDLESIGGVLYAQGWLSAGTHNGRDYALFFRQPVPKGVAEDAVLIEKARAKYAELSYSKKGLQTFFLATLLIASLLSIFLALVMALYFARRFVEPVLSLAEGAKAVAQGDFSQTRPVLRNDEFGRLTKLFNHMTEQLSIAKEADERNRRREEAARHYLECVLEGLTTGVVVFDEQGCLKTFNKAAEQILGMPLTPLWGSSRHGWHGVSAQQSLLAEVFAAIGAAAGTDKPVHVKYAAPDDAKILLGKATVLPEDNGNGVVMVIDDITVLIHAQKEAAWGEVAKRLAHEIRNPLTPIQLSAERLAWKLGGKLDEQDAQILTRSTDTIIKQVAALKEMVEAFRNYARSPSLKLENQDLNALIGDVLALYEAGPCRFAAELAGEPLMMAADTTAMRQVLHNIFKNAAEAAEEADVPEVRVKSEAGQDGRIVLTVCDNGKGFGREMLHNAFEPYVTDKPAGTGLGLPVVKKIIEEHGGRISLSNQDAGGACVRIILPKTVETYA

SEQ ID NO: 65644 - protein, 419 aa, Neisseria meningitidis
MSMALAQKLAADSIAAVAEGRNLQDVLAQIRTAHPDLTAQENGALQDIAYGCQRYLGSLKHMLAQMLKKPIGNPQLESLLLAALYQLHYTRNAPHAVVNEAVESIAKIGRGQYRSFANAILRRFLRERDKLAASCKKDDVAKHNLPLWWVAYLKNHYPKHWHNIAAALQSHPPMTLRVNRRHGNAESYLEKLAAEGIAAKALDEYAVTLEEAVPVNRLPGFSDGIVSVQDFGAQQAAYLLNPKDGERILDACAAPGGKTGHILELADCRVTALDIDAGRLKRVEDNIARLGFQTASAACADARDLAAWYDGKPFDTILADVPCTASGVARRNPDVKWLRRPTDALKTARQQEALLDALWQTLKQGGRMLLATCSVFVEENDGQLQKFLNRHADAEPIESRVLLPNKHQDGFYYALIQKH

SEQ ID NO: 65645 - protein, 405 aa, Neisseria meningitidis
MQRRIITLLCAAGMAFSTQTLAANLEVRPNAPERYTVKQGDTLWGISGKYLYSPWQWGRLWDANRDQIHNPDLIYLDQVLVLRHVDGEPRLGLEQTDGIPVVKMSPDKEVSGYGIPAIDVNFYRIFMRHPQIVSRKETAAAPRLLSGPEGRLLYTKGTRVYTKGLKEPGRYLTYRINKNITDPDTGKFLGQEVAFSGIVRSLDYTDSVLEQRSKQAGERPKDNEYHTRTHPLITPLRTPSIQPLVVETAISEIQQGDYLMKMPEDTDRFNMMPHEPSRPVQAKIVSVFEGTRIAGQFQTITIDKGEADGLDKGTVLSLYKRKKTMQVDLSNNFKSRDTVELISTPAEEVGLAMVYRTSEHLSSAIILENISDISVGDTAANPGRDLDNIPDQGRSRVKFGFNRSE

SEQ ID NO: 65646 - protein, 490 aa, Neisseria meningitidis
MNQTSRDLTRISHNTKIVATLGPGSNNVELLEDMIRVGGLNVVRFNFSHGTPEFHQENARIVREAAKRTGQEIAIIADLQGPKIRVGKIAGGGIELNKGETLGLDAALEGEGTREAVGLDYRDLPDDVAAGDVLWLDDGLLTLTVESVEGSRIITRVENSHVLKSNKGINKRGGGLSAGALTEKDFRDLKTAIAIGCDYLAISFVKSAEDLHIARAKVEEEMKGSTAVRPGLVSKIERVEAIENLDEIILAGDGIMVARGDLAVEVGHAAVPALQKRMIRRARELRRFSITATQMMESMITNPVPTRAEVSDVANAVLDGTDAVMCSAETAVGAYPFETVSQMAIICAAAEKEQDSLNGVAEQVEYPEAVSTNLAVAGGAVSVARAVHAKAIVALTESGSTAFEISRHNITLPIFALTPSVSAQRRMAMYRGVRPLILATSTDHDTALNEVETMLVEHNILHSGDQYIITSGSQMRESGSTNTLEVLRVK

SEQ ID NO: 65647 - protein, 464 aa, Neisseria meningitidis
MTPSALKKTVLLLGTAFAAASAQASGYHFGTQSVNAQSTANAAAAEAADASTIFYNPAGLTKLDSSQISVNANIVLPSIHYEADSATDFTGLPVQGSKSGKITKTTVAPHIYGAYKVNDNLTVGLGVYVPFGSATEYEKDSVLRHNINKLGLTSIAVEPVAAWKLNERHSFGAGIIAQHTSAELRKYADWGIMEKAKALKETPPNPTKAAQIKADGHADVKGSDWGFGYQLAWMWDINDRARVGVNYRSKVSHTLKGDAEWAADDAMAKQLWDANKLALLGYTPSEKARVKIVTPESLSVHGMYKVSDKADLFGDVTWTRHSRFDKAELVFEKEKTIVNGKSDRTTITPNWRNTYKVGFGGSYQISEPLQLRAGIAFDKSPVRNADYRMNSLPDGNRIWFSAGMKYHIGKNHVVDAAYTHIHINDTSYRTAKASGNDVDSKGASSARFKNHADIIGLQYTYKFK

SEQ ID NO: 65648 - protein, 757 aa, Neisseria meningitidis
MNITQILSQELSATAAQITAAVELLDDGATVPFIARYRKEATGGLDDTQLRRLAERLQYLRELEERKAVVLKSIEEQGKLSDDLRAQIEAADNKTALEDLYLPYKPKRRTKAQIAREHGLQPLADVLLAEQSQDVEAAAQGYLNENVPDAKAALDGARAILMEQFAEDAELIGTLRDKLWNEAEIHAQVVGGKETEGEKFSDYFDHREPIRAMPSHRALAVLRGRNEGVLNIALKYQPDDTPITQQSEYEQIIARRFKVSDGHKWLRDTVRLTWRAKIFLSLELEALNRLKEAADTDAITVFARNLKDLLLAAPAGRLTTLGLDPGYRNGVKCAVVDDTGKLLDTVIVYLHQENNMLATLSRLIKQHGVKLIAIGNGTASRETDKIAGELVREMSKMGLHKIVVSEAGASIYSASELAAREFPDLDVSLRGAVSIARRLQDPLAELVKIDPKSIGVGQYQHDVNQSQLAKSLDAVVEDCVNAVGVDVNTASAPLLARISGLNQTLAQNIVAYRDENGAFDSRKKLLKVPRLGEKTFEQAAGFLRINGGKEPLDASAVHPEAYPVVAKMLAQQGISAAELIGNRERVKQIKASDFTDERFGLPTILDILSELEKPGRDPRGEFQTASFAEGIHEISDLQVGMILEGVVSNVANFGAFVDIGVHQDGLVHISALSNKFVQDPREVVKAGDVVKVKVLEVDAARKRIALTMRLDDEPGGAKHKMPSENRSRERTAGRKPQRNDRAPANSAMADAFAKLKR

SEQ ID NO: 65649 - protein, 216 aa, Neisseria meningitidis
MISVEHVSKRYLTRQGWRTVLHDISFKMEKGEKIGILGRNGAGKSTLIRLISGVEPPTTGEIKRTMSISWPLAFSGAFQGSLTGMDNLRFICRIYNVDIDYVKNFTEEFSELGQYLYEPVKRYSSGMKARLAFALSLAVEFDCYLIDEVIAVGDSRFADKCKYELFEKRKDRSIILVSHSHSAMKQYCDNAMVLEKGHMYQFEDMDKAYEYYNSLP

SEQ ID NO: 65650 - protein, 372 aa, Neisseria meningitidis
MKVLTVFGTRPEAIKMAPVILELQKHNTITSKVCITAQHREMLDQVLSLFEIKADYDLNIMKPNQSLQEITTNIISSLTDVLEDFKPDCVLVHGDTTTTFAASLAAFYQKIPVGHIEAGLRTYNLYSPWPEEANRRLTSVLSQWHFAPTEDSKNNLLSESIPSDKVIVTGNTVIDALMVSLEKLKITTIKKQMEQAFPFIQDNSKVILITAHRRENHGEGIKNIGLSILELAKKYPTFSFVIPLHLNPNVRKPIQDLLSSVHNVHLIEPQEYLPFVYLMSKSHIILSDSGGIQEEAPSLGKPVLVLRDTTERPEAVAAGTVKLVGSETQNIIESFTQLIEYPEYYEKMANIENPYGIGNASKIIVETLLKNR

SEQ ID NO: 65651 - protein, 138 aa, Neisseria meningitidis
MAKLTEQDILNWNGPEDDYMNDEHLAFFRELLVKMQDELIENASATTGHLQEHESAPDPADRATQEEEYALELRTRDRERKLLSKIQATIRNIDEGDYGFCADTGEPIGLKRLLARPTATLSVESQERRERMKKQFAD

SEQ ID NO: 65652 - protein, 228 aa, Neisseria meningitidis
MTVLQERYCEVSDRIGKLVLQAGRKPHSVSLIAVGKTFPSDGIREVYAAGQRDFGENYIQEWYDKTEELADLTDIVWHVIGDVQSNKTKFVAERAHWVHTICRLKTAVRLSRQRPSSMPPLQVCIEVNIAGEAVKHGVAPEEAVALAVEVAKLPNIVVRGLMCVAKANSSETELKVQFQTMRKLLADLNTAGVKADVLSMGMSDDMPAAIECGATHVRIGSAIFGKRG

SEQ ID NO: 65653 - protein, 347 aa, Neisseria meningitidis
MQITDLLAFGAKNKASDLHLSSGISPMIRVHGDMRRINLPEMSAEEVGNMVTSVMNDHQRKIYQQNLEVDFSFELPNVARFRVNAFNTGRGPAAVFRTIPSTVLSLEELKAPSIFQKIAESPRGMVLVTGPTGSGKSTTLAAMINYINETQPAHILTIEDPIEFVHQSKKSLINQRELHQHTLSFANALSSALREDPDVILVGEMRDPETIGLALTAAETGHLVFGTLHTTGAAKTVDRIVDVFPAGEKEMVRSMLSESLTAVISQNLLKTHDGNGRVASHEILIANPAVRNLIRENKITQINSVLQTGQASGMQTMDQSLQSLVRQGLIAPEVARRRAQNSESMSF

SEQ ID NO: 65654 - protein, 716 aa, Neisseria meningitidis
MKTPPLKPLLITSLPVFASVFTAASIVWQLGEPKLAMPFVLGIIAGGLVDLDNRLTGRLKNIIATVALFTLSSLVAQSTLGTGLPFILAMTLMTFGFTIMGAVGLKYRTFAFGALAVATYTTLTYTPETYWLTNPFMILCGTVLYSTAIILFQIILPHRPVQENVANAYEALGSYLEAKADFFDPDEAEWIGNRHIDLAMSNTGVITAFNQCRSALFYRLRGKHRHPRTAKMLRYYFAAQDIHERISSAHVDYQEMSEKFKNTDIIFRIHRLLEMQGQACRNTAQALRASKDYVYSKRLGRAIEGCRQSLRLLSDSNDNPDIRHLRRLLDNLGSVDQQFRQLQHNGLQAENDRMGDTRIAALETGSLKNTWQAIRPQLNLESGVFRHAVRLSLVVAAACTIVEALNLNLGYWILLTALFVCQPNYTATKSRVRQRIAGTVLGVIVGSLVPYFTPSVETKLWIVIASTTLFFMTRTYKYSFSTFFITIQALTSLSLAGLDVYAAMPVRIIDTIIGASLAWAAVSYLWPDWKYLTLERTAALAVCSNGAYLEKITERLKSGETGDDVEYRATRRRAHEHTAALSSTLSDMSSEPAKFADSLQPGFTLLKTGYALTGYISALGAYRSEMHEECSPDFTAQFHLAAEHTAHIFQHLPETEPDDFQTALDTLRGELDTLRTHSSGTQSHILLQQLQLIARQLEPYYRAYRQIPHRQPQNAA

SEQ ID NO: 65655 - protein, 335 aa, Neisseria meningitidis
MSTFFQQTAQAMIAKHIDRFPLLKLDQVIDWQPIEQYLNRQKNRYLRDHRGRPAYPLLSMFKAVLLGQWHSLSDPELEHSLITRIDFNLFCRFDELSIPDYSTLCRYRNWLAQDDTLSELLKLINRQLTEKGLKIEKASAAVVDATIIQTAGSKQRQTIEVDEEGQVSGQTTPSKDSDARWIKKNGLYKLGYKQHTRTDAEGYIEKLHITPANAHECKHLSPLLEGLPEGTTVYADKGYDSAENRQHLEERQLLDGIMRKTCRNRPLSEAQTKRNRYLSKTRYVVEQSFGTLHRKFRYARAAYFGLIKVSAQSHLKAMCLNLLKAANRLSAPVCA

SEQ ID NO: 65656 - protein, 367 aa, Neisseria meningitidis
MEAEVINQLNNTLNDLEKRSEDIRVYMDYQGKKDRLEEVIGLSEDPELWNDPKRAQEIGKERKILEGIVLTLDNIATGIEDNRMLIEMTVEENDEEGFAAVQEDVAGLEKQMADLEFKRMFNQPADPNNCFIDITAGAGGTEAEDWAGMLFRMYSRYAERKGFKIEILEEDDGEIAGINRATIRVEGEYAYGLLRTETGVHRLVRYSPFDSNNKRHTSFASVFVYPEIDDSIEIEINPADLRIDTYRASGAGGQHINKTDSAVRITHEPTGIVVQCQNDRSQHANKAAAMEMLKSKLYELEMRKRNEEKQALEEGKSDVGWGSQIRSYVLDSSRIKDLRTGYEVGNTKAVLDGDLDGFIEASLKQGV

SEQ ID NO: 65657 - protein, 280 aa, Neisseria meningitidis
MIQHAGLGYRRDLAEDFLSLSENSPICFIEAAPENWLKMGGWARKQFDRVAERLPLALHGLSMSLGGQAPLDTDLIDGIKEMMRRYDCTFFSDHLSYCHDGGHLYDLLPLPFTEEMVHHTARRIREVQDRLGCRIAVENTSYYLHSPLAEMNEVEFLNAVAREADCGIHLDVNNIYVNAVNHGLLSPEAFLKNVDADRVCYIHIAGHDVETPELLIDTHGAAVLPTVWDLLELAYAKLPTIPPTLLERDFNFPPFAELEAEVAKIADYQTRAGKEYRRAA

SEQ ID NO: 65658 - protein, 249 aa, Neisseria meningitidis
MKALVAVKRVVDYNVKVRVKADGSDVDIGNVKMSMNPFDEIAVEEAVRLKEAGKVSEIVAVSLGEKKCEETLRTALAMGADRAIHVETDTKLESLAVAKLLKAVADKENPQIFFLGKQAIDDDANQVAQMLAALLNAAQGTFASKVHIEGGEVQIVREIDGGEETIALKLPAVISADLRLNEPRFVKLPNIMAAKKKPLEKLAPADLATDILPRLKTVKFAEPKARQAGVKVASVAELVEKLKNEAKVI

SEQ ID NO: 65659 - protein, 322 aa, Neisseria meningitidis
MKILLVRLSSMGDLIHTLPAIEDLARQCPDVELHWLCEAGFADIARLHPFVKKIHVMKWRQWRKHLFQAETWREMGHLKQTLRQEAFNFVLDSQGLIKSACFAKMAKSPIYGLDKNSAREGLAALAYAKTYAVPKGKNAVWRNRELFAQVFGYAMPETQVFGLTVPEAGRLKNLAQPYYAALHATSRDSKLWPVENWRSLLQKLNEEQQCNIYLPWGNEDEKTRAKQIADGLPFAIVCDKMNLLQAAYLLKHAVGIVGVDTGLLHLANALEKPVVGIYTDTDPIKTGVQVSPIAKNLGNIGQIPTADLVYQTLMDCVAADKG

SEQ ID NO: 65660 - protein, 226 aa, Neisseria meningitidis
MTYTIVPIATARSPYKQKFGIARQPGLVSAAEVCIELNPEFTADSVRGLEDFDYVWISFIFHGVLDEGWAQMVRPPRLGGKQKMGVFATRSPHRPNHLGLSLLKLNRIETGKPVRLYCSGADLLDGTPIVDIKPYIPFVESKPDAASGFVSGKPVELEVVWQENIGAENLSANTKNLISQSIAQDPRPAYQNIPERIYVMNIADYEIRFQIEENRATVIDLSPTPL

SEQ ID NO: 65661 - protein, 334 aa, Neisseria meningitidis
MSIKVAINGFGRIGRLALRQIEKAHGIEVVAVNDLTPAEMLLHLFKYDSTQGRFQGTAELKDDAIVVNGKEIKVFANPNPEELPWGELGVDVVLECTGFFTNKTKAEAHIRAGARKVVISAPGGNDVKTVVYGVNQDILDGSETVISAASCTTNCLAPMAAVLQKEFGVVEGLMTTIHAYTGDQNTLDAPHRKGDLRRARAAALNIVPNSTGAAKAIGLVIPELNGKLDGSAQRVPVATGSLTELVSVLERPVTKEEINAAMKAAASESYGYNEDQIVSSDVVGIEYGSLFDATQTRVMTVGGKQLVKTVAWYDNEMSYTCQLVRTLEYFAGKI

SEQ ID NO: 65662 - protein, 864 aa, Neisseria meningitidis
MSKSAVSPMMQQYLGIKAQHTDKLVFYRMGDFYEMFFDDAVEAAKLLDITLTTRGQVDGEPVKMAGVPFHAAEQYLARLVKLGKSVAICEQVGEVGAGKGPVERKVVRIVTPGTLTDSALLEDKETNRIVAVSPDKKYIGLAWASLQSGEFKTKLTTVDKLDDELARLQAAEILLPDSKNAPQLQTASGVTRLNAWQFAADAGEKLLTEYFGCQDLRGFGLDGKEHAVAIGAAGALLNYIRLTQNLMPQHLDGLSLETDSQYIGMDAATRRNLEITQTLSGKKSPTLMSTLDLCATHMGSRLLALWLHHPLRNRAHIRARQEAVAALESQYKPLQCRLKNIADIERIAARIAVGNARPRDLASLRDSLFELAQIDLSANGSSLLETLKAVFPENLSTAEQLRQAILPEPSVWLKDGNVINHGFHPELDELRRIQNHGDEFLLDLEAKERERTGLSTLKVEFNRVHGFYIELSKTQAEQAPADYQRRQTLKNAERFITPELKAFEDKVLTAQEQALALEKQLFDGVLKNLQTALPQLQKAAKAAAALDVLSTFSALAKERNFVRPEFADYPAIHIENGRHPVVEQQVRHFTANHTNLDHKHRLMLLTGPNMGGKSTYMRQVALIVLLAHTGCFVPADAATIGPIDQIFTRIGASDDLASNRSTFMVEMSETAYILHHATEQSLVLMDEVGRGTSTFDGLALAHAVAEHLLQKNKSFSLFATHYFELTYLPEAHAAAVNMHLSALEQGQDIVFLHQIQPGPAGKSYGIAVAKLAGLPVRALKSAQKHLNGLENQAAANRPQLDIFSTMPSEKGDEPNVGNFVDKAEEKHFEGILAAALEKLDPDSLTPREALSELYRLKDLCKSVS

SEQ ID NO: 65663 - protein, 163 aa, Neisseria meningitidis
MNSLFVDNTVFITRLKAGHIGRLVQALFEEWHGFEPWSSVDKIRAYYGRCLKDDELPLAFAAVDDFGTLLGSAAVKRHDMKSFPQYEYWLGDVFVLPEYRGKGIGRRLVAHCIGAARSLGIKFLYLYTPDVQIFYESFGWAVVGRHFHNGEWVTVMRLDMDKV

SEQ ID NO: 65664 - protein, 464 aa, Neisseria meningitidis
MTVKTRFAPSPTGYLHIGGVRTALFSWAFARHHKGEFLLRIEDTDLARSTAESVNIILDGMKWVGLNYDNADNVVYQTRRFDRYKEVIAELLEKGHAYYCYCSKEELEAMREKAEKEGTATYDRRWRPEAGKTLPEIPAGVQPVVRFKTPLDGVTRWADLVKGEISIPNEALDDLIIARSDGSPTYNFCVVVDDYDMGVTHVIRGDDHVNNTPKQINILKAIGATLPEYGHLPMILNEQGKKISKRSGDTVAITDFGAMGILPEAMLNYLARLGWAHGDDEFFTMEQFIEWFDLKDVSPSPSRMDLKKLYWINGEHIKITPNGKLAELVKPRLALRDIHETEKPALEDVLALVKDRAQDLNTLADECLYFYVKQTPTEADVQKHWDDEAAARMLRFAERLEGLEDWNAEAIHDLFKPFCDEEGIKMGKLGMPLRLAVCGTAKTPSVDAVLALIGKEEVLKRIRA

SEQ ID NO: 65665 - protein, 392 aa, Neisseria meningitidis
MAFLKLTEQNVQGKTVLIRADMNVPFKDGKISDDTRIRASIASVKYCVDNGASVIVMTHLGRPTEGEFHPEDDVAPVAAHLGSLLGKDVKVLNDWRENKPALNAGDVVMLQNVRINKGEKKNDLELGKAYASLCDVFVNDAFGTAHRAQASTEAVAQAAPVACAGVLMAGELDALGKALKQPARPMVAIVAGSKVSTKLTILESLADKVDQLIVGGGIANTFLLAEGKAIGKSLAEHDLVEESKKIMAKMAAKGGSVPLPTDVVVAKAFAADAEAVVKDIADVAEDDMILDIGPKSAAALADLLKAADTVVWNGPVGVFEFDQFAGGTKALAEAIAQSKAFSIAGGGDTLAAIAKFGVTEQIGYISTGGGAFLEFLEGKELPAVAALEKRGA

SEQ ID NO: 65666 - protein, 417 aa, Neisseria meningitidis
MDKLKISANGPLNGEITVSGAKNAALPLMCAGLLTSGTLRLKNVPMLADVKTTQKLLQGMGARVLTDNISEFEINGGTVNNTCAPYELVRTMRASILVLGPTLARFGEAQVSLPGGCAIGSRPVDQHLKGLEAMGAEIVIEHGYVKAKGKLKGTRVAMDVVTVGGTENLLMAATLAEGTTVLENCAIEPEVVDLAECLVKMGAKISGIGTSTMIVEGVDELHGCEHSVVPDRIEAGTFLCAVAITGGRVVLRNAAPKTMEVVLDKLVEAGAVIEAGDDWIAIDMRQRPKAVDIRTVVHPGFPTDMQAQFMALNAVAEGSCRVVETIFENRFMHVPELNRMGANITTEGNTAFVQGVERLSGAVVKATDLRASASLVIAGLAARGETVVEQIYHLDRGYENIEKKLGSVGAKIERVSG

SEQ ID NO: 65667 - protein, 324 aa, Neisseria meningitidis
MTEYPGIGSPLFYGVFFAAVLVMIALDMFSLKKNGSHKVGVKEALAWSGLWVAVSCLFAGWLYFELAGNLGYGAAVAKEKVLEFFTGYILEKSLAVDNIFVFLMIFGYFKVAPQFQHRVLLYGVLGALVLRTVMIFVGAALVRQFEWILYLFGAFLLYTGIHMMKPEGDEKEDLANSRLLNAVKKVVPVGTEFHGEKFFTVENGKKIATPLFLVLVMIELSDVVFAVDSIPAVFAVTTDPFIVLTSNIFAILGLRAMYFLLADVAERFIFLKYGLAFVLSFIGVKMLVMHWVHIPISVSLSVVFGALGASILTSLIYTKKQPDK

SEQ ID NO: 65668 - protein, 482 aa, Neisseria meningitidis
MKGDIGVIGLAVMGQNLILNMNDCGFKVVAYNRTIGKVDEFLNGAAKGTGIIGAYSLQDLVDKLAKPRKIMMMVRAGSVVDDFIEQLLPLLEEGDIIIDGGNANYSDTTRRTHYLAGKGILFVGAGVSGGEEGARRGPSIMPGGDKRAWEAVKPIFQAIAAKTPQGEPCCDWVGRDGAGHFVKMVHNGIEYGDMQLICEAYQFMKDGLGLSYDEMHRVFAEWNKTELDSYLIEITAAILGYKDEGGEPLVEKILDTAGQKGTGKWTGINALDLGIPLTLISEAVFARCVSSFKEQRVQTGKLFARTVTPVEGGKQEWVEALRQTLLASKIISYAQGFMLIREAGESYGWDLDYGNTALLWREGCIIRSAFLSNIRDAYENNPDLVFLGTDPYFKNILENCLPAWRKVVAKAVECGIPMPCMASAITFLDGYTTERLPANLLQAQRDYFGAHTYERTDKPRGEFFHTNWTGKGGDTASTTYDI

SEQ ID NO: 65669 - protein, 307 aa, Neisseria meningitidis
MLQRTLAKSISVTGVGLHSGERVALTLHPAPENSGISFRRTDLDGEMGEQIKLTPYLINDTRLSSTIVTDKGVRVGTIEHIMSALSAYGIDNALIELNAPEIPIMDGSSLPFIYLLQDAGVVDQKAQKRFLKILKPVEIKEAGKWVRFTPYDGFKVTLTIEFDHPVFNRSSPTFEIDFAGKSYIDEIARARTFGFMHEVEMMRAHNLGLGGNLNNAIVIDDTDVLNPEGLRYPDEFVRHKILDAIGDLYIVGHPIIGAFEGYKSGHAINNALLRAVLADETAYDRVEFADSDDLPDAFHELNIRTCG

SEQ ID NO: 65670 - protein, 113 aa, Neisseria meningitidis
AAGVASTATDIKGKYVEKVEVAKGVITAEMKSSGVNKEIQGKKLSLWAKRQAGSVKWFCGQPVTRDANATNDDVKAATDTAKKIDTKHLPSTCRDDSSVVCIETPPTAFYKNT

SEQ ID NO: 65671 - protein, 685 aa, Neisseria meningitidis
MTRKILVTSALPYANGSIHLGHMVEHIQTDVWVRFQKLRGNECHYCCADDTHGTPVMLAAQKQGIAPEDMIAKVREEHLADFTGFFIGYDNYYSTHSPENKQFSQDIYRALKANGKIESRVIEQLFDPEKQMFLPDRFVKGECPKCHAQDQYGDNCEVCGTTYSPTELINPYSAVSGAKPELRESEHFFFKLGECADFLKAWTSGNNPHDGKPHLQAEALNKMKEWLGEGEETTLSDWDISRDAPYFGFEIPDAPGKYFYVWLDAPVGYMASFKNLCDRIGVDFDEYFKADSQTEMYHFIGKDILYFHALFWPAMLHFSGHRAPTGVYAHGFLTVDGQKMSKSRGTFITAKSYLEQGLNPEWMRYYIAAKLNSKIEDIDLNLQDFISRVNSDLVGKYVNIAARASGFIAKRFEGRLKDVADSELLAKLTAQSEAIAECYESREYARALRDIMALADIVNEYVDANKPWELAKQEGQDARLHEVCSELINAFTMLTAYLAPVLPQTAANAAKFLNLEAITWANTRETLGKHAINKYEHLMQRVEQKQVDDLIEANKQSIQTTPAPAAEESQYEKVAEQASFDDFMKIDMRVAKVLNCEAVEGSTKLLKFDLDFGFEKRIIFSGIAASYPNPAELNGRMVIAVANFAPRKMAKFGVSEGMILSAATADGKLKLLDVDAGAQPGDKVG

SEQ ID NO: 65672 - protein, 612 aa, Neisseria meningitidis
MCGIVGAIRAHHNVVDFLTDGLKRLEYRGYDSSGIAVNTDGKIKRVRRVGRVQLMEDAAREKGISGGIGIGHTRWATHGGVTEPNAHPHISGGMIAVVHNGIIENFESERKRLEGLGYRFESQTDTEVIAHSINHEYAQNGGKLFEAVQEAVKRFHGAYAIAVIAQDKPDELVVARMGCPLLVALGDDETFIASDVSAVIAFTRRVAYLEDGDIALLASDGIKRLTDKSGLPAERKVKVSELSLASLELGPYSHFMQKEIHEQPRAIADTAEVFLDGGFIPENFGKNAKSVFESIRSVKILACGTSYYAALTAKYWLESIAKIPSDVEIASEYRYRSVIADPDQLVITISQSGETLDTMEALKYAKSLGHRHSLSICNVMESALPRESSLVLYTRAGAEIGVASTKAFTTQLVALFGLAVTLAKVRGLVSEEDEARYTEELRQLPGSVQHALNLEPQIAAWAQQFAKKTSALFLGRGIHYPIALEGALKLKEITYIHAEAYPAGELKHGPLALVDENMPVVVIAPNDSLLDKVKANMQEVGARGGELFVFADLDSNFNATEGVHVIRAPRHVGELSPVVHTIPVQLLSYHVALARGTDVDKPRNLAKSVTVE

SEQ ID NO: 65673 - protein, 279 aa, Neisseria meningitidis
MLVAFLIMLREGIEAALIVGIVAGFLKQSGHSKLMPKVWFGVVLASLMCLGLGYGIHSATGEIPQKQQEFVVGIIGLVAVAMLTYMILWMKKAARSMKQQLQDSVQAALNRGSGQGWALVGMAFLAVAREGLESVFFLLAVFKQSPTWQMPAGAVAGVLAAAVIGALIYQGGMRLNLAKFFRWTGAFLIVVAAGLLAGSLRALHEAGIWNALQDIVFDSSKYLHEDSPLGVLLGGFFGYTDHPTQGEALVWLLYLIPVMTWFLCGSRPSETLTRKEELK

SEQ ID NO: 65674 - protein, 421 aa, Neisseria meningitidis
MSKNQPAQPTRRTLFKTAIAAGAVGAIGGYLGGKKRGETAERTAESQHSPQAYPCYGEHQAGIVTPQQAFSIMCAFDVTAQSAKQLENLFRTLTARIEFLTQGGEYQDGDDKLPPAGSGILGKAFNPDGLTVTVGVGSSLFDGRFGLKDKKPIHLQEMRDFSNDKLQKSWCDGDLSLQICAFTPETCQAALRDIIKHTVQTAVIRWSIDGWQPKSEPGAMAARNLLGFRDGTGNPKVSDPKTADEVLWTGVAANSLDEPEWAKNGSYQAVRLIRHFVEFWDRTPLQEQTDIFGRRKYSGAPMDGKKEADQPDFAKDPEGNTTPKDSHIRLANPRDPEFLKKHRLFRRAYSYSRGLASSGQLDVGLVFVCYQANLADGFIFVQNLLNGEPLEEYISPFGGGYFFVLPGVEKGGFLGQGLLGV

SEQ ID NO: 65675 - protein, 456 aa, Neisseria meningitidis
MPQNTLNIVILAAGKGTRMYSKMPKVLHEIGGETMLGRVIDTAAALNPQNICVVVGHGKEQVLDTVKRDVVWVEQTEQLGTGHAVKTALPHLAAEGRTLVLYGDVPLIDVETLETLLEAAGNEVGLLTDVPADPSGLGRIIRDSSGSVTAIVEEKDADAAQKAVKEINTGILVLPNAKLEAWLNSLSSNNAQGEYYLTDLIAKAVADGIKIHPVQVRSSHLAAGVNNKLQLAELERIFQTEQAQELLKAGVTLRDPARFDLRGRLKHGQDVVIDVNCIFEGKIELGDNVEIGANCVIKNAKIGANSKIAPFSHLEGCEVGENNQIGPYARLRPQAKLADDVHVGNFVEIKNAAIGKGTKANHLTYIGDAEVGSKTNFGAGTIIANYDGVHKHKTVIGDEVRIGSNCVLVSPVKIGNKVTTGAGSTITRNVEDGKLALARSRQTIIDGWVRPEKNKQ

SEQ ID NO: 65676 - protein, 333 aa, Neisseria meningitidis
MKRKIWLLPLLAVSAYLQAQTEVRLAVHKSFSLPKGLIARFERANDAKVSIIQAGGANEMLNKLILSRANPIADAVYGLDNANIGKAREMGILAAAQPESAPVAVGLPSALAVDYGYVSINYDKKWFEGKKLPLPQTLQDLTRPEYKNLLVVPSPATSSPGLGFLMANISGLGEEGAFKWWAQMRQNGVKVAKGWSEAYYTDFSHNGGAYPLVVGYAASPAAEVYFSKGKYSEPPTGNLFLKGGVFRQVEGAAVLKGAKQPKLAAKLVQWLQSREVQQAVPSEMWVYPAVKNTRLPDVFRFAQAPTHTTAPAQRDIDANQRGWVSRWIRTVLK

SEQ ID NO: 65677 - protein, 282 aa, Neisseria meningitidis
MDFKQFDFLHLISASGWEHLAEKAWAFGLNLAAALLIFLVGKWAAKRIVAVMRAAMTRAQVDATLISFLCNVANIGLLILVIIAALGRLGVSTTSVTALIGGAGLAVALSLKDQLSNFAAGALIILFRPFKVGDFIRVGGFEGYVREIKMVQTSLRTTDNEEVVLPNSVVMGNSIVNRSTLPLCRAQVIVGVDYNCDLKVAKEAVLKAAVEHPLSVQNEERQAAAYITALGDNAIEITLWAWANEADRWTLQCDLNEQVVENLRKVNINIPFPQRDIHIINS

SEQ ID NO: 65678 - protein, 421 aa, Neisseria meningitidis
MFSFFRRKKKQETPALEEAQIQETAAKAESETAQVIENIKEDAESLAESVKGQVESAVETVSGAVEQVKEAVAEMLSEAEEAAEKAAEQVEAAKEAIAETVGEAVGQVQEAVATTEEHKLGWAARLKQGLTKSRDKMAKSLAGVFGGGQIDEDLYEELETVLITSDMGMEATEYLMKDVRDRVSLKGLKDGNELRGALKEALYDLIKPLEKPLVLPETKEPFVIMLAGINGAGKTTSIGKLAKYFQAQGKSVLLAAGDTFRAAAREQLQAWGERNNVTVISQTTGDSAAVCFDAVQAAKARGIDIVLADTAGRLPTQLHLMEEIKKVKRVLQKAMPDAPHEIIVVLDANIGQNAVNQVKAFDDALGLTGLIVTKLDGTAKGGILAALASDRPVPVRYIGVGEGIDDLRPFDARAFVDALLD

SEQ ID NO: 65679 - protein, 1371 aa, Neisseria meningitidis
MPSEHRPTPPAKKRRPLLKLSAALLSVLILAVCFLGWLAGTEAGLRFGLYQIPSWFGVNISSQNLKGTLLDGFDGDNWSIETEGADLKISRFRFAWKPSELMRRSLHITEISAGDIAIVTKPTPPKEERPPLSLPDSIDLPAAVYLDRFETGKISMGKAFDKQTVYLERLDASYRYDRKGHRLDLKAADTPWSSSSGSASVGLKKPFALDTAIYTKGGLEGKTIHSTARLSGSLKDVRAELAIDGGNIRLSGKSVIHPFAESLDKTLEEVLVKGFNINPSAFVPSLPDAGLNFDLTAIPSFSDGIALEGSLDLENTKAGFADRNGIPVRQVLGSFVIRQDGTVHIGNTSVALLGRGGIRLSGKIDTEKDILDLNIGINSVGAEDVLQTAFKGRLDGSIGIGGTTASPKISWQLGIGTARTDGSLAIASDPANGQRKLVLDTVNIAAGQGSLTAQGYLELFKDRLLKLDIRSRAFDPSRIDPQLPAGNINGSINLAGELAKEKFTGKMRFLPGTFNGVPIAGSADIVYESRHLPRAAVDLRLGRNIIKTDGGFGKKGDRLNLNITAPDLSRFGFGLAGSLNVRGHLSGDLDGGIRTFETDLSGAARNLHIGKAADIRSLDFTLKGSPDTSRPIRADIKGSRLSLSGGAEVVDTADLMLDGTGVQHRIRTHAAMTLDGKPFKFDLDASGGINRELTRWKGSIGILDIGGAFNLKLQNRMTLEAGAERVAASAANWQAMGGSLNLQHFSWDKKTGISAKGGAHGLHIAELHNFFKPPFEHNLVLNGDWDVAYGRNARGYLNISRQSGDAVLPGGQALGLNAFSLKTRFQNDRIGILLDGGARFGRINADLDIGNAFGGNMANAPLGGRITASLPDLGTLKPFLPAAAQNITGSLNAAAQIGGRVGSPSVNAAVNGSSNYGKINGNITVGQSRSFDTAPLGGRLNLTVADAEVFRNFLPVGQTVKGSLNAAVTLGGSIADPHLGGSINGDKLYYRNQTQGIILDNGSLRSHIAGRKWVIDSLKFRHEGTAELSGTVGMENSGPDVDIGAVFDKYRILSRPNRRLTVSGNTRLRYSPQKGISVTGMIKTDQGLFGSQKSSMPSVGDDVVVLGEVKKEAAAPLPVNMNLTLDLNDGIRFAGYGADVTIGGKLTLTAQSGGSVRGVGTVRVIKGRYKAYGQDLDITKGTVSFVGPLNDPNLNIRAERRLSPVGAGVEILGSLNSPRITLTANEPMSEKDKLSWLILNRAGSGSSGDNAALSAAAGALLAGQINDRIGLVDDLGFTSKRSRNAQTGELNPAEQVLTVGKQLTGKLYIGYEYSISSAEQSVKLIYRLTRAIQAVARIGSRSSGGELTYTIRFDRFSGSDKKDSAGNSKGK

SEQ ID NO: 65680 - protein, 239 aa, Neisseria meningitidis
MTQQIKYKRVLLKLSGESLMGSDPFGINHDTIVQTVGEIAEVVKMGVQVGIVVGGGNIFRGVSAQAGSMDRATADYMGMMATVMNALALKDAFETLGIKARVQSALSMQQIAETYARPKAIQYLEEGKVVIFAAGTGNPFFTTDTAAALRGAEMNCDVMLKATNVDGVYTADPKKDPSATRYETITFDEALLKNLKVMDATAFALCRERKLNIVVFGIAKEGSLKRVITGEDEGTLVHC

SEQ ID NO: 65681 - protein, 284 aa, Neisseria meningitidis
MAEITAKMVADLRAATGLGMMECKKALVEAEGNFDKAEEILRIKSGAKAGKLAGRTAAEGVLAYAINGNVGALVEVNCETDFVAKDAGFVEFANFVAKTAAEKKPASVEELSELVEAERKAIIAKLGENMSVRRFQVIDTANQLVAYIHGALATEGVLVEYKGSEDVARKIGMHIVAAKPQCVSEAEVDAETVEKERHIYTEQAIASGKPADIAAKMVEGRIRKFLAEITLNGQAFVMNPDQTVAQFSKENGTEVISFVRYKVGDGIEKKAVDYAAEVAAAAKV

SEQ ID NO: 65682 - protein, 242 aa, Neisseria meningitidis
MSQITMRQMIEAGVHFGHQTRFWNPKMAQYIFGARNKIHIVNLEKTLPMFQDAQEAVRRLVANKGTVLFVGTKRQARDIIREEATRAGMPFVDYRWLGGMLTNYKTVKQSIKRLEEKTAALENAAESGFSKKEILEMQRDVEKLERSLGGIKNMKGLPDAIFVIDTGYQKGTLVEAEKLGIPVIAVVDTNNSPDGVKYVIPGNDDSAKAIRLYCRGIADAVLEGKNQALQETVAAAQEAAAE

SEQ ID NO: 65683 - protein, 193 aa, Neisseria meningitidis
MRNEEKHALRRELRRARAQMGHQGRLAAGQTINRLLKRYIKRGRKIGVYWPMGKELRLDGFVRAAQKRGAKLYLPYIEPRSRRMWFTPYPESGMERERIRGRAKLNVPQFAGRKIRVHGLSVLLVPLVGIDREGYRLGQAGGYYDATLAAMKYRLQAKTVGVGFACQFVDRLPREPHDLLLDGFVSEAGILCF

SEQ ID NO: 65684 - protein, 488 aa, Neisseria meningitidis
MAEATDVVLVGGGIMSATLGVLLKELEPSWEITLIERLEDVALESSNAWNNAGTGHSALCELNYAPLGANGIIDPARALNIAEQFHVSRQFWATLVAEGKLEDNSFINAVPHMSLVMNEDHCSYLQKRYDAFKTQKLFENMEFSTDRNKISDWAPLMMRGRDENQPVAANYSAEGTDVDFGRLTRQMVKYLQGKGVKTEFNRHVEDIKRESDGAWVLKTADTRNPDGQLTLRTRFLFLGAGGGALTLLQKSGIPEGKGYGGFPVSGLFFRNSNPETAEQHNAKVYGQASVGAPPMSVPHLDTRNVDGKRHLMFGPYAGFRSNFLKQGSLMDLPLSIHMDNLYPMLRAGWANMPLTKYLLGELRKTKEERFASLLEYYPEANPDDWELITAGQRVQIIKKDSEKGGVLQFGTEIVAHADGSLAALLGASPGASTAVPLMIRLMHQCFPERTPSWEGRLKELVPGYGIKLNENPERADEIIAYTAKVLDI

SEQ ID NO: 65685 - protein, 291 aa, Neisseria meningitidis
MFQKHLQKASDSVVGGTLYVVATPIGNLADITLRALAVLQKADIICAEDTRVTAQLLSAYGIQGKLVSVREHNERQMADKIVGYLSDGMVVAQVSDAGTPAVCDPGAKLARRVREVGFKVVPVVGASAVMAALSVAGVAGSDFYFNGFVPPKSGERRKLFAKWVRVAFPVVMFETPHRIGATLADMAELFPERRLMLAREITKTFETFLSGTVGEIQTALAADGNQSRGEMVLVLYPAQDEKHEGLSESAQNIMKILTAELPTKQAAELAAKITGEGKKALYDLALSWKNK

SEQ ID NO: 65686 - protein, 384 aa, Neisseria meningitidis
MKFIDEAKIEVAAGKGGNGATSFRREKFVPRGGPDGGDGGKGGSVWAEADENTNTLVEYRFVKRYQAKNGEKGHGSDRYGAGADDIVLKMPVGTLIRDLDTGENVADLTYHGQRVCLAKGGKGGLGNIHFKSSVNRAPKQSTPGEEGEARSLQLELKVLADVGLLGMPNAGKSTLITAVSAARPKIANYPFTTLHPNLGVVRIDENHSFVMADIPGLIEGAAEGAGLGHRFLKHLSRTGLLLHVVDLAPFDETVNPAEEALAIINELRKYDEELYGKPRWLVLNKLDMLDEEEARARTAAFLEAVGWDYPKPDDRFQFDMETPRLFQISALTHQGTQELVHQINQYLIEKKRIEAEKAEAERAATNVEIAEQQPKTDTGVFKPE

SEQ ID NO: 65687 - protein, 699 aa, Neisseria meningitidis
MTTITEKRLTFAFPEDYYVTKYDEWEHYKIFQNSCNLRNKIDTNEKGKNGINQSVDDDNGSSGVDIIALHESTLWLIEIKDYYRLGLEPNAQSIDEKLSDLPYLIARKIRDSLAGLVSAKFKAEKQEEKDFSRLALDCNEIKIVLHIEMPSIRSKLYPSSSDLANLLKDKFKLSEFTKNFANCYAEPIFTNISHINNPQLRNVPWSVSTGTEQKLSSEQQRLIHNPMTTIYNTLTRQKEPFAPIDPKNVRMYVCGMTVYDYCHLGHARVMVVFDMIARWLRECGYPLTYVRNITDIDDKIIARAAENGETIGELTARFIQAMHEDADALGVLRPDIEPKATENIPQMIAMIETLIQNGKAYPAANGDVYYAVREFSAYGQLSGKSLDDLRAGERVEVDGFKRDPLDFVLWKAAKAGEPAWESPWGNGRPGWHIECSAMSENLFGNTFDIHGGGADLQFPHHENEIAQSVGATGHTCGHHHAQTHHGQSIASHVKYWLHNGFIRVDGEKMSKSLGNFFTIREVLKQYDPEVVRFFILRAHYRSPLNYSDAHLDDAKGALTRLYTTLKNTPAAEFDLSENVNDYTRRFYAAMNDDFGTVEAVAVLFELAGEVNKTNDAQLAGCLKALGGIIGLLQRDPTEFLQGGAASDGLSNEEIEDLIARRKQARADKNWAESDRIRDLLNEHKIILEDNAGGTTWRRG

SEQ ID NO: 65688 - protein, 371 aa, Neisseria meningitidis
MKVGFVGWRGMVGSVLMQRMKEENDFAHIPEAFFFTTSNVGGAAPDFGQAAKTLLDANDVAELAKMDIIVTCQGGDYTKSVFQPLRDSGWNGYWVDAASSLRMKDDAIIVLDPVNRNVIDNGLKNGVKNYIGGNCTVSLMLMALGGLFQNDLVEWATSMTYQAASGAGAKNMRELISGMGAIHAKVADELADPSSAILDIDRKVSDFLRSEDYPKANFGVPLAGSLIPWIDVDLGNGQSKEEWKGGVETNKILGRSDNPTVIDGLCVRIGSMRCHSQALTLKLKKDLPVSEIEAILAGANDWVKVIPNEKEASIHELTPAKVTGTLSVPVGRIRKLEMGGEYISAFTVGDQLLWGAAEPLRRVLRIVLGSL

SEQ ID NO: 65689 - protein, 168 aa, Neisseria meningitidis
MVDAWSVPDFESKICPPEALAARLALLPRPLVFTNGCFDILHRGHVTYLAQARSMGGALVLALNTDASVRRLGKGGDRPINPLENRAAVAAALESVDLVTWFDGDTPAALIEAVKPEILVKGGDWAADKIVGAAETLARGGQVFSIPFLHQTSTTKTLAKIRAAEGGK

SEQ ID NO: 65690 - protein, 262 aa, Neisseria meningitidis
MLTLYSETFPSRLLLGTAAYPTPEILKQSVRTARPAMITVSLRRAGCGGEAHGQGFWSLLQETGVPVLPNTAGCQSVQEAVTTAQMAREVFETDWIKLELIGDDDTLQPDVFQLVEAAEILIKDGFKVLPYCTEDLIACRRLLDAGCQALMPWAAPIGTGLGAVHAYALNVLRERLPDTPLIIDAGLGLPSQAAQVMEWGFDGVLLNTAVSRSGDPVNMARAFALAVESGRLAFEAGPVEARDKAQASTPTVGQPFWHSAEY

SEQ ID NO: 65691 - protein, 205 aa, Neisseria meningitidis
MTFLPLKSPLKFYAVVPTADWVERMVEAGADTVQLRCKALHGDELKREIARCVAACQGSHTQLFINDHWREAIEAGAYGVHLGQEDMDTADLAAIAAAGLRLGLSTHSVAELDRALSVHPSYIASGAIFPTTTKQMPTAPQGLDKLREYVKQAGGTPVVAIGGIDLNNARAVLATGVSSLAAVRAVTKAANPEAVVKAFQALWDG

SEQ ID NO: 65692 - protein, 273 aa, Neisseria meningitidis
MTFDKWLGLSKLPKNEARMLLQYVSEYTRVQLLTRGGEEMPDEVRQRADRLAQRRLNGEPVAYILGAREFYGRRFTVNPSVLIPRPETEHLVEAVLARLPENGRVWDLGTGSGAVAVTVALERPDAFVRASDISPPALETARKNAADLGARVEFAYGSWFDTDMPSEGKWDIIVSNPPYIENGDKHLSQGDLRFEPQIALTDFSDGLSCIRTLAQGAPDRLAEGGFLLLEHGFDQGAAVRGVLAENGFSGVETLPDLAGLDRVTLGKYMKHLK

SEQ ID NO: 65693 - protein, 256 aa, Neisseria meningitidis
MTTTEHDNDDAFLLRYSRHILLDEIGIEGQQKLSAAHILVVGCGGLGAAALPYLAASGIGTLTIADSDTVELHNLQRQVAFDEGDVGKLKTEALADRLRHINHTVDVRTINEKLDGCRLTGLVQAADIVLDCCDNYATRQAVNRACVQAKTPLVSGAAVRFEGQLAVYRPDLPDSPCYACLFDGGSASDGICSLFGVFSPLVGIIGSTQAAEALKILLDAGEPSHGRLAVYRALEGGWQYFDLPRNPECPVCGAER

SEQ ID NO: 65694 - protein, 329 aa, Neisseria meningitidis
MKITVIGAGSWGTALALHFSQHGNRVSLWTRNADQVRQMQEARENKRGLPGFSFPETLEVCADLADALKDSGLVLIVTSVAGLRSSAELLKQYGAGHLPVLAACKGFEQDTGLLTFQVLKEVLPDNKKIGVLSGPSFAQELAKQLPCAVVLASENQEWVEELVPQLNTSVMRLYGSTDVIGVAVGGAVKNVMAIATGLSDGLEYGLNARAALVTRGLAEITRLASAMGAQPKTMMGLAGIGDLILTCTGALSRNRRVGLGLAEGKELHQVLVEIGHVSEGVSTIEEVFNTACKYQIDMPITQTLLQLIRKEMTPQQVVERLMERSARFE

SEQ ID NO: 65695 - protein, 143 aa, Neisseria meningitidis
MKTFSAKPHEVKREWFVIDAQDKVLGRVAAEVASRLRGKHKPEYTPHVDTGDYIIVINADKLRVTGAKFEDKKYFRHSGFPGGIYERTFREMQEQFPGRALEQAVKGMLPKGPLGYAMIKKLKVYAGAEHAHAAQQPKVLELK

SEQ ID NO: 65696 - protein, 130 aa, Neisseria meningitidis
MNGKYYYGTGRRKSSVARVFLIKGTGQIIVNGRPVDEFFARETSRMVVRQPLVLTENAESFDIKVNVVGGGETGQSGAIRHGITRALIDFDAALKPALSQAGFVTRDAREVERKKPGLRKARRAKQFSKR

SEQ ID NO: 65697 - protein, 145 aa, Neisseria meningitidis
MIGLLIITHETIGEAYRKLAHHFFPGGLPENVRILGVQPTEDQDDIINNAIAALQEFPDNDGVLIMTDIFGATPCNAARRLVRENKSAILTGLNAPMMVKAVQYSPAAEDLAAFTECVREAAVKGIFAITSAPEDLVCRRSGDAV

SEQ ID NO: 65698 - protein, 89 aa, Neisseria meningitidis
MLKQSIEIINKLGLHARASNKFTQTASQFKSEVWVTKNDSRVNGKSIMGLMMLAAAKGTVIELETDGADEAEAMRALTDLINGYFGEGE

SEQ ID NO: 65699 - protein, 591 aa, Neisseria meningitidis
MSIVLHGVAAGKGIAVGCAHLIARGTEEVPQYDVAEADTDAEAERFDAAVKATRKELEQLRSAIPENAPTELGAFISLHLMLLTDVTLSREPVDILREQKINAEWALKQQSDKLAAQFDNMDDAYLRERKQDMLQVVRRIHNNLIGQGNELEVADNLFDETVLIANDLSPADTVLFKEQRIAAFVTDAGGPTGHTAILGRSLDIPSVVGLHNARKLITEGETVIVDGINGVLIIAPDESVLNEYRRRAREYRSHKRDLNKLKKTAAATADGVCIELVGNIESAEDVKPLHNLGADGIGLFRSEFLYLNRDTMPSEDEQYEVYSAIVKKMKGKSVTIRTVDLGVDKNPRWFGKNSTPNGSLNPALGMTGIRLCLAEPVMFRTQMRAILRAAAHGPVRMMWPMITSVSEVRQCLIHLDTAQRQLAERGDAFGKVGIGCMIEIPSAALTVGSILKLVDFISVGTNDLIQYILSVDRGDDSVSHLYQPGHPAVLKMLQHVIRTANRMDKDVSVCGEMAGDTAFTRVLLGMGLRRFSMNPNNILPVKNIILHSNVGQLESDIVKVIRCEDEEKSEKLIKQMNSVSVEEEADFKGRK

SEQ ID NO: 65700 - protein, 105 aa, Neisseria meningitidis
MVVRGGIYLVSLDPTVGSEIKKTRPCVVVSPPEIHNYLKTVLIVPMTSGSRPAPFRVNVRFQDKDGLLLPEQIRAVDKAGLVKHLGNLDNSTAEKLFAVLQEMFA

SEQ ID NO: 65701 - protein, 265 aa, Neisseria meningitidis
MDTAQKQRWAITLSYDGSRFYGWQKQADGVPTVQAALETALAQIAGEAVSTTVAGRTDTGVHATAQVVHFDTTAARPQQAWVRGVNAHLPEGIAVLHARQVAPEFHARFDAYGRHYRYLLESAPVRSPLLKNRAGWTHLKLDIEPMRRAAAYLIGEQDFSSFRAAECQAKSPVKTIYRADLTQSAGLVRLDLHGNAFLHHMVRNIMGALVYVGSGRLSVEGFAALIQERSRLKAPPTFMPDGLYLTGVDYPEAYGIIRPQIPEWL

SEQ ID NO: 65702 - protein, 247 aa, Neisseria meningitidis
MLIIRNLIYWLILCSTLIFLFPFMLLASPFRDGAHKMARVWVKILNLSLKHIVGLKYRIIGAENIPDRPAVICAKHQSGWETLALQDIFPPQVYVAKRELFKIPFFGWGLKLVKTIGIDRNNRREANEQLIKQGLARKNEGYWITIFPEGTRLAPGKRGKYKLGGARMAKMFEMDIVPVALNSGEFWPKNSFLKYPGEITVVICPTIPHASGSEAELMGKCEHLIETQQPLISGAGPFAAKMPSETA

SEQ ID NO: 65703 - protein, 156 aa, Neisseria meningitidis
MNITVLAVGTKMPRWVDEAVAEYAKRFGRDVAYALKEIKPEKRGAGVNAAQGMAAEEKRILEAIPQGAFLVVLDERGKAPTSVELAEHLKSWRQNGEHVCFVIGGADGMTDRLKQQARMMMRLSSLTLPHGMVRVFLTEQLYRAVSILHNHPYHRE

SEQ ID NO: 65704 - protein, 548 aa, Neisseria meningitidis
MSEEKLKMSFEPTVIEHLGVKMYSHTVPAIAELIANAYDACATEVEVRLFDKPEHKIVIKDNGIGMSFDEINDFYLRIGRNRREEKQASPCGRIPTGKKGLGKLALFGLGNKIEISTIQGNERVTFTLDYAEIRRSKGIYQPEFRKESVESNIESGTTITLTELTKKQGYPLDNYVEHLSRLFDFPAQDFKIKVSLNGSEPKIIDGNLKYDLVTPQFEWEYQDLATNISSLSSKFEQYEYSGLIQGKFITTEKPLKNNMKGITLFANGRMVNMPEFFTDSESSHFYSYLTGWLNVDFIDNDDEDLIATDRTSLDWKHSKTSKLRVFLGEIVRAIGQDWRKRRKKEKDDEVKGESGVDIEDWKNKLPEKEREPVEVILNRLEDSELTNKEQAEVISALHSIIPEYPYYHWRHLHQDLHTACNDFYNEKKDYLSAAIEAVKVFEDKVQKQTGLHSIDGRELIEQAFGSKNSILLLTNNKTKAEQNLEDGLEQLACGTWTGFRNPVQHELRANLSPSIFNDKDALDLISLVSYLLRKVEQTKKRSKVVSSK

SEQ ID NO: 65705 - protein, 328 aa, Neisseria meningitidis
MHPPSVLFSRRPQPYSRHPNNQSEKIMNQTAINRADVRTRFIFDDMPVRGLHVRLENVWQHIVKQKNYPAAIRRALGELLAAGVLLSGNLKNEGTLIVQVQGQGRLKMLVAEATSDRTVRATARWDETAEIADDESLGDLLGEGGVFVLTLQPKDGEPWQGVVPLEGDGIAQMLVNYMKRSEQLDTHIVLSASDEAAGGLLVQRLPEEVLDEEAWEHVSTLARTLTAEELAGLDAQHVLYRLFHETPPRVFEPETFEFSCTCSRGKVSDMLLMLGGEEVGGVVVEQGSIEVDCDFCHSKYVFDETDVNALFGEDVVGVAKGLPRHTVQ

SEQ ID NO: 65706 - protein, 484 aa, Neisseria meningitidis
MSIEPTPPNLENDGIENDVERVSADFDRVHSLCEILEPAFEQIENGTPLEDAPLRDKLTELTVLLSELHPADVAAVLESLPPRERNIVWILVKPEDDGEVLLEVSDAVRETLIESMDKDELLAAVDDLDADELAELADDLPHQVVYEALQTRDEEERAQVKAAMSYEDNQVGAIMDFELVSIRADVACEVVLRYLRRFDSLPDHTDKIFVVDENDVLQGVLPIRKLLVADPEDLVENVMAKDVVRFRAEDDVEETAQAFERYDLVTAPVVDENKKLIGRVTVDEMVDVIREESEADMLNMAGLQEEEDLFAPVLDSVKNRWMWLAVNLCTAFLASRVIGAFEGSIEKIVALAALMPIVAGIGGNSGNQTITMIVRAMAMGQLTDMQAGRLLKKEVGVALVNGIIWGTVMGAVSWLLYGSLGIGLVMIAAMTLNLLLAATVGVLIPVVMEKFGRDPALGSSVLITAVTDSGGFLIFLGLATLFLL

SEQ ID NO: 65707 - protein, 1320 aa, Neisseria meningitidis
MSVVLPLRGVTALSDFRVEKLLQKAAALGLPEVKLSSEFWYFVGSEKALDAATVEKLQALLAAQSVEQTPKAREGLHLFLVTPRLGTISPWASKATNIAENCGLAGIERIERGMAVWLEGALTDEQQQQWAALLHDRMTESVLPDFQTASKLFHHLESETFSTVDVLGGGKEALVKANTEMGLALSADEIDYLVENYQALQRNPSDVELMMFAQANSEHCRHKIFNADFILNGEKQPKSLFGMIRDTHNAHPEGTVVAYKDNSSVIEGAKVERFYPNAAENQGYRFHEEDTHIIMKVETHNHPTAIAPFAGAATGAGGEIRDEGATGKGSRPKAGLTGFTVSNLNIPGLKQPWEQDYGKPEHISSPLDIMIEGPIGGAAFNNEFGRPNLLGYFRTFEEKFDGQVRGYHKPIMIAGGLGSIQAQQTHKDEIPEGALLIQLGGPGMLIGLGGGAASSMDTGTNDASLDFNSVQRGNPEIERRAQEVIDRCWQLGDKNPIISIHDVGAGGLSNAFPELVNDAGRGAVFKLREVPLEEHGLNPLQIWCNESQERYVLSILEKDLDIFRSICERERCPFAVVGTATDDGHLKVRDDLFSNNPVDLPLNVLLGKPPKTTRTDKTVAPSKKPFHAGDIDITEAAYRVLRLPAVAAKNFLITIGDRSVGGMTHRDQMVGKYQTPVADCAVTMMGFNTYRGEAMSMGEKPTVALFDAPASGRMCVGEAITNIAAANIGDIGNIKLSANWMAACGNEGEDEKLYRTVEAVSKACQALDLSIPVGKDSLSMKTVWQDGEEKKSVVSPLSLIISAFAPVQDVRKTVTPELKNVEDSVLLFVDLGFGKARMGGSAFGQVYNNMSGDAPDLDDTSRLKAFYNVIQQLVAEDKLLAYHDRSDGGLFAVLVEMAFAGRCGLDIDLNLLLAQTFITNHTALSQSLRTEEVKALAEWQETIARTLFNEELGAVIQVRKQDVADIINLFYQQQLHHNVFEIGTLTDENTLIIRDGQTHLISDNLIKLQQTWQETSHQIQRLRDNPACADSEFALIGDNGRSALFANLKFDVNEDIAAPFINSGAKPKIAILREQGVNGQIEMAAAFTRAGFDAYDVHMSDLMAGRVHLADFKMLAACGGFSYGDVLGAGKGWAKSILFHPALRDQFAAFFTDPNTLTLGVCNGCQMVSNLAEIIPGTAGWPKFKRNLSEQFEARLSMVHVPKSASLILNEMQGSSLPVVVSHGEGRADFALHGGNISADLGIALQYVDGQNQITQTYPLNPNGSPQGIAGVTNADGRVTIMMPHPERVYRAAQMSWKPEDWTELSGWYRLFAGARKALG

SEQ ID NO: 65708 - protein, 252 aa, Neisseria meningitidis
MITIRNVSYRIGTHPILDNISLDIPEGGITALIGPNGAGKSTLFSFMARLRPLESGSIAYRGKNLAGTPTAELARTLSILTQENSIMSRITVRDLLMFGRYPYHQGRPTAECRRIVNGAIEEFHLQDLSDRYLTELSGGQRQRAMIAMVFCQSTDYVLLDEPLNNLDMYHARSLMQILQKLTREHKRTTVAVLHDINQAAAYADHVVAMKNGKAVLTGTPEEVFTVHNIKELFDMDVDVLDYEGKKLIVHHI

SEQ ID NO: 65709 - protein, 322 aa, Neisseria meningitidis
MTAKPFSLNLTNLLLLAVLFAVSLSVGVADFRWSDVFSLSDSQQVMFISRLPRTFAIVLTGASMAVAGMIMQILMRNRFVEPSMAGAGQSAALGLLLMSLLLPAAPLPVKMSVAAVAALIGMLVFMMLIRRLPPTAQLMVPLVGIIFGGVVEAVATFIAYENEMLQMLGVWQQGDFSGVLLGRYELLWATGILALFAYLIADQLTILGLGETVSVNLGLNRTAILWSGLIIVALITSLVIVTVGNIPFIGLVVPNIISRLIGDRLRQSLPAVALLGASLVLLCDIIGRVIVFPFEIPVSTVFGVLGTALFLWLLLRKPAHAV

SEQ ID NO: 65710 - protein, 448 aa, Neisseria meningitidis
MSDNVPTIAAVATAPGRGGVGVIRISGKNLLPMAQALCGKTPKPRVATYADFTDEDGQAIDSGLLLFFAAPASFTGEDVIELQGHGGPVVMDMLLNRCLELGARLAEPGEFTKRAFLNDKLDLAQAEGVADLIDASSRSAARLALRSLKGDFSRRIHGLVEDLITLRMLVEATLDFPEEDIDFLEAADARGKLDGLRRAVDDVLANAQQGAILREGLNVVLVGAPNVGKSSLLNALAGDEVAIVTDIAGTTRDAVRERILIDGVPVHIVDTAGLRETDDVVERIGIERSRKAVSEADVALVLVDPREGLNEKTRAILDALPLELKRIEIHSKSDLHAHAAGGFGTGAETVIALSAKTGDGLDALKRTLLREAGWQGESEGLFLARTRHVNALKAAQEELSLAALCGNHQIELFAEHLRLAQVACGEITGEFTADDLLGVIFSRFCIGK

SEQ ID NO: 65711 - protein, 1449 aa, Neisseria meningitidis
MKTTDKRTTETHRKAPKTGRIRFSPAYLAICLSFGILPQAWAGHTYFGINYQYYRDFAENKGKFAVGAKDIEVYNKKGELVGKSMTKAPMIDFSVVSRNGVAALVGDQYIVSVAHNGGYNNVDFGAEGRNPDQHRFSYQIVKRNNYKPDNSHPYNGDYHMPRLHKFVTDAEPVEMTSDMRGNTYSDKEKYPERVRIGSGHHYWRYDDDKHGDLSYSGAWLIGGNTHMQGWGNNGVVSLSGDVRHANDYGPMPIAGAAGDSGSPMFIYDKTNNKWLLNGVLQTGYPYSGRENGFQLIRKDWFYDDIYRGDTHTVFFEPRSNGHFSFTSNNNGTGTVTETNEKVSNPKLKVQTVRLFDESLNETDKEPVYAAGGVNQYRPRLNNGENLSFIDYGNGKLILSNNINQGAGGLYFEGDFTVSPENNETWQGAGVHISEDSTVTWKVNGVANDRLSKIGKGTLHVQAKGENQGSISVGDGTVILDQQADDKGKKQAFSEIGLVSGRGTVQLNADNQFNPDKLYFGFRGGRLDLNGHSLSFHRIQNTDEGAMIVNHNATTTSTVTITGNESITQPSGKNINRLNYSKEIAYNGWFGEKDTTKTNGRLNLVYQPAAEDRTLLLSGGTNLNGNITQTNGKLFFSGRPTPHAYNHLGSGWSKMEGIPQGEIVWDNDWINRTFKAENFHIQGGQAVISRNVAKVEGDWHLSNHAQAVFGVAPHQSHTICTRSDWTGLTNCVEKTITDDKVIASLTKTDISGNVSLADHAHLNLTGLATLNGNLSANGDTRYTVSHNATQNGNLSLVGNAQATFNQATLNGNTSASGNASFNLSNNAAQNGSLTLSDNAKANVSHSALNGNVSLADKAVFHFENSRFTGQLSGSKDTALHLKDSEWTLPSGTELGNLNLDNATITLNSAYRHDAAGAQTGSVSDTPRRRSRRSLLSVTPPTSVESRFNTLTVNGKLNGQGTFRFMSELFGYRSDKLKLAESSEGTYTLAVNNTGNEPVSLDQLTVVEGKDNKPLSENLNFTLQNEHVDAGAWRYQLIRKDGEFRLHNPVKEQELSDKLGKAEAKKQAEKDNAQSLDALIAAGRDAAEKTESVAEPARQAGGENVGIMQAEEEKKRVQADKDSALAKQREAETRPATTAFPRARRARRDLPQPQPQPQPQPQPQRDLISRYANSGLSEFSATLNSVFAVQDELDRVFAEDRRNAVWTSGIRDTKHYRSQDFRAYRQQTDLRQIGMQKNLGSGRVGILFSHNRTENTFDDGIGNSARLAHGAVFGQYGIGRFDIGISTGAGFSSGSLSDGIGGKIRRRVLHYGIQARYRAGFGGFGIEPYIGATRYFVQKADYRYENVNIATPGLAFNRYRAGIKADYSFKPAQHISITPYLSLSYTDAASGKVRTRVNTAVLAQDFGKTRSAEWGVNAEIKGFTLSLHAAAAKGPQLEAQHSAGIKLGYRW

SEQ ID NO: 65712 - protein, 370 aa, Neisseria meningitidis
MSTFFQQTAQAMIAKHIDRFPLLKLDQVIDWQPIEQYLNRQKNRYLRDHRGRPAYPLLSMFKAVLLGQWHSLSDPELEHSLITRIDFNLFCRFDELSIPDYSTLCRYRNWLAQDDTLSELLKLINRQLTEKGLKIEKASAAVVDATIIQTAGSEQRQAIEVDEEGQVSGQTTLSKDKNARWTKKNSLYKLGYKQHTRTDAEGYIEKLYITPTNAHECTHLSPLLEGLPKGTTVYADKGYDSKENRQHLKEHRLQNGIMRKACRNRPLTETQTKRNRYLSKTRYSGLNLNQDKATKPQTVQIVRQGEATPYWFKFNPLYVVEQSFGTLHRKFRYARAAYFGLSKVSAQSHLKAMCLNLLKAANRLSAPAAA

SEQ ID NO: 65713 - protein, 105 aa, Neisseria meningitidis
MSTFFRQTAQAMIAKHIDRFPLLKLDRVIDWQPIEQYLNRQKNRYLRDHRGRPAYPLLSMFKAVLLGQWHSLSDPELEHSSITRIDFNLFCRFDELSIPDYSIVD

SEQ ID NO: 65714 - protein, 938 aa, Neisseria meningitidis
MSNRPTLLLVDGSSYLYRAYHAMGQNLTAPDGAPTGALYGVLNMLRRLRSEYPHDYCAVVFDAKGKNFRHQMFEEYKATRPPMPDDLRPQAEALPDLVRLTGWPVLVIGQVEADDVIGTLAKQGAEHGLRVIVSTGDKDMAQLVDERVTLVNTMSSETLDIEGVKAKFGVRPDQIRDYLALMGDKVDNVPGVEKCGPKTAVKWLEAYGSLQGVIEHASEIKGKVGENLQAALPQLPLSYDLVTIKTDVDLHAELSDGIESLRCTTPKWAQLVVDFKRWGFRTWLKEAESNMNTGSTDDLFGSDSIGEQAALNAEMPFEKQAEKATAPEKLDYQAVTTEAQFAALLDKLSRADTIGIDTETTSLDAMNASLVGISIAFQAGEAVYIPVGHSLTAAPEQLDLQDVLGRLKPHLENPALKKIGQNLKYDQHVFANYGIALNGIAGDAMLASYIIESHLGHGLDELSERWLGLETITYESLCGKGAKQISFADVAIGQATEYAAQDADFALRLEAHLRAQMDAKQLEMYEKMELPVAQVLFEMERNGVQIDRAELARQSAELGAELMKLEQEAYAAAGQPFNLNSPKQLQEILFDKMGIPTKGLKKTAKGGISTNEAVLEQLAPDYPLPKIILQNRSLAKLKSTYTDKLPEMISPKDGRVHTTYAQAVAITGRLASNNPNLQNIPIRTAEGRRVRRAFTAPQGSVIVSADYSQIELRIMAHLSGDKTLIAAFQNGEDVHRRTAAEVFGIAPENVSSEQRRYAKTINFGLIYGMGQYGLAKSLGIDNISAKNFIDRYFARYPGVAEYMQRTKEQAAAQGFVETLFGRRLYLPDIRNKNTNARAGAERAAINAPMQGTASDLIKRAMIDVSRWLSECEASPWDELLQSKLIMQVHDELVLEVVETELDFVKEKLPQIMAKVDGGLLDVPLVAEVGVGENWEEAH

SEQ ID NO: 65715 - protein, 544 aa, Neisseria meningitidis
MAAKDVQFGNEVRQKMVNGVNILANAVRVTLGPKGRNVVVDRAFGGPHITKDGVTVAKEIELKDKFENMGAQMVKEVASKTNDVAGDGTTTATVLAQSIVAEGMKYVTAGMNPTDLKRGIDKAVAALVEELKNIAKPCDTSKEIAQVGSISANSDEQVGAIIAEAMEKVGKEGVITVEDGKSLENELDVVEGMQFDRGYLSPYFINDAEKQIAGLDNPFVLLFDKKISNIRDLLPVLEQVAKASRPLLIIAEDVEGEALATLVVNNIRGILKTVAVKAPGFGDRRKAMLQDIAILTGGTVISEEVGLSLEKATLDDLGQAKRIEIGKENTTIIDGFGDAAQIEARVAEIRQQIETATSDYDKEKLQERVAKLAGGVAVIKVGAATEVEMKEKKDRVEDALHATRAAVEEGVVAGGGVALLRARAALENLHTGNADQDAGVQIVLRAVESPLRQIVANAGGEPSVVVNKVLEGKGNYGYNAGSGEYGDMIEMGVLDPAKVTRSALQHAASIAGLMLTTDCMIAEIPEDKPAMPDMGGMGGMGGMM

SEQ ID NO: 65716 - protein, 480 aa, Neisseria meningitidis
MKQLAMYINGRFENDFNGEWRNVLNPSTEEAIAREPKGGKADVDRAVAAARAAQPAWERLPAVERGAYLRKIAQGIRERADELTDTIVAEGGKTKDLARVEVMFTADYLDYQAEWARRYEGEIIQSDRPRENILLFKRPLGVIAGILPWNFPFFLIARKMGPALVTGNTIVVKPSSVTPINCHIFAEIVDAVGLPAGVFNVVNGPGAEIGNALSAHPQVDMVSLTGSVEAGRQVMEAASANITKVSLELGGKAPAIVLKDADLDLAVKSILASRVGNTGQICNCAERVYVHSSLKDAFIEKMTAAMKGVRYGNPAEAEAGALEMGPLIEERAVKAVAEKVERAVKQGAKLVCGGKRAEGRGYFFEPTLLTDTDNSMDIMKEETFGPVLPVSAFDTLDQVIALANDCEFGLTSSVYTTNLNEAFYVTRRLQFGETYINRENFEAMQGFHAGWKKSGIGGADGKHGLEEYLQTQVVYLETDI

SEQ ID NO: 65717 - protein, 279 aa, Neisseria meningitidis
MKKTAYAFLLLIGFASAPAFAETRPADPYEGYNRAVFKFNDQADRYIFAPAARGYRKVAPKPVRAGVSNFFNNLCDVVSFGSNILRLDIKRASEDLVRVGINTTFGLGGLIDIAGAGGIPDNKNTLGDTFASWGWKNSNYFVLPVLGPSTVRDALGTGITSVYSPKNIVFRTPVGRWGTTAVSAVSTREGLLDLTDSLDEAAIDKYSYTRDLYMKVRARQTGATPAEGTEDNIDIDELVESAETGAAETAVQEDSVSETQAEAAGEAETQPGTQPGTQP

SEQ ID NO: 65718 - protein, 127 aa, Neisseria meningitidis
MKLTVRNYHLDGYGHVNNARYLEFFEEARWAFFEERGLLHELAGLILIVARIDIRYSRPAVEGDVLQFSCRLKTPGTRRIVLTQTITLPNGKTAAEADITLMPVHAATQRTVSLPATLARALEALSE

SEQ ID NO: 65719 - protein, 170 aa, Neisseria meningitidis
MMGSKFFFLLLRFAGSVLPPSHMRGIVGRRVRGFLARRVSPHIGRGVNIERGAYVFPDTVLGDGSGIGANCEICRGPVVGKNVMMEPECLLYSTNHKFDRENKRFEGYTEIRPITLEDDVWPGRRVIVMAGVTVGRGSVVGAGAVVTKDIPPYSLAAGNPAVVKKNLPEG

SEQ ID NO: 65720 - protein, 213 aa, Neisseria meningitidis
MRCFMIQNVVTSIILYSGTAVDLLIILMLFFAKRKSRKDIINIYLGQFLGSVSLILLSLLFAFVLDYIPSKEILGLLGLIPIFLGLKVLLLGDSDGEAIAKEGLRKDNKNLIFLVAMITFASCGADNIGVFVPYFTTLNLVNLIVALLTFLVMIYLLVFSAQKLAQVPSVGETLEKYSRWFVAVVYLGLGVYILIENNSFDMLWTVSGQEKIL

SEQ ID NO: 65721 - protein, 201 aa, Neisseria meningitidis
MMTLYSGITCPFSHRCRFVLYEKGMDFEIKDVDIYNKPEDLAVMNPYNQVPVLVERDLVLHESNIINEYIDERFPHPQLMPGDPVMRGRGRLVLYRMEKELFNHVQVLENPAATNKEQAKAREAIGNGLTMLAPSFSKSKYILGEDFSMIDVALAPLLWRLGHYDVKLGKSAAPLLKYAERIFQREAFIEALTPAEKAMRK

SEQ ID NO: 65722 - protein, 148 aa, Neisseria meningitidis
MSLKIRLTEDMKTAMRAKDQVSLGTIRLINAAVKQFEVDERTEADDAKITAILTKMVKQRKDSVKIYTEAGRQDLADKENAEIEVLHRYLPQMLSAGEIRTAVDAAVAETGAAGMADMGKVMGVLKTRLAGKADMGEVNKILKAVLTA

SEQ ID NO: 65723 - protein, 70 aa, Neisseria meningitidis
MPAIRVKENEPFEVAMRRFKRAVEKTGLLTELRAREAYEKPTTERKRKKAAAVKRLQKRLRSQQLPPKMY

SEQ ID NO: 65724 - protein, 228 aa, Neisseria meningitidis
MADLTFQQAVSNIIGMKGEIVRALGETFVMVGLSTTFAVIFGTLLGVLLFVTSSRQLHYNKLVNFLLDNLVNLMRAFPFVILMIAMIPATRAIVGSTIGPVAASLVLSVSGLFYFARLVEQNLREVPKGVIEAAAAMGAPPVAIIRKVLLNEARAGMVSSITVLAIGLLSYSAAAGMIGGGGLGDLAIRYGYYRYQTEVIVFIVALLVLLVILIQSTGNALARKLDKR

SEQ ID NO: 65725 - protein, 287 aa, Neisseria meningitidis
MKTFFKTLSAAALALILAACGGQKDSAPAASASAAADNGAAKKEIVFGTTVGDFGDMVKEQIQPELEKKGYTVKLVEFTDYVRPNLALAEGELDINVFQHKPYLDDFKKEHNLDITEVFQVPTAPLGLYPGKLKSLEEVKDGSTVSAPNDPSNFARVLVMLDELGWIKLKDGINPLTASKADIAENLKNIKIVELEAAQLPRSRADVDFAVVNGNYAISSGMKLTEALFQEPSFAYVNWSAVKTADKDSQWLKDVTEAYNSDAFKAYAHKRFEGYKSPAAWNEGAAK

SEQ ID NO: 65726 - protein, 288 aa, Neisseria meningitidis
MAGETITAADYIKHHLQSLTSLSDVTQGQGLKNIADFSFINLDAVFFAVLLGVIGSFLLWRGAKKATAGVPGRFQAAVEILFEFVDDMCKSIIHNEKSRKAVAPLGLTLFVWIFLMNAMDMLPVDLLPMVWQGITGNHHALLRVVPTADLNTTLALAVGVLLICIYYNIKIKGLGGWFHELFSAPFGAKLAPANFLLNLVEFLSKTVSHGMRLFGNMYAGELVFLLIALLGGAWAASGSVEVMDPILFVFHIIAGLAWAIFHILVITLQAFIFMALAFVYIGQAHDAH

SEQ ID NO: 65727 - protein, 78 aa, Neisseria meningitidis; identical to SEQ ID NO: 65545

SEQ ID NO: 65728 - protein, 156 aa, Neisseria meningitidis
MNINATLFAQIIVFFGLVWFTMKFVWPPIAKALDERAAKVAEGLAAAERGKSDFEQAEKKVAELLAEGRNQVSEMVANAEKRAAKIVEEAKEQASSEAARIAAQAKADVEQELFRARESLREQVAVLAVKGAESILRSEVDASKHAKLLDTLKQEL

SEQ ID NO: 65729 - protein, 177 aa, Neisseria meningitidis
MAEFATIARPYAKALFGLAQEKSQIESWLGGLEKLAAVVQEGKVASLIDRPETNASEKADILIDLVGLKDKELKNFVIVLAGQKRLSILPEVYAQYQDLTLSFNHIKSAVIYSAYPLTDKQVGELAQMLNKRFDSELKISVEIEPELIGGIKVEVGDQVLDLSVQGKLSALYTTMTN

SEQ ID NO: 65730 - protein, 515 aa, Neisseria meningitidis
MQLNPAEISDLIKAKIENLSVNAEVRTRGTVISVTDGIVRIHGLSDAMQGEMLEFPGNTFGLAMNLERDSVGAVVLGEHEHIKEGDTVTCTGRILEVPVGRELVGRVVDALGRPIDGKGPINTTLTAPIEKIAPGVIARKSVDQPMQTGLKAIDSMVPVGRGQRELIIGDRQTGKTAVALDAIVNQKGTGVICIYVAIGQKASSIANVVRKLEEHGAMEHTIVVAATASEAAALQYIAPYSGCTMGEFFRDRGEDALIVYDDLSKQAVAYRQISLLLRRPPGREAYPGDVFYLHSRLLERAARVNEHEVEKLTNGEVKGKTGSLTALPIIETQAGDVSAFVPTNVISITDGQIFLETDLFNAGIRPAINAGISVSRVGGAAQTKVIKKLGGGIRLALAQYRELAAFSQFASDLDEATRKQLEHGEVVTELMKQKQFSTLNTAEMALTLWAINNGSYSDVPVAKALAFESEFLSFVRTQHPEVLEAVNASGAMSDESEKTLEAAMKSFKSSYAYQA

SEQ ID NO: 65731 - protein, 301 aa, Neisseria meningitidis
MLTFQQIIFKLQTFWADKGCTVIQPFDMEVGAGTSHPATCLRALGPEPWFAAYVQPSRRPKDGRYGDNPNRLQHYYQFQVALKPAPANIQDLYLDSLRELGIDPKVHDIRFVEDDWENPTLGAWGLGWEVWLNGMEVTQFTYFQQVGGIDCTPVLGEITYGIERLAMYLQGVENVYDLVWAKTLDGNTVTYGDVYHQNEVEQSTYNFEYSDADWLLRQFNDYEAQAKRLLAEENAALALPAYELVLKAGHTFNLLDARGAISVTERATYIGRIRALSRAVAQKYVESREKLGFPLMKANAA

SEQ ID NO: 65732 - protein, 687 aa, Neisseria meningitidis
MMTQTLLIELLTEELPPKALNNLGNHFAAAVAEGLEKAQLVDGAAEYTAYASPRRLAVQVKNVKAVQADQKIVKKGPAVANAVKDGAPTKALEGFARGAGAKIEDLTIVHDGKQDVYAYEYVQTGKLLGELLEDIINAAVKKLPIPKVMRWGSSTFTFVRPVHGLIVLHGGDIVNVSVLGLQSGNKTLGHRFLSDGEITIENADSYAEQMREQGKVVASFAERKAAIQTALEGQARRLNAAVAADEALLDEVTALVEWPVVLEAGFEEHFLAVPQECLILTMQQNQKYFPLLDQNGKLMNRFLLVSNLQTEDPSHIIQGNERVLRARLSDAEFFYKQDQKATLESRLPKLSGVVYHNKIGSQAERIERLQSIAAHIAKALGADAAAAERAARLAKADLVTEMVGEFPELQGTMGKYYARLDGETEEIAEAVEQHYQPRFAGDKLPESKIATAVALADKLETLVGIWGIGLIPTSDKDPYALRRSALGILRMLMQYGLDVNELIQTAFDSFPKGLLNEKTPSETADFMQARLAVLLQNDYPQDIVAAVLAKQPRRLDDVVAKLQAVASFKQLPEAAALAAANKRVQNLLKKADAELGVVNESLLQQDEEKALFAAAQGLQPKIAAAVAEGNFQTALSELASVKPQVDAFFDGVMVMAEDAAVKQNRLNLLNRLAEQMNAVADIALLGE

SEQ ID NO: 65733 - protein, 241 aa, Neisseria meningitidis
MPRFYLPENLSVGQTVALPDNIVRHLNVLRVRPNENITLFDGKGKAHAAQLTVLEKRRAEAEILHEDTTDNESPLNITLIQSISSGDRMDFTLQKSVELGVTAIQPVISERCIVRLDGERAAKRLARWQEIVISACEQSGRNTVPPVLPIIGYREALDKMPSESTKLIMSINRARKLGDIRHPSGAIVFMVGPEGGWTEQEEQQAFDAGFQTVTLGKRILRTETVALAALAAMQTLWGDFA

SEQ ID NO: 65734 - protein, 248 aa, Neisseria meningitidis
MSTQDLSGKIALVTGASRGIGAAIADTLAAAGAKVIGTATSESGAAAISERLAQWGGEGRALDSAEPETIESLIADIEKAFGKLDILVNNAGITRDNLLMRMKEEEWDDIMQVNLKSVFRASKAVLRGMMKQRSGRIINITSVVGVMGNAGQTNYAAAKAGLIGFAKSMAREVGSRGITVNCVAPGFIDTDMTRALPEETRQAFTAQTALGRFGDAQDIADAVLFLASDQAKYITGQTLHVNGGMLMP

SEQ ID NO: 65735 - protein, 521 aa, Neisseria meningitidis
MTQDKILILDFGSQVTQLIARRVREAHVYCELHSFDMPLDEIKAFNPKGIILSGGPNSVYESDYQADTGIFDLGIPILGICYGMQFMAHHLGGEVQPGNQREFGYAQVKTIDSELTRGIQDDTPNTLDVWMSHGDKVSKLPTGFTVIGDTPSCPIAMMENAEKQFYGIQFHPEVTHTKQGRALLNRFVLDICGAQPGWTMPNYIEEAVAKIREQVGSDEVILGLSGGVDSSVAAALIHRAIGDQLTCVFVDHGLLRLNEGKMVMDMFARNLGVKVIHVDAEGQFMAKLAGVTDPEKKRKIIGAEFIEVFDAEEKKLTNAKWLAQGTIYPDVIESAGAKTKKAHAIKSHHNVGGLPENMKLKLLEPLRDLFKDEVRELGVALGLPREMVYRHPFPGPGLGVRILGEVKKEYADLLRQADDIFIQELRNTTDENGTSWYDLTSQAFAVFLPVKSVGVMGDGRTYDYVVALRAVITSDFMTAHWAELPYSLLGRVSNRIINEVKGINRVVYDVSGKPPATIEWE

SEQ ID NO: 65736 - protein, 621 aa, Neisseria meningitidis
MIEKLTFGLFKKEDARSFMRLMAYVRPYKIRIVAALIAIFGVAATESYLAAFIAPLINHGFSAPAAPPELSAAAGILSTLQNWREQFTYMVWGTENKIWTVPLFLIILVVIRGICRFTSTYLMTWVSVMTISKIRKDMFAKMLTLSSRYHQETPSGTVLMNMLNLTEQSVSNASDIFTVLTRDTMIVTGLTIVLLYLNWQLSLIVVLMFPLLSLLSRYYRDRLKHVISDSQKSIGTMNNVIAETHQGHRVVKLFNGQAQAANRFDAINRTIVRLSKKITQATAAHSPFSELIASIALAVVIFIALWQSQNGYTTIGEFMAFIVAMLQMYAPIKSLANISIPMQTMFLAADGVCAFLDTPPEQDKGTLAPQRVEGRISFRNVDVEYRSDGIKALDGFNLDIRQGERVALVGRSGSGKSTVVNLLPRFVEPSAGNICIDGIDIADIKLDCLRAQFALVSQDVFLFDDTLFENVRYSRPDAGEAEVLSALQAANLQSLIDASPLGLHQPIGSNGSNLSGGQRQRVAIARAILKDAPILLLDEATSALDNESERLVQQALERLMENRTGIIVAHRLTTIEGADRIIVMDDGKIIEQGTHEQLMSQNGYYTMLRNISNKDAAVRTA

SEQ ID NO: 65737 - protein, 308 aa, Neisseria meningitidis
MSFAFFFPGQGSQSLGMMNGFAEHAIVKNTFAEASAILGQDLWAMINGSDAEIIGQTVNTQPIMLAAGVAVYRAYSEAGGKTPAAVAGHSLGEYTALVAAGALDFADAVKLVRLRAELMQSAVPQGVGAMAAILGLEDEQVKQICAESAQDEVVEAVNFNSPGQVVIAGNAAAVERAMLAAKEAGAKRALPLPVSVPSHCSLMKPAADKLAEALKTVEIKQPQIRVIHNADVAAYDDADKIKDALVRQLYSPVRWTETVNALVSDGIAESAECGPGKVLAGLAKRINKAAACSALTDAGQVAAFIEAH

SEQ ID NO: 65738 - protein, 320 aa, Neisseria meningitidis
MQYAKISGTGSYLPANRVSNDDLAQKVDTSDEWITARTGIKFRHIAAENEKTSDLAAEAARRALDAAGLNGNEIDLIIVATATPDMQFPSTATIVQQKLGITNGCPAFDVQAVCAGFMYALTTANAYIKSGMAKNALVIGAETFSRIVDWNDRTTCVLFGDGAGAVVLSASDTPGIIHSKLKADGNYLKLLNVPGQIACGKVSGSPYISMDGPGVFKFAVKMLSKIADDVIEEAGYTAAQIDWIVPHQANRRIIESTAKHLGLSMDKVVLTVQDHGNTSAASIPLALDTGIRSGQIKRGQNLLLEGIGGGFAWGAVLLQY

SEQ ID NO: 65739 - protein, 196 aa, Neisseria meningitidis
MGLELPLILGTSSVFRREQMERLGIAFQAASPDFDETPMLGESAPQTALRLAEGKARSLAGRFPEALIVGADQVAWCDGRQWGKPMNLANAQKMLMHLSGREIEFYSAVVLLNTVTGRMQRHIDKTVVVMRKLDELHILRYLEREPDAVYCSCALKSEALGALLIERIESTDPNALIGLPVFRLVDFLKNEGVDVL

SEQ ID NO: 65740 - protein, 545 aa, Neisseria meningitidis
MDFKRLTAFFAIALVIMIGWEKMFPTPKPVPAPQQTAQQQAVTASAEAALAPATPITVTTDTVQAVIDEKSGDLRRLTLLKYKATGDENKPFILFGDGKEYTYVAQSELLDAQGNNILKGIGFSAPKKQYSLEGDKVEVRLSAPETRGLKIDKVYTFTKGSYLVNVRFDIANGSGQTANLSADYRIVRDHSEPEGQGYFTHSYVGPVVYTPEGNFQKVSFSDLDDDAKSGKSEAEYIRKTPTGWLGMIEHHFMSTWILQPKGGQSVCAAGDCRIDIKRRNDKLYSTSVSVPLAAIQNGAKSEASINLYAGPQTTSVIANIADNLQLAKDYGKVHWFASPLFWLLNQLHNIIGNWGWAIIVLTIIVKAVLYPLTNASYRSMAKMRAAAPKLQAIKEKYGDDRMAQQQAMMQLYTDEKINPLGGCLPMLLQIPVFIGLYWALFASVELRQAPWLGWITDLSRADPYYILPIIMAATMFAQTYLNPPPTDPMQAKMMKIMPLVFSVMFFFFPAGLVLYWVINNLLTIAQQWHINRSIEKQRAQGEVVS

SEQ ID NO: 65741 - protein, 121 aa, Neisseria meningitidis
MDYRFGRQYRLLKTDDFSSVFAFRNRRSRDLLQVSRSNGNGLDHPRIGLVVGKKTAKRANERNYMKRVIRDWFRLNKNRLPPQDFVVRVRRKFDRATAKQARAELAQLMFGNPATGCRKQA

SEQ ID NO: 65742 - protein, 44 aa, Neisseria meningitidis; identical to SEQ ID NO: 65549

SEQ ID NO: 65743 - protein, 518 aa, Neisseria meningitidis
MTLAEFWPLCLRRLHDMLPHGQFAQWIAPLTVGEEGGVWVVYGKNQFACNMLKSQFAGKIEAVREELAAGRSAFVFKPGEGVCYEMAAVEGAVEPAEPSLHAGSEEMPVQEVLLDELPSEEPVKPAASKTAADILAERMRNLPHEPRQAAGSASRPESAAVAKARTDAQRDAEEARYEQTNLSPDYTFDTLVEGKGNRLAAAAAQAIAESPGQSYNPFFLYGSTGLGKTHLVQAVGNELLKNRPDAKVRYMHSDDYIRSFMKAVRNNTYDVFKQQYKQYDLLIIDDIQFIKGKDRTMEEFFYLYNHFHNEKKQLILTCDVLPAKIEGMDDRLKSRFSWGLTLELEPPELEMRIAILQKKAEAAGISIEDEAALFIANLIRSNVRELEGAFNRVGASSRFMNRPVIDIDLARTALQDIIAEKHKVITADIIIDAVAKYYRIKISDVLGKKRTRNIARPRQVAMSLTKELTTLSLPSIGDSFGGRDHTTVMHGIRAVAKLREEDPELAQDYEKLLILIQN

SEQ ID NO: 65744 - protein, 367 aa, Neisseria meningitidis
MLILQAERDSLLKPLQAVTGIVERRHTLPILSNVLIEGKGGQTKLLATDLEIQIDTAGPEGGADDFRITTNAKKFQDILRALPAGALVSLDWDDSRLTLKAGKSRFALQTLPAADFPMMNVGEDISATFSLEQERFKTMLSQVQYSMAVQDIRYYLNGLLMQVEGSQLRLVATDGHRLAYAACAIDADLPRAEVILPRKTVLELFKLLNNPDDPIQIELLDKQVRFQCNGTTIVSKVIDGKFPDFNRVIPLDNDKIFVLSRAELLGALERVSILANEKFRGARLFLQSGLLSVVCSNNEQEEAREEIEIAYQGGELEVGFNIGYLMDVLRNIHSDDMQLAFGDANRSTLFTVPNNPNFKYIVMPMRI

SEQ ID NO: 65745 - protein, 910 aa, Neisseria meningitidis
MQEQYQPAAIEPAAQKKWDDARIFNVSEDASKPKYYCLSMFPYPSGKLHMGHVRNYTIGDVLSRFKLLNGFNVMQPMGWDAFGMPAENAAMKNNVAPAAWTYDNIEYMKTQLKSLGFAIDWARETATCKPEYYRWEQWLFTKLFEKGIVYRKNGTVNWDPVDQTVLANEQVIDGRGWRSGALIEKREIPMYYFKITDYAEELLNDLDKLEHWPEQVKTMQRNWIGKSRGMTVRFAVSDDSKQGLEGDYAKFLQVYTTRPDTLMGATYVAVAAEHPLATAAAADKPELQAFIAECKAGSVAEADMATMEKKGVPTGRYVVNPLNGDKLEVWIANYVLWGYGDGAVMAVPAHDERDFEFAAKYSLPKKQVLQRVTIGLSPEQEEAMGFGGGSGCGAGYGDGSGSDSRDLPFMPNKWQAWYGVKDDFMVLINSGELDGMNYQTAFDAVAAKLQAIGAGEPKTQYRLRDWGISRQRYWGCPIPIVHCEQCGDVPVPADQLPVVLPENVVPDGMGSPLAKMPEFYETTCPCCGGAAKRETDTMDTFMESSWYFFRYMSPKFSDGMVDPAAAKYWGAVDQYIGGIEHAILHLLYARFFTKLMRDEGLVNVDEPFERLLTQGMVVCETYYRENDKGGKDWINPADVELTFDDKGRPVSAVLKVDGLPVVISGTEKMSKSKNNGVDPQELINAYGADTARLFMMFAAPPEQSLEWSDSGVEGAHRFLRRLWRTVYEYLKQGEAVNAFAGSQDGLSKELKDLRHKLHSTIAKVSDDYGRRQQFNTAIAAVMELLNQYDKTDTGSEQGRTVAQEVLEAAVRLLWPIVPHICETLWSELNGAKLWEAGWPAVDEAALVKSEIEVMVQVNGKLRGKITVAADASKADLEAAALATEGAVKFMEGKPAKKIIVVPGRLVNIVV

SEQ ID NO: 65746 - protein, 725 aa, Neisseria meningitidis
MTRFKYSLLFAALLPVYAQADVSVSDDPKPQESTELPTITVTADRTASSNDGYTVSGTHTPLGLPMTLREIPQSVSVITSQQMRDQNIKALDRALLQATGTSRQIYGSDRAGYNYLFARGSRIANYQINGIPVADALADTGNANTAAYERVEVVRGVAGLLDGTGEPSATVNLVRKRPTRKPLFEVRAEAGNRKHFGLGADVSGSLNAEGTLRGRLVSTFGRGDSWRQRERSRDAELYGILEYDIAPQTRVHAGMDYQQAKETADAPLSYAVYDSQGYATAFGPKDNPATNWANSRHRALNLFAGIEHRFNQDWKLKAEYDYTRSRFRQPYGVAGVLSIDHNTAATDLIPGYWHADPRTHSASVSLIGKYRLFGREHDLIAGINGYKYASNKYGERSIIPNAIPNAYEFSRTGAYPQPASFAQTIPQYGTRRQIGGYLATRFRAADNLSLILGGRYSRYRTGSYDSRTQGMTYVSANRFTPYTGIVFDLTGNLSLYGSYSSLFVPQSQKDEHGSYLKPVTGNNLEAGIKGEWLEGRLNASAAVYRARKNNLATAAGRDPSGNTYYRAANQAKTHGWEIEVGGRITPEWQIQAGYSQSKTRDQDGSRLNPDSVPERSFKLFTAYHFAPEAPSGWTIGAGVRWQSETHTDPATLRIPNPAAKARAADNSRQKAYAVADIMARYRFNPRAELSLNVDNLFNKHYRTQPDRHSYGALRTVNAAFTYRFK

SEQ ID NO: 65747 - protein, 354 aa, Neisseria meningitidis
MALVSMRQLLDHAAENSYGLPAFNVNNLEQMRAIMEAADQVNAPVIVQASAGARKYAGAPFLRHLILAAVEEFPHIPVVMHQDHGASPDVCQRSIQLGFSSVMMDGSLMEDGKTPSSYEYNVNATRTVVNFSHACGVSVEGEIGVLGNLETGEAGEEDGVGAVGKLSHDQMLTSVEDAVRFVKDTGVDALAIAVGTSHGAYKFTRPPTGDVLRIDRIKEIHQALPNTHIVMHGSSSVPQEWLKVINEYGGNIGETYGVPVEEIVEGIKHGVRKVNIDTDLRLASTGAVRRYLAENPSDFDPRKYLSKTIEAMKQICLDRYLAFGCEGQAGKIKPVSLEKMANRYAKGELNQIVK

SEQ ID NO: 65748 - protein, 305 aa, Neisseria meningitidis
MVLDGFAAHFDAYLENIVREGKSEHTVAAYRRDLEELFALLAQMPSEDAGGVPQGLSQRDFTAALRRLSQRGLNARTLARKLSSWRQYCAWLVKRGLLHTDPTADIKPPKQPERVPKALPQEWLNRMLDLPVDGGDPLAVRDHALFELMYGSGLRVSEIHGLNADDVYLDEAWVHVTGKGRKQRQVPLTGKSVEALKNYLPLRQTASDGKALFTGRNGTRLSQRQIQKRLAQWAAQNGDGRHVSPHMMRHSYAGHLLQASRDIRAVQELLGHSSLSTTQIYTKLDFDHIARLYDEAHPRAKRQDE

SEQ ID NO: 65749 - protein, 637 aa, Neisseria meningitidis
MNPSPLLDLIDSPQDLRRLDKKQLPRLAGELRTFLLESVGQTGGHFASNLGAVELTVALHYVYNTPEDKLVWDVGHQSYPHKILTGRKNQMHTMRQYGGLAGFPKRCESEYDAFGVGHSSTSIGAALGMAAADKQLGSDRRSVAIIGDGAMTAGQAFEALNCAGDMDVDLLVVLNDNEMSISPNVGALPKYLASNVVRDMHGLLSTVKAQTGKVLDKIPGAMEFAQKVEHKIKTLAEEAEHAKQSLSLFENFGFRYTGPVDGHNVENLVDVLEDLRGRKGPQLLHVITKKGNGYKLAENDPVKYHAVANLPKESAAQMPSEKEPKPAAKPTYTQVFGKWLCDRAAADSRLVAITPAMREGSGLVEFEQRFPDRYFDVGIAEQHAVTFAGGLACEGMKPVVAIYSTFLQRAYDQLVHDIALQNLPVLFAVDRAGIVGADGPTHAGLYDLSFLRCIPNMIVAAPSDENECRLLLSTCYQADAPAAVRYPRGTGTGVPVSDGMETVEIGKGIIRREGEKTAFIAFGSMVAPALAVAGKLNATVADMRFVKPIDEELIVRLARSHDRIVTLEENAEQGGAGSAVLEVLAKHGICKPVLLLGVADTVTGHGDPKKLLDDLGLSAEAVERRVRAWLSDRDAAN

SEQ ID NO: 65750 - protein, 453 aa, Neisseria meningitidis
MLKKVLIANRGEIALRVLRACREMGIATVAVHSEADKDSLHVKLADESVCIGPAASAQSYLNVPAIIAAAEVSCADAVHPGYGFLAENADFAEQVEQSGFTFIGPKPDTIRLMGDKVSAKHAMIAAGVPCVPGSDGALPDDGEEILKIADKIGYPVIIKASGGGGGRGMRVVEKKEDLLQSVEMTKAEAGAAFGNPMVYMERYLQRPRHVEIQVIADEHGNAVYLAERDCSLQRRHQKVIEEAPAPFITEKERAKIGKACADACKRIGYRGAGTFEFLYEDGEFFFIEMNTRVQVEHPVTELITGVDIVQEQLRIAAGLPLQYKQKDIQVEGHAFECRINAEDPYNFIPSPGPIESCHLPSGFGIRVDSHIYQGYRIPPYYDSLIGKVCVVGKDRDQAMAKMRVALAELAITGIKTNTPLHRDLFNDPGFQKGGVSIHYLEHWLEDRKAKQDK

SEQ ID NO: 65751 - protein, 151 aa, Neisseria meningitidis
MDLRKLKKLIDLVEESGIAEIEVTEGEEKVRITRTIAAAPVYAAPVPAAAPAVTPAAAPVAASAPAAAPAARDLSDAQKSPMVGTFYRAPGPNAAPFVEVGQQVKAGDTLCIIEAMKLMNEIEAEKSGTVKEILVENGTPVEFGEPLFIIG

SEQ ID NO: 65752 - protein, 346 aa, Neisseria meningitidis
MDISDFDFTLPEHLIAQHPPEVRGSSHLLVALPDMPLQDRVFGDLPDYVEAGDVLVFNNTKVMKARLFGQKDSGGRIEALIERVLDSHTALAHIRSSKSPKPGMGLVFEGGIRAVMVGREGELFCLRFEGGETVYELLEQNGHLPLPPYIERAADADDDSRYQTVYAKYQGAVAAPTAGLHFTEELLRRLKDKGAVTAEVTLHVGAGTFQPVRVDKIEEHKMHSEWFEVPSETAAAVEAAKARGNKVWAVGTTSMRALESAARATGRLKAGQGDTDIFITPGYRFNVADRLVTNFHLPKSTLLMLVSAFSGMGHIRAAYRYAVEREYRFFSYGDAMVLGRNEGVVR

SEQ ID NO: 65753 - protein, 1071 aa, Neisseria meningitidis
MPKRTDLKSILIIGAGPIVIGQACEFDYSGAQACKALREEGYKVILVNSNPATIMTDPEMADVTYIEPIMWQTVEKIIAKERPDAILPTMGGQTALNCALDLARNGVLAKYNVELIGATEDAIDKAEDRGRFKEAMEKIGLSCPKSFVCHTMNEALAAQEQVGFPTLIRPSFTMGGSGGGIAYNKDEFLAICERGFDASPTHELLIEQSVLGWKEYEMEVVRDKNDNCIIICSIENFDPMGVHTGDSITVAPAQTLTDKEYQIMRNASLAVLREIGVDTGGSNVQFAVNPENGEMIVIEMNPRVSRSSALASKATGFPIAKVAAKLAVGFTLDELRNDITGGRTPASFEPSIDYVVTKIPRFAFEKFPAADDRLTTQMKSVGEVMAMGRTIQESFQKALRGLETGLCGFNPRSSDKAEIRRELANPGPERMLFVADAFRAGFTLEEIHEICAIDPWFLAQIEDLMKEEKAVSDGVLSDLDYAALRRLKRKGFSDKRIAQLLDVKEKEVREHRYVLNLHPVYKRVDTCAAEFATETAYLYSTYEEECEARPSDRKKVMILGGGPNRIGQGIEFDYCCVHAALALRESGFETIMVNCNPETVSTDFDTSDRLYFEPLTLEDVLEIVRTENPWGVIVHYGGQTPLKLANALVENGVNIIGTSADSIDAAEDRERFQKVLNDLGLRQPPNRIAHNEEEALVKAEEIGYPLVVRPSYVLGGRAMQIVHSAEQLQKYMREAVQVSEDSPVLLDFFLNNAIEVDVDCVSDGKDVVIGGIMQHVEQAGIHSGDSGCSLPPYSLSEEIQDEIRRQTKAMAYALGVVGLMNVQFAVQDGVVFVLEVNPRASRTVPFVSKATGVPLAKVGARCMAGISLKEQGVEKEVVPDFYAVKEAVFPFIKFPGVDTILGPEMRSTGEVMGVGASFGEAYYKAQLGAGERLNPTGKIFLSVREEDKERVIKTAKNFQALGYGICATRGTAQYLTEHGLIVQTINKVPEGRPHIGDALKNGEIALVVNTVSSDPQSVSDSHIIRQSALQQRVPQYTTTAGGEAMSEGAKSRDHLGVYSVQELHGRLKNRS

SEQ ID NO: 65754 - protein, 377 aa, Neisseria meningitidis
MSTPALLVLADGSVFHGTSIGYEGSTSGEVVFNTSMTGYQEILTDPSYCKQIVTLTYPHIGNTGTNAEDEESRSVYAAGLIIRDLPLLHSNFRASESLHDYLVRNKTVAIADIDTRRLTTLLREKGAQGGAILTGADATIEKAQELIAAFGSMVGKDLAKEVSCTETYEWTEGEWALGKGFVTPDEQPYHVVAYDFGVKTNILRMLASRGCRLTVVPAQTSAQDVLALNPDGVFLSNGPGDPEPCTYAIEAVQKLMESGKPIFGICLGHQLISLAIGAKTLKMRFSHHGANHPVQDLDSGKVVITSQNHGFAVDADTLPANARITHKSLFDNTLQGIELTDKPVFCFQGHPEASPGPQDVGYLFDKFIGNMKAAKRA

SEQ ID NO: 65755 - protein, 363 aa, Neisseria meningitidis
MSLKCGIVGLPNVGKSTLFNALTQSGIEAANYPFCTIEPNVGIVEVPDPRMAELAKIVNPQKMQPAIVEFVDIAGLVAGASKGEGLGNQFLANIRETDAIVNVVRCFDDDNIVHVAGRVDPIADIETIGTELALADLASVEKAIVREEKRARSGDKDAQKLVDLCKKLLPHLDEGKPVRSFGLDAEERAMLKPLFLLTAKPAMYVGNVAEDGFENNPHLDRLKELAAKENAPVVAVCAAMESEIAELEDDEKAEFLAEMGLEEPGLNRLIRAGYDLLGLQTYFTAGVKEVRAWTIHKGDTAPQAAGVIHTDFERGFIRAQVISYDDFVSLGGEAKAKEAGKMRVEGKEYVVQDGDVMHFLFNV

SEQ ID NO: 65756 - protein, 431 aa, Neisseria meningitidis
MSVIQDLQSRGLIAQTTDIEALDALLNEQKIALYCGFDPTADSLHIGHLLPVLALRRFQQAGHTPIALVGGATGMIGDPSFKAAERSLNSAETVAGWVESIRNQLTPFLSFEGGNAAIMANNADWFGKMNCLDFLRDIGKHFSVNAMLNKESVKQRIDRDGAGISFTEFAYSLLQGYDFAELNKRHGAVLEIGGSDQWGNITAGIDLTRRLNQKQVFGLTLPLVTKSDGTKFGKTEGGAVWLNAKKTSPYQFYQFWLKVADADVYKFLKYFTFLSIEEIDAIEAKDKASGTKPEAQRILAEEMTRLIHGEAALQAAQRISESLFAEDQSSLTESDFEQLALDGLPAFEVSDGINVVEALVKTGLASSNKEARGFVNSKAVLLNGKPAEANNPNHAAERPDDACLLTDEHKRFGKYTILRRGKRNHALLVWK

SEQ ID NO: 65757 - protein, 318 aa, Neisseria meningitidis
MTACFTTYPNITMRIRLGRHNSPDFPHGAAVTIGNFDGVHLGHKHILQKLRLEADTRGLPVVAVVFEPQPKEFFALRTGRMPPCRISPLRTKLELLEGTGCVDAVWVLCFDRNFSEISAQAFIDRLLRQTLNTRYLLVGDDFRFGAGREGCFELLAQQPDMQTERTPSVIVEDIRTSSTAVRQALSDGNLAYAKKLLGHDYVLSGRVVHGRKLGRTLNAPTANIRLPRHRYALGGVFVVEADGAFGTRRGVASFGFNPTVDSGCSQKLEVHLFDFQGDLYGQRLNVRFLHKLRDEEKFDGMAELKRQIAADMEAAKCW

SEQ ID NO: 65758 - protein, 929 aa, Neisseria meningitidis
MTDYSKTVNLLESPFPMRGNLAKREPAWLKSWYEQKRYQKLREIAKGRPKFILHDGPPYANGDIHIGHAVNKILKDIIIRSKTQAGFDAPYVPGWDCHGLPIEVMVEKLHGKDMPKARFRELCREYAAEQIARQKKDFIRLGVLGDWDNPYLTMDFKTEADTVRMLGEIYKSGYLYRGAKPVQFCLDCGSSLAEAEVEYKDKVSPAIDVGYPFKDTAALATAFGLAGIEGKAFAVIWTTTPWTLPASQAVSAGADVVYQLIDTPTGKLVLAKDLAEDALKRYGFSDGIAILAETTGDKLENLHMNHPFLERDIPMLNGEHVTTDAGTGLVHTAPAHGLEDYAVCNKYGIELYNPVNAEGKYIGETPRVAGMRVWEANSVILQWLEETGNLLASSKIEHSYAHCWRHKTPLIYRATGQWFVGMDKAGADGKTLRDKAIKAVDDTEFFPSWGRARLEAMIEGRPDWVVSRQRYWGTPMTFFVHKETGELHPNSAELLEKVAQRIEEKGIEAWFSLDKGELLSAEDCEHYDKLSDTMDVWFDSGSTHYSVLKQREELDWPADLYLEGSDQHRGWFQSSMLTGCASSMGRAPYKQLLTHGFVVDQNGRKMSKSIGNVVAPQEVYNEFGADILRLWAASTDYSGELAISKEILKRVTESYRRIRNTLSFLFANLSDFNPIEDAVQQADMVEIDRYALVLARRLQERVAGDFYPRYAFHFAVKEMVSFCSEDLGAFYLDILKDRLYTTKADSRARRSAQTALYHITRSLVLLIAPILCFTGEEAWDIIGGGAEDSVLFHTWHEFPTINEKAEAELVKKWTAIREAREAVTAAIEPLRADKTVGSSLQAEAEITAPEEMAGYLNALGEELRFALLVSKAEVKVGSELAVAAKASDGEKCERCWHYTRDVGAVAGHETVCKRCAENVGGEGETRHYA

SEQ ID NO: 65759 - protein, 159 aa, Neisseria meningitidis
MPSETAIADITRTYSAHYLNPNNRNMTLFPDALPCLDKLKAQGYWLAVATGKGRAGLDNAISQTATGGYWLATACAGEYPSKPSPEMVFGICGELGLDPKEALVVGDTAHDLHMAANAGAAAVGVATGAHSREQLLSAPHLAVLDGLSELPGFLAQHYA

SEQ ID NO: 65760 - protein, 1144 aa, Neisseria meningitidis
MTEPTYIPLRLHTEFSITDGMVRIKKLIAKAQEYGLPALGISDLMNEFGLVKFYKACRSAGIKPIGAADVRIGNPDAPDKPFRAMLIIRNDAGYLRLSELLTAAYVGKDRNVHHAELNPEWLENGDNSGLICLSGAHYGEVGVNLLNGNEDAARAAALKYAAWFPDAFYLELQRLPERPEWEACVSGSVKLAEELGLPVVATHPTQFMSRDDFNAHEARVCIAGGWVLTDKKRPRDFTPSQFFIPPETMAERFSDLPEALENTVEIAKRCNLHITLGKNFLPLFPTPDGLSLDDYLVKLSNEGLQERMVQLYPDEAERAAKMPEYQERLDFELNIIIQMKFPGYFLIVQDFINWAKTHGCPVGPGRGSGAGSLVAYSLKITDLDPLKYALLFERFLNPERVSMPDFDVDFCQANRGRVIEYVREKYGAEAVSQIVTFGTMSSKAVIRDVGRVLELPFTLCDKLSKLIPLEANKPLGLDDAMKAEPQIQELIEAEEADELITLAKKLEDLTRGLGMHAGGVLIAPGKISDYSPVYQADESASPVSMYDKGDVEDVGLVKFDFLGLRNLTIIEMAQNNIKNTTGDIVDVGTIPLDDQTAYQIFRDANTTAVFQFESTGMKKMLKTAHTTKFEELIAFVSLYRPGPMDNIPDFVARMKGQEFQYIHPLLEGILAPTYGIMVYQEQVMQAAQIIGGYSLGGADLLRRAMGKKKPEEMVKHREIFAEGAAKQGISREKSDEIFNYMEKFAGYGFNKSHAAAYALISYQTAWLKAHYPAEFMAATMSSELDNTDQLKHFYDDCRANGIEFLPPDINESDYRFTPYPDMKIRYALGAIKGTGEAAVESITSARQSGGKFTGLLDFCERVGKEHMNRRTLEALIRGGAFDSIEPNRAMLLANIDLAMNNADQKAANANQGGLFDMMEDAIEPVRLIDAPMWSESEKLAEEKTVIGFYLSGHPFGPYAQEVRQIAPQKLSKLKPQDSVRLAGFVTAVRTMMGKRGKIAFVSLEDLSGQVEIMVGGQTLENCADCLKADQVLIIESKVSRDDYGGGDGLRILANQVMTLQTARERYARSLSLALAPHHDIGELVQLLAAHQLPDTPRIPLQLSYANEKASGRLQVPPKWTVTPSSALFGELETLLGSRSVRVNW

SEQ ID NO: 65761 - protein, 278 aa, Neisseria meningitidis
MIDLHCHSTVSDGMLSPAEVVRLAHQNGCTLLALTDHDHTGGIAEARAEADRLGLRLINGVEISVTWRGRTIHVVGLDFDERDENLQNLLAQVRQGRLKRLEAIAAKLEKKGIGGAYDGALALAANKEMVSRTHVAEFLIQAGHVKNKQQAFIKYLGDGKSCAVRHEWATLEDCVSAVNGAGGMAVIAHPMRYDLSATAKRNLFEEFKNLGGAGIEVHSGNCCKNDRLNYALLAERFGMLASAGSDFHRLNDFSGGILGACPELPENCRPVWAHFSRH

SEQ ID NO: 65762 - protein, 430 aa, Neisseria meningitidis
MQFSAFGEKFTQHSGILQLMDDLGDALKSDKPVNMLGGGNPARIPEIDRAFAGIFSKLAAEHAVENIGNYSNPQGDAVLIDALTAFLNREYGWNLTADNIALTNGSQNAFFYLFNLFGGKFKLSDGTSAEKAILLPLAPEYIGYADVHIEGRHFVSVKPKIENVEHEGEAGFFKYRVDFDALESLPGLKEEKIGAICCSRPTNPTGNVLTDGEMARLDALAREHGIPLIIDNAYGMPFPNIIYSDVTLNWHENIILCFSLSKVGLPGVRTGIIVAAPEVVKAVSSLNAIVNLAPTRFGAAIAAPLLESGEMKRLADQVIRPFYRNQAQTAVSLLKRELGAYPMKIHKPEGAIFLWLWFENLPVPSQTLYEMLKAEGTLIIPGEHFFIGIDTRDYPHAGECIRMSIAQDAETLEKGIAAIGKTVRKLYDNV

SEQ ID NO: 65763 - protein, 636 aa, Neisseria meningitidis
MTLETLIALPRNIKKICFLIHDFLMIFIAFWFTQSLKADYSNEWFDPANWQSFLLTALLTIGLFVRMGLYRAVTRFISFRILSTALAGSIVSAVLFFLNTLIFEERLRLALPIVYFLLLFVSVTGSRMVLRGLLSEHPKKQMIPVIIYGAGRSGRQLLEAVKQMREYSAAAFVDDDPKLWHTIIYDLAVYQPDAIAFLIERYGVEKILLAIPGATQEQRRRIISKLEAYPCEVLTIPGMKDLMDGKISIGTLKKISVSDLLGRDSVAPDNRLMSADIEGKTVMVTGAGGSIGSELCRQIIRRRPEKLLLFELSEFALYAIEKELRETCIQKRLNTEILPFLGSVQNRTLLEHVMTAFSVATVYHAAAYKHVPMVEFNTVEGIRNNIFGTLECALAATTSGVRTFVLISTDKAVRPTNTMGASKRMAELCLQALAAEPGQKTRFSMVRFGNVLGSSGSVVPLFEKQIAEGGPLTLTHPDITRYFMTIPEAAQLVIQAGAMGTGGDVFVLDMGESVKIIDLARQMITLSGLKPKTPEQPDGDIEIFITGLRPGEKLYEELLIDDNVRKTGHPRIMTADEAMLPWHELSALLNRIRAACDRYDQQAIRTLLINAPTGFAPSDGICDLLWVRETHRKNAV

SEQ ID NO: 65764 - protein, 413 aa, Neisseria meningitidis
MSKFFKRLFDIVASASGLIFLSPVFLILIYLIRKNLGSPVFFFQERPGKDGKPFKMVKFRSMHDALDSDGILLPDGERLTPFGKKLRAASLDELPELWNVLKGDMSLVGPRPLLMQYLPLYDNFQNRRHEMKPGITGWAQVNGRNALSWDERFACDIWYIDHFSLCLDIKILLLTVKKVLIKEGISAQGEATMPPFTGKRKLAVVGAGGHGKVVAELAAALGTYGEIVFLDDRVQGSVNGFPVIGTTLLLENSLSPEQFDIAVAVGNNRIRRQIAEKAAALGFALPVLIHPDSTVSPSATVGQGGVVMAKAVVQADSVLKDGVIVNTAATVDHDCLLDAFVHISPGAHLSGNTRIGEESWIGTGACSRQQIRIGSRATIGAGAVVVRDVSDGMTVAGNPAKPLAGKNTETLRS

SEQ ID NO: 65765 - protein, 369 aa, Neisseria meningitidis
MFSDTDISMMENALRLAALGRFSTSPNPRVGCVIAHGSQIVGQGFHVKAGEPHAEVHALRQAGEMAQGATAFVTLEPCSHYGRTPPCAEALLRSGVTRVVAAMRDPNPLVAGKGLAMLEAAGIKTECGLLEHQARELNRGFLSRIERRRPFVRLKCAVSLDGKTALSDGSSFWITGEDARADVQVLRAESCAVLTGIGTVLADNPRLNVRAFPTLRQPARIVLDSRLRLPLDSHLLTDGQSPTYIATLERDEDKLRPYREHAHIRILMPSETADGKIDLHHLMRLLADEGFGEIMVEAGSELTSAFLAEDLADEIVLYRSPKILGGGSGLFCLPENRAALSAPPLWTPVSSEILGHDIKTVFRKNGNAF

SEQ ID NO: 65766 - protein, 798 aa, Neisseria meningitidis
MIKKILTTCFGLVFGFCVFGVGLVAIAILVTYPKLPSLDSLQHYQPKMPLTIYSADGEVIGMYGEQRREFTKIGDFPEVLRNAVIAAEDKRFYRHWGVDVWGVARAAVGNVVSGSVQSGASTITQQVAKNFYLSSEKTFTRKFNEVLLAYKIEQSLSKDKILELYFNQIYLGQRAYGFASAAQIYFNKNVRDLTLAEAAMLAGLPKAPSAYNPIVNPERAKLRQKYILNNMLEEKMITVQQRDQALNEELHYERFVRKIDQSALYVAEMVRQELYEKYGEDAYTQGFKVYTTVRADHQKVATEALRKALRNFDRGSSYRGAENYIDLSKSEDVEETVSQYLSGLYTVDKMVPAVVLDVTKKKNVVIQLPGGRRVTLDRRALGFAARAVNNEKMGEDRIRRGAVIRVKNNGGRWAVVQEPLLQGALVSLDAKTGAVRALVGGYDFHSKTFNRAVQAMRQPGSTFKPFVYSAALSKGMTASTVVNDAPISLPGKGPNGSVWTPKNSDGRYSGYITLRQALTASKNMVSIRILMSIGVGYAQQYIRRFGFRSSELPASLSMALGTGETTPLKVAEAYSVFANGGYRVSSHVIDKIYDRDGRLRAQMQPLVAGQNAPQAIDPRNAYIMYKIMQDVVRVGTARGAAALGRTDIAGKTGTTNDNKDAWFVGFNPDVVTAVYIGFDKPKSMGRVGYGGTIAVPVWVDYMRFALKGKQGKGMKMPEGVVSSNGEYYMKERMVTDPGLTLDNSGIAPQPSRRAKEDDGGAAEGGRQAADDEVRQDMQETPVLPSNTGSKQQQLDSLF

SEQ ID NO: 65767 - protein, 207 aa, Neisseria meningitidis
MKRLTLLAFVLAAGAVSASPKADVEKGKQVAATVCAACHAADGNSGIAMYPRLAAQHTAYIYHQTIGIRDGKRTHGSAAVMKPVVMNLSDQDILNVSAFYAKQQPKSGEANPKENPELGAKIYRGGLSDKKVPACMSCHGPSGAGMPGGGSEIQAYPRLGGQHQAYIVEQMNAYKSGQRKNTIMEDIANRMSEEDLKAVANFIQGLR

SEQ ID NO: 65768 - protein, 354 aa, Neisseria meningitidis
MLVLGIESSCDETGVALYDTERGLRAHCLHTQMAMHAEYGGVVPELASRDHIRRLVPLTEGCLAQAGASYGDIDAVAFTQGPGLGGALLAGSSYANALALALDKPVIPVHHLEGHLLSPLLAEEKPDFPFVALLVSGGHTQIMAVRGIGDYALLGESVDDAAGEAFDKTAKLLGLPYPGGAKLSELAESGRPEAFVFPRPMIHSDDLQMSFSGLKTAVLTAVEKVRAENGADDIPEQTRNDICRAFQDAVVDVLAAKVKKALLQTGFRTVVVAGGVGANRKLRETFGNMTVQIPTPKGKPKHPSEKVSVFFPPTAYCTDNGAMIAFAGAMHLGKGREVGAFNVRPRWPLSEIVR

SEQ ID NO: 65769 - protein, 389 aa, Neisseria meningitidis
MSEYLFTSESVSEGHPDKVADQVSDAILDAILAQDPKARVAAETLVNTGLCVLAGEITTTAQVDYIKVARETIKRIGYNSSELGFDANGCAVGVYYDQQSPDIAQGVNEGEGIDLNQGAGDQGLMFGYACDETPTLMPFAIYYSHRLMQRQSELRKDGRLPWLRPDAKAQLTVVYDSETGKVKRIDTVVLSTQHDPSVGYEELKNAVIEQIIKPVLPSELLTDETKYLINPTGRFVIGGPQGDCGLTGRKIIVDTYGGAAPHGGGAFSGKDPSKVDRSAAYACRYVAKNIVAAGLATQCQIQVSYAIGVAEPTSISIDTFGTGKISEEKLITLVREHFDLRPKGIVQMLDLLRPIYSKSAAYGHFGREEPEFTWERTDKAAALRAAAGL

SEQ ID NO: 65770 - protein, 469 aa, Neisseria meningitidis
MNFPKTAASLLLLLASLAAHALDTGRIPQNEIAVYVQELDSGKVIIDHRSDVPVNPASTMKLVTAFAAFKTFGSNYRWATEFKSNGTVNDGTLDGNLYWAGSGDPVFNQENLLAVQRQLREQGIRNITGHLMLDHSLWGEVGSPDDFEADSGSPFMTPPNPTMLSAGMVMVRAERNAADSTDILTDPPLPHIFAQNNLKITASQAACPSIKKLMRASFSDNTLKLRGNIPESCLGKPVGVRMFALDELIRQSFTNHWLLGGGRISDGIGISDTPEGAQTLAVAHSKPMKEILTDMNKRSDNLIARSVFLKLGGDGKLPAVSEQAASAVRRELAVSGIDVADLVLENGSGLSRKERVTARMMAQMLETAYFSPFAQDFIDTLPIAGTDGTLRNRFKQSGGLLRLKTGTLNNVRALAGYWLGDKPMAVVVIINSGRAVSLLPDLDNFVANNIISGGDGWLDAKLMCKERRA

SEQ ID NO: 65771 - protein, 85 aa, Neisseria meningitidis
MQTVTMYTGPFCPYCTMAKRLLHAAGVGHIDEIRVDASPEAFAEMQQLSGQRSVPQIFIGETHVGGFTDLYRLQQEGGLDGLLNP

SEQ ID NO: 65772 - protein, 2015 aa, Neisseria meningitidis
MNKGLHRIIFSKKHSTMVAVAETANSQGKGKQAGSSVSVSLKTSGDLCGKLKTTLKTLVCSLVSLSMVLPAHAQITTDKSAPKNQQVVILKTNTGAPLVNIQTPNGRGLSHNRYTQFDVDNKGAVLNNDRNNNPFLVKGSAQLILNEVRGTASKLNGIVTVGGQKADVIIANPNGITVNGGGFKNVGRGILTIGAPQIGKDGALTGFDVRQGTLTVGAAGWNDKGGADYTGVLARAVALQGKLQGKNLAVSTGPQKVDYASGEISAGTAAGTKPTIALDTAALGGMYADSITLIANEKGVGVKNAGTLEAAKQLIVTSSGRIENSGRIATTADGTEASPTYLSIETTEKGAAGTFISNGGRIESKGLLVIETGEDISLRNGAVVQNNGSRPATTVLNAGHNLVIESKTNVNNAKGSANLSAGGRTTINDATIQAGSSVYSSTKGDTELGENTRIIAENVTVLSNGSIGSAAVIEAKDTAHIESGKPLSLETSTVASNIRLNNGNIKGGKQLALLADDNITAKTTNLNTPGNLYVHTGKDLNLNVDKDLSAASIHLKSDNAAHITGTSKTLTASKDMGVEAGLLNVTNTNLRTNSGNLHIQAAKGNIQLRNTKLNAAKALETTALQGNIVSDGLHAVSADGHVSLLANGNADFTGHNTLTAKADVNAGSVGKGRLKADNTNITSSSGDITLVAGNGIQLGDGKQRNSINGKHISIKNNGGNADLKNLNVHAKSGALNIHSDRALSIENTKLESTHNTHLNAQHERVTLNQVDAYAHRHLSITGSQIWQNDKLPSANKLVANGVLALNARYSQIADNTTLRAGAINLTAGTALVKRGNINWSTVSTKTLEDNAELKPLAGRLNIEAGSGTLTIEPANRISAHTDLSIKTGGKLLLSAKGGNAGAPSAQVSSLEAKGNIRLVTGETDLRGSKITAGKNLVVATTKGKLNIEAVNNSFSNYFPTQKAAELNQKSKELEQQIAQLKKSSPKSKLIPTLQEERDRLAFYIQAINKEVKGKKPKGKEYLQAKLSAQNIDLISAQGIEISGSDITASKKLNLHAAGVLPKAADSEAAAILIDGITDQYEIGKPTYKSHYDKAALNKPSRLTGRTGVSIHAAAALDDARIIIGASEIKAPSGSIDIKAHSDIVLEAGQNDAYTFLKTKGKSGKIIRKTKFTSTRDHLIMPAPVELTANGITLQAGGNIEANTTRFNAPAGKVTLVAGEELQLLAEEGIHKHELDVQKSRRFIGIKVGKSNYSKNELNETKLPVRVVAQTAATRSGWDTVLEGTEFKTTLAGADIQAGVGEKARVDAKIILKGIVNRIQSEEKLETNSTVWQKQAGRGSTIETLKLPSFESPTPPKLSAPGGYIVDIPKGNLKTEIEKLSKQPEYAYLKQLQVAKNINWNQVQLAYDRWDYKQEGLTEAGAAIIALAVTVVTSGAGTGAVLGLNGAAAAATDAAFASLASQASVSFINNKGDVGKTLKELGRSSTVKNLVVAAATAGVADKIGASALNNVSDKQWINNLTVNLANAGSAALINTAINGGSLKDNLGDAALGAIVSTVHGEVASKIKFNLSEDYITHKIAHAIAGCAAAAANKGKCQDGAIGAAVGEIVGEALTNGKNPATLTAKEREQILAYSKLVAGTVSGVVGGDVNTAANAAKVAIENNLLSQEEYALREKLIKKAKGKGLLSLDWGSLTEQEARQFIYLIEKDRYSNQLLDRYQKNPSSLNNQEKNILAYFINQTSGGNTAWAASILKTPQSMGNLTIPSKDINNTLSKAYQTLSRYDSFDYKSAVAAQPALYLLNGPLGFSVKAATVAAGGYNIGQGAKAISNGEYLHGTVQVVNGTLMVAGSVSAQAAISAKPAPVTRYLSNDSAPALRQALTAESQRIRMKLPEEYRQIGNLAIAKIDVKGLPQRMEAFSSFQKGEHGFISLPETKIFKPISVDKYHNIASPPRGTLRNIDGEYKLLETIAQQLGNNRNVSGRIDLFTELKACQSCSNVILEFRNRYPNIQLNIFTGK

SEQ ID NO: 65773 - protein, 833 aa, Neisseria meningitidis
MLKTPPTLAAELSGKTGVSISAPYANENSRILLSTTDISSENGKIKIQSYGDQYYYARQSELYTFERRSYKTGKWYNRKHITEVKEHKNAKPDAVNLSASQGIDIKSGGSIDAYATAFDAPKGSINIEAGRKLTLYAVEELNYDKLDSQKRRRFLGISYSKAHDTTTQVMKTALPSRVVAESANLQSGWDTKLQGTQFETTLGGATIRAGVGEQARADAKIILEGIKSSIHTETVSSSKSTLWQKQAGRGSNIETLQLPSFTGPVAPVLSAPGGYIVDIPKGNLKTQIETLTKQPEYAYLKQLQVAKNINWNQVQLAYDKWDYKQEGMTPAAAAVVVIVVTVLTYGALSAPAAAGTAGAAGAGAGGAAAGTAAGTGVAAGTAATTGVAAGTSAAAITTAAGKAALASLASQAAVSLINNKGDINHTLKELGKSSTVRQAATAAVTAGVLQGISGLNTQAAEAVSKHFHSPAAGKLTANLINSTAAASVHTAINGGSLKDNLGDAALGAIVSTVHGEVASKIKFNLSEDYIAHKIAHAVAGCASAVANKGKCRDGAIGAAVGEMVGETLLDGRDVGKLSPQERQKVIAYSQIIAGSAVALVKGDVNTAVNAATVAVENNSLLARRRVNIRWTPRQELEHEYAILEIQAITNQIRRLDPKFNGIAILRTPGEPWTRHDVQTYRQYYNQLRESRGFAVEPIYRIRINNGNEFNRIMSSKYPYNELYVANPKSATGYFRVDSYDPATREIISRKFTQFSQIQESTGIGYIKEAVRKYSPGTVISNVPSTPTTIRGRKLEGKLILEVPAQVNPIPQSVLRAAQEENVIIRDTTGRIYK

SEQ ID NO: 65774 - protein, 140 aa, Neisseria meningitidis
MKITKIFTFDSSHMLDGHDGKCQNLHGHTYKLEITVSDGIIKGGAKDGMVMDFTDLKAIVKQHITDPFDHAFIYHGGNSRECQIAALLEGWNMKTLRLPCRTTAENMAVEMYDRLKNAGLNVCRVKLWETPTSCAEYEGE

SEQ ID NO: 65775 - protein, 361 aa, Neisseria meningitidis
MTVPCIPRGPVMADIAAFRLTEEEKQRLLDPAVGGVILFRRNFQNIAQLKELTAEIKALRTPELIIAVDHEGGRVQRFIEGFTRLPAMNVLGQIWDKDGASAAETAARQIGWVLATELSACGIDLSFTPVLDLDWGNCAVIGNRSFHRNPEAVARLALALQKGLEKGGMKSCGKHFPGHGFVEGDSHLVLPEDGRSLSELEAADLAPFRIMSREGMAAVMPAHVVYPQVDTKPAGFSEIWLKQILRRDIGFKGVIFSDDLTMEGACGAGGIKERARISFEAGCDIVLVCNRPDLVDELRDDFRIPDNPALAQRWQYMANTLGSAAAQAVIQTADFQAAQAFVAGLASPQDTAGGVKVGEAF

SEQ ID NO: 65776 - protein, 499 aa, Neisseria meningitidis
MFKKYQYLALAALCAASLAGCDKAGSFFGADKKEASFVERIKHTKDDGSVSMLLPDFVQLVQSEGPAVVNIQAAPAPRTQNGSSNAETDSDPLADSDPFYEFFKRLVPNMPEIPQEEADDGGLNFGSGFIISKDGYILTNTHVVTGMGSIKVLLNDKREYTAKLIGSDVQSDVALLKIDATEELPVVKIGNPKDLKPGEWVAAIGAPFGFDNSVTAGIVSAKGRSLPNESYTPFIQTDVAINPGNSGGPLFNLKGQVVGINSQIYSRSGGFMGISFAIPIDVAMNVAEQLKNTGKVQRGQLGVIIQEVSYGLAQSFGLDKAGGALIAKILPGSPAERAGLRAGDIVLSLDGGEIRSSGDLPVMVGAITPGKEVSLGVWRKGEEITIKVKLGNAAEHIGASSKTDEAPYTEQQSGTFSVESAGITLQTHTDSSGGHLVVVRVSDAAERAGLRRGDEILAVGQVPVNDEAGFRKAMDKAGKNVPLLIMRRGNTLFIALNLQ

SEQ ID NO: 65777 - protein, 407 aa, Neisseria meningitidis
MSAQSQNNHTSPLVVLTTLFFMMGFITCMNDILIPHLKEIFDLSYVQAMLIQFCFFTAYAVMSIPMGAFVGKVGYKNGVIGGFLLTAVGCLLFYPAAGSHSYAVFLGALFILASGVTLLQVAGNPYVTLLAKPGKESATLTLVQAFNALGTTIAPQIGAFLILADATQTVSKAEQISSVQIPYLGLAGLLIILAVFVKMIRLPDARKIAAEESAHNHDGKTSVWQYKHLVFGTAGIFCYVGAEVSIGSLMVNVLGYLKGLDHASAAHYLSFYWGGAMVGRFLGSAVMAKFAPNRYLAFNASAAVVLLAVAMATGSGNADVAMWSLLAIGFFNSIMFPTIFSLATKGLGKFTNAASGVLCTAIVGGAVVPVVQGWVADTYTLMSSFVVSVICYLYIVFFAVYGYRADK

SEQ ID NO: 65778 - protein, 274 aa, Neisseria meningitidis
MDGAQPKTNFFERLIARLAREPDSAEDVLTLLRQAHEQEVFDADTLLRLEKVLDFSDLEVRDAMITRSRMNVLKENDSIERITAYVIDTAHSRFPVIGEDKDEVLGILHAKDLLKYMFNPEQFHLKSILRPAVFVPEGKSLTALLKEFREQRNHMAIVIDEYGGTSGLVTFEDIIEQIVGDIEDEFDEDESADNIHAVSAERWRIHAATEIEDINAFFGTEYSSEEADTIGGLVIQELGHLPVRGEKVLIGGLQFTVARADNRRLHTLMATRVK

SEQ ID NO: 65779 - protein, 311 aa, Neisseria meningitidis
MNPKKLVIASRESLLAMWQAKHIQGRLKALYPDCEVEILGMTTRGDQILDKTLSKVGGKGLFVKELEQALYDGRADLAVHSIKDVPMDLPEGFALAAIGERANPFDAFVSNQYARLEEMPEGAVVGTSSLRREAQLRARYPHLLIKPLRGNVQTRLSKLDNGEYDAIILAAAGLQRLKLDGRIRMILSESDSLPAAGQGALGIEIAAHREDLYEVLKPLNHGVTNACVTAERALARALGGSCQVPLAAYCTEENGLLTLRGLVGHPDGSVVLRADAQAPAEYADALGRAVAKKLADDGARELIGAVLNTEN

SEQ ID NO: 65780 - protein, 1161 aa, Neisseria meningitidis
MRLTHIKLSGFKSFTDPTTIHVPGQLVAVIGPNGCGKSNVIDAVRWVLGEVSAKQLRGESMQDVIFNGAATRRPAPRASVELVFDNSDHSLQGAWGQYAEVSIKRQLTRQGESTYFINNQTVRRRDITDLFLGTGVGARGYAVIEQGMISRIIEARPEELRAYIEEAAGVSKYKERRKETEGRLKDTREHLQRLGDLQNELARQVEKLEKQAETAERYKSLTAQLNRQQDLLDYAQWQQSLAAADKATAQHQSLQAQQDETAAQVQALNDEVHALQTAEQSQQQAVHELGNKRGVLREQIARLEEQIRHQQNLHQRIERDKQAAQAQMQRIHQEQQQIRVQLEENELQAEEKQTELAEWAMQVAEHEERLPELEETQATLNAAFQTQQDEANRIRRELALKQQQLAHAEQTVAKHEERKGRLKQENQALNLPDEAETAAAQEAAALLQSQQEHYEEQIIAAEEALHAAREAFQTTSSRFQSLKQQHITLQAQQQALSQILSQQQEAADFWQATDYAAAPQLWQHITAPAEWQHALSVILAERLHARAVPQGFVPPEPLPQGQAAWLSDGLSGGIKKSLPVQALVNQIQAQPPFQTALHYWLDGVLCAPDLSYALAHQSDLGAHQIWLTPEGHQVDKVSVLLYAKPAQESLIAQKAHLDGIASELDNLAPELSAAEAAFKQAEAAVRSSEVQHKNLMQQQQQHTRQYSQAQQRAAELLARTNQGQIRREHIERELAQLAEEQTVLQHTSDGLSDDIAILQEAAAELEHQQQTAAHSRQEQQGRLKQAQLALLEANRQYGLAEVAVHKLNQQKQNYQQQIAQLEQQTFDWQERQQELALAYETEFQNDEQHIKLEELSEAVQSLDEEYIVVQEKLAQIQEQGREQYARVQTLQTKLPQLQAATQTALLQQQEALINAKRYHQNLTERAADLDALEALAKESPKVLNSSIGSLSQQIEALGAVNLAALQELEEARERDGYYRSQSEDVQTAITLLEEAIAQIDDKTKARFKETFDAVNGKVQTFFPTLFGGGEATLKMIGDDLLTAGVSIMARPPGKKNSTIHLLSGGEKALTAMSLVFALFSLNPAPFCLLDEVDAPLDDANTSRFCNLVKEMSAQTQFLYISHNRLTMEMAEQLVGVTMQEKGVSRVVAVDIKQALEMAESV

SEQ ID NO: 65781 - protein, 346 aa, Neisseria meningitidis
MQAVVVNKNVAGDVEVVEREVRPLEYGEALVEVEYCGVCHTDLHVAAGDYGEKPGRVLGHEGIGLVKEVADGVKHLKVGDRVSIAWLFQSCGSCEYCNTGRETLCRSVLNAGYTADGGMATHCIVSADYAVKVPEGLDPAQASSITCAGVTTYKAIKVSSVRPGQWIAIYGAGGLGNLGVQYAKKVFGAHVVAIDINDDKLAFAKETGADLVVNAAKEDAAKVIQEKTGGAHAAVVTAVSAAAFNSAVNCVRAGGRVVAIGLPPESMDLSIPRLVLDGIEVVGSLVGTRKDLEEAFQFGAEGLVVPKVQLRALDEAPAIFQEMREGKITGRMVIDMKKECGCGHHR

SEQ ID NO: 65782 - protein, 260 aa, Neisseria meningitidis
MKTKLIKILTPFTVLPLLACGQTPVSNANAEPAVKAESAGKSVAASLKARLEKTYSAQDLKVLSVSETPVKGIYEVVVSGRQIIYTDAEGGYMFVGELINIDTRKNLTEERAADLNKIDFASLPLDKAIKEVRGNGKLKVAVFSDPDCPFCKRLEHEFEKMTDVTVYSFMMPIAGLHPDAARKAQILWCQPDRAKAWTDWMRKGKFPVGGSICDNPVAETTSLGEQFGFNGTPTLVFPNGRSQSGYSPMPQLEEIIRKNQ

SEQ ID NO: 65783 - protein, 316 aa, Neisseria meningitidis
MSTFFRQTAQAMIAKHIDRFPLLKLDQVIDWQPIEQYLNRQKNRYLRDHRGRPAYPLLSMFKAVLLGQWHSLSDPELEHSLITRIDFNLFCRFDELIIPDYSTLCRYRNWLAQDDTLSELLKLINCQLTEKGLKIEKASAAVVDATIIQTAGSKQRQAIEVDEEGQISGQTTPSKDSDARWIKKNGLYKLGYKQHTRTDVEGYIEKLYITPTNAHECTHLSPLLEGLPKGTTVYADKGYDSAENRQHLEEHQLQDGIMRKACRNRPLSETQTKRDRYLSKTRGDVFEPVESRQQAKCARCRPKGDRMPDYRVSRED

SEQ ID NO: 65784 - protein, 642 aa, Neisseria meningitidis
MAKVIGIDLGTTNSCLAISENGQTKVIENAEGARTTPSVIAYLDGGEILVGAPAKRQAVTNAKNTIYAAKRLIGHKFEDKEVQRDIESMPFEIIKANNGDAWVKAQGKELSPPQISAEVLRKMKEAAEAYLGEKVTEAVITVPAYFNDSQRQATKDAGRIAGLDVKRIINEPTAAALAFGMDKGDNKDRKVAVYDLGGGTFDISIIEIANLDGDKQFEVLATNGDTFLGGEDFDQRLIDYIIDEFKKEQGIDLKQDVMALQRLKEAAEKAKIELSSGQQTEINLPYITMDATGPKHLAMKITRAKFESLVEDLIARSIEPCRTALKDAGLSTGDIDDVILVGGQSRMPKVQEAVRDFFGKEPRKDVNPDEAVAVGAAIQGEVLSGGRSDVLLLDVTPLSLGIETMGGVMTKLIQKNTTIPTKASQVFSTAEDNQSAVTIHVLQGERERASANKSLGQFNLGDIAPAPRGMPQIEVTFDIDANGILHVSAKDKGTGKAANITIQGSSGLSEEEIERMVKDAEANAEEDKKLTELVASRNQAEALIHSVKKSLADYGDKLDAAEKEKIEAALKEAEEAVKGDDKTAIDAKAEALGTASQKLGEMVYAQAQAEAQAGEGAQAESSAKKDDDIVDADFEEVKDDKK

SEQ ID NO: 65785 - protein, 272 aa, Neisseria meningitidis
MKKDHLNTTGFDLWHTIREETAAAVSAEPMLASFLHQTVLRHESLGSVLAYHLSSKLGSPIMDVRALFEIYQQALGSDTQIGKCVEADLKAIYERDPACDEYSLPLLYFKGFHAIQAHRINHRLYLDGRKTLAYFLQNRMSEVFGVDIHPAARFGYGLMLDHATGFVAGETAVLGNNISILHGVTLGGSGKEGGDRHPKIGDGVMIGANASILGNIRIGSNAKIGAGSVVVSDVPPSITVVGVPAKPVARSLKTPSADMDQNIQFTEIDFMI

SEQ ID NO: 65786 - protein, 368 aa, Neisseria meningitidis
MRMITLKTTPFHQAHQDAGAKLVDFAGWELPIHYGSQIAEHEAVRTDAGMFDVSHMLVTDVAGANAKAFFRKLIANDVAKLAFVGKALYSALLNDNGGVIDDLIVYRTNEAETQYRIVSNGATREKDTAQFHKVGQEFGVSFNPRYDLGMLAVQGPKAIEKLLTVKPEWADVVHNLKPFQGADLGNDWFVARTGYTGEDGVEVILPGTEAVAFFKALQAAGVQPCGLGARDTLRMEAGMNLYGNDMDDDTSPLEAGMGWTVDLKDESRDFVGKAALLALKEKGVAVKQVGLLLGKGGILRAHMEVLTDKGKGETTSGVFSPSLKQSIAIARVPKDFDGDTAKVLIRGKEADVRVLKLPFVRNGQKQFD

SEQ ID NO: 65787 - protein, 415 aa, Neisseria meningitidis
MQLTAVGLNHQTAPLSIREKLAFAAACLPEAVRNLARSNAATEAVILSTCNRTELYCVGDSEEIIRWLADYHSLPIEEISPYLYTLGMQETVRHAFRVACGLDSMVLGEPQILGQIKDAVRVAQEQESMGKKLNALFQKTFSVAKEVRTDTAVGENSVSMASASVKLAEQIFPDIGDLNVLFIGAGEMIELVATYFAAKSPRLMTVANRTLARAQELCDKLGVNAEPCLLSDLPAILHEYDVVVSSTASQLPIVGKGMVERALKQRQSMPLFMLDLAVPRDIEAEVGDLNDAYLYTVDDMVNIVQSGKEARQKAAAAAETLVSEKVAEFVRQQQGRQSVPLIRALRDEGEKARKQVLENAMKQLAKGATAEEVLERLSIQLTNKLLHSPTQTLNKAGEEDKDLVHAVAQIYHLDK

SEQ ID NO: 65788 - protein, 344 aa, Neisseria meningitidis
MSLPAMDAGIYLEETAPRALIEHNNILDNSVGVYLHGSADAMVRENKIVGDATLRVNERGNGVTVWNAPGAQVVGNDISKGRDGIFSNTSTHNTYKNNRFSDLRFAVHYMYTNDSEISGNISVGNNMGYVLMFSERLKVFDNIAVGSRDQGIMLNYVNYSDIHDNIINKAGKCVFAYNANYDKLSANHFENCQIGIHFTAAIEGTSLHDNSFINNESQVKYVSTRFLDWSEGGHGNYWSDNSAFDLNGDGFGDSAYRPNGIIDQIIWRAPVSRLLMNSPAISIVKWAQAQFPAVLPGGVVDSKPLMKPYAPKIQTRYQAMKDGLLKKVETRQLEWGRAENGSLN

SEQ ID NO: 65789 - protein, 216 aa, Neisseria meningitidis
MPSENTKGTTMTTHHVELRKVTKRFGAQKAVNQVDLVLKAGESVGLAGHNGAGKSTIMKLILGLITPTEGEVMLLGERTGSKAGARLRSQIGYLPETVALHPSLTGIETLDFYAKLKKQPLTQNRGLLERVGISQAAHRRVGTYSKGMRQRLALAQALLGEPKVLLFDEPTTGLDPASRQMFYEVVRELNGRGATVLLSTHALAELDGHADRIIVD

SEQ ID NO: 65790 - protein, 585 aa, Neisseria meningitidis
MVFRRPLLYLVTICSRCIITDLQFNNKYTGTAMTESITRDSMQYDVVIVGAGPSGLSAAIKLKQLAEKNGREISVCVVEKGSEAGAHSLAGAVIDPIALNELIPDWKEKGAPLTRTVTQDKVLFLTEKKAFNLPITPNFDNHGNYIVSLGEVVRWLAEQAENMGVEIYPGFAAAEVLYHEDGSVKGIATGNMGVGKNGEPTDSFQPGMELWAQQTLFAEGCRGSLSKQIIERFKLDQNSQPQTYGLGIKEVWEVPSEQHQPGLVMHSAGWPLDSKTYGGAFVYHFDDNKVAVGFVVGLDYQNPYLSPFEEFQRFKTHPEIRKTFEGGRRIAYGARSLIEGGLQSLPKLSFKGGVLVGDAAGFLNMPRIKGIHTAMKSAMLAAEAVFPLLENLEEVENFDSGKEAADYQQRFEQSWLYQELYAARNVRPSFKWGVYLGSLYTGIDQMIFRGKAPWTLKHHGKDNEQLKKAAACTPIDYPKPDGVLTFDRLSSVFLANLAHEENQPDHLVLNNPQTMIDVNYKEYASPETRYCPAGVYEIVEENGSPRLQINAANCVHCKTCDIKDPTQNITWICPEGASGPNYGGM

SEQ ID NO: 65791 - protein, 504 aa, Neisseria meningitidis
MELKLKRLILILMLGMFSVNSYAERFKYPIGNSDVRLDIDHTKSVVTDFRVDGQRFSGRIIEPSIIEHVPTGARSLEKIPVKVTASVSRAGVLAGVGALVRQGAKLGKRAVPYVGTALLAYDIYETFKDEIKEQGYQYDPETDKFVKGYEYSNCIWEHAENGIKTYGCYGVDSSIMRLMSDYSRFPEVKELMEHQMEIVGRNYWEMVRKNRNDSFRNYNFSRCYFNWNGGNCNIGEDINDARSFINFSLIRNPKYKEEMDAKKLEEILALKVDANPDKYIQATGYPGYSEKVEVAPGTKVNMGPVTDRNGNPVQVVATFGRDSQGNTTVDVQVIPRPDLTPGSAEAPETKPKPAPTPETNPKEKENPREEDQDNPKPTPTPGETPSPNESPKDRREEKKPDGNGGLLCDLFPKILACAEMGEPSENDFEGIAIPKAVNEETWSPDNMFPSSGVCPKDKTFHVFGKAFSVSYQPLCTLMENVRFAVIIGFIIMSAFITFGSLRKE

SEQ ID NO: 65792 - protein, 121 aa, Neisseria meningitidis
MNLIQQLEQEEIARLNKDIPEFAPGDTVVVSVRVVEGTRSRLQAYEGVVIARRNRGLNSNFIVRKISSGEGVERTFQLYSPTVEKIEVKRRGDVRRAKLYYLRGLTGKAARIKEKLPARKG

SEQ ID NO: 65793 - protein, 249 aa, Neisseria meningitidis
MLIQAVTIFPEMFDSITRYGVTGRANRQGIWQFEAVNPRKFADNRLGYIDDRPFGGGPGMIMMAPPLHAAIEHAKAQSSQAAKVIYLSPQGKPLTHPKAAELAELPHLILLCGRYEGIDERLLQTSVDEEISIGDFVVSGGELPAMMLMDAVLRLVPGVLGDMQSAEQDSFSSGILDCPHYTKPLEFQGMAVPEVLRSGNHGLIAEWRLEQSLRRTLERRPDLLEKRVLIPKESRLLETIRQEQREIQS

SEQ ID NO: 65794 - protein, 169 aa, Neisseria meningitidis
MTDTQNRVAMGYIKGVFGIKGWLKIAANTEYSDSLLDYPEWHLVKDGKTISVTLEAGKVVNSELQVKFEGINDRDLAFSLHGYTIEIPREAFAPTEEDEYYWTDLVGMTVVNKDHTVLGKVSNLMETGANDVLMIDGEHGQILIPFVSQYIETVDTGSKIITADWGLDY

SEQ ID NO: 65795 - protein, 81 aa, Neisseria meningitidis
MVVIRLARGGSKHRPFYNVIVTDSRSRRDGRFIERVGFYNPVANEKQERVRLNADRLNHWIAQGAQVSDSVAKLIKEQKAA

SEQ ID NO: 65796 - protein, 354 aa, Neisseria meningitidis
MKAARFYDKGDIRIEDIPEPTVAPGTVGINVAWCGICGTDLHEFMEGPIFIPPCGHPHPISGESAPVTMGHEFSGVVYAVGEGVDDIKVGQHVVVEPYIIHDDVPTGEGSNYHLSKDMNFIGLGGCGGGLSEKIAVKRRWVHPISDKIPLDQAALIEPLSVGHHAYVRSGAKAGDVALVGGAGPIGLLLAAVLKAKGIKVIITELSKARKDKARESGVADYILDPSEVDVVEEVKKLTNGEGVDVAFECTSVNKVLDTLVEACKPAANLVIVSIWSHPATVNVHSVVMKELDVRGTIAYCNDHAETIKLVEEGKINLEPFITQRIKLDELVSEGFERLIHNNESAVKIIVSPNL

SEQ ID NO: 65797 - protein, 89 aa, Neisseria meningitidis; identical to SEQ ID NO: 65158

SEQ ID NO: 65798 - protein, 295 aa, Neisseria meningitidis
MQKSKLSWFLKLMLALSLAFLYIPLVVLVVYSFNESKLVTVWGGFSTRWYGALLENDTILEAAWLSLRIAVVSSLAAVVLGTLAGYAMARIKRFRGSTLFAGMISAPMVMPDVITGLSMLLLIIQVQIFLQGSEWLQHLYFDRGFFTIFLGHTTLCMAYITVVIRSRLVELDQSLEEAAMDLGARPLKIFFVITLPLIAPAIASGFLLGITLSLDDLVITSFLSGPGSSTLPQVIFSKIKLGLDPQMNVLATILIGIIGTLVIIVNYWMMRQATKRDREAAEAYRQEKLAAEKAN

SEQ ID NO: 65799 - protein, 419 aa, Neisseria meningitidis
MHVSELQTLHISKLLELAEEHGIENANRFRKQDLVFAIVRQMMKKGEGFTCSGTLEILPDGFGFLRSADTSYLAGPDDIYVSPTQIRRFNLHTGDTIEGSVRVPKDNERYFALVRLDTINGDHPEVCRHKILFENLTPLFPTEQLKLERDLKSEENLTGRAIDLISPIGKGQRALLVAPPKSGKTVMLQNIAHAVTSNYPEVELIVLLIDERPEEVTEMSRSVRGEVVSSTFDEPAQRHVQVAEMVLEKAKRMVEHKKDVVILLDSITRLARAYNTVVPTSGKILTGGVDANALHRPKRFFGAARNVEEGGSLTIIATALVETGSRMDDVIYEEFKGTGNMELHLDRRMAEKRLFPAININKSGTRREELLVPNDQLQRMWLLRKFLHPMDEIEAAEFLIGKIKASKNNDDFFELMRGK

SEQ ID NO: 65800 - protein, 273 aa, Neisseria meningitidis
MSSPRHVFYISDRTGLTAENIGEALLNQFGNLSFKRHTHPFVDTPEKARAVVEKVNRSRQENGQRPIAFVSVVDDEIRRIIKGADAFQINFFETFLGLLEKELNTEATASEQGHHSIGNTKRYDARMEAVNFSLNHDDGVSDKNLQEADVILMGVSRSGKTPTCLYLALQYGIRAANYPLIPDDLESADLPRMVKPYRDKLFGLTIQPERLQAIRQERRPNSTYAKIDTCRSEVADAQSMFRRHGIPFANTTDKSVEELAVHILQACKLKRRF

SEQ ID NO: 65801 - protein, 383 aa, Neisseria meningitidis
MDLSIVVPIYNVESYLEACLSSIEPILSNENVELILVNDGSKDGSEDICYKYIDKTTNNKQQTTNNKQQTTNNKQQTTNNKQQTTNNKQQTTNNKQQTTNNKQQTTNNKQQTTNNKHRTPNIKYIYQDNQGTAEARNTGIKNSNGKYIVFIDSDDFINCQVLLDFLSKDDIDMPDVVFLNAVKYDKGSVSHFGEDYQPEKILNQSKVEVLKGLCRFRKFPGSACNKIIKRELIIKEKLFFEKEVYAEDIEWSMRLFNAATTFSYLDGCYYYYRQGRKDSKTGTVSEKSIKSLLYILEKNAEMEFNRDISSYLYSFLSYEYLVLLFIMTSKNIACDADIKRRAYHLRFMLLKSNKLIYKLIFPIITLFGVDITGRILKAIRGNI

SEQ ID NO: 65802 - protein, 531 aa, Neisseria meningitidis
MSQEILDQVRRRRTFAIISHPDAGKTTLTEKLLLFSGAIQSAGTVKGKKTGKFATSDWMDIEKQRGISVASSVMQFDYKDHTVNLLDTPGHQDFSEDTYRVLTAVDSALMVIDAAKGVEAQTIKLLNVCRLRNTPIVTFMNKYDREVRDSLELLDEVENILQIRCAPVTWPIGMGKNFKGVYHILNDEIYLFEAGGERLPHEFDIIKGIDNPELEQRFPLEIQQLRDEIELVQAASNEFNLDEFLAGELTPVFFGSAINNFGIQEILNSLIEWAPAPKPRDATVRMVEPDEPKFSGFIFKIQANMDPKHRDRIAFLRVCSGKFERGMKMKHLRINREIAASSVVTFMSHDRELVEEAYAGDIIGIPNHGNIQIGDSFSEGEQLTFTGIPFFAPELFRSVRIKNPLKIKQLQKGLQQLGEEGAVQVFKPMSGADLILGAVGVLQFEVVTSRLANEYGVEAVFDNASIWSARWVSCDDKKKLAEFEKANAGNLAIDAGGNLAYLAPNRVNLGLTQERWPDIVFHETREHSVKL

SEQ ID NO: 65803 - protein, 500 aa, Neisseria meningitidis
MAKVLIVPVSAGLDASAVAQAFAKALDAQIFQAVDATAETLLAQGKSDDWFDALVGKVAALDAANLVIEGIAPDADKIYLAGKNVELALSLDAAAVFAVRSDNADADELANRLNLAKQFFAAAPGVLEGFVVDGAAASVAEAAAEKTGLTFFGSSDALKDVSVLAGREAKRLSPAQFRYNLIDFARQADKRIVLPEGAEPRTVQAAAICHEKGIARCVLLAKREEVEAVAKERGISLPDSLEIIDPASLVEQYVEPMCELRKSKGLTPEDARKQLQDTVVLGTMMMAQNDVDGLVSGAVHTTANTIRPALQLIKTAPGASLVSSVFFMLLPNQVLVFGDCAVNPNPTAQQLADIAIQSADSAKAFGIDPKVAMISYSTVNSGSGPDVDTVIEATKLAQEKRPDLAIDGPLQYDAATVPGVGKSKAPGSPVAGQATVLVFPDLNTGNCTYKAVQRSANVLSVGPLLQGLRKPVNDLSRGALVEDIVFTIALTAVQAKQMEG

SEQ ID NO: 65804 - protein, 458 aa, Neisseria meningitidis
MHDKTWSGRFNEPVSELVKQYTASIGFDRRLAEWDIQGSLAHAQMLKETGVLDEGDLADIRRGMAEILEEIRSGKIEWSSDLEDVHMNIERRLTDKIGDAGKRLHTGRSRNDQVATDIRLWLRDQITVIQSLIQSLQTALLDLAEQNAETVMPGFTHLQVAQPVSFGHHMLAYVEMLGRDNERMADCRRRVNRMPLGAAALAGTTYPIRREITAELLGFEQICQNSLDAVSDRDFAVEFTAAASLIMVHLSRLSEELILWMSPRFGFIDIADRFCTGSSIMPQKKNPDVPELVRGKSGRVIGHLIGLITLMKSQPLAYNKDNQEDKEPLFDTADTLIDTLRIYADMMRGVTVKPDNMRAAVMQGFATATDLADYLVKKGMPFRDAHEVVAQAVRHADEAGVDLSELPLEVLQGFSDLIADDVYGVLTPEGSLNARNHLGGSAPEQVRFQVKRWREMSA

SEQ ID NO: 65805 - protein, 289 aa, Neisseria meningitidis
MKPIRKAVFPVAGMGTRFLPATKASPKEMLPIVDKPLIQYAVEEAVEAGCTEMVFVTGRNKRSIEDHFDKAYELETELEMRHKDKLLEHVRNILPPNITCLYIRQAEALGLGHAVLCARAAIGDEPFAVILADDLIDAQKGALKQMVEVYERSGNSILGVETVEPSQTGSYGIVETEQLKQFQRITGIVEKPKPEDAPSNLAVVGRYILTPRIFDLLTGLPRGAGNEIQLTDGIAKLLDHEFVLAHPFEGTRYDCGSKLGYLEATVAYGLKHPETGEPFRRLLEKYRTE

SEQ ID NO: 65806 - protein, 199 aa, Neisseria meningitidis
MSEKPEKIVLASGNAGKLKEFGNLFEPYGITVLPQSEFSIPECPEPYSTFVENALAKARHAAGHSGLPALADDSGICAAALNGAPGIHSARYAGSNPKSDTANNLKLAAELAGKADKSCCYVCVLVFVRHKDDPRPIIAEGVWHGQWNGVPAGENGFGYDPYFYLPGHGKTAAELDSEVKNRESHRAQALAELLRKLAL

SEQ ID NO: 65807 - protein, 485 aa, Neisseria meningitidis
MHKILPIAHVLSRLGMLFSFILLIPAALSYAFSDGAYTAFATTATVTLSGSYIVRLATLRFRRELRPRDGFTLVLMLWLAFAAMAAMPMYLYFPNMGFTDAFFESMSGLTTTGATVIPHVDGLAPSVNFWRHMLNWLGGMGIIVLAVAILPMLGVGGTQLFKAEIPGIDKESKMSPRISQVAKKLWFGYTLITILAAACLHFAGMSWFDAVCHAMATLSLGGFSTHDASIAYYNSPLIEAVIIVFTIVGGINFASHFAALNSRSLKTYWKDEECRTMLLLLSGSILTAALYLWHTGYYAGFTESLRYTAFNFVSIGLANGLANTDFAQWPLLISLWMFFLANILANSGSTGGGIKTIRALVLFKFSLREMMVLLHPKAVRTVKISGKAIPDRLALTVMSFIFIYFMTVVLFSFLLMASGMEFTTAFTAVIACITNAGPGLGEVGPAGNYAGLDVMQKWICVTAMLLGRLEIFTVFILFTPAYWKK

SEQ ID NO: 65808 - protein, 841 aa, Neisseria meningitidis
MNPNSKHNTNFTNLLKPSDSDIKQFAAQHIRHLTDLLNRYAYEYYTLDAPSVPDAEYDKLFRELEALERNHPELKLPDSPTQRVGGEPLAGFAEVRHEVPMLSLTNAFSPQDENGVFDHAEMYAFDQRVRDGLDGGKPEYVIEPKFDGLAISLLYRDGVLVQAATRGDGTTGEDVTQNVKTVANIPLRLHGENTPELIEVRGEVLMLKADFAALNKRQAENGQKPFANPRNAAAGSLRQLDSRITAQRKLHFFPYSVARQQGGFVAEEHIQELAYFQALGFSLPNGNFGCFKNIDEVLTFYEQMQQKRPELPYEIDGMVVKVNSLAQQRELGFISRAPRWAVAHKFPAEEALTIVEAIDVQIGRTGAVTPVARLQPVFVGGVTVTNATLHNQDEVSRKDVRVGDTVVVRRAGDVIPEVVRVIFERRPMRETAVAVSDGIGHRQDDLFAETPSANQTQSVPLHKPYRLPTHCPICRSEIEREEGEAVARCSGGMLCQAQRAQGLIHFASRKAMDIDGLGEKQIEQLVAQDLVLHFADLYRLDIPTLQKMKETADKTVAESDQMPSEGSSVGASGKHKKQPVKWAENILAGIESGKTPELARFLFALGIRHVGERTAKTLAQAFGTLERVRRAPEPVLACLPDIGTVVARSIAHFFAQAEQQAMIDELLAAGVAPQTQAVTIPPARHAEPQRWIARLPDFKISENKAQALWELAGKNIEGLQNDKALPADWQAWRSEPQNAALLENLKTFFAQMPSEDEAAQGSDGINKAVAGKTFVLTGTLPTLKRDQAQSLIEAAGGKVSGSVSKKTDYVVAGEAAGSKLEKANALGVSILSEAELLTLLG

SEQ ID NO: 65809 - protein, 206 aa, Neisseria meningitidis [sequence omitted]

SEQ ID NO: 65810 - protein, 290 aa, Neisseria meningitidis
MSWLDKILPPKIKNRSKDGSSNVPEGLWHKCPSCSATVYSTELQQNNQVCPKCNHHNPLSARQRLNLLLDEDGREEVAGNVKPTDPLKFKDGKKYPDRLSAARKLTGEDDALVVMKGKMNGLPVVVAAFEFRFIGGSMGSVVGERFVQGVRRAVADNCPFVCVAASGGARMQEGVNSLMQMTKTSAALHLLTEKRLPFISVLTDPTMGGVSASFAFLGDVVLAEPNALIGFAGPRVIEQTVRETLPEGFQRAEFLLEKGAIDQIVDRRDMKRRISDLITLLCRQDKVSAA

SEQ ID NO: 65811 - protein, 344 aa, Neisseria meningitidis
MQTLTIIRPDDMHLHLRDGDALKAVAPYTARQMGRAVIMPNLKPPVVSVADALAYKARIMAALPEGSAFEPLMTLYLTDQATPALVREAKAAGIVAFKLYPAGATTNSDSGVTDLFKLIPVLEEMAKQGILFLVHGEVTDPEIDIFDREAAFIGRVMKPVLAQVPNLKVVFEHITTAEAARLVLEAGDNVAATVTPQHLLLNRNDLLVGGVRPHHFCLPVLKRETHRQALVAAVTGEKAHKFFLGTDSAPHAKSAKENACGCAGMFSAMTAIELYAEVFEKAGALDKLEAFASKNGARFYGIPENTDTITLVKQSQTVPASIPYGDGELVPMRAGGEIGWTVQY

SEQ ID NO: 65812 - protein, 141 aa, Neisseria meningitidis
MKTARRRSRELAVQAVYQSLINRTAAPEIAKNIREMPDFAKADEELFNKLFFGTQTNAAEYIRQIRPLLDRDEKDLNPIERAVLLTACHELSAMPETPYPVIINEAIEVTKTFGGTDGHKFVNGILDKLAAQIRPDEPKRR

SEQ ID NO: 65813 - protein, 158 aa, Neisseria meningitidis
MNTIAPNLDGKHLRIGIVQARFTNEIGSEMLKVCCRTLQELGVADENITVATVPGALEIPIALMNFASSEKFDALIAIGVVIRGETYHFELVSNESGAGVSRVALDYNIPIANAVLTTENDAQAIERIEEKASDAAKVAVECANLVNLLLEEQFEDEE

SEQ ID NO: 65814 - protein, 307 aa, Neisseria meningitidis
MDIETFLAGERAADGYRCGFVAIVGRPNVGKSTLMNHLIGQKISITSKKAQTTRNRVTGIYTDDTAQFVFVDTPGFQTDHRNALNDRLNQNVTEALGGVDVVVFVVEAMRFTDADRVVLKQLPKHTPVILVVNKIDKDKAKDRYALEAFVAQVRAEFEFAAAEAVSAKHGLRIANLLELIKPYLPESVPMYPEDMVTDKSARFLAMEIVREKLFRYLGEELPYAMNVEVEQFEEEDGLNRIYIAVLVDKESQKAILIGKGGERLKKISTEARLDMEKLFDTKVFLKVWVKVKSGWADDIRFLRELGL

SEQ ID NO: 65815 - protein, 259 aa, Neisseria meningitidis
MKEHKARKRFGQNFLQDTRIISDIVNAVRPQADDVVIEIGPGLAAITEPLAKKLNRLHVVEIDRDIVCRLKTLPFADKLVIHEGDVLQFDFNGIAGKKKIVGNLPYNISTPLLFKLAEVADDVVDMHFMLQKEVVDRMVAAPKSNDYGRLGVMLQYFFDMEMLIDVPPESFDPAPKVDSAVVRMIPVKHRIGKADDFEHFAKLVKLAFHQRRKTIRNNLKELAGDDDLQAVGINPQDRAEHIAPEKYVALSNYLAGKAV

SEQ ID NO: 65816 - protein, 400 aa, Neisseria meningitidis
MKNYHAPDEKGFFGEHGGLFVSETLIPALQELADAYKAAKNDPEFWEAFRHDLKHYVGRPSPVYHAARLSEHLGGAQIWLKREDLNHTGAHKVNNTIGQALLAKRMGKKRVIAETGAGQHGVASATVAARFGMTCDVYMGADDIQRQMPNVFRMKLLGANVVGVESGSRTLKDAMNEAMREWVARVDDTFYIIGTAAGPAPYPEMVRDFQCVIGNEAKAQMQEAIGRQPDVAVACVGGGSNAIGLFHPYIGEENVRLVGVEAGGLGVNTPDHAAPITSGAPIGVLHGFRSYLMQDENGQVLGTHSVSAGLDYPGIGPEHSHLHDIKRVEYTVAKDDEALEAFDLLCRFEGIIPALESSHAVAWAVKNAPKMGKDQVILVNLSGRGDKDINTVAKLKGIKL

SEQ ID NO: 65817 - protein, 1773 aa, Neisseria meningitidis
MKTKRFKINAISLSIFLAYALTPYSEAALVRDDVDYQIFRDFAENKGKFFVGATDLSVKNKQGQNIGNALSNVPMIDFSVADVNRRTLTVIDPQYAVSVKHVKGDEISYYGHHNGHLDVSNDENEYRSVAQNDYEPNKNWHHGNQGRLEDYNMARLNKFVTEVAPIAPTSAGGGVETYKDKNRFSEFVRVGAGTQFEYNSRYNMTELSRAYRYAIAGTPYQDVNVTSNLNQEGLIGFGDNSKHHSPEKLKEVLSQNALTNYAVLGDSGSPLFAYDKQEKRWVFLGAYDYWAGYQKNSWQEWNIYKKEFADEIKQRDNAGTIKGYGEHHWKTTGTNSHIGSTAVRLAGNERGANNGQNVTFENNGTLVLDQNINQGAGGLFFKGDYTVKGANNGITWLGAGIDVADGKKVVWQVKNPNGDRLAKIGKGTLEINGTGVNQGQLKVGDGTVILNQQADADKKVQAFSQVGIVSGRGTLVLNSPDQINPNNLYFGFRGGRLDANGNDLTFEHIRNVDEGARIVNHNTDRASTITLTGKSLITAPQNLSVYEIRNDYDDDDYYGYYSYRKPIPQGKDLYYKNYRYYALKSGGSVNAPMPENGQTENNDWILMGSTQEEAKKNAMNHKNNQRISGFSGFFGEENGKGHNGALNLNFNGKSAQNRFLLTGGTNLNGKISVTQGNVLLSGRPTPHARDFVNKSSAQKDAHFSKNNEVVFEDDWINRTFKATEITVNQSASFSSGRNVSNITANITATDNAKVNLGYKNGDEVCVRSDYTGYVTCNTGNLSDKALNSFGATKINGNVNLNQNAALVLGKAALWGQIQGQGNSRVSLNQHSKWHLTGDSQVHNLSLADSHIHLNNASDAQSANQYHTLKINHLSGNGHFHYLTHLAENLGDKVLVKESASGHYQLHVQDKTGEPNQEGLNLFDASSVRDRSHLSVSLANHHVDLGALRYTIKTENGITRLYNPYAENRRRVKPAPSPATNTASQAQTDSAQIAKPQNIVVAPPSPQANQAEEAKRQQAKAEQVKRQQAEAERKSAELAKQKAEAEREARELATRQKAEQERSSAELARRHEKEREAAELSAKQKVEAEREAQALAVRRKAEAEEAKRQAAELARRHEKEREAAELSAKQRVGEEERRQTAQSQPQRRKRRAAPQDYMAASQDRPKRRGHRSVQQNNVEIAQAQAELARRQQEERKAAELLAKQRAEAEREAQALAARRKAEAEEAKRQAAELAHRQEAERKAAELSANQKAAAEAQALAARQQKALARQQEEARKAAELAVKQKAETERKTAELAKQRAAAEAAKRQQEARQTAELARRQEAERQAAELSAKQKAETDREAAESAKRKAEEEEHRQAAQSQPQRRKRRAAPQDYMAASQNRPKRRGRRSTLPAPPSPSFDSSAYAAPRALHNPDWYENDYEEIPLDALEDENVSESVDTSDKQPQDNTELHEKVETVSLQPRAAQPRAQAATQPQAQAAAQADAVSTNTNSALSDAMASTQSILLDTGASLTRHIAQKSRADAEKNSVWMSNIGYGRDYASAQYRRFSSKRTQTQIGIDRSLSENMQIGGVLTYSDSQHTFDQASGKNTFVQANLYGKYYLNDAWYMAGDIGAGSLRSRLQTQQKANFNRTSIQTGLTLGNTLKINQFEIVPSAGIRYSRLSSADYKLGNDSVKVSSMSVKTLTAGLDFAYRFKVGNLTVKPLLSAAYFANYGKGGVNVGGNSFVYKADNQQQYSAGAALLYRNVTLNVNGSITKGKQLEKQKSGQIKIQIRF

SEQ ID NO: 65818 - protein, 294 aa, Neisseria meningitidis
MSSGNIHIHSMTGFANAAAECGSKRINLDIRAVNHRFLDIQIRMPDDLRYLESGIREKISSHIARGKVECKIQIQDTENSRQSLELNSDLVNQLAEINKNLRKHHDLAKLGVADILRFPGVLASQRENTEELAKSITELTEKALKDFTAARRREGKKLGEHLLQRLESMEEIIDALSELFPTLLETHKEKIRARLVEAVGDINNDRLQQEFALFIQKSDIDEEFSRLRTHIAEVRRIVTEHKGSSGKRLDFLMQELNREANTLGSKSIAAECTQASVELKVLIEQMREQVQNIE

SEQ ID NO: 65819 - protein, 512 aa, Neisseria meningitidis
MVSKLDKYWQHPALYWPLLILFAAATPFTFAPYYHFWLMPLIFGAFVRLIELRPRFAVSSAYLFGLTAYTTQFYWIHTALHDVSGLPDLYAVPLTFLLPAYLALYPALCFWLWKKFTLPRGIKIGLVLPILWTLTEFARERFLTGFGWGAIGYSQITPDSPLAGFAPFGGIHMVTLATAFLGVWLVLASDNTARSGKRLLPIILIAALLAAGYTARQTDFTRPDGSRSTVALLQGNIDQTLKWREDQVIPTIQKYYEQVGKTTADIVILPETAIPVMRQNLPENILAKFAEQAQNNGSALAVGISQYTSDGNGYENAVINLTGYQENNQDGIPYYAKNHLVPFGEYKPLPFLTTPLYKMMNMPLSDFRKGGGKQSALLMKNQKIAFNICYEDGFGDELIAAAKDATLLANASNMAWYGKSNAMYQHLQQSQARAMELGRYMVRATNTGATAIISPKGNIIAQAQPDTETVLEGHIKGYVGETPYMKTGSSWWLMGILTLAALILFIFRNKEH

SEQ ID NO: 65820 - protein, 371 aa, Neisseria meningitidis
MLKFTLHKKDGYARRGTLELNHGKIETPVFMPVGTYGSVKAMNPQNLHDIKAQIILGNTYHLWLRPGLEVVEQFGGLHGFIGWDKPILTDSGGFQVFSLSDMRKLTEEGCTFKSPINGDKLFLSPEISMKIQTVLNSDIAMQLDECTPGEATREQARKSLQMSLRWAERSKKAFEDLKNPNALFGIVQGAMYEDLREESLKGLEELDFPGLAIGGLSVGEPKPEMYRMLRAVGPILPEHKPHYLMGVGTPEDLVYGVAHGVDMFDCVMPTRNARNGWLFTRFGDLKIKNAKHKLDKRPIDESCTCYACQNFSRAYLHHLHRAGEILGAQLNTIHNLHFYQVIMAEMREAVEQGKFADWQAQFHENRARGTD

SEQ ID NO: 65821 - protein, 637 aa, Neisseria meningitidis
MLNITLPDGSVRQYESPVTVAQIAASIGAGLAKAAVAGRVNGKLVDACDPIVEDSAVQIITPKDQEGIEIIRHSCAHLVGHAVKQLYPNAKMVIGPVIEEGFYYDIATEKPFTPEDVAAIEARMKELIAQDYDVVKIMTPRAEAIKIFQERGEEYKLRLIDDMPEVEAMGMYHHQEYVDMCRGPHVPNTRFLKNFKLTKLAGAYWRGDSNNEMLQRIYGTAWATKDELKAYIQRIEEAEKRDHRKLGKQLDLFHLQDEAPGMVFWHPKGWALWQVIEQHMRKELNAAGYKEVKTPQIMDKTFWEKSGHWENYKDNMFVTSSEKREYAVKPMNCPGHVQIFNNGLRSYRDLPMRLAEFGSCHRNEPSGALHGLMRVRGFVQDDAHIFCTEDQIVSEARAFNELLVRIYKQFGFHDVSVKLSLRPEQRAGSDDVWDKAEQGLREALTACGVEWGELPGEGAFYGPKIEYHVRDALGRSWQCGTLQLDFVLPERLDAEYVTENNDRARPVMLHRAILGSLERFIGILIENHAGSFPLWLAPVQLVIMNITENQADYCREVAAKLQAAGFRVELDLRNEKIGYKIRDNSQYRFPYQIVVGDKEKQENKVAVRRKAEDLGSLDLDDFIAQLQQEITDALVNH

SEQ ID NO: 65822 - protein, 173 aa, Neisseria meningitidis
MIAQEREARINGEITAKEVRLISESGEQLGVVSVREALAMAEGQDVDLVEISPTAKPPVCKLMDYGKYKYQQAKKRDEAKKNQKQVQIKEIKFRPGTDEGDYQIKMRNINRFLADGDKVKVTLRFRGREMAHQQLGAQLLERVKEDLAEVAQIESFPKMEGRQMVMMIAPKKK

SEQ ID NO: 65823 - protein, 65 aa, Neisseria meningitidis; identical to SEQ ID NO: 65455

SEQ ID NO: 65824 - protein, 119 aa, Neisseria meningitidis; identical to SEQ ID NO: 65457

SEQ ID NO: 65825 - protein, 330 aa, Neisseria meningitidis
MENVNRIVAEGIAAVEAAQDFNALEQIKARYLGKTGELTGLLKTLGQMSPEERKTIGAHINECKNRFQTAFNAKRDALNEAKLQARLAAEALDITLPGRAQEGGSLHPVTLTLQRVVELFHGMGFEVADGPEIEDDFHNFQALNIPANHPARAMQDTFYVENGDVLRTHTSPIQIRYMLDKKEPPVRIIAPGRVYRVDSDATHSPMFHQAEGLWVEEGVTFADLKAVFTDFIRRFFERDDLQVRFRPSFFPFTEPSAEIDIMGENGKWLEVGGCGMVHPNVLKNVNIDPEKYTGFAFGIGLDRFAMLRYNVNDLRLFFDNDLNFLKQFVK

SEQ ID NO: 65826 - protein, 787 aa, Neisseria meningitidis
MQFSYSWLKTQADTELSSDKLEHLLTMSGLEVEEAETAAPAFAGVVIAEVKSVEKHPDADRLNVTRVDVGTGELVQIVCGAPNVKAGIKVPCSLPGAVLPGNFKIKPTKMRGVVSNGMLCSTDELGLPDDGVNGLHILPEDAPVGTNIREYLDLDDTLFTLKITPNRADCLSVKGIAREVSALTGCAFRQPEIRKMPSEGGKTRAVKIDAPADCGRFISRVIENVNAKAATPDWMKQRLERSGIRSISVLVDIGNYVMLEIGQPMHVFDADKLSGSLHIRRAREGETLECLNEKTVSLSENTLVVADEKGALSLAGLMGGAASAVSDGTQNIVLEAAWFAPEIIAGKSRQYGFGSDSSFRFERGVDYRLQADAIERATELVLQICGGAAGEMVEAQGELPEVKQVGLRLGRLKTVLGVDIPSEQVETILQHLGLQPEKTAEGFRVTAPSFRFDIEIEADLIEEIGRVYGYENIPDDYTSGRLKMLELPETRRPRFAVYNEMAARGYREVVSYAFVNEQWEQDFAANADPIRLQNPLAAQYAVMRSTLIGGLVEILQNNLNRKQNRVRVFEIARVFGKGSDGRFVQNERIGGLWYGAAMPEQWGGKTRNADFYDIKADVENLLKNKAVEFVKTGYPALHPGRAANIVSDGKVIGFVGELHPKWLQKYDLPQAPLVFEIDMAAVLECGKTRYRAVSKFQPVRRDLAFVMPEAMSHDDLLLVLKGAANKLVQEISVFDVYRGMGLPEGMKSVAVKVILQDMENTLTDEAVEPLIGKLIGAATAAGARLRS

SEQ ID NO: 65827 - protein, 433 aa, Neisseria meningitidis
MPSEHQHISSLLDFDRTHLLHPYTSMTDPLPVYPVKRAEGVFIELADGTRLIDGMSSWWCAIHGYNHPVLNQVVETQIKQMAHVMFGGLTHESAVELGKLLVGILPQGLDRIFYADSGSVSVEVALKMAVQYRQARGLMAKQNIATVRRGYHGDTWNAMSVCDPETGMHHIFGSTLPQRYFVDNPKSRFDDEWDGADLQPVRALFEAHHADIAAFILEPVVQGAGGMYFYHPQYLRGLRDLCDEFDIVLIFDEIATGFGRTGKMFACEHAEVVPDIMCIGKGLSGGYMTLAAAITSQKVTETISRGEAGVFMHGPTFMANPLACAVACASVKLLLSQDWQANIRRIESILKGRLKAAWDIRGVKDVRVLGAIGVIELDKGVDMARFQADCVAQGIWVRPFGRLVYLMPPYIISDGLLTELADKTVQILKEHSK

SEQ ID NO: 65828 - protein, 149 aa, Neisseria meningitidis
MSLIGEILPLSHIVLDMEVGSKKRLFEEAGLLLERESSLSHADVFECLFAREKLGSTGLGQGVAIPHGRHAGVKQATGAFIRTREPVGFDAPDGKPVSLVFILLVPENATGEHLEVLSKLAGKFSQKSIRESLMTVSSAEEARAILTEE

SEQ ID NO: 65829 - protein, 320 aa, Neisseria meningitidis
MPSISVRRLFDDNQYKLQLAWAAGNSGADNRIGVEADKPVLALVGHLNFIHPNQIQVVGLAESEYLNRLESGETGYQFGDLFDISMSLVIVANGLPVSPGLRDYCHKNDIPLLTSKLESPYLMDVLRIYLQRTLAASSVKHGVFLDVFEIGVLITGHSGLGKSELALELISRGHSLIADDAVELFRIGPETLEGRCSPMLRDFLEVRGLGILNIRHIFGETSIRPKKILQLIINLVEADDEYMKQLDRLSIRTETESILNVNVRSVTLPVAVGRNLAVLVEAAVRNYILQLRGKDSTREFLERHQTQLKENEQHNENRPD

SEQ ID NO: 65830 - protein, 284 aa, Neisseria meningitidis
MKIVLISGLSGSGKSVALRQMEDSGYFCVDNLPLEMLPALVSYHIERADETELAVSVDVRSGIDIGQAREQIASLRGLGHRVEVLFVEAEESVLVRRFSETRRGHPLSNQDMTLLESLKKEREWLFPLKEIAYCIDTSKMNAQQLRHAVRQWLKVERTGLLVILESFGFKYGVPNNADFMFDMRSLPNPYYDPELRPYTGMDKPVWDYLDGQPLVQEMVDDIERFVTHWLPRLEDESRSYVTVAIGCTGGQHRLVYIVEKLARRLKGRYELLIRHRQAQNLSDR

SEQ ID NO: 65831 - protein, 313 aa, Neisseria meningitidis
MAIQWFPGHMNKAKKAIAERAKSVDMVIEMLDARMPASSENPLLAQLSKGKPKLKILNKQDLADPERTKIWLEHYNSRPDTCAIALDSSETGAHGKITQACRAMIPHRQGIDKPLRVLICGIPNVGKSTLINGMIGKKSAKTGNEPGITKAEQRLFLADDFWLYDTPGMLWPKIIVEESGYNLAAGGSVGRNALDEEEVALELLDYLRRHYLPMLQERYQADKDPSSHWDENVWLEWIAKKRGAVLSGGRINYQKAAENILTDFREGKIGRITLETPNQWETWLKKARQKEAELKAIREARKAERKGQKPSEA

SEQ ID NO: 65832 - protein, 245 aa, Neisseria meningitidis
MGGQKTHFGFSTVNEDEKAGKVAEVFHSVAKNYDIMNDVMSAGLHRVWKHFTINTAHLKKGDKVLDIAGGTGDLSRGWAKRVGKEGEVWLTDINSSMLTVGRDRLLNEGMILPVSLADAEKLPFPDNYFNLVSVAFGLRNMTHKDAALKEMYRVLKPGGTLLVLEFSKIYKPLEGAYDFYSFKLLPAMGRLIAKDAESYQYLAESIRMHPDQETLKQMMLDAGFDSVDYHNMSAGIVALHKGVKF

SEQ ID NO: 65833 - protein, 164 aa, Neisseria meningitidis
MNNRHFAVIALGSNLENPAQQVRAALDTLSSHPDIRLKQASSLYMTAPVGYDNQPDFVNAVCTVSTTLDGIALLAELNRIEADFGRERSFRNAPRTLDLDIIDFDGISSDDPRLTLPHPRAHERSFVIRPLAEILPDFILGKHGKVAELSKRLGNQGIRLLPDK

SEQ ID NO: 65834 - protein, 124 aa, Neisseria meningitidis
MQYLIVKYSHQIFVTITILVFNIRVFLLWKNPEKPLAGFWKALPHLNDTMLLFTGLWLMKITHFSPFNAPWLGTKILLLLAYIALGMMMMRARPRSTKFYTVYLLAMCCLTCIVYLAKTKVLPF

SEQ ID NO: 65835 - protein, 291 aa, Neisseria meningitidis
MEEGLIDRLLETLWLDRRLNQNTLNGYRRDLEKIARRLSQSGRMLKDADEADLAAAVYVDGEQRSSQARALSACKRLYIWMEREGIRTDNPTRLLKPPKIDKNIPTLITEQQISRLLAAPDTDTPHGLRDKALLELMYATGLRVSEAVGLNFGNVDLDRGCITALGKGDKQRMVPMGQESAYWVGRYYTEARPALLKGRSCDALFVSQKKTGISRQLAWMIVKEYASQAGIGHISPHSLRHAFATHLVQHGLDLRVVQDMLGHADLNTTQIYTHVANVWLQGVVKEHHSRN

SEQ ID NO: 65836 - protein, 706 aa, Neisseria meningitidis
MFDKHVKTFQYGNQTVTLETGEIARQAAAAVKVSMGDTVVLVAVTTNKEVKEGQDFFPLTVDYLERTYAAGKIPGGFFKREGKQSEKEILTSRLIDRPIRPLFPEGFYHDIQIVAMVVSVDPEIDSDIPAMLGASAALVLSGVPFAGPIGAARVGYINGVYVLNPTKAELAKSQLDLVVAGTSKAVLMVESEAKILPEDVMLGAVVYGHDQMQVAINAINEFADEVNPELWDWKAPETNEELVAKVRGIAGETIKEAFKIRQKQARSAKLDEAWSAVKEALITEETDTLAANEIKGIFKHLEADVVRSQILDGQPRIDGRDTRTVRPLNIQTGVLPRTHGSALFTRGETQALAVATLGTSRDEQIIDALSGEYTDRFMLHYNFPPYSTGEVGRMGAPKRREIGHGRLAKRALLAVLPKPEDFSYTMRVVSEITESNGSSSMASVCGGCLSLLSAGVPLKAHVAGIAMGLILEGNKFAVLTDILGDEDHLGDMDFKVAGTTEGVTALQMDIKIQGITKEIMQIALAQAKEARLHILDQMKAAVAGPQELSAHAPRLFTMKINQDKIREVIGKGGETIRAITAETGTEINIAEDGTITIAATTQEAGDAAKKRIEQITAEVEVGKVYEGTVVKILDNNVGAIVSVMPGKDGLVHISQIAHERVRNVGDYLQVGQVVNVKALEVDDRGRVRLSIKALLDAPAREENAAE

SEQ ID NO: 65837 - protein, 222 aa, Neisseria meningitidis
MNHDITFLTLFLLGFFGGTHCIGMCGGLSSAFALQLPPHINRFWLILLLNTGRVSSYTAIGLILGLIGQVGVSLDQTRVLQNILYTAANLLLLFLGLYLSGISSLAAKIEKIGKPIWRNLNPILNRLLPIKSIPACLAVGILWGWLPCGLVYSASLYALGSGSAATGGLYMLAFALGTLPNLLAIGIFSLQLKKIMQNRYIRLCTGLSVSLWALWKLAVLWL

SEQ ID NO: 65838 - protein, 310 aa, Neisseria meningitidis
MKIANSITELIGNTPLVKLNRLTEGLKAEVAVKLEFFNPGSSVKDRIAEAMIEGAEKAGKINKNTVIVEATSGNTGVGLAMVCAARGYKLAITMPESMSKERKMLLRAFGAELILTPAAEGMAGAIAKAKSLVDAHPDTYFMPRQFDNEANPEVHRKTTAEEIWRDTDGKVDVFVAGVGTGGTITGVGEVLKKYKPEVKVVAVEPEASPVLSGGEKGPHPIQGIGAGFIPTVLNTKIYDSITKVSNEAAFETARAIAEKEGILVGISSGAAVWSALQLAKQPENEGKLIVVLLPSYGERYLSTPLFADLA

SEQ ID NO: 65839 - protein, 292 aa, Neisseria meningitidis
MFAALSLFMSFTAVFLIFVVLCGTAWGVYKYRLKTHPEISESSHFGDYFGSFFPTVLVLFLIRSFIAEPFQIPSSSMRPGLIKGDFILVGKFSYGLRVPVLNNVFIPTGKIERGDVVVFNYPLQPEMTYIKRIVGIPGDVVEYRNKVLTVNGKPASDIPDGTYRYPDDTDPSEIHNTDMFHSGLDGKSFNILKKEGQPAVSLPVLGKYTSDIMSENGYSIEQSGLEHCQYADDGSGFVCKVPEGRYFAMGDNRDNSADSRYWGFVDDKLVVGKAMFILMNFGDFGRAGTAIR

SEQ ID NO: 65840 - protein, 233 aa, Neisseria meningitidis
MSLKTVAVIGAMEQEIELLREMMENVKAVSFGKFAAYEGELAGKRMVLALSGIGKVNAAVATAWIIREFAPDCVINTGSAGGLGKGLKVGDVVVGTEIAHHDVDVTAFGYVWGQVPQLPAVFVSDGLLVGKAKQAAEVFEGAAVEQGLIVSGDRFVHSSEGVAEIRKHFPEVKAVEMEAAAIAQTCHQLETPFVIIRAVSDSADEKADISFDEFLKTAAANSAKMVAEIVKSL

SEQ ID NO: 65841 - protein, 325 aa, Neisseria meningitidis
MIYPWHQEQWRQIAEHWTSRPNAWLFVGKKGTGKTAFARFAAKALLCEKPVTGNVPCGECASCHLFEQGSHPDFYEITPLTDERENGRKLLQIKIDAVREIIDNVYLTSVRGGLRVILIHPAESMNVQAANSLLKVLEEPPPQVVFLLVSHAADKVLPTIKSRCRKMVLPAPSHEEASAYLRERGVAEPEEFLAFHSGAPLFQEEDGLRELRAKLLDILAEPRLLKILDYAALFDKEKLPLAVFVGWMQKWLVDLGLCLQHMKPVYYPAYEDRLLQTASGFRPRNVFAAEDMLKQLAPYGVHTLNVKMQIEHLLINYLEWKKENG

SEQ ID NO: 65842 - protein, 259 aa, Neisseria meningitidis
MHIIDSHCHLNFEGLKERLPEVLSNMEANGVGQALAISVSRESFSEVFAVAEAHEHIYCTIGVHPDSREAEEFSIAEMVEAAAHPKVVGIGETGLDYYWCKGDLSWQHKRFADHIEAANQTGLPVIVHTRDAAADTLAILKECKTNSGVIHCFSEDTAFARAAMDLGLYISFSGIVTFKNAPLVQEAAKYVPDDRILVETDAPFLAPVPKRGRQNEPAFVRHTAEHIAKLRNQTLEQVAAYTTENFYRLFKKVPDMRAV

SEQ ID NO: 65843 - protein, 208 aa, Neisseria meningitidis
MNVNVINHPLVRHKLTLMREADCSTYKFRTLATELARLMAYEASRDFEIEKYLIDGWCGQIEGDRIKGKTLTVVPILRAGLGMLDGVLDLIPTAKISVVGLQRDEETLKPVSYFEKFVDSMDERPALIIDPMLATGGSMVATIDLLKAKGCKNIKALVLVAAPEGVKAVNDAHPDVTIYTAALDSHLNENGYIIPGLGDAGDKIFGTR

SEQ ID NO: 65844 - protein, 459 aa, Neisseria meningitidis
MAKTLKTLYQCTECGGTSPKWQGKCPHCGEWNTLQESLAAPEPKNARFQSWAADTSTVQSLSAVTAAEVPRNPTGMSELDRVLGGGLVDGAVILLGGDPGIGKSTLLLQTIAKMAQSRKVLYVSGEESAQQVALRAQRLELPTEGVNLLAEIRMEAIQTALKQHQPEVVVIDSIQTMYSDQITSAPGSVSQVRECAAQLTRMAKQMGIAMILVGHVTKDGAIAGPRVLEHMVDTVLYFEGDQHSNYRMIRAIKNRFGAANELGVFAMTENGLKGVSNPSAIFLASYRDDTPGSCVLVTQEGSRPLLVEIQALVDDAHGFTPKRLTVGLEQNRLAMLLAVLNRHGGIACFDQDVFLNAVGGVKIGEPAADLAVILAMLSSFRNRPLPEKMVAFGEIGLSGEVRPVARGQERLKEAEKLGFKRAIVPKANMPRNVKEFPNLKIYGVSSLQEAIDICRDSRE

SEQ ID NO: 65845 - protein, 655 aa, Neisseria meningitidis
MGNTFKSILVWVALGIGLMAAFNALDGKKEDNGQIEYSQFIQQVNNGEVSGVNIEGSVVSGYLIKGERTDKSTFFTNAPLDDNLIKTLLDKNVRVKVTPEEKPSALAALFYSLLPVLLLIGAWFYFMRMQTGGGGKGGAFSFGKSRARLLDKDANKVTFADVAGCDEAKEEVQEIVDYLKAPNRYQSLGGRVPRGILLAGSPGTGKTLLAKAIAGEAGVPFFSISGSDFVEMFVGVGASRVRDMFEQAKKNAPCIIFIDEIDAVGRQRGAGLGGGNDEREQTLNQLLVEMDGFESNQTVIVIAATNRPDVLDPALQRPGRFDRQVVVPLPDIRGREQILNVHSKKVPLDKSVDLLSLARGTPGFSGADLANLVNEAALFAGRRNKVKVDQSDFEDAKDKIYMGPERRSMVMHEDEKRATAYHESGHAIVAESLPFTDPVHKVTIMPRGRALGLTWQLPERDRISMYKDQMLSQLSILFGGRIAEDIFVGRISTGASNDFERATQMAREMVTRYGMSDKMGVMVYAENEGEVFLGRSVTRSQNISEKTQQDIDAEIRRILDEQYQVAYKILDENRDKMETMCKALMEWETIDRDQVLEIMAGKQPSPPKDYSHNLRENADAAEDNAPHAPTREETEAPAPADTASTESEQQPENKA

SEQ ID NO: 65846 - protein, 338 aa, Neisseria meningitidis
MIGGLMQFPYRNVSASRMRRMRRDDFSRRLMREHTLTADDLIYPVFVLEGSAREEDVPSMPGVKRQSLDRLLFTAEEAVKLGIPMLALFPVVTANKTERAQEAYNPEGLVPSTVRALRERFPELGIMTDVALDPYTVHGQDGLTDENGYVMNDETVEVLVKQALCHAEAGAQVVAPSDMMDGRIGAIREALEDAGHIHTRIMAYSAKYASAFYGPFRDAVGSSGNLGKADKKTYQMDPANTDEALHEVALDIQEGADMVMVKPGLPYLDVVRRVKDEFGVPTYAYQVSGEYAMLQAAVANGWLDGGKVVLESLLAFKRAGADGILTYYAIEAAKMLKR

SEQ ID NO: 65847 - protein, 257 aa, Neisseria meningitidis
MNTIADVQSSRDLRNLPINQVGIKDLRFPITLQTAEGIQSTVARLTMTVYLPAEQKGTHMSRFVALMEQHTEALDFAQLRRLTAEMVALLDSRAGKISVSFPFFRKKTAPVSGIRSLLDYDVSLTGEMKDGAYGHSMKVMIPVTSLCPCSKEISQYGAHNQRSHVTVSLTADAEVGIEEVIDYVEAQASCQLYGLLKRPDEKYVTEKAYENPKFVEDMVRDVATSLIADKRIKSFVVESENFESIHNHSAYAYIAYP

SEQ ID NO: 65848 - protein, 296 aa, Neisseria meningitidis
MNSPFHNIGIVTRPNTPDIQDTAHTLITFLKQHGFTVYLDEVGIKEGCIYTQDTVGCHIVNKTELGQYCDLVAVLGGDGTFLSVAREIALRAVPIIGINQGHLGFLTQIPREYMTDKLLPVLEGKYLAEERILIEAALIREGKTAERAIALNDAVLSRGGAGQMIEFEVFVNREFVYTQRSDGLIVSTPTGSTAYSLAAGGPIMQAGLHAFTLVPICPQSMTNRPIAIPDTSEIEILVTQGGDARVHFDGQTHIDVQNLDRITIRRYRNPLRILHPTDYQYFKTLRQKLHWGEQLV

SEQ ID NO: 65849 - protein, 346 aa, Neisseria meningitidis
MQPIRYRTDLTPYNTFGLRAQARAFIALEHADGLRDIVRLPEFNRDTVLWLGGGSNILLMEDYAGLVVHMENKGIREIARSDGMVLIEAQAGEIWHDFVLHAVALGLNGLENLSLIPGTVGASPVQNIGAYGVEAKDVIHSVRCFDLDTETFVTLSNADCRFAYRESLFKQEGKGRYVIVSVVFALKTHFVPNLGYGDLAAAVAELSAGRVPTAKDVSDAVCAIRNSKLPNPNVLGNVGSFFKNPVVSAEKAATLLQRHPDMPRYPQPDGSVKLAAGWLIDQCRLKGFQIGGAAVHDRQALVLVNKNNASANDVRQLAQHIKFTVFARFQVELHAEPNWLPASFSL

SEQ ID NO: 65850 - protein, 432 aa, Neisseria meningitidis
MAKNVVVIGAQWGDEGKGKIVDWLAEEAGGVVRFQGGHNAGHTLVVGGKKTILRLIPSGILHESLDCFIGSGVVVSPEALLGEIDELNAAGVKNVEGRLKIAPTCPLILPYHIALDQAREASRGKGKIGTTGRGIGPAYEDKVARRAIRAADLLHPEKLREKLDAVFAYYNVQLQHLHNAESVKAEDVMAVIEKVAPRITPMITDVSRVLNEKNKNGEKLLFEGAQGALLDIDYGTYPFVTSSNCLAGAASAGAGVGPQMLDYVLGIVKAYTTRVGSGPFPTELFDEVGAGLAERGHEFGSVTGRARRCGWFDAAALKRSIQINGISGMCITKLDVMDGVETINICVGYELPDGGKTDILPCGSDAVEACKPIYETMPGWSESTFGVKSYDALPANAKAYLKRIEEVCGAPVAIVSTGPDREETIVLHHPFA

SEQ ID NO: 65851 - protein, 215 aa, Neisseria meningitidis
MKALLLGAPGAGKGTQAQFITAAFGIPQISTGDMLRAAIKAGTPLGLEAKKIIDEGGLVRDDIIIGMVKERIAQDDCKNGFLFDGFPRTLAQAEAMVEAGVDLDAVVEIDVPDSVIVDRMSGRRVHLASGRTYHVTYNPPKVEGKDDVTGEDLIQRDDDKEETVKKRLAVYHEQTEVLVDFYSKLEGEHAPKYIKVDGTQPVEAVKAEVLGALGK

SEQ ID NO: 65852 - protein, 323 aa, Neisseria meningitidis
MSAKFQQETLKSRFAQAKVLVVGDVMLDRYWFGDVSRISPEAPVPVAKIGRIDQRAGGAANVARNIASLGGKVGLLSVTGNDEAADALDALMVQDGVASYLMRDKQIATTVKLRVVARNQQLIRLDFEEHPNREVLEQIKRKYREILPEYDAIIFSDYGKGGLSHISDMIDWAKHEGKTVLIDPKGDDYEKYAGATLITPNRAELKEVVGSWKNENDLTEKAQNLRRHLDLTAILLTRSEEGMTLFSEGEPIYQPTRAQEVYDVSGAGDTVIAGMGLGLAAGCTMPEAMYLANTAAGVVVAKLGTAVCSFAELTKALSGQSTM

SEQ ID NO: 65853 - protein, 372 aa, Neisseria meningitidis
MPDFQRITIENIEYFIVDSIQNLRAEDSFIHRNNKLSVFGGNGEARKYVGSYIDDSGRKLSTFFEYENWGITETKNGRRVEYPLIQKNCFFNKKNLQRYLVDAKVEYHKQEQKYHHDISRFYDDYVLSINNLPTENIFFSIHDISDHLENSKGYRRGYIRSEDDIWSIWRKIVLSKISYLSILKLLPVKDIEDSEPLFYFRIFLDYQFRSIVHPQLLSREKLEIPASEFNQFVEQEIIKQKSRKGQQKYRKDVINHMPQCPFTLITDEILLRASHIKSYMVCITEKNEKEALDYLNGLALTPTYDWLFDQGYITFLDDGRLICGTRLSRYTWEKLNINPNAKNKMRIYPEGREKYLEYHRKFVFQDNIDDFL

SEQ ID NO: 65854 - protein, 514 aa, Neisseria meningitidis
MMTEIQQRAQLHRQIWKIADEVRGAVDGWDFKQYVLGTLFYRFISENFTDYMQAGDSSIDYAAMPDSIITPEIKDDAVKVKGYFIYPGQLFCNIAAEAHQNEELNTKLKEIFTAIESSASGYPSEQDIKGLFDDFDTTSSRLGSTVADKNKRLAAVLKGVAELDFGSFEDHHIDLFGDAYEYLISNYAANAGKSGGEFFTPQSVSKLIARLAVHGQEKVNKIYDPACGSGSLLLQAKKQFDEHIIEEGFFGQEINHTTYNLARMNMFLHNVNYNKFHIELGDTLTNPKLKDSKPFDAVVSNPPYSINWIGSGDPTLINDDRFAPAGVLAPKSKADFAFILHALNYLSGRGRAAIVSFPGIFYRGGAEQKIRQYLVEGNYVETVIALAPNLFYGTGIAVNILVLSKHKDNTDIQFIDAGGFFKKETNNNVLTEEHIAEIVKLFADKADVPHIAQNAAQQTVKDNGYNLAVSSYVEPEDTREIIDIKQLNAEISETVAKIERLRREIDEVIAEIEA

SEQ ID NO: 65855 - protein, 191 aa, Neisseria meningitidis
MPSERGGILLKCAIGKNSRTKMFEQEDEWISKTQMKKQMNGLQDLGMELTKLSNDTLKKIGLDEDLYEAVVTYKKITSNGALKRQAQFIGRLMRDTDPAPIEAFLAKLRGDDAAHNAFLQRVEQARVRLLADDGALTQFMSDFPHADAGKLRTLIRNTKKEQEQNKPPKNFRALFQELKTVMESQGGTGEA

SEQ ID NO: 65856 - protein, 566 aa, Neisseria meningitidis
MSVKIQTRSVNTDVFNHLLTAGADPLIARLCASRGVQSPAELDDKLASLLPYQTLTNCEAAARRLADAVERQEKILIVADYDADGATACAVGLDGLAAMGAKVDFLVPNRFEHGYGLTPELAEIAAAQGVDLLITVDNGIASIAGVARAQALGLDVIVTDHHLPAETVPDCIIVNPNQKGCGFPSKSLAGVGVIFYVLMALRAELRRRNYFSDGLKEPNLGDLLDLVALGTVADVVSLDHNNRILVSQGLKRMRSGKMRPGIRALFEVARRDWRKAQPFDMGFALGPRINAAGRLDDMSVGIACLLARDDSEAQELAAQLNNLNIERREIEQSMLQDALNAFPETLPSGQMTLVAYRDDFHQGVVGIVASRLKDRFYRPTIVFAPADNGEVRGSGRSIPNLHLRDALDLVSKRHPDLILKFGGHAMAAGLSILEHNIPAFQTTFEEAVREMVCEDDLSQTFITDGSLPACDITLEQAQNLARHVWGQGFAPPSFTDEFHVVRQQPLGAEGKHKKVWLQKDGCEFEAMFWRCSEDIPEYIRTVYRPVANEWRNNLELQLYIDYWEAA

SEQ ID NO: 65857 - protein, 453 aa, Neisseria meningitidis
MLKKWLNKMLPSGRSSKKAESKTVIPAERHNIRAEMLSFAAENVIRRLKGAGFQAYVVGGAIRDLLLGIEPKDFDVATDAMPEQVHKLFRRSRIVGRRFQIVHVMNGAEIIEVTTFRGGAKVHQNAHGRIMKDNTYGSIEEDAMRRDFTCNALYYDPEKEEILDFHNGIADVAARRLVMIGDAAERYQEDPVRILRAIRLSGKLGFELSEETAAPIAESICRLKHEPVARLFDEIMKLLFSGHARECLKRLNGFDIPDDIHPLLNALRVSDGIAGKMTVLALKNTDERLRADKSVSVGFVLAALMWPELERHWKSNLQQGLKPVPALSDAINTMRETVERGWGVPQRFSATMREIWMFQPQFENRKGARPHKLFAQARFRAAYDFLLLRAETGNADRALAEWWTAFQTASQEQRTEMTKNEAAARHEKNEGQAKKRRRRRRKPKPKVVGTDWE

SEQ ID NO: 65858 - protein, 230 aa, Neisseria meningitidis
MAVPPPNILGGIFNRPFEQREKNNKPHFVFCTVSHLRRLKGHDVLLTAFARALAQCPQLRLNIGGSGQEEQRLKQQAADLGITHAVTFLGALQPEAVLDLMRNSDAFVLASRTETFGVVYIEALSQGLPVIATRCGGAESIVSDGNGYLVPVDDDDALADALIKMYEHHSDFEPARLRENCLNEFGENAVIGRLIGIFRQAIAEYGKKIPVKYSGLTKIRTRRRSRRQYK

SEQ ID NO: 65859 - protein, 485 aa, Neisseria meningitidis
MKPTIALVGRPNVGKSTLFNRLTRTKDALVHDLPGLTRDRHYGHGKVGSKPYLVIDTGGFEPVVDSGILHEMAKQTLQAVDEADAVVFLVDGRTGLTPQDKIIADRLRQSPRPVYLAVNKGEGGNRAVLAAEFYELALGDPYVISGAHGDGVYYLIEDILETFPEPEKEEEEAKHPVFAVIGRPNVGKSTLVNAILGEERVIAFDMAGTTRDSIHIDFEREGKPFTIIDTAGVRRRGKVDEAVEKFSVIKAMQAVEAANVAVLVLDAQQDIADQDATIAGFALEAGRALVVAVNKWDGISEERREQVKRDINRKLYFLDFAKFHFISALKERGIDGLFDSIQAAYNAAMIKMPTPKITRVLQSAIERQQPPRAGLVRPKMRYAHQGGMNPPVIVVHGNSLHAISDSYTRYLTQTFRKAFNLQGTPLRIQYNVSENPYENADDKPKKKPLRRVSLSNRIEKREGRKEEKNRFKKKTKVSVKKQFSK

SEQ ID NO: 65860 - protein, 431 aa, Neisseria meningitidis
MAQKIQSVKGMNDLLPVEQKDFKLTAAFWQAFEDTVGRWTRTYGYQQIRTPIVEQTGLFVRSIGEETDVVGKEMYTFSDSNDSLSLSLRPEGTASCLRAVVEHNFLYNSPQKLWYMGPMFRRERPQKGRYRQFHQVGIEALGFEGPDIDAEIIAMSADLWEKLGIREYLTLEINSLGNREERAAHRAALVEYLTRYEDKLDEDSKRRLKTNPLRVLDTKNPDLQEICNAAPRLVDYLGEASQNHYARFKAMLDGLGIQYIENPRLVRGLDYYNQTVFEWTTDKLGAQATVCGGGRYDGLIEELGGKPAPSIGFAMGIERLLLLVSEYGSLEVNAAPDVYAMHQGEGADLQVMKYAQALRAQGFNVMQHSGYQSLKAQMKKADNSGARFALIVAQDELANGTVTLKDMNGAHDQQTVAAADLTNTLQQWKNA

SEQ ID NO: 65861 - protein, 289 aa, Neisseria meningitidis
MKRIFLPALPAILPLSAYADLPLTIEDIMTDKGKWKLETSLTYLNSENNRAELAAPVYIQTGATSFIPIPTEIQENGSNTDMLVGTLGLRYGLTGNTDIYGSGSYLWHEERKLDGNGKTRNKRMSDVSLGISHTFLKDDKNPALISFLESTVYEKSRNKASSGKSWLIGATTYKAIDPVVLSLTAAYRINGSKTLSSNTKYKAGNYWMLNPNISFAANDRISLTGGIQWLGKQPDRLDGKKESARNTSTYAHFGAGFGFTKTTALNASARFNVSGQSSSELKFGVQHTF

SEQ ID NO: 65862 - protein, 263 aa, Neisseria meningitidis
MITVNTLQKMKAAGEKIAMLTAYESSFAALMDDAGVDVLLVGDSLGMAVQGRQSTLPVSLRDMCYHTECVARGAKNAMIVSDLPFGAYQQSKEQAFAAAAELMAAGAHMVKLEGGVWMAETTEFLQMRGIPVCAHIGLTPQSVFAFGGYKVQGRGGKAQALLNDAKAHDDAGAAVVLMECVPAELAKKVTESVSCPTIGIGAGVDCDGQVLVMHDMLGIFPGKTAKFVKNFMQGQSSIQAAVRAYVAEVKAKTFPAAEHIFAD

SEQ ID NO: 65863 - protein, 327 aa, Neisseria meningitidis
MAAYDSLMVFTGNANPELAQRVVRHLDISLGNASVSKFSDGEVAVELLENVRGRDVFILQPTCAPTNDNLMEILTMADALKRASAGRITTAIPYFGYARQDRRPRSVRVPISAKLVANMLYSAGIDRVLTVDLHADQIQGFFDIPVDNIYATPILLNDIKQQRIENLTVVSPDIGGVVRARAVAKSLNADLAIIDKRRPKANVAEVMNIIGDIQGRTCLIVDDMIDTANTLCKAAVALKERGAERVLAYASHAVFSGEAVSRIASSEIDQVVVTDTIPLSEAAKNCDRIRQVTIAGLLAETVRRISNEESVSYLFNEEVMTGSMLLP

SEQ ID NO: 65864 - protein, 190 aa, Neisseria meningitidis
MTYEIQASVREAQGTGASRRLRREGQIPGILYGEGQEPVAIAVDHKTVFYALEKESFHTALIKLSLNGETKDVIVRDFQMHPFRREVQHIDFQAVKADQPVRIRVPLHIVNAENSQAVKLQGGRVSLLNTTVEVVALPANIPAFLDLDCAEVVAGDILHLSDIKLPEGVESVSLKRNENLAVATVTGKKR

SEQ ID NO: 65865 - protein, 468 aa, Neisseria meningitidis
MNDYTAMPSEDREVGALSLPPHSMEAEQSVLGGLMLENPAWDRIADVVSGEDFYRHEHRLIFRSIAKLINESRPADVITVQEDLQRNEELEAAGGFEYLITLAQNTPSAANIRRYAEIVRERSIMRQLAEVGTEIARSAYNPQGRDAGQLLDEAENKVFQIAESTAKSKQGFLEMPDLLKEVVQRIDMLYSRDNPDEVTGVSTGFIDLDKKTSGLQPGDLIIVAGRPSMGKTAFSINIAEHVAVEGKLPVAVFSMEMGGAQLVMRMLGSVGRLDQSVLKTGRLEDEHWGRLNEAVVKLSDAPVYIDETPGLTALELRARARRLARQFNNKLGLIVIDYLQLMAGSGRSDNRASELGEISRSLKALAKELQVPIIALSQLSRTVESRTDKRPMMSDLRESGAIEQDADLIMFMYRDEYYNQDSPMKGLAECIIGKHRNGPVGKIFLTWTGQFTKFDNAAYIPEEAKIED

SEQ ID NO: 65866 - protein, 395 aa, Neisseria meningitidis
MNTLLKQLKPYPFARLHEAMQGISAPEGMEAVPLHIGEPKHPTPKVITDALTASLHELEKYPLTAGLPELRQACANWLKRRYDGLTVDADNEILPVLGSREALFSFVQTVLNPVSDGIKPAIVSPNPFYQIYEGATLLGGGEIHFANCPAPSFNPDWRSISEEVWKRTKLVFVCSPNNPSGSVLDLDGWKEVFDLQDKYGFIIASDECYSEIYFDGNKPLGCLQAAAQLGRSRQKLLMFTSLSKRSNVPGLRSGFVAGDAELLKNFLLYRTYHGSAMSIPVQRASIAAWDDEQHVIDNRRLYQEKFERVIPILQQVFDVKLPDASFYIWLKVPDGDDLAFARNLWQKAAIQVLPGRFLARDTEQGNPGEGYVRIALVADVATCVKAAEDIVSLYR

SEQ ID NO: 65867 - protein, 335 aa, Neisseria meningitidis
MSTFFRQTAQAMIAKHIDRFPLLKLDQVIDWQPIEQYLNRQRTRYLRDHRGRPAYPLLSMFKAVLLGQWHSLSDPELEHSLITRIDFNLFCRFDELSIPDYSTLCRYRNWLAQDDTLSELLKLINCQLTEKGLKIEKASAAVVDATIIQTAGSKQRQAIEVDEEGQISGQTTPSKDSDARWIKKNGLYKLGYKQHTRTDAEGYIEKLYITPTNAHECTHLSPLLEGLPKGTTVYADKGYDSAENRQHLEEHQLQDGIMRKACRNRPLSEVQTKRNRYLSKTRYVVEQSFGTLHRKFRYARAAYFGLIKVSAQSHLKAMCLNLLKAANRLSAPAAA

SEQ ID NO: 65868 - protein, 148 aa, Neisseria meningitidis
MQHEEGNRQRPQGELLLRTVAMPRDTNPNQDIFGGWIMSQMDLGGGILAAEIARGRIVTVAVQEMNFIRPVKVGNVVCCYGHCVRVGNTSLQLKVEVWVKTLMNDCVTEDRHLVTEAVFTYVAIDAEGNPRPIPKEGNPILAGLLPTP

SEQ ID NO: 65869 - protein, 91 aa, Neisseria meningitidis
MKPNIHPDNYRTVLFFDSSANEGWLIRSCAETHGKTMVWTDGKEYPLFSLDTSSASHPVYTGKQRNVNTEGHASKFNQRFQSVMSSFRKDK

SEQ ID NO: 65870 - protein, 292 aa, Neisseria meningitidis
MNYAKEINALNNSLSDLKGDINVSFEFFPPKNEQMETMLWDSIHRLQTLHPKFVSVTYGANSGERDRTHGIVKRIKQETGLEAAPHLTGIDASPDELRQIAKDYWDSGIRRIVALRGDEPPGYEKKPFYAEDLVKLLRSVADFDISVAAYPEVHPEAKSAQADLINLKRKIDAGANHVITQFFFDVERYLRFRDRCVMLGIDVEIVPGILPVTNFKQLGKMAQVTNVKIPSWLSQMYEGLDDDQGTRNLVAASIAIDMVKVLSREGVKDFHFYTLNRSELTYAICHILGVRP

SEQ ID NO: 65871 - protein, 587 aa, Neisseria meningitidis
MGFPVRKFDAVIVGGGGAGLRAALQLSKSGLNCAVLSKVFPTRSHTVAAQGGISASLGNVQEDRWDWHMYDTVKGSDWLGDQDAIEFMCRAAPEAVIELEHMGMPFDRVESGKIYQRPFGGHTAEHGKRAVERACAVADRTGHAMLHTLYQQNVRANTQFFVEWTAQDLIRDENGDVVGVTAMEMETGEVYIFHAKAVMFATGGGGRIYASSTNAYMNTGDGLGICARAGIPLEDMEFWQFHPTGVAGAGVLITEGVRGEGGILLNADGERFMERYAPTVKDLASRDVVSRAMAMEIYEGRGCGKNKDHVLLKIDHIGAEKIMEKLPGIREISIQFAGIDPIKDPIPVVPTTHYMMGGIPTNYHGEVVVPQGDEYEVPVKGLYAAGECACASVHGANRLGTNSLLDLVVFGKAAGDSMIKFIKEQSDWKPLPANAGELTRQRIERLDNQTDGENVDALRRELQRSVQLHAGVFRTDEILSKGVREVMAIAERVKRTEIKDKSKVWNTARIEALELDNLIEVAKATLVSAEARKESRGAHASDDHPERDDENWMKHTLYHSDANTLSYKPVHTKPLSVEYIKPAKRVY

SEQ ID NO: 65872 - protein, 82 aa, Neisseria meningitidis
MMVFDDIAKRKIRFQTRRGLLELDLIFGRFMEKEFEHLSDKELSEFSEILEFQDQELLALINGHSETDKGHLIPMLEKIRRA

SEQ ID NO: 65873 - protein, 427 aa, Neisseria meningitidis
MSKSIKLNVPGQAGLELPVLEASIGHDVVDIRGLTKNTGLFSFDPGFVSTASCESKITYIDGDQGLLYYRGYPIEQLAEKSDYLEVCYLLIYGELPTPEQKAEFDNTVRRHTMVHEQLTWFFRGFRRDAHPMAMMVGVVGALSAFYQDSLDISNPEHRKIAIYRLISKIPTIAAMCYRYSNGLPFNYPKNNLSYSENFLHMMFATPCEDYKPNPVLARALDRIFILHADHEQNASTSTVRLAGSSGANPFACIAAGIACLWGASHGGANEAVLKMLDEIGDVSNVAAYMEGVKQRKYRLMGFGHRVYRNMDPRASIMRETCYEVLKELGLEDSPKFKLAMELEQIALKDPFFIERKLYPNVDFYSGIVLSALGIPTEMFTVIFALSRSVGWISHWHEMISDPSLKIGRPRQLYTGSERRDYVPPGER

SEQ ID NO: 65874 - protein, 942 aa, Neisseria meningitidis
MMDEKLNFSYLFGSNAPYIEELYEAFLENPDAVDEKWKQYFTDLSKQPGTVAVDVAHTPIRESFVTLAKKKIASAVAGGADEAMLKKQVSVLRLISAYRIQGVGAAQLDPLKRIPPRDIEALDPKFHGLSDADMALQFNMGEGDFANRGKLPLSQIISNLKQTYCGHIALEYIYIPNTEERRWVRNYFESVLSTPHYNADQKRRILKEMTAAETLERYLHTKYVGQKRFGVEGGESAIAGLNYLIQNAGKDGVEEVIIGMAHRGRLNVLVNILGKKPGDLFAEFEGRAEIKLPSGDVKYHMGFSSDIATPHGPMHVSLAFNPSHLEIVNPVVEGSARAKQKRLGENGRDKVLPVLIHGDSAFIGLGVNQATFNLSKTRGYTTGGTVHIVINNQIGFTTSDIRDTRSTVHCTDIAKMVSAPVIHVNGDDPERVCFAIQAALDYRKKFHKDIVIDVVCYRKWGHNEGDDPTLTQPMMYKKVSQHPGARALYTEQLIAEGVVTQAEADGYIQAYRDALDKGEHVEQTTLSNFQRTQIDWSKYQGKDWREHIETGLPAADIERLTEKFTAVPEGFALHPTAKRVIEARKAMASGKQAIDWGMAETLAYASLVTKGHGVRISGEDSGRGTFSHRHAVLHDQKREKWDDGTYVPLRHMGEGMGEFLVIDSILNEEAVMAFEYGFACSAPDKLTIWEAQFGDFANGAQVTIDQFLSSGETKWGRLCGLTTILPHGYDGQGPEHSSARVERWLQLCSENNMQVIMPSEASQMFHLLQRQVLGSYRKPLVIFMSKRLLRFKGAMSPLENFTEGSTFRPVIGDTAERASNDSVKRVVLCAGQVYYDLEAGRAERKLEDDVAIVRVEQLYPFPYDEVKAELAKYPNAKSVVWAQEEPKNQGAFYQIRHRIEDVISEEQKLSYAGRPSSASPAVGYSSKHIAQLKQLVEDALAL

SEQ ID NO: 65875 - protein, 296 aa, Neisseria meningitidis
MSVLINKDTKVLVQGFTGKNGTFHSEQALAYGTKVVGGVTPGKGGQTHLDLPVFNTMKEAVKETGADASVIYVPAPFVLDSIVEAVDSGVGLVVVITEGVPTLDMLKAKRYLETNGNGTRLVGPNCPGVITPGECKIGIMPGHIHTPGRIGIISRSGTLTYEAVAQTTKLGLGQSTCIGIGGDPIPGMNQIDALKLFQEDPDTDAIIMIGEIGGTAEEEAAEYIQSNVSKPVVGYIAGVTAPKGKRMGHAGAIISGGKGTAEEKFAAFEKAGIAYTRSPAELGTTMLEVLKTKGLA

SEQ ID NO: 65876 - protein, 948 aa, Neisseria meningitidis
MCNHHPKHSHGNDTIRIRGARTHNLKNVDLDIPRHKLVVVTGLSGSGKSSLAFDTLYAEGQRRYVESLSAYARQFLQMMDKPDVDLIEGLSPAISIEQKSTSHNPRSTVGTVTEIHDYLRLLYARVGTPYCPEHKLPLSSQTVSQMVDAVLKLPEDTRVMILAPAVRERKGEFVDFFADLQAQGFARVRVDGEVYQLDEVPKLEKNIKHNIDVVIDRVKVKADIKQRLAESFETALRHGNERALAMEMDSGEEHWFSARFACPVCSYSLPELEPRLFSFNNPMGSCPTCDGLGNTNFFDPEKVVAHPELSLASGAIDGWDKRNQFYFQMIQSLARHYGFDVQAAWETLPAKIKKVVLHGSGKEVIDFTYLSERGTTFNRSHAFEGIIPNLERRYRETDSETVREKLREYQNHRACPSCGGARLRKEARYVYVSGEPLHEVSAWPLTKTHRFFETLDLDGNKKQIAEKILKEITERLGFLINVGLDYLNLSRSAETLSGGEAQRIRLASQIGSGLTGVMYVLDEPSIGLHQRDNDRLLATLKRLRDLGNSVIVVEHDEDAIREADFVVDMGPGAGEHGGNVLIADTPENVAKCENSVTGQYLSGKKSIAVPSERTPVNPGRMLVLKGARGNNLKNVTLELPLGLITCITGVSGSGKSTLINDTLAKITARELNRAQEEPAPYDDIRGLEHLDKVINVDQSPIGRTPRSNPATYTGLFTPIRELFASVPLSRERGYNVGRFSFNVKGGRCEACQGDGVIKVEMHFLPDVYVPCEVCHGKRYNRETLEIQYKGKNISQVLDMTVEEACEFFDAVPTVSRKLQTLMDVGLGYIRLGQSATTLSGGEAQRVKLALELSKRDTGRTLYILDEPTTGLHFADIALLLEVIGRLKGKGNSIVIIEHNLDVIKTADWIVDLGPEGGDGGGRIIASGSPEEVAKVKGSYTGKYLKNIL

SEQ ID NO: 65877 - protein, 352 aa, Neisseria meningitidis
MITPQQAIERLISNNELFYDEMTDLMRQIMRGQVLPEQIAAILTGLRIKVETVSEITAAAAVMREFATKVPLENAEGLVDIVGTGGDGAKTFNISTTSMFVAAAAGAKVAKHGGRSVSSSSGAADVVEQMGANLNLTPEQVAQSIRQTGIGFMFAPNHHSAMRHVAPVRRSLGFRSIFNILGPLTNPAGAPNQLLGVFHTDLCGILSRVLQQLGSKHVLVVCGEGGLDEITLTGKTRVAELKDGKISEYDIRPEDFGIETRRNLDEIKVANTQESLLKMNEVLEGREGAARDIVLLNTAAALYAGNVAASLSDGISAAREAIDSGRAKSKKEEFVGFQPQQRCHFLGKMELG

SEQ ID NO: 65878 - protein, 513 aa, Neisseria meningitidis
MKIGIPRESLSGETRVACTPATVALLGKLGFETVVESGAGLAASLDDAAYQAAGATVADKAAVWAYPLIYKVNAPSEDELPLLKEGQTIVSFLWPRQNEALVEALRAKKVNALAMDMVPRISRAQALDALSSMANISGYRAVIEAANAFGRFFTGQITAAGKVPPAQVLVIGAGVAGLAAIGTANSLGAVVRAFDTRLEVAEQIESMGGKFLKLDFPQESGGSGDGYAKVMSDEFIAAEMKLFAEQAKEVDIIITTAAIPGKPAPKLITKEMVESMKPGSVIVDLAAATGGNCELTKQGELFVTGNGVKIIGYTDMANRLAGQSSQLYATNLVNLTKLLSPNKDGEITLDFEDVIIRNMTVTRDGEITFPPPPIQVSAQPQQTPSEKAAPAAKPEPKPVPLWKKLAPAVIAAVLVLWVGAVAPAAFLNHFIVFVLACVIGYYVVWNVSHSLHTPLMSVTNAISGIIVVGALLQIGQGNGFVSLLSFVAILIASINIFGGFFVTRRMLNMFRKG

SEQ ID NO: 65879 - protein, 335 aa, Neisseria meningitidis
MSTFFQQTAQAMIAKHIDRFPLLKLDQVIDWQPIEQYLNRQRTRYLRDHRGRPAYPLLSMFKAVLLGQWHSLSDPELEHSLITRIDFNLFCRFDELSIPDYSTLCRYRNWLAQDDTLSELLKLINCQLTEKGLKIEKASAAVVDATIIQTAGSKQRQAIEVDEEGQISGQTTPSKDSDARWIKKNGLYKLGYKQHTRTDAEGYIEKLHITPANAHECKHLSPLLEGLPKGTTVYADKGYDSAENRQHLKEHRLQDGIMRKACRNRPLSEAQTKRNRYLSKTRYVVEQSFGTLHRKFRYARAAYFGLIKVSAQSHLKAMCLNLLKAANRLSAPAAA

SEQ ID NO: 65880 - protein, 294 aa, Neisseria meningitidis
MSTFFRQTAQAMIAKHIDRFPLLKSDQVIDWQPIEQYLNRQRTRYLRDHRGRPAYPLLSMFKAVLLGQWHSLSDPELEHSLITRIDFNLFCRFDELSIPDYSTLCRYRNRLAQDDTLSELLELINRQLTEKGLKVEKASAAVVDATIIQTAGSKQRQAIEVDNKGQVSGQTTPSKDGDARWTKKNGLYRLGYKQHTRTDAEGYIEKLHITPANTHECNHLLPLLEGITEGTTIYADKGYDSAENRTSGRTSVVRRHYARAAYFGLIKVSAQSHLKAMCLNLLKAANRLSAPAAA

SEQ ID NO: 65881 - protein, 249 aa, Neisseria meningitidis
MPSVELLLVIVGLPRGTFYYQLAVQSAEDKYADLKRHIHDIYRRHKGRYGYRRIAAAIRHAGTPVNHKKVSRLMAKTGLKAVIWRRKYRSFKGEVGKIAPNILRRCFHAEKPNEKWVTDVTEFNVGGEKIYLSPIMDLFNGEIVSYRIQTRPTFDLAGEILKGAPEKPRSSEKPILHSDQGWQYQMFFYSGLNLNQDRAMKPQTVQIVRQGEATPYWFKFNPLYNNDRIKLKLKGLSLVQYRIQSLKAA

SEQ ID NO: 65882 - protein, 351 aa, Neisseria meningitidis
MKTYAPALYTAALLTACSPAADSNHPSGQNAPANTESDGKNITLLNASYDVARDFYKEYNPLFIKTYQSEHPGTSVSIQQSHGGSSKQALSVANGLQADVVTMNQSSDIDLLEKKGLVEKGWQQALPDHAAPYTSTMVFLVRKNNPKQIRDWNDLAKDGVNIVIANPKTSGNGRYAFLGAYGYGLKTTNGNEQEAQKLVASILKNTPVFENGGRAATTTFTQRNIGDVLITFENEANYVSKKLTQGQFEIVYPSYTISAESPVAVVNSVVAKKGTQKTARAYLEYLWSEPAQELAASLYLRPRNPEVLARHKADFPDLDTFSPEEKFGGWDNIMKTYFADGGIFDRLTAQK

SEQ ID NO: 65883 - protein, 636 aa, Neisseria meningitidis
MNILSVENASFAVGHVALLDKTSFQLDSGEKIGLIGRNGAGKSSFLKILAGVQKLDDGQIIVQNNLKIVYVPQESFFDKEATVFDTVAEGLGEIRDLLRRYHHVSHELENGSSEALLKELNELQLEIEAKDGWKLDAAVKQTLGELGLPENEKIGNLSGGQKKRVALAQAWVQKPDVLLLDEPTNHLDIDAIIWLENLLKAFEGSLVVITHDRRFLDNIATRIVELDRGILRSYPGSFSKYSEKKAQELAVEAEHNRLFDKFHAQEEAWIRKGIEARRTRNEGRVRRLEELRRQRAERRNVQGQVNFKLDSGEKSGKIIAELEHASFTYGDKVIMDKFSAILQRGDKIGLIGPNGIGKTTFLKLILGELQPTYGRIRIGSKQEVAYFDQFRSTLNENDTVFYTLGQGNDYVEVGGKKKHVMSYLEDFLFHPARAQSPVSSLSGGERNRLLLAKLFTRPANILILDEPTNDLDIDTQELLEDLLRDYQGTVFLVSHDRMFLDNVITQSIIFEGNGRLKEYIGGYQDYIDAKSREAKIQTESAPKTADAEPVKEKPKANRTVKLSYKEQRELDALPDEIAALEAEQAEINAQLSDPEIFKDYEKAGALQSRAEEIEMLLLEKLERWELLETKQNGNAV

SEQ ID NO: 65884 - protein, 335 aa, Neisseria meningitidis
MSTFFRQTAQAMIAKHIDRFPLLKLDQVIDWQPIEQYLNRQKNRYLRDHRGRPAYPLLSMFKAVLLGQWHSLSDPELEHSLITRIDFNLFCRFDELIIPDYSTLCRYRNWLAQDDTLSELLKLINCQLTEKGLKIEKASAAVVDATIIQTAGSKQRQAIEVDEEGQISGQTTPSKDSDARWIKKNGLYKLGYKQHTRTDAEGYIEKLHITPANAHECKHLSPLLEGLPEGTTVYADKGYDSAENRQHLEEHQLLDGIMRKACRNRPLSEVQTKRNRYLSKTRYVVEQSFGTLHRKFRYARAAYFGLIKVSAQSHLKAMCLNLLKAANRLSAPAAA

SEQ ID NO: 65885 - protein, 416 aa, Neisseria meningitidis
MFSKSVTLAQYDPDLAAAIAQEDQRQQDHVELIASENYVSCAVMEAQGSQLTNKYAEGYPGKRYYGGCEYVDIVEQLAIDRVKKLFGAQYANVQPHSGSQANQAVYASVLKPGDTILGMSLAHGGHLTHGASVNISGKLYNAVTYGLDENEVLDYAEVERLALEHKPKMIVAGASAYALQIDWAKFREIADKVGAYLFVDMAHYAGLVAGGEYPNPVPFCDFVTTTTHKTLRGPRGGVILCRDNTHEKALNSSIFPSLQGGPLMHVIAAKAVAFKEALQPEFKQYAKQVKINAAAMAEELVKRGLRIVSGRTESHVFLVDLQPMKITGKAAEAALGKAHITVNKNAIPNDPEKPFVTSGIRIGSAAMTTRGFNEADARVLANLVADVLSNPEDEANLAKVREQVTALCNKYPVYGA

SEQ ID NO: 65886 - protein, 591 aa, Neisseria meningitidis
MAKTYLLTALIMSMTISGCQVIHANQGKVNTHSAVITGADAHTPEHATGLTEQKQVIASDFMVASANPLATQAGYDILKQGGSAADAMVAVQTTLSLVEPQSSGLGGGAFVLYWDNTAKTLTTFDGRETAPMRATPELFLDKDGQPLKFMEAVVGGRSVGTPAIPKLMETIHQRYGVLPWGKLFDTPIRLAKQGFEVSPRLAISVEQNQQHLARYPKTAAYFLPNGVPLQAGSLLKNLEFADSVQALAAQGAKALHTGKYAQNIVSVVQNAKDNPGQLSLQDLSDYQVVERPPVCVTYRIYEVCGMGAPSSGGIAVGQILGILNEFSPNQVGYDAEGLRLLGDASRLAFADRDVYLGDPDFVPVPIRQLISKDYLKHRSQLLEQSDKALPSVSAGDFIHEWVSSQAIELPSTSHISIVDKAGNVLSMTTSIENAFGSTLMANGYLLNNELTDFSFEPIKQGKQVANRVEPGKRPRSSMAPTIVFKAGKPYMAIGSPGGSRIIGYVAKTIVAHSDWNMDIQDAISAPNLLNRFGSYELETGTTALQWQQALNDLGYKTDVRELNSGVQAIIIEPSRLVGGADPRREGRVMGD

SEQ ID NO: 65887 - protein, 281 aa, Neisseria meningitidis
MLSYRHAFHAGNHADMLKHFTLFLVLQYFNRKDKPYWYIDTHGGAGVYNLEGSEAQKVGEYRQGIALLRQAQNLPAELSDFAAHIQKILPSPELYCGSPWLAQSLTRVGDKLRLFELHPTDFVHLQNNMGEAGLGKRGQVLREDGYKGLISLLPPPPRRAAVLIDPPYEEKQDYWRVTETLKSALKRFESGCYLIWYPCLSREESRKLPEELKKLVPDNYLHAELHVHAPKADGFGMHGSGMFVINPPYLLAEQLAANLPALTRLLAQDEGARYLLDSKIR

SEQ ID NO: 65888 - protein, 200 aa, Neisseria meningitidis
MFNIPAVAVSYLIGSLSFAVIVSKYYGMDDPRTYGSGNPGATNVLRSGKKKAAALTLLGDAAKGLVAVLLARVLQEPLGLSDSAIAAVALAALVGHMWPVFFGFKGGKGVATALGVLLALSPTTALVCALIWLVMAFGFKVSSLAALTATIAAPLAALFFMPHTSWIFATLAIAILVLLRHKSNILNLIKGKESKIGEKR

SEQ ID NO: 65889 - protein, 420 aa, Neisseria meningitidis [sequence omitted]

SEQ ID NO: 65890 - protein, 376 aa, Neisseria meningitidis
MIKISTRFDAGSVVVKDLTDPSNIRLALRPDNASDFAQWFYFRLQGAAYQNCIMHFENAAEAAYPKGWEGYQACASYDRRNWFRVPTSYENGVLTVNHTPLSNSVYYAYFEPYSEEQHLNLLGDAQGSGLCRIDDLGSTVQGRDINLLTIGNQVESDLKIWITARQHPGETMAEWFVEGLLGRLLDPQDPTARTLLDRATFYIVPNMNPDGSALGNLRTNAAGANLNREWENPTLEKSPEVFFVREKMLETGVDLFLDIHGDEGLPFIFVAGTEGVPNYNPRISALETQFKTALLNASPDFQDEYGYEKDAPGQANMTLATNWVGNRFNCLAYTLEMPFKDNANLPDDDFGWNGQRSLRLGEAALSAILNIIGDLR

SEQ ID NO: 65891 - protein, 201 aa, Neisseria meningitidis
MTIYFKNGFYDDTLGSIPEGAVAVRAEEYAALLAGQAQGGQIAADSDGRPVLTPPRPSEYHEWDGKKWEIGEAAAAARFAEQKTATAFRLAAKADELKNSLLAGYPQVEIDSFYRQEKEALARQADNNAPTPMLAQIAAARGVELDVLIEKVVEKSARLAVAAGAIIGKRQQLEDKLNTIETAPGLDALEKEIEEWTLNIG

SEQ ID NO: 65892 - protein, 256 aa, Neisseria meningitidis
MRQNAKIPPTDHQKGKSMATLSDKTILITGASQGLGEQVAKAYAAAGATVILVARHQKKLEKVYDAIVEARHPEPFAIRFDLMSAEEKEFNQFAATIAEATQGKLDGIVHCAGYFYALSPLDFQTVAEWVNQYRINTVAPMGLTRALFPLLKQSPDASVIFVGESHGETPKAYWGGFGASKAALNYLCKVAADEWERFGNLRANVLVPGPINSPQRIKSHPGEAKSERKSYGDVLPAFVWWASTESKGRSGEIVYL

SEQ ID NO: 65893 - protein, 133 aa, Neisseria meningitidis
MKDKHDSSAMRLDKWLWAARFFKTRSLAQKHIELGRVQVNGSKVKNSKTIDIGDIIDLTLNSLPYKIKVKGLNHQRRPASEARLLYEEDAKTATLREERKQLDQFSRITSAYPDGRPTKRDRRQLDRLKKGDW

SEQ ID NO: 65894 - protein, 319 aa, Neisseria meningitidis
MKPVFLDFEQPIAELTNKIDELRFVQDESAVDISDEIHRLQKKSNDLTKSIFSKLTPAQISQVSRHPQRPYTLDYIEALFTDFEELHGDRHFADDYAIVGGLARFNGQSVMVVGHQKGRDTKEKIRRNFGMPRPEGYRKALRLMKTAEKFGLPVMTFIDTPGAYPGIGAEERGQSEAIGKNLYELTRLRVPVLCTVIGEGGSGGALAVAVGDYVNMLQYSTYSVISPEGCASILWKTAEKAADAAQALGITADRLQKLDLVDTVIKEPLGGAHRDFGQTMKNVKAVLEKQLHEAQSIPLADLLSRRFDRIMAYGKFSEQ

SEQ ID NO: 65895 - protein, 426 aa, Neisseria meningitidis
MKDCFPQGLNGKKTAVALSGGLDSVVLLHLLVRAGKKGGFIPDALHIHHGLSPRADDWADFCQNYCDMLGVGLETVKVCVEKNGLGIEAAARQKRYAAFAEKGFDVLALAHHRDDQIETFMLAVARGGGLRALAAMPAVRPFGEKGIIWRPLLPFSRQDIWDYAQKHGLPNIEDESNTDTAYLRNRFRHRILPELSAQIPHFGRHVLNNVRALQEDLALLDEVVVQDCRWVCGAGYFDTARWLTFSPRRKTHILRHFLKENGIPVPNQNALADIARVLTEAKTGRWNLQGFELHHYAGRLFVFRLEKTDKLRFLKDRQISGNLREILTGQGFVLKRHPFGLPEHLLEQDGILRTVAASDTLAMGGIHKDVKKILQGKRVLPVLRPIWPLVADSGNRPLALANCCADFQYSVSDGILPVHPDFPILF

SEQ ID NO: 65896 - protein, 261 aa, Neisseria meningitidis
MKHISSTNNEHIRHLHRLLSQGKFRRQYAQTVLEGVHLLQVFLQSGGMPVGVYIPEAKMPSEEVRKLTAVLPEDGFFSVSDGILKKISSLTCADDVLALIDIPDAGALPAGGDCVVLDGVQDPGNVGTVLRSAAAAGIGAVILGKGCADAWSPKVLRAGMGAHFLSEIYPQADLEIWLVRYKGRVFATALREEKQAVLYGEDLCEPTAWVFGNEGAGVGKAVLDRADKCVRIPMHDATESLNVAMAATICLFEQMRQRAAY

SEQ ID NO: 65897 - protein, 350 aa, Neisseria meningitidis
MTVSPVALRRKTECKPHPTARYWKKCDVEALFGLPFLDLIYQAAEIHRQNFNPREIQLSTLLSIKTGGCPEDCAYCPQSAHHNTNLGKEQMMDVDEIVEKAKIAKSRGASRFCMGAAWRGPKPKDVETVSAIIKAVKGLGMETCGTFGMLEEGMAEDLKEAGLDYYNHNLDTDPDRYNDIIHTRRHEDRMDTLGKVRNAGLKVCCGGIVGMNETRAERAGLIASLANLDPQPESVPINRLVKVEGTPLDDAEDLDWTEFVRTIAVARITMPQSYVRLSAGRSNMPEAMQAMCFMAGANSIFYGDKLLTTGNPDEDGDRILMEKLNLYPLQFELEGEVAEVEKASGIKVDY

SEQ ID NO: 65898 - protein, 619 aa, Neisseria meningitidis
MPEYRSKTSTHGRNMAGARALWRATGVMETDFGKPIIAVANSFTQFVPGHVHLHNMGQLVAREIEKAGAIAKEFNTIAIDDGIAMGHSGMLYSLPSRDLIADSIEYMVNAHCADALVCISNCDKITPGMLIAAMRLNIPTIFVSGGPMEAGKVIGVANIQPERRLDLIDAMIESADDNISNRQVEEVEQNACPTCGSCSGMFTANSMNCLTEALGLSLPGNGSYLATHVGRKELFLEAGRMIVEITKRYYEQNDETVLPRSIATKKAFENAMTMDIAMGGSTNTILHLLAVANEAGVDFKMADIDRLSRVVPCICKTAPNNHDYYMEDVHRAGGIFAILKELDKAGKLHTDVHTIHAPTLKDAIEKWDVTNPENTHAIERFKAAPGGVRTTQAFSQNRMWKTLDLDREKGCIRDVAHAYSQDGGLAVLFGNIAERGCVVKTAGVDESILKFTGRARVFESQEDAVEGILGNQIVAGDIVIIRYEGPKGGPGMQEMLYPTSYLKSKGLGKACALLTDGRFSGGTSGLSIGHASPEAAEGGAIGLVHEGDTVEIDIPNRSIRLVISDEELAARRAEMEARGSKAWKPENRDRYVSAALRAYGAMATSADKGAVRDVAQIER

SEQ ID NO: 65899 - protein, 486 aa, Neisseria meningitidis
MNYFPIFANLAGRPVLVVGGGAVAARKISLLLKAGAEVRVAAKHLNAELSALAAENKILWLAEEFRAEHIRTVFLIIAASSDQALNRRVFHLAESCQKPVNVVDDRDHCSFIFPSVIDRNPVQIAVSSSGSAPVLARLLRERLEALLPPSLGDMAEISGRWRDAVKGKLKSVTERRRFWEKQFNGRFAALVKNRQNTLAERELAGQLEQSRQNDQGGSVSLVGAGPGDAGLLTLKGLQEIQQADVVLYDALVSDGILSLVRRDAERIFVGKRARGGRTPQEDTNALMVRLAREGRRVVRLKGGDPFVFGRGGEELETLARHQIPFSVVPGITAAVGATAYAGIPLTHRDYAQSAVFVTGHRKADAPDIEWQTLARSRQTLVIYMGALKAALIAERLQQHGRSPDTPAAVISQGTLPAQKTATGTLANLAELAETAPNPALIVIGEVVGLHEKLAWFGENAKKESNPAEHAYFALDGLGTGQEQQAA

SEQ ID NO: 65900 - protein, 603 aa, Neisseria meningitidis
MKQIRNIAIIAHVDHGKTTLVDQLLRQSGTFRANQQVDERVMDSNDLEKERGITILAKNTAIDYEGYHINIVDTPGHADFGGEVERVLGMVDCVVLLVDAQEGPMPQTRFVTKKALALGLKPIVVINKIDKPSARPSWVIDQTFELFDNLGATDEQLDFPIVYASGLSGFAKLEETDESNDMRPLFDTILKYTPAPSGSADETLQLQISQLDYDNYTGRLGIGRILNGRIKPGQVVAVMNHDQQIAQGRINQLLGFKGLERVPLEEAEAGDIVIISGIEDIGIGVTITDKDNPKGLPMLSVDEPTLTMDFMVNTSPLAGTEGKFVTSRQIRDRLQKELLTNVALRVEDTADADVFRVSGRGELHLTILLENMRREGYELAVGKPRVVYRDIDGQKCEPYENLTVDVPDDNQGAVMEELGRRRGELTNMESDGNGRTRLEYHIPARGLIGFQGEFMTLTRGVGLMSHVFDDYAPVKPDMPGRHNGVLVSQEQGEAVAYALWNLEDRGRMFVSPNDKIYEGMIIGIHSRDNDLVVNPLKGKKLTNIRASGTDEAVRLTTPIKLTLEGAVEFIDDDELVEITPQSIRLRKRYLSELERRRHFKKLD

SEQ ID NO: 65901 - protein, 852 aa, Neisseria meningitidis
MPANLSSALETFKQQRDAAEAHYLKANRVSVFFREYTAAVETLLAALWAEYFQNSALCLMAVGGFGRGELYPCSDVDLAVVSPAPLSDGIQEQIARFVQTLWDCKLMPSVKSGSVDELCESVRNDITGDTAFLEARFLFGNRQTADKLAEKMNAQRNVAAFVEAKLVEMEHRHAKSQGSGAVLEPNIKSCPGGLRDIHTLLWIAKAQGLATDLPDLLKQRILTRAEAGMLSHGYRRLAHIRIHLHLNAKRAEDRLLFDLQPQVAESMGYEGLNLRRQSEELMRVFYRAIKTVKQLSGILTPMLRSRVSSAPMRVTLRIDDDYIQVNNQIAARHTDIFFRRPEHIFKIVEIMQQRNDITALEPQTLRAWWGATRKINRSFYQNSENRHRFAGFFRNGNGLTQTLRFLNLYGVLGRYLPAWEKIVGLLQHDLFHIYPVDDHILTVVRNVRRLALDMHSHELPYASALMQSFEKQDILYLAAFFHDIAKGRGGDHAIQGIADARQFAADHFLTGEESDLLAWLVENHLLMSAVAQKEDIQDPDVLDAFCKRVQTHERLSALYLLTISDIRGTNPKLWNAWRASLLESLFHAAGRYLTGNGGNPHTLFGRRRQEAADLLTRAAVPEKQQKKLWNALGSAYFARHQSREILWHAANLVHDFETPIVRSRILFKSDSFQVMVFMPNGPRLFARLCRIFSRHGFDILAARAFITEHDYILDTFIVQIPSQHAPEDYPDIQSALEAELNSFIHGHTVAETQSHSRRISRRSRYMPIAPSITITPEEDYPDWYSVEITAVNRPFLLADMAEVFFAHNVSLRYAKISTLDERAEDSFTVFSLDLKNPKIQSSLKQTLLEQLS

SEQ ID NO: 65902 - protein, 327 aa, Neisseria meningitidis
MSEIKTDDPKRGIKLRGADKTARIPIKVVPLQEKLKKPEWIRAKLPSRKFFEIKDILREQKMHTVCEEASCPNIGECFSKGTATFMIMGDICTRRCPFCDVGHGRPNMLDPDEPKNLAESVKAMNLRYVVITSVDRDDLRDGGAQHFADCIKAIRETSPNTKIEILVPDFRGRLDIALKILAETPPDVMNHNLETHPSLYRKARPGANYQHSLDLLKRYKEMMPHIPTKSGIMVGLGETDEDVREIMRDMRAHNIEMITIGQYLQPSDGHLPVLRYVTPEQFKIFEKEAYELGFSNAAIGAMVRSSYHADEQAAEALRESHGGCGHH

SEQ ID NO: 65903 - protein, 89 aa, Neisseria meningitidis
MNKSELIEAIAQEADISKAAAQKALDATTNAVTTALKQGDTVTLVGFGTFYVGERAERQGRNPKTGEPLTIAAAKTPKFRAGKALKDAL

SEQ ID NO: 65904 - protein, 820 aa, Neisseria meningitidis
MTQKEKHFEEYAALATLPLRDVVVYPHMVLPLFVGRPKSIAALENAITREEPVFLLAQTDAAVEEPVAADLYQTGTVAQVLQVLKLPDGTVKVLVEGLYRGRVLTIEDTGGLFVSHIEAVVEEDTGGNTDLEAVRRTLLAQFEQYAKLNKKIPAEIIGSINGIAENSRLTDTVAAHLQLKLAQRQQILEIPEIGKRMEFLLAQLESELDIMQAEKRIRGRVKRQMEKSQREYYLNEQIKAIHKELGEEDENGELDALEADIKKAGMTKEAEEKCLSELKKLKMMPPMSAESTVVRNYIDTLLELPWKKKSRVSKDIAKAGLVLDTDHYGLEKVKERILEYLAVQKRMDKLKGPILCLVGPPGVGKTSLGESIAKATGRKYVRMALGGVRDESEIRGHRRTYIGSMPGKILQNMAKAGVKNPLFLLDEIDKLGSDFRGDPASALLEVLDPEQNNKFADHYAEVDYDLSDVMFIATSNSLNIPTPLLDRMEIIRLSGYTEDEKINIAMQYLVPKQMKRNGVKEGELLVEESAVRDIIRYYTREAGVRSLDREIAKICRKVVMQITLDEDKKRLSETKKTSKAKPKAVKVNEKNLHDYLGVRRFDYGVAESENRIGQVTGLAWTEVGGELLTVEAAALPGKGVIQCTGQLGDVMKESVSAAWSVVRSRAESVGLASDFYEKKDIHVHVPEGATPKDGPSAGIAMTLAMVSAFSKIPVRADVAMTGEITLRGEVLPIGGLKEKLLAALRGGIKHVLIPKDNFKDLEEIPENVKTGLTIHPVKWIDEVLALGLESQPEPWAEPSGAEAVAESASKPKPRSRATKH

SEQ ID NO: 65905 - protein, 581 aa, Neisseria meningitidis
MERQTDEFAQAAARAAIRFLEHYASSGDEVLANCTERLFQALQNGHSFIRLSGGEADALSALAPVVGTSAAPLILEGRRLFLGRMWQLEYDLAAEIKRLAAADTSAPDAAGARQNLAKWFQGTGSEGQRDAAALALLQSFMVITGGPGTGKTTTVAKLLALICGKDENLPNIALAAPTGKAAAHMARALHRAINGFDALEAVRRHLLKLEGQTVHRLLKLRPPKMQAAFNPVYPLPFDVLVIDEASMLDTALMLQLLKAVKTGARVILLGDENQLPSVGIGAVLSVLSQKTVLDGETHQRLAGFLPEHGFSVSANPPVLAQNTAHLSFSHRFGDNSGIGCLARAAVSGDEGAWALFDRFPDELEHSECSPNARVERLYRAHKAYWQAVKDGNIEAAYAGISDIVVLAAWRQDAEDFNEAYCRHVRRKMNIPEHLAYFAGEPIMIRQNDYALELFNGDIGLIMEDVGRQGSLAAYFADADGFKKVAVSCLPEFEPAFAMTVHKSQGSEYREVWLLPPSAAPSDEGDDALSGLSKELLYTAITRAREKFVFFGGEETFRQAAATVKTRQTALGSMLERVFSQG

SEQ ID NO: 65906 - protein, 205 aa, Neisseria meningitidis
MSHKKQDAFQGLIDALKVLPNVGPKSAQRIAYHLLQHKRKEAEKLVDALQTALKQVDHCARCNTFCEGGLCDICADETRDGRRLMVVHMPADVSNMEAANCHDGLYFVLMGQINTALGMDVSAIALDRLAQRLGGGEVEEIIIATAFTAEGNATAYVLSEFFKNLPYKVSRLSQGIPLGGELEYVDAGTLAQAVYERRLIKEGGA

SEQ ID NO: 65907 - protein, 542 aa, Neisseria meningitidis
MISTNGITMQFGAKPLFENVSVKFGEGNRYGLIGANGSGKSTFMKILGGDLEQTAGEVAIENGVRLGKLRQDQFAYEDMRVLDVVMMGHTEMWAAMTERDAIYANPEATEDDYMKAAELEAKFAEYDGYTAEARAAELLSGVGISEDLHNATMAEVAPGFKLRVLLAQALFSKPDVLLLDEPTNNLDINTIRWLEGVLNQYDSTMIIISHDRHFLNEVCTHMADLDYNTITIYPGNYDDYMLASAQSRERALKDNAKAKEKLQELQEFVARFSANKSKARQATSRLKQADKIKSEMVEVKPSTRQNPYIRFEADEKAKLHRQAVEVEKLAKRFETQLFKNLNFILEAGQRLAIIGPNGAGKSTLLKLLAGAYNPEYSDGLLPDEGSIKWAEKASVGYYPQDHENDFDVDMDLSEWMRQWGQDGDDEQVIRGTLGRLLFGSNDVVKKVKVLSGGEKGRMLYGKLLLLKPNVLVMDEPTNHMDMESIESLNMALEKYNGTLIFVSHDRQFVSSLATQIIELDGKGGYEHYLGDYESYLEKKGVA

SEQ ID NO: 65908 - protein, 417 aa, Neisseria meningitidis
MQTYLVGGAVRDYLLGLPVKDRDWVVVGADAQTMLAQGFQPVGKDFPVFLHPETHEEYALARTERKTAKGYVGFSFHADKDVTLEQDLMRRDLTINAMAQDADGKIIDPFGGQRDLAAGILRHVSPAFAEDPVRILRTARFAARYKFEIAEETIKLMRQMVENGEADALVAERVWQEFAKGLMEKNPRKMIEVLRECGALKVLLPEVNALFGVPQRADYHPEIDSGIHTLMTLQRAADMGLSLPERYAALLHDLGKAKTPSDILPRHHGHDLAGVEPVRKVNQRLRAPKHCAELAELVCRWHIIFHQVGQLKSQTILNVLKKTDAFRRPERFQTALNVCIADTQGRLNREHTPYPQRAHWLALLEAANQADSGKIAAECRSQGKAHLIAEQIDRARLAQIAPLQKAFRAAQDKTEKH

SEQ ID NO: 65909 - protein, 144 aa, Neisseria meningitidis
MPLPAPCRFAKPAASFLSMALLSCQLSHAATAYIPLNDFQPNCDIRRLGLTQGQHNELRKIRAAFKMAGDRARLKVMHSEHSRRRSVVEIISSDVFNRNEARDYVESRYLSGMDFAVDELEIQHRFFHILTPQQQQMWLSSCLK

SEQ ID NO: 65910 - protein, 220 aa, Neisseria meningitidis
MLQFAPFLPTQGNRIMFTGIVQGLGKLTAIHRPSEAFQTYVVELPQEAADNLQRGASVANNGCCLTITEIEGNRVSFDLMAETLAKTNLGLLKEGDCVNIERAARFGDEIGGHVMSGHIMATVPIVEIERDGYNRTVWFSLPHELKPYILTKGFVGLDGCSLTIGKVEDSRFNVHLIPETLERTLFGSRKVGDRINIEIDPNTQAIVDTVERLMAQRYAK

SEQ ID NO: 65911 - protein, 590 aa, Neisseria meningitidis
MILPARFSDGISLSLRLKLLTGLWVGLAALSVVLTLLLSLRLENAASVIEEAGNLRMQAYRLAYMAGEGSPRAQIDNQVAEFEKSLKRIAQSDAIHPLIPSDTPLAYDLIQSMLIIDWQAHILPPLQSYRRPTQVDLYRFAGNIELFLQALENANEKNTWWLRRFQWAIMLMTLVSSVLMLFWHQIWVIRPLQALREGAERIGRRCFDIPVPEGGTPEFKQVGRCFNQMGGRLKILYDDLEGQVAEQTRSLEKQNQNLTLLYQTTRDLHQSYIPQQAAEHFLNRILPAVGADSGRVCLDGGSDVYVSIHHADCGTAASDLGKYHEEIFPIEYQNETLGRLLLSFPNGISLDEDDRILLQTLGRQLGVSLAGAKQEEEKRLLAVLQERNLIAQGLHDSIAQALTFLNLQVQMLETAFAENKREEAAENIGFIKTGVQECYEDVRELLLNFRTKISNKEFPEAVADLFSRFTQQTGTTVETAWENGTHLPTQDEQLQMIFILQESLSNIRKHAHATHIKFRLLKQDGSFTMTIQDNGQGFDTENIGEPSGSHVGLHIMQERAKRIHAVLEIRSQAQQGTTVSLTVASEESLK

SEQ ID NO: 65912 - protein, 363 aa, Neisseria meningitidis
MSHISPIPEILADIKVGKMVIITDAEDRENEGDLLMAAQFVTPEAINFMIKHARGLVCLPMDGEMVEKLGLPMMTQKNGAQYGTNFTVSIEAAHGITTGISAADRALTIQTAVSPTAKPEDIVQPGHIFPLRAQKGGVLVRAGHTEAGVDLAQMNGLIPAAVICEIINDDGTMARMPELMKFAEEHKLKIGTITDLIEYRSRTESLLEDMGNAPVQTPWGEFQQHVYVDKLSGETHLALVKGTPSADTETLVRVHEPFSVMDFIQANPRHSWSLPKALERVQQAESGVVILLHRTEDGASLLDRTLPKGANQAYKWDSKSYGIGAQILAGLNVKKLRVLGQPSSFTGLTGFGLEVVGFEEAEK

SEQ ID NO: 65913 - protein, 436 aa, Neisseria meningitidis
MTDLFAREPYAPLAERLRPHTLDDVVGQEHLIGEGKPLRVAVEGGKPHSMLLWGPPGVGKTTLARILAQSFNAQFLPVSAVFSGVKDIREAIDKAEIALQQGRATILFVDEVHRFNKAQQDAFLPHVESGLLTFIGATTENPSFEVNPALLSRAQVYVLQPLSSDDLKKLIAKVLALPEYQEFTIETDAQKLLVNTVDGDARRLLNLLEQLLRAADTRRLKNLTAEFLADSLGAQIRRFDKGGESFYNQISALHKSVRGSHPNAALYWFCRMLDGGTDPRYLARRIVRIAWEDIGLADPRALQIANDAAATFERLGSPEGELALAQAVLYLAAAAKSNAGYKAYNQMRHFVKENASDEVPVHLRNAPTKLMKELGYGREYRYAHDEPNAYAAGESYMPDGLDEPDFYQPVPRGLEIKIGEKLAWLKSLDEEVLKAK

SEQ ID NO: 65914 - protein, 489 aa, Neisseria meningitidis
MEKHNGTYRDLHRPASEFATRDEYLEHELQIMQPKRWRPNLPFRDYRFEWEDLIPAMAGTIGKVVMVGAVAAAFAAPLGLPDSFVLENVRYELLIAAAFILLVSGFFLPGANLPGTHGPLIPMIPIVVSAGGHPLAFGISIAVLGLLMALFRGGSIMAKLTSNGVCGGLLLYLGFIGTTGQVKKLFSWAGGFNMPYIAFTVIIVTIVMYALLEHWKKRWLAVPLGCLIAGVAAFALGAPFEFHTAPGLPPMSPAYWWGENSGWHLGLPTAESFLVVFPFAVLAVAMWSPDFLGHQVFQKISYPEKTDKVLMNIDDTMTSCSVRQAVGSILGGANFTSSWGTYIVPASIAKRPIPGGAVLTAVLCIIAGLWGYPMDLAIWQPVLSVALVVGVYLPLLEAGMEMTRKGKTTQSAATVVFSSALVNPVFGWALTMLLDNLGLIGCKERSAQLGFTGRVLIPVVGFLILCVAMGAVGMLPGIPPFLEHFKSLG

SEQ ID NO: 65915 - protein, 469 aa, Neisseria meningitidis
MKYISTRGETAHKPFSEVLLMGLAPDGGLMLPEHYPQIGREALDKWRGLAYPELAFEIMRLFVTDIPEDDLRDILNRTYTEAAFGTKEITPVRTLSDGIKIQALSNGPTLAFKDMAMQFLGNAFEYVLNKEGKKLNILGATSGDTGSAAEYALRGKKGVNVFMLSPDGKMSAFQRAQMYSLQDGNIHNIAVKGMFDDCQDIVKAVQNDAAFKEKYHIGTVNSINWGRIVAQVVYYFAGYFKATQSNDEQVSFCVPSGNFGNVCAGHIAKQMGLPVRRLIVATNENDVLDEFFKTGAYRPRNSAHTYVTSSPSMDISKASNFERFVFDLMDRDPQEINTLWAEVAAGKGFNLRFALDKVGGKYGFTSGKSTHADRLATIRQVYEQDQELIDPHTADGVKVAREVREERETVVCLETALAAKFDATIREAVGDVAIPRPAALEGLENLPQRVQTVPNSADAVKGIIEQTLA

SEQ ID NO: 65916 - protein, 225 aa, Neisseria meningitidis
MSIKQWPEGERPREKLLERGAAALSDAELLAILLRVGTRGMSAVDLARYLLQEFGSLGRLMSAEVGKLSAYKGMGTASFTQFAVVREIGRRILAEELQESIVLSDPDTVADYLRFHLGQEKVEVSVALLLNRQNQLIAVRELSRGTVAENTIYIREIVKLALDEYADSLIIAHNHPGGSPEPSQEDIMFTRRLAQAMSLVDVSLLDHFIVTAQTVRSFRQLGLMP

SEQ ID NO: 65917 - protein, 469 aa, Neisseria meningitidis
MTAQTLYDKLWNSHVVREEEDGTVLLYIDRHLVHEVTSPQAFEGLKMAGRKLWRIDSVVSTADHNTPTGDWDKGIQDPISKLQVDTLDKNIKEFGALAYFPFMDKGQGIVHVMGPEQGATLPGMTVVCGDSHTSTHGAFGALAHGIGTSEVEHTMATQCITAKKSKSMLIAVDGKLKAGVTAKDVALYIIGQIGTAGGTGYAIEFGGEAIRSLSMEGRMTLCNMAIEAGARSGMVAVDQTTIDYVKDKPFAPEGEAWDKAVEYWRTLVSDEGAVFDKEYRFNAEDIEPQVTWGTSPEMVLDISSKVPNPAEETDPVKRSGMERALEYMGLEAGTPLNEIPVDIVFIGSCTNSRVEDLREAAAIAKDRKKAANVQRVLIVPGSGLVKEQAEKEGLDKIFIEAGFEWREPGCSMCLAMNADRLTPGQRCASTSNRNFEGRQGNGGRTHLVSPAMAAAAAVTGRFTDIRMMA

SEQ ID NO: 65918 - protein, 187 aa, Neisseria meningitidis
MKKIIIAALAAAAIGTASAATYKVDEYHANARFSIDHFNTSTNVGGFYGLTGSVEFDQAKRDGKIDITIPVANLQSGSQHFTDHLKSADIFDAAQYPDIRFVSTKFNFNGKKLVSVDGNLTMHGKTAPVKLKAEKFNCYQSPMLKTEVCGGDFSTTIDRTKWGMDYLVNVGMTKSVRIDIQIEAAKQ

SEQ ID NO: 65919 - protein, 288 aa, Neisseria meningitidis
MMKTLLPFFGVVRVSGEDRQTFLHGQLSNDINNLQTGQACYATYNTPKGRVIANMIVVNRGGDLLLIMAQDLLEATVKRLRMFVLRAKAVFEILEDYAVGAELEASAEPLAAQEPNLAFAAQQDSDGICSIALPHGGILRIAPKNTLPPYDAAAENAWRLHEIRSGYPWICAATKETAVAQMLNQHIIGGVHFKKGCYPGQEIIARAQYRGQVKRGLAVLSGNSAAEAGSVLAADGEEAGIVLDSVQDSENFTALAVIKFSAAQKELTVPNGGIFKAVHLFFKTENAE

SEQ ID NO: 65920 - protein, 151 aa, Neisseria meningitidis
MKKPKILFVCLGNICRSPMAEYILRRRAAEAGIPLEADSAGTSGWHDGEDMHRETAKILKKHGIDASGFTSRKIRQSDAVAFDCIIAMDGKNLSELERTFGRRSEKIFKLTDLIPESGYDHVPDPWYTGDFEETFRLADAGCRALLEKISK

SEQ ID NO: 65921 - protein, 397 aa, Neisseria meningitidis
MNPKHLIAFSALFAATQAEALPVASVSLDTVTVSPSAPYTDTNGLLTDYGNASASPWMKKLQSVAQGSGETFRILQIGDSHTAGDFFTDSLRKRLQKTWGDGGIGWVYPANVKGQRMAAVRHNGNWQSLTSRNNTGDFPLGGILAHTGSGGSMTLTASDGIASKQRVSLFAKPLLAEQTLTVNGNTVSANGGGWQVLDTGAALPLTIHTEMPWDIGFINIENPAGGITVSAMGINGAQLTQWSKWRADRMNDLAQTGADLVILAYGTNEAFGDNIDIADTEQKWLDTVRQIRDSLPAAGILIIGAPESLKNTLGVCGTRPVRLTEVQQMQRRIARQGQTMFWSWQNAMGGVCSMKNWLNHGWAAKDGVHFSAKGYQRSAEMLADSLEELVRSAAIRQ

SEQ ID NO: 65922 - protein, 330 aa, Neisseria meningitidis
MKKESRPAFDAAAVFDAAAVPVSDSGFAANANVRRFVDDEVGKGDFSRAEWQDFFDKAAYKADIVKIMHRPSTSRPWYVFRTGNSGKAKFRGARRFYAENRALIDDVAQKYGVPAELIVAVIGIETNYGKNTGSFRVADALATLGFDYPRRAGFFQKELVELLKLAKEEGGDVFAFKGSYAGAMGMPQFMPSSYRKWAVDYDGDGHRDIWGNVGDVAASIANYMKQHGWRTGGKILVSATLAPGADVQAIIGEKTALTRTVADLKAYGIIPGEELADDEKAVLFKLETAPGVFEYYLGLNNFYTVWQYNHSRMYVTAVRDIANSLGGPGL

SEQ ID NO: 65923 - protein, 1296 aa, Neisseria meningitidis
MTYPIPKPREKSRWLNLSQGSLPLALARYLPHKQLKVVLTQDAEQALRLQTAWRFFRPHDTAVFLPDWETLPYERFSPHQDLVSERLSALWQIKSGAADVLFVPVATAMQKLPPVPFLAGRTFWLKTGQTLDIGRLKSDLVDAGYNHVSHVVAAGEFAVRGGIVDLFPMGSEMPYRIDLFDDEIDSIKTFDTETQRTISPVSEIRLLPAHEFPTDSEAQKIFRSRFREEVDGNPNDAAVYKAVSNGHFGAGVEYYLPLFFENELETLFDYIGEDALFVSLGDVHAEANRFWSDVKSRYAMAQGDETYPPLLPQHLYLSADVFAGRLKNYGQVLPDVSGKEHTLPDLAVNRQSDEPLQALKDFQTAFDGRILLCAESLGRRETMLGFLQQNGLKAKPVSDWQGFLSAHEPLMITVAPLAYGFKLGGLQSPNQQQTTSASEGEGDAVTDQTEFSAAAISPLPSPLPQEREQSAAAVSDGLKTESSLYSIANNLHGQIRQQPTPSPVGEDWGESKTVAAQTEFPASATNPLPSPLPQEREQSAAAVSDDLKTKSSLYPIENSLHGQIRQQPAPSPVGEGWGEGKAVADQSAIAVITESDLYQYVARSRVHNRRKKHAAVSDGLLRDLAEINIGDPVVHEEHGIGRYMGLVTIDLGGETNEMMLLEYAGEAQLYVPVSQLHLISRYSGQAHENIALHKLGSGAWNKAKRKAAEKARDTAAELLNLYARRAAQSGHKFEINELDYQAFADGFGYEETEDQAAAIAAVIKDLTQAKPMDRLVCGDVGFGKTEVALRAAFVAVMGGKQVAVLAPTTLLVEQHAQNFADRFADFPVKVASLSRFNNSKATKAALEGMADGTVDIVIGTHKLVQDDIKFKNVGLVIIDEEHRFGVRQKEQLKRLRANVDILTMTATPIPRTLSMALEGLRDFSLITTAPSRRLAVKTFVKPFSEGSVREAVLRELKRGGQVFFLHNEVDTIENMRERLETLLPEARIGVAHGQLRERELEQVMRDFLQQRFNVLLCSTIIETGIDIPNANTIIINRADKFGLAQLHQLRGRVGRSHHQAYAYLLTPEYITKDAEKRLDAIAAADELGAGFTLAMQDLEIRGAGEILGEGQSGEMIQVGFTLYTEMLKQAVRDLKKGHQPDLDAPLGITTEIKLHSPALLPESYCPDIHERLVLYKRLAVCETVQQINAIHEELVDRFGLPEQPVKTLIESHHLRLMAKELGINAIDAAGEAVTVTFGKNNNIDPTEIILLIQNDKKYRLAGADKLRFTAEMENIEVRINTVKNVLKTLQNRCLPK

SEQ ID NO: 65924 - protein, 280 aa, Neisseria meningitidis
MDIKINDITLGNNLPFVLFGGINVLESLDSTLQTCAHYVEVTRKLGIPYIFKASFDKANRSSIHSYRGVGLEEGLKIFEKVKAEFGIPVITDVHEPHQCQPVAEVCDVIQLPAFLARQTDLVAAMAETGNVINIKKPQFLSPSQMKNIVEKFHEADNGKLILCERGSSFGYDNLVVDILGFGVMKQTCGNLPVIFDVTHSLQTRDAGSAASGGRRAQALDLALAGMATRLAGLFLESHPDPKLAKCDGPSALPLHLLEDFLIRIKALDDLIKSQPILTIE

SEQ ID NO: 65925 - protein, 428 aa, Neisseria meningitidis [sequence omitted]

SEQ ID NO: 65926 - protein, 377 aa, Neisseria meningitidis
MSYSTFPKTKNDALNEPMFFGQPVNVARYDQQKYEVFEKLIEKQLSFFWRPEEIDVSRDRIDYANLPEHEKHIFISNLKYQTLLDSIQGRSPNVALLPLVSIPELETWIETWSFSETIHSRSYTHIIRNIVNDPSVVFDDIVENEYITARAEDIACYYDDLIEYTQYYNLLGEGVHNVGGKPITVSLRGLKKKLYLCLMCVNVLEAIRFYVSFACSFAFAERELMEGNAKIIKLIARDEALHLTGTQHMLNLMRSGVDDSEMAEIAAELQDECFQLFKKAAEQEKEWAAYLFKDGSMIGLNKEILSQYVEYITNLRMQAVGLPAGFEGANQNPIPWINAWLSSDNVQVAPQEVEISSYLIGQIDSEVNTDDLGDFEL

SEQ ID NO: 65927 - protein, 759 aa, Neisseria meningitidis
MNTPTDLKVTKRDGRLEAIDLDKIHRVVTWAADGLENVSVSQVELKSHIQFYNGIRTDDIHETIIKAAADLISEDTPDYQYLAARLAIFHLRKIAYGEYEPPHLYDHVKKLTDAAKYDRHILEDYSREEFDELNAYIDHERDMSFSYAAVKQLEGKYLVQNRVTRQIYETPQFLYVLVAMCLFSKYPKETRLDYVKRFYDAVSTFKVSLPTPIMSGVRTPTRQFSSCVLIECDDSLDSINATTSAIVKYVSQRAGIGINAGRIRGLDSEIRGGEARHTGCIPFFKMFQAAVKSCSQGGVRGGAATLFYPLWHIEAESLLVLKNNRGVEDNRIRQLDYGVQINRLLYTRLIKGGNITLFSPNEVPGLYEAFFADQDEFERLYTKYEQDPDIRKRIIPAADLFSTLMQERAGTGRIYIQNVDHCNTHSPFDPRVAPVHQSNLCMEIALPTKPLDNINDPNGEIALCTLSAFNLGALNSLDELEGLADLTVRALDALLDYQGYPVEAARTSTMGRRSLGIGVINYAYYLAKNGVRYSDGSALGLTHRTFEAIQYYLLKASANLAKEYGACTLFNQTVYSQGKLPIDTYKKDLDAVCNEPLHYDWESLRADIVKYGLRNSTLTALMPSETSSQIANATNGIEPPRGLVTVKASKDGILKQVVPEFETLKNAYETLWQLPGNEGYLKLVGVMQKFVDQAISANTAYDPGKFEGGKVSMKQMLKDLLTAYKYGVKTLYYHNTRDGADDTQTDIQDDGCAGGACKI

SEQ ID NO: 65928 - protein, 275 aa, Neisseria meningitidis
MPELPEVETTLRGIAPHIEGKTVEAVVLRQLKLRWQINPDLGEILSGRQVLSCGRRAKYLIVRFQTGILLIHLGMSGSLRIFTPSDGRIGRSDRHDHVDIVFSDGTVMRYRDPRKFGAILWYEGIEEHHPLLEKLGPEPLSEAFCTDYLYVRLKAQKRAVKLALMDNAVVVGVGNIYANESLFRAGISPHRPANRLKKKECALLVETVKAVLRRAIETGGSTLRDFVDSDGKSGYFQQEYTVYGRHNQPCPQCGGLVVKETLGQRGTFYCPNCQK

SEQ ID NO: 65929 - protein, 230 aa, Neisseria meningitidis
MKLIKYLQYQGIGSRKQCQWLIAGGYVFINGTCMDDTDADIDSSSVETLDIDGEAVTVVPEPYFYIMLNKPEDYETSHKPKHYRSVFSLFPDNMRNIDMQAVGRLDADTTGVLLITNDGKLNHSLTSPSRKIPKLYEVTLKHPTGETLCETLKNGVLLHDENETVCAADAVLKNPTTLLLTITEGKYHQVKRMIAAAGNRVQHLHRRRFAHLETENLKPGEWKFIECPKF

SEQ ID NO: 65930 - protein, 218 aa, Neisseria meningitidis
MNRQKVIAIDGPGASGKGTVAARVAAALGYDYLDTGALYRLTALYAQKQGVGWHDEENVSELAKKLPAVFSDSRILLGGEDVSDGIRTEAIGMGASAVAQLPKVRASLLQRQRDFLTEKGLVADGRDTGSVVFPQAELKIFLTAESKIRAERRAKQIGIPCEGLAFERILSDIEARDEADRNRKVAPLKQQPDALLLDTSRLTIEETVKKVLDWYRKV

SEQ ID NO: 65931 - protein, 561 aa, Neisseria meningitidis
MSMENFAQLLEESFTLQEMNPGEVITAEVVAIDQNFVTVNAGLKSESLIDVAEFKNAQGEIEVKVGDFVTVTIESVENGFGETKLSREKAKRAADWIALEEAMENGNILSGIINGKVKGGLTVMISSIRAFLPGSLVDVRPVKDTSHFEGKEIEFKVIKLDKKRNNVVVSRRAVLEATLGEERKALLENLQEGSVIKGIVKNITDYGAFVDLGGIDGLLHITDLAWRRVKHPSEVLEVGQEVEAKVLKFDQEKQRVSLGMKQLGEDPWSGLTRRYPQDTRLFGKVSNLTDYGAFVEIEQGIEGLVHVSEMDWTNKNVHPSKVVQLGDEVEVMILEIDEGRRRISLGMKQCQANPWEEFAANHNKGDKISGAVKSITDFGVFVGLPGGIDGLVHLSDLSWTESGEEAVRKYKKGEEVEAVVLAIDVEKERISLGIKQLEGDPFGNFISVNDKGSLVKGSVKSVDAKGAVIALSDEVEGYLPASEFAADRVEDLTTKLKEGDEVEAVIVTVDRKNRSIKLSVKAKDAKESREALNSVNAAANANAGTTSLGDLLKAKLSGEQE

SEQ ID NO: 65932 - protein, 421 aa, Neisseria meningitidis
MNTLQRRKTHQVRIDHITVGSEAPVVIQSMTNTDTADAKATALQIKELSDAGSEMVRITVNSPEAASKVAEIRRRLDDMGYATPLIGDFHFNGERLLAEFPECGKALSKYRINPGNVGKGVKGDEKFAFMIRTAAENDKAVRIGVNWGSLDQSLAKRMMDANLASSAPKPPEEVTKEALIVSALESAEKAVLLGLPEDKIILSCKVSAVQDLIQVYRELGSRCAYPLHLGLTEAGMGSKGIVASTAALSVLLQEGIGDTIRISLTPEPGSPRTQEVVVGQEILQTMGLRSFTPMVTACPGCGRTTSTVFQELAQDVQNYLRQKMSIWRTLYPGVESLNVAVMGCVVNGPGESKLADIGISLPGTGETPVAPVYVDGERKVTLKGDNIATEFLAIVEEYVKTNYGENGSKRNQNKIIPIQSL

SEQ ID NO: 65933 - protein, 767 aa, Neisseria meningitidis
MQKTETKKARPEHVVNLIGDALWLMGLAATLYLVISLISFDMGDPSWSHSSPVVEDVANWGGLFGAYVADVGYYLFGWSFWWWIAAACVMLYKNFRLHAKQTENEAYNHKIAAAALFVLTVFSPVLEYFVLGGKYADSLPVGAGGMVGIRVGAVFAWLLGKSGSLLIILVVLLLSLSLLVQISWLEFLNGAGRAVQNRLSALSGKVMALGKRRPNTKTDGVDTQNTRRMVKEAKNITAKPVALPEGSSSNRKSVAVSVAPPPKIQVSLFEDDEPRQAGEYHKPTLNLLRIPDSEPVSINPAELERTAELIESKLAEFGIGVQVVSATSGPVITRYEIEPAQGVKGSQIVALSKDLARSMSLQSVRIVETIAGKNTMGIELPNDKRQDVMLSEILSSPVFAEAKSKLTVALGKDIAGTPVVGDLAKMPHLLVAGMTGSGKSVGVNGMIMSMLFKATPDEVRFIMIDPKMLELSIYDGIPHLLCPVVTDMREAGQALNWCVAEMEKRYRLLSHAGVRNLEGFNQKVEAAKAAGKPLLNPFSLNPDNPEPLEKLPMIVVVIDELADLMMTERKAVEQQIARLAQKARAAGIHMIVATQRPSVDVVTGLIKANIPTRMAFTVQSKIDSRTILDQMGADELLKYGDSLFLQPGSAEPTRLQGAFVSDDEVHHVVAFVKEQAPANYVEGLLTGEAAQETANIVSPNADSDELFDQAVAYVLESKKTSISSLQRQLRIGYNRAANLMEALENAGVVSPSDLNGSRKILAHKDHL

SEQ ID NO: 65934 - protein, 150 aa, Neisseria meningitidis
MQIILLEKIGGLGNLGDIVTVKNGYARNFLIPAGKAKRATEANMKEFEARRAELEAKQAEILADARVRQEKLDGQTITVAQKAGVDGRLFGSVTNADIAAAIVAAGIEAVKANVRLPNGPLKAVGEYEVEVALHTDAVAKITVAVVAATE

SEQ ID NO: 65935 - protein, 76 aa, Neisseria meningitidis; identical to SEQ ID NO: 65041

SEQ ID NO: 65936 - protein, 100 aa, Neisseria meningitidis
MGFNNLVSLAVLIEKVFPIRYTPAGIPVLDIILKHESWQEENGQQCLVQLEIPARILGRQAEEWQYRQGVYVHVEGFLAQKSRRSLMPMLRIQNIQEYKG

SEQ ID NO: 65937 - protein, 122 aa, Neisseria meningitidis
MRHYEIVFIVHPDQSEQVPAMVERYKTMIAEANGKIHRLEDWGRRQLAYPINKIHKAHYVLMNIETTPEVVEELETAFRFNDAVLRHLTIKTKHAVTEASPMLGGEKAKNLLSGASEEAVAQ

SEQ ID NO: 65938 - protein, 725 aa, Neisseria meningitidis
MQQKVRFQIEGMTCQACASRIEKVLNKKDFVESAGVNFASEEAQVVFDDSKTSVADIAKIIEKTGYGAKEKTEDTLPQPEAEHHIGWRLWLLLAINIPFLIGMVGMMLKGLNWTRHDWMLSPLLQFALASVVQLWLAVPFYKSAWASIKGGLANMDVLVTIGTVSIYLYSVYMLFFSPHAAYGMAHVYFEVGIMVIGFVSLGKFLEHRTKKSSLNSLGLLLKLTPTQVNVQRDGEWRQLPIDQVQIGDLIRANHGERIAADGIIESGSGWADESHLTGESNPEEKKAGGKVLAGALMTEGSVVYRAAQLGSQTLLGDMMNALSEAQGSKAPIARVADKAAAVFVPAVVGIALLTFIATWLIKGDWTLALMHAVAVLVIACPCALGLATPAAIMVGMGKAVKHGIWFKDAAAMEEAAHVDAVVLDKTGTLTEGKPQVAAVYCVPDSGFDEDALYRIAAAVEQNAAHPLARAIVSAAQARGLEIPTAQNAQTIVGAGITAEVKGAGLVKAGKAEFAELTLPKFSDGVWEIASVVAVSVNGKPIGAFALADALKADTAEAIGRLKKHNIDVYIMSGDNQGTVEYVAKQLGIAHAFGNMSPRDKAAEVQKLKAAGKTVAMVGDGINDAPALAAANVSFAMKGGADVAEHTASATLMQHSVNQLADALSVSRATLKNIKQNLFFAFFYNILGIPLAALGFLNPVIAGAAMAASSVSVLSNALRLKRVKID

SEQ ID NO: 65939 - protein, 151 aa, Neisseria meningitidis
MHKIPKGTALAFDFGEARIGVAQGDAELGLSHPLATVTGGSNDEKFAAIAKLVQEWQPRYFVVGLPVHTDGTKHEMTHLSRKFGRRLNGRFNLPVYWVDERLSSVYAESLLSEAQVFGKKRKSVLDQVAAQAILHGFFEGGPAECFNGREG

SEQ ID NO: 65940 - protein, 218 aa, Neisseria meningitidis
MASVFLEGEAVEVGNIFCIGRNYAAHIEELKNEIPSEPVVFMKPSGSILNSGGTILLPEFSRDVQFECELVLLVGKDSDGTGEGKDILGCVAGYGVGLDLTARDIQCRLKEKGLPWLKAKGFRHSACVSDFAAAGRIGNPENVLFSLKQNGVLKQRGDTGLMIYPIREILHKLAADYGLGKGDLVFTGTSSGVGAIGAGDNLALELDGLVRASFTVGC

SEQ ID NO: 65941 - protein, 570 aa, Neisseria meningitidis
MKASQFFISTLKEAPAEAALASHKLMIRAGLIKANASGLYTWMPMGLRVLRKVENVVREEMARAGSVELLMPVVQPAELWQESGRWEFYGKELLRLKDRHDRDFCMGPTCEEVIADIVRKEINSYKQLPKNFYHIQTKFRDEVRPRFGVMRAREFVMKDAYSFHADYASLQTTYDAMYDAYCRIFTRLGLEFRPVAADTGSIGGTGSHEFQVLAESGEDVIAYSDTSDYAANVELAPTLPLKGERTAAQAELVKVHTPNVKTIESLVEFLNIPVEQTLKSIVVEGENEGEIVLLLLRGDHEFNDIKAEKLAGVKSPLTMASPAAIVEQFGANGGSLGPVGFAGKVYADFATEKGADWVIGANEDGYHYTGFNFGRDAAEPEFVDLRNVVEGDESPDGQGRLKLARGIEVGHVFQLRDKYTQAMNVSFLDNNGKSQIMEMGCYGIGITRVVAAAIEQNNDEKGIIWTKAMASFEVVIVPMNYKKSDTVREAADKIYAELLAAGADVLLDDRDERAGVLLNDSELLGIPHRIVIGDRALKEGNVEYAERRDNEAQAIAIGEIVARVTASLNA

SEQ ID NO: 65942 - protein, 535 aa, Neisseria meningitidis
MSIVEIKVPDIGGHENVDIIAVEVKAGDTIAVDDTLITLETDKATMDVPADAAGVVKEVKVKVGDKISEGGVILTVETGAAAAEAAPAAAEAQPAPAAAPAAAGGATVQVAVPDIGGHTDVDVIAVEIKVGDTVAEDDTLITLETDKATMDVPCTAAGVVKAVFLKVGDKVSEGSAIIEVETVGSAAAAPAQAAQAAAPAAAPPPTAAAAPAAAPAPSAPAAAKIDEAAFAKAHAGPSARKLARELGVDLGQVKGTGLKGRIVGDDIKAFVKSVMQGGAAKPAAVGASLGGGLDLLPWPKVDFSKFGNVEVKELSRIKKISGQNLSRNWVVIPHVTVHEEADMTELEEFRKQLNKEWEREGVKLSPLAFIIKASVSALKAFPEFNASLDGDNLVLKNYFNIGFAADTPNGLVVPVIKDVDQKGLKQISQELTELSKKAREGKLKPQEMQGACFTISSLGGIGGTGFTPIVNAPEVAILGVCKSQIKPVWNGKEFAPRLMCPLSLSFDHRVIDGAAGMRFTVFLANLLKDFRRITL

SEQ ID NO: 65943 - protein, 594 aa, Neisseria meningitidis
MSLVELKVPDIGGHENVDIIAVEVNVGDTIAVDDTLITLETDKATMDVPAEVAGVVKEVKVKVGDKISEGGLIVVIEAEGAAAAPKAEAPVAPAQEAPKAAAPAPQAAQFGGSADVEYDVVVLGGGPGGYSAAFAAADEGLKVAIVERYKTLGGVCLNVGCIPSKALLHNAAVIDEVRHLAANGIKYPEPELDIDMLRGYKDGVVSRLTTGLAGMAKGRKVDIIQGDGQFLDPHHLEVSLTTSEVYEQATPTGEKKIVAFKNCIIAAGSRVTKLPFIPEDPRIFDSSGALALKEVPGKLLIIGGGIIGLEMGTVYSTLGSRLDVVEMMDGLMQGADRDLVKVWQKQNEYRFDNIMINTKTVAVEPKEDGVYVTFEGANAPKEPQRYDAVLVAAGRAPNGKLISAEKAGVAVTDRGFIEVDKQMRTNVPHIYAIGDIVGQPMLAHKAVHEGHVAAENCAGHKAYFDARVIPGVAYTSPEVAWVGETELSAKASGRKITKANFPWAASGRAIANGCDNGFTKLIFDAETGRIIGGGIVGPNGGDMIGEVCLAIEMGCDAADIGKTIHPHPTLGESIGMAAEVALGTCTDLPPQKKK

SEQ ID NO: 65944 - protein, 96 aa, Neisseria meningitidis
MALTLADVDKIARLSRLHLTAAEKEKSLQELNDIFAMVEQMQNINTDGIEPMAHPHEAALRLREDEVTETDRAAEYQAVAPEVRNRLYIVPQVIEE

SEQ ID NO: 65945 - protein, 481 aa, Neisseria meningitidis
MTQYTLKQASVLLQSKQISAVELASAYLAAIAEKNPALNGYITIDQDKTLAEARAADERIAQGNASALTGIPVAYKDIFCQTGWRSACASKMLDNFISPYTATVVQKLLDEGMVTLGRTNMDEFAMGSTNENSFYGAAKNPWNPEHVPGGSSGGSAAVVAARLAPAALGSDTGGSIRQPASHCGITGIKPTYGTVSRFGMVAYASSFDQAGPMAQTAEDCAILLNAMAGFDPKDSTSLEREKEDYTRDLNQPLKGLKIGLPKEYFGEGNSADVLTALQNTIDLLKAQGAELIEVSLPQTKLSIPAYYVLASAEASTNLSRYDGVRYGHRAAQFSDLEEMYGKTRAEGFGSEVKRRIMIGTYVLSHGYYDAYYLKAQKLRRLVADDFQTAFARCDLILAPTAPSAAPKIGADASPVETYLSDIYTIAVNLAGLPALTLPAGFSSGGLPIGVQLIGNYFSEAKILGAAHQIQLNSDWHGKRPE

SEQ ID NO: 65946 - protein, 476 aa, Neisseria meningitidis
MTWETVIGLEIHVQLNTKSKIFSGASTAFGAEPNAHAGVVECALPGVLPVMNREVVEKAIKLGLALDAKINRKNVFDRKNYFYPDLPKGYQISQLDLPIVEHGKLEIVVGDDVKTINVTRAHMEEDAGKSVHEGLNGATGIDLNRAGTPLLEVVSEPEMRSAAEAVAYAKALHSLVTWLNICDGNMAEGSFRVDANVSVRPKGQAEFGTRREIKNLNSFRFLEQAINYEAEAQIEILEDGGKVQQATMLFDPEKGETRVMRLKEDAHDYRYFPDPDLLPVIISDDRLQKAKAEMPELPKEMAARFVADYGVSDYDARLLTASRVQAAYFEEAAKESGQGKLTANWMNGELAATLNKEGMELADSPITAPRLAALVGKIADGTLSSKLAKKAFEAMWAEPEASIAEIIEKHGLQQMTDTGAIEAMVDEVLANNAKAVEQFKSGNEKALNAIVGQVMKASKGKANPAQVQELIKAKLA

SEQ ID NO: 65947 - protein, 336 aa, Neisseria meningitidis
MNHTITLPDQTTFAAGDGETVLAAAARQNLNLPHSCKSGVCGQCKAELVSGDIQMGGHSEQALSEAEKAQGKILMCCTTAQSDISINIPGYKADALPVRTLPARIENIIFKHDVALLKLALPKAPPFAFYAGQYIDLLLPGNVSRSYSIANPPDQEGILELHIRRRENGVCSEMIFGSEPKVKEKGIVRVKGPLGSFTLQEDSGKPVILLATGTGYAPIRSILLDLIRQGSSRVVHFYWGARHQDDLYALEEAQGLADRLKNACFTPVLSRPRECWQGRKGHVQDIAAQDHPDLSEYEVFACGSLAMTEQAKNLFVQQHKLPENLFFSDAFTPSAS

SEQ ID NO: 65948 - protein, 256 aa, Neisseria meningitidis
MEPERLQKVLAASGVGSRREMEEWINNGWVTVNGKTAQLGDKVTPDDHVTVKGSIIKLKWADRLPRIILYYKQEGEIVSRDDPQGRVSIFDRLPQAASSRWVAIGRLDINTSGLLILTTSGELVQRFAHPSFEVEREYAVRVLGGLTGEQMRVLTEEGVMLEDGLAKVERIREQGGEGANKWYNVVIKEGRNREVRRIFESQGLTVSRLVRVGFGPIGLPNRLKRGQFYELNPAEVANILKWAEMLLPGEYRRKKA

SEQ ID NO: 65949 - protein, 451 aa, Neisseria meningitidis
MSDFFHSDVLSVSELNAFAKSLLENHLAGLWIAGEVSNLTRAASGHYYFSLKDSRAQVRCAMFKGAAARLAKPLKEGDHIEVSGKISIYEARGEFQITVNEVRLKGLGQLYEAYERLKAQLQAEGAFAAERKKPLPTRPQCIGIVTSLAAAALRDVVTTLKRRAPEIPVIVYPTPVQGAGSELQIAQAIKTASQRAECDVLIVCRGGGSIEDLWAFNEEPVVRAIEACTVPVVSGVGHETDFTLADFVADVRAPTPTGAAELVSPNRQESLHRLAQAQGRLKTVLEQRYFDASQKLDWLARQIRHPRQKLDEQRASIGKLAQTLSYSMKQNLRAHTARFERQTQALQHYRPDVSVCKNNIVRLQTALPAAFSQLLTHRRQSLTAQAALLEAVSPQHILERGFSVVKNTRGQVIRNADVLKQGQKLHITFADGETDVRVSKEQGQQDLFDCI

SEQ ID NO: 65950 - protein, 273 aa, Neisseria meningitidis
MMRIFSTGGKMDTQAVITHIVRWLDEYAARANAKGFVVGVSGGIDSAVVSALAARTGRTTLLLDMPIRQHPDQLERARLHIRNLQRQYANVSAQTVDLTDTFQTFEQTVGVHQTAFDNQPLSLANARSRLRMLTLYYYGQIHGLLVTGTGNKIEDFGVGFFTKYGDGGVDISPIADLTKTQVYRLAEALGVDEAIQKAPPTDGLWDTERTDEEQMGASYPELEWAMGVYGTRKPEDFEGRQREVLEIYTRLHRAMQHKINPIPVCRIPPELLG

SEQ ID NO: 65951 - protein, 157 aa, Neisseria meningitidis
MTDFSVWETAPFGATVDHILQRYHNVHRAQFEELVPLAQKVAQVHADTFPAEIAELLAYMQNELLMHMMKEERMLFPMINQGVGRGAAMPISVMMHEHEEHDRAIARLKELTDNFQAPEGACGSWTRLYALAKEMVEDLNDHIHLENDILFARVLDS

SEQ ID NO: 65952 - protein, 315 aa, Neisseria meningitidis
MTDITPFANRLGKNIKHLMKWAKRNGIEAWRIYDRDIPQFPFAVDVYGDQIHLQEYDTGWLMRSEEYEAWLAEVLEAVAFVTGFAPEQIRLKRRERQKGLQQYEKTGKAGDDFVITENGRKFWVNLDKYLDTGLFLDHRNTRKKVGETAAGKRFLNLFSYTGSFTVYAATGGAASSETVDLSNTYLDWARRNFELNGIDTERHKIVRADVFQYLQTAYGEGRQFDLIVMDPPSFSNSKKMSDILDIQRDHKKLIDGAVKLLASDGILYFSNNLRSFVLDDLVSEQYAVKDISKQSVPEDFRNKKIHRCWEIRHKS

SEQ ID NO: 65953 - protein, 397 aa, Neisseria meningitidis
MQNYLTPNFAFAPMIPERASGSRVWDTEGREYIDFSGGIAVNALGHCHPALVDALNAQMHKLWHISNIYTTRPAQELAQKLVANSFADKVFFCNSGSEANEAALKLARKYARDRFGGGKSEIVACINSFHGRTLFTVSVGGQPKYSKDYAPLPQGITHVPFNDIAALEAAVGEQTCAVIIEPIQGESGILPATAEYLQTARRLCDRHNALLILDEVQTGMGHTGRLFAYEHYGVVPDILSSAKALGCGFPIGAMLATETIAAAFQPGTHGSTFGGNPMACAVGSRAFDIINAPETLHNVRSQGQKLQTALLDLGRKTGLFSQVRGMGLLLGCVLDAPYRGRASEITAAALKHGVMILVAGADVLRFAPSLLLNDEDTAEGLRRLEHVLTEFAAANRP

SEQ ID NO: 65954 - protein, 414 aa, Neisseria meningitidis
MSNENRTCSFCGKSKSHVKHLIEGENAFICDECVSNCIEILHEDGNDGTPSESAGGEPEESGKLPTPAEIVANLNDHVIGQEQAKKALAVSVYNHYKRLRHPKARANVELSKSNILLIGPTGSGKTLLAQSLARKLDVPFVMADATTLTEAGYVGEDVEQIITKLLGKCDFDVEKAQRGIVYIDEIDKISRKSDNPSITRDVSGEGVQQALLKLIEGTVASVPPQGGRKHPNQEFINVDTTNILFICGGAFAGLEKVIRQRTEKGGIGFGASVHSKDENADITKLFGIVEPEDLIKFGLIPELIGRLPVIATLEELDEDALINILTEPKNALVKQYQALFGMENVELEFEEGALRSIARQAMERKTGARGLRSIVERCLLDTMYRLPDLQGLKKVVVGKAVIEEGREPELVFES

SEQ ID NO: 65955 - protein, 306 aa, Neisseria meningitidis
MTNKPAKRPVNGVLLLDKPEGLSSNTALQKTRHLFRAEKAGHTGVLDPLATGLLPVCFGEATKFAQYLINADKAYTATLKLGEASSTGDAEGEIVATARADISLAEFQTACQALTGNIRQVPPMFSALKHEGKPLYEYARKGIVIERKARDITVYAIDIAEFDAPKAVIDVRCSKGTYIRTLSEDIAKHIGTFAHLTALRRTETAGFTIAQSHTLEALANLDETERDSLLLPCDVLVAHFPQTVLNDYAVHMLRCGQRPRFEEDLPSDTPVRVYTENGRFVGLAEYQKEICRLKALRLMNTAASAA

SEQ ID NO: 65956 - protein, 390 aa, Neisseria meningitidis
MKRDLSKMTCIEDLRRVAKRKMPRMFYDYIDSGSWTETTYRENTSDFKDIRFRQKVLVNMEGRSLETKMIGQDVKMPVAIAPTGFTGMAHADGEILAARAAEKFGIPFTLSTMSICSIEDVAENTSAPFWFQLYVMRDREFMENLIKRAKDAKCSALVLTADLQVLGQRHKDIKNGLSAPPKPTIANLINLATKPEWCMKMLNTERRTFRNIVGHAKNVGDLSSLSSWTSEQFDPRLSWDDVARIKDLWGGKLIIKGIMEPEDAEKAAKSGADALVVSNHGGRQLDDTVSAIKALPDIVSAVGSDIEVWMDSGIRSGQDILKAWALGAKGTMIGRAFLYGLGAYGEEGVTRALEILYKEMDISMAFTGHRDIQDVDASILRGKDWGRETV

SEQ ID NO: 65957 - protein, 148 aa, Neisseria meningitidis
MRLTTKGRFAVTAMLDLAMNAQTGAVKLSAISERQNISLSYLEQLFGKLRRAGLVESLRGPGGGYILAAPAARINIAQIIAAAEDRLDATQCGSKANCHHGAPCLTHDLWENLNKTINDYLGSVTLQSIIEQKNNGDGSRVVQFTHIH

SEQ ID NO: 65958 - protein, 128 aa, Neisseria meningitidis; identical to SEQ ID NO: 65255

SEQ ID NO: 65959 - protein, 916 aa, Neisseria meningitidis
MTDATIRHDHKFALETLPVSLEDEMRKSYLDYAMSVIVGRALPDVRDGLKPVHRRVLYAMHELKNNWNAAYKKSARIVGDVIGKYHPHGDTAVYDTIVRMAQNFAMRYVLIDGQGNFGSVDGLAAAAMRYTEIRMAKISHEMLADIEEETVNFGPNYDGSEHEPLVLPTRFPTLLVNGSSGIAVGMATNIPPHNLSDTVNACLRLLDAPDTEIDELIDIIQAPDFPTGATIYGLSGVREGYKTGRGRVIMRGKTHIEPIGKNGEREAIVIDEIPYQVNKAKLVEKIGDLVREKTLEGISELRDESDKSGMRVVIELKRNENAEVVLNQLYKLTPLQDSFGINMVVLVDGQPRLLNLKQILSEFLRHRREVVTRRTLFRLKKARHEGHIAEGKAVALSNIDEIIKLIKESPNAAEAKDKLLAHPWRSSLVEEMLTRSGLDLEMMRPEGLAANIGLKEQGYYLSEIQADAILRMSLRNLTGLDQEEIVESYKNLMGKIIDFVDILSKPERITQIIRDELEEIKTNYGDERRSEINPFGGDIADEDLIPQREMVVTLTHGGYIKTQPTTDYQAQRRGGRGKQAAATKDEDFIETLFVANTHDYLMCFTNLGKCHWIKVYKLPEGGRNSRGRPINNVIQLEEGEKVSAILAVREFPEDQYVFFATAQGLVKKVQLSAFKNVRAQGIKAIALKEGDYLVGAAQTGGADDIMLFSNLGKAIRFNEYWEKSGNDEAEDADIETEISDGIEDETADSENALPSGKHGVRPSGRGSGGLRGMRLPADGKIVSLITFAPETEESGLQVLTATANGYGKRTPIADYSRKNKGGQGNIAINTGERNGDLVAATLVGETDDLMLITSGGVLIRTKVEQIRETGRAAAGVKLINLDEGETLVSLERVAEDESELSDASVISNVTEPEVEN

SEQ ID NO: 65960 - protein, 548 aa, Neisseria meningitidis
MKHLHDLPAWSKLWNHFDDSKTLHMREMFEQDPQRAERYWLQVGGLTLDYSKNRINDETMSLLFELAHEAGVPERMRQMFHGKKINTTENRAVLHVALRNRTNSPIVVDGEDVMPKVNRVLQRMGEFAHEVRSGSWLGYTNQVITDVVNIGIGGSDLGPLMMCTALKPFGHPRLNMHFVSNVDGSQLRDVLSKVHPETTLFIIASKTFTTQETLTNALTAREWFLNHAGDEEAVAKHFAAVSTNQKAVAEFGIDTANMFEFWDWVGGRYSLWSAIGLPIMLYLGEENFIEMLNGAHLMDQHFINTPLERNLPVILALIGIWYINYYGGGSHVIAPYDQHLHRLPKFIQQLDMESNGKQVTLDGKAVGHETSPIIWGETGINGQHAFFQLLHQGTHITPIDLIASLEKRSNLPGHHEILLANVFAQAEAFMRGKTPDEVRAELKAQGMDEARIEELVPHKTFSGNRPTNLILMDKVNPRNMGSLIAMYEHKTFVQGIIWGINSFDQWGVELGKQLAKTILGELTGETGSQKHDSSTERLINLYLQTNRK

SEQ ID NO: 65961 - protein, 481 aa, Neisseria meningitidis
MSTQTNFDLVLFGATGDLAMRKLLPCLYQAHVAGLLHPEGRILGVSRSELDTEGFLAKVETSSKIHVKENFSDEAWASFVERLAYLKVDVTQPDDFAALGDLVKARKNTENVVIYLSTAPKFFAQACENLAAIGLNADNVRVVLEKPLGTDLASSQQINTDVARYFKEGQIYRIDHYLGKESLQNLLALRFANVMFEPLWNNKYIESVQLTIAEQLGVEERGEFYDITGALRDMVQNHLMQMLCMTAMEAPASLDADAVRDEKVKVIKSLKPLTVESVNENVVRGQYTAAKGMNGYLEEINVLQDSFTETYVAIKAEIENERWKGVPFYLRTGKRMAGKVAEIVLNFKDLNSHIFEGSRTAPNRLVIELQPYESVRLYTQMKTPGAGNKVETVPLATDLGKALESRRAEAYERLLLDVINGKLALFNRRDELEAAWEYVMPILENWTNNTTPPHGYGAHSWGPEAARELLARDGHKWHEEQ

SEQ ID NO: 65962 - protein, 227 aa, Neisseria meningitidis
QPAAQDDTLSELLKLINCQLTEKGLKVEKASAAVVDATIIQTAGSKQRQAIEVDEEGQVSSQTTPSKDKDARWIKKNGLYKLGYKQHTRTDAEGDIEKLHITPANAHECKHLSPLLEGLPEGTTVYADKGYDSAENRQHLEEHQLLDGIMRKACRNRPLSEVQTKRNRYLSKTRYVVEQSFGTLHRKFRYARAAYFGLIKVSAQSHLKAMCLNLLKAANRLSAPAAA

SEQ ID NO: 65963 - protein, 122 aa, Neisseria meningitidis
MSTFFRQTAQAMIAKHIDRFPLLKLDQVIDWQPIEQYLNRQRTRYLRDHRGRPAYPLLSMFKAVLLGQWHSLSDPELEHSLITRIDFNLFCRFDELSIPDYSTLCRYRNRRRKTTPCPNCSN

SEQ ID NO: 65964 - protein, 867 aa, Neisseria meningitidis
MSKTVHYLKDYQTPAYHILKTDLHFDINEPQTIVKSRLTVEPKRVGEPLVLDGSAKLLSVKINGVAADYVLEGETLTIADVPSERFTVEVETEILPAENKSLMGLYASAGNLFTQCEPEGFRKITFYIDRPDVMSKFTTTIVADKKRYPVLLSNGNKIDGGEYSDGRHWVKWEDPFAKPSYLFALVAGDLAVTEDYFTTMSGRNVKIEFYTTEADKPKVGFAVESLKNAMKWDETRFGLEYDLDIFMVVAVGDFNMGAMENKGLNIFNTKFVLADSRTATDTDFEGIESVVGHEYFHNWTGNRVTCRDWFQLSLKEGLTVFRDQEFSGDRASRAVRRIENIRLLRQHQFPEDAGPTAHPVRPARYEEMNNFYTMTVYEKGAEVVRMYHTLLGEEGFQKGMKLYFQRHDGQAVTCDDFRAAMVDANGINLDQFALWYSQAGTPVLDAQGRLKNNVFELTIKQTVPPTPDMADKQPMMIPVKIGLLNCNGEAVAFDYQGKRATEAVLLLTEAEQTFQFESVTEAVVPSLLRGFSAPVHLNYPYSDDDLLLLLAHDSDAFTRWEAAQTLYRRAVAANLAALSDGVELPKHEKLLAAVEKVISDDLLDNAFKALLLGVPSEAELWDGAENIDPLRYHQAREALLDILAVRFLPKWHELNRQAAKQENQSYEYSPEAAGWRTLRNVCRAFVLRADPAHIETVAEKYAEMAQNMTHEWGILSAVNGNESDTRNRLLAQFADKFSDDALVMDKYFALVGSSRRSDTLQQVQTALQHPKFSLENPNKARSLIGSFSRNVPHFHAEDGSGYRFIADKVIEIDRFNPQVAARLVQAFNLCNKLEPHRKNLVKQALQRIRAQEGLSKDVGEIVGKILD

SEQ ID NO: 65965 - protein, 336 aa, Neisseria meningitidis
MHIGGYFIDNPIALAPMAGITDKPFRRLCRDFGAGWAVCEMLTSDPTLRNTRKTLHRSDFADEGGIVAVQIAGSDPQQMADAARYNVSLGAQLIDINMGCPAKKVCNVQAGSALMQNEPLVAAILEAVVKAAGVPVTLKTRLGWHDDHQNLPVIAKIAEDCGIAALAVHGRTRTQMYKGEAAYDLIAETKCRLNIPVWVNGDITSPQKAQAVLKQTAADGIMIGRGAQGRPWFFRDLKHYAEHGVLPPALSLAECTATILNHIRAMHAFYGDTAGVRIARKHIGWYIDEMPDGEQTRREINRLDSAAAQYDMFAGYLERLAEKTDSWACAYRPNAF

SEQ ID NO: 65966 - protein, 457 aa, Neisseria meningitidis
MSNPFSSLGLGTELVSALTAQGYENPTPIQAAAIPKALAGHDLLAAAQTGTGKTAAFMLPSLERLKRYATASTSPAMHPVRMLVLTPTRELADQIDQNVQGYIKNLPLRHTVLFGGMNMDKQTADLRAGCEIVVATVGRLLDHVKQKNIHLNKVEIVVLDEADRMLDMGFIDDIRKIMQMLPRQRQTLLFSATFSAPIRKLAQDFMNAPETVEVAAQDTTNANVEQHIIAVDTIQKRNLLERLIVDLHMNQVIVFCKTKQSVDRVTRELVRRNLSAQAIHGDRSQQSRLETLNAFKDGNLRVLVATDIAARGLDIAELPFVINYEMPAQPEDYVHRIGRTGRAGADGVAISLMDESEQKMFESIKELTGNKLLIERIEGFEPQWWEQGGAKPEKPEMREPRQRNRYESAKAQREKNTRPENAANDAGAACGKIAGRSRRSRREHRTCALLQPRYGVK

SEQ ID NO: 65967 - protein, 503 aa, Neisseria meningitidis
MSEQNHPQTEPQLDENQIIALRREKLHNIRQQRNAYPNDFKRDSFAADLHAQYGEIGKEELDPQGIPVKVAGRMMLKRQMGKASFATIQDVSGQIQLYLNNKGVSQEVLDDFNHWDLGDIVGAEGTLFKTNHGELTVRVSGIRLLSKSLRPLPDKHKGLSDQETKYRQRYVDLIANEESRNTFIKRSQIIQSVRNFMVGEHYLEVETPMMHPIPGGATAKPFVTHHNALDIPLYLRIAPELYLKRLVVGGLERVFEINRSFRNEGMSVRHNPEFTMIEFYEAFSDYERMMQMAEDIIRNASHTVNGTANITYNGKEVDLESPFERLTILEAIKKYNPHYTDEQLNDAEWLKKEIVKHGESLPPSPGIGSLQLALFEGCAEGKLWNPTFIVDYPVEVSPLARASDTKQGLTERFELFVVGRELANGYSELNDPEDQAERFKAQVAQKDAGDDEAMHYDADYIRAMEFGLPPTGGCGIGIDRLVMLLTDSQTIRDVILFPQMRPE

SEQ ID NO: 65968 - protein, 417 aa, Neisseria meningitidis
MSEQHISTWKSKINALGPGIMMASAAVGGSHLIASTQAGALYGWQIALIIILTNLFKYPFFRFSAHYTLDTGKSLIEGYAEKSRVYLWVFLILCILSATINAGAVAIVTAAIVKMAIPSLMFDAGTVAALIMASCLIILVSGRYRALDRVSKIIIVTLSIATLAAAGIAMSRGMQMQSDFIEPTPWTLAGLGFLIALMGWMPAPIEISAINSLWVTEKQRINPSEYRDGIFDFNVGYIASAVLALVFLALGAFVQYGNGEAVQMAGGKYIGQLINMYAVTIGGWSRPLVAFIAFACMYGTTITVVDGYARAIAEPVRLLRGKDKTGNAEFFAWNIWVAGSGLAVIFWFDGVMANLLKFAMIAAFVSAPVFAWLNYRLVKGDEKHKLTSGMNALALAGLIYLTGFTVLFLLNLAGMFK

SEQ ID NO: 65969 - protein, 273 aa, Neisseria meningitidis
MLIHYTLCRYRNWLAKDDTLSELLELINRQLTEKGLKIEKASAAVVDATIIQTAGSKQRQAIEVDNKGQVSGQTTPSKDSDARWIKKNGLYKLGYKQHTRTDAEGYIEKLHITPANAHECKHLSPLLEGIAEGTTVYADKGYDSAENRQHLEEHQLQDGIMRKACRNRPLSETQTKRNQYLSKTRYSGLNLNQDKATKPQTVQIVRQGEATPYWFKFNPLYVVEQSFGTLHRKFRYARAAYFGLIKVSAQSHLKAMCLNLLKAANRLSAPVAA

SEQ ID NO: 65970 - protein, 259 aa, Neisseria meningitidis
MSATIPPKIIRYDSNPTDVYFFGTCVLDLFMPEAGMDAIALIEQQGIRVHFPMAQSCCGQPAYSSGHPTEAFDVAKAQLDLFPENWPIVVPSGSCGGMMKHHWPTLFKGSEYEERAVDCAGRIIEFTHFLLAIGFKPEDKGEPLKVAVHTSCAARREMNVHLSGWQLIDGMENVERIVHDHESECCGFGGTFSVKQADISGAMVTDKVAALKETGATEIISADCGCMMNIGGKIAKDEPDMPRPKHIASFLLERTGGKA

SEQ ID NO: 65971 - protein, 238 aa, Neisseria meningitidis
MKTKLPLFIIWLSVSAACSSPVSRNIQDMRLEPQAEAGSSDAIPYPVPTLQDRLDYLEGTLVRLSNEVETLNGKVKALEHAKTHPSSRAYVQKLDDRKLKEHYLNTEGGSASAHTVETAQNLYNQALKHYKSGRFSAAASLLKGADGGDGGSIAQRSMYLLLQSRARMGNCESVIEIGGRYANRFKDSPTAPEAMFKIGECQYRLQQKDIARATWRSLIQTYPGSPAAKRAAAAVRKR

SEQ ID NO: 65972 - protein, 658 aa, Neisseria meningitidis
MPRIAALPDHLVNQIAAGEVVERPANALKEIVENSIDAGATAIDVELDGGGIRLIRVSDNGSGIHPDDIELALHRHATSKIKTLNDLEHVASMGFRGEGLASIASVSRLTLTSRQEDSSHATQVKAEDGKLSSPTAAAHPVGTTIEAAELFFNTPARRKFLKSENTEYAHCATMIERLALAHPHIAFSLKRDGKQVFKLPAQSLHERIAAIVGDDFQTASLEIDSGSGALRLYGAIAKPTFAKGKTDKQYCFVNHRFVRDKVMLHAVKQAYRDVLHNALTPAFVLFLDLPPEAVDVNVHPTKTEIRFRDSRQVHQLVFHTLNKALADTRADLTESVSNAGEVLHDITGVTPAPMPSENDSENLFNRASDYPTGNKPDTRNAFGSSGKTAPMPYQSAYAPQQRSLSLRESRAAMNTYAELYKKTDDIDLELSQFEQARFGNMPSETPAPKTDTPLSDGIPSQSELPPLGFAIAQLLGIYILAQAEDSLLLIDMHAAAERVNYEKMKRQRQENGRLQSQRLLIPITFAASHEECAALADYAETLAGFGLELSDMGGNTLAVRAVPTMLGKADVVSLARDVLGELAQVGSSQTIEEHENHILATMSCHGSVRAGRQLTLPEMNALLRDMENTPRSNQCNHGRPTWVKLTLKELDALFLRGQ

SEQ ID NO: 65973 - protein, 709 aa, Neisseria meningitidis
MAYQVLARKWRPKTFADLVGQEHVVKALQNALDEGRLHHAYLLTGTRGVGKTTIARILAKSLNCENAQHGEPCGVCQSCTQIDAGRYVDLLEIDAASNTGIDNIREVLENAQYAPTAGKYKVYIIDEVHMLSKSAFNAMLKTLEEPPEHVKFILATTDPHKVPVTVLSRCLQFVLRNMTAQQVARHLAYVLDSEKIAYDPPALQLLGRAAAGSMRDALSLLDQAIALGSGKVAENDVRQMIGAVDKQYLYELLTGIINQNGAALLAKAQEMAACAVGFDNALGELAILLQQLALIQAVPNALSHDDPDSDILHRLAQTISGEQIQLYYQIAVHGKRDLSLAPDEYAGFMMTLLRMLAFAPLAAASCDANAVIENTELQSPSAQTAEKETAVKKPQPRPEAETAQTSVQTASAAAMPSESKTAGPVSNQENNDVPPWEDAPDEAQAAAGTAQTSAKSIQTASEAETPPENQVSKNKAADNVTDAPLSEVPSENPIQATPNDEAVETEAFAHEAPAKPFYGYGFPDNDCPPEDGAEIPPPDWEHAAPADTVGGGADEEAEAGGIGGNNTPSAPPPEFSTENWAAIVRHFARKLGAAQMPAQHSAWTEYHPDTGLMVLAMTAEARATADKKRLDKIRDTLAQAYGLQLTLQTQDWRDESGRETPAMQDKRVQAEDRQKAQALLEADPAAQKILQAFGAQWQPESLELAANRP

SEQ ID NO: 65974 - protein, 111 aa, Neisseria meningitidis
MFGKAGLGGLMKQAQQMQENMKKAQAKLAETEIEGEAGNGLVKITMTCAHEVRKIDISPDLIQEAADDKEMLEDLILAALKSARDKAEETANKTMGAFTQGLPPGVGDFFR

SEQ ID NO: 65975 - protein, 348 aa, Neisseria meningitidis
MSDDKSKALAAALAQIEKSFGKGAIMKMDGSQQEENLEVISTGSLGLDLALGVGGLPRGRIVEIFGPESSGKTTLCLEAVAQCQKNGGVCAFVDAEHAFDPVYARKLGVKVEELYLSQPDTGEQALEICDTLVRSGGIDMVVVDSVAALVPKAEIEGDMGDSHVGLQARLMSQALRKLTGHIKKTNTLVVFINQIRMKIGVMFGSPETTTGGNALKFYSSVRLDIRRTGSIKKGEEVLGNETRVKVIKNKVAPPFRQAEFDILYGEGISWEGELIDIGVKNDIINKSGAWYSYNGAKIGQGKDNVRVWLKENPEVADEIDAKIRALNGVEMHITEGTQDETDGERPEE

SEQ ID NO: 65976 - protein, 265 aa, Neisseria meningitidis
MAAVFSVCACFMCSCLVVKNTVIGSGRTKIAVPLVARDAAVLSAVLDQIKNLPFDIVEFRADFLECAGSIGEVLRHTQTVRDALPDKPLLFTFRRHGEGGSFPCSDDYYFELLDALIESRLPDIIDIELFSGETAVRCAVANAQKNGIAALLCNHEFHRTPPQEEIVCRLKQMEDCGADICKIAVMPQSAEDVLTLLSATLKAKELAAKPIVTMSMGQTGAVSRLAGQVFGSSITFGSGTQNSAPGQIGVSALRATLDCLENGAD

SEQ ID NO: 65977 - protein, 671 aa, Neisseria meningitidis
MMKLNPQQLEAVRYLGGPLLVLAGAGSGKTGVITQKIKHLIVNVGYLPHTVAAITFTNKAAAEMQERVAKMLPKPQTRGLTICTFHSLGMKILREEANHIGYKKNFSILDSTDSAKIIGELLGGTGKEAVFKAQHQISLWKNDLKTPEDVVQTASNIWEQQTARVYASYQETLQSYQAVDFDDLIRLPAVLLQQNSEVRNKWQRRLRYLLVDECQDTNTCQFTLMKLLTGAEGMFTAVGDDDQSIYAWRGANMENLRKMQENYPQMKVIKLEQNYRSTARILKIANKVIENNPKLFTKKLWSKLGEGEPVKVVACQNEQHEADWVVSQIVKQKLIGGDKTQYADFAVLYRGKHQARIFEEALRGARIPYRLSGGQSFFDKAEIKDVLSYVRLLANPNDDPAFLRAVTTPKRGIGDVTLGKLNTYAHEHECSLYEAAQNEEALATLNNTNRQHLQAFMDMFGSYRAKAETGEAGEFINSLLEEIDYENHLLASEEGKAGEIKWRNVGDLVSWFARKGGEDGKNIIELAQTVALMTLLEGKDEEETDAVSLSTLHAAKGLEYPYVFLVGCEEGVLPHNDSIEEGNVEEERRLMYVGITRAKRQLTLTHCVKRKKQGTWQFPEPSRFIDEMPQEDLKILGRKGGEPIVSKEEGRRNLADIIGRLDNLKKSGAAD

SEQ ID NO: 65978 - protein, 391 aa, Neisseria meningitidis
MQNIFDPLVIRGKSLTPIVQGGMGVGVSASGLSSAVARENGIGTIASVDLRHLHEDLLAESQINPSEEKYTSLNCTALDREIQKAKSASEGKGLIAVNVMKAVKDHAAYVRQACESGADAVVMGAGLPLDLPEMTEGYHKDVALLPILSESRGINIVLKRWMKKGILPDAIVVEHPAHAAGHLGASTVEGVNDAKFDFKRVIEETFEVFKSLGLESEKIPLILAGGMANFEKVKTALKNWGASAVQIGTAFAVTEEGDAHLNFKKTLAGAETEKVVEFMSVAGLPARGVRSKFLDSYIKRESKLQANAKADPRRCTQGLNCLTSCGLRDGLSKAGQFCIDIQLAAAFRGEVDKGLFFRGKDPLPFGNAIRTVRETIQYLLTGSEPVATVGR

SEQ ID NO: 65979 - protein, 659 aa, Neisseria meningitidis
MSQLANAIRFLSADAVQKANSGHPGAPMGMAEMAETLWTKFLNHNPANPKFYNRDRFVLSNGHASMLLYSLLHLTGYNLSIEDLKNFRQLHSKTPGHPEYGYTDGVETTTGPLGQGIANAVGMALAEKILAAEFNKDGLNIVDHYTYVFMGDGCLMEGVSHEACSLAGTLGLGKLIVLYDDNNISIDGKVDGWFTENIPQRFESYGWHVVPNVNGHDTAAIQAAIEAARAETGKPSIICCKTLIGKGSANKEGSHKTHGAPLGADEIEATRKHLGWTYPAFEIPQEIYDAWNAKEQGAKLEAEWNELFAQYQTKYPAEAAEFVRRMDKKLPDNFDEYVQAALKEVCAKAETIATRKASQNSIEILAKELPELVGGSADLTPSNLTDWSNSVSVTRDKGGNYIHYGVREFGMGAIMNGLVLHGGVKPFGATFLMFSEYERNALRMAALMKINPVFVFTHDSIGLGEDGPTHQPIEQTATLRLIPNMDVWRPCDTAESLVAWAEAVKAADHPSCLIFSRQNLKFQARSEQQLNDIKRGGYVISEAQGNAQAVIIATGSEVELALEAQKALAAQNIAVHVVSMPSTNVFDRQDTAYQAAVLPESLPRIAVEAGHADGWYKYVGLNGAVVGINRFGESAPADLLFKAFGFTVDNVVDTVKSVL

SEQ ID NO: 65980 - protein, 174 aa, Neisseria meningitidis
MSLNKVILIGRLGRDPEVRYMPNGEAVCNFSVATSETWNDRNGQRVERTEWHNITMYRKLAEIAGQYLKKGGLVYLEGRIQSRKYQGKDGIERTAYDIVANEMKMLGGRNENSGGAPYEEGYGQSQEAYQRPAQQSRQPASDAPSHPQEAPAAPRRQPVPAAAPVEDIDDDIPF

SEQ ID NO: 65981 - protein, 336 aa, Neisseria meningitidis
MSKKRVLTGVTTTGIPHLGNYVGAIRPAVRAAQNPDTESFLFLADYHGIIKCHEPEMIHQSTQAVAATWLACGLDPERTTFYRQSDIPEVMELNWILTCITAKGLMNRAHAYKAAVQANAENGQEDPDFGVEMGLYSYPILMTADILMFNAHEVPVGRDQIQHVEMARDIAGRFNHRFRELFTLPEVKIDENVELLVGLDGRKMSKSYGNTIPLWENDKKTQKSVNKIITNMKEPGEPKKPDESPLFEIYKAFSTPSETAEFTKMLADGLAWGEAKKLLAAKINAELAEPRERYNELTADPSQIEEILQAGAQKARKEARELLGKVRDAVGIRPLK

SEQ ID NO: 65982 - protein, 859 aa, Neisseria meningitidis
MRYDKLTAKFQQALAEAQSLALAADSSYLEAGFVLKALLDDQNSGAAALLAHAGVNVPQVKQRLQQHLNSLPKVSGQGGDILPSRELQAVLNLMDKAATKRGDAYIASELFLLALVQQNDAAGKILKEAGATEQNINAAIDAVRGGQNVNDANAEDQRDALKKYTLDLTQRARDGKLDPVIGRDDEIRRAIQVLQRRTKNNPVLIGEPGVGKTAIVEGLAQRIVNGEVPESLRNKRLLVLDLAALIAGAKYRGEFEERLKGVLNDLAKDDGNTLIFIDEIHTLVGAGKTDGAMDAGNMLKPALARGELHCIGATTLDEYRQYIEKDAALERRFQKVLVGEPSVEDTIAILRGLQERYEIHHGIDITDPAIVAAAELSDRYITDRFLPDKAIDLIDEAASRVKMEKETKPEAMDKIDRRLIQLRMEKAHVEKEKDDASKKRLELIDEEINGLQKEYADLDEIWKAEKAISDGAANIKKQIDEVKIKIEQAKRQGDLALASKLMYEDLEHLEKQRAAAERADTDSTKPANKLLRNNVGAEEIAEVVSRMTGIPVSKMMEGERDKLLKMEEVLHRRVVGQDEAVRAVSDAIRRSRSGLADPNKPYGSFLFLGPTGVGKTELCKALAGFLFDSEDHLIRIDMSEYMEKHAVARLIGAPPGYVGYEEGGYLTEQVRRKPYSVILLDEVEKAHPDVFNILLQVLDDGRLTDGQGRTVDFKNTVIVMTSNIGSQHIQQMGIQDYEAVKEVVMEDVKEHFRPEMINRIDEVVVFHGLDQANIRSIAKIQLKGLEKRLEKQNLRLAVSDAALDIIAKAGFDPIYGARPLKRAIQSEIENPLAKALLAGNYAPESEIRVEADGDRLKFA

SEQ ID NO: 65983 - protein, 153 aa, Neisseria meningitidis
MKPQKSLRARAMDILSRQELSRIGLKRKLAPHAESEEELENVLNEFAERNWQSDLRYAEAYIRSKSRKHGSLRLKQALAQQGIDEETSRNLLPDRSSEKLAAIAVLRKKFKHPAADLKEKQKQARFLAYRGFDADTVQTALKHAWDENWEDGC

SEQ ID NO: 65984 - protein, 477 aa, Neisseria meningitidis
MNEYSQLIKHPDISLSPISDGIGVGNPATGEILAYVRNTGSDKLKNLIQKAAAAQKLWAAKTALERADILWRWYFLVKENKEALARLMTMEQGKSLTESRGEIDYAASFVRWFAEEARRIDGDVLTSVKASQKLIVLKQPVGVTAAITPWNFPSAMIARKAAPALAVGCAMIVKPASLTPLSAYALVVLAYEAGVPQDLLPVVSGRASEIGREFATNPIIRKISFTGSTEVGAKIFADSAADIKKLSLELGGNAPFIVFDDADLDKAVEGALASKFRNSGQTCVCTNRVYAQSGIYDAFCRKLSEKAAALKLGNGLEDGVNQGPLIEEKAVEKVEQHIADALSKGAVCLTGGKRSALGGTFFEPTVLSGVTAQMAVAREETFGPLCPVFRFETEAEVIEAANNTEYGLAAYLFTADTARQWRVGEALEYGMVGINTGLISNEAAPFGGVKRSGLGREGSKYGADEYLELKYLCMDVG

SEQ ID NO: 65985 - protein, 64 aa, Neisseria meningitidis
MKHKLASWWKTIKLTANLMAGVPDYENYVAQQRKHNPNAPVMTKLQFQDYCRKRRCGANGGRCC

SEQ ID NO: 65986 - protein, 405 aa, Neisseria meningitidis
MALIVHKYGGTSVGSPERIKNVAKRVAKARAEGHDIVVVVSAMSGETNRLVALAHEMQEHPDPRELDVVLSTGEQVTIGLLAMALKDIGVDAKSYTGWQVALKTDTAHTKARIESIDDEKMRADLTAGKVVIVAGFQGISSEGDISTLGRGGSDTSAVALAAALKADECQIYTDVDGVYTTDPRVVPEARRMDTVTFEEMIELASLGSKVLQIRSVEFAGKYKVRLRVLSSLQDGGNGTLITFEEDDNMERAAVTGIAFDKNQARINVRGVPDKPGVAYQILGAVADANIEVDMIIQNVGSEGTTDFSFTVPRGDYKQTLEILSERQDSIGAASIDGDDTVCKVSAVGLGMRSHVGVAAKIFRTLAEEGINIQMISTSEIKVSVLIDEKYMELATRVLHKAFNLG

SEQ ID NO: 65987 - protein, 419 aa, Neisseria meningitidis
MCSNTPQAATKNRETRHMTGIIHSLLDTDLYKFTMLQVVLHQFPQTHSLYEFRCRNASTVYPLADIKEDLEVELDALCQLRFTHDELDYLRSLRFIKSDFVDYLELFQLQRRFVEVGTDDKGRLNIRIEGPMIQAMFFEIFILAIVNELYFRRLETPAVIEEGERRLQAKAARLKEIAAAQNPDEPPFLISDFGTRRRYKLAWQEHVIRTLLEAAPSIVRGTSNVFLAKKLGITPIGTMAHEFLQAFQALDVRLRNFQKAALESWVHEYRGDLGVALTDVVGMDAFLRDFDLYFAKLFDGLRHDSGDPYIWGDKAYAHYQKLKIDSRTKMLTFSDGLDIERSWALHQYFKDRFKTGFGIGTNLTNDMGHTPLNIVLKLVECNGQSVAKLSDSPGKTMTNNSTFLAYLRQVFDVPEPETP

SEQ ID NO: 65988 - protein, 572 aa, Neisseria meningitidis
MNLHQTVEREAAAAFAAAGIADSPVVLQPTKNAEHGDFQINGVMGAAKKAKQNPRELAQKVAEALADNAVIESAEVAGPGFINLRLRPEFLAQNIQTALNDARFGIAKTDKPQTVVIDYSSPNLAKEMHVGHLRSSIIGDSISRVLAFMGNTVVRQNHVGDWGTQFGMLVAYLVEQQKDNAAFELADLEQFYRAAKVRFDEDPAFADTAREYVVKLQGGDETVLALWKQFVDISLSHAQAVYDTLGLKLRPEDVAGESKYNDDLQPVVDDLVQKGLAVEDDGAKVVFLDEFKNKEGEPAAFIVQKQGGGFLYASTDLACLRYRVGTLHADRLLYVVDHRQALHFEQLFTTSRKAGYLPENVGAAFVGFGTMMGKDGKPFKTRSGDTVKLVDLLTEAVERAAALVKEKNPELGADEAAKIGKTVGIGAVKYADLSKNRTSNYVFDWDAMLSFEGNTAPYLQYAYTRVQSVFRKAGEWDATAPTVLSEPLEKQLAAELLKFEDVLQSVADTAYPHYLAAYLYQIATLFSRFYEACPILKAESASRNSRLQLAKLTGDTLKQGLDLLGIDVLDVM

SEQ ID NO: 65989 - protein, 248 aa, Neisseria meningitidis
MDFRFDIIYEYRWMFLYGALTTLGLTVVATAGGSVLGLLLALARLIHLEKAGAPMRVLAWALRKVSLLYVTLFRGTPLFVQIVIWAYVWFPFFVHPSDGILVSGEAAIALRRGYGPLIAGSLALIANSGAYICEIFRAGIQSIDKGQMEAARSLGLTYPQAMRYVILPQALRRMLPPLASEFITLLKDSSLLSVIAVAELAYVQNTITGRYSVYEEPLYTVALIYLLMTTFLGWIFLRLEKRYNPQHR

SEQ ID NO: 65990 - protein, 160 aa, Neisseria meningitidis
MTNIRIGQGYDVHQLTEGRKLILGGVEIPFEKGLLGHSDADALLHAVTDALLGAAGLGDIGSHFPDTAAEFKDADSRVLLRAAYQSVQAQGWQAVNVDTTVIAQKPKLAPHIPQMRANIAADLGIDISCVNIKGKTNEKLGYLGRMEGIESQAAVLLVRI

SEQ ID NO: 65991 - protein, 229 aa, Neisseria meningitidis
MKRKNIALIPAAGIGARFGADKPKQYVEIGSKTVLEHTIGIFERHEAVDLTVVVVSPEDTFADKVQTAFPQVRVWKNGGQTRAETVRNGVAKLLETGLAAETDNILVHDAARCCLPSEALTRLIEQAGNAAEGGILAIPVADTLKCADGGNISATVERTSLWQAQTPQLFRAGLLHRALAAENLDGITDEASAVEKLGIRPLLVQGDARNLKLTQPQDAYIVRLLLDAV

SEQ ID NO: 65992 - protein, 642 aa, Neisseria meningitidis
MAVDYVYDKTKLTDDEITRLKKLRDRNSEYWKEETYHIKSNNRVYPNIPALFPKHPFDPFENINNSKRISFYDKEYTEDYLVGFAQGLGVAKRNGETEKPIRQYFKECLNTGKYSDDTCKSQQSIPTVRSDIFALNTKIKNSHINSEILSVGNYIEWLRPTLNQLSSSQEHLYSDVDPFHYIEVTDNSHVIGQTISLDEFRLENSLWEPRWDSDVGELKTTNADIRFNTKSESLLVKEDYAGGARFRFAYGLKDKVPETPVLTFEKNITGTSDIIFENPIDDLKSLDGHQIIKVNGTADKHAFRLSGKHQKGIYTLSLQQRPEGFFTKVQERDDISIYAQQAQAANTLFALRLNDKNSDIFDRTLPRKGLWLRVIDGHSNQWVQGKTAPVESNRKGVQLGGEVFTWQNESNQLSVGLMSGQAEQRSTFRNPDTDNLTTGNVKGFGAGIYATWHQLQDKQTGAYADSWVQYQRFRHRINTEDATERFTSKGITASIEAGYNALLAEHFTKKGNRVRFYLQPQAQLTYLGVNGKFSDSENAHVNLLGSRQLQSRVGVQAKAQFSLYKNIAIEPFAAVNALYHNKPFGVEMDGERRMINNKTAIESQLGVAVKIKSHLTLQATFNRQTGKHHQAKQGALNLQWTF

SEQ ID NO: 65993 - protein, 150 aa, Neisseria meningitidis
MFMAIANNKKAFHDFFIEDRIEAGLVLEGWEVKAIRAARVQLKESYIYWKKDAFYLVGCHITALPTASTHIKPDAVRPRKLLLNQSEINKLIGKTERAGYTIVPLDLHFSRGKIKMEIGLAKGKKQHDKRQSMKEADWKREKQRLIKHTR

SEQ ID NO: 65994 - protein, 289 aa, Neisseria meningitidis
MPQPDPQGFRRSLFLHRRAGMAKIGDFAVKSMIEIRSKRMITLPSLNNLPSKWDEIRYWLETRVCECGVMSHPNLTECEAGQFDRDFWDNIGCAPEEYVRIRRAIRLLEARYPDSLNELVCAAIATPLGEMLAVFGNKGLCLLEFVGQKHLEQEIAAVQKALRGRFVFREDERTQLLRQELDLYFKGRLKTFATPLEQIGTEFQKQAWDALLAIPYGETRSYKEQAQRLGNPNAVRAVAAANGQNKVSILIPCHRVIGSDGKLTGYAGGLNRKQFLLALERGEVQTALF

SEQ ID NO: 65995 - protein, 916 aa, Neisseria meningitidis
MLTNIAKKIFGSRNDRLLKQYRKSVARINALEEQMQALSDADLQAKTAEFKQRLADGQTLDGILPEAFAVCREASRRTLGMRHFDVQLIGGMVLHDGKIAEMRTGEGKTLVATLAVYLNALAGKGVHVVTVNDYLASRDAGIMEPLYNFLGLTVGVIISDMQPFDRQNAYAADITYGTNNEFGFDYLRDNMVTDQYDKVQRELNFAVVDEVDSILIDEARTPLIISGQADDNIQLYQIMNTVPPHLVRQETEEGEGDYWVDEKAHQVILSEAGHEHAEQILTQMGLLAENDSLYSAANIALMHHLMAALRAHTLFHKDQHYVIQDGEIVIVDEFTGRLMSGRRWSEGLHQAVEAKEGVEIKRENQTLASITFQNYFRLYTKLSGMTGTADTEAFEFQSIYNLETVIIPTNRPVQRKDFNDQIFRSAEEKFEAVVKDIEECHKRGQPVLVGTTSIENSELVSHLLQKAGLPHNVLNAKEHEREALIVAQAGKVGAITVATNMAGRGTDIVLGGNLKHQTDAIRADEALSDEEKQAQISALEDGWQAEHDKVMEAGGLHIIGTERHESRRIDNQLRGRSGRQGDPGSSRFYLSFEDPLLRLFALDRAAAILNRLAPERGVAIEHNLLTRQIEGAQRKVEGRNFDMRKQVLEYDDVANEQRKVIYSQRNEILTSKDISDLMKEIRSDVVSDLVDTYMPPDSMEEQWDIPTLENRLAAEFRLHEDIQSWLKADNAIDGQDIKERLIERIENEYAAKTELVGKQAMADFERNVMLQVIDNQWREHLAAMDYLRQGIHLRSYAQKNPKQEYKREAFTMFQDLWNGIKFHIASLLTSVQIEQNPVAVVEEQPIGNIQSIHSESPDMEELLGQSQTDLVTEAFNPDGTDFSPEALEARGQIVHRNDPCPCGSGLKYKQCHGKLA

SEQ ID NO: 65996 - protein, 590 aa, Neisseria meningitidis
MIPSDFIDELLAKTDIVDIIDEQVPLKKGGANYMACCPFHKEKTPSFSVSPTKQFYHCFSCGAHGSAIGFVMEHQGLSFPEAVQFLADRVGMVVPKVHGQNDNPEVRAERKKKQQTLEETTAAAADFYAQQLKFNPAAKAYLDKRGLSAEVIAHYGLGYAPDGWQPLTQVFQPYPNTALVDTGMVIDNEGRHYDRFRHRIMFPIRNPRGQVIGFGGRVLDDSKPKYLNSPDTPLFDKGKNLYGLYEGRAAVKEAGRILVVEGYMDVVALAQFGVGYGVAALGTATTAEHVKILMRQADSIYFCFDGDSAGRKAAWRALENALPQLKDDKSLHFLFLPEEHDPDSYIRAYGKAQFEDALLNQSKPLSEYFWEHLSDGIHLNTQEGKAELVKTSSPLLAQITAPALAYLLKQRLSELVGIDPDNLAQLLGQEAPKRHVKQKNYKLPPISVKQPVMPTLVQRQIRSLLINPDWAAYIDLPDYLALDGDFACLANLAETIKNHPSVPATAQVLEHMRGSPYEETINRIFRSALQSEEMEGGGEEDCENFQIGIKKLLNELKYSQIEALKQKSLQSGLNESEKKLLLSLLTAKQN

SEQ ID NO: 65997 - protein, 642 aa, Neisseria meningitidis
MSKNQNHEEYQDDARPLTIEEQRARLRQLIIMGKERGYITYSEINDALPDDMSDADQIDNIVSMISGLGIQVTEHAPDAEDILLSDNAAVTDDDAVEEAEAALSSADSEFGRTTDPVRMYMREMGQVDLLTREDEIIIAKKIENALKNMVQAISACPGSIAEILELIEKIRKDEIRVDEVVEAIIDPNEVLLNELGLGHLETTAPEKPSNDNSDENEDDEESEEDADEISAANLAELKQKVIGHFAQIEKDYKKMIGRLEKHHSRHKDYLAYRDAIANKLLEVRFATRQIDSLSSSLRGKVENIRKLEREIRDICLDRVHMERDYFIQNFLPEITNLEWIEEEIAKGRVWSDALDRFRHAILEKQTELADMEKETRISIEELKEINKNMVSSEKETAAAKQEMIQANLRLVISIAKKYTNRGLQFLDLIQEGNIGLMKAVDKFEYRRGYKFSTYATWWIRQAITRSIADQARTIRIPVHMIETINKMNRISRQHLQETGEEPDSAKLAELMQMPEDKIRKIMKIAKEPISMETPIGDDDDSHLGDFIEDANNVAPADAAMYTSLHEVTKEILESLTPREAKVLRMRFGIDMNTDHTLEEVGRQFDVTRERIRQIEAKALRKLRHPTRSDRLRSFLDSEDSKL

SEQ ID NO: 65998 - protein, 283 aa, Neisseria meningitidis
MIAKHIDRFPLLKLDQVIDWQPIEQYLNRQRIRYVRDHRGRPTYSLLSMFKSVLLGQWHSLSDPELEHSLITRIDFNLFCRFDELSIPDYSTLCRYRNWLAQDDTLSELLELINCQLTEKGLKVEKASAAVIDATIIQTAGSKQRQAIEVDEEGQISGQTTPSKDSDARWTKKNGLYRLGYKQHTRTDAEGYIEKLHITPANAHECKHLSPLLEGLPEGTTVYADKGYDSAENRTSGRTSVVRRHYARAAYFGLIKVSAQSHLKAMCLNLLKAANRLSAPAAA

SEQ ID NO: 65999 - protein, 741 aa, Neisseria meningitidis
MCKPNYGGIVLLPLLLASCIGGNFGVQPVVESTPTAYPVTFKSKDVPTSPPAGPSVETTPVNRPAVGAAMRLLRRNIAFHREDGTAIPDSKQAEEKLSFKEGDVLFLYGSKKDKLQQLKDKIHQRNPNVEIRTSENENKKYGYEFVDAGYVYTTKGKDEIEWTSNHKQFTYRFGYDGFVYYSGEHPSQSLPSAGTVKYSGNWQYMTDAIRHRTGKAGDPSEDLGYIVYYGQNVGATSYAATADDREGKHPAEYTVDFGKKTLTGKLIKNQYVQKKTDEKKPLTIYDITATLDGNRFTGSAKVNTEVKTKHADKEHLFFHTDADQRLEGGFFGDNGEELAGRFISNDNSVFGVFAGKQKTDASNASDTNPAMPSEKHTKILDSLKISVDEATDSNARKFAISPMPDFGHPDKLLVEGREISLLKDTQTIDLADGRKMTVSACCDFLTYVKLGRIKTDRPASKPKAEDENSEDEIGESEENEEDLVAEEENTEDEVVEDEDREEDEVSEDGNSEDEEEIAEEDDDEAEEEEVEEPEEESPEEGGGGGSDGIPPASEAPKGRDIDLFLKGIRTAEADIPQTGKARYTGTWEARISKPIQWDNKADKKAAKAEFDVDFGEKSISGTLTEKNGVEAAFYIEKGVIDGNGFHATARTRDNGINLSGNGSTNPKTFQASDLRVEGGFYGPQAEELGGTIFNKDGKSLDITEDIDNEIEADAGEQLEPEVKPQFGVVFGAKKDMQEVEK

SEQ ID NO: 66000 - protein, 105 aa, Neisseria meningitidis
MSTFFQQTAQAMIAKHIDRFPLLKLDQVIDWQPIEQYLNRQKTRYLRDHRGRPAYPLLSMFKAVLLGQWHSLSDPELEHSLITRIDFNLFCRFDELSIPDYSIVD

SEQ ID NO: 66001 - protein, 544 aa, Neisseria meningitidis
MTKFIFVTGGVVSSLGKGIAAASIAAILESRGLNVTMLKLDPYINVDPGTMSPFQHGEVFVTDDGAETDLDLGHYERFIDSTMTRRNSFSTGQVYENVIAKERRGDYLGGTVQVIPHITDEIKRRIHEGAAGYDVAIVEIGGTVGDIESLPFLEAIRQMRSQLGRNNTLFAHLSYVPYIAAAGEIKTKPTQHTVKEMLSIGLQPDILICRMDRTMPADERRKIALFCNVEERAIVGSYDVDSIYECPEMLHDQGIDNIITEQLQLNVQQADLTAWKKIVHAIQNPKHTVKIAMVGKYVDLTESYKSLIEALKHAGVHTETDVQITFVDSESIEKNNGDVSMLKDMDAILVPGGFGSRGVEGKIAAVRYARENNVPYLGICLGMQIALIEYARDVAGLKGANSTEFDLKCAAPVVALIDEWQTADGSVETRDESADLGGTMRLGAQEVELKAGSLAAKIYGSEHIRERHRHRYEVNNNYVPTLEQAGLVIGGVSAGRERLVETIELPNHPWFFACQFHPEFTSNPRKGHPLFTAFVKAALNNKKA

SEQ ID NO: 66002 - protein, 383 aa, Neisseria meningitidis
MLKSAFKNRRFQAILRMNTTANPSNIIVGLSGGVDSSVTAALLKQQGYQVRGVFMQNWEDDDNDEYCSIKQDSFDAIAVADIVGIDIDIVNFAAQYKDKVFAYFLQEYSAGRTPNPDVLCNAEIKFKCFLDYAVGQGADTIATGHYARKEVRNGVHYLLKGLDQNKDQSYFLYRLKPFQLERAIFPLGGLEKPEVRRLAAEFNLPTAAKKDSTGICFIGERPFREFLQKYLPTDNGKMVTPEGKTVGEHVGLMFYTLGQRKGLGIGGGGEPWFVAAKDLTKNELMVVQGHDHPLLYTRSLVMNDLSFTLPERPKEGHYTCKTRYRMADAPCELRYLDDETVELVFDEPQWAVTPGQSAVLYDGDICLGGGIIQSTDKPVIITR

SEQ ID NO: 66003 - protein, 127 aa, Neisseria meningitidis
MEPSSYAAEKKGKGGIRRVINAFGYSIDGIAAAYRYEAAFRQVLWLNALLVCAAFFWVSEKSLRLPLIIASFVSVIVELFNTAVEAAVDHTSTEKHELAKRAKDAGSAAQLFAMLMLAAVWLSALFG

SEQ ID NO: 66004 - protein, 573 aa, Neisseria meningitidis
MPSEAICSKKTMLNKDQFADNHFIRTIIEDDLKSGKHEAVQTRFPPEPNGYLHIGHAKSICLNFGLAYIYDGLCNLRFDDTNPEKENDEYVNAIKEDVEWLGFHWAGEPRFASNYFDQLYDYAVGLIKDGKAYVDDLTPEEMREYRGTLTEAGKNSPYRDRSVEENLDLFTRMKNGEFPDGSKTLRLKIDMASGNINMRDPVIYRIRRAHHHNTGDKWCIYPMYDYTHCISDAIEGITHSLCTLEFEAHRPLYDWVLDNIHAPHATRPRQYEFSRLELLYTITSKRKLNQLVVEKHVSGWDDPRMPTISGMRRRGYTPEGLRLFAKRAGISKSENIVDMSVLEGAIREELENSAPRLMAVLNPLKVTLTNFEAGRTQSRRAAFHPNHEEMGEREVPISQTIYIEADDFAENPPKGFKRLIPGGEVRLRHGYVIKCDEVVKDEAGNVVELKCSIDHDTLGKNPEGRKVKGVIHWVSAEHAAEIKVRLYDRLFTIERPDAVRGEDGEYLPFTDFLNPESVKEITAYAEPAAKDLPAESRWQFERIGYFVTDRKDHGKDTPVFNRTVTLKDSWQPK

SEQ ID NO: 66005 - protein, 300 aa, Neisseria meningitidis
MDSLMTLLSVLIPMFAGFFIRVPKPYLPALDKVLSVLVYAVLLLIGVSLSRVEDLGSRLDDMALTVLWLFVCTVGANLLALAVLGKLFPWRIKGKGKGVSVGVSGSVGQLGCVLLGFASGKLMRDIWMPSENAGMYCLMLLVLLIGVQLKSSGVSLRQVLVNRRGIRLSVWFMLSSLSGGLLFAASADGVSWVKGLAMASGFGWYSLSGLVMTEAYGAVWGSIALLNDLARELFALAFIPLLMKRFPDAAVGVGGATSMDFTLPVIRGAGGLEAVPVAVSFGVVVNIAAPFLMVVFSALG

SEQ ID NO: 66006 - protein, 146 aa, Neisseria meningitidis
MPKATFYTHVAQVPIFTCRLIARAIRDGGRILVWSDSFGQLQELDKMLWQYEAESFIPHEIWETEEAMPSEPSVLLACGGNLPRIPEGMAVLNLSDGFWNTAPVLPARVLEIVGNSLEELADARERFTAYRRSGFAIEHHGMEGKA

SEQ ID NO: 66007 - protein, 468 aa, Neisseria meningitidis
MEFSTKTEILQEQQAGAQLFVCTEEAQLNHPTALALLSSLEEGQNFADTKIPTGNGLQAVAVCCLKSTGRAALNKAAAEAAKWAQNQETVNVDVHAFEEAQAAAVAEAFAIAFGNAAYRFDRYKKEAKPAKFAEAVFHSAHEAAVKEALRVAEAQVYGQSLCRDLGNAAPNECTPEFLARTAKAEAEKLGAHAKIIEKDYIKENMGSFWSVAKGSVEDPYLVELSYFGAADKEAAPVVLVGKGITFDTGGISLKPGLNMDEMKFDMCGAATVISTFCAAVKLQLPINLIAVVATCENMPSGAANKPGDVVKSMKGLTIEVLNTDAEGRLILCDALTYAEQFKPKAVIDVATLTGACIVALGHDVSGVMGNNQDLVDSLLAASYNVDDKAWQLPLFETYKDQLKSNFADIPNIGTPGAGTITAATFLSYFTEGYPWAHLDIAGTAWKSGAEKGATGRPVPLLLNYLRNL

SEQ ID NO: 66008 - protein, 861 aa, Neisseria meningitidis
MLEAYRKAAAERAALGIPALPLNAQQTADLVELLKSPPAGEGEFLVELLAHRVPPGVDDAAKVKASFLAAVAEGSASSPLISPEYATELLGTMLGGYNIHALIELLDDDKLAPIAAKGLKHTLLMFDSFHDVQEKAEKGNKYAQEVLQSWADAEWFASRAKVPEKITVTVFKVDGETNTDDLSPAPDAWSRPDIPLHALAMLKNPRDGITPDKPGEVGPIKLLEELKAKGHPVAYVGDVVGTGSSRKSATNSVIWHTGEDIPFVPNKRFGGVCLGGKIAPIFFNTQEDSGALPIEVDVSALKMGDVVDILPYEGKIVKNGETVAEFELKSQVLLDEVQAGGRINLIIGRGLTAKAREALKLPASTAFRLPQAPAESKAGFTLAQKMVGRACGLPEGQGVRPGTYCEPRMTTVGSQDTTGPMTRDELKDLACLGFSADMVMQSFCHTAAYPKPVDVKTHKELPAFISTRGGVSLRPGDGVIHSWLNRLLLPDTVGTGGDSHTRFPIGISFPAGSGLVAFAAATGVMPLDMPESVLVRFSGKLQPGVTLRDLVNAIPLYAIKQGLLTVAKAGKKNIFSGRILEIEGLPDLKVEQAFELTDASAERSAAGCTVKLNKEPIIEYMKSNVVLMKNMIANGYQDPRTLERRIKAMEKWLANPELLEADKDAEYAAVIEINMDDIKEPIIACPNDPDDVCFMSERSGTKIDEVFIGSCMTNIGHFRAASKLLEGKADTPVRLWIAPPTKMDAKQLSDEGHYGVLGRAGARMEMPGCSLCMGNQAQVREGATVMSTSTRNFPNRLGKNTFVYLGSAELAAICSKLGKIPTVEEYQANIGIINEQGDKIYRYMNFNEIDSYNEVAETVNV

SEQ ID NO: 66009 - protein, 337 aa, Neisseria meningitidis
MQVYYDKDADLSLIKGKTVAIIGYGSQGHAHAANLKDSGVNVVIGLRQGSSWKKAEAAGHVVKTVAEATKEADVVMLLLPDETMPAVYHAEVAANLKEGATLAFAHGFNVHYNQIVPRADLDVIMVAPKGPGHTVRSEYKRGGGVPSLIAVYQDNSGKAKDIALSYAAANGGTKGGVIETTFREETETDLFGEQAVLCGGVVELIKAGFETLTEAGYAPEMAYFECLHEMKLIVDLIFEGGIANMNYSISNNAEYGEYVTGPEVVNASSKEAMRNALKRIQTGEYAKMFIQEGNVNYASMTARRRLNADHQVEKVGAQLRAMMPWITANKLVDQDKN

SEQ ID NO: 66010 - protein, 163 aa, Neisseria meningitidis; identical to SEQ ID NO: 65334

SEQ ID NO: 66011 - protein, 575 aa, Neisseria meningitidis
MQLSGAQIIVQSLKAEGVEYVFGYPGGAVIEIYDALFQLNKFKHILTRHEQAAVHAADAYARVSGKVGVALVTSGPGVTNALTGIATAYTDSIPMVVISGQVGNSLIGTDAFQEVDTVGITRPCVKHNFLVTDINELAETIKKAFQIAASGRPGPVVVDVPKDVTQAMAKFSYPQEDIFIRSYQPVVQGHIGQIKKAVQMLASAKRPVVYFGGGVVLGNASEELTRFVRMTGAPCTGTLMGLGAYPSGDRQFLGMLGMHGTYEANLAMQNADVVLAVGARFDDRVVSVPSKFFEKAKKVIHIDVDPSSIAKRVKADIPIVGDVKNVLSEMVALWQKQESVPSEDALGKWWKTIEEWRSRDCLWFDNGSEIIKPQYVIQKLAEITGNSAIITSDVGQHQMFAAQYYPFERPRQWLNSGGLGTMGVGLPYAIGAKLAAPDQDVFCITGDGSIQMNIQELSTCFQYRIPVNVITLNNGYLGMVRQWQEIYYGGRESETYFDSLPDFVKLAEAYGHIGIRVDKKSDVEGALLEALNQKDRLVFIDFLTDQKQNVMPMVGNGKGLDEMVLPPHMRADGKA

SEQ ID NO: 66012 - protein, 217 aa, Neisseria meningitidis
MQDNALTIALSKGRIFEETLPLLAAAGIVPTEEPEKSRKLIIGTNHENIRLVIVRATDVPTYVRYGAADFGIAGKDVLIEHGGTGLYRPLDLEIAKCRMMVAVRKGFDYEAASQPGCRLKIATKYPEIAASHFAGKGVHVDIIKLYGSMELAPLVGLSDAIVDLVSTGNTLKANGLEAVEHIVDISSRLVVNKAALKTKYALLEPIIQAFGGAVKAK

SEQ ID NO: 66013 - protein, 112 aa, Neisseria meningitidis
MSTFFQQTAQAMIAKHIDRFPLLKLDQVIDWQPIEQYLNRQRTRYLRDHRGRPAYPLLSMFKAVLLGQWHSLSDPELEHSLITRIDFNLFCRFDELSIPDYSTLCRYRNRRR

SEQ ID NO: 66014 - protein, 224 aa, Neisseria meningitidis
AQDDTLSELLKLINCQLTEKGLKVEKASAAVVDATIIQTAGSKQRQAIEVDEEGQVSSQTTPSKDKDARWIKKNGLYKLGYKQHTRTDAEGYIEKLHITPANAHECKHLSPLLEGLPEGTTVYADKGYDSAENRQHLEEHQLLDGIMRKACRNRPLSEVQTKRNRYLSKTRYVVEQSFGTLHRKFRYARAAYFGLIKVSAQSHLKAMCLNLLKAANRLSAPAAA

SEQ ID NO: 66015 - protein, 187 aa, Neisseria meningitidis
MPWNLPIFLTWLRVLLIPVMTALFYLPFPWFAEETINLTAAVIFAVAALTDWFDGFLARLWKQTSDFGAFLDPVADKLMVAVSLLLLVKLDRTYVLFAMIIIGREITISALREWMAQMGKRNSVAVATVGKFKTAAQMLAIFLLLLNIPDFYGFNLVVIGNVLMFIASLLTVWSMLYYLKMAWKEIA

SEQ ID NO: 66016 - protein, 301 aa, Neisseria meningitidis
MDILDKLVDFAQLTGSVDVQCLLGGQWSVRHETLQREGLVHIVTSGSGYLCIDGETSPRPVSTGDIVFFPRGLGHVLSHDGKCGESLQPDMRQHGAFTVKQCGNGQDMSLFCARFRYDTHADLMNGLPETVFLNIAHPSLQYVVSMLQLESKKPLTGTVSMVNALSSVLLVLILRAYLEQDKDVELSGVLKGWQDKRLGHLIQKVIDKPEDEWNVDKMVAAANMSRAQLMRRFKSRVGLSPHAFVNHIRLQKGALLLKKNPDSVLSVALSVGFQSETHFGKAFKRQYHVSPGQYRKEGGQK

SEQ ID NO: 66017 - protein, 874 aa, Neisseria meningitidis
MKTSELRQKFLKFFETKGHTVVRSSSLVPHDDPTLLFTNAGMNQFKDVFLGFDKRPYSRATTAQKCVRAGGKHNDLENVGYTARHHTFFEMMGNFSFGDYFKRDAIHFAWEFLTSPEWLNIPKDKLLATVYAEDDEAYNIWLNEIGMPSERIVRIGDNKGAKYVSDNFWQMGDTGPCGPCSEIFYDHGEEIWGGIPGSPEEDGDRWIEIWNCVFMQFNRDEQGNMNPLPKPSVDTGMGLERMAAVMQHVHSNYEIDLFQDLLKAVARETGAAFSMDEPSLKVIADHIRSCSFLIADGVLPSNEGRGYVLRRIIRRAVRHGYKLGQSKPFFHKLVADLVKEMGGAYPELKEKQAQIEEALKNEESRFAQTLETGMALLENALAKGGKTLDGEIIFKLYDTYGFPYDLTADICRERNIELDEAGFEREMEAQRARARAAQSFKANAQLPYDGQDTEFKGYSERQTESKVLALYKDGEQVNELNEGDSGAVVIDFTPFYAESGGQVGDVGYIFSSENRFEVRDTQKIKAAVFGQFGVQTSGRLKVGDSVTAKVDDEIRNANMRNHSATHLMHKALRDVLGGHVEQKGSLVTAESTRFDISHPQAVTAEEIAEVERRVNEAVLANVAVNAAIMSMEDAQKTGAMMLFGEKYGEEVRVLQMGGFSTELCGGTHVSRTGDIGLFKIISEGGIAAGVRRIEAITGLNALKWAQEQERLVKDIIAETKAQTEKDVLAKIQAGAAHAKALEKELARAKAELAVHAGAKLLDDAKDLGAAKLVAAQIEADAAALREIVTDLTGKSDNAVILLAAVNDGKVSLCAGVSKPLTGKVKAGDLVKFAAEQVGGKGGGRPDLAQAGGTDAGKLPEMLVSVESWLCQKLS

SEQ ID NO: 66018 - protein, 539 aa, Neisseria meningitidis
MKQNVMFLILGRNFLKIILCFSFFVPKFALASVNVPGKFDRVEVYDDGRYLGIRGSDDKRRRIWKGVFDRESGRYLTSEAQDLKVRHVSTGASSTGKVSSVVSSSVSRAGVLAGVGKLARLGAKFSTRAVPYVGTALLAHDVYETFKEDIQAQGYQYDPETDKFVKGYEYSNCLWYEDERRINRTYGCYGVDSSIMRLMSDYSRFPEVKELMESQMERLARPYWEKLRNRPDMYYFKNYNFKRCYFGLNGGDCLVAKGDDGRTFISFSLQGNSKYKEEMDAKKLEEILSLKVDANPDKYIKATGYPGYSEKVEVAPGTKVNMGPVTDRNGNPVQVVATFGRDSQGNTTVDVQVIPRPDLTPGSAEAPNAQPLPEVSPAENPANNPAPNENPGTRPNPEPDPDLNPDANPDTDGQPGTSPDSPAVPDRPNGRDGKDGGLLCKFFPDILACDRLPEPNPAEDLNLPSETVNVEFKKSGIFQDSAQCPAPVTFTITVLDSSKQFAFSFENACTIAERLRYMLLALAWAVAAFFCIRTVSREV

SEQ ID NO: 66019 - protein, 765 aa, Neisseria meningitidis
MQPHAPHTDSNTLMLGRYAERAYLEYAMSVVKGRALPEVSDGQKPVQRRILFAMRDMGLTAGAKPVKSARVVGEILGKYHPHGDSSAYEAMVRMAQDFTLRYPLIDGIGNFGSRDGDGAAAMRYTEARLTPIAELLLSEINQGTVDFVPNYDGAFDEPLHLPARLPMVLLNGASGIAVGMATEIPSHNLNEVTQAAIALLKKPTLETADLMQYIPAPDFAGGGQIITPADELRRIYETGKGSVRVRARYEIEKLARGQWRVIVTELPPNANSAKILAEIEEQTNPKPKAGKKQLNQDQLNTKKLMLDLIDRVRDESDGEHPVRLVFEPKSSRIDTDTFINTLMAQTSLEGNVSMNLVMMGLDNRPAQKNLKTILQEWLDFRTVTVTRRLKFRLNQVEKRLHILEGRLKVFLHIDEVIKVIRESDDPKTDLMAAFGLTEIQAEDILEIRLRQLARLEGFKLEKELNELREEQGRLNILLGDENEKRKLIVKEMQADMKQFGDARRTLVEEAGRAVLTQTTADEPITLILSEKGWIRSRAGHNLDLSQTAFKEGDRLKQTLEGRTILPVVILDSSGRTYTLDAAEIPGGRGDGVPVSSLIELQNGAKPVAMLTGLPEQHYLLSSSGGYGFIAKLGDMVGRVKAGKVVMTADSGETVLPPVAVYASSFINPDCKIIAATNQNRALAFPIGELKIMAKGKGLQIIGLNAGESMTHTAVSSEPEILIESEGRRGAAHKDRIPISLLEAKRGKKGKLLPISGSLKQLSSPK

SEQ ID NO: 66020 - protein, 268 aa, Neisseria meningitidis
MNMKKWIAAALACSALALSACGGQGKDAAAPAANPDKVYRVASNAEFAPFESLDSKGNVEGFDVDLMNAMAKAGNFKIEFKHQPWDSLFPALNNGDADVVMSGVTITDDRKQSMDFSDPYFEITQVVLVPKGKKISSSEDLKNMNKVGVVTGYTGDFSVSKLLGNDNPKIARFENVPLIIKELENGGLDSVVSDSAVIANYVKNNPTKGMDFVTLPDFTTEHYGIAVRKGDEATVKMLNDALKKVRESGEYDKIYAKYFAKEDGQAAK

SEQ ID NO: 66021 - protein, 546 aa, Neisseria meningitidis
MSLPYKRWHYFNLIKNSLQKGCLKQQQTLTATTLKRNTIMTVIKQEDFIQSICDAFQFISYYHPKDYIDALYKAWQKEENPAAKDAMTQILVNSRMCAENNRPICQDTGIATVFLKVGMDVQWDADMSVEEMVNEGVRRAYTWEGNTLRASVLADPAGKRQNTKDNTPAVIHMSIVPGDKVEVTCAAKGGGSENKSKLAMLNPSDNIVDWVLKTIPTMGAGWCPPGILGIGIGGTPEKAVLMAKESLMSHIDIQELQEKAASGAELSTTEALRLELFEKVNALGIGAQGLGGLTTVLDVKILDYPTHAASKPIAMIPNCAATRHVEFELDGSGPVELTPPRVEDWPDLTYSPDNGKRVDVDKLTKEEVASWKTGDVLLLNGKILTGRDAAHKRLVDMLDKGEELPVDFTNRLIYYVGPVDPVGDEIVGPAGPTTATRMDKFTRQMLEQTDLLGMIGKSERGAATCEAIADNKAVYLMAVGGAAYLVAKAIKSSKVLAFPELGMEAIYEFEVKDMPVTVAVDSKGESIHATAPPQWQAKIGIIPVKS

SEQ ID NO: 66022 - protein, 470 aa, Neisseria meningitidis
MKILILGNGQVGSTVAQNLAAIPNNDVTVIDIDEKALQETGSRLDVQTVFGNGASPFTLERAGAEDADLLLALSRSDETNIVACKVAADLFNIPGRIARVRSSEYLEYLSPKLENNENGSLSIFGITETISPEQLVTEQLAGLIDCPGALQVLRFADDRVRMVIIQARRGGLLVGRSIADIAQDLPDGADCQICAVYRNNRLIVPAPQTVIIEGDEILFAAAAENIGAVIPELRPKETSTRRIMIAGGGNIGYRLAKQLEHAYNVKIIECRPRRAEWIAENLDNTLVLQGSATDETLLDNEYIDEIDVFCALTNDDESNIMSALLAKNLGAKRVIGIVNRSSYVDLLEGNKIDIVVSPHLITIGSILAHIRRGDIVAVHPIRRGTAEAIEVVAHGDKKTSAIIGRRISGIKWPEGCHIAAVVRAGTGETIMGHHTETVIQDGDHIIFFVSRRRILNELEKLIQVKMGFFG

SEQ ID NO: 66023 - protein, 91 aa, Neisseria meningitidis
MNKSELIQAIADEAELSKRAAAEFVNAFVSVVTQELKDGNDVTLVGFGTFHAAQSAERQGRNPKTGEPLTIAARKTPKFRSGKALKDAVNG

SEQ ID NO: 66024 - protein, 185 aa, Neisseria meningitidis
MDALKLLTNRRSSKKLKHPAPDAAELEQIFQAATQVPDHGNMRPFRFTVIQGEVGLQRFRDVLKQTVAELNFGDDAMKKAEKVGNMAPMVIGVTFAPNRDVPKPKPEWEQMLTAGCAAYALQLAATAQGFDNVWITGMWVNSPLLREAFGCADKDKIIGLMMVGTPTEEVHKPKNTDLEAFVSHW

SEQ ID NO: 66025 - protein, 505 aa, Neisseria meningitidis
MEMFKMSREMLQLAEALASEKNVDAEVVFQALEFALSTAAKKKADREHMDVRVQINRDTGEYQTFRRWLIVADEDYTYPDVEKTIEEIQEEIPGTTIQIGEYYEEQLPNEGFGRQAAQTAKQIILQRIRDAEREQNLNEFLAVKEDIVSGTVKRVERHGIIVEVVAGKLDALIPRDQMIPRENFRSGDRIRALFLRVEEIGNTGRKQVILSRTSGDFLVKLYANEVPEIADGMLEIRAVARDPGQRAKVAVKANDQRIDPQGTCIGVRGSRVNAVSNELSGERIDVVLWSPEPAQFVMSALSPAEVSRIVIDEDKHAVDVIVAEDQLALAIGRGGQNVRLASDLTGWQLNIMTSAEADERNAAEDAAIRRLFMDHLNVDEETADVLVQEGFATLEEVAYVPAAELLAIEGFDEEIVDMLRNRARDAILTMAIAAEEKLGEVSDDMRNLEGIDADMLRSLAEAGITTRDDLAELAVDELIEITGVNEETAKAVILTAREHWFTEDK

SEQ ID NO: 66026 - protein, 962 aa, Neisseria meningitidis
MSNTTVEQFAAELKRPVEDLLKQLKEAGVSKNSGSDSLTLDDKQLLNAYLTKKNGSNGGTISIRRTKTEVSTVDGVKVETRKRGRTVNIPSAEELAAQVKAAQTQAAPVRPEQTAEDAAKARAEAATRAEARAKAEAEAAKLKAAKAGNKAKPAAQKPTEAKAETAPVAAETKPAEESKAEKAQADKMPSKKPAEPKEKAAKPKHERNGKGKDAKKPAKPAAPAVPQPVVSAEEQAQRDEEARRAAALRAHQEALLKEKQERQARREAMKQQAEQQAKAAQEAKTGRQRPAKPAEKPQAAAPAVENKPVNPAKAKKENRRNRDDEGQGRNAKGKGGKGGRDRNNARNGDDERVRGSKKGKKLKLEPNQHAFQAPTEPVVHEVLVPETITVADLAHKMAVKGVEVVKALMKMGMMVTINQSIDQDTALIVVEELGHIGKPAAADDPEAFLDEGAEAVEAEALPRPPVVTVMGHVDHGKTSLLDYIRRAKVVQGEAGGITQHIGAYHVKTPRGVITFLDTPGHEAFTAMRARGAKATDIVILVVAADDGVMPQTIEAIAHAKAAGVPMVVAVNKIDKEAANPERIRQELTAHEVVPDEWGGDVQFIDVSAKKGLNIDALLEAVLLEAEVLELTAPVDAPAKGIIVEARLDKGRGAVATLLVQSGTLKKGDMLLAGTAFGKIRAMVDENGKAINEAGPSIPVEILGLSDVPNAGEDAMVLADEKKAREIALFRQGKYRDVRLAKQQAAKLENMFNNMGETQAQSLSVIIKADVQGSYEALAGSLKKLSTDEVKVDVLHSGVGGITESDVNLAIASGAFIIGFNVRADASSRKLAENENVEIRYYNIIYDAIDDVKAAMSGMLSPEEKEQVTGTVEIRQVISVSKVGNIAGCMVTDGVVKRDSHARLIRNNVVIHTGELSSLKRYKDDVKEVRMGFECGLMIKGYNEIMEGDQLECFDIVEVARTL

SEQ ID NO: 66027 - protein, 208 aa, Neisseria meningitidis
MYTGERFNTYSHLSGLILAAAGLALMLLKTIGHGDGYRIFSVSVYGISLLLLYLSSSLYHGIAAGKLKSILKKTDHCMIYVLIAGSYTPFALVSLRNGPGWTVFSLSWLLAAAGIAQELTIGRKSEKRLLSIAIYIVMGWMVLAVMKSLTASLPPAGLAWLAAGGMLYSVGIYWFVNDEKIRHGHGIWHLFVLGGSITQFVSVYGYVI

SEQ ID NO: 66028 - protein, 352 aa, Neisseria meningitidis
MRPLNVQIRLGNLRHNYRILKEMHGGKLLAVVKADAYGHGAVRCAFALADLADGFAVATIDEGIRLRESGITHPIVLLEGVFEASEYEAVEQYSLWPAVGNQWQLEALLSRHWKKPVKVWLKMDSGMHRTGFFPHDYASVYAALKQSEYVDSIVKFSHFSCADEPESGMTEIQMEAFDLGTEGLEGEESLANSAAILNVPEARRDWGRAGLALYGISPFGGSDDRLKPVMRLSTRIFGERVLQPHSPIGYGATFYTSKSTRVGLIACGYADGYPRRAPSNSPVAVDGKLTRVIGRVSMDMMTIELDASQEGLGHEVELWGDTVNINTVAEAAGTIPYELMCNIKRAKFTYIE

SEQ ID NO: 66029 - protein, 725 aa, Neisseria meningitidis
MFRKPSEMPVPQPTAPYDHLTAEARTLLFRTASYLKPEEQVELEKAVAYAFHAHDGQTRKSGEPYITHPIAVATQLALWHMDIQGLCAGVMHDVLEDTGVTKGEMAAVFGNTIAEMVDGLSKLEKLKFEDHAEHQAESFRKLILAMTKDVRVIVVKLADRLHNMRTLGSMRPDKRRRIARETLEIYAQIANRIGLNNAYQELQDLSFQNLHPNRYETLKKAMDKSRKNRQDVVGKVLRAFGQRLVGVNIEAKIKGREKNLYGIHQKMMAKKLRFAEVMDIYGFRVIVNSIPACYAALGALHTLYQPKPGRFKDYIAIPKSNGYQSLHTTLVGPYGLPIEVQIRTKEMDAVAEGGIAGHWSYKSYSKTVDQAVLHTNRWLKNILDLQASSANAIEFLEHVKVDLFPNEIYILTPKGKILTLPKGATPVDFAYAVHTDIGHKTVAARINNIMMPLRTKLKTGDSVEIITSEHAKPNPAWLNFAVSGRARSAIRQYIKNLNRHDAVVLGESLLQKALSSLLPKDVLLSDGIKEKYLADLNDKQTSFEEVLYNVGMGHTLPVYVAMHIAELAGEHFGSEVRLSSIKVDGQESGHIHFAECCHPVPGDSIRLLLVKGKGMIIHRDTCPTLLKSDPEQQLDADWENMNGQNYRVGLQVQSEDSHGLLALMAQAISDSGADIESVETPSKSQSGTEGFVEFKFLLKVKNLNQLNQIIQNLHSIPYIRKVIRS

SEQ ID NO: 66030 - protein, 451 aa, Neisseria meningitidis
MKAPELLLPAGGLERMRTAYDYGADAVYAGSPRYSLRARNNEFAKLDVLEQGIKEAHERNKKFFLTVNTLPHNSKLKTFVSDMEPLIAMKPDALIMADPGLIMTVREKWPEMPIHLSVQANTTNYWGVKFWQNIGVERIILSRELSMEEIAEIRQQCPDIELEVFIHGALCIAYSGRCLLSGYFNHRDPNQGTCTNSCRWDYKVHNATENDAGDAQLLQGFNFEKAQEEANQNFEGINGQKRHPYADKVFLIEESNRPGEMMPIMEDEHGTYIMNSKDLRGIEVVEKLAKIGVDSLKVEGRTKSLYYVARVAQSYRKAIDDAVAGRPFDYSLLSELEGLANRGYTSGFLERHQTQDYQNYLSGHSTAKQSQYVGHVTEIDKNGWATIEVKNRFAVGDSLEIIHPNGNQTIKLEQMARKGQPVDVAPGNGIQVKIPDMQGKEKALIARVLNP

SEQ ID NO: 66031 - protein, 213 aa, Neisseria meningitidis
MPSEKPMNRRTFLLGAGALLLTACGRKSARTHAKIPEGSTVLALGDSLTFGYGANPGESYPAQLQKLTGWNIVNGGVSGDTSAQALSRLPALLARKPKLVIVGIGGNDFLRKVPKEQTRANIAKIIETVQKENIPAVLVGVPHITLGALFGHLSDHPLYEDLSEEYGIPLFGGAWAEILGDNNLKSDQIHANGKGYRKFAEDLNQFLRKQGFR

SEQ ID NO: 66032 - protein, 950 aa, Neisseria meningitidis
MKLSELFNPNEFAARHLSFGDEAALLAAVDEKSMDEFVGNTVPQSIRMPSELDLPEALTEADALAKLKGIASKNMINKSYIGLGYYPTRVPNVILRNVLENPGWYTAYTPYQAEIAQGRLEALLNFQQVCIDLTGFPVAGASLLDEATAAAEAMAMAHRVGKVKSERFFVDERVYPQTLDVMKTRAKYFGFELVVGDFAQADEGEYFGALFQYVGKDGDVQDLQDVIGRLKAKGTIVAVAADIMSLVLLKSPAELGADIALGNTQRFGVPMGFGGPHAAYFAFKDEFKRSAPGRIIGVSKDASGKPALRMALSTREQHIRREKATSNICTAQALLANLAGMYAVYHGPKGVKRIADRIHALASAFADALVSDGLNVVHKVFFDTVTVDFGNKEKADQVFAAALESGYNLRRVNDTQVAAAFHETSACEDLVDLYRAFTGKDTFAFADDVKGRLNAELLRQDDILQHPVFNSYHTEHEMLRYLKKLEDRDLAMNRSMISLGSCTMKLNATAEMLPITWAEFSDIHPYAPEAQTAGYRELLADMENSLKAITGFDAISLQPNSGAQGEYTGMLSIRRYQEAQGEAHRNICLIPKSAHGTNPATAAMLGLKVVVVDTDEHGNVNIDDLKAKAEQHRDALSAIMITYPSTHGVYEEGIRDICRIIHENGGQVYMDGANLNAQIGIMQPAEVGADVLHMNLHKTFCIPHGGGGPGMGPIGLKAHLAPFAPGHTLTDTHSASAGQTAVAAAAYGSASILPITWMYLTMMGKQGMEQATRWALLNANYVAKRLSEDYPILYTGKNGRVAHECIVDLRPLKAESGITETDIAKRLMDYGFHAPTVSFPVAGTLMIEPTESESKAELDRFIATLKSIRREVQKVIDGEWPKDDNPLVNAPHTAADITGNWAHPYSREEAVFPLPFVREHKFWPFVNRVDDVYGDRNLVCSCPPMENYED

SEQ ID NO: 66033 - protein, 366 aa, Neisseria meningitidis
MAGNTFGQLFTVTTFGESHGAGLGCIIDGCPPGLELSEADIQFDLDRRKPGTSRHVTQRREADQVEILSGVFEGKTTGTPIALLIRNTDQRSKDYGNIATSFRPGHADYTYWHKYGTRDYRGGGRSSARETAARVAAGAVAKKWLKEKFGTEITAYVTQVGEKEIRFEGCEHISQNPFFAANHSQIAELENYMDSVRKSLDSVGAKLHIEAANVPVGLGEPVFDRLDAEIAYAMMGINAVKGVEIGAGFDSVTQRGSEHGDELTPQGFLSNHSGGILGGISTGQDIHVNIAIKPTSSIATPRRSIDINGNPIELATHGRHDPCVGLRAAPIAEAMLALVLIDHALRHRAQNADVQVNTPDITLSNK

SEQ ID NO: 66034 - protein, 661 aa, Neisseria meningitidis
MAKNNQYSESSITVLKGLEPVKERPGMYTRTDSPTHICQEVIDNAADEALGGFATAIDVQIHEDGSLSVRDNGRGIPVGLHPEEGVPVVELVFTRLHAGGKFNKKDGGSAYAFSGGLHGVGVSVTNALSTRLEVTVKREGKIHRIVFAGGDVVEPLAQVGKCAVKDSGTEVRVWPDGKYFESPNYSIPELERLLRAKAVLLPGVRVSLTRPVKGEDEAHTQTWHYPDGLKSYLTDLIADAQEAVPLFSCENYISDEHNGDFSIGEGAAFALTWLEEGSCANESYVNLIPTPLGGTHEAGLKQAVFNAVSNFINLHNLLPRGVKVQSDDVFGKTAFVLSARVLDPQFQGQTKDKLTNRDALKLVATVSGDPLELWLNQNVDFGKKIAELAIRQAQARMRSVKKIEKKKGSGVAVLPGKLTDCESEDIRENELFLVEGDSAGGSAKLARDKATQAILPLRGKVLNSFEVHPDQLFGNAEIHDISVAIGVDPHGINDHPDLSGLRYGKIAILSDADVDGSHIQVLLLTLFYRHFPKLVADGHIYVAQPPLFRVDVNAQGKSKPARKFYALDQNELDGILERLQKEGVKETAYSISRFKGLGEMNPDQLKDTTMHPDTRRLLQVQIPEGADDETRDIFFKLMGKGEAAARRAWMEREGDTAELDI

SEQ ID NO: 66035 - protein, 431 aa, Neisseria meningitidis
MLDIQLLRSNTAAVAERLARRGYDFDTARFDALEERRKSVQVKTEELQASRNSISKQIGALKGQGKHEEAQVAMDQVAQIKTDLEQAAADLDAVQKELDAWLLSIPNLPHEDVPFGKDETENVEVRKVGTPREFDFEIKDHVDLGEPLGLDFEGGAKLSGARFTVMRGQIARLHRALAQFMLDTHTLKHGYTEHYTPYIVDDTTLQGTGQLPKFAEDLFHVTRGGDESKTTQYLIPTAEVTLTNTVAGSIIPSEQLPLKLTAHSPCFRSEAGSYGKDTRGLIRQHQFDKVEMVQIVHPEKSYETLEEMVGHAENILKALELPYRVITLCTGDMGFGATKTYDLEVWVPAQNTYREISSCSNCEDFQARRMKARFKDENGKNRLVHTLNGSGLAVGRTLVAVLENHQNADGSINIPAALQPYMGGVAKLEVK

SEQ ID NO: 66036 - protein, 358 aa, Neisseria meningitidis
MKPSILEKLQQLGDRLEEVTHLLGQPEATSDMDNYRKLTREHAELTPVVEVFQNYRLAQSDLADAEEMLSDPEMKDFAAEEIEAAKAKIGELDTELQKLLLPKDADDDKNIFIEIRAGTGGDEAALFAGDLLRMYSRYAERNRWQVEIVSANESELGGYKEVIARIIGLGAYSRLKFESGGHRVQRVPATESQGRIHTSACTVAVMPEADELEDIELNPADLRIDTFRASGAGGQHINKTDSAVRITHLPTGMVVECQDGRSQHANKAQAMKVLAARLNDAQKREAQAKEAAERKSLIGSGDRSERIRTYNYPQGRVTDHRINLTLHKLDFVMDGDLAEITNALIAEHQAELLAAMGD

SEQ ID NO: 66037 - protein, 444 aa, Neisseria meningitidis
MAKKYFGTDGVRGEVGQFPITPDFVLKLGYAAGQVLVQHDTDQKPTVLIGKDTRISGYMLEAALVAGFTAAGVNVVQTGPLPTPGVAYLTRALRLSAGVMISASHNAYSDNGIKFFAEGGVKLSDEIELEIEAKIDEEMKTQPSARLGRARRISGADDRYIEFCKSTFPSHSDLRGLKLVIDTANGAGYGVAPKVFHELGAQVVSIGDEPNGYNINEKCGATYTKTLQAAVLQHEADYGIALDGDGDRLMMVDKNGKVYDGDSLIYVIAKARAREGINIGGVVGTVMTNMAMEIALKEQGVDFCRAKVGDRYVLEQLNQRSWLIGGEASGHILCMDKHNTGDGIISALQVLAALQTLNQDLATVCADWQPYPQTMINVRIQKGQKWQEASKDVLAEVEKELEGKGRVVLRASGTEPVVRVMVEARQADWARDGAERIASAIGSL

SEQ ID NO: 66038 - protein, 283 aa, Neisseria meningitidis
MVGCVWQAGRFEIGLDKPKIMGIVNLTPDSLSDGGAYSQNAQTALAHAERLLKEGADILDIGGESTRPGADYVSPEEEWARVESVLAEVAGWGVPVSLDTRHTVVMEKALALGGIDIINDVAALTDEGALELLACQADTGICLMHMQGLPKNMQINPKYQDVVGEVARYLKARAAECIAAGIAPQRITLDPGFCFGKTLQHNITLMRHLPELMAETGYPLLIGVSRKSMIGELTGETDAAARGHGSVAAALAAVARGAKIVRVHDVKATADALKAWEALGINL

SEQ ID NO: 66039 - protein, 740 aa, Neisseria meningitidis
MPAYGHYPFIQDNPPTQNRISTSRVILWRVLQTFQAMDLLSVFHKYRLKYAVAVLTILLLAAIGLHASVYRIFTPENIRSRLQQSIAHTHRKISFDADIQRRLLPRPTVILKNLTITEPGGDRTAVSVQETKIGLSWKNLWSDQIQIEKWVVSSAELALTRDGKGVWNIQDLIDSQKRQASVNRIIVENSTVRLNFLQEQLILKEINLNLQSPDSSGQPFESSGILVWGKLSVPWKSRGLFLSDGIGTPKISPFHFEASTSLDGHGITISTTGSPSVRFNAGGADAAGLGLRADTSFRNLHLTAQIPTLALRNNSIKIETVNGAFTAGGEYAQWDGSFKLDKANLHSGIANIGNAEISGSFKTPRHQTNFSLNSPLVWTENKGLDAPRLYVSTLQDTVNRLPQPRFISRLDGSLSVPNLQNWNAELNGTFDRQTVAAKFRYTHEDAPHLEAAVALQKLNLTPYLDDVRQQNGKIFPDTLAKLSGDIEAHLKIGKVQLPGLQLDDMETYLHADKGHIALSRFKSGLYGGHTEGGISIANTRPATYRLQQNASNIQIQPLLQDLFGFHSFSGNGDAVIDLTAGGETRKELIRSLQGSLSLNISNGAWHGIDMDNILKNGISGKTADNAAPSTPFHRFTLNSEISDGISRHIDTELFSDSLYVTSNGYTNLDTQELSEDVLIRNAVHPKNKPIPLKITGTVDKPSITVDYGRLTGGINSRKEKQKILEDTLLEQWQWLKPKEP

SEQ ID NO: 66040 - protein, 264 aa, Neisseria meningitidis
MKAYLDLMRHVLDNGTDKSDRTGTGTRSVFGYQMRFDLGKGFPLLTTKKLHLRSIIHELLWFLKGDTNIKYLKDNNVSIWDEWADENGDLGPVYGYQWRNWPAPDGRHIDQIANVLEQIKKNPDSRRLIVSAWNPALVDEMALPPCHALFQFYVADGKLSCQLYQRSADIFLGVPFNIASYALLTMMMAQVCGLEAGEFVHTFGDAHLYRNHFEQAALQLEREPRALPVMKINPEVKDLFAFKFEDFELEGYDPHPHIKAAVSV

SEQ ID NO: 66041 - protein, 444 aa, Neisseria meningitidis
MTDLNTLFANLKQRNPNQEPFHQAVEEVFMSLDPFLAKNPKYTQQSLLERIVEPERVVMFRVTWQDDKGQVQVNRGYRVQMSSAIGPYKGGLRFHPTVDLGVLKFLAFEQVFKNALTTLPMGGGKGGSDFDPKGKSDAEVMRFCQAFMTELYRHIGADTDVPAGDIGVGGREIGYLFGQYKKIRNEFSSVLTGKGLEWGGSLIRPEATGYGCVYFAQAMLQTRNDSFEGKRVLISGSGNVAQYAAEKAIQLGAKVLTVSDSNGFVLFPDSGMSEAQLAALIELKEVRRERVATYAKEQGLQYFENQKPWGVAAEIALPCATQNELDEEAAKTLLANGCYVVAEGANMPSTLGAVEQFIKAGILYAPGKASNAGGVATSGLEMSQNAIRLSWTREEVDQRLFGIMQSIHESCLKYGKVGDTVNYVNGANIAGFVKVADAMLAQGF

SEQ ID NO: 66042 - protein, 260 aa, Neisseria meningitidis
MMKLVRPQKISDQVLSVLEGRIVEGVYAEGGKIPPERVLAEEFGVSRPSVRSALNVLVARQVLEARQGDGYYVSVKPQQDFLQSWQELLGKHSNWEQDVFDFSCHIEGCMAALAAERRTDADLKRIGFWLEKFEEACESGNLEHQSEADVSFHQTIADAAHNLLFSHLSGGLLKMLYRQTRSSLIYLNQEEDPRPKLMAQHRVLYEAISNRRPGEASEAAKAHLNYVASSILKDREYQSRNRHADTLAQNDLKRVQDWEV

SEQ ID NO: 66043 - protein, 1067 aa, Neisseria meningitidis
MAKFFIDRPIFAWVISIFIIAAGIFGIKSLPVSQYPSVAAPTITLHATYPGASAQVMEDSVLSVIERNMNGVEGLDYMSTSADSSGSGSVSLTFTPDTDENLAQVEVQNKLSEVLSTLPATVQQYGVTVSKARSNFLMIVMLSSDVQSTEEMNDYAQRNIVPELQRIEGVGQVRLFGAQRAMRIWVDPKKLQNYNLSFADVGSALSAQNVQISAGSIGSLPAVRGQTVTATVTAQGQLGTAEEFGNVILRANTDGSNVYLKDVARVGLGMEDYSSSTRLNGVNTTGMAVMLSNSGNAMATAKAVKERMATLEKYFPQGMSWKTPYDTSKFVEISIEKVIHTLIEAMVLVFVVMYLFLQNIRYTLIPTIVVPISLLGGFAFISYMGMSINVLTMFAMVLVIGIVVDDAIVVVENVERIMADEGLPPKEATKKAMGQISGAVIGITAVLISVFVPLAMFSGATGNIYKQFALTMASSIAFSAFLALTLTPALCATMLKTIPKGHHEEKKGFFGWFNKKFNSWTHGYEGRVAKVLRKTFRMMVVYIGLAVVGVFLFMRLPTSFLPTEDQGFVMVSVQLPAGATQERTNATLAQVTQLAKSIPEIENIITVSGFSFSGSGQNMAMGFAILKDWNERTAPGSDAVAIAGKLTGMMMGTLKDGFGIAVVPPPILELGNGSGLSINLQDRNNTGHTALLAKRNELIQKMRASGLFDPSTVRAGGLEDSPQLKIDINRAAAAAQGISFADIRTALASALSSSYVSDFPNQGRLQRVMVQADEDARMQPADILNLTVPNKSGVAVPLSTIATVSWENGTEQSVRFNGYPSMKLSASPATGVSTGQAMAAVQKMVDELGGGYSLEWGGQSREEAKGGSQTLILYGLAVAAVFLVLAALYESWSIPLAVILVIPLGLIGAAAGVTGRNLFEGLLGSVPSFANDIYFQVGFVTVMGLSAKNAILIIEFAKDLQAQGKSAVEAALEAARLRFRPIIMTSFAFILGVVPLYIAGGASSASQRAIGTTVFWGMLIGTLLSVFLVPLFYVVVRKFFKETAHEHEMAVKHAAEAGITGSDDSQH

SEQ ID NO: 66044 - protein, 522 aa, Neisseria meningitidis
MSQTDTQRDGRFLRTVEWLGNMLPHPVTLFIIFIVLLLIASAAGAYFGLSVPDPRPVGAKGRADDGLIHVVSLLDADGLIKILTHTVKNFTGFAPLGTVLVSLLGVGIAEKSGLISALMRLLLTKSPRKLTTFMVVFTGILSNTASELGYVVLIPLSAIIFHSLGRHPLAGLAAAFAGVSGGYSANLFLGTIDPLLAGITQQAAQIIHPDYVVGPEANWFFMVASTFVIALIGYFVTEKIVEPQLGPYQSDLSQEEKDIRHSNEITPLEYKGLIWAGVVFVALSALLAWSIVPADGILRHPETGLVSGSPFLKSIVVFIFLLFALPGIVYGRVTRSLRGEQEVVNAMAESMSTLGLYLVIIFFAAQFVAFFNWTNIGQYIAVKGATFLKEVGLGGSVLFIGFILICAFINLMIGSASAQWAVTAPIFVPMLMLAGYAPEVIQAAYRIGDSVTNIITPMMSYFGLIMATVIKYKKDAGVGTLISMMLPYSAFFLIAWIALFCIWVFVLGLPVGPGAPTFYPAP

SEQ ID NO: 66045 - protein, 481 aa, Neisseria meningitidis
METLMDTQTYNYKVVRQFAIMTVVWGIVGMLVGVIVAAQLFAPALDLSNIGPWFHFGRLRPLHTNAVIFAFGGCGLIGTSYYVVQRTCNTRLFGGWLPAFTFWGWQAVIVAAVVSFPMGWTQGKEYAELEWPIDILITLVWVAYAIVFFGTIAKRKIKHIYVANWFYGGFILAVALLHIVNNISIPAGLMKSYPVYSGAIDAMVQWWYGHNAVGFFLTAGFLGMMYYFVPKQAARPVYSYRLSVVHFWALIFTYMWAGPHHLHYTALPDWTQSLGMVLSLILFAPSWGGMINGIMTLSGAWDKLRTDPILKFLIVSLSFYGMSTFEGPMMSIKTVNALSHYTDWTVAHVHAGALGWVGFVTIGSVYYMIPRLFGKEQMHSTKLVEAHFWIATIGVVLYIAAMWIAGVMQGLMWSSLNDDGTLTYSFVESVKRTMPYYVIRFAGGLLYLSGMCIMAYNVYRTAIGGKAVDAEIPAVSQTQHH

SEQ ID NO: 66046 - protein, 769 aa, Neisseria meningitidis
MHFENEILVTYVIAKVSSCYNKLVFIGTEDPIMTAISPIQDTQSATLQELREWFDSYCTALPNNDKKLVLAARSLAEAHYPADAATPYGEPLPDHFLGAAQMVHELDLLPDAVAATLLADIGRYVPDWNLLVSERCNSTVAELVKGVDEVQKLTHFARVDSLATPEERAQQAETMRKMLLAMVTDIRVVLIKLAMRTRTLQFLSNAPDSPEKRAVAKETLDIFAPLANRLGVWQLKWQLEDLGFRHQEPEKYREIALLLDEKRTERLEYIENFLNILRTELKKYNIHFEVAGRPKHIYSIYKKMVKKKLSFDGLFDIRAVRILVDTVPECYTTLGIVHSLWQPIPGEFDDYIANPKGNGYKSLHTVIVGPEDKGVEVQIRTFDMHQFNEFGVAAHWRYKEGGKGDSAYEQKIAWLRQLLDWRENMAESGKEDLAAAFKTELFNDTIYVLTPHGKVLSLPTGATPIDFAYALHSSIGDRCRGAKVEGQIVPLSTPLENGQRVEIITAKEGHPSVNWLYEGWVKSNKAIGKIRAYIRQQNADTVREEGRVQLDKQLAKLTPKPNLQELAENLGYKKPEDLYTAVGQGEISNRAIQKACGTLNEPPPVPVSETTIVKQSKIKKGGKNGVLIDGEDGLMTTLAKCCKPAPPDDIVGFVTRDRGISVHRKTCPSFRHLAEHAPEKVLDASWAALQEGQVFAVDIEIRAQDRSGLLRDVSDALARHKLNVTAVQTQSRDLEASMRFTLEVKQVTDLPRVLASLGDVKGVLSVTRL

SEQ ID NO: 66047 - protein, 380 aa, Neisseria meningitidis
MKVFKQQLEQLGAQNQYRSIPDLIHQGRYITRENCKMLNMSSNDYLGLASDENLRRSFLQQYGGNFPSFTSSSSRLLTGNFPIYTDLEELVAQRFQRESALLFNSGYHANLGILPALTTTKSLILADKFVHASMIDGIRLSRCAFFRYRHNDYEHLKNLLEKNVGKFDRTFIVTESVFSMDGDVADLKQLVQLKKQFPNTYLYVDEAHAIGVYGQNGLGIAERDNLIAEIDLLVGTFGKALASVGAYAVCNQVLKECLINQMRPLIFSTALPPFNVAWTYFIFERLPQFSKERSHLEQLSAFLRREVAHRTQIMPSQTCIVPYILGGNEATLAKAEYLQRQGYYCLPIRPPTVPKGTSRIRLSLTADMTMDEVRQFAACL

SEQ ID NO: 66048 - protein, 307 aa, Neisseria meningitidis
MQYSTLAGQTDNSLVSNNFGFLRLPLNFMPYESHADWVITGVPYDMAVSGRSGARFGPEAIRRASVNLAWEHRRFPWTFDVRERLNIIDCGDLVFSFGDSRDFVEKMEAHAGKLLSSGKRCLSLGGDHFITLPLLRAHARYFGKLALIHFDAHTDTYDNGSEYDHGTMFYTAPKEGLIDPSRSVQIGIRTEHSKKLPFTVLSAPKVNEDSVEETVRKIKETVGNMPVYLTFDIDCLDPSFAPGTGTPVCGGLSSDRALKILRGLTDLDIVGMDVVEVAPSYDQSDITALAGATIALEMLYLQGAKKD

SEQ ID NO: 66049 - protein, 602 aa, Neisseria meningitidis
MRTNYCGLISEQYLDQTVTVKGWVHRRRDHGGVIFIDLRDREGIVQVVIDPDTPEAFAAADSARNEYVLSITGRVRNRPEGTTNDKMISGKIEILAKEIEVLNAAATPPFQIDDENISENVRLTNRVIDLRRPVMQRNLRLRYQVAMGVRRYLDAQGFIDIETPMLTRSTPEGARDYLVPSRVHPGEFFALPQSPQLFKQLLMVAGFDRYYQITKCFRDEDLRADRQPEFTQIDLETSFLNEDEIMDITEGMAKQVFKDALGVDLGDFPRMPYSEAMFYYGSDKPDMRINLKFTELTDLMKTEEFKVFRGAADMKGGRVVALRVPNGAKFSRKEIDEYTKFVGIYGAKGLAYIKVNDVGNLSNGEDSGLQSPIVKFLSENALKEIIARTGAQNGDIIFFGADKTKVVNEAIGALRIKVGLEHGKDNGYFTDEWKPLWVVDFPMFEYDEEADRYVAVHHPFTAPKEGHEDLMVSDPANCLARAYDMVLNGWEIGGGSIRIHRADVQEKVFAALKISPEEQQEKFGFLLDNLKFGAPPHGGLAFGLDRLVTLMTGAESIRDVIAFPKTQRAQCLLTNAPNSVDDKQLRELSLRLRQKAAETKEA

SEQ ID NO: 66050 - protein, 87 aa, Neisseria meningitidis; identical to SEQ ID NO: 65405

SEQ ID NO: 66051 - protein, 270 aa, Neisseria meningitidis
MENIGRQRPIGVFDSGIGGLTNVRALMERLPMENIIYFGDTARVPYGTKSKATIENFSMQIVDFLLEHDVKAMVIACNTIAAVAGQKIRQKTGNMPVLDVISAGAKAALATTRNNKIGIIATNTTVNSNAYARAIHRNNPDTLVRTQAAPLLVPLVEEGWLEHEVTRLTVCEYLKPLLADGIDTLVLGCTHFPLLKPLIGREAGNVALVDSAITTAEETARVLAQEGLLNTDNNNPDYRFYVSDIPLKFRTIGERFLGRTMEQIEMVSLG

SEQ ID NO: 66052 - protein, 416 aa, Neisseria meningitidis
MTKLTRRQIIRRTAGTLFALSPIASAVAKTVRAPQFTAVRIWPSHTYTRLTLESTTALKYQHFTLDNPGRLVVDIQNANINTVLHGLSQKVMADDPFIRNIRAGQNTPDTVRLVIDLKQPSYAQVFSLPPVGGFKNRLVVDLYPQGMDADDPMMALLNGSLNKTLRGSPEADLAQNTTPQPGRGRNGRRPVIMIDPGHGGEDPGAVSSGGLQEKHVVLSIARETKKQLEALGYNVFMTRNEDVFIPLGVRVAKGRARRADVFVSIHADAFTSPSARGTGVYMLNTKGATSSAAKFLEQTQNNADAVGGVPTSGNRNVDTALLDMTQTATLRDSRKLGKLVLEELGRLNHLHKGRVDEANFAVLRAPDMPSILVETAFLSNPAEEKLLGSESFRRQCAQSIASGVQRYINTSVLKRG

SEQ ID NO: 66053 - protein, 125 aa, Neisseria meningitidis
MIYGIGTDIVSLKRIVRLSKKFGQAFAERILTPEELLEFPQAGKPVNYLAKRFAAKEAFAKAVGTGIRGAVSFRNIGIGHDALGKPEFFYAPALSKWLEEQGISRVSLSMSDEEDTVLAFAVAEK

SEQ ID NO: 66054 - protein, 410 aa, Neisseria meningitidis
MPSAHYPEMSEKLMAVLMAMLVTLMPFSIDAYLPAIPEMAQSLNADVHRIEQSLSLFMFGTAFGQVVGGSVSDIKGRKPVALTGLAVYCLAVAAIVFASSAEQLLNLRVVQAFGAGMTVVIVGAMVRDYYSGRKAAQMFALIGIILMVVPLVAPMVGALLQGLGGWQAIFVFLAAYSLVLLGLVQYFLPKPAVGGKIGRDVFGLVAGRFKRVLKTRAAMGYLFFQAFSFGSMFAFLTESSFVYQQLYHVTPHQYAWAFALNIITMMFFNRITAWRLKTGVHPQSILLWGIVVQFAANLSQLAAVLFFGLPPFWLLVACVMFSVGTQGLVGANTQACFMSYFKEEGGSANAVLGVFQSLIGAGVGMAATFLHDGSATVMAATMTASTSCGIALLWLCSHRAWKENGQSEYL

SEQ ID NO: 66055 - protein, 384 aa, Neisseria meningitidis
MTETTQTPTLKPKKSVALSGVAAGNTALCTVGRTGNDLSYRGYDILDLAQKCEFEEVAHLLIHGHLPNKFELAAYKTKLKSMRGLPIRVIKVLESLPAHTHPMDVMRTGVSMLGCVHPERESHPESEARDIADKLIASLGSILLYWYQYSHNGKRIEVESDEETIGGHFLQLLHGKRPSESHIKAMHVSLILYAEHEFNASTFTARVIAGTGSDMYSSITGAIGALKGPKHGGANEVAYDIQKRYRNADEAEADIRERIGRKEIVIGFGHPVYTISDPRNVVIKEVARGLSKETGDMRLFDIAERLESVMWEEKKMFPNLDWFSAVSYQKLGVPTAMFTPLFVISRTTGWSAHVLEQRKDGKIIRPSANYTGPEDLAFVEIEER

SEQ ID NO: 66056 - protein, 392 aa, Neisseria meningitidis
MEFVYDVAESAVSPAVIKVIGLGGGGCNAINNMVANNVRGVEFISANTDAQSLAKNHAAKRIQLGTNLTRGLGAGANPDIGRAAAQEDREAIEEAIRGANMLFITTGMGGGTGTGSAPVVAEIAKSLGILTVAVVTRPFAYEGKRVHVAQAGLEQLKEHVDSLIIIPNDKLMTALGEDVTMREAFRAADNVLRDAVAGISEVVTCPSEIINLDFADVKTVMSNRGIAMMGSGYAQGIDRARMATDQAISSPLLDDVTLDGARGVLVNITTAPGCLKMSELSEVMKIVNQSAHPDLECKFGAAEDETMSEDAIRITIIATGLKEKGAVDFVPAREVEAVAPSKQEQSHNVEGMIRTNRGIRTMNLTAADFDNQSVLDDFEIPAILRRQHNSDK

SEQ ID NO: 66057 - protein, 414 aa, Neisseria meningitidis
MEQQQRYISVLDIGTSKVLALIGEVQDDDKINIVGLGQAPSRGLRAGMVTNIDATVQAIRQAVNDAELMADTKITHVTTGIAGNHIRSLNSQGVVKIKDGEVTQADIDRAIETAKAINIPPDQKILDAVVQDYIIDTQLGVREPIGMSGVRLDTRVHIITGASTAVQNVQKCIERCGLKSDQIMLQPLASGQAVLTEDEKDLGVCVIDIGGGTTDIAVYMNGAIRHTSVIPAGGNLITKDLSKSLRTPLDAAEYIKIHYGVASCDTEGLGEMIEVPGVGDRTSRQVSSKVLAAIISARIQEIFGVVLGELQKSGFPKEVLNAGIVLTGGVSMMTGIVEFAEKIFDLPVRTGAPQEMGGLSDRVRTPRFSTAIGLLHAACKLEGNLPQLENGAVQEREGGGGLLARLKRWIENSF

SEQ ID NO: 66058 - protein, 242 aa, Neisseria meningitidis
MWDNAEAMERLTRWLLVMMAMLLAASGLVWFYNSNHLPVKQVSLKGNLVYSDKKALGSLAKEYIHGNILRTDINGAQEAYRRYPWIASVMVRRRFPDTVEVVLTERKPVARWGDHALVDGEGNVFEARLDRPGMPVFRGAEGTSAEMLRRYDEFSTVLAKQGLGIKEMTYTARSAWIVVLDNGITVRLGRENEMKRLRLFTEAWQHLLRKNKNRLSYVDMRYKDGFSVRYAPDGLPEKESEE

SEQ ID NO: 66059 - protein, 304 aa, Neisseria meningitidis
MQNFGKVAVLMGGFSSEREISLDSGTAILNALKSKGIDAYAFDPKETPLSELKAQGFQTAFNILHGTYGEDGAVQGALELLGIPYTGSGVAASAIGMDKYRCKLIWQALGLPVPEFAVLHDDTDFDAVEEKLGLPMFVKPAAEGSSVGVVKVKGKGRLKSVYEELKHFQGEIIAERFIGGGEYSCPVLNGKGLPGIHIIPATEFYDYEAKYNRNDTIYQCPSEDLTEAEESLMRELAVRGAQAIGAEGCVRVDFLKDTDGKLYLLEINTLPGMTGHSLVPKSAAVMGVGFADLCIEILKTAHVG

SEQ ID NO: 66060 - protein, 506 aa, Neisseria meningitidis
MFFISIRYIFVRKLWRANGQPFKITPLRIENPPERNIMMKNRVTNIHFVGIGGVGMSGIAEVLHNLGFKVSGSDQARNAATEHLGSLGIQVYPGHTAEHVNGADVVVTSTAVKKENPEVVAALEQQIPVIPRALMLAELMRFRDGIAIAGTHGKTTTTSLTASILGAAGLDPTFVIGGKLNAAGTNARLGKGEYIVAEADESDASFLHLTPIMSVVTNIDEDHMDTYGHSVEKLHQAFIDFIHRMPFYGKAFLCIDSEHVRAILPKVSKPYATYGLDDTADIYATDIENVGAQMKFTVHVQMKGHEQGSFEVVLNMPGRHNVLNALAAIGVALEVGASVEAIQKGLLGFEGVGRRFQKYGDIKLPNGGTALLVDDYGHHPVEMAATLSAARGAYPEKRLVLAFQPHRYTRTRDLFEDFTKVLNTVDALVLTEVYAAGEEPIAAADSRALARAIRVLGKLEPIYCENVADLPEMLLNVLQDGDIVLNMGAGSINRVPAALLELSKQI

SEQ ID NO: 66061 - protein, 355 aa, Neisseria meningitidis
MGGKTFMLMAGGTGGHIFPALAVADSLRARGHHVIWLGSKDSMEERIVPQYDILLETLAIKGVRGNGIKRKLMLPFTLYQTVREAQQIIRKHRVECVIGFGGFVTFPGGLAAKLLGVPIVIHEQNAVAGLSNRHLSRWAKRVLYAFPKAFSHEGGLVGNPVRADISNLPVPAERFQGREGRLKILVVGGSLGADVLNKTVPQALALLPDNARPQMYHQSGRGKLGSLQADYDALGVQAECVEFITDMVSAYRDADLVICRAGALTIAELTAAGLGALLVPYPHAVDDHQTANARFMVQAEAGLLLPQTQLTAEKLAEILGGLNREKCLKWAENARTLALPHSADDVAEAAIACAA

SEQ ID NO: 66062 - protein, 435 aa, Neisseria meningitidis
MVFLKISEVLVKVGDGVHTLLLDRPIVRDGRKFDAPLLWMVVLMTAFSLLMIYSASVYLASKEGGDQFFYLTRQAGFVVAGLIASGLLWFLCRMRTWRRLVPWIFALSGLLLVVVLIAGREINGATRWIPLGPLNFQPTELFKLAVILYLASLFTRREEVLRSMESLGWQSIWRGTANLIMSATNPQARRETLEMYGRFRAIILPIMLVAFGLVLIMVQPDFGSFVVITVIAVGMLFLAGLPWKYFFVLVGSVLGGMVLMITAAPYRVQRVVAFLDPWKDPQGAGYQLTHSLMAIGRGEWFGMGLGASLSKRGFLPEAHTDFIFAIIAEEFGFFGMCVLIFCYGWLVVRAFSIGKQSRDLGLTFNAYIASGIGIWIGIQSFFNIGVNIGALPTKGLTLPLMSYGGSSVFFMLISMMLLLRIDYENRRKMRGYRVE

SEQ ID NO: 66063 - protein, 445 aa, Neisseria meningitidis
MTFQNKKILVAGLGGTGISMIAYLRKNGAEVAAYDAELKPERVSQIGKMFDGLVFYTGRLKDALSNGFDILALSPGISERQPDIEAFKRNGGRVLGDIELLADIVNRRGDKVIAITGSNGKTTVTSLVGYLCIKCGLDTVIAGNIGAPVLEAELQREGKKADVWVLELSSFQLENTESLRPTAATVLNISEDHLDRYDDLLDYAHTKAKIFRGDGVQVLNADDAFCRAMKRAGREVKWFSLEYEADFWLERETGRLKQGNEDLIATQDIPLQGLHNATNVMAAVALCEAVGLPREALLEHVKTFQGLPHRVEKIGEKNGVVFIDDSKGTNVGATAAAIAGLQNPLFVILGGMGKGQDFTPLRDALAGKAKGVFLIGVDAPQIRRDLDGCDLNMTDCATLEEAVQKAYAQAEAGDIVLLSPACASFDMFKGYAHRSEVFIGAFKAL

SEQ ID NO: 66064 - protein, 360 aa, Neisseria meningitidis
MFLWLAHFSNWLTGLNIFQYTTFRAVMAALTALAFSLMFGPWTIRRLTALKCGQAVRTDGPQTHLVKNGTPTMGGSLILTAITVSTLLWGNWANPYIWILLGVLLATGALGFYDDWRKVVYKDPNGVSAKFKMVWQSSVAIIAGLALFYLAANSANNILIVPFFKQIALPLGVVGFLVLSYLTIVGTSNAVNLTDGLDGLATFPVVLVAAGLAIFAYASGHSQFAQYLQLPYVAGANEVVIFCTAMCGACLGFLWFNAYPAQVFMGDVGALALGAALGTVAVIVRQEFVLVIMGGLFVVEAVSVMLQVGWYKKTKKRIFLMAPIHHHYEQKGWKETQVVVRFWIITIVLVLIGLSTLKIR

SEQ ID NO: 66065 - protein, 452 aa, Neisseria meningitidis
MKPLDLNFICQALKLPMPSESKPVSRIVTDSRDIRAGDVFFALAGGRFDAHDFVEDVLAAGAAAVVVSREDCVAMDGALKVDDTLTALQMLAKAWRENVNPFVFGITGSGGKTTVKEMLAAVLRRRFGDNAVLATAGNFNNHIGLPLTLLKLNEKHRYAVIEMGMNHFGELAVLTQIAKPDAALVNNAMRAHVGCGFDGVGDIAKAKSEIYQGLCSDGMALIPQEDANMAVFKTATLNLNTRTFGIDSGDVHAENIVLKPLSCEFDLVCGNECAAVVLPVPGRHNVHNAAAAAALSLAAGLSLNDVAEGLKGFSNIKGRLNVKSGIKGATLIDDTYNANPDSMKAAVDVLARMPAPRIFVMGDMGELGEDEAAAMHAEVGAYARDQGIEAAYFVGDNSVEAAEKFGADGLWFAAKDPLIQVLRHDLPERATVLVKGSRFMQMEEVVEALEDK

SEQ ID NO: 66066 - protein, 492 aa, Neisseria meningitidis
MFSKLTPLAETGIPTLSCANAAGRLLHSDSRQIKQGDIFVACPGEYADGRSYIPAAVANGAAFVFWDDDGKFAWNPEWKVPNQGIKDLKHRAGILAAQVYGNVSDGLKFWGVTGTNGKTSITQWLAQAADLLGEKTAIVGTVGNGFWGALEETTHTTPAPVDVQTLLYRFRQQGATVAAMEVSSHGLDQSRVNGVSFRSAIFTNLTRDHLDYHGTMEAYGAIKSRLFYWHGLKHAVINVDDEYGAELAGRLKKDCPDLAVYSYGFSEQADIRIIDFTASSDGIAAVFQTPWGEGKCRTRLLGRFNAQNLAACIALLCANGYPLDNVLDVLAKIRPASGRMDCIMNSGKPLVVVDYAHTPDALEKALATLQEIKPQGAALWCVFGCGGNRDRGKRPLMGAAAVQGADKVVVTSDNPRLENPHDIINDILPAVPAPECVEADRAAAIRYAVEQAAANDIILIAGKGHENYQDVQGVKHRFSDLEIVGQALLTRK

SEQ ID NO: 66067 - protein, 581 aa, Neisseria meningitidis
MLIKSEYKPRMLPKEEQVKKPMTSNGRISFVLMAIAVLFAGLIARGLYLQTVTYNFLKEQGDNRIVRTQTLPATRGTVSDRNGAVLALSAPTESLFAVPKEMKEMPSAAQLERLSELVDVPVDVLRNKLEQKGKSFIWIKRQLDPKVAEEVKALGLENFVFEKELKRHYPMGNLFAHVIGFTDIDGKGQEGLELSLEDSLHGEDGAEVVLRDRQGNIVDSLDSPRNKAPKNGKDIILSLDQRIQTLAYEELNKAVEYHQAKAGTVVVLDARTGEILALANTPAYDPNRPGRADSEQRRNRAVTDMIEPGSAIKPFVIAKALDAGKTDLNERLNTQPYKIGPSPVRDTHVYPSLDVRGIMQKSSNVGTSKLSARFGAEEMYDFYHELGIGVRMHSGFPGETAGLLRNWRRWRPIEQATMSFGYGLQLSLLQLARAYTALTHDGVLLPVSFEKQAVAPQGKRIFKESTAREVRNLMVSVTEPGGTGTAGAVDGFDVGAKTGTARKFVNGRYADNKHIATFIGFAPAKNPRVIVAVTIDEPTAHGYYGGVVAGPPFKKIMGGSLNILGISPTKPLTAAAVKTPS

SEQ ID NO: 66068 - protein, 328 aa, Neisseria meningitidis
MSGAESYRHITVLLNEAVDALAVREDGVYVDGTFGRGGHSRLILSRLGDAGRLIVFDKDPQAIAVAEELARSDKRVGVVHGGFASFQTALDGLGIGKVDGALFDLGISSPQIDDGSRGFSFRFDAPLDMRMDTTRGMSAAEWIAVASEQDLHEVIKNYGEERFSRQIARAIVAQRAESPIDTTRKLAQIVAQNVRTRERGQDPATRTFQAIRIFINRELEEVGAVLPQVMCRLKEGGRLAVIAFHSLEDRIVKQFVKKYSQHAPLPRWAAVREADLPEPPLKIAGRALKPGEAEIAANPRARSAVLRVAERTAGPIPEQSQRKTSEWQ

SEQ ID NO: 66069 - protein, 151 aa, Neisseria meningitidis
MFGGAHELSIDSKGRLAVPAKFRDILSRLYTPAVVVTLESKHKLLMYPVAEWEKVAAQLLNLKVADNPVLRRFQNLLLHNAEILEWDSAGRVLVPAGLRKRVDFDREVVLVGRANRLELWGREQWEAEMVQALDDDPDELAFQLGQTDLQL

SEQ ID NO: 66070 - protein, 68 aa, Neisseria meningitidis
MDGDCNIAELSESLSMPATAVSNHLSRLRVEGLVDFTRYHRIIEYRLISEDAAAILRTIRDLENKRAV

SEQ ID NO: 66071 - protein, 350 aa, Neisseria meningitidis
MDLEMKKINGIGFFEKNLTFWVLICMAIGIFIGKYFPSIPDRLGKFEFYNVSIPTTILLWIMIYPMMLKIDFKSIKDIGKNPKGLFITWFVNWIIKPLTMYLIASLFFFVIYKGFINKELASEYLAGAVLLGAAPCTAMVFVWSKLTRGDSAYTLVQVASNDLIILIAYIPIVSFLLKIGNINIPWGTLLLSIVLFIVVPLILSMATRSIIIKNKGEDYLNKTFIPAFDKYTMMGLLLTLIIIFSFQGQKILDQPLNIILIAIPLIIQTLFIFAITFFMAYLAKLPYSIAAPCGMIGASNFFELSVAVSISLFGLLSGATLTTVVGVLVEVPVMLALVRFANFMENKFNH

SEQ ID NO: 66072 - protein, 558 aa, Neisseria meningitidis
MSQQYVYSMLRVSKVVPPQKTIIKDISLSFFPGAKIGLLGLNGAGKSTVLRIMAGVDKEFEGEAVPMGGIKIGYLPQEPELDPEKTVREEVESGLGEVAAAQKRLEEVYAEYANPDADFDALAEEQGRLEAIIAAGSSTGGGAEHELEIAADALRLPEWDAKIDNLSGGEKRRVALCKLLLSKPDMLLLDEPTNHLDAESVEWLEQFLVRFPGTVVAVTHDRYFLDNAAEWILELDRGHGIPWKGNYSSWLEQKEKRLENEAKSEAARVKAMKQELEWVRQNAKGRQAKSKARLARFEEMSNYEYQKRNETQEIFIPVAERLGNEVIEFVNVSKSFGDKVLIDDLSFKVPAGAIVGIIGPNGAGKSTLFKMIAGKEQPDSGEVKIGQTVKMSLIDQSREGLQNDKTVFDNIAEGRDILQVGQFEIPARQYLGRFNFKGSDQSKITGQLSGGERGRLHLAKTLLGGGNVLLLDEPSNDLDVETLRALEDALLEFAGSVMVISHDRWFLDRIATHILACEGDSKWVFFDGNYQEYEADKKRRLGEEGTKPKRIKYKPVTR

SEQ ID NO: 66073 - protein, 318 aa, Neisseria meningitidis
MKEFDFIKRYLQTGTDKDVVLGIGDDAAIVRPREGFDLCFSADMLLKDRHFFADVKPEDLAWKVLAVNISDMAAMGAIPRWVLLSAALPELDEVWLERFCGSFFGLAKKFGVTLIGGDTTKGDMAFNVTIIGELPKGRALRRDAAVAGDDIWVSGRVGMAAAALNCRLKRCVLPDDVFAECEQKLLRPEPRVGLGLALLPFARAAQDVSDGLAQDLGHILTASGVGAEIWADSLPSLSVLKDILPRAQWLSYTLAGGDDYELVFTAPESCRSRVLDAAERCGVPVTRIGKINGGCRLKVLDADGRELELHSLGFDHFG

SEQ ID NO: 66074 - protein, 524 aa, Neisseria meningitidis
MAQIQMSANVKTINAVFAAMLVGTVGYFIYWGLGYTHYNYAALFIIATMFGVFMAFNIGGNDVANSFGTSVGAGTLTIPQALLIAAVFEVSGAVIAGGEVTNTIRKGIVDLKGVDFEPIQFVFIMMSALLAAALWLLFASKKGLPVSTTHSIIGGIVGSAVCMAVMNDAASGDLIRWGKLGGIGVSWVLSPVLGGAVSYFLFSRVKKNVLDYNAWAEGTLKGIKQEKKAYKERHRLFFEGLSEAEKVEYATKMAHDAQIYDEPEFDPQELQSEYYRGLYAFDNRKNNVDSYKALHSWIPFIASFGAMMISAMLIFKGLKNLHLGMSNVNSFLTIFMIGAAVWMGTFVFAKSLKRKDLGKSTFQMFSWMQVFTACGFAFSHGANDIANAIGPFAAIMDVLRTNSVAAQNVVPPIAMLTFGIALIVGLWFVGKEVIKTVGTSLAEMHPASGFTAELSAASVVMGASLMGLPVSSTHILVGAVLGIGLVNRNANWKLMKPIGLAWVITLPAAAVLSVVCYLVLQAVF

SEQ ID NO: 66075 - protein, 472 aa, Neisseria meningitidis
MSIKNAVKLIEESEARFVDLRFTDTKGKQHHFTVPARIVLEDPEEWFENGQAFDGSSIGGWKGIQASDMQLRPDASTAFVDPFYDDATVVLTCDVIDPADGQGYDRDPRSIARRAEAYLKSSGIGDTAYFGPEPEFFVFDGVEFETDMHKTRYEITSESGAWASGLHMDGQNTGHRPAVKGGYAPVAPIDAGQDLRSAMVNILEELGIEVEVHHSEVGTGSQMEIGTRFATLVKRADQTQDMKYVIQNVAHNFGKTATFMPKPIMGDNGSGMHVHQSIWKDGQNLFAGDGYAGLSDTALYYIGGIIKHAKALNAITNPSTNSYKRLVPHFEAPTKLAYSAKNRSASIRIPSVNSSKARRIEARFPDPTANPYLAFAALLMAGLDGIQNKIHPGDPADKNLYDLPPEEDTLVPTVCASLEEALAALKADHEFLLRGGVFSKDWIDSYIAFKEEDVRRIRMAPHPLEFEMYYSL

SEQ ID NO: 66076 - protein, 271 aa, Neisseria meningitidis
MTMHALPRYAVFGNPVAHSKSPQIHQQFALQEGVDIEYERICADIGGFAQAVSTFFETGGCGANVTVPFKQEAFHLADEHSERALAAGAVNTLIFLKNGKLRGDNTDGIGLANDITQVKNIAIEGKTILLLGAGGAVRGVIPVLKEHRPARIVIANRTRAKAEELAQLFGIEAVPMADVNGGFDIIINGTSGGLNGQIPDIPPDIFQNCALAYDMVYGCAAKPFLDFARQSGAKKTADGLGMLVGQAAASYALWRGFTPDIRPVIEYMKAL

SEQ ID NO: 66077 - protein, 233 aa, Neisseria meningitidis
MFRIIKWLIALPVGIFIFFNAYVYGNIITYRAVAPHRTAFMSMRMKQFEQEGRDVALDYRWMPYKRISTNLKKALIASEDARFAGHGGFDWGGIQNAIRRNRNSGKVKAGGSTISQQLAKNLFLNESRSYIRKGEEAAITAMMEAVTDKDRIFELYLNSIEWHYGVFGAEAASRYFYQIPAAKLTKQQAAKLTARVPAPLYYADHPKSKRLRNKTNIVLRRMGSAELPESDTD

SEQ ID NO: 66078 - protein, 351 aa, Neisseria meningitidis
MTILSDVKALGQQIWLDNLSRSLVQSGELAQMLKQGVCGVTSNPAIFQKAFAGDALYADEVAALKQQDLTPKQRYETMAVADVRAACGVCLAEHESTGGKTGFVSLEVSPELSKDAQGTVEEARRLYAAIGCKNAMIKVPATDAGIDALETLVSDGISVNLTLLFSRAQTLKAYAAYARGIAKRLAAGQSVAHIHVVASFFISRVDSALDTTLPDRLKGKIAIALAKAAYQDWEQYFTAPEFAALEAQGANRVQLLWASTGVKNPAYPDTLYVDSLIGAHTVNTVPDATLKAFIDHGTAKATLTEGADEAQAQLAEIAALGIDVETLAARLQEDGLKQFEEAFEKLLAPLV

SEQ ID NO: 66079 - protein, 295 aa, Neisseria meningitidis
MYTGRFAPSPTGLLHIGSLLTAAASYADARSNGGKWLVRMEDLDPPREMPGAANHILHTLEAFGFEWDGEVAYQSRRYALYEETLCRLQTAGLVYPCHCSRKDWQTGARRGADGFVYNGRCRNPQQRPAPQGKQPAWRIRVPDRVIGFSDGIVGGYAQNLAGDIGDFVLLRADGYWAYQLAVVADDAEQGVTHIVRGQDLLVSTPRQIYLQQCLDVPTPQYAHLPLLTNAQGQKWSKQTLAPALDLNRREQLLRQVFRYLNLPEAPEADRPAELLDWAVAHWDMDKVPKHAITTP

SEQ ID NO: 66080 - protein, 336 aa, Neisseria meningitidis
MNDNTHTLPPRRLSVAPMLDWTDRHYRYMARQITRNTWLYSEMVNAGAIVYGDKDRFLMFNEGEQPVALQLGGSDPSDLAKAAKAAEEYGYNEVNLNCGCPSPRVQKGAFGACLMNEVGLVADCLNAMQDAVGIPVTVKHRIGVDRQTEYQTVADFVGTLRDKTACKTFIVHARNAWLDGLSPKENRDVPPLKYDYVYRLKQEFPGLEIIINGGITTNEAIAGHLQHVDGVMVGREAYHNPMVMREWDRLFYGDTANPIGYADLVQRLYTYSQAQIQAGRGTILRHIVRHSLGLMHGLKGARTWRRMLSDATLLKDNDGSLILEAWKEVERANTRE

SEQ ID NO: 66081 - protein, 176 aa, Neisseria meningitidis
MKFVSDLLSVILFFATYTVTKNMIAATAVALVAGVVQAAFLYWKYKKLDTMQWVGLVLIVVFGGATIVLGDSRFIMWKPSVLFWLGALFLWGSHLAGKNGLKASIGREIQLPDAVWAKLTYMWVGFLIFMGIANWFVFTRFESQWVNYKMFGSTALMLVFFIIQGIYLSTCLKKED

SEQ ID NO: 66082 - protein, 138 aa, Neisseria meningitidis
MRLLHTMLRVGNLEKSLDFYQNVLGMKLLRRKDYPEGRFTLAFVGYGDETDSTVLELTHNWDTERYDLGNAYGHIAVEVDDAYEACERVKRQGGNVVREAGPMKHGTTVIAFVEDPDGYKIEFIQKKSGDDSVAYQTA

SEQ ID NO: 66083 - protein, 332 aa, Neisseria meningitidis
MSRPVPAVFGSVFHSQMPVLAYREGKWQPTEWQSSQDLSLVPGAHALHYGSECFEGLKAFRQADGKIVLFRPTANIARMRQSADILHLPRPETQAYLDALVELVKRAADEIPDAPAALYLRPTLIGTDPVIGKAGSPSETALLYILASPVGDYFKVGSPVKILVETEHIRCAPHMGRVKCGGNYASAMHWVLKAKAEYGANQVLFCPNGDVQETGASNFILINGDEIITKPLTDEFLHGVTRDSVLTVAKDLGYTVSERNFTVDELKAAVENGAEAILTGTAAVISPVTSFVIGGKEIEVKSQERGYAIRKAITDIQYGLAEDKYGWLVEVC

SEQ ID NO: 66084 - protein, 261 aa, Neisseria meningitidis
MGFLQGKKILITGMISERSIAYGIAKACREQGAELAFTYVVDKLEERVRKMAAELGSELVFRCDVASDDEINQVFADLGKHWDGLDGLVHSIGFAPKEALSGDFLDSISREAFNTAHEISAYSLPALAKAARPMMRGRNSAIVALSYLGAVRAIPNYNVMGMAKASLEAGIRFTAACLGKEGIRCNGISAGPIKTLAASGIADFGKLLGHVAAHNPLRRNVTIEEVGNTAAFLLSDLSSGITGEITYVDGGYSINALSTEG

SEQ ID NO: 66085 - protein, 273 aa, Neisseria meningitidis
MSLQNIIETAFENRADITPTTVTPEVKEAVLETIRQLDSGKLRVAERLGVGEWKVNEWAKKAVLLSFRIQDNEVLNDGVNKYFDKVPTKFADWSEDEFKNAGFRAVPGAVARRGSFVAKNVVLMPSYVNIGAYVDEGAMVDTWATVGSCAQIGKNVHLSGGVGIGGVLEPLQASPTIIEDNCFIGARSEIVEGVIVEEGSVISMGVFIGQSTKIFDRTTGEIYQGRVPAGSVVVSGSMPSKDGSHSLYCAVIVKRVDAQTRAKTSVNELLRGI

SEQ ID NO: 66086 - protein, 324 aa, Neisseria meningitidis
MLENLPYFQRHLPEDLAKVNEVINRAVQSDVALISQIGTYIISAGGKRLRPIMTILAGKAVGYDDEKLYSLAAMVEFIHTSTLLHDDVVDESDLRRGRATANNLFGNAAAVLVGDFLYTRAFQLMVASGSMRVLEVMADATNIIAEGEVMQLMNIGNTDITEEQYIQVIQYKTAKLFEAAAQVGAILGKASPEHERALKDYGMYVGTAFQIIDDVLDYSGETEETGKNVGDDLAEGKPTLPLIYLMRQGSEQVANDVRTALENADRSYFEKIHDYVVRSDALAYSIGEARKAVDCAVTALDALPDSEVKDAMIQLAKESLVRVS

SEQ ID NO: 66087 - protein, 102 aa, Neisseria meningitidis
MYAVVKTGGKQYKVSVGEKLKVEQIPAELDSQIELTEVLMIADGESVKVGAPFIEGAKVTAKVVAHGRGEKVRIFKMRRRKHYQKRQGHRQNFTQIEIVAIA

SEQ ID NO: 66088 - protein, 90 aa, Neisseria meningitidis
MASKKAGGSTRNGRDSEAKRLGVKAYGNELIPAGSIIVRQRGTKFHAGDNVGMGKDHTLFAKVDGYVEFKTKGALNRKTVSIRPYTGSEE

SEQ ID NO: 66089 - protein, 394 aa, Neisseria meningitidis
MSLHSDILVVGAGPAGLSFAAELAGSGLKVTLIERSPLTVLQNPPYDGREIALTHFSREIMQRLGMWDKIPENEIYPLRDAKVLNGRSDYQLHFPQPTEARGEPADCLGYLISNHNIRRAAYEVVSQLDNITILTDTAVKEVKTSDNEAQVILENGKILTARLLLAADSRFSQTRRQLGISSDMHDYSRTMFVCRMKHTLSNQHTAYECFHYGRTIALLPLEEHLTNTVITVDTDKINSVQNLSPEELAASVKEQLKGRLGDMELVSSIHHYPLVGMIAKRFYGKRSALIGDAAVGMHPVTAHGFNLGLSSADILAKLILEAEQRGQDIGAASLLEKYSSKHMLHAQPLYHGTNMMLKLFTNETAPAKLLRGLVLRAGNNFPPLKKLITKQLTG

SEQ ID NO: 66090 - protein, 51 aa, Neisseria meningitidis
MRDKIKLESSAGTGHFYTTTKNKRTMPGKLEIKKFDPVARKHVVYKETKLK

SEQ ID NO: 66091 - protein, 77 aa, Neisseria meningitidis; identical to SEQ ID NO: 65406

SEQ ID NO: 66092 - protein, 228 aa, Neisseria meningitidis
MYAFTAAQQQKALFWLVLFHILIIAASNYLVQFPFQISGIHTTWGAFSFPFIFLATDLTVRIFGSHLARRIIFWVMFPALLLSYVFSVLFHNGSWTGLGALSEFNTFVGRIALASFAAYALGQILDIFVFNKLRRLKAWWVAPTASTVIGNALDTLVFFAVAFYASSDGFMAANWQGIAFVDYLFKLTVCGLFFLPAYGVILNLLTKKLTTLQTKQAQDRPAPSLQNP

SEQ ID NO: 66093 - protein, 619 aa, Neisseria meningitidis
MFRAQLGSNTRSTKIGDDADFSFSDKPKPGTSHYFSSGKTDQNSSEYGYDEINIQGKNYNSGILAVDNMPVVKKYITDTYGDNLKDAVKKQLQDLYKTRPEAWEENKKRTEEAYIEQLGPKFSILKQKNPDLINKLVEDSVLTPHSNTSQTSLNNIFNKKLHVKIENKSHVAGQVLELTKMTLKDSLWEPRRHSDIHMLETSDNARIRLNTKDEKLTVHKAYQGGADFLFGYDVRESDKPALTFEEKVSGQSGVVLERRPENLKTLDGRKLIAAEKADSNSFAFKQNYRQGLYELLLKQCEGGFCLGVQRLAIPEAEAVLYAQQAYAANTLFGLRAADRGDDVYAADPSRQKLWLRFIGGRSHQNIRGGAAADGRRKGVQIGGEVFVRQNEGSRLAIGVMGGRAGQHASVNGKGGAAGSYLHGYGGGVYAAWHQLRDKQTGAYLDGWLQYQRFKHRINDENRAERYKTKGWTASVEGGYNALVAEGVVGKGNNVRFYLQPQAQFTYLGVNGGFTDSEGTAVGLLGSGQWQSRAGIRAKTRFALRNGVNLQPFAAFNVLHRSKSFGVEMDGEKQTLAGRTALEGRFGIEAGWKGHMSARIGYGKRTDGDKEAALSLKWLF

SEQ ID NO: 66094 - protein, 162 aa, Neisseria meningitidis
MLKITLIAACAENLCIGAGNAMPWHIPEDFAFFKAYTLGKPVIMGRKTWESLPVKPLPGRRNIVISRQADYCAAGAETAASLEAALALCAGAEEAVIMGGAQIYGQAMPLATDLRITEVDLSVEGDAFFPAIDRTHWKEAERTERRVSSKGTSYAFVHYLRY

SEQ ID NO: 66095 - protein, 268 aa, Neisseria meningitidis
MPTVFIFLTAVYAGLGAFAWHCQQQGLGRDYPWKTELPVLGAALTVHGAALLMPVIQDKIIIMGFGYSGSLIVWMMLFIYFAGSFFYSLRGVQLLLYPCAALMLLSGLVFPGKFSGYEITDLPFMLHIGTSLLAYGLFGIATLLSVLTLLLNRSLHRRNFSKLAGFLPSLLSLEKLMFQAMWAGFILLTYSVVSGTFFAEAVFGKPMTFTHKTVFGILSWLIYGGLLLKHSMTAWRGKKAAVWTIIGFVSLMIAYMGSKFVLEIILNR

SEQ ID NO: 66096 - protein, 456 aa, Neisseria meningitidis
MLDNLTGRFSNVLKNIRGQAKLTEDNIKEALREVRLALLEADVALPVVKEFINNVKEKALGQEVAGSLTPDQAFIGVVNKALTELMGRENKTLDLSVAPPAVVLMAGLQGAGKTTTVGKLARLLKNDQKKKVLVVSADVYRPAAIEQLRLLAEQVGVDFFPSDTNQKPVEIATAAVDYAKKHFYDVLMVDTAGRLAIDEEMMNEIKALHAAVNPVETLFVIDAMLGQDAVNTAQAFNEALPLTGVVLTKMDGDSRGGAALSVRHVTGKPIKFIGVGEKINGLEPFHPDRLASRILGMGDVLTLIEDVQKGIDEAAAAKMAKKLQKGKGFDLNDFKEQIQQMRNMGGLENLMSKMPGELGQISKQIPEGTAEKAMGKVEAIINSMTPKERANPALLKASRKRRIAMGAGTTVQEVNKLLKQFEQMQQMMKMFSGNGLGKLMRLAKGMKGMKGMFPGL

SEQ ID NO: 66097 - protein, 622 aa, Neisseria meningitidis
MQAVRYRPEIDGLRAVAVLSVMIFHLNNRWLPGGFLGVDIFFVISGFLITGIILSEIQNGSFSFRDFYTRRIKRIYPAFIAAVSLASVIASQIFLYEDFNQMRKTVELSAVFLSNIYLGFQQGYFDLSADENPVLHIWSLAVEEQYYLLYPLLLIFCCKKTKSLRVLRNISIILFLILTATSFLPSGFYTDILNQPNTYYLSTLRFPELLAGSLLAVYGQTQNGRRQTANGKRQLLSSLCFGALLACLFVIDKHNPFIPGMTLLLPCLLTALLIRSMQYGTLPTRILSASPIVFVGKISYSLYLYHWIFIAFAHYITGDKQLGLPAVSAVAALTAGFSLLSYYLIEQPLRKRKMTFKKAFFCLYLAPSLILVGYNLYARGILKQEHLRPLPGAPLAAENHFPETVLTLGDSHAGHLRGFLDYVGSREGWKAKILSLDSECLVWVDEKLADNPLCRKYRDEVEKAEAVFIAQFYDLRMGGQPVPRFEAQSFLIPGFPARFRETVKRIAAVKPVYVFANNTSISRSPLREEKLKRFAANQYLRPIQAMGDIGKSNQAVFDLIKDIPNVHWVDAQKYLPKNTVEIYGRYLYGDQDHLTYFGSYYMGREFHKHERLLKSSRDGALQ

SEQ ID NO: 66098 - protein, 456 aa, Neisseria meningitidis
MINPIASLSPLDGRYAQSVEALRPIFSEYGLMKARVKVELNWLKALAAEPKIAEVPPFSAETLAEIDTVIENFSLEDAAAVKAIEATTNHDVKAIEYWLKKRFAEVPEVAAVSEFIHFACTSEDINNLSHALMLQEAREAVLLPKLAEIIEKLTAMAHDLAAVPMMSRTHGQPATPTTLGKETANVVYRLQRQFKSLQAQEFLGKINGAVGNYNAHMVAYPDVDWETHCRNFVEISLGLTFNPYTIQIEPHDYMAEFFQTLSRINTILIDFNRDVWGYISLGYFKQKVKAGEVGSSTMPHKVNPIDFENSEGNLGMANAVLGFLAEKLPISRWQRDLTDSTVLRNMGVGVGYAVLGFAAHLRGLNKLEPNPAALAADLDATWELLAEPIQTVMRRYGVANPYEKLKDLTRGKGGITPEVLKGFIGLLEIPAEAKAKLLELTPALYVGKAEALAKRI

SEQ ID NO: 66099 - protein, 210 aa, Neisseria meningitidis
MENTNRVPEQARYDAERRQADEALAGVFPAVSIFGSARTPQNHADYAFSCRLARRLSDSGIAVISGGGPGIMEAANKGAFAGKSVSVGLNIVLPHEQKPNPYQDIALRFSRFAERKAVFFRYSQAYVVMPGGFGTLDELFEILTLVQTGKVPPRPIVLVGKAFWSGLAEWINAQLLARGLISEGAASLFAISDDEDEIVAYLSEHGLQTA

SEQ ID NO: 66100 - protein, 512 aa, Neisseria meningitidis
MNMLGALVKVGSLTMVSRVLGFVRDTVIARAFGAGMATDAFFVAFKLPNLLRRVFAEGAFAQAFVPILAEYKETRSKEATEAFIRHVAGMLSFVLVIVTALGILAAPWVIYVSAPGFAKDADKFQLSIDLLRITFPYILLISLSSFVGSVLNSYHKFSIPAFTPTFLNVSFIVFALFFVPYFDPPVTALAWAVFVGGILQLGFQLPWLAKLGFLKLPKLSFKDAAVNRVMKQMAPAILGVSVAQISLVINTIFASYLQSGSVSWMYYADRMMELPGGVLGAALGTILLPTLSKHSANQDTEQFSALLDWGLRLCMLLTLPAAVGMAVLSFPLVATLFMYREFTLFDAQMTQHALIAYSFGLIGLIMIKVLAPGFYARQNIKTPVKIAIFTLICTQLMNLAFIGPLKHVGLSLAIGLGACINAGLLFYLLRRHGIYQPGKGWAAFLAKMLLSLAVMGGGLYAAQIWLPFDWAHAGGMQKAARLFILIAVGGGLYFASLAALGFRPRHFKRVES

SEQ ID NO: 66101 - protein, 260 aa, Neisseria meningitidis
MTDILNKILTAKAQEVAAQKAAVNAEHIRALAAEAAPVRSFIGSIRGKHRLNLPAVIAEIKKASPSKGLIRPDFRPPEIARAYENAGAACLSVLTDEPYFQGSPEYLKQAREAVSLPVLRKDFIIDEYQVYQARAWGADAVLLIAAALEREQLERFEAVAHELGMTVLLELHDESELEKCRNLTTPLWGVNNRNLRTFEVSLDQTLSLLPALEGKTVVTESGITGKADVEFMQSRGVHTFLIGETFMRADDIEAEVGKLF

SEQ ID NO: 66102 - protein, 766 aa, Neisseria meningitidis
MHRPTAKQILHEVFGYPEFRGRQESIVNALAGGRSLMVLMPTGGGKSLCYQIPALMREGVAVVVSPLIALMNDQVANLHVAGIEAAAVNSGTSADEAREIADKLAQGRLKLLYVAPERLVTDRFLRFLDQQTVSLFAIDEAHCVSQWGHDFRPEYQQLGMLAERYPNVPRIALTATADAATRADIKHYLHLDDAPEFVSSFDRPNIYYQVIEKNNGKKQLLDFIRKEMTGQSGIVYCLSRKKVEDVAQFLRENGLNAIPYHAGLSMDVREENQRRFTHEDNIIVVATVAFGMGIDKPDVRFVAHLDMPQSVEHFYQESGRAGRDGLPAASWLCYGLNDWVLLRERIAEGNSDEVQKQIEMQKLDAMLAVCETAACRRVLLLKHFGEASEPCGHCDNCLHPPVRFDGTVLVQKLLSCVYRAGQRFAAGYITNILRGKSDDWIRGNRHEQLSTFGIGTELSDKEWRSVIRQCISLGYLTVNITRYQALQLTEAAKKVLKGETEVMLRPLKRDKPAARTLKDNWLRTEREERLWQALRVWRMKQAEAEGIPAYMIFGDKTLRDLVEKMPQDLNGLHDIYGLGEAKIDRFGHGILEVCRNAAGFSRDAVIRPQTEREQQLRQKLEAWRYEQARAENCALHAVLSDESLADMLADTPETETDLEGVYGLGSVRAAKYGRDILAVCRPFSDGIDETAKRKRRLMRALIQWCGETAKHEQSEPYRILSKAALRAIAAKQPEGLAELAAVYGVGEEKAARYGAAVLAVLERNAV

SEQ ID NO: 66103 - protein, 312 aa, Neisseria meningitidis
MRRQQERKSMPDAVKKVYLIHGWGANRHVFDDLMPRLPATWPVSAVDLPGHGDAPFAQPFDIEAAADAVAAQIDTPADILGWSLGGLVALYLAARHPDKVRSLCLTASFARLTADEDYPEGLAAPALGKMVGAFRTDYAKHIKQFLQLQLLHTPDADGIIGRILPDLARCGTPSALQEALDAAERADARHLLDKIDVPVLLVFGGKDAITPPRMGEYLHRRLKGSRLVVMEKAAHAPFLSHAEAFAALYRDFVEGVLDEPSGRTLAGLPPSCRTCRPTPDTRPQRAQTYPACRGGCGHQPQPAGETLSAGGI

SEQ ID NO: 66104 - protein, 154 aa, Neisseria meningitidis
MFTIVLYQPEIPPNTGNIIRLCANTGADLHLVKPLGFPLDSAKMKRAGLDYHEFASLTVYENFDDCLKALAGRRIFALTTKGTARPDETAFQKGDVLLFGPETRGLPADILDSLPAAQKIRLPMQPGSRSMNLSNTVAVILFEAWRQHGYAGGV

SEQ ID NO: 66105 - protein, 298 aa, Neisseria meningitidis
MNPTNDLKAWQQRAQAQTELLLERFLPSENEIPHTLHEAMRYAALDGGKRLRPMLVLAASELGEAVHEAVGQAMAAIEMIHAYSLVHDDMPAMDNDSLRRGKPTCHVKYGEATALLTGDALQTQAFDVLSRPTELPAARQLAMLSVLAKAGGSMGMAGGQAIDLANVGKQMAQTDLEQMHSLKTGALIRAAVLLGAMSCPNLSEDSLAVLDDYAAKLGLAFQVIDDVLDCEADTATLGKTAGKDADNDKPTYVKLMGLEAARSYAHKLVAEAVALLEPFGDKALRLRQLAEFAVARKY

SEQ ID NO: 66106 - protein, 351 aa, Neisseria meningitidis
MTILSDVKALGQQIWLDNLSRSLVQSGELAQMLKQGVCGVTSNPAIFQKAFAGDALYADEIAALKQQNLSPKQRYETMAVADVRAACDVCLAEHESTGGKTGFVSLEVSPELSKDAQGTVEEARRLYAAIGCKNAMIKVPATDAGIDALETLVSDGISVNLTLLFSRAQTLKAYAAYARGIAKRLAAGQSVAHIQVVASFFISRVDGALDTTLPDHLKGKIAIALAKAAYQDWAQYFGSPEFAALETKGANRVQLLWASTGVKNPAYPDTLYVDSLIGAHTVNTVPDATLKAFIDHGTAKATLTEGVEEAQAQLAETAALGIDVETLATRLQEDGLKQFEEAFEKLLAPLA

SEQ ID NO: 66107 - protein, 467 aa, Neisseria meningitidis
MKPLRRLTNLLAACAVAAAALIQPALAADLAQDPFITDNAQRQHYEPGGKYHLFGDPRGSVSDRTGKINVIQDYTHQMGNLLIQQANINGTIGYHTRFSGHGHEEHAPFDNHAADSASEEKGNVDEGFTVYRLNWEGHEHHPADAYDGPKGGNYPKPTGARDEYTYHVNGTARSIKLNPTDTRSIRQRISDNYSNLGSNFSDRADEANRKMFEHNAKLDRWGNSMEFINGVAAGALNPFISAGEALGIGDILYGTRYAIDKAAMRNIAPLPAEGKFAVIGGLGSVAGFEKNTREAVDRWIQENPNAAETVEAVFNVAAAAKVAKLAKAAKPGKAAVSGDFADSYKKKLALSDSARQLYQNAKYREALDIHYEDLIRRKTDGSSKFINGREIDAVTNDALIQAKRTISAIDKPKNFLNQKNRKQIKATIEAANQQGKRAEFWFKYGVHSQVKSYIESKGGIVKTGLGD

SEQ ID NO: 66108 - protein, 2703 aa, Neisseria meningitidis
MNRTLYKVVFNKHRNCMIAVAENAKREGKNTADTQAVGILPNDIAGFAGFIHSISVISFSLSLLLGSALILTSSSATAQGIVADKSAPAQQQPTILQTGNGIPQVNIQTPTSAGVSVNQYAQFDVGNRGAILNNSRSNTQTQLGGWIQGNPWLARGEARVVVNQINSSHSSQLNGYIEVGGRRAEVVIANPAGIAVNGGGFINASRATLTTAQPQYQAGDLSGFKIRQGNVVIAGHGLDARDTDYTRILSYHSKIDAPVWGQDVRVVAGQNDVAATGDAHSPILNNAAANTSNNTANNGTHIPLFAIDTGKLGGMYANKITLISTVEQAGIRNQGQWFASAGNVAVNAEGKLVNTGMIAATGENHAVSLHARNVHNSGTVASQDDANIHSQTLDNSGTVLSSGRLTVRNLGRLKNQNNGTIQAARLDMSTGGLDNTGNITQTGSQALDLVSAGKFDNSGKIGVSDVPQTGLNPNPSVIPQIPSTATGSGSSTVSVSKPGSNNPVSPTAPAKNYAVGRIQTTGAFDNAGSINAGGQIDIAAQNGLGNSGSLNAAKLRVSGDSFNNTVKGKLQAHDLAVNTQTAKNSGHLLTQTGKIDNRELHNAGEIAANNLTLIHSGRLSNDKKGNIRAAHLQLDTAGLHNAGNILADSGTVTTKNNLRNTGKVSVARLNTEGQTLDNTRGRIEAETVNIQSQQLTNQSGHITATEQLTINSRNVDNQNGKLLSANQAQLAVSDGLYNQHGEIATNRQLSIHDKNQNTLALNNADGTIQSAGNVSLQAKSLANNGTLTAGNKLDIALTDDFVVERDLTAGKQLNLSIKGRLKNTHTLQAGHTLKLNAGNIDNQVTGKIIGGEQTDITSEQHVDNRGLINSDGLTHIGAGQTLTNTGTGKIYGNHIALDAQILLNREETTEGSTKAGAIAARKRLDIGAKEIHNQEGALLSSEGIFAVGNRLDEQHHAAGMADTFVNGSAGLEVQGDALMSVRNMQNINNHFKTETYLAKAEKQVRDYTVLGQNTYYQAGKDGLFDNSQGQKDQTTATFHLKNGSRIEANQWHVRDYHIETYKERIIENRPAHITVGGDLTASGQNWLNKDSRIVVGGRIITDDLNQKEITNQSTTGKGRTDAVGTQWDSVTKKGWYSGRKRQRRTERNHTPYHDTQLFTHDFDTPVSVIQQNAASPSFQPAASAIKLIDGVSTAAVNGQRIHTGNVVSLNNATVTLPNSSLYTTHPDNKGWLVETDPQFADYRRWLGSDYMLQQLQLDTNHLHKRLGDGYYEQKLVNEQIHQLTGYRRLDGYRSDEEQFKALMDNGLTAAKTFGLTPGIALSAEQVARLTSDIVWMENQTVTLSDGSTQTVLVPKVYALARKGDLNTSGGLISAEQVLLKLQNGNLTNSGTIAGRQAVLIQARNINSNGNIQADQIGLKAEKSINIDGGQVQAGRLLTAQAQNINLNGTTQTSGNERNGNTAIDRMAGINVVGSHTEQVDNRTSDGILSLHASNDINLNAATVSNQVKDGTTQITAGNNLNLGTIRTEHREAYGTLDDENHRHVRQSTEVGSSIRTQNGALLRAGNDLKIRQGELEAEEGKTVLAAGRDVTISEGRQITELDTSVSGKSKGILSSTKTHDRYRFSHDEAVGSNIGGGKMIVAAGQDINVRGSNLISDKGIVLKAGHDIDISTAHNRYTGNEYHESKKSGVMGTGGLGFTIGNRKTTDDTDRTNIVHTGSIIGSLNGDTVTVAGNRYRQTGSTVSSPEGRNTVTAKSIDVEFANNRYATDYAHTQEQKGLTVALNVPVVQAAQNFIQAAQNVGKSKNKRVNAMAAANAAWQSYQATQQMQQFAPSSSAGQGQNNNQSPSISVSITYGEQKSRNEQKRHYTEAAASQIIGKGQTTLAATGSGEQSNINITGSDVIGHAGTALIADNHIRLQSAKQDGSEQSKNKSSGWNAGVAVKIGNGIRFGITAGGNIGKGKEQGGSTTHRHTHVGSTTGKTTIRSGGDTTLKGVQLIGKGIQADTRNLHIESVQDTETYQSKQQNGNVQVTVGYGFSASGSYRQSKVKADHASVTGQSGIYAGEDGYQIKVRDNTDLKGGIITSSQSAEDKGKNLFQTATLTASDIQNHSRYEGRSFGIGGSFDLNGGWDGTVTDKQGRPTDRISPAAGYGSDGDSKNSTTRSGVNTHNIHITDEAGQLARTGRTAKETEARIYTGIDTETADQHSGHLKNSFDKDAVAKEINLQREVTKEFGRNAAQAVAAVADKLGNTQSYERYQEARTLLEAELQNTDSEAEKAAFRASLGQVNAYLAENQSRYDTWKEGGIGRSILHGAAGGLTTGSLGGILAGGGTSLAAPYLDKAAENLGPAGKAAVNALGGAAIGYATGGSGGAVVGANVDWNNRQLHPKEMALADKYAEALKREVEKREGRKISSQEAAMRIRRQILRWVDKGSQDGYTDQSVISLIGMKGEDKALGYTWDYRDYGARNPQTYNDPKLFEEYRRQDKPEYRNLTWLHSGTKDTKIRQGERKNEEFALNVAEGLTSLVNPNPRIKVPILAGIRNLKNIKPTVTGSDPLLAGAGNIRIPANGNVAKGDRIPDTALASKGIKHKNRKDQLEKNKKSGEDFEMEIYQKKVKQGFKPQRQITVKTKSGVKTRLDIISKEGGLDVCTECKASITAPLTKNQKKAFPEIERTGATVVGKGKPGYPKGTKIEPTKVIIERKR

SEQ ID NO: 66109 - protein, 1302 aa, Neisseria meningitidis
MNEGEVVLTPEQIQTLRGYASRGDTYGGWRYLANLGDRYADDAAAIVGKDANLNGLNLWMKKGVENLWDDTVGKKTRLEKFDRVALQHFSQYVDLINENNGRLPNTSEIERSYYKAVTENGVSSSAAIDLVINRSLPDMADGYWALGLGIEAERIHNEQAVNNPNGSERDNRKQLISALDKGFDGSFKEKHFTFLQSVIMDVTKLGVEYTIDGWQKIGGWGNGIINDLYKSVVKREWTGIFEIVNNNIKQFRDLFPNPEGWIDDGHQCFAPWVKETKKRNGKYHVYDPLALDLDGDGIETVAAKGFSGSLFDHTNNGIRTATGWVSADDGLLVRDLNGNGIIDNGAELFGDNTKLADGSFAKHGYAALAELDSNGDNIINAADAAFQSLRVWQDLNQDGISQANELRTLEELGIQSLDLAYKDVNKNLGNGNTLAQQGSYTKTDGTTAKMGDLLLAADNLHSRFKDKVELTAEQAKAANLAGIGRLRDLREAAALSGDLANMLKAYSAAETKEAQLALLDNLIHKWAETDSNWGKKSPMRLSTDWTQTANEGIALTPSQVAQLKKNALVSLSDKAKAAIDAARDRIAVLDAYTGQDSNTLYYMSEEDALNIVKVTNDTYDHLAKNIYQNLLFQTRLQPYLNQISFKMENDTFTLDFSGLVQAFNHVKETNPQKAFVDLAEMLAYGELRSWYEGRRLMTDYVEEAKKAGKFEDYQKVLGQETVALLAKTSGTQADDILQNVGFGHNKNVSLYGNDGNDTLIGGAGNDYLEGGSGSDTYVFGEGFGQDTVYNYDYATGRKDIIRFTDGITADMLTFTREGNHLLIKAKDGSGQVTVQSYFQNDGSGAYRIDEIHFDNGKVLDVATVKELVQQSTDGSDRLYAYQSGNTLNGGLGDDYLYGADGDDLLNGDAGNDSIYSGNGNDTLDGGEGNDALYGYNGNDALNGGEGNDHLNGEDGNDTLIGGAGNDYLEGGSGSDTYVFGKGFGQDAVYNYDYATGRKDIIRFTDGITADMLTFTREGNHLLIKAKDGSGQVTVQSYFQNDGSGAYRIDEIHFDNGKVLDVATVKELVQQSTDGSDRLYAYQSGNTLNGGLGDDYLYGADGDDLLNGDAGNDSIYSGNGNDTLDGGEGNDALYGYNGNDALNGGEGNDHLNGEDGNDTLIGGAGNDYLEGGSGSDTYVFGEGFGQDTVYNYHVDKNSDTMHFKGFKAADVHFIRSGSDLVLSASEQDNVRISGFFYGENHRVDTFVFDDAAISNPDFAKYINAGNNLVQSMSVFGSNTAATGGNVDANIQSVQQPLLVTPSA

SEQ ID NO: 66110 - protein, 67 aa, Neisseria meningitidis
MRTEFFKNPTLAPSTAAPWSKRQTAEKQTPSVVLPFADEYGSTPMPPKPSKPPSTLPPPKPQSWQKR

SEQ ID NO: 66111 - protein, 921 aa, Neisseria meningitidis
MRIRRRLKNIYLLDKKNLARNHVQVINQFEQTGTHANRYDVTVLVNGLPLVQIELKKRGVAVREAFNQVHRYSKESFNSENSLFKFLQIFVISNGTDTRYFANTTKRDKNSFDFTMNWARSDNHPIKDLKDFTATFLQKSVLLGVLLHYSVFDANDTLLIMRPYQIAAAERILWKINSSAQAKNWSKPESGGYVWHTTGSGKTLTSFKAARLATESAFIDKVFFVVDRKDLDYQTMKEYQRFSPDSVNGSESTAGLKRNLEKDDNKIIVTTIQKLNNLMKGEDNLPVYHQRVVFIFDECHRSQFGEAQKNLKKKFKKFCQFGFTGTPIFPENALGAETTAGVFGRELHSYVITDAIRDEKVLKFKVDYNDVRPQFKAVEAEQDEKKLSAAENHKALLHPERIREITQYILNQFRQKTHRLNAGGKGFNAMFAVSSVDAAKCYYEAFKTQQAGSLHPLKVATIFSFAANEEQNAVGEIVDETFEPEAMDSSAKEFLQAAINDYNACFKTNFGTDSKAFQNYYRDLAKRVKNQEIDLLIVVGMFLTGFDAPTLNTLFVDKNLRYHGLMQAFSRTNRIYDATKTFGNIVCFRDLEQATIDAITLFGDKNTKNVVLEKSYEEYMNGYTDSQTGEARRGYLDVAKELRERFPDPDKIETEKDKKDFAKLFGEYLRAENVLQNYDEFAALRELQSVDAADEDAMKAFQEKYYLSDEDVQEMRQVPMPSERAVQDYRSAYNDIRDWLRRQKAGEQKEQSKIDWDDVVFEVDLLKSQEINLDYILQLVFEHHKKIKGKAELVEEIRRIIRASIGHRAKEGLIVDFINDTDLDKVPDVPAILETFYTYAQEVMRHEAAGLIAAEGLNETAAKRYLISSLKRGYASENGTELTETLPKMSPLNPQYLTKKQSVFQKIAAFVEKFAGIGTDI

SEQ ID NO: 66112 - protein, 310 aa, Neisseria meningitidis
MYEIKQPFHSGYLQVSEIHQIYWEESGNPDGVPVIFLHGGPGAGASPECRGFFNPDVFRIVIIDQRGCGRSRPYACAEDNTTWDLVADIEKVREMLGIGKWLVFGGSWGSTLSLAYAQTHPERVKGLVLRGIFLCRPSETVWLNEAGGVSRIYPEQWQKFVAPIAENRRNRLIEAYHGLLFHQDEEVCLSAAKAWADWESYLIRFEPEEVDEDAYASLAIARLENHYFVNGGWLQGDRAILNNIGKIRHIPTIIVQGRYDLCTPMQSAWALSKAFPEAELRVVQAGHRAFDPPLVDALVQAVEDILPHLL

SEQ ID NO: 66113 - protein, 531 aa, Neisseria meningitidis
MKPLKTLEFGFVDAANYRRRENKDLFNRIFVKGEYLDELCEPNISFLIGEKGTGKTAYAVYLTNNFYKNIHATTKFVRETDYSKFIQLKKARHLTVSDFTSIWKVILYLLISNQIKCKENGILSSIFNKFKALDEAINEYYYGAFDPEIVQAITLIENSKEAAEMIFGKFVKLGEEESQQITFTESKFQANLGFIERKFKDALSQLKLKDNHILFIDGIDIRPSQIPFDEYHECVKGLANAIWMLNNDIFPSIKDSKGRMRVVLLIRPDIFDSLGLQNQNTKLQDNSVFLDWRTDYKSYRSSKIFGVFDHLLRTQQEKQDSLEKGNSWDYYFPWNAPNLHDEYKNLTSFISFLRKSYYRPRDILQMLTLLQKNKKSKEDYVVAEDFDNTSFQREYSIYLLGEIKDHLLFYYSQSDYQNFLKFFEFLNGKDRFKYSDFLKAFERLKKHLQTTSVEIPKFMSTANEFLQFLFDLNVIAYLDNPEDETKPYIHWCFKDRNYANISPKIKTETEYLIFSGLSKALDVGTPFKNKQ

SEQ ID NO: 66114 - protein, 469 aa, Neisseria meningitidis
MPHIDFDTIPGSIRVPGQYIEFNTRNAVQGLPQNPQKVLMVAPMLTAGIQPALEPVQLFSDAEAADLFGQGSLAHLMVRQAFANNPYLDLTVIGIADHSAGVQATATVTLSGTATAPGVVEITIGGKQVSTAVNTGETAATVADRLKTAITAADVTVTASGSGAAVTLTAKHKGEIGNESGLTVSTGNTGLTYQANAFTGGAKNADIATALSKVAGKHYHIICSPFSDDANAKALSNHITNVSNAIEQRGCIGVLGMSAALSTATTATGEINDGRMTCAWYKGAVEPNGIIAAGYAAVLAFEEDPAKPLNTLEIKGLAVTPDAQWPLFAECNNALYNGLTPLTVVNNRVQIMRAVSTYTKSANNTDDPALLDITTIRTLDYVRRSVKERIALRFPRDKLSDRLLPKVKSEILDVLIKLDQAEIIENAEANKGKLVVARAQNDPNRVNAIIPADVVNGLHVFAGRIDLIL

SEQ ID NO: 66115 - protein, 2273 aa, Neisseria meningitidis
MNKRCYKVIFNKKRSCMMAVAENVHRDGKSMQDSEAASVRVTGAASVSSARAAFGFRMAAFSVMLALGVAAFSPAPASGIIADKSAPKNQQAVILQTANGLPQVNIQTPSSQGVSVNRFKQFDVDEKGVILNNSRSNTQTQLGGWIQGNPHLARGEARVIVNQIDSSNPSLLNGYIEVGGKRAEVVVANPSGIRVNGGGLINAASVTLTSGVPVLNNGNLTGFDVSSGKVVIGGKGLDTSDADYTRILSRAAEINAGVWGKDVKVVSGKNKLDFDGSLAKTASAPSSSDSVTPTVAIDTATLGGMYADKITLISTDNGAVIRNKGRIFAATGGVTLSADGKLSNSGSIDAAEITISAQTVDNRQGFIRSGKGSVLKVSDGINNQAGLIGSAGLLDIRDTGKSSLHINNTDGTIIAGKDVSLQAKSLDNDGILTAARDVSVSLHDDFAGKRDIEAGRTLTFSTQGRLKNTRIIQAGDTVSLTAAQIDNTVSGKIQSGNRTGLNGKNGITNRGLINSNGITLLQTEAKSDNAGTGRIYGSRVAVEADTLLNREETVNGETKAAVIAARERLDIGAREIENREAALLSSSGDLHIGSALNGSRQVQGANTSLHNRSAAIESSGNIRIATKDLQNTNEHLRFHTEETHREHRIEYQAEGRTERYPEGSQKELGWEIFEDESLHMRTPDGSPHSVWYKYDYERITAESKITESKPGQIISGGNLVLDAAKLKNHNSRIIAGGRLIVGTPESALDNDETLGTKTITDKGDLHRYHRHHKKGRDSTGYSRSPYEPAPEVSSIRMGISAYKGYAPQQASDIPGTVVPVVAENGIHPTFTLPNSSLFAIAPNNKGYLIETDPAFTDYRKWLGSGYMLAALQQDPNHIHKRLGDGYYEQKLVNEQIAKLTGYRRLDGYTNDEEQFKALMDNGITIAKELQLTPGIALSAEQVARLTSDIVWLENETVTLPDGTTQTVLKPKVYVRARPKDMNGQGALLSGSVVDIGSGAIENRGGLIAGREALILNAQNIKNLQGDLQGKNIFAAAGSDITNTGSIGAENALLLKASNNIESRSETRSNQNEQGSVRNIGRVAGIYLTGRQNGSVLLDAGNNIVLTASELTNQSEDGQTVLNAGGDIRSDTTGISRNQNTIFDSDNYVIRKEQNEVGSTIRTRGNLSLNAKGDIRIRAAEVGSEQGRLKLAAGRDIKVEAGKAHTETEDALKYTGRSGGGIKQKMTRHLKNQNGQAVSGTLDGKEIILVSGRDITVTGSNIIADNHTILSAKNNIVLKAAETRSRSAEMNKKEKSGLMGSGGIGFTAGSKKDTQTNRSETVSHTESVVGSLNGNTLISAGKHYTQTGSTISSPQGDVGISSGKISIDAAQNRYSQESKQVYEQKGVTVAISVPVVNTVMGAVDAVKAVQTVGKSKNSRVNAMAAANALNKGVDSGVALYNAARNPKKAAGQGISVSVTYGEQKNTSESRIKGTQVQEGKITGGGKVSLTASGAGKDSRITITGSDVYGGKGTRLKAENAVQIEAARQTHQERSENKSAGFNAGVAIAINKGISFGFTAGANYGKGYGNGDETAYRNSHIGSKDSQTAIESGGDTVIKGGQLKGKGVGVTAESLHIESLQDTAVFKGKQENVSAQVTVGYGFSVGGSYNRSKSSSDYASVNEQSGIFAGGDGYRIRVNGKTGLVGAAVVSDADKSKNLLKTSEIWHKDIQNHASAAASALGLSGGFSYSPKPTSGQYSTKKEAEIGKIGGKPVSLMRFDQVSAKDDELNEKYRSERIEKGETFKEANLNQNNAGGLKFGLKQNDIHSNDKYALAKMGLGNLLGNAKESESRQSITRSVISEGDWQIASAQGRKNIAGIEKGTSSAHKALAKADREGLLKEVELNRDVAKEFINETLIGGIADEAYRSQFIAEHRLMTFKMDENGEPIEDKQLEEDINKQFDNSVKLKKEFASFKDYWEAYKAIGGNIYELREVSDQERKNLKTARYTDPETGKTVEKIVVGVNGIFNNIQAAAKFAAQQYVGRFNPEKNRYERTYENVYFLHNPETNGRGFSKLPEIAVAAFHKMLEGAKIGNKTVIGLSNSGLALGNIMEDYGKDKNGLFVGSHSRGTLVVDNVLNTLNTQANRDKKILSNTELKMVGPAANVVRADKRLFQLQQGVTTPRTADFARQSIQIENHELDLIGMLIGRNPATVGTNTRQKSQWQAIRDIIGDYTSPHNCYGMANKQCVTDGYRDPENKQTQSPTGVFERGVSNEIEIMYRPVRIYDLQHPKGKTK

SEQ ID NO: 66116 - protein, 513 aa, Neisseria meningitidis
MKFLDREASIAKPGFNRWLVPPAALAVHLAIGQIYAYSVFNAPLTKLIGITESAAGDWKLTTVGWIFSIALAMLGASAALFGTWMERVGPRKAIFAAACCFSLGFFVSAFGVRTHNLFLLYLGNGVIGGVGLGLGYIGPVSTLMKWFPDKPGMATGLAIMGFGGGAMLASPLSVSLMNTFSNAASVGVAETFAVLGLLYLALMMFGAFTIRVPADGWKPEGYTAPKTQNKLVSSNHVNVSQAMKTPQFWLLFWVLCLNVTAGIGVLGQASVMIQELFSETSIGRQAAVGAGAAAGFVSLLSLFNMGGRFLWSSVSDKIGRKNTYTIFFVLGSLLYFAVPSIGEGGSKALFIIGFCVIISMYGGGFAAIPAYLKDLFGTYQVGAIHGRILLAWSTAAVIGPVLVNYIRQSQIDSGIPAAQAYSVTMYIMACLLIIGLLCNLAVKSVHEKHHEKDIKTAAHSGNPDDETAISDAYLVGEKVSGGGISVWWRWALAVIPLAYGVVMVFVKALDLFS

SEQ ID NO: 66117 - protein, 346 aa, Neisseria meningitidis
MKAMVYHGANDIRFEEKPRPQIIDPTDAVVKIVKTTICGTDLGIWKGKNPEVADGRILGHEGIGIVEEVGEAVKNIKVGDKVIISCVSKCCTCDNCKTQLYSHCRNGGWILGYMIDGTQAEYVRTPYADNSLVPLPDNVNEEIALLLSDALPTAHEIGVQYGDVKPGDTVFIAGAGPVGMSALLTAQLYSPAAIIVCDMDENRLKLAKELGATHTINPASGEVSKQVFAIVGEDGVDCAIEAVGIPATWNMCQDIVKPGGHIAVVGVHGQSVDFKLEKLWIKKLAITTGLVNANTTEMLMKAISSSSVDYTKMLTHHFKFSELEKAYDVFKHAAENQVMKVVLEAD

SEQ ID NO: 66118 - protein, 1829 aa, Neisseria meningitidis
MNEGEVVLTPEQIQTLRGYASRGDTYGGWRYLANLGDRYADDAAAIVGKDANLNGLNLWMKKGVENLWDDTVGKKTRLEKFDRVALQHFRQYARLINQNNGRLPNTSEIERSYYKAVTDNGVSSSAAIDLVINRSLPDMADGYWALGLGIEAERIHNEQAVNNPNGSERDNRKQLISALDKGFDGSFKEKHFTFLQSVMMDVTKLGVEYTIDGWQKIGGWGNGIINDLYKSVVKREWTGIFEIVNNNIKQGNEAFKNEINSLVHDMKAAGKEFGDDLNTQWNNLTQAAEIIYNDIVDNTSQGIEKGVKAIKELSEKMKNAASDLADGSAEKAKQVVEDLAQAAKEAYENAKSTAEKAAQAAREFFKGLPSFKDLAEKFRDLFPNPEGWIDDGHQCLAPWVKETKKRNGKYHVYDPLALDLDGDGIETVATKGFAGSLFDHTNNGIRTATGWVSADDGLLVRDLNGNGIIDNGAELFGDNTKLADGSFAKHGYAALAELDSNGDNIINAADAAFQTLRVWQDLNQDGISQANELRTLEELGIQSLDLAYKDVNKNLGNGNTLAQQGSYTKTDGTTAKMGDLLLAADNLHSRFKDKVELTAEQAKAANLAGIGRLRDLREAAALSGDLANMLKAYSAAETKEAQLALLDNLIHKWAETDSNWGKKSPMRLSTDWTQTANEGIALTPSQVAQLKKNALVSLSDKAKAAIDAARDRIAVLDAYTGQDSNTLYYMSEEDALNIVKVTNDTYDHLAKNIYQNLLFQTRLQPYLNQISFKMENDTFTLDFSGLVQAFNHVKETNPQKAFVDLAEMLAYGELRSWYEGRRLMTDYVEEAKKAGKFEDYQKVLGQETVALLAKTSGTQADDILQNVGFGHNKNVSLYGNDGNDTLIGGAGNDYLEGGSGSDTYVFGEGFGQDTVYNYDYATGRKDIIRFTDGITADMLTFTREGNHLLIKAKDGSGQVTVQSYFQNDGSGAYRIDEIHFDNGKVLDVATVKELVQQSTDGSDRLYAYQSGNTLNGGLGDDYLYGADGDDLLNGDAGNDSIYSGNGNDTLDGGEGNDALYGYNGNDALNGGEGNDHLNGEDGNDTLIGGAGNDYLEGGSGSDTYVFGKGFGQDTVYNYDYATGRKDIIRFTDGITADMLTFTREGNHLLIKAKDGSGQVTVQYYFQNDGSGAYRIDEIHFDNGKVLDVATVKELVQQSTDGSDRLYAYQSGNTLNGGLGDDYLYGADGDDLLNGDAGNDSIYSGNGNDTLDGGEGNDALYGYNGNDALNGGEGNDHLNGEDGNDTLIGGAGNDYLEGGSGSDTYVFGKGFGQDAVYNYDYATGRKDIIRFTDGITADMLTFTREGNHLLIKAKDGSGQVTVQSYFQNDGSGAYRIDEIHFDNGKVLDVATVKELVQQSTDGSDRLYAYQSGNTLNGGLGDDYLYGADGDDLLNGDAGNDSIYSGNGNDTLNGGEGNDALYGYNGNDALNGGEGNDHLNGEDGNDTLIGGAGNDYLEGGSGSDTYVFGKGFGQDAVYNYDYATGRKDIIRFTDGITADMLTFTREGNHLLIKAKDGSGQVTVQSYFQNDGSGAYRIDEIHFDNGKVLDVATVKELVQQSTDGSDRLYAYQSGSTLNGGLGDDYLYGADGDDLLNGDAGNDSIYSGNGNDTLDGGEGNDALYGYNGNDALNGGEGNDHLNGEDGNDTLIGGAGNDYLEGGSGSDTYVFGEGFGQDTVYNYHVDKNSDTMHFKGFKAADVHFIRSGSDLVLSASEQDNVRISGFFYGENHRVDTFVFDDAAISNPDFAKYINAGNNLVQSMSVFGSNTAATGGNVDANIQSVQQPLLVTPSA

SEQ ID NO: 66119 - protein, 314 aa, Neisseria meningitidis
MSASKKFPIPLSYFSIALGLFALGLSWRYGASVGLLPALAAESLLAAASVVWLLLVAAYLIKMFAYRNDFLSDLRDLVQCCFISAIPITAMLEGLALKPYQAGAAAVLIYVGVAGQLAFSMYRAAGLWRGLHSLEATTPIIYLPTVATNFVSASSLAALGHHDYAALFFGAGMFSWLSLEASILGRLRTAAPVGTAARGVVGIQLAPAFVGCGAYFAVGGKVDGFALALIGYGCLQLLFLLRLTRWFWEGGFTMSFWGFSFGFAAMAGCGLHLAASGVLSGLGLTLATAGSAGVALLLVGTLHRIATGRFLVRS

SEQ ID NO: 66120 - protein, 136 aa, Neisseria meningitidis
MGNTAMWMSCNPTIPILFGIQVKIFPLNQIFNHIHPARYAVTFENNVDSKLRRHWVAGATIRIIDRQTDEVIAKKTIYVFEKGLDGTGGARMPWKFAILCNKERLTSSEPLSDFVLSVLKPYILRPLYIASLRRDD

SEQ ID NO: 66121 - protein, 2514 aa, Neisseria meningitidis
MNKTLYRVIFNRKRGAVVAVAETTKREGKSCADSDSGSAHVKSVPFGTTHAPVCRSNIFSFSLLGFSLCLAVGTANIAFADGIIADKAAPKTQQATILQTGNGIPQVNIQTPTSAGVSVNQYAQFDVGNRGAILNNSRSNTQTQLGGWIQGNPWLARGEARVVVNQINSSHSSQMNGYIEVGGRRAEVVIANPAGIAVNGGGFINASRATLTTGQPQYQAGDLSGFKIRQGNVVIAGHGLDARDTDFTRILSYHSKIDAPVWGQDVRVVAGQNDVVATGNAHSPILNNAAANTSNNTANNGTHIPLFAIDTGKLGGMYANKITLISTAEQAGIRNQGQLFASSGNVAIDANGRLVNSGTMAAANAKDTDNTAEHKVNIRSQGVENSGTAVSQQGTQIHSQSIQNTGTLLSSGEILIHNSGSLKNETSGTIEAARLAIDTDTLNNQGKLSQTGSQKLHIDAQGKMDNRGRMGLQDTAPTASNGSSNQTGNSYNASFHSSTTTPTTATGTGTATVSISNITAPTFADGTIRTHGALDNSGSIIANGQTDVSAQQGLNNAGQIDIHQLNAKGSAFDNHNGTIISDAVHIQAGSLNNQNGNITTRQQLEIETDQLDNAHGKLLSAEIADLAVSGSLNNQNGEIATNQQLIIHDGQQSTAVIDNTNGTIQSGRDVAIQAKSLSNNGTLAADNKLDIALQDDFYVERNIVAGNELSLSTRGSLKNSHTLQAGKRIRIKANNLDNAAQGNIQSGGTTDIGTQHNLTNRGLIDGQQTKIQAGQMNNIGTGRIYGDNIAIAATRLDNQDENGTGAAIAARENLNLGIGQLNNRENSLIYSGNDMAVGGALDTNGQATGKAQRIHNAGATIEAAGKMRLGVEKLHNTNEHLKTQLVETGREHIVDYEAFGRHELLREGTQHELGWSVYNDESDHLRTPDGAAHENWHKYDYEKVTQKTQVTQTAPAKIISGNDLTIDGKEVFNTDSQIIAGGNLIVQTEKDGLHNEQTFGEKKVFSENGKLHSYWREKHKGRDSTGHSEQNYTLPEEITRNISLGSFAYESHRKALSHHAPSQGTELPQSNGISLPYTSNSFTPLPSSSLYIINPVNKGYLVETDPRFANYRQWLGSDYMLDSLKLDPNNLHKRLGDGYYEQRLINEQIAELTGHRRLDGYQNDEEQFKALMDNGATAARSMNLSVGIALSAEQVAQLTSDIVWLVQKEVKLPDGGTQTVLVPQVYVRVKNGDIDGKGALLSGSNTQINVSGSLKNSGTIAGRNALIINTDTLDNIGGRIHAQKSAVTATQDINNIGGMLSAEQTLLLNAGNNINSQSTTASSQNTQGSSTYLDRMAGIYITGKEKGVLAAQAGKDINIIAGQISNQSEQGQTRLQAGRDINLDTVQTSKHQATHFDADNHVIRGSTNEVGSSIQTKGDVTLLSGNNLNAKAAEVSSANGTLAVSAKNDINISAGINTTHVDDASKHTGRSGGGNKLVITDKAQSHHETAQSSTFEGKQVVLQAGNDANILGSNVISDNGTQIQAGNHVRIGTTQTQSQSETYHQTQKSGLMSAGIGFTIGSKTNTQENQSQSNEHTGSTVGSLKGDTTIVAGKHYEQIGSTVSSPEGNNTIYAQSIDIQAAHNKLNSNTTQTYEQKGLTVAFSSPVTDLAQQAIAVAQSSKQVGQSKNDRVNAMAAANAGWQAYQTGKSAQNLANGTTNAKQVSISITYGEQQNRQTTQVQANQAQASQIQAGGKTTLIATGAAEQSNINIAGSDVAGKAGTILIADNDITLQSAEQSNTERGQNKSAGWNAGAAVSFGQGGWSLGVTAGGNVGKGYGNGDSITHRHSHIGDKGSQTLIQSGGDTTIKGAQVRGKGVQVNAKNLSIQSVQDRETYQSKQQNASAQVTVGYGFSAGGDYSQSKIRADHVSVTEQSGIYAGEDGYQIKVGNHTDLKGGIITSTQSAEDKGKNRFQTATLTHSDIKNHSQYKGESFGLGASASISGKTLGQGAQNKPQNKHLTSVADKNSASSSVGYGSDSDSQSSITKSGINTRNIQITDEAAQIRLTGKTAAQTKADIDTNVTTDTAERHSGSLKNTFNKEAVQSELDLQRTVSQDFSKNVQQANTEINQHLDKLKADKEAAETAAAEALANGDMETAKRKAHEAQDAAAKADNWQQGKVILNMLASGLAAPTQSGAGIAAATASPAVSYAIGQHFKDLAGQNANGKLTASQETAHVLAHAVLGAAVAAVGDNNALAGALSAGGSEAAAPYISKWLYGKEKGSDLTAEEKETVTAITNVLGTATGAAVGNSATDAAQGSLNAQSAVENNDTVEQVKFALRHPRIAIAIGSVHKDPGSTLEPNISTIASTFQLNLFPNSEFGGEGGVGNAFRHVLWQATITREFGKDIAVKVGNSHESGEKINYSIRRNLSLDKADEMIDQLNNEIGREIALNTNRLNTKELVGLILETYKNNGFYQAERNSNGNYDVVRKRLSEKDYQNTSNILIHLDNTGAGFKIQQRRKQIRAQISARQWRR

SEQ ID NO: 66122 - protein, 127 aa, Neisseria meningitidis
MYCLRLRRLVLIFVNPLYIIATTVPAQQAFLDAAELMQWSIETEGLGLNVISHKILGKDHAQVEFEAYFRDGQHRSAHHELSGFVNIGGQWYFIDPTVPHPAMKQPCICGSGKKFKACCGKYLKPVA

SEQ ID NO: 66123 - protein, 331 aa, Neisseria meningitidis
MKKSLIALTLAALPVAAMADVTLYGTIKAGVETSRSVFHQNGQVTEVTTATGIVDLGSKIGFKGQEDLGNGLKAIWQVEQKASIAGTDSGWGNRQSFIGLKGGFGKLRVGRLNSVLKDTGDINPWDSKSDYLGVNKIAEPEARLISVRYDSPEFAGLSGSVQYALNDNAGRHNSESYHAGFNYKNGGFFVQYGGAYKRHHQVQEGLNIEKYQIHRLVSGYDNDALYASVAVQQQDAKLTDASNSHNSQTEVAATLAYRFGNVTPRVSYAHGFKGLVDDADIGNEYDQVVVGAEYDFSKRTSALVSAGWLQEGKGENKFVATAGGVGLRHKF

SEQ ID NO: 66124 - protein, 371 aa, Pseudomonas aeruginosa
MLELDTRQIRMGQRAADKAEALRLLGAALVADGLAAPGYAEGLKAREAQGSTYLGQGIAIPHGTPDTRELVFSTGVRLLQFPEGVDWGDGQQVYLAIGIAAKSDEHLQLLQLLTRALGEADLGPALSAAASAEEVLGLLQGAPQELALDAQLVGLGQNAEDLDELAWLGARLLKKAGCVENGFAAVLQQTEPLPLGDGLCWLHSEQLVKRPGLAFVTPAQPLQHQGQLVTGLFCLASLGEAHQALLERLCDLLLEGRGAELVRATSSRSVLAALGGELPPDWPSARAVLANPHGLHARPGAGVAQLAKGFAGEIRVRLADSEAAPVSAKSLSKLLALGARRGQTLEFSAEPAIAEDALPALLAAVREGLGE

SEQ ID NO: 66125 - protein, 363 aa, Pseudomonas aeruginosa
EINPILNSIKDLSERTQTIRGYLDYDQKHDRLVEVNRELEDPNVWNNPEYAQNLGRERAQLAQVVETLDDLTSGLADSRDLLDMAVEEDDEGAVDDVANEVERLREILEKLEFRRMFSGEMDPNNAYLDIQAGSGGTEAQDWANMLLRMYLRWADKHGFDATIIELSEGEVAGIKGATVHIKGEYAFGWLRTEIGVHRLVRKSPFDSGNRRHTSFTAVFVSPEIDDNIEIEINPADLRIDTYRSSGAGGQHVNTTDSAVRITHVPTNTVVACQNERSQHANKDTAMKMLRAKLYELEMQKRTAASQALEDSKSDIGWGHQIRSYVLDQSRIKDLRTGIERSDCDKVLDGDLDEYLEASLKQGL

SEQ ID NO: 66126 - protein, 277 aa, Pseudomonas aeruginosa
MSDQQLDQHELQQEENKLIAQRKEKLAAVREARAIAFPNDFRRDAYFADLQKQYADKTKEELEAAAIPVKVAGRIMLNRGSFIVLQDSSERLQVYVNRKTLPEETLAEIKTWDLGDIIGAEGVLARSGKGDLYVDMTSVRLLTKSLRPLPDKHHGLTDTEQRYRQRYVDLMVNEETRHTFRVRSQVIAHIRRFLSERGFLEVETPMLQTIPGGAAAKPFETHHNALDMAMFLRIAPELYLKRLVVGGFEKVFEINRNFRNEGVSTRNNPEFTMLEFY

SEQ ID NO: 66127 - protein, 490 aa, Pseudomonas aeruginosa
MKILAIRLKNLASLAGEQEIDFTREPLSSAGLFAITGPTGAGKSTVLDALCLALFGSTPRLESTSASSKVPDGRNELSSNDERNLLRRGCALPYAEVDFVGIDGHRYRARWETRRSRDKADGALQKSQQSLQDLETQQMLAANKKSEFREQLEQKLGLNFAQFTRAVLLAQSEFSAFLKASDNDRGALLEKLTDTGLYSQLSKAAYQRASQADEQRKQLEQRLEGSLPLAEQARAGLEAALESHAQARLQEQQALQRLEGQQQWFTEEQRLLQSCEHAQGQLAEARQAWDALATERETLQWLERLAPVRGTDRTPEATRAGTPALRAAAAAAHRAASRGHRALARIAGPLAGGARAPGPGRQPSASGPGAVARGFPAGERGQAPGANAGRATGTPSAIEPAPRPAKRRRSATDMEQQRHVAEQAQLQAALRDSQALAALGDAWVTHQGQLATFVQRSPARARKPGAAPRAGKIPGPRRGTARTLAGAMDR

SEQ ID NO: 66128 - protein, 253 aa, Pseudomonas aeruginosa
MTDFTQAIPVLPEPDWHAVAGIPIVDAGTPLEALGLSREFSVWPAYHKLGIPHAIPECHARGEVFERLLRVAAALPGGVRLVVLDAWRPFAVQQYLYDSLSSALAAHYPRAGEAELERLTRQFVSPPSSSREAPSPHLTGGAVDVTLCDAQGRWLDMGSAFDEAVPASYTAYFERLAEPDTRQRRVRDHRRLLYHAMLDAGFSNLPSEWWHYDFGDQLWAWHTGATQALFGPVQLQAMDALWRQQLQKRPPAD

SEQ ID NO: 66129 - protein, 220 aa, Pseudomonas aeruginosa
  MISC_FEATURE (51)..(51): X=any amino acid
  MISC_FEATURE (96)..(96): X=any amino acid
  MISC_FEATURE (115)..(115): X=any amino acid
  MISC_FEATURE (146)..(146): X=any amino acid
  MISC_FEATURE (202)..(202): X=any amino acid
ISLSLGWRQRRHRYAIRAGRNLPDKEFRYLRTVIVTAAVYRGFDQELRLRXPHQLTFRHRAGVTPYTSTFVFAECCVFNKQSQRPGIFDQPELTEXILHPSRAHLLPKLRCHFAXFLHPSSLKRLGILYPTTCVGLGYGSWLPEAXKLFLEAWHQPLRHLKDDSSSALGLETPDLPKISAYHLKLGQPTPSWLAFSVPPSQXPEVRNINLFPIDYAFQPR

SEQ ID NO: 66130 - protein, 103 aa, Pseudomonas aeruginosa
MTQVTVKELAQVVDTPVERLLLQMRDAGLPHTSAEQVVTDSEKQALLTHLKCSHGDRATEPRKITLQRKTTTTLKVGGSKTVSVEVRKKKTYVKRSHDEIEAE

SEQ ID NO: 66131 - protein, 122 aa, Pseudomonas aeruginosa
  MISC_FEATURE (19)..(19): X=any amino acid
MLSAVIFSEHSYPAMPLAXQPEHQRFVHSGPLVLGAAPLKSQTSTADRDRTVSRRSKPSSRTTLNGEQPYPWDRLQPQDVMSRHRGAKHRRRYELLGGISLLSPEYLLSVERWPFHTEPPDH

SEQ ID NO: 66132 - protein, 292 aa, Pseudomonas aeruginosa
MQGLGQLLHGVAVLVVRPRDEDVHVGRVAAFDGQRILGWVQLGFQGVVGIDQRHVDLGQHARQGRGFQFADLDVLRIVDDVLRRGGDALVVLELDHPGLVQQEQGAAAVGGVVGNHHGSAGRQFVELLVLARVGAQRLDVYAGHGDQVGALGLVELIEVRLVLEEVGVQALFRDLHVRLHVVGELLDLQVHAFLGQQRLDHVEDLRVRHRGGRDGEGLGGLGGGEAERRDSGESSKQFFHLQLLSRCSWRLWITAALRVLGLAGKLTCARSAPPACRPRFAESGRGSAASPP

SEQ ID NO: 66133 - protein, 731 aa, Pseudomonas aeruginosa
SDPSQEAAVLQARQSPGLLVEGPPGTGKSQTIVNMVADAIGRQRSLLIVCQKHAALEVVHKRLVAEGLGQRIVMLNDVNRDREPVIRNIREQLEALFADAGGAQGWERPRERLAARIEALEGELDRYHQSLHRVDEATGLSYRRLLGELIELEKGSPPLDFPALRQRLAALDIGSLARLEENCAPLVRLWLPARYEGSPLAQLRAFATDQATLQAFADSLRAFGEAENARQKALDEHPASFEVDDPTPYRAWLASQVGTLLNLREEQRQRLAHWLPLFRDAAPGQPSRGDGLLAEAEQIERQLRQLDLERHAPLLSPALAMLEENNLERFQAHTRQVLEARTWLARLNPLHLLRRGRLRRFLREHGEADDDSRLAALLGACDLERQWRPLRRQLAALQQSLGLATVATDAGPELTGLAGHASQQLREIQTLARGLAQAPRAEQLDAVILTGEKQRFEALLGDLDAALIRQAARQLSLDKLKVLADWLGDELLEQLHRAIAGNQSNLPALGRLREALPQLVAYQRFRGRAGQLEATDLEFLALLRQRQERLDAIPVEELEATVRRMLNREARLGWKQRLEQDNPELLFSRDEARARVASLAEADVQMRALNRELLGKGIDAARLGSRKQWEDVTRLTGKRSRRLREFIELGAELGLMSLRPVWLMNPDLASRVLPLKAGLFDMVIYDEASQMPVEFALPTLYRGRVTVVSGDEKQMPPTAFFSSRVESDEAE

SEQ ID NO: 66134 - protein, 274 aa, Pseudomonas aeruginosa
MHSIMGRRRFVFPRLAHQPLDVFQTLDQCRDLKLQSLDAALLLDHHIVESLQSVILESLAAFQVIHARVQLHLGLPGKTEAVGQHHPQLAADRLDLLGRIRPSRMAPPDRAGPGVVTTSPDDHVHVKLADHIAQVSDIHLVRTEGVLEDLCQQRGLAPQRLPVIDIELEQLGDILPPRHQDEPRIAGIVHQQQAAEGKVAEQQGVLLQPGIQSEHTDLSCSTVVHGQLSPSLREGPRRNCRAGYFAARPKQAHTSARPSLARLSSRTPHKMPAK

SEQ ID NO: 66135 - protein, 226 aa, Pseudomonas aeruginosa
MASLMTRSSLDLGRGAEGVVGRRRGDAPLQALGAVPGLGRGRLAAADALDDDEQEQQLGGAEHEGADRRDHVEVGELQVVVGDPSRHAGEADEVHREERQVHADEAHPEVQLAEGLVVHVAGPLRQPVVSRGEDAEDRAGHQHVVEVGDHEVGVVVLEVCRGDRQHQSGEAADGEQDDEGHGEQHRRLEGQRTLPHGGHPVEHLHPGGHRDQHGGVHEEQLAGDIQ

SEQ ID NO: 66136 - protein, 201 aa, Pseudomonas aeruginosa
MFLLQSVTEREFESTQQGATFVIRTSGGGQGDVQATQRIDLVVIDFREDDLLFHAHAVVAATIEGLGIQAAEVTHARQGDGQQTIQELVHPVATQGDLDADRPAFTDLEACDGLTSVSHDRLLTSDLFQIGYGVLDDLLVTDRLAKTHVQGDFGNARNFHHVRQLKLFFQLGRDFLPINFFQSCHGDLPSSLKPEPVSGST

SEQ ID NO: 66137 - protein, 118 aa, Pseudomonas aeruginosa
MYLWLKTLHITFALSSAALFVWRLAWNWSGRKASGIRRWGPHLVDTLLLLSALGLVHLAMPWPLPLWLLAKLGLLLGYIVCAAFALRMARGPGKGLLSVLSLTLLGGIFYLALNKPWW

SEQ ID NO: 66138 - protein, 592 aa, Pseudomonas aeruginosa
MSAISDTCGITPGSASEARLHAEMQARVVFVGVRPFQQREGPVEAAGQPVGELRAGADADAGQAEVVVLFGQRILQAQLRALGEHVEAPVVDVAAGALAEEASEGRRTPFLGEQVAVVGGVLRRQVATHAGGTAGGELFVGNQRPGGELEGRLGRHLPVAAEGQGVVEIALEHAEAGLGAITLAVEFLVVVAVAEETAGTGHQAQAKGQLGTFGVAEAVVAEGQRGVLDRHPVVVAADPGLFLEVLEVDAEGERVRPEAGDRQAVDRRDAIGVALADHIHAAHRGHVAVGLVAGQLHAPALAQRRGIGAGPDLGVVLVLRRGEIGQRDGVAELPEVVVAQRNHRAQVTGVGAVVVVQADAGVPGILVFHLQVDVHGAGPLALAHHRQHLAAGGAVDLRQLALDLGEVGHLALLQGRHFLAQLHRRIVLGADHPDATDSGLGDLQVDHPAAHLLLRQLDVDRLVALLLVGGLQRIARPLDVAQAALRSEEGIHRRLDGAVVQHGVAAYHVLVDVHQTLGLGSRRGGRGLVGQRSARQCDSQATDRPALAKRVRTIEQRTLHTVPRSSIGTYCSNATSPFIEQFCERQQTSGDA

SEQ ID NO: 66139 - protein, 437 aa, Pseudomonas aeruginosa
MNALKGRDILALGFMTFALFVGAGNIIFPPIVGLQSGPHVWLAALGFLITAVGLPVITVIALAKVGGSVDALSHPIGRYAGGLLAAVCYLAVGPLFAIPRTATVSFEVGVVPLLGESGTALFVYSLAYFLLALAISLYPGRLLDTVGRFLAPLKILALAILGVAAFLWPAGPIGTAQPEYTQAAFSQGFVNGYLTMDTLAALVFGIVIVNAIRSRGVQSPRLITRYAIVAGLIAGVGLVLVYVSLFRLGAGSHAIAADASNGAAVLHAYVQHTFGSLGSSFLAGLIALACLVTAVGLTCACAEYFCQRLPLSYRSLVIILAGFSFIVSNLGLTKLIQVSIPVLTAIYPPCIVLVALSFCIGLWHSATRILAPVMLVSLAFGVLDALKAAGLGQDFPQWLLHLPLAEQGLAWLIPSVATLAACSLVDRLLGKPAQVAA

SEQ ID NO: 66140 - protein, 30 aa, Pseudomonas aeruginosa
MRAVLQRRHVALVDHALARLTHQLVDSCHL

SEQ ID NO: 66141 - protein, 792 aa, Pseudomonas aeruginosa
MKARLLTSTLAIGRADSRELSAEVIGRAGAGARGRALLFVAFRFRRGLGLGLGRLAQRFGSFLALGQVLVISARRLLDTLQTDQYLVAGELDQGYALGIAAGQGDFVDTRPHQGALVGNQHDLLAFLDLYRGDQRAVALVGDHGDHPLAAAAATRELAQRGTLAEAALGGGEDLRPGLRNQHGDQLLPLAQAHATYAAGVAAHDAHHALGEADHLAGAGEQHDFLGAIGDRGGDQGVALFQLERDQAAAARTAELHQRGLLHGTEGGGHEDVGAGRLGHQLGGLALDFLDLGGLDHLALEHRAFGFVEVVIGATVLLQRLQVDLQHRGDPLALIQRQQVHQRPATRGTRGFRNLEGTQPVDLALAGEQQEGRMAVGHQQVFDVVLVLHPGGGLAFAAATLRLVGGQRLGLGVAAVRDGHHAVFLGDQVGDGQVDLGSHDLGAASIAEFGLDRFQFLTDHLHQARRVGQDADQLADQVEDFLVFGEQLLVLQAGQAMQAQLEDRLGLLRRQVVLAVAQAVLRIQVFRTTGVGAGTLDHRFHRAGLPGSGDQAFLGLGRGRRTLDQLDHRVDVRQGDRLAFQDVPALAGLAQLVDGTPGHHFAAVADEHLEHVLQVQRARLAVDQGHHVDAEHALQLGLGIEVVEDHLAHLAATQLDDHAHAVLVRLVAQLGNTLDLLLFHQLGDLLDQPRLVQLVRQLGDDNLLATAALLHLLDDGAGTDVDAPATGAVGLDDPGAAVDDAGGGEVRTGDVLHQLIDGQVGVVHQRQGSRRSLRRGCAAGCWSPCPRRYRWNR

SEQ ID NO: 66142 - protein, 138 aa, Pseudomonas aeruginosa
MDDHQLHAFLAAEFVDVELVGQLGPAHGRVGPLLAVDVEGNAIQLQRAAFAFQHQLQVTLADDPLLHQLEHPVEHRLGKVLAPGTGLAQRARQLQVELLDAQLAIGEQAPGQVLLGQLAAYFGIEGGGESAEVFLRQR

SEQ ID NO: 66143 - protein, 137 aa, Pseudomonas aeruginosa
MLLDDTQANAIGMYFLTHLSTPLLVRNLDRDMARPLHDAISTAFGTRHDALERTTFVDEDGGDLQVIHIGAFVVLSVGNGRLQHFLHDLGGFLTAESQEVERSPTFFPRIWSATKRAFWAEIRAPDSLAATSIFLTP

SEQ ID NO: 66144 - protein, 514 aa, Pseudomonas aeruginosa
MSVELWQQCVDLLRDELPSQQFNTWIRPLQVEAEGDELRVYAPNRFVLDWVNEKYLGRLLELLGERGEGQLPALSLLIGSKRSRTPRAAIVPSQTHVAPPPPVAPPPAPVQPVSAAPVVVPREELPPVTTAPSVSSDPYEPEEPSIDPLAAAMPAGAAPAVRTERNVQVEGALKHTSYLNRTFTFENFVEGKSNQLARAAAWQVADNLKHGYNPLFLYGGVGLGKTHLMHAVGNHLLKKNPNAKVVYLHSERFVADMVKALQLNAINEFKRFYRSVDALLIDDIQFFARKERSQEEFFHTFNALLEGGQQVILTSDRYPKEIEGLEERLKSRFGWGLTVAVEPPELETRVAILMKKAEQAKIELPHDAAFFIAQRIRSNVRELEGALKRVIAHSHFMGRPITIELIRESLKDLLALQDKLVSIDNIQRTVAEYYKIKISDLLSKRRSRSVARPRQVAMALSKELTNHSLPEIGVAFGGRDHTTVLHACRKIAQLRESDADIREDYKNLLRTLTT

SEQ ID NO: 66145 - protein, 367 aa, Pseudomonas aeruginosa
MHFTIQREALLKPLQLVAGVVERRQTLPVLSNVLLVVEGQQLSLTGTDLEVELVGRVVLEDAAEPGEITVPARKLMDICKSLPNDVLIDIRVEEQKLLVKAGRSRFTLSTLPANDFPTVEEGPGSLNFSIAQSKLRRLIDRTSFAMAQQDVRYYLNGMLLEVNGGTLRSVATDGHRLAMCSLDAQIPSQDRHQVIVPRKGILELARLLTEQDGEVGIVLGQHHIRATTGEFTFTSKLVDGKFPDYERVLPRGGDKLVVGDRQQLREAFSRTAILSNEKYRGIRLQLSNGLLKIQANNPEQEEAEEEVQVEYNGGNLEIGFNVSYLLDVLGVIGTEQVRFILSDSNSSALVHEADNDDSAYVVMPMRL

SEQ ID NO: 66146 - protein, 806 aa, Pseudomonas aeruginosa
MSENNTYDSSSIKVLKGLDAVRKRPGMYIGDTDDGTGLHHMVFEVVDNSIDEALAGYCSEISITIHTDESITVRDNGRGIPVDIHKEEGVSAAEVIMTVLHAGGKFDDNTYKVSGGLHGVGVSVVNALSHELRLTIRRHNKVWEQVYHHGVPQFPLREVGETDGSGTEVHFKPSPETFSNIHFSWDILAKRIRELSFLNSGVGILLRDERTGKEELFKYEGGLKAFVEYLNTNKTAVNEVFHFNVQREEDGVGVEVALQWNDSFNENLLCFTNNIPQRDGGTHLAGFRSALTRNLNNYIEAEGLAKKFKIATTGDDAREGLTAIISVKVPDPKFSSQTKDKLVSSEVKTAVEQEMGKYFADFLLENPNEAKAVVGKMIDAARAREAARKAREMTRRKGALDIAGLPGKLADCQEKDPALSELYIVEGDSAGGSAKQGRNRRTQAILPLKGKILNVEKARFDKMLSSQEVGTLITALGCGIGREEYNIDKLRYHNIIIMTDADVDGSHIRTLLLTFFFRQMPELIERGYIYIAQPPLYKVKRGKQEQYIKDDQAMEEYMTQSALEDASLHVNEHAPGLSGAALEKLVNEYRGVIATLKRLSRLYPQELTEHFIYLPTVSVDDLANESAMQGWLEKFQARLTAAEKSGLTYKASLREDRERHLWLPEVELVAHGLSSYVTFNRDFFASNDYRSVSLLGDQLNSLLEDGAYVQKGERKRPISAFKDGLDWLMAEGTKRHSIQRYKGLGEMNPEQLWETTMDPNVRRMLKVTIEDAIAADQIFNTLMGDAVEPRRDFIESNALAVSNLDV

SEQ ID NO: 66147 - protein, 257 aa, Pseudomonas aeruginosa
MSTVQAIRTVLFYLLLSASAFVWGTLSFFIAPILPFRARYRFVVQNWCRFAIWLTRVVAGIRYEVRGLENIPEKPCVILSKHQSTWETFFLSGFFEPLSQVLKRELLYVPFFGWALALLKPIAIDRSQPKLALKQLAKQGDECLKKGAWVLIFPEGTRIPVGQMGKFSRGGTALAVNAGLPVLPIAHNAGQYWPKAGWAKYPGTIQVVIGPAMHAEGEGPRAIAELNQRAEAWVSETMAEISPIQQRVSHPEPSVVS

SEQ ID NO: 66148 - protein, 315 aa, Pseudomonas aeruginosa
MSQTTPAVRTFQDLILALQNYWAEQGCVVLQPYDMEVGAGTFHTATFLRAIGPETWNAAYVQPSRRPTDGRYGENPNRLQHYYQFQVVLKPNPENFQELYLGSLKAIGIDPLVHDIRFVEDNWESPTLGAWGLGWEIWLNGMEVTQFTYFQQVGGIECYPVTGEITYGLERLAMYLQGVDSVYDLVWTDGPFGKVTYGDVFHQNEVEQSTFNFEHANVPKLFELFDFYESEANRLIALELPLPTYEMVLKASHTFNLLDARRAISVTERQRYILRVRTLARAVAQSYLQARARLGFPMATPELRDEVLAKLKEAE

SEQ ID NO: 66149 - protein, 217 aa, Pseudomonas aeruginosa
MSASSPAAWRGTLAGLIAFHIFIIIASNYLVQLPITLFGWHTTWGAFSFPFIFLATDLTVRLLGKGPARLVIARVMIPALIASYVVSVLFQEAAFRGFSALLEFNTFVARISLASFLAYVLGQILDIQVFDRLRRSRHWWTAPVASTILGNLLDTFTFFFVAFWRSDNPFMAQHWVEIATVDYGVKLSISLLLFVPLYGMLLNGILKMLPGRPQSNA

SEQ ID NO: 66150 - protein, 434 aa, Pseudomonas aeruginosa
MNPRLAACQALAAVLAGRASLSGALPPQLDKVAPRDRGLTQELAFGAARWQPRLQALAARLLQKPFKAADTDIHALLLIGLYQLLYTRIPPHAAIGETVGCADKLKKGWAKGVLNAVLRRAQREGETLLAEVDRDPSARLGHPRWLLKALKQAWPEQLDALCAANNAHPPMTLRVNRRHGERDAYLAELAEAGIKARACDYSRDGIQLAAPRDVRELPGFAEGRVSVQDEAAQLAAEQLESAPGQRVLDACCAPGGKTCHLLETQPELAEVVAVDLEESRLVRVRENLQRLGLQASLVAADARATGEWWDGKPFQRILLDAPCSATGVIRRHPDIKLARKPEDIAALAHLQGELLDALWPTLEVGGVLLYATCSVMPAENSDSIAAFLARTPGARELDLPGPWGMKQPHGRQLLPQVEGHDGFYYAKLIKISAR

SEQ ID NO: 66151 - protein, 402 aa, Pseudomonas aeruginosa
MTSYRNGPDAKGLFGRFGGQYVAETLMPLILDLAREYEKAKDDPAFQEELAYFQRDYVGRPSPLYFAERLTEHCGGAKIYLKREELNHTGAHKINNCIGQILLARRMGKKRIIAETGAGMHGVATATVAARFGLQCVIYMGTTDIDRQQANVFRMKLLGAEVIPVTAGTGTLKDAMNEALRDWVTNVDSTFYLIGTVAGPHPYPAMVRDFQAVIGKETREQLAEKEGRLPDSLVACIGGGSNAMGLFHPFLDDAGVQIVGVEAAGHGIDTGKHAASLNGGVPGVLHGNRTFLLQDADGQIIDAHSISAGLDYPGIGPEHAWLHDTGRVEYTSITDDEALEAFHTCCRLEGIIPALESSHALAEVFKRAPSLPKEHIMVVNLSGRGDKDMQTVMHHMQQESKA

SEQ ID NO: 66152 - protein, 1032 aa, Pseudomonas aeruginosa
MDIELPGFDIERELGEGAMATVYLATQRSLQRKVALKVMAAALAADPSFAERFLREGRTLARLSHPNTVTIHDIGNVGSCYYMAMEYLPNGTLKERIQQGLDPEQGLAYVRQVAAALGYAHSQGLVHRDVKPANILFRADGTAVLSDFGIAKSIEDNTQFTQVGFAVGTPSYMSPEQARGQEIDGRADLYALGVVLYEILTGKLPYNGKDSLSTALAHLTEPLPELPIEQGRYQDILRQLLAKDPAERFPTAGALIAALDRLAPSALEATQIRPLATPQGSPRASNPPPAEPAPLPPADLGGLQPVSIQLPPVTPSAGGATPPPPPPSQAAKPPSPPPPPLPPAKPRAGGSRTPLIAAAAAAVLLAIGGGAWWLLGSGDAPSAADPAPLGQTPADKPQQQTPVADAEQDGGERPLLMPGKKTLFQRVLTKPGAAISAEAGGPPRAGAVPAFSVLYVYARKQVGGSPWLRVGASSNGEGDGWLPASAVSDWKQSLVLKFTERSGRAPVMFLNSAEQVERLLGDTRAARDTLTQAVDHKGDPQVVAVEPNDRAIPQDQFYLLPIFDSKESFDADGQPAQLLEVASIDPGGSAAAPQAPGQAGQGGASGAASDTFRTGIVLVVDTSVSMQPYIDRVREVIDGLQRQIGERGDLDKVSFGLVGFRNNTDKTPGLEYVSKTLVPLQPGNDAQRFAELSSQVRATDVSSHSFNEDAFAGIMQAVDEMDWSPYAGRVVLLVTDAGALRKNDPLGRTQMNEAEVRQAALRKGVKIYALHLRTPAGKNNHGYAEQQYRSLTADANPKIADLYIPVAGGEVNAFGNTVKEIGTVFADLVHDAGNRKPQAPRFDAAPSVASKSAAIGYAMQMEFLGRRDPVRAPQVVTAWTADRDLTNPALPAFQVCVLLSKLQLNELQQSLKLIVDAAKRTQTSPKDFFQEIASASAYMSRDPAQLVKGSNLAQSGVLGEYLEGLPYRSKSLNMTQDLWLSLSVAEQQDFIDELESKIRLYETFHNDVANWVRFGDADAGDALYRVPLSTLP

SEQ ID NO: 66153 - protein, 144 aa, Pseudomonas aeruginosa
MTLYRLHEADLEIPDAWQDQSINIFKLPASGPAREASFVISRDASQGDAPFADYVARQLENAEKQLPGFKLHKRWDINIHGHAAVLLDYQWQREGRDLMLRQVFIERRPAVLITTLTTTPADLPHHEPAWKQAMQTLVPRPTPS

SEQ ID NO: 66154 - protein, 187 aa, Pseudomonas aeruginosa
MSLINTQVQPFKVNAFHNGKFIEVTEESLKGKWSVLIFMPAAFTFNCPTEIEDAANNYGEFQKAGAEVYIVTTDTHFSHKVWHETSPAVGKAQFPLIGDPTHQLTNAFGVHIPEEGLALRGTFVINPEGVIKTVEIHSNEIARDVGETVRKLKAAQYTAAHPGEVCPAKWKEGEKTLAPSLDLVGKI

SEQ ID NO: 66155 - protein, 275 aa, Pseudomonas aeruginosa
MAVSQPAISKTLKELEEILGARLFERSKAGAELTEAGVTFLRYAGPCVQALRDGVNTLRGHEAQVETVRVGVLSTVESLVVPEVIRRLHRRHGALVVSVATGPSAYLLAQLKVGELDLVVGRMTDSPDIQGLTFEHLYSESMMLVVRPGHPLLAAPLGDLQRLAEFPLVLPLAGTTIRRHADSLFVQWGIALAGQRLETLSPTLSRSYVLRSEAIWVAPRDAVRLDVGNGELAELDLGIREPGGSVGLCHNAALPLPLGAQWFSAVLREVAAELH

SEQ ID NO: 66156 - protein, 161 aa, Pseudomonas aeruginosa
MNGTEASQANGPAQEYLTFTLGREEYAIDILRVQEIRGYDQVTAIANAPPFIKGVINLRGAIVPIVDLRIKFHLAEVTYDPFTVVIILNIGRRIVGVVVDSVSDVIALGGDAIRPPPEFGASFDTEYLLGLATAGERMLILVDIERLMTSREMALVDEAAA

SEQ ID NO: 66157 - protein, 270 aa, Pseudomonas aeruginosa
MATPQPVDARTQPWRETPGGDLVALGRPVRQALHLVRHNPAQGRVLSRRETILLVLFALTLHGAVIHWLSQQRTPALPEVPPQVPPMTIEFTAPAPPVVEPPPPEPLPPVVEEPPPPVVDENAVKPPPPKPVPKPKPKPKPQPRPKPAPKAVEPAPPAPPQPAAPPAPPAPAAAPAPLTPPSANAGYLHNPAPEYPALAMRRGWEGTVLLRVHVLASGSPSEIQVQKSSGREALDQAAVKAVKRWSFVPAKRGDKAEDGWVSVPIDFKLN

SEQ ID NO: 66158 - protein, 259 aa, Pseudomonas aeruginosa
MAGSLIERALGLLELLASDARGLPLQQLADRLDIPKSAAHRMLAELIRLGYVRQDDDTSRYRLSTRLAALGFRFLASSGVVDLVQPVLDGLARETGELVRLGVIEGDRQTWIAKSQGATSGLRYDPDMGREAPLFYTASGHAWLASLSDKAALALVERQGVGAARDFGPNAPRSRSELLRYLKRAREHGYAWQIECSAPGMAAMAALVRHPEDGRALGVLSVAGPSARFGEARMHELAPLLLAAAQDLSHASQASELFR

SEQ ID NO: 66159 - protein, 284 aa, Pseudomonas aeruginosa
MSAPRSVLAGLIGAGIQASRTPALHEREGDAQGIRYLYRLIDLDPLGKSADDLEFLLAAASDLGFTGLNVTFPCKQAIIPLLDDLSAEARGIGAVNTVVLRDGRRIGHNTDCLGFAEGFRRGLADAPRQRVVQMGAGGAGAAVAHALLAEGVERLVLFDVDPARAQALADNLNQHFGAPRALAGSDLAGALGDAQGLVNTTPVGMAKLPGMPVPAELLRADLWVAEVIYFPLETELLRQARALGCRTLDGGTMAVFQAVKAFELFSGVTADAARMQAHFASLGD

SEQ ID NO: 66160 - protein, 501 aa, Pseudomonas aeruginosa
MSDLAQNPPAVRTVLAGLMLSIFLSALDQTIVAVSLPAISADYADLDLLAWVISAYMVAMTVSMPIYGKLGDLYGRRRLMLFAIVVFTAASLLCGLAQSMGQLVLARVLQGIGAGGLMAVSQAIIGDIVPPRERGRYQGYFSSMYAIASVAGPVLGGLLTEYLSWHWVFWINLPIGLLALAISRRTLVGLPVPRRQPVIDYLGIVLMVVGLTALLLAITQIGQGAAWSDPALLGLFALAALALLLFVAQERRFREPLVPMQLFAVRAATLSWLVAFFASFQAISLTVLVPLRYQSVTGAGADSAALHLLPLVMGLPLGAYCCGRLTASLGRYKPLILLGAVLLPCGIAGLALVPVGDHWLSGLCMLLTGIAIGTQFPTSLVAAQNAVEQRHIGVATSNATLFRSLGGAVGVALMSAILLALLKHLRIGGGLDQGFSESALLSSLDAASGPARVILQHVLADAFKVLFLVNAAVALLGLAVASALPDMTLRGRGATQPTAGE

SEQ ID NO: 66161 - protein, 221 aa, Pseudomonas aeruginosa
MSYQHQYIDGTPIHFPLGKLVCVGRNYAEHAKELNNPVPTEPLLFIKPGSCVVPVSGGLSLPQERGSVHYEAEIAVLIGKPLSRKPNREEVLDAISGYAPALDLTLREVQAKLKEKGLPWELAKSFDGAGVLSPFVNADQFPDPTDIGIRLTINGEVRQDGNSRDMLNPIVPLIQHIAGHFSLQAGDVVLTGTPSGVGPLNSGDELLLELPGASRFETRVL

SEQ ID NO: 66162 - protein, 321 aa, Pseudomonas aeruginosa
MTIHAQTPEPFSMSRAFTPRRLLLAVLLVALSALVLLGQSFRVFDRAWFAVQEWRHADAWKERSIWLPDYRVRIEAQPIEGLNDDVSALTFDPDRRTLFTVTNQPAQIIELSLQGKVLRTIPLTGFGDAEAIEYISRGVYVITDERQQRLVKVRLEDDTRFIDAADAQQLSLGIGLNGNKGFEGLAYDAEGKRLFVAKERDPVRIYEIHGFPHTQADKPFAVHVVDDPGRDKRLFVRDLSSLQFDEGTGHLLALSDESRLVVELDTDGEPVSTLSLLRGMHGLKRSVPQAEGVAMDDRGVLYLVSEPNLFYVFSKDEPAQP

SEQ ID NO: 66163 - protein, 264 aa, Pseudomonas aeruginosa
MKQYLDLMRHVREHGTFKSDRTGTGTYSVFGHQMRFDLAAGFPLVTTKKCHLKSIVHELLWFLKGSTNIAYLKEHGVSIWDEWADENGDLGPVYGYQWRSWPAPDGRHIDQIANLMAMLKKNPDSRRLIVSAWNPALIDEMALPPCHALFQFYVADGKLSCQLYQRSADIFLGVPFNIASYALLTLMVAQVAGLQPGEFIWTGGDCHLYANHLEQADLQLTREPLPLPSMKLNPEVKDLFDFRFEDFELVGYEAHPHIKAPVAV

SEQ ID NO: 66164 - protein, 168 aa, Pseudomonas aeruginosa
MARPLAMIAALGENRAIGIDNRLPWRLPADLKHFKAMTLGKPVIMGRKTWDSLGRPLPGRLNLVVSRQAGLALEGAEVFASLDAALARAEAWAQAEDADELMLIGGAQLYAEALPRAARLYLTRVGLAPEGDAFFPEIDGAAWRLASSIEHAAADDAPAYAFEVWERR

SEQ ID NO: 66165 - protein, 398 aa, Pseudomonas aeruginosa
MTLPSLRLKANAERRLRAGHLWVYSNEVDVAATPLNAFAAGDQAVLEMANGKPLGIVALSPNNLICGRLISRDTKHVLDKSLLVHRINIALSLRERLFDKPFYRLVYGDSDLLPGLVVDRFGDVLVVQLASAAMELRKDEVLAALLQVLKPAAVLWKNDSSARDAEGLERYVANAYGEVPEWVALEENGVKFEAPVLAGQKTGWFYDHRMNRARLAPYVQGKRVLDLFSYIGGWGIQAAAFGASEVMCVDASAFALDGVERNAALNGVAEKVACVEGDVFEALRELKAADERFDVVIADPPAFIKRKKDLKNGEAAYRRLNEQAMRLLSKDGILVSASCSMHLPEDDLQNILIGSARHLDRNIQLLERGGQGPDHPVHLAIAETRYIKSLTCRLLPNG

SEQ ID NO: 66166 - protein, 270 aa, Pseudomonas aeruginosa
MPELPEVETTRRGIAPYLEGQRVERVIVRERRLRWPIPEDLDVRLSGQRIVSVERRAKYLLLGAEAGTLISHLGMSGSLRLVESGTPASRHEHVDIELASGMALRYTDPRRFGAMLWSLAPLEHELLRNLGPEPLTDAFAGQRLFELSRGRSMAVKPFIMDNAVVVGVGNIYASEALFAAGIDPRKPAGSISKARYLRLAEEIKRILAIAIERGGTTLRDFVGGDGQPGYFQQELFVYGRGGEFCKVCGSTLREIRLGQRASVYCPRCQR

SEQ ID NO: 66167 - protein, 83 aa, Pseudomonas aeruginosa
MSLKITDDCINCDVCEPECPNGAISQGEEIYVIDPNLCTECVGHYDEPQCQQVCPVDCIPLDDANVESKDQLMEKYRKITGKA

SEQ ID NO: 66168 - protein, 465 aa, Pseudomonas aeruginosa
MAARKVQITMKTPARRRVGLLLASLCLPLFAQAAETQPTHEFSLDNGLKVIVREDHRAPVVVSQLWYRIGSSYETPGLTGLSHALEHMMFKGSRKLGPGEASRVLRDLGAEENAFTTDDYTAYYQVLARDRLPVALEMEADRMAHLSLPVDQFKSEIEVIKEERRLRTDDNPNALAFERFKAAAYPASGYHTPTIGWMADLQRMTIDDLRHWYESWYAPNNATLVVVGDVTADEVKTLAKRYFGEIPWRQLPPARKPLELAEPGERRLKLYVRTQLPNLIMGFNVPSLGSSENPREVNALRLIGALLDGGYSARLASRLERGEELVAGASTYYDAFNRGDSLFVLSATPNVQKGKTLEQVEAGLWKQLDDLKQNPPSAAEIERVRAQMIAGMVYEKDSIAAQASSIGQLESVGLSWKLIDQDLEALKAVTPDDIQKAARTYFTPSRLTLAQVLPVKAEEKEARHE

SEQ ID NO: 66169 - protein, 265 aa, Pseudomonas aeruginosa
MSQASSTDTPFVIAGRTYGSRLLVGTGKYKDLDETRRAIEASGAEIVTVAVRRTNIGQNPDEPNLLDVIPPDRYTILPNTAGCYDAVEAVRTCRLARELLDGHNLVKLEVLADQKTLFPNVVETLKAAEQLVKDGFDVMVYTSDDPIIARQLAEIGCIAVMPLAGLIGSGLGICNPYNLRIILEEAKVPVLVDAGVGTASDAAIAMELGCEAVLMNTAIAHAKDPVMMAEAMKHAIVAGRLAYLAGRMPRKLYASASSPLDGLID

SEQ ID NO: 66170 - protein, 197 aa, Pseudomonas aeruginosa
MIKLEQLVLASHNAGKLKELQAMLGASVKVRSIGEFSQVEPEETGLSFVENAILKARNAARLSGLPALADDSGLAVDFLGGAPGIYSARYADGRGDAANNAKLLEAMKDVPDAERGAQFVSVLALVRHADDPLPILCEGIWEGRILREARGAHGFGYDPLFWVPERDCSSAELAPEEKNRLSHRARAMALLKQRLGL

SEQ ID NO: 66171 - protein, 230 aa, Pseudomonas aeruginosa
MSTIAENIAKVAARIREAAQAAGRDPATVGLLAVSKTKPAAAVREAHAAGLRDFGENYLQEALGKQAELADLPLNWHFIGPIQSNKTRPIAEHFQWVHSVDRLKIAQRLSEQRPAGLPPLNVCLQVNVSGEASKSGCAPEDLPALAEAVKQLPNLRLRGLMAIPEPTAERAAQHAAFARLRELLLDLNLGLDTLSMGMSDDLEAAIGEGATWVRIGTALFGARDYGAPAS

SEQ ID NO: 66172 - protein, 344 aa, Pseudomonas aeruginosa
MDITELLAFSAKQGASDLHLSAGLPPMIRVDGDVRRINLPPLEHKQVHALIYDIMNDKQRKDFEEFLETDFSFEVPGVARFRVNAFNQNRGAGAVFRTIPSKVLTMEELGMGEVFKRVSDVPRGLVLVTGPTGSGKSTTLAAMLDYLNNTKYHHILTIEDPIEFVHESKKCLVNQREVHRDTLGFSEALRSALREDPDIILVGEMRDLETIRLALTAAETGHLVFGTLHTTSAAKTIDRVVDVFPAEEKAMVRSMLSESLQSVISQTLIKKIGGGRVAAHEIMIGTPAIRNLIREDKVAQMYSAIQTGGSLGMQTLDMCLKGLVAKGLISRENAREKAKIPENF

SEQ ID NO: 66173 - protein, 144 aa, Pseudomonas aeruginosa
MASDKPLRLLLGFDYGTRQIGVAVGQAVTGQARELCVLKAQNGVPDWNRVEALIKEWQPDAIVVGLPLNMDGSPSEMSERAEKFGRRLNGRFNLPVFTHDERLTTYAAKGERLAQGQRDGYRERPVDALAAALLLEGWLAEHPD

SEQ ID NO: 66174 - protein, 682 aa, Pseudomonas aeruginosa
MKKINAGNLFAGMRSSSVIAGLFIVLIVSIVLLFANFAYLNTQSNHDKQYIGHAGELRVLSQRIAKNATEAAAGKGEAFKLLKDARNDFEKRWNILVNGDESTSLPPSPEAVKPQMDVVQQDWDGLRKNADSILASEQTVLSLHQVASTLAETIPQLQVEYEEVVDILLENGAPADQVAVAQRQSLLAERILGSVNKVLAGDENSVQAADSFGRDASLFGRVLKGMQEGNAAMSISKVTNAEAVDRLNEIAELFEFVSGSVDEILETSPDLFQVREAANNIFSVSQTLLDKASQLADGFENLAGGRSINLFAGYALGALALASIILIGLVMVRETNRRLAETAEKNDRNQAAILRLLDEIADLADGDLTVAATVTEDFTGAIADSINYSIDQLRELVETINQTAVQVAAAAQETQSTAMHLAEASEHQAQEIAGASAAINEMAVSIDQVSANASESSAVAERSVAIANKGNEVVHNTITGMDNIREQIQDTSKRIKRLGESSQEIGDIVSLINDIADQTNILALNAAIQASMAGDAGRGFAVVADEVQRLAERSSAATKQIEALVKTIQTDTNEAVISMEQTTSEVVRGARLAQDAGVALEEIEKVSKTLAALIQNISNAARQQASSAGHISNTMNVIQEITSQTSAGTTATARSIGNLAKMASEMRNSVSGFKLPEGVEQA

SEQ ID NO: 66175 - protein, 467 aa, Pseudomonas aeruginosa
MGLNADWMQRDLNVLWHPCTQMKDHERLPVIPIRRGEGVWLEDFEGKRYIDAVSSWWVNVFGHANPRINQRIKDQVDQLEHVILAGFSHQPVIELSERLVKITPPGLDRVFYADSGSAGIEVALKMSYHFWLNSGRPRKKRFVTLTNSYHGETIAAMSVGDVALFTETYKSLLLDTIKVPSPDCFLRPDGMCWEEHSRNMFAHMERTLAEGHDEIAAVIVEPLIQGAGGMRMYHPVYLKLLREACDRYGVHLIHDEIAVGFGRTGTMFACEQAGIAPDFLCLSKALTGGYLPMSAVLTSETIYRGFYDDYQTLRAFLHSHTYTGNPLACAAALATLDIFEEDKVIEANRALSTHMARATAHLADHPHVAEVRQTGMVLAIEMVQDKASRTPYPWQERRGLKVFQHGLERGALLRPLGSVVYFLPPYVITPEQIDFLAEVASEGIDIATRDAVSVAVSDFHPDHRDPG

SEQ ID NO: 66176 - protein, 496 aa, Pseudomonas aeruginosa
MSLRWLRAAAFLMLGVFSAVALGKDKQPTAIVVGAGLAGLSAAYELQKDGWQVTVLEARPQVGGRSGLATSEWVGNQKVQPTLNAYLDTFKLKPVPAPDFVRTPSYLIDGLYYSSSDLALKQPNVAADLKRFESTLDDLSASISDPLNPASSNTLFALDQMNAARWLDKLNLSPTARLLVNQRIRSRYDEPSRLSLLYLAQQGRAYRGVDDRDLRAARLPGGSQVLAEAFVKQIKTIKTKSKVSSIVQAKDGVAVKAGSETYKADYVVLAVPLKALGQIQMTPSLSGTQMSALKGTNYGWRDQILLKFKRPVWDDKSRLSGEIFSDQGLGMIWVEPALKGGANVLINLSGDNARVLQAFGDRQMVDQVLIRMNKFYPKMRGAFAGYEIRRYSADPGTGGSYLAYGPGQVTRFWRIWEQPLSRVAFAGEHTDALYPGTIEGALRSGKRAASQVRDLYAGKTPVIEGAPMVAKAEKVAAPTTGGEKKNPFAWFTRLFD

SEQ ID NO: 66177 - protein, 458 aa, Pseudomonas aeruginosa
MTSTAFSSLPLSADLLANLDSLGYREMTPIQAQSLPLILQGHDLIAQAKTGSGKTAAFGLALLSPLNPRYFGCQALVLCPTRELADQVAKEIRRLARAADNIKVLTLCGGVPYGPQVASLEHGAHVVVGTPGRIQEHLRKGTLVLDGLNTLVLDEADRMLDMGFYDSIAEIIGQLPERRQTLLFSATYPDGIEKLAKTFMRDPRQVRVESLHADSQIEQRFFEIDPKQRMDAVVRLLQHFRPQSCVAFCQTRQQCQELADALKAQRISALALHGDLEQRERDQVLTVFANRSCNVLVATDVAARGLDIAALETVINVELARDPEVHIHRIGRSGRAGEKGLALSLVAPAEASRAQAIEDLQKQPLAWYALGQLKASPEPLLPPMSTLCIAGGRKDKVRPGDLLGALTGDAGLPGSAVGKIAIFDFQAFVAIERGLAHQALKRLSEGKIKGRSFKVRLL

SEQ ID NO: 66178 - protein, 850 aa, Pseudomonas aeruginosa
MDIAEYFSKQTTEYLQRAAQVAAEFGKREVDTEHLLYALADADVVQAVLKQFGLSPADLKQYIEANAVRGASKGEASEDMTISPRVKSALQHAFALSRELGHSYVGPEHLLLGLAAVPDSFAGTLLKKYGLTEQALRQKAVKVVGKGAEDGRVDGPSNTPQLDKFSRDLTRLAREGKLDPVIGRSKEVETTIEVLARRKKNNPVLIGEPGVGKTAIVEGLAQRMVQGEVPEVLRDKRLVELNINAMVAGAKYRGEFEERLKQVMDELQAAQSEIILFIDEVHTIVGAGQGGGEGGLDVANVLKPAMARGEMNLIGATTLNEYQKYIEKDAALERRFQPVFVPEPTVEQTISILRGLRDKLEGHHKVTIRDEAFVAAAELSDRYIGNRFLPDKAIDLIDQAAARVRIASTSRPAEIQELEAELAQLKREQDYAASRKWYDEAKVFEKRIQERKEHLEQITERWQQTQGSKTEEVRVEDIAEIISKLTGIPVTELTAEEREKLLQMEERLHQRVIGQQEAITAVSDAVRLARAGLRQGSRPIATFLFLGPTGVGKTELAKALAEVVFGDEDAMIRIDMSEYMERHAVSRLIGAPPGYVGYDEGGQLTERVRRRPYSVILLDEIEKAHADVNNILLQVFDDGRLTDGKGRVVDFTNTIIIATSNLGSELIMKNAQAGEFAQPPEKLKRELMTTLRGHFRPEFLNRLDEVIVFESLSKAQIEDIVRLQLERVKRAAHAQDIYLHIDDSLVGHLAEEAYQPEFGARELKRQIRQQLETRLATAMLKGEVKEGETVTFFYDAKDGVGYRKGAAPNPAARKKSGAGETPRGRATAARKPAAKKGAAAKGKADKPKAK

SEQ ID NO: 66179 - protein, 452 aa, Pseudomonas aeruginosa
MNRTLAYKLGAIALLILLLLIPLLMIDGLIRDRQEVRDGVLQDIARSSSYSQRLTGPLLVVPYRRTVREWVTEEKTEKRVLQEREQRGELYFLPDRFALDGQMRTELRYRGIYQARLYHVDNKVAGYFQVPAHYGIEEDLEDYQFETPFLAMGISDIRGIENALRLSLNGASVDFEPGSRVGLLGSGVHAPLQGVDGRQAQRLEYAFDLSLLGSERLDIVPVGRDSQVILKADWPHPSFGGEFLPSEREITAQGFTARWQTSFFATNMEEALRSCVEEQRCDGFQARAFGVGLVDPVDQYLKADRAIKYALLFITLTFAGFFLFEVLKRLAVHPVQYALVGLALAFFYLLLLSLAEHVGFELAYLVSAGACVGLIGFYLCFVLRSVARGLGFSVGLAGLYGLLYGLLSAEDYALLMGSLLLFAVLAAVMVLTRRLDWYGVGRKDFPAVPARA

SEQ ID NO: 66180 - protein, 206 aa, Pseudomonas aeruginosa
MSATHTLFYAAASPFVRKVLVLLHETGQRERVALEEVTPTPVAPIRQLNASNPAGKIPALRLPDGQVLHDSRVICDYFDQQHVGEPLIPREGSARWRRLTIASLADAVLDAAVLSRYETFVRPEEKRWDTWLEAQREKIGRSLAWLEGDCIAELQARFDIAAIGVACALGYLDLRQPEWDWRGRYPRLAAWFAEVSQRPSMQATRA

SEQ ID NO: 66181 - protein, 575 aa, Pseudomonas aeruginosa
MSSTPKPPASPREFSPSLLDLGTLESLDSLPRAGQRSAEFSASLLDLGTPASLDCLPRAGLRAAEFSAARLDLGTPASLDCLPRASHHAGPELPPLSPRLYSADLAPTKAEGRRWGRYSLFALWTNDVHNIANYSFAIGLFALGMSGAQILAALALGALMVYGLMNLSGYMGQKTGLPYPVMCRIAFGIHGAQLPALIRAVIAIAWFGIQTYLASIVLRVLLTAIWPGLAAYDQDAILGLSSLGWATFVAIWCVQLLIFAYGMEMVRRYESFAGPVILLTVAALAAWMYLRAGASIAWSSGEPMSGSQMWLKIFGGAAFWVTLYGTMILNFCDFARGCPDRRTISVGNFWGLPVNILLFGLFAVVLAGAQFRIDGQLIQSPTDIVAAIPDTLFLVLASLALLIVTVAVNIMANFVAPAYVLTNLAPNLLNFRRAGLISATIAVLILPWHLYNSPGVILYFLGGLGALLGPLYGIIMVDYYLVRKGRVNLPELYTESRAGAYHYARGVNPRAIAAFVPAAIISTLLALLPAFAELSPFSWFFGAGLAGLIHYALAKRRTAYREVSGEAIAVDSVQH

SEQ ID NO: 66182 - protein, 352 aa, Pseudomonas aeruginosa
MSATASVATRHDWSLAEVRALFEQPFNDLLFQAQTVHRAHFDPNRVQVSTLLSIKTGACPEDCKYCPQSGHYNTGLDKEKLMEVQKVLEAAAEAKAIGSTRFCMGAAWKHPSAKDMPYVLEMVKGVKKLGLETCMTLGRLTQEQTQALADAGLDYYNHNLDTSPEFYGNIITTRTYSERLQTLAYVREAGMKICSGGILGMGESVDDRAGLLIQLANLPEHPESVPINMLVKVKGTPLAEEKDVDPFDFIRTLAVARIMMPKSHVRLSAGREQMNEQMQALAFMAGANSIFYGEKLLTTKNPQAEKDMQLFARLGIKPEEREEHADEVHQAAIEQALVEQRESKLFYNAASA

SEQ ID NO: 66183 - protein, 401 aa, Pseudomonas aeruginosa
MSFDLASRLASRRAEDLYRQRPLLESAQGPDVVVDGQPLLAFCSNDYLGLANHPEVIAALRAGAERWGVGGGASHLVVGHSGPHHELELALAEFTGRPRALLFSTGYMANLGAVAALVGKGDTVLEDRLNHASLLDAGLLSGARFSRYLHNDPASLAARLDKAEGNTLVVTDGVFSMDGNLADLPALAAVAQARGAWLMVDDAHGFGPLGASGGGIVEHFGLGQEQVPVLIGTLGKGFGTAGAFVAGSEELIETLIQYARPYIYTTSQPPAVACATLKSLELLRRESWRRQHLAALIARFRHGAEALGLTLMDSFTPIQPILVGGSRQAVALAGMLRARGIMVGAIRPPTVPANSARLRVTLSAAHSEAQVDRLLEALGESWRQLSSSLLAEIEAEEGDDA

SEQ ID NO: 66184 - protein, 387 aa, Pseudomonas aeruginosa
MLRISHYLRSLTEDAPTPRRAGGRRAPVVIWNLLRRCNLTCKHCYSTSADSDFRGELETAEILRGIDDLRAAGVRVLILSGGEPLMHPDLFEIAAHARQAGMFVALSSNGTLIDEGNIQRVAEARFDYVGISLDGLRETHDRFRQKQGSFDAALAAMRLCREADIRVGMRTTLTEENAAQLPALLDLMRELDVQKFYLSHLNYSGRGRRSRALDAHHRRTREALALLFERADQDIRQGRDSDFVTGNNDADAILLLDWLKRRRPQQLARLCELLLDWGGNASGEGIANIDNTGEVHPDSYWWHHSVGNIRHQRFADFWFERPDPLLLQLRQRPRPVVGRCSQCRWLDICNGNTRTRAWAGGELWGEDPGCYLSDQEIGLERIALHAV

SEQ ID NO: 66185 - protein, 392 aa, Pseudomonas aeruginosa
MNLRPLAPLLLTLLAGCSQQPPLRGSGDLGVLIERADGSVQILDGTAKTSLARVEGLGDLSHASLVFSRDQRYAYVFGRDGGLTKLDLLAQRIDKRLIQGGNSIGGAISQDGRLVAVSNYEPGGVKVFDSRTLELVAEIPATRLPGQDRNSRVVGLVDAPGQRFVFSLFDSGEIWIADFSQGDTPHLTRFRDIGKQPYDALISPDGRYYMAGLFGEDGMAQLDLWHPERGVRRVLGDYGRGQRKLPVYKMPHLEGWTIASDQAFVPAVGHHQVLVLDARDWKQTDAIDVAGQPVFVMTRPDDRQIWVNFAYPDNDKVQVIDSETHEVIETLRPGPGVLHMEFSGRGDQVWISVRDADQLQVWDPYRLKRIGSLPARSPSGIFFSHRAQHIGL

SEQ ID NO: 66186 - protein, 568 aa, Pseudomonas aeruginosa
MPFGKPLVGTLLASLTLLGLATAHAKDDMKAAEQYQGAASAVDPAHVVRTNGAPDMSESEFNEAKQIYFQRCAGCHGVLRKGATGKPLTPDITQQRGQQYLEALITYGTPLGMPNWGSSGELSKEQITLMAKYIQHTPPQPPEWGMPEMRESWKVLVKPEDRPKKQLNDLDLPNLFSVTLRDAGQIALVDGDSKKIVKVIDTGYAVHISRMSASGRYLLVIGRDARIDMIDLWAKEPTKVAEIKIGIEARSVESSKFKGYEDRYTIAGAYWPPQFAIMDGETLEPKQIVSTRGMTVDTQTYHPEPRVAAIIASHEHPEFIVNVKETGKVLLVNYKDIDNLTVTSIGAAPFLHDGGWDSSHRYFMTAANNSNKVAVIDSKDRRLSALVDVGKTPHPGRGANFVHPKYGPVWSTSHLGDGSISLIGTDPKNHPQYAWKKVAELQGQGGGSLFIKTHPKSSHLYVDTTFNPDARISQSVAVFDLKNLDAKYQVLPIAEWADLGEGAKRVVQPEYNKRGDEVWFSVWNGKNDSSALVVVDDKTLKLKAVVKDPRLITPTGKFNVYNTQHDVY

SEQ ID NO: 66187 - protein, 612 aa, Pseudomonas aeruginosa
MAFAVELEEWVGAHWHRFITRHASGEFEAARVTLESMRRPLGMLFRALGGAPGVALEATPARRLLLRRTWLQRVAGTCEQAPVSWFNGDSLRLPESLAVYPQAELNRELYRWLALLAASAGPLRHWAQDNQRWARQLLDAYPALRPRYARLVAAHLRQRPSLDDCPAADAELEIALRRALAEPGSVERFPRVERAPWPVPLWLYPGERWTPSASAEDGEEAAAGAGKRQVARSGARKRAERIEERNSERNLLLFRLESLLSWSEHLALDRCSDDEDDPDGARVAEDLDYLSLSRQRTQKGGGLRLDLDLPAADYDDLPLGPGLKLPEWDYRQQRLLSDHVLLQPMRPRGATSASLPAHLEKTALHLRRQFACLRDGRQRLRQQPQGDEIDLDAWLDFQVERRRGGSTQPGLFLEQRPRRRDLACLLLADLSMSTEAYLDDQRRVIDSIVDSLLLFGEALQALGDPFALYGFSSVRRQQVRWQVLKDFDEGYGGEVRGRVLALSPGYYTRMGAAIRRASQVLGGQPQKRRLLLLLSDGKPNDLDRYEGRYGIEDTRQAVIEARSQGLVPFCITIDKEAADYLPYLFGADGFALVERAGQLPERLLQLYRRLRR

SEQ ID NO: 66188 - protein, 341 aa, Pseudomonas aeruginosa
MRRLLLGAGLLLASLVAWADVPPIPALTARVTDLTATLSGDQRQHLEQQLAALEAKSGAQLAVLLVPTTGDDSIEEYAVRTFEKWKLGQKKVDDGVLLLVAKNDRTLRIEVGYGLEGAITDVQAGRIISEQITPQFRQGNFYGGIQAGVDSLVQLIDAEKNPDSATASAPVDALPAVPEATPPRALPAPVDEGEVYDSAPPEPKKKSGLSGQLWGNPVYLGVYVAVLLAVALLGRLLPLQWMRRRSIGRFLLCSAAVAGLAWLLSMGLWQNVDRAADDSLGVLAPTLFIYALFLLPGEVLMAILSAILNSRGGGGGGGSGGGGIFRGGGGSSGGGGASGRW

SEQ ID NO: 66189 - protein, 139 aa, Pseudomonas aeruginosa
MSIRPSLPLAGLLLAVALPLSAAQPGAAKGAPLSGCAAKQAAIEAKLETARSFANEGQVAGLEKALSEVKEHCTEAGLLRENKQKVIDSEREVSEREKDLRKAMGKGDPEKIEKRKAKLAEARAELEEAKKGLEQAQAQ

SEQ ID NO: 66190 - protein, 322 aa, Pseudomonas aeruginosa
MRTLIRLVRTLILLLVLALLAGAWWWLQDEALRPPALAGHSEDSSLKVAGLRRHYLLYVPPGVSEGAPLLVVLHGSRGDGAQMRRISGYGFDRLAAQEGFLVAYPDGFEGHWNDCRKAASYSARLRDVDDVAFLRALVARLAQEYRVDSQRVYVAGYSNGGQMAFRLAAEAPGLPAAIAAVAASLPTTGNDACRPVERPTAALLINGTRDPINPYLGGKVSLFGFGDRGAVRSTLDSARWWAGLNGIAAPPDVAPLTRPGPVWTERQRWQEDGHPPVELLSVHGGGHVLAQPDYRFPRILGKSDPELDAPVEIWRFFSQLPR

SEQ ID NO: 66191 - protein, 434 aa, Pseudomonas aeruginosa
MKLLWGVLAAALAAWGLTLAVDPPASLDIWVVRKQAILLTGVASFALMSLIMLLAVRPVWLEKPLDGLDRMYRLHKWAGILAIVLGLLHYLLELAGPWLAGIVGKPVKGPRVETFLDVFRGSAKELGEWSAWILGGMLLVTLWQRFPYHLWRYVHKALALVYLVLAFHSVVLAPASYWSQPAGWLVAACALLGSACALLSLSGRIGRTRRHAGVVTAVERHGESLLEVTCRLQGDWSHRAGQFAFLTCDRLEGAHPFTIASADRGCGEVRFSIKALGDYTRRLQDNLEVGARVEVEGPYGCFDFRRGLAGRQVWVAAGIGVTPFIAWLESLQAAPESAPSVELHYCVRNSQEALFAGRLRELCEHLPSVTLHIRYSDEQGKPQAAQLGVLKSAEGRWPSVWFCGPQGLADSLRRDLRRQGMPLRLFHQEAFRMR

SEQ ID NO: 66192 - protein, 396 aa, Pseudomonas aeruginosa
MSEYSVFTSESVSEGHPDKIADQISDAVLDAIIAKDKYARVACETLVKTGVAIIAGEVTTSAWVDLEELVRKVIIDIGYDSSDVGFDGATCGVLNIIGKQSVDINQGVDRAKPEDQGAGDQGLMFGYASNETDVLMPAPICFSHRLVERQAEARKSGLLPWLRPDAKSQVTCRYEGGKVVGIDAVVLSTQHNPEVSYNDLRDGVMELIIKQVLPAELLHKDTQFHINPTGNFVIGGPVGDCGLTGRKIIVDSYGGMARHGGGAFSGKDPSKVDRSAAYAGRYVAKNIVAAGLAERCEIQVSYAIGVAQPTSISINTFGTGKVSDEKIVQLVREHFDLRPYAITKMLDLLHPMYQPTAAYGHFGRHPFELTVDGDTFTAFTWEKTDKAALLRDAAGL

SEQ ID NO: 66193 - protein, 387 aa, Pseudomonas aeruginosa
MTVLKMTDLDLKGKRVLIREDLNVPVKDGQVQSDARIKAALPTLKLALEKGAAVMVCSHLGRPTEGEFSAENSLKPVAEYLSKALGREVPLLADYLDGVEVKAGDLVLFENVRFNKGEKKNADELAQKYAALCDVFVMDAFGTAHRAEGSTHGVARFAKVAAAGPLLAAELDALGKALGNPARPMAAIVAGSKVSTKLDVLNSLAGICDQLIVGGGIANTFLAAAGHKVGKSLYEADLVETAKAIAAKVKVPLPVDVVVAKEFAESAVATVKAIAEVADDDMILDIGPQTAAQFAELLKTSKTILWNGPVGVFEFDQFGEGTRTLANAIADSAAFSIAGGGDTLAAIDKYGIAERISYISTGGGAFLEFVEGKVLPAVEILEQRAKG

SEQ ID NO: 66194 - protein, 354 aa, Pseudomonas aeruginosa
MALISMRQMLDHAAEFGYGVPAFNVNNLEQMRAIMEAADKTDSPVIVQASAGARKYAGAPFLRHLILAAIEEFPHIPVVMHQDHGTSPDVCQRSIQLGFSSVMMDGSLREDGKTPADYDYNVRVTQQTVAFAHACGVSVEGELGCLGSLETGMAGEEDGVGAEGVLDHSQLLTDPEEAADFVKKTKVDALAIAIGTSHGAYKFTKPPTGDTLSIQRIKEIHARIPDTHLVMHGSSSVPQDWLAIINEYGGEIKETYGVPVEEIVEGIKYGVRKVNIDTDLRLASTGAIRRFLAQNPSEFDPRKYFSKTVEAMRDICIARYEAFGTAGNASKIKPISLEGMFQRYARGELDPKVN

SEQ ID NO: 66195 - protein, 392 aa, Pseudomonas aeruginosa
MASTDVLIVGAGAAGLMCAMTAAGRGRRVRVLDHANKAGKKILMSGGGRCNFTNLYTEPANFLSRNPHFCKSALARYTQWDFIGLVAKHQVPYHEKKLGQLFCDNKSSDILEMLLRECAEAGAEILLDTSIEEIARDDAGYRLRTSAGEMRCESLVIASGGLSIPTLGASGFGYQVARQFGHEVLPTRAGLVPFTITDQLKELCAELSGTSVDCRVSCNGQAFRENLLFTHRGLSGPAMLQISSYWQPGDTLEIDLLPDHDASEWLAQQQRERPNSELKTLLAELFTKKLAGLLADRWFVSKPMKQYTPTELAGIAGQLSAWRVTPSGTEGYRTAEVTLGGVSTDEVSSKTMESQRSPGLYFVGEVLDVSGHLGGFNFQWAWASGYAAGQYA

SEQ ID NO: 66196 - protein, 617 aa, Pseudomonas aeruginosa
MSGKAQQQSRLKELIARGREQGYLTYAEVNDHLPEDISDPEQVEDIIRMINDMGINVFETAPDADALLLAEADTDEAAAEEAAAALAAVESDIGRTTDPVRMYMREMGTVELLTREGEIEIAKRIEEGIREVMSAIAQFPGTVDSILADYNRIVAEGGRLSDVLSGYIDPDDGSLPAEEVEPVNLKDDSADSKEKDDEEEESDDSSDSDDEGDGGPDPEEARLRFTAVSEQLDKAKKALKKHGRGSKQATAELTGLAELFMPIKLVPKQFDALVARVRSALEGVRAQERAIMQLCVRDARMPRADFLRLFPNHETDEKWVDSVLKSKPKYAEAIERLRDDILRNQQKLAALESEVELTVAEIKEINRAMSIGEAKARRAKKEMVEANLRLVISIAKKYTNRGLQFLDLIQEGNIGLMKAVDKFEYRRGYKFSTYATWWIRQAITRSIADQARTIRIPVHMIETINKLNRISRQMLQEMGREPTPEELGERMDMPEDKIRKVLKIAKEPISMETPIGDDEDSHLGDFIEDSTMQSPIEMATSESLKESTREVLAGLTAREAKVLRMRFGIDMNTDHTLEEVGKQFDVTRERIRQIEAKALRKLRHPSRSEHLRSFLDE

SEQ ID NO: 66197 - protein, 664 aa, Pseudomonas aeruginosa
MAGLIPQSFIDDLLNRTDIVEVVSSRIQLKKTGKNYSACCPFHKEKTPSFTVSPDKQFYYCFGCGAGGNALGFVMDHDQLEFPQAVEELAKRAGMDVPREERGGRGHTPRQPTDSPLYPLLSAAAEFYKQALKSHPARKAAVNYLKGRGLTGEIARDFGLGFAPPGWDNLLKHLGGDNLQLKAMLDAGLLVENSDTGKRYDRFRDRVMFPIRDSRGRIIAFGGRVLGDDKPKYLNSPETPVFHKGQELYGLYEARQKNRDLDEIMVVEGYMDVIALAQQGIRNAVATLGTATSEEHIKRLFRLVPSILFCFDGDQAGRKAAWRALESVLPNLQDGKRVRFLFLPEGEDPDSLVRAEGEDAFRARITQQAQPLAEYFFQQLMLEADPATLEGKAHLATLAAPLLEKIPGNNLRLLMRQRLSEITGLSGENIGQLAHHSPPPSSMDHGASGVLDGDDYFAASAYYENEPSHAPFDAAPGYVEAQPRKSWNKDKKPWDGKKWDGKKKWDKGGRGDFKAPQRTPVSVESTTLNALRTLLHHPQLALKVDDAGTLAREQDTYAQLLVSLLEALQKNPRQSSMQLIARWHGTPQGRLLQALGEKEWLIVQENLEKQFFDTITKLSESQRFGEREERLRSVMQKSYSELTDEEKALLREHYSVAASSPSQS

SEQ ID NO: 66198 - protein, 149 aa, Pseudomonas aeruginosa
MSEIKSRLLDAVKVAMRAQDKPRLTTLRLALADIKRVEVDERIEVDDARALLILDRMIKQRRDAQRQFSDAGRQDLAEVEAAEILVLQDFMPKPLDDHEIDALIERSIVDSGAQGPQDMGKAMNLLRPQVQGRVDMAQVSQRLKARLSS

SEQ ID NO: 66199 - protein, 71 aa, Pseudomonas aeruginosa
MPAVKVKENEPFDVALRRFKRSCEKAGVLAEVRSREFYEKPTAERKRKAAAAVKRHAKKVQREQRRRERLY

SEQ ID NO: 66200 - protein, 341 aa, Pseudomonas aeruginosa
MRVLGLETSCDETGVALYDSERGLLADALFSQIDLHRVYGGVVPELASRDHVKRMLPLIRQVLDESGCTPADIDAIAYTAGPGLVGALLVGASCAQAMAFAWGVPAVGVHHMEGHLLAPMLEEQPPRFPFVALLVSGGHTQLVRVDGIGRYQLLGESVDDAAGEAFDKTAKLIGLGYPGGPEIARLAERGTPGRFVFPRPMTDRPGLDFSFSGLKTFTLNTWQRCVEAGDDSEQTRCDIALAFQTAVVETLLIKCRRALKQTGLKNLVIAGGVSANQALRSGLEKMLGEMKGQVFYARPRFCTDNGAMIAYAGCQRLLAGQHDGPAISVQPRWPMESLPAV

SEQ ID NO: 66201 - protein, 189 aa, Pseudomonas aeruginosa
MVWLLAILAYLLGSLSFAVLLSRWFGTQDPRASGSGNPGATNMLRVAGKKLAILTLLGDVGKGLLPVLVARWLGLGVMEEAWVGIAAVIGHLYPLYFNFRGGKGVATAAGMLLGLYPPAVLLAAAAWLLTFKLSRTSSLASLVATPLTLPLLAWQQPGALLPMTVLTGLIVWRHRANLRDLFAGRERHF

SEQ ID NO: 66202 - protein, 410 aa, Pseudomonas aeruginosa
MQIYKVGGAVRDRLLGRPVTDIDWVVVGASSDEMLARGYRPVGADFPVFLHPQSGEEYALARTERKSGRGYGGFTFHASPEVTLEEDLTRRDLTINAMAEDEQGRVIDPYGGQADLEARLLRHVSPAFAEDPLRVLRVARFAARYAGLGFRVAAETLALMRQLAESGELQALTPERSWKEISRALMEPNPEVFIQVLHDCGALAELIPEVEALFGVPQPAAHHPEIDTGVHVLSVLQQCARHRQPLSVRWACLLHDLGKGLTSEADWPRHIAHEARGVPLIDAVNQRFRVPRECQELARLVGEYHTHAHRALELRPNTLLELLQSFDVYRRPQRFEEFVAASEMDARGRLGLEQRDYPQAAYLLGAAQAARAVSVKPLVEKGLKGAELGEALKRARLAALKAYKEERGKA

SEQ ID NO: 66203 - protein, 517 aa, Pseudomonas aeruginosa
MSKRQPIATGSEWTFELIQQYDREISRIAERYALDTYPNQIEVITAEQMMDAYASVGMPIGYNHWSYGKHFLSTEKNYKRGQMGLAYEIVINSDPCIAYLMEENTQCMQALVIAHACYGHNSFFKGNYLFRTWTDASSIIDYLVFAKQYIMQCEERYGIDAVEDLLDSCHALMNYGVDRYKRPYPISAEEERQRQKEREELIQRQVNDLWRTIPRVGGKDKEQSMARYPSEPQENILYFIEKNAPLLEPWQREVIRIVRKIAQYFYPQRQTQVMNEGWATFWHYTLLNDLYDEGLVNDGFMMEFLQYHTSVVYQPSFDSPYYSGINPYALGFAMYRDIRRICEEPTDEDRRWFPDIAGSDWLATLKFAMKSFKDESFILQFLSPKVIRDLKLFSILDDDQKDDLLVAAIHDEAGYRTIRETLAAQYNLGNREPNIQIWNVDRRGDRSLTLRHQQFDRQPLSDSTADVLKHLHRLWGFDIHLETLQGDQLVQTHHMPPKGASEGEEGYPRLDLIIPPI

SEQ ID NO: 66204 - protein, 423 aa, Pseudomonas aeruginosa
MSYVIDRRLNGKNKSTVNRQRFLRRYREHIKKAVEEAVSRRSITDMEHGEQISIPGRDIDEPVLHHGRGGRQTVVHPGNKEFTAGEHIARPSGGGGGRGGGKASNSGEGMDDFVFQITQEEFLDFMFEDLELPNLVKRHITGTDTFKTVRAGISNDGNPSRINIVRTLRSAHARRIALSGGSRAKLRAALKELERIKREEPDNLGDIQELELEIAKLRARIDRVPFLDTFDLKYNLLVKQPNPTSKAVMFCLMDVSGSMTQATKDIAKRFFILLYLFLKRNYEKIEVVFIRHHTSAREVDEEEFFYSRETGGTIVSSALKMMQEIMAERYPTHEWNIYAAQASDGDNWNDDSPVCRDILLKQIMPFVQYYTYVEITPREHQALWFEYERVREAFEDSFAQQQIVSASDIYPVFRELFQRRLVA

SEQ ID NO: 66205 - protein, 268 aa, Pseudomonas aeruginosa
MSELYQHRARKRFGQNFLHDAGVIHRILRAIHAREGQRLLEIGPGQGALTEGLLGSGARLDVIELDQDLIPLLKLKFGLESRFSLHQGDALKFDFASLVESGEKLRVVGNLPYNISTPLIFHLLEHAPVIEDMHFMLQKEVVERLAATPGGGDWGRLSIMVQYHCRVEHLFNVGPGAFNPPPKVDSAIVRLTPFAEPPHPARDPKLLERVVREAFNQRRKTLRNTLKPLLSVEDIEAAEVDPTLRPEQLDLAAFVRLANQLAELPGNR

SEQ ID NO: 66206 - protein, 278 aa, Pseudomonas aeruginosa
MSVPTVLQKILARKAEEVAERRARVNLAEVERLARSADAPRGFANALLERAKRKEPAVIAEIKKASPSKGVLREHFVPAEIARSYEAGGAACLSVLTDVDFFQGADAYLKEARAACALPVIRKDFMIDPYQIVEARAIGADCILLIVSALDDVLMAELAATAKSVGLDVLVEVHDGTELERALKTLDTPLVGINNRNLHTFEVSLETTLDLLPEIPRDRLVVTESGILNRADVELMEVSEVYAFLVGEAFMRADDPGLELKRLFFQERGAVVLGADPD

SEQ ID NO: 66207 - protein, 299 aa, Pseudomonas aeruginosa
MIEEATSSKHSGTTDAPLVSVVAPCFNAEKYLEEALRSIYEQDYPNFEVIIVDDGSTDNSYAMLEQLQKVHGFQLYRQQNQGVSAALNFGLRHARGDYVATPDLDDIMLPHSLSVRAAYLDQHPEVGCVGALVIYIDSEGQETKRQNGNRIRQLDFDYLLGNAYVCGAPVSLYRMEALRAAGFYDPEIKVQDFQMTLRIASQGYQIHKLPVLVTRYRRHPDNLSRRYKVLLDADLRTIAPYQSHPAYERGRTELVNKALKYAVVADKRHAWQLLRSLPLRQWNRTTFRRLKRFLLHHES

SEQ ID NO: 66208 - protein, 230 aa, Pseudomonas aeruginosa
MRLDRFLANLPELSRRDAQMLIAGGHLRVDGQVVRDGTHEVRVFSRVELDERLLQAGKPARYYMLHKPMGCVSATRDPQHPTVLDLFPEDLRDDLHIGGRLDYNTTGLMLLTNDGQWSRRLTLPGSRRDKVYYVETEAPIDQRYVDAFAAGLHFRFEDLVTLPAQLEPIGPRCARLTLHEGRYHQVKRMFGHFDNKVLRLHRERMGDICLDPQLPPGAWRPLNAEEICSV

SEQ ID NO: 66209 - protein, 314 aa, Pseudomonas aeruginosa
MADPAFHTPLVHEGILAVRGPDAAKFLQGQLTCNLAYLNDETSSLGGRCNIKGRLLSSFRILPEGDGLLLAMAGELLEAQLADLKKYAVFSKASLADESAAWLRIGLRDASEALRALGIDTPAESGRIARHGDLLAVALGDGRVELWVPAQRAEAVLATLREHSREAPLDDWLLGQVRAGIGQVFGATRELFIPQMINLQAVGGVSFKKGCYTGQEIVARMQYLGRLKRRLYRLALDADEVPAPGTGLFSPVHSTSVGEVVLAARTPENSVELLAVLQDDAVADGRISLGSAEGAPLVLLNLPYTLDSDREIQR

SEQ ID NO: 66210 - protein, 84 aa, Pseudomonas aeruginosa
MADETELKRLYWHSRRGMLELDVLLVPFVQEVYPGLDAEDQARFRKLLECEDQDMFGWFMQRGEPEDADLRRMVRMILDRVQPD

SEQ ID NO: 66211 - protein, 474 aa, Pseudomonas aeruginosa
MHTLKRCMAAMVALLALSLAMTARAELPDFTPLVEQASPAVVNISTRQKLPDRAMARGQLSIPDLEGLPPMFRDFLERSIPQVPRNPRGQQREAQSLGSGFIISNDGYILTNNHVVADADEILVRLSDRSEHKAKLIGADPRSDVAVLKIEAKNLPTLKLGDSNKLKVGEWVLAIGSPFGFDHSVTAGIVSAKGRSLPNESYVPFIQTDVAINPGNSGGPLLNLQGEVVGINSQIFTRSGGFMGLSFAIPIDVALNVADQLKKAGKVSRGWLGVVIQEVNKDLAESFGLDKPSGALVAQLVEDGPAAKGGLQVGDVILSLNGQSINESADLPHLVGNMKPGDKINLDVIRNGQRKSLSMAVGSLPDDDEEIASMGAPGAERSSNRLGVTVADLTAEQRKSLDIQGGVVIKEVQDGPAAVIGLRPGDVITHLDNKAVTSTKVFADVAKALPKNRSVSMRVLRQGRASFITFKLAE

SEQ ID NO: 66212 - protein, 284 aa, Pseudomonas aeruginosa
MTLNFPLLLVIAVAVCGALALVDLVLFAPRRRAAISSYEGQVNEPDPAVLEKLNKEPLLVEYGKSFFPVLFIVLVLRSFLVEPFQIPSGSMKPTLEVGDFILVNKFAYGIRLPVLDTKVIPIGDPQRGDVMVFRYPSEPNINYIKRVVGLPGDTVRYTKEKRLYVNGELVAEKLVGEEPGTLGSVTLYQEKLGQAEHLIRKEMSRYRIEPDRQWTIPAGHYFMMGDNRDNSNDSRYWNDPKIPKDLLGMVPDRNIVGKAFAVWMSWPDPKMSNLPNFSRVGVIH

SEQ ID NO: 66213 - protein, 305 aa, Pseudomonas aeruginosa
MTDMHDDIPAGSRCGYVAIVGRPNVGKSTLLNHILGQKLAITSRKPQTTRHNMLGIKTEGEVQAVYVDTPGLHKSGEKALNRYMNRTASAALKDVDVVIFVVDRTRWTEEDQMVLERVQYVSCPVLIAVNKTDRIEEKADLLPHLEWLTQQLPKAEVVPISAQHGTNLDVLEKLVAERLPESEHFFPEDQITDRSSRFLAAELVREKIMRQLGAELPYQITVEIEEFKQEGRILHIHALILVEREGQKKIIIGDKGERIKSIGQNARKDMEVLFDSKVMLNLWVKVKGGWSDDERALRSLGYGDL

SEQ ID NO: 66214 - protein, 375 aa, Pseudomonas aeruginosa
MAEAKVLSGAGLRGQVAGQTALSTVGQEGAGLTYRGYDVRDLAAAAIFEEVAYLLLYGELPNKQQLDAYLKKLQGQRDLPQALKEVLERIPKDAHPMDVMRTGASVLGTLEPELSFDQQRDVADRLLAAFPAIMTYWYRFTHEGQRIDCNSDEPTIGGHFLALLHGKKPSELHVKVMNVSLILYAEHEFNASTFTARVCASTLSDLYSCVTGAIGSLRGPLHGGANEAAMELIERFSSPQEATAELLKMLERKDKIMGFGHAIYKDSDPRNEVIKGWSKQLADEVGDKVLFAVSEAIDKTMWEQKKLFPNADFYHASAYHFMGIPTKLFTPIFVCSRTSGWTAHVFEQRANNRIIRPSAEYTGVEQRAFVPLEQR

SEQ ID NO: 66215 - protein, 240 aa, Pseudomonas aeruginosa
MTQNPPPLEIAHDDGETLSEHVFRKIQSAIVSGEIAPGSKISEPELARTYGISRGPLREAIHRLEGLRLLVRVPHVGARVVSLSHAELIELYEIRESLEGMACRLAAERMSQAEIDELRRVLDTHERDEAFQAGRGYYQQEGDYDFHYRIIQGSGNATLTRMLCGELYQLVRMYRIQYSTTPNRPRQAFAEHHRILDAIADRDGELAELLMRRHISASRRNIERQLEPQPAKLASASSTV

SEQ ID NO: 66216 - protein, 97 aa, Pseudomonas aeruginosa
MAPCPGKTVTAQSPSTFIPLRRTSQCNQHPGCATLYLDCSAASEDLFDTARTRLESAIGTLSVLDLLDETEEPGESTCRITGSLLSLFEAEYARRHR

SEQ ID NO: 66217 - protein, 704 aa, Pseudomonas aeruginosa
MHTFFIAPTGFGVGLTSISLGLLRALERAGLKVGFFKPIAQLHPGDLGPERSSELVARTHGLDTPKPLPLAQVERMLGDGQLDELLEEIISLYQRAAADKDVVIVEGMVPTRHASYAARVNFHLAKSLDAEVILVSAPENETLTELTDRIEIQAQLFGGPRDPKVLGVILNKVRGEADAANAEDGVADFARRLTEHSPLLRDDFRLIGCIPWQDELNAARTRDIADLLSARVINAGDYEQRRVQKIVLCARAVPNTVQLLKPGVLVVTPGDRDDIILAASLAAMNGVPLAGLLLCSDFPPDPRIMELCRGALQGGLPVLSVATGSYDTATNLNRMNKEIPVDDRERAERVTEFVAGHIDFEWLKQRCGTPRELRLSPPAFRYQVVQRAQKAGKRIVLPEGSEPRTVQAAAICQARGIARCVLLAKPEEVQAVAQAQGIVLPEGLEIIDPDLVRQRYVEPMVELRKGKGLNAPMAEQQLEDSVVLATMMLALDEVDGLVSGAIHTTASTIRPALQLIKTAPGYNLVSSVFFMLLPDQVLVYGDCAVNPDPSASDLAEIAVQSAASAQAFGIPARVAMISYSTGDSGSGVDVDKVREATRLAREQRPDLLIDGPLQYDAAAIASVGRQKAPNSPVAGQATVFIFPDLNTGNTTYKAVQRSADCVSVGPMLQGLRKPVNDLSRGALVEDIVYTIALTAIQADAQAPA

SEQ ID NO: 66218 - protein, 406 aa, Pseudomonas aeruginosa
MSRPLSIALISETYPPEVNGVANTLGRLHAGLQQLGHRVQVVRPRQPGDDGRRSDAELVLTRGWPLPGYPGLQWGMSSLHKLLRCWKRQRPDVLYIATEGPLGFSALRAARRLGIPAVSGFHTNFQQYSEHYGFGPLTRLVTGYLRWFHNRTQMTLVPSGSQRMELQRRGFERLNLLSRGVDSQLFHPSRRDPELRRRWGLGEQDIAVLHVGRLAAEKNLGLLGGTFRALCAAHPQLKLRLVLVGDGPERKHLERDLPEALFCGVQRGETLAAHYASGDLFLFPSLSETFGNVVLEAQAAGLAVVAFDQAAAGQHIRHGHNGVLAAPGDKSGFVEVASWLLDDQERLRRVRLNARQHASRQGWDSIVEHFQNYLEDACASPLVQPARSKPERPPAEDGGALPRSRE

SEQ ID NO: 66219 - protein, 312 aa, Pseudomonas aeruginosa
MTSIVVAALYKFVTLDDYVALREPLLQTLLDNGVKGTLLLAEEGINGTVSGSREGIDALFAWLRSDPRLADIEHKESYCDEQPFYRTKVKLKKEIVTLGVPGVDPNKQVGQYVEAKDWNALISDPEVLLIDTRNDYEVAIGTFEGAVDPKTRSFREFPEYIKAHYDPARHKKVAMFCTGGIRCEKASSYMLGAGFEEVFHLKGGILKYLEEVPQEQSLWRGDCFVFDNRVTVRHDLSEGEYDQCHACRNPVSLEDRQSEHYVPGISCPHCWDSLSEKTRAGARERQKQIELARQRNQPHPLGRDPRQSTLEN

SEQ ID NO: 66220 - protein, 275 aa, Pseudomonas aeruginosa
MNRQIVRSALFVPATRPERIPKALASGADRVIVDLEDAVEEGLKVEARANLRRFLVDTPEARVLVRINAAEHPGHADDLALCRDHAGVIGLLLPKVESAAQVRHAAVASGKPVWPIVESARGLAALGEIAAAAGVERLSFGSLDLALDLDLNSGSNAAEQILGHARYALLLQTRLAGLAPPLDGVYPAIQNRAGLVEAVRFARDMGFGGLLCIHPSQVEPIHQTLMPSPAELEWARRVAEAGASGAGVFVVDGEMVDAPVLGRARRLLERAGEGG

SEQ ID NO: 66221 - protein, 331 aa, Pseudomonas aeruginosa
MFKTMVRALLCALAIGGSCLANAAQPIVIKFSHVVAENTPKGQGALLFKKLVEQRLGGRVEVDVYPNSSLFGDGKEMEALLLGDVQMLAPSLAKFEQYTRKVQIFDLPFLFDDIQAVDRFQRSPQGRALLTSMQGKGILGLAYWHNGMKQLSANRPLLEPEDARGLKFRVQASDVLNEQFRQLRAISRKMSFAEVYQGLQTGVVNGTENTWSNYESQKVNEVQKYFTESNHGLVDYMVITNAKFWNGLPADIREELQRIMDEVTVQVNLEAERLNRDARQRILASGASEIHTLSPQQRADWRQAMQPVWQKFRGNVGADLLQAAEASNRPD

SEQ ID NO: 66222 - protein, 406 aa, Pseudomonas aeruginosa
MSAPHAQVERADFDRYMVPNYAPAAFIPVRGEGSRVWDQSGRELIDFAGGIAVTSLGHAHPALVKALTEQAQRIWHVSNVFTNEPALRLARKLVDATFAERVFLANSGAEANEAAFKLARRYANDVYGPQKYEIIAASNSFHGRTLFTVNVGGQPKYSDGFGPKFEGITHVPYNDLEALKAAISDKTCAVVLEPIQGEGGVLPAQQAYLEGARKLCDEHNALLVFDEVQSGMGRVGELFAYMHYGVVPDILSSAKSLGGGFPIGAMLTTGEIAKHLSVGTHGTTYGGNPLASAVAEAALDVINTPEVLDGVKAKHERFKSRLQKIGQEYGIFDEIRGMGLLIGAALTDEWKGKARDVLNAAEKEAVMVLQASPDVVRFAPSLVIDDAEIDEGLERFERAVAKLVRG

SEQ ID NO: 66223 - protein, 488 aa, Pseudomonas aeruginosa
MMSTHYIAGQWLAGQGETLESLDPVGQGVVWSGRGADATQVDAAVCAAREAFPAWARRPLEQRIELLERFAATLKSRADELARVIGEETGKPLWESATEVTSMVNKVAISVQAFRERTGEKSGPLADATAVLRHKPHGVVAVFGPYNFPGHLPNGHIVPALLAGNCVVFKPSELTPKVAELTLKAWIQAGLPAGVLNLVQGGRETGVALAAHRGLDGLFFTGSSRTGNLLHSQFGGQPQKILALEMGGNNPLVVEEVADLDAAVYTIIQSAFISAGQRCTCARRLLVPQGAWGDALLARLVAVSATLRVGRFDEQPAPFMGAVISLSAAEHLLKAQEHLIGKGAQPLLAMTQPIDGAALLTPGILDVSAVAERPDEEFFGPLLQVIRYSDFAAAIREANATQYGLAAGLLSDSRERFEQFLVESRAGIVNWNKQLTGAASSAPFGGIGASGNHRPSAYYAADYCAYPVASLESPSVSLPATLTPGISL

SEQ ID NO: 66224 - protein, 332 aa, Pseudomonas aeruginosa
MLALGKLLDLTLAGREPTEKIQLTADGTRLHWLAEGALEVTPIGARDNGVDLLLSAGIHGNETAPIELLERLIRKVAAGTLKPAARVLFLFGNPEAIRRGERYVEQDMNRLFNGRHEEGSGNEAFRAAELERLAQVFFSKTERVHLHYDLHTAIRGSKIEQFALYPWAEGRQHSRSELARLRDAGIEAVLLQNKPGITFSAYTYGQLGAEAFTLELGKARPFGENQEVNLERLERSLELLIDGSEEQPDGSRLDGLKLFSVSREVIKHSDHFRLHLDDDVANFTELSPGYLLAEDIGGTRWVVDEVGARIIFPNPRVKNGLRAGILVVPAKL

SEQ ID NO: 66225 - protein, 874 aa, Pseudomonas aeruginosa
MKSAEIREAFLRFFEEKGHTRVASSSLIPANDPTLLFTNAGMNQFKDCFLGLEKRAYTRATTSQKCVRAGGKHNDLENVGYTARHHTFFEMLGNFSFGDYFKRDAIHYAWEFLTGEKWLNLPKEKLWVTVYATDDEAYDIWTKEVGVPAERMVRIGDNKGAPYASDNFWAMGDTGPCGPCTEIFFDHGPEIWGGPPGSPEEDGDRYIEIWNNVFMQFNRTADGVMHPLPAPSVDTGMGLERVSAVLQHVHSNYEIDLFQNLLKASAEAIGCANDDAPSLKVVADHIRSCSFLIADGVLPSNEGRGYVLRRIIRRACRHGNKLGARGTFFHKIVAALVAEMGDAFPELKQQQAHIERVLKTEEEQFAKTLEQGLKILEQDLAELQGSVIPGNVVFKLYDTYGFPVDLTNDIARERELTIDEDGFEREMEAQRERARASSAFGMDYNSLVKVDGETRFLGYQGVSGAGQIVALFRDGQAVERLEEGEEGVVVLDQTPFYAESGGQVGDSGYLEAAGVRFDVRDTTKAGGAHLHHGVVARGNLSVGGAVKAEVDASVRQATALNHSATHLLHAALRQVLGDHVQQKGSLVDSQRLRFDFSHFEAIKAEQLKALEDIVNAEIRRNTEVETEETDIDTAKAKGAMALFGEKYGDQVRVLSMGGDFSVELCGGTHVSRTGDIGLFKITSEGGVAAGVRRIEAVTGAAALAYLNGAEEQLKEAASLVKGSRDNLLDKLGALLERNRSLEKELEQLKAKAASAAGDDLSAAAVEIKGAKVLAARLDGLDGKALLALVDQLKNKLGRAVILLGGELDGKVVLVAGVTQDLTGQLKAGELMKQAAAAVGGKGGGRPDMAQGGGTDAAKLDEALALAQRFVEQGL

SEQ ID NO: 66226 - protein, 412 aa, Pseudomonas aeruginosa
MALIVQKFGGTSVGTVERIEQVAEKVKKFREAGDDVVVVVSAMSGETNRLIGLANQIMEQPVPRELDVMVSTGEQVTIALLSMALIKRGVPAVSYTGNQVRILTDSAHTKARILHIDDTHIRADLKAGRVVVVAGFQGVDGNGNITTLGRGGSDTTGVALAAALKADECQIYTDVDGVYTTDPRVVPQARRLDKITFEEMLEMASLGSKVLQIRAVEFAGKYNVPLRVLHSFQEGPGTLITIDDEEESMEQPIISGIAFNRDEAKLTIRGVPDTPGVAFKILGPISAANVEVDMIVQNVAHDNTTDFTFTVHRNDYLNALEILKQTAANIGAREAIGDTNIAKVSIVGVGMRSHAGVASRMFEALAKESINIQMISTSEIKVSVVIEEKYLELAVRALHTAFELDAPARQGE

SEQ ID NO: 66227 - protein, 61 aa, Pseudomonas aeruginosa
MLILTRRVGETLMVGDDVTVTVLGVKGNQVRIGVNAPKEVAVHREEIYQRIQKEKDQEPNH

SEQ ID NO: 66228 - protein, 482 aa, Pseudomonas aeruginosa
MTEVEAKKPQESLQDRLAQVVELLHRHKVVEDLTHRQEGQHHDRVENLVHRQNLVELQRKLEELHPADIAHILESLPLDDRLTVWQLVKSEDDGDILLEVSDAVRETLIADMDDHEIIAATKDLDADELADLAPELPRDVVHELMESLDAQQRERVRSALSYEEDQVGALMDFEMVTIREDVSLEVVLRYLRRLKELPGHTDKLFVVDYDGVLKGVLPIKRLLVNDPDKQVLEVMATDPVTFHPDEDGYDAAQAFERYDLISAPVVDKGGKLIGRLTIDEMVDLIREESESEVLNMAGLREEEDIFASVWKSVRNRWAWLATNLITAFVASRVIGLFEGSIEKLVALAALMPIVAGIGGNSGNQTITMIVRAIALDQVQPTSNSRNRLLRKELGVALVNGLAWGGVIGVVAFYLYGNWELGVVMTAAMTLNLLLAAMMGVLIPMTLHRFGRDPAMGSSVMITAMTDSGGFFIFLGLATIFLM

SEQ ID NO: 66229 - protein, 440 aa, Pseudomonas aeruginosa
MSTPTPKVGFVSLGCPKALVDSERILTQLRMEGYEVVPTYEDADVVVVNTCGFIDSAKAESLEVIGEAIAENGKVIVTGCMGVEEHAIRDVHPSVLAVTGPQQYEQVVTAVHEVVPPKTEHNPLVDLVPPQGVKLTPRHYAYLKISEGCNHSCSFCIIPSMRGKLVSRPVGDVLSEAERLVKAGVKELLVISQDTSAYGVDLKYKTDFWNGQPVKTRMKELCEALSSMGVWVRLHYVYPYPNVDDVIPLMAAGKLLPYLDIPFQHASPKVLKAMKRPAFEDKTLARIKQWREICPELTIRSTFIVGFPGETEEDFQYLLDWLTEAQLDRVGCFQYSPVEGAPANELGLEPVPDEVKQDRWERFMAHQQAISAARLQLKVGKEIEVLIDEVDEQGAVGRSWADAPEIDGNVFVDSDELKPGDKVRVRITDADEYDLWAELV

SEQ ID NO: 66230 - protein, 634 aa, Pseudomonas aeruginosa
MSDAATRAEETSEGHSSSAIGLMVGAVGVCYGDIGTSPLYTLKEVFIGGYGVQANHDGVLGVLSLIFWSLVWVVSIKYVIFVLRADNQGEGGVMALSALARRAAAPFGRLQTFVVVAGLIGAALFYGDSMITPAISVLSAVEGLEIAFDGLEHWTVPLALIVLIGLFLIQKHGTARIGILFGPVMVLWFGALAALGVYGVIQQPEVLQAMNPVWAVRFFSSHPGIGVAILGATVLALTGAEALYADMGHFGRKPIARAWFLLVLPALVLNYFGQGATILSNAEAARNPFYLLAPGWALLPMVALSTLATVIASQAVISGAFSLTRQAIQLGYVPRMTIQHTSSHEQGQIYIGGVNWALMVGVVLLVLGFESSASLAAAYGVAVTGTMLITTLLMGVVIWRLWKWPLWLGVPFFCVMLAVDSLFFAANLPKVIQGGAFPVIAGIVIFILMSTWKRGRQLLVERLDEGSLPLSVFISSMRVQPPHRVQGTAVFLTARTDAVPHALLHNLLHNQVLHEQVVLLTVVNEDSPRVSPDRRFEVEAYGDGFFRVILHFGFMEEPDIPAALRLCHLNELDFSPMRTTYFLSRETVIPSKRIGMARWREGLFAFLLKNANGNLRYFNLPLNRVIELGTQVEI

SEQ ID NO: 66231 - protein, 276 aa, Pseudomonas aeruginosa
MYRLDDLLHLMARLRDPEFGCPWDLQQSYATIVPHTLEEAYEVADAIEQGDFPQLREELGDLLFQVVYYSQLAREEDRFAFDEVVDGITRKLIRRHPHVFLDGDLYGKPDAAKLAEAAVKQRWEELKAEERAAKAKEPQQLSLLDDVPVALPALSRAAKLQKRAAQVGFDWPEALPVVDKVREGLDEVLEAMAEGDEGAVGEEVGDLLFVVVNLARHLKVDPEAALRQANGKFERRFRFIERNLREAGRKAEECSLEELDSLWGEAKKAERSAPGC

SEQ ID NO: 66232 - protein, 179 aa, Pseudomonas aeruginosa
MSMSLRDQLLKAGLVNEKQAKQATKQKQKQQRLEHKNQVDKDDSQRQAAEQAKAEKLARDQELNRQQQEKAEKKAKAAQIKQLIEGTRLPKLESDDYYNFVDAKKVKRIAVNDLIRDKLSRGSLAIVSYDGRYEIVPRDAAVKIQERDPRRVVLLNVQSQEPDEDDPYKDYVVPDDLMW

SEQ ID NO: 66233 - protein, 318 aa, Pseudomonas aeruginosa
MPTGRPLRLFAAALCGGLLLSGCANQLPQRSEHEERVERKLLEHTLQVDVGQPDVLELPQRRVRINDQKSFEVTEFEVTRRYDRYTPYQAWREIYEIPLGAVALVAGVGANIVNVVTFGSVPDNITHGWINYGLAGVNPFMNVESNGRAEQNLASIDEKQRDKRLEYSSLPWAERPVLVSSGKELNELLTDRHGVLRLNLLDSPFAEQDISRISQIHLSVSDPQDGTRADASLRVSRSLRGKLLEAHALIYDDLEGDDVHHWVHRVKRLAELGLEEEASELEQSLIELTRNDPELQQQFMHALLRDAGRLAADPGETP

SEQ ID NO: 66234 - protein, 571 aa, Pseudomonas aeruginosa
MRTSQYLLSTLKETPADAVVISHQLLLRAGMIRRLASGLYTWLPMGLRVLRKVETIVREEMNAAGALEVLMPAVQPAELWQESGRWEQYGPELLRLKDRHEREFCVGPTHEEVITDLARNELNSYKQLPINFYQIQTKFRDEIRPRFGLMRGREFIMKDAYSFHLSQDSLQQTYDGMYQAYSKIFSRLGLDFRPVQADNGSIGGSGSHEFHVLANSGEDDIVFSDSSDYAANIEKAEAVPRESARGSATEDMRLVDTPNTKTIAALVDGFQLPIEKTIKTLVVHGAEEGTLVALIVRGDHELNEIKAANQPLVASPLVFASEAEIRAAIGAGPGSLGPVNLPIACIVDRSVALMSDFAAGANIEDKHYFGVNWERDLPLPEVADLRNVVEGDPSPDGKGTLVIKRGIEVGHIFQLGTKYSEAMKLSVLSEQGKPVNLIMGCYGIGVSRVVAAAIEQNHDERGILWPSALAPFQIALVPLKYETESVKQATDKLYAELTAAGFEVLLDDRDKKTSPGVKFADMELIGIPHRIVISDRGLSEGVLEYKGRRDSESQNLPIGELMSFITEKLSR

SEQ ID NO: 66235 - protein, 156 aa, Pseudomonas aeruginosa
MEINIGIGEQDRAAIAEGLSRLLADTYTLYLKTHNFHWNVTGPMFNTLHLMFEGQYTELAVAVDDIAERIRALGFPAPGTYAAYARLSSIKEEEGVPEAEEMIRQLVQGQEAVVRTARSIFPLLDKVSDEPTADLLTQRMQVHEKTAWMLRSLLAS

SEQ ID NO: 66236 - protein, 591 aa, Pseudomonas aeruginosa
MMRSHYCGQLNESLDGQEVTLCGWVHRRRDHGGVIFLDVRDREGLAQVVFDPDRAETFAKADRVRSEFVVKITGKVRLRPEGARNPNMASGSIEVLGYELEVLNQAETPPFPLDEYSDVGEETRLRYRFIDLRRPEMAAKLKLRARITSSIRRYLDDNGFLDVETPILGRPTPEGARDYLVPSRTYPGHFFALPQSPQLFKQLLMVAGFDRYYQIAKCFRDEDLRADRQPEFTQIDIETSFLDESDIIGITEKMVRQLFKEVLDVEFDEFPHMPFEEAMRRYGSDKPDLRIPLELVDVADQLKEVEFKVFSGPANDPKGRVAALRVPGAASMPRSQIDDYTKFVGIYGAKGLAYIKVNERAKGVEGLQSPIVKFIPEANLNVILDRVGAVDGDIVFFGADKAKIVCDALGALRIKVGHDLKLLTREWAPMWVVDFPMFEENDDGSLSALHHPFTSPKCTPAELEANPGAALSRAYDMVLNGTELGGGSIRIHDKSMQQAVFRVLGIDEAEQEEKFGFLLDALKYGAPPHGGLAFGLDRLVMLMTGASSIREVIAFPKTQSAGDVMTQAPGSVDGKALRELHIRLREQPKAE

SEQ ID NO: 66237 - protein, 347 aa, Pseudomonas aeruginosa
MKQQFERSPSESYFWPVVLAVVLHVLIFAMLFVSWAFAPELPPSKPIVQATLYQLKSKSQATTQTNQKIAGEAKKTASKQYEVEQLEQKKLEQQKLEQQKLEQQQVAAAKAAEQKKADEARKAEAQKAAEAKKADEAKKAAEAKAAEQKKQADIAKKRAEDEAKKKAAEDAKKKAAEDAKKKAAEEAKKKAAAEAAKKKAAVEAAKKKAAAAAAAARKAAEDKKARALAELLSDTTERQQALADEVGSEVTGSLDDLIVNLVSQQWRRPPSARNGMSVEVLIEMLPDGTITNASVSRSSGDKPFDSSAVAAVRNVGRIPEMQQLPRATFDSLYRQRRIIFKPEDLSL

SEQ ID NO: 66238 - protein, 274 aa, Pseudomonas aeruginosa
MPKHLRVLTFLALSLPLAAWAEVPVYDGVAANNGGNVPPSGYGTAGAGGAFAGGGVTTPTSVQGELFMQLQQMQDELARLRGTLEEQQNQIQQLKQESLERYQDLDRRISGGGAPAAQNSAPAGAINANGAPAAPAGNNAPAPSSEPGDPAKEKLYYDAAFDLIKSKDFDKASQAFNAFLRKYPNSQYSGNAQYWLGEVNLAKGDLQGAGQAFARVSQSYPSSQKVPDSLYKLADVERRLGNNDKAKGILQQVISQYPGTSAAQLAQRDLKNLR

SEQ ID NO: 66239 - protein, 839 aa, Pseudomonas aeruginosa
MAIFRKKFDFEVSVYSRSSCLVALGLALPAVTFAVEFNAEFLNNEGGAPVELKYFENGNSVSPGTYSVDIHLNQIMIRREDVVFSADSETGSVRPVIRVGLLKEIGVDIARLTRDKLIPANLENNTPLNVAELIPGASVEFDVNSLSLLVSIPQLYVQRHSRGYVDPSLWDDGVTALFSNYQANFTRNTNFGQNSDYRYLGLRNGFNLFGWRLRNDSSLSGGTGMRNKFSSNRTYVERDIRALKGTLSLGELYTSAQGDAFESVRMRGVQLQSDIGMLPDNEISYTPVVRGIAETNATVEVSQNGFVIYSTNVPPGAFEITDIYPSGSNGDLEVKIIEADGRQRSFKQSYSYLPVMTRKGNLRYGLAAGEYHNDGQPSVNLLQGSAVYGLSDRVTGFGGLLAAEKYNATNLGLGFNTPLGGLSADVTHSQSRTRRGGRNQGQSLRLLYSKTINATETSFTVVGYRYSTEGYRTLSQHIDDMSDESYLYGSSSSRQKSRIDLTVNQTLFRRSSLYLTAGETTYWNRPGSSRRVQFGFSSGIKRASYSLAVSRTQETGSFGRSDTQFTASVSIPLGGSARSSQVYANAVSSQHGDSSLNTGISGYLDEANAFNYSAQANYSKDGGNSGSVGLGWDTSKAKLSANYSQGRDNKQINLGASGSVVVHPGGVTFGQPVGETFGLVEVPEVGGVGLDGYSSVRTDGRGYAVLPYMQPYRYNWVNLDTNTLGSDTEISDSTQMAVPTRGAVIAKRFSAESGRRVQFDLSMDSGGKIPFGAQAYDKEERVVGMVDNLSRLLVFGIEDQGRLSIRWSDGSCSVDYQLPPRNKDLTYERVALSCRRSSI

SEQ ID NO: 66240 - protein, 173 aa, Pseudomonas aeruginosa
MPHSYRKMESPVGTLTLVARDDAFLVAILWQHERPNRVPLDEMRLSEDSSLLAETERQLREYFSGKRSRFELPLDFQGTEFQKKVWSALLTIPFGETRSYTEIAVQIGSPNAVRAVGAANGRNPLSIVAPCHRVIGASGGLTGFAGGLAAKQWLLRLETRGRTPDLLSMIEDE

SEQ ID NO: 66241 - protein, 330 aa, Pseudomonas aeruginosa
MWPSCMARFPSDGQPGYRFVPSPGSGAGEEEMRPLVSVVCACFNISKYLDEAIASIYAQGYPNLELIVVDDGSTDDTYERLAMLRERHGFQLYRQANRGVSDALNHGLRHARGEFVMTPDLDDILLPGALDTRVDYLLAHPEVGCVGGFNICIDSAGNEVARDGFSEGCVERWGFDAALAETLVVMPLTALYRMEAMKRADFFDPSIRVQDFQITLRIAAQGYEIHRLPAYMGRYRRHGSGLSGRYKLNYEADMQAIEPYRAHPNYRRARQLILNKALKKAVVQDGRYAWQLFRSVPLRAWDRVTLKRFWRFLRYLPVLGLKGGTGVEGR

SEQ ID NO: 66242 - protein, 157 aa, Pseudomonas aeruginosa
MTQPSCPCGSGDPLDDCCGRYHQGHPAPTAEALMRSRYSAYALGLVDYLRDTTLPAQQAGLDLDGIRAWSHGSTWLGLEVENHEVLGGQPEHARVTFVARWHDADGEHAHRECSGFVQRNGRWYFLDPTVALKLGRNDPCPCGAGGKLKKCCGPWIT

SEQ ID NO: 66243 - protein, 933 aa, Pseudomonas aeruginosa
MILALIIALPFMGALLPLLAERGGRTLCAASAGVAPLIGLILLLGQRGTVFAGQTLTASYSWLPEIGINLSLRLDGLGFLFALLILGIGLLVILYARYYLSEQEPMGRFFAFLLLFMGSMLGVVLAENLLLMMLFWELTSLSSFLLIGFWGSRSDARKGARMALTVTGGGGLALLAGVLLLGHIAGSFELTEVLAAGELIRAHALYPLVLILILLGVFTKSAQFPFHFWLPHAMAAPTPVSAYLHSATMVKAGVFLLARLYPALAGTEWFFYLVSLSGLVTLLLGAGMALFQHDLKGLLAYSTISHLGLITLLFGLDSPLSNVAAVFHIINHATFKASLFMAAGIIDHETGSRDMRLINGMWKYLPHTAVLAIVASLAMAGVPLLNGFLSKEMFFGETLSQNLLGSFNWLVPAVATLAGVFSVAYSLRFIHDVFFNGEPARLPKFPPHEPPRYMKVPVEILVFLCLLVGMLPAYTVAPLLAAAASASLGGQLPEYSLAIWHGFNLPLLMSVVALVGGVLVYVLRKPLFNWYAGLPEVDAKLVFEQQVQRVVALAARLTAWLENGSLQRYLAWLLGAALVVVAVELAPLARLTGSRGLTPLDGITALGMLVLAFSGLATALFHRMRLVALLILSVAGLLVALAFARFSAPDLALTQLSVEVVTMVLLMLALYFLPSRTPAESSSLRGLRDVALAGGVGMLVALLAYAVLTRPYESIAGFFVENSVSGGGGYNVVNVILVDFRGFDTLGEISVLAIAGVGIYAMLAGFALHKPTCDPQGRNWAHAKHPLILETLSRVLLPLALLISVFIFLRGHNLPGGGFIAGLVTAIALVLQYIASGSQWVEQRLPLNYAAMAGAGVLIAGLTGLGSWLFGYPFLTSAFGHFELPLIGEIELATAMLFDLGVYLTVVGAALLILSYLGKLSLMPEPVAQEEAL

SEQ ID NO: 66244 - protein, 307 aa, Pseudomonas aeruginosa
MPEIYHYLQQLVNGLTVGSTYALIAIGYTMVYGIIGMINFAHGEVYMIGSYIAFIAITLLAMMGLDSVPLMMLAAFAASIIVTSAFGYSIERVAYRPLRGGNRLIPLISAIGMSIFLQNAVMLSQDSKEKAIPTLLPGNFVFGESSMNGVVISYMQILIFVVTFLVMFGLTLFISRSRLGRACRACAEDLKMTNLLGINSNNIIALTFVIGAALAAVAAVLLGMQYGVINPGIGFLAGIKAFTAAVLGGIGSIPGAMLGGLLLGVAEAFGADVFGDQYKDVVAFGLLILVLLFRPTGILGRPEVEKV

SEQ ID NO: 66245 - protein, 237 aa, Pseudomonas aeruginosa
MSIDNVSGTSSNTGNVNGSKRAAGSGATETGQSVKGSSNLGKDEFLKLLVAQLKNQDPMSPQQNGEFIAQLAQFSTVEGVQSLNKSMESILSNYQSSQALQASSLVGRKVIVATDKSVVDTKDTFKASLNLPVSSSNVWVNVYDDKGTVVNRINLGQQAAGSVSFMWDGKDSSGNIMPPGTYKFEAQTSIDGKTYGLQTYLPANVDSVTLGQNGGELMLNLAGLGSIALSKVQIIGQ

SEQ ID NO: 66246 - protein, 1694 aa, Pseudomonas aeruginosa
MIEDSVSEPDRRDGGDAGKRLAWLQRQVLPVLEEGGAVWVSGLDGAPFAGGAHKVVEASVAGELPGNERFRLACLGGAVGGVADDWQAMRLLLRAVESLEDRGWLLLEEALSVSAAGACRSPQAQARLALSLGLRQVAELRLGAPDDGGRQRVLQLFRQDLAVARMQRYSGLRVACYGNMPFHYRSLRPLAECFEDSLLSLDIDEVMAWKPDVIAVADGWSVEFWRDYCDAHNVLLVGMRHGSVTRYGFAEGTYRYADYLCGSAWDIDDTLASSVMPRNGFLLTGNAWCDEVFRLPARTPAENAPTILFAPTYNPEISAAVHLGERVVALIRKVYPASRIIIKPHPAIVQHEHAFVSDKDLFRDLMKLWREQSRTDPLVTLVDDPEASIAASFAEADILLADRSSLIFEFMTLDRPILLFSREQRIARWAYNPEAPGNAWRDIGLEFADDEQLLDLLANAFTRHAESRDTQENRTQQLYGRFRDGRSVQRVAAAIAEAPRLQIVLDARAAADGGQRLAEHYAACFAHRRIDLIAPSGAALPADVRRFDSWRAWCDAEAATLERRASAVLLVEDDGQLLPGSAHQVSALLPAIAMGQLRHARLALEEREAGPAGETDWSARRLHRLLARLQPKPAWRLLAPALLREELADLPDEAEQPLWLRAVAAAEAPVEWPVGQLNLFAEEGLLRQGDVHMLCARARLRAVPCVSGLPLRQRQVVLQVTPFASQLYDRFPFQLRVCLNGQLFSRVSVEDARAKSLVLPFRGDERGGMTIELECDGSYPAFEGVSTPVSLLLQTAFQPAPGDYCAALAAGAASPEAGEDLRSEYETWLHGREVEPARYRPFIDALRRDSRIEVLVLAEEAEDADLQRSLASIDGQALPAWRTRILGRAPAFARKGLAWLAEGGSAAERINLAAAASDADWLIVIHAGDELARSALLLLAEKIRTETALLCCYSDEDHVCDGRYEAPLLKPDFNLDLLRSYPYCGRSLAFQRAALLAQGGLQEGFGDLALQDFMFRLAEREGLDRIGHLAEVLYHSARAFGEWLASAAVRPFIASVVDEHLNRLGVPHRIEPGRLAVINRIAYDYPGTPAVSLLLPVGDSLSALQRSVESFLENTDYPSYELLLVASGPLAPDMAAWLEAVQGLGSEQIRVLSPQASSLAGCLNLCVAEARGEFLLSLGAGVVALRPDWLRELLNHGRRPEVGAVGGKLLGLDGTIREAGLVLGLGGTAGRAFAGEAGDSAGYMHRLLVVQNHTALSASCLLFKRSLHDELGGFDENDFAHGHADVDFSLRARQLGYLSVWTPYAILAQNGNVELPSVEADESLYRRWLPALARDPAYNRNLSLEGAGFALERPEVPAWQPLFGRSPLPRVLAHPADPYGCGHYRVRQPFRALHDAGLLDGMLSESLLQPVALERLEVDSVILQRQISEEQLRAISRMRSFNRAFRVYELDDYLPELPLKSLHRAEMPGDIRQILGRALGLADRFVVSTEPLAEAFRRMHGDIRVVPNRLPLPWWRDLSSRRRDAERPRVGWAGGIGHGGDLEVIAEVVRELADEVDWVFFGFCPDALRPYVREYHPGVEIERYPAYLASLDLDLALAPLEQNRFNECKSNLRLLEYGVLGFPVICSDVLCYRDSLPVTRVKNRSRDWLEAIRAHLADADANAAAGAQLREAVRRDWMLEGAHLEAWAAAWLPD

SEQ ID NO: 66247 - protein, 402 aa, Pseudomonas aeruginosa
MQPALNAFTEQPADTAEATSRAGLEQAFALFNQMSSQLSESYSLLEERVTELKGQLALVSAQRMEELAEKERLANRLQSLLDLLPGGVIVIDAHGVVREANPAALGLLGEPLVGMLWREVIARCFAPREDDGHEISLRDGRRLSIATRSLNGEPGQLILLNDLTDTRRLQEQLARHERLSALGRMVASLAHQIRTPLSAALLYAGHLSEQALPTDQQQRFAGRLKERLHELEHQVRDMLVFARGELPLTDRVAPKALFDSLRAAAEVHVQGLQVRWQCEARGGELLCNRDTLVGTVLNLVENAIQACGPELRLKVHLYARADSLRLSVSDNGPGMDPATLARLGEPFFTTKTTGTGLGLAVVKAVARAHQGQLQLRSRPGRGTCATLILPLIPAAPLSAIQE

SEQ ID NO: 66248 - protein, 329 aa, Pseudomonas aeruginosa
MSVESIRIEGIDTPVSRIGLGTWAIGGWMWGGADDATSVETIRRAVESGINLIDTAPVYGFGHSEEVVGKALQGLRDKAVIATKAALEWSDAGIHRNASAARIRREVEDSLRRLKTDRIDLYQIHWPDPLVAHEETAGELERLRRDGKILAIGVSNYSPEQMDGFRQFAPLASVQPPYNLFERAIDADVLPYAERNGIVVLAYGALCRGLLSGRMNAETRFDGDDLRKSDPKFQQPRFAQYLAAVAQLEELARERYGKSVLALAIRWILDRGPTVALWGARKPEQLNGIADAFGWRLDDEAMARIERILAETIQDPVGPEFMAPPSRNA

SEQ ID NO: 66249 - protein, 135 aa, Pseudomonas aeruginosa
MLTGLNHLTLAVADLPASIAFYRDLLGFRLEARWDQGAYLELGSLWLCLSREPQYGGPAADYTHYAFGIAAADFARFAAQLRAHGVREWKQNRSEGDSFYFLDPDGHRLEAHVGDLRSRLAACRQAPYAGMRFAD

SEQ ID NO: 66250 - protein, 291 aa, Pseudomonas aeruginosa
MSNERDTSRTPTPDPAEHNAFFPSPYSLSQYTSAKTDFDGADYPTPYKGGKKVLMIGTDERYILMQNASMFSTGNHPVEMLLPMYHLDKAGFEFDVATLSGNPVKLEMWAMPGEDEAVKSIYAKYLPKLKAPRKLADLLEQAVADDSPYAAVFVPGGHGVLAGIPHSREVKRLLNAFLAKDRYIITLCHGPACLLAPAVEEKPEDYPFKGYEICVFPDALDTGANLEIGYMPGPLPWLVGENLQKLGVKILNKGITGQVHRDRKLLTGDSPLASNNLGKLAAKTLLEAFAR

SEQ ID NO: 66251 - protein, 689 aa, Pseudomonas aeruginosa
MAVNDYEPGSMVITHVQGGGRDIIQYIPARSSYGTPPFVPPGPSPYVGTGMQEYRKLRSTLDKSHSELKKNLKNETLKEVDELKSEAGLPGKAVSANDIRDEKSIVDALMDAKAKSLKAIEDRPANLYTASDFPQKSESMYQSQLLASRKFYGEFLDRHMSELAKAYSADIYKAQIAILKQTSQELENKARSLEAEAQRAAAEVEADYKARKANVEKKVQSELDQAGNALPQLTNPTPEQWLERATQLVTQAIANKKKLQTANNALIAKAPNALEKQKATYNADLLVDEIASLQARLDKLNAETARRKEIARQAAIRAANTYAMPANGSVVATAAGRGLIQVAQGAASLAQAISDAIAVLGRVLASAPSVMAVGFASLTYSSRTAEQWQDQTPDSVRYALGMDAAKLGLPPSVNLNAVAKASGTVDLPMRLTNEARGNTTTLSVVSTDGVSVPKAVPVRMAAYNATTGLYEVTVPSTTAEAPPLILTWTPASPPGNQNPSSTTPVVPKPVPVYEGATLTPVKATPETYPGVITLPEDLIIGFPADSGIKPIYVMFRDPRDVPGAATGKGQPVSGNWLGAASQGEGAPIPSQIADKLRGKTFKNWRDFREQFWIAVANDPELSKQFNPGSLAVMRDGGAPYVRESEQAGGRIKIEIHHKVRIADGGGVYNMGNLVAVTPKRHIEIHKGGK

SEQ ID NO: 66252 - protein, 415 aa, Pseudomonas aeruginosa
MLSWDEFDKEDPTEAKAAPAAAQAVAQGHDKLDDEAAGSVEEARAVSADDSDAVARAKKALNDLDIQEGLDDLEGSAARVQVGDKQMINARADLNQLVPFKYDWAWQKYLDGCANHWMPQEVNMNADIALWKSKDGLSEDERRIVMRNLGFFSTADSLVANNLVLAVYRLITNPECRQYILRQAFEEAIHTHAYQYCIESLGMDEGEIFNMYHEIPSVAKKASWGLKYTRSISDPMFQTGTPETDRQFLRNLIAYYCVLEGIFFYCGFTQILSMGRRNKMTGTAEQFQYILRDESMHLNFGIDVINQIKIENPHLWDAQMKDEATQMILQGTQLEIEYARDTMPRGVLGMNAAMMEDYLKFIANRRLTQIGLKEEYPGTTNPFPWMSEIMDLKKEKNFFETRVIEYQTGGALSWD

SEQ ID NO: 66253 - protein, 963 aa, Pseudomonas aeruginosa
MHTDTTRENPQASAPQAADSSQDLAATAPGQLRVIKRNGTVVPYTDDKITVAITKAFLAVEGGTAAASSRIHDTVRRLTEQVTATFKRRMPSGGTIHIEEIQDQVELALMRAGEQKVARDYVIYREARAAERKNAGAASDVAQPHPSIRITRADGSLSPLDMGRLNTIISEACEGLAEVDGALIERETLKNLYDGVAEKDVNTALVMTARTLVEREPNYSYVTARLLMDTLRAEALGFLGVAESATHHEMAELYAKALPAYIEKGAEFELVDAKLKEFDLEKLGKAIDHERDQQFTYLGLQTLYDRYFIHKDGIRFELPQIFFMRVAMGLAIEEKDREARAIEFYNLLSSFDYMSSTPTLFNAGTLRPQLSSCYLTTVPDDLSGIYGAIHDNAMLSKFAGGLGNDWTPVRALGSYIKGTNGKSQGVVPFLKVVNDTAVAVNQGGKRKGAVCAYLETWHLDIEEFLELRKNTGDDRRRTHDMNTANWIPDLFMKRVFDDGSWTLFSPSDVPDLHDLYGKAFEERYEYYEALASYGKLKLHKVVQAKDLWRKMLSMLFETGHPWLTFKDPCNLRSPQQHVGVVHSSNLCTEITLNTNKDEIAVCNLGSINLVNHIVDGKLDTAKLEKTVKTAVRMLDNVIDINYYSVPQAQNSNFKHRPVGLGIMGFQDALYLQHIPYGSDAAIAFADQSMEAISYYAIQASCDLADERGAYQTFQGSLWSQGILPIDSEKKLIEERGAKYIEVDLSETLDWAPLRERVQKGIRNSNIMAIAPTATIANITGVSQSIEPTYQNLYVKSNLSGEFTVINPYLVRDLKARGLWDPVMVNDLKYYDGSVQQIERIPQDLKDLYATAFEVETRWIVEAASRRQKWIDQAQSLNLYIAGASGKKLDVTYRMAWFRGLKTTYYLRALAATSTEKSTINTGKLNAVSAGGNDGLQAAPAAEPKPAPVPQACSIDNPDCEACQ

SEQ ID NO: 66254 - protein, 236 aa, Pseudomonas aeruginosa
MEQEAWRILIVEDDRRLAELTREYLEGNGLKVDIEANGALAAARILAERPDLVVLDLMLPGEDGLSICRQVRPQFDGPILMLTARTDDMDEVLGLEMGADDYVCKPVRPRVLLARIRALLRRSEAPEAGAPAADSKRLAFGRLVIDNAMREAWLDGTTIELTSAEFDLLWLLAANAGRILSREEIFNALRGIEYDGQDRSIDVRISRIRPKIGDDPMHPRLIKTVRSKGYLFVGEG

SEQ ID NO: 66255 - protein, 106 aa, Pseudomonas aeruginosa
MKNQVNALAVLSVGEIEQVSGAGTFLGDAIINGVYAANSFLNSPLFSSIGNAASAIGLNRTHELVDLLAFQVPSVAAITVGKILGGTDNHNVPLHYNKESGEGLYS

SEQ ID NO: 66256 - protein, 448 aa, Pseudomonas aeruginosa
MIRSLRIRLMLGAAALAVLFMLALLPALQRAFGIALENTIEQRLAADVATLVSAARVEKGRLVMPEHLPVEEFNLPEAKVLGYIYDQNGDLLWRSTSAADESINYTPRYDGRGNEFHTTRDAKGEEFFVFDVEIDLLRGKQAAYSIVTMQSVSEFESLLKGFREQLYLWLGGALLVLLGLLWLGLTWGFRAMRGLSSELDQIESGERESLSEEHPRELLRLTHSLNRLLRSEHKQRERYRHSLGDLAHSLKTPLAVLQGVGDQLAEEPGNREQVRVLQGQIERMSQQIGYQLQRASLRKSGLVRHREQLAPLVETLCDALDKVYRDKRVSLQRDFSPSFSVPVERGALLELLGNLLENAYRLCLGRVRVGARLGPGYSELWVEDDGPGVPAEQRARIIRRGERADTQHPGQGIGLAVALDIIESYDGELSLDDSELGGACFRIRFATV

SEQ ID NO: 66257 - protein, 436 aa, Pseudomonas aeruginosa
MTKQPFYKSLYVQVLVAIAIGIALGHWYPETAVAMKPFGDGFVKLIKMAIAPIIFCTVVTGIAGMQSMKSVGKTGGMALLYFEVVSTVALIIGLVVVNVVQPGAGMHVDPNTLDTSKIAAYAAAGEKQSTVDFLMNVIPGTVVGAFANGDILQVLFFSVLFGYALHRLGSYGKPVFEFIERVSHVMFNIINVIMKVAPIGAFGAMAFTIGAYGVGSLVQLGQLMLCFYITCILFVLIVLGGIARAHGFSILRFIRYIREELLIVLGTSSSESALPRMIDKMEKLGCNKSVVGLVIPTGYSFNLDGTSIYLTMAAVFIAQATDTPMDITHQITLLLVLLIASKGAAGVTGSGFIVLAATLSAVGHLPVAGLALILGIDRFMSEARALTNLVGNGVATVVVSKWCKQLDEGTLQRELAGEGNASSPASDIPVGGREAV

SEQ ID NO: 66258 - protein, 472 aa, Pseudomonas aeruginosa
MADSDKGKLGLPALTALVVGGIIGSGIFSLPQNMAEGAGAGAILIAWAITFVGMLTLTRIFQWLSTTRPELDDGVYGYAREGFGEYLGFNAAWGYWISAWVGNAGYLVVLFSALGSFGALAFFGDGTTWPALLGELTVLWLMHAFVLHGVHNAAITNAIVTLAKVVPIALFILCVALAFRIETFHLDFWGSPALGSVTRQVETTMLYTVWVFLGIESATVYASHARHAADVSRATLLGFVVTLLLLVCVSVLSLGVVPQHELAQMKNPSMAQVMAAAVGPWGATLINVGLIVSVGGALLAWTMLAVEMLYLASRGPTHTAPALFGRTNAVETPAPALWLTSTLISALLLVAFLNASGYNALIQLATSMALIPYLLCAGFCLKLVARRPHSGAMLALALLGTLYGVWLIYAAGLKYLLLSMILYAPGLGFFLHARRQRGLPAFGNRAEGSVAALVLVLALAALWMIGSGRLTL

SEQ ID NO: 66259 - protein, 409 aa, Pseudomonas aeruginosa
MSDNTFSVQRFRALPTEIHVMLVGTLLTRGAYFMVWPFLALLLWREFRLSASAIGLLLALATVCGALSGIYTGWLSDRFGRKRLIFFGTSLSGLSFVLLGFSGQPLSYGLAISGVSIGCALLESSCKALIGDRVEDRRSRELALYCRYFLINLGAALGPLIGLTLGVAAQAGTFLVTALVYFCYGLLLWRLLHHLELKRRSLAPRSSTGFLEACLSMGRHRAFTLLLLCNMLAALIYATFDSTLVQYLTRSGLPDVVNSIALLVTINALTIVVAQFPLLRLLENTGTGGRLMLGMLLMLLAQLGFAWTPVTLFAGLALATVVLSLGELIVFPTFSVEVDQLTPDDLRGSYFGAANLYSLGTALAPLYGGIMLDHAGSQALYLGLAALCGVIMLLQVGAVGLRQAERAGG

SEQ ID NO: 66260 - protein, 65 aa, Pseudomonas aeruginosa
MPCMLSEVSVSGLYVPPLFLYLCLAMPLYLLLERLAWRWLECAWHPGLLRFFLSFIVLSVLVLKF

SEQ ID NO: 66261 - protein, 334 aa, Pseudomonas aeruginosa
MIRMTLDEVRELAVRILRRHAFSEAHVQAVADTLVAGERDECASHGIWRLLGCIATLKAGKVSADAEPELHDIAPGLLRVDAHGGFSQCAFRLGLPHLLEKARSQGIAAMAVNRCVHFSALWVEVEALTEAGLVALATTPSHAWVAPAGGRKPIFGTNPIAFGWPRPDGPPFVFDFATSAVARGEIQLHERAGKPIPLGWGVDEQGEPTTDASAALRGAMLTFGGHKGSALAAMVELLAGPLIGDLTSAESLAYDEGSRSSPYGGELLIAIDPRRMLGASAEEHLARAETLFEGIVEQGARLPSQRRFEARERSARDGVTIPEALHRELLALLE

SEQ ID NO: 66262 - protein, 490 aa, Pseudomonas aeruginosa
MSDRGRTLMVQGTTSDAGKSTLVTALCRWLARRGVAVVPFKPQNMALNSAVTADGGEIGRAQAVQAQACRLAPHTDMNPVLLKPNTDIGAQVIIHGRAVTSMDAAAYHDYKRVAMEAVLASHGRLAAAYRVVMVEGAGSPAEINLRANDIANMGFAEAVDCPVILVADIDRGGVFAHLVGTLELLSDSERERVKGFVINRFRGDIALLQPGLDWLEARTGKPVLGVLPYVSDLHLEAEDAIDTRQAAKVGPRLKVVVPVLPRISNHTDFDPLRLHPQVELSFVGPGQALPSADLIVLPGSKSVRADLAALRERGWDEAILRHLRYGGRLLGICGGLQMLGERLHDPLGLEGAAGSSAGLGLLALETTLEADKQLRNVQGRLSLEDAPLSGYEIHAGVTRGEALARPAVVLDDGRADGARSVDGNVMGTYLHGLFESTAACSALLRWAGLREVQAVDYQALRERDIERLADLVERHLDTGRLLALCGEPHA

SEQ ID NO: 66263 - protein, 194 aa, Pseudomonas aeruginosa
MSLRLDLLRHGETESGGGFRGSLDDALTARGWAQMRTAVEGGRWDLLVSSPLQRCRAFAEELAQRQGIELELENDLRELHFGAWEGRSAAALMDGHSEALGRFWADPYAFTPPGGEPLSEFEARVLAAQRRLRQRHAGRRVLLVTHGGVIRLLLARARGLPREHLLQVDVGHGALFGLRAGEGDDRWHECREGE

SEQ ID NO: 66264 - protein, 424 aa, Pseudomonas aeruginosa
MKTIWFKTSLALTISAVSTYTLANGIAINEQSASGAGTAYAGRASSALDASTIYGNPAGLSKLKRTEVSGGLAIVKAKDDISQAHSTAQGSNKGDSVPLAAVPFGYFSTPINEDFTFGLGIYVPYGIINDYENGFMGSSHGSYSKVQVITVQPTIAWKINDKVSVGFGPTFNRIDGQLKNTLATNGLLGSNGDTKINIKGDDTAIGYNVGVMVDLTDDTTWGLTYHSKVKYHLGGNTEVKNAPGALGLNGKYDAKLDITLPESVDTSITHKFDDKWTGYLGAVWTRWSRLEKIEVRNSGVPALGQALGFNTIGEDLNWRDTWSFSVGTSYQATPEWVLRTGFAYEPSPTSNEDRNVRIPVGDRKVFTVGAGWSPNQDLTVDVAYAYLWETTAGVNQEGSALQPAYSAKYDNSAHGLTAQVTYRF

SEQ ID NO: 66265 - protein, 97 aa, Pseudomonas aeruginosa
MKRICSVYKSPRKSEMYLYVDKREALSRVPEALLVPFGAPQHVFDLLLTPERQLAREDVAKVLENIEKQGFHLQMPPGEEEYIEHLPEELLRMNDPL

SEQ ID NO: 66266 - protein, 91 aa, Pseudomonas aeruginosa
MAHTIHGKKKLLARVRRIAGQTRALEQALEEGSECAAVLQQIAAIRGAVNGLMNEVLEGHIREHLGAEQASAEQRREDLELVVTALRSYLK

SEQ ID NO: 66267 - protein, 179 aa, Pseudomonas aeruginosa
MGLLAAIMLAVYLANPFGTASLDPRARLLGVALYKIPSRSMEPTLQQGDFILANAARYAFADPQVGDLVVFRFPPQRSIAYVKRIAGIPGDRVRIDGGRLYVNERPVTEPYLAQQALRQPESLRMAERTVPAGQYFMLGDNRDNSNDSRYWGYVPRADLVGRVFAVWYAEDTRRIGSVR

SEQ ID NO: 66268 - protein, 371 aa, Pseudomonas aeruginosa
MSTAERAPILLTPGPLTTSYRTRRAMMVDWGSWDSDFNELTASVCQRLLKIVGGEGSHTCVPLQGSGTFAVEAAIGTLVPRDGKVLVLINGAYGKRLAKICEVLQRPFSTLETEENVPTTAADVERLLAADPAISHVALIHCETSTGILNPLEAIAKVVERHGKRLIVDAMSSFGAIGIDARKVPFDALIAASGKCLEGVPGMGFVFARSAALEASAGNCHSLAMDLQDQHAYMRKTGQWRFTPPTHVVAALHEALSQYEEEGGLPARQRRYASNCETLLGEMARLGFRSFLPAEIQAPIIVTFHAPRDPRYRFADFYQRVREKGFILYPGKLTQVETFRVGCIGHVDAAEMRQAVAAIGEALRELEVLEI

SEQ ID NO: 66269 - protein, 513 aa, Pseudomonas aeruginosa
MNPSRRVALVAAIYLGTFIASLDISIVNLALPTLQYALDTDLAGLQWVVDAYALCLSAFMLSSGPLSDRYGRKLTWLLGVGLFSFGSLLCALATSLPLLLFGRAVQGIAGALLIPGALSILTQAFHDPGQRAQVIGGWTSFSALSLILGPLLGGLLVEHAGWQSIFLINLPLGLLALALGLWGIEETAHPEHAAFDPLGQLLSVVWLGALTYALIAAGEGGWLSPTAWPALLLAGVGLLGFLFVERRTARPLLPLGLFRQAGFAVCNLASFVLGFSGYASLFFLSLFFQQVQGASAQQAGFYLAPQFLAMGALSMLFGRLQRHVPLRRLLVLGYLVIGLAMLALAACGTGTAYPWVGLLLVALGLGMGLAVPGTGLAVMASVARERSGMASATMNTLRQAGMAVGIALLGALLSGRAIVVLGDRLEGLGIADAQRLATQAVTAHRLPGSLAGLDAELPAALAEGFRLAMLVAGASALLAAALLWRLRVSAGPAADTVGASGRTAGVQLQADRH

SEQ ID NO: 66270 - protein, 331 aa, Pseudomonas aeruginosa
MTKANPFAALKWLSLAPALLLGGCDMTLFNPKGQVGMDERTLIITATLLMLIVVIPVIVMTLAFAWKYRASNTQAEYKPDWHHSNRIEAVVWLVPCVIIAILGWITWESTHKLDPYRPLDSEVKPVTIQAVSLDWKWLFIYPEQGIATVNEIAFPKDTPVNFQITSDSVMNSFFIPQLGSQIYSMAGMMTKLHLIANEEGVFDGISANYSGGGFSGMRFKAIATSEQGFQDWVAKVKAAPASLSIGTYPELVKPSENVPPTYFSSVSPELFGHILTKYEHHGDAKGAAHGEHAGAEHEAAMTGHDMQDMDMQAMQGMKDMKDMHMQPSTQE

SEQ ID NO: 66271 - protein, 658 aa, Pseudomonas aeruginosa
MFGKLTLSAVPYHEPIVMVTLAVVALLGLGVVGAITYYRKWTYLWTEWLTSVDHKKIGVMYIVVALVMLVRGFADAIMMRGQLALAEGANHGYLPPEHYDQIFTAHGVIMIIFMAMPFMTGLMNLAVPLQIGARDVAFPFLNSLSFWLLVVSAMLVNVSLGLGEFARTGWVAYPPLSELAYSPGVGVDYYIWALQISGMGTLLTGINFLVTVFKMRTPGMKLMQMPIFTWTCTFANILIVASFPILTAALGLLSLDRYLDMHFFTNELGGNAMMYINLFWAWGHPEVYILILPAFGIFSEVTATFAGKRMFGYKSMVWASAAITFLGFTVWLHHFFTMGSGGDVNGFFGVATMLISIPTGVKLFNWLFTIYKGRLRFSTPILWTLGFMVTFTIGGMTGVLLAIPGADFLLHNSLFLIAHFHNTIIGGAVFGYLAGFAFWFPKAFGFTLDEKWGKRSFWCWLVGFYMAFMPLYILGFMGMTRRLNHYDNPLWKPYLVVAFFGAVLIFCGIACQLIQLFVSVRNRKQLADVNGDPWEGRTLEWATSSPPPFYNFAELPKVQDVDAFHDMKKAGTAYRKLPAYQPIHMPKNTAAGFSIAVFAFVFGFAAIWHIWWLMAVGFVGMIGSFIVRSYNQDVDYYVQPEEIEKIESARFQQLAKQV

SEQ ID NO: 66272 - protein, 557 aa, Pseudomonas aeruginosa
MQPVLFRTLSLGVAIAAASSSAFAATLDGGAVAAPDEYGAKVAAQILKAGGNAVDAAVATAFTLAVTYPEAGNIGGGGFMTLYMDGKPYFLDYREVAPKAASKTMYLDDKGEVIENLSLVGAKAAGVPGTVMGLWEAHKRFGKLPWSELLTPAIGYAQKGFKVADKQFQYRQDAVALFNGKTNFGDYFGHMKAGEAFLQPDLAKTLERIADKGPDEFYKGHTADLLVAQMQQDKGLITHQDLADYKVRWREPMRVDWQGNTLYTAPLPSSGGIALAQLLGIKENRAADFKGVELNSARYIHLLAEIEKRVFADRADYLGDPDFSKVPVARLTDPAYLKQRAAEVNPTAISPTEKVRPGLEPHQTTHFSIVDADGNAVSNTYTLNWDFGSGVVVKGAGFLLNDEMDDFSAKPGVANAFGVVGSDANAIEPGKRMLSSMSPSIVTRDGKVSLVVGTPGGSRIFTSIFQVLNNIYDFHLPLEKAVAAQRVHHQLLPKDTIYYDAYAPLAGKVAEELKAMGYTLEDQGWNMGDIQAIRVDGKALETASDPRGRGVGLVVKP

SEQ ID NO: 66273 - protein, 302 aa, Pseudomonas aeruginosa
MRIAPSLLSTAIVAALLSAPVVADELTGTLKKIKETGTITLGHRDASIPFSYLGTEPGKPIGYSHDLQLKVVEAVKKELNLPELKVRYNLVTSQTRIPLVQNGTVDIECGSTTNNEERQKQVDFSVGIFEVGTRLLSKKTANIKDFDDLKGKNVVTTAGTTSERLLKAMNADKKMGMNIISAKDHGESFMMLESGRAVAFMMDDALLYGEMAKAKKPDDWVVGGTPQSFEIYGCMVRKGDAAFKKVVDKAITDTYASGEVNKIYDKWFTQPIPPKGLNLNFPMSEELKKLIASPTDKAAEQM

SEQ ID NO: 66274 - protein, 256 aa, Pseudomonas aeruginosa
MSFDPFGDFETTGYLRNSLGLKDPAEVKENEHFSFEMGLDEALSYLERTKNLNYQALLQVHRLLFEKFYPWAGRDRLELVPHLSVWKGPKGAPRRTFFESPAMIERAVDYALSLASKKQGFMQKPGEVMGLLCFAHPFLDGNGRSILLFYMELSYRAGFAIDWASTRKDDYLQALDDEIHNPGKGHLDRYLVPFVVPIHSRDQWPEIIGQINGLDGMDGENITYENLDDPEVQKVYAAYHAEHPYPAKDGTPDSEP

SEQ ID NO: 66275 - protein, 380 aa, Pseudomonas aeruginosa
MRILADENIPVVDAFFADQGSIRRLPGRAIDRAALAEVDVLLVRSVTEVSRAALAGSPVRFVGTCTIGTDHLDLDYFAEAGIAWSSAPGCNARGVVDYVLGCLLAMAEVRGADLAERTYGVVGAGQVGGRLVEVLRGLGWKVLVCDPPRQAREPDGEFVSLERLLAEADVISLHTPLNRDGEHPTRHLLDEPRLAALRPGTWLVNASRGAVVDNQALRRLLEGGADLEVALDVWEGEPQADPELAARCLIATPHIAGYSLEGKLRGTAQIYQAYCAWRGIAERVSLQDVLPETWLAGLQLNPGCDPAWALATLCRAVYDPRSDDAAFRRSLTGDSATRRAAFDALRKHYPPRREITGLRVATGGQAELQRVVRALGAQLV

SEQ ID NO: 66276 - protein, 601 aa, Pseudomonas aeruginosa
MLKRTLLSAAVASALFAGVANAAGVVAIATSPTLEANSPGATEQYGPGQANYVVGKSVENGANLDSKAANITLAQEIFGNKSEETTFDLPSVTYTIDPVKAGNAAAGHTIKLTLGRTVVRFAKAVTANQIKIGALAAGSGFVITSGTGATDNTLELRLDQAGADMIKQTATGGNVVFFNFREPSSQDSQPAKVTNMRAPLQGDATFVAGSWNPKVSLQNDPLNELRFQVTVSAQFDTTTGADAGNPANNDSAPPLTIFTSLPAVYWDVLNTNQYGQNRVLHPLNLNNQDRSFDTTVSVGGDNTDYYGANYARLGAVRLGINTDVLNEAGRTVFGFAGGDKVTSTLSGNFNGISDIGLTTGNCSAFAANPGSAAKLWNSAAIEGVVDAQGNGTLPVSFDNSNINQTYNVCVKASGTVPMQALQRFDVGDLKVDFENVRYVDRTIAGNRLDEFWKNSCVASLFNLPGSNVSDQFFIRLTNTSDDGRDGKVRGVLFDQNGKRYPATGSTYLTDSSGKTALKAHETGVYTVTEVAKAFGIDGTNWNGANGRARLVLEGEFPTCEALGLIRSANGTITNMTSTTQGNFNEDGSSTSENHKAGNNRN

SEQ ID NO: 66277 - protein, 422 aa, Pseudomonas aeruginosa
MKGNAPVLAAVDISKGFRVYRAPHQRMLQAIWGERKKFYSEFWALRNVSFQVFPGEVVGVIGCNGSGKSTLLQILAGTLRPTSGQVVRPERVAALLELGAGFNMEYTGRENIIFNAMLLGLGEQEISERLDEIIQFADIGEFIDRPVRTYSSGMFVRLAFSIAAYVDADVLIVDEALAVGDAAFQFKCLNRLEELLLKGITILLVSHDIQLIKSYCSRAIYLSKGRVIFDGDCETATELYLRDSIETQRAEVRSGSLIASGEHGNSVIAYGNGQGRFLSIRMGVLDEARDYFDSGERVWVEVLVQFDLPVPEHPKITLTIRDQRGYNLYGINNLLLGKALNVEPDGRLRTRISFDCDLQAGEYALTFRLENSLSESVCELMDKKVNAAIFRVFNSPKCFDAVVNLHGAFEPVPFCCETRATQ

SEQ ID NO: 66278 - protein, 196 aa, Pseudomonas aeruginosa
MNPREHGKRSIDNETRSALKRQRPAVIWLTGLSGAGKSTIASALELALFEQKKHTFLLDGDDLRLGLCRNLGYSDEDRTENIRRIAEVAKILLEAGLIVIVATISPFSRDRRLSRELIGIEHFIEVFVDTPLSECERRDPKGLYRKARSGKIENFTGIDSIYETPAQPNITIDTLSEDPDLAVKRIISYLETNQPA

SEQ ID NO: 66279 - protein, 319 aa, Pseudomonas aeruginosa
MDKNLHQPLGGNEMPRFGGIATMMRLPHVQSPAELDALDAAFVGVPLDIGTSLRSGTRFGPREIRAESVMIRPYNMATGAAPFDSLNVADIGDVAINTFNLLEAVRIIEQEYDRILGHGILPLTLGGDHTITLPILRAIKKKHGKVGLVHVDAHADVNDHMFGEKIAHGTTFRRAVEEDLLDCDRVVQIGLRAQGYTAEDFNWSRKQGFRVVQAEECWHKSLEPLMAEVREKVGGGPVYLSFDIDGIDPAWAPGTGTPEIGGLTTIQAMEIIRGCQGLDLIGCDLVEVSPPYDTTGNTSLLGANLLYEMLCVLPGVVRR

SEQ ID NO: 66280 - protein, 650 aa, Pseudomonas aeruginosa
MSLLKQLFLAICLFLVVAFSGSFVSSVENSREQLRGQLRSHAQDAATALGLSLTPHVDDPAMVQLMVSSIFDSGYFASIRVIDIKSGKPLVERVQAHAERTVPGWFERLVDLQPQGGDALIMRGWEQAARVEVVSHPQFALARLWDSALGSLYWLLACGAASLLLGGWLLRRQLRPLDQMVRQAHAISRREFLSLPRLPRTPELRRVVQAMNQMVEKLRTLFAEEAARSDKLRAQAYQDSLTGLPNRRLFDARLNEQLGAGEHEHAGQLLLLRLNDLNGLNQRLGGQRTDELIQAVARLLVDSCGQQGRADWLLARSRGGEFAVLAPGCSREQAERLAEELCEGLENLARTGASDLTPVAYLGISAFAEGDSPADLLARADQALAQAESQPAQPWASQDGTALAALNDSQDWHDWIDQALTERRLLLYFQPVVDCLDTQRVLHHKVLARLLDPQATAIAAGRFLPWIERFGWAARMDLAMLEQSLEHLRRHPRPLALSLSAASVRNAQTFAPLLALLKAHPQEARQLTLELDERHLPAAAELERLSQVLRELGCGLGLQHFGGRFSLIGNLTHLGLAYLKLDGCYLHAVDREGDKRLFIEAVYRTTHSIDLPLIAEQVETLGELEVLREMGLRGAMGRLFGSPAPWSGDA

SEQ ID NO: 66281 - protein, 378 aa, Pseudomonas aeruginosa
MAESESGQDKTEEPTEKRRREAREKGQLPRSRELNTLAILMAGAGGLLIYGADLAGALLRLMRSNFELSRETAMNTESMLQLLGASAYLAAQGLWPILLMLLVAAIVGPIALGGWLFSMDALQPKFSRLNPLSGLKRMFSAKSLLELSKALIKFLVVLAVALLVLSADRDALLALAHQPLEQAILHSVRVVGWSAFWMACSLLLIAAVDVPYQIWDNRQKLLMTKQEVRDEYKDSEGKPEVKSKIRQMQREMAQRRMMAAVPEADVVITNPTHFAVALKYDPAGGGAPLLLAKGNDFLALKIREVAQEHKVMVMESPALARAVYYSTELDQEIPAGLYLAVAQVLAYVYQLKQYQAGKGKRPSPLKDLPIPPDLRRDE

SEQ ID NO: 66282 - protein, 447 aa, Pseudomonas aeruginosa
MSAITRYLAMLRLFGMLLCAAAIPSVATATVPVTVAVAASDVEEEAVEASAVGAEAEAARDAGYESAEVPALARRVTDLTATLDAAERARLEASLAALEARKGAQVAILMVPSTYPDSIEAYATRVFEAWKLGRKGIDDGVLVLVAKDDRRMRIEVGYGLEGTITDIDAGRIIREYMTPAFRQQDYAGGLEAAAQRLVRLIDGEALPPPPRDPLEPGAVRQTLAIAFLLGALGGVALLVRPRAWYWTLGAVVALAAALALGRHWPAGAMVALAEMVAVLGVGFGALLKYSRGARWFFAILVLYALGLFWAYRRYGLPVLHYGLAVPLSLGLSLLMLAGAWQGLRRGRRWAYLPGLLGLLLTLALECLLLLVDDPLNSIEALIILPAACLPLLIGCNFSAGGSGGGRRRGGDYASSSGSSSSSSSSSSSDSFSGGGGSSGGGGASGSW

SEQ ID NO: 66283 - protein, 124 aa, Pseudomonas aeruginosa
MKILIVDDFSTMRRIIKNLLRDLGFTNTAEADDGTTALPMLHSGNFDFLVTDWNMPGMTGIDLLRAVRADERLKHLPVLMVTAEAKRDQIIEAAQAGVNGYVVKPFTAQVLKEKIEKIFERVNG

SEQ ID NO: 66284 - protein, 262 aa, Pseudomonas aeruginosa
MVLGNDSTGDEFESTLKKHARELVDCLERGHFQQAVQLIQELSQARDRGLYQEVGKLTRELHNAIVDFQIDPHSPHAQEMSQIADATDRLSYVVEMTEKAANRTMDLVEQSAPLVNQLGDDSRELHQEWQRFMRREIDADGFRELAKRIEQFLVRSGENAGQLSSQLNDILLAQDYQDLTGQVIKRVTKLVTEVESNLVKLVWMAGQVDRYAGIEHDHVSMRHQAALERSAKGEGPQVAAEKREDVVSGQDDVDDLLSSLGF

SEQ ID NO: 66285 - protein, 223 aa, Pseudomonas aeruginosa
MSNVFSLLLAREARLLFRRPAELANPLVFFAIVIALFPLAVGPESQLLQTLSPGLVWVAALLAVLLSLEGLFRSDFEDGSMEQWVLSPHPLALLVLAKVLAHWLFSGLALVLMSPLFALMLGLPARCIPVLLLSLLLGTPVLSLLGAVGAALTVGLKRGGLLLALLILPLYIPVLILGSGALQASLQGLPSSGHLLWLASLTALALTLTPFAIAAGLKISVGE

SEQ ID NO: 66286 - protein, 411 aa, Pseudomonas aeruginosa
MAEFGNYVIYLIMLGAVLGALASILRPESGLGREFVNGIHAIGPVFLAQAGIMVAIPYLSKAISHALGPFFQTLGSDVSIAALSIIAVDMGGYQLADALTANRDMWITAMLVGYTSGATIVYLIPVGLTMLERKDHKYLALGAMAGLISIPFAVLAALLLITLNHIPVRELVSTGSPALHYLSLDFLDMLRLLAPLFVFCFLLAAGLKYRATAMVTGFLVFGKVMDAFIKMALALSIVQHFTGVFTKVFGGWGFDPMFADEKELFRAIEIAGYIGIMLAGTFPICYLFQRYCKRPMAVLGRYLGLSQPGATAFVMVLANIIATYHLFKYMNARDKVLCVALGVCAQATIGDHLAFTANFQPTLILPILLGKLFGGLLAVFIAIRISVPAAERYARQEQEHDEAEKSALHAA

SEQ ID NO: 66287 - protein, 283 aa, Pseudomonas aeruginosa
MSAPDSWRERLYIVIFQTDTRDGRRFDSALLLVILASLLVVMIDSIDEIHQDYGDLLAYIEWGFTGIFLVEYLLRLYCSPKPLRYAFSFYGLVDLLAILPGFLALLYPDAQYLLIVRVIRMLRIFRVLKLRQYLSQANFLLTALRGSKQKIIVFFLTVMTLVTVFGALMYVVEGPEHGFTSIPRGIYWAIVTLTTVGFGDITPKTPLGQAIASLVMLTGYSIIAVPTGIFTAELATAMRQDPANLLQRDCPVCRKATHEVQAAFCCRCGNPLFPREEGSHGKS

SEQ ID NO: 66288 - protein, 477 aa, Pseudomonas aeruginosa
MTADKKAKILATLGPATRSRDDIRALVEAGANLLRLNFSHGDYADHAQRFAWVREVEAELNYPIGVLMDLQGPKLRVGRFAAGAVQLQRGQTFTLDLSDAPGDERRVNLPHPEIIHALEPGMSLLLDDGKIRLEVVNCHSDAIETRVAVGGELSDRKGVNVPEAVLQLSPLTDKDRRDLAFGLELGVDWVALSFVQRPEDIDEARGLIGDKAFLMAKIEKPSAVSAIEAIAERADAIMVARGDLGVEVPAESVPGIQKRIVQVCRQLGKPVVVATQMLESMRFSPAPTRAEVTDVATAVGAGADAVMLSAETASGQYPREAVEMMAKIVRQVEAEPDYHVQLEVNRPQPDATVSDAISCAIRRVSRILPVAVLVNYTESGNSTLRAARERPKAPILSLTPNLRTARRLTVAWGVYSVVNEQLAHVDEICSTALDIALAQRMARRGDTVVVTAGVPFGRPGSTNMLRIETVAPPLGDL

SEQ ID NO: 66289 - protein, 296 aa, Pseudomonas aeruginosa
MAKIGFIGTGIMGKPMAQNLQKAGHSLFLSTHHDAAPADLLEAGAIALANPKEVAQEAEFIIVMVPDTPQVEDVLFRKDGIAEGAGPNKVVIDMSSISPTATKGFAEKIKATGAQYLDAPVSGGEVGAKAATLSIMVGGCPNTFERALPLFQAMGKNITRVGGNGDGQTAKVANQIIVALNIQAVAEALLFAARNGADPAKVREALMGGFASSRILEVHGERMVKGTFDPGFRISLHQKDLNLALAGARELNLNLPNTANAQQVFSTCAAIGGSNWDHSALIKGLEHMANFSIRDE

SEQ ID NO: 66290 - protein, 260 aa, Pseudomonas aeruginosa
MPRFCANLSMLFTEVDFLERFDAAAKAGFAGVEYLFPYDVEAEAIKARLEANGLEQVLFNLPAGDWAKGERGIACHPDRVQEFREGVDKAIAYARVLGNRQVNCLAGIRPQGHDCASVEKTFVDNLRYAADKLEAAGIRLVMEMINTLDIPGFYLQNTRQALEIRDKVGSANLFLQYDIYHMQIMEGDLARTLENQLAAINHVQLADNPGRHEPGTGEINYRFLFEHLDRIGYQGWIGCEYKPATTTEAGLGWMKTHNVV

SEQ ID NO: 66291 - protein, 331 aa, Pseudomonas aeruginosa
MSDSRLVDPFGRRITYLRLSVTDRCDFRCTYCMSEDMQFLPRDQVLSLEELYAVADAFIGLGVRRIRITGGEPLVRKGITGLLARLGQRAELEDLAITTNGSQLRERAAELKAAGVRRLNVSLDSLQRERFAAFTRSDRLEQVLDGIQAAREAGFERIKLNCVVQKGRNDDEILDLVEYALANQLDISFIEEMPLGSITSHRRELTLCTSDEVRAIIERRWPLTPSLARSGGPSRYYQIGDEPSRIGFISPHSNNFCGDCNRVRVTAEGKLVLCLGHEGALDLRELLRSHPGDRERLSAALVAALNLKPERHHFDAQEQVQVLRFMSMTGG

SEQ ID NO: 66292 - protein, 434 aa, Pseudomonas aeruginosa
MTRNAKAYRAAILHSIADPAEVGVERSYEYFEDGLLLVEDGKVARLGDAETLLGEIGEVEVFEYRDALITPGFIDTHIHFPQTGMIASYGEQLLDWLNTYTFPTERQFGDQAHADQVAEIFLQELLRNGTTTALVFGSVHRQSVESLFEAARRLDLRLIAGKVMMDRNAPDYLTDTAESSYRDSKALIERWHGQGRLLYAVTPRFAPTSTAEQLDMAARLLREHPGVYLHTHLSENLKEIEWVKELFPERSGYLDVYDHHGLLGPRSVFAHGVHLCDGECQRLAETGSAVAFCPTSNLFLGSGLFDLPKLERYKVKVGLGTDVGAGTSFSQLQSLNEAYKVMQLQGARLDPFKSLYLATLGGARALELDDRIGSFATSNEADFVVLDYHATPLLSYRLSQAGSLAERLFALTILGDDRTVKETFAAGRSVHRRD

SEQ ID NO: 66293 - protein, 799 aa, Pseudomonas aeruginosa
MSNHRKPHKSQEELADLFRAELTTGVGRSVKHESAPKHVSGEAIYIDDRLEFPNQLHVYARLSERAHARITRLDVTPCYQFPGVAIALTAADVPGQLDIGPVVAGDPLLADGKVEYVGQMVLAVAADSLETARKAAMAAIVEYEDLEPVLDVVEALRKRHFVLDSHQHRIGDSAAALAGAPHRLQGTLHIGGQEHFYLETQISSVMPSEDGGMIVYCSTQNPTEVQKLVAEVLGVSFNRIVIDMRRMGGGFGGKETQAAAPACLCAVVAYHTGRPAKMRLPRMEDMQITGKRHPFYVEYDVGFDDDGRLHGIQIDLAGNCGYSPDLSGSIVDRAMFHSDNAYFLGNATINGHRCKTNTASNTAYRGFGGPQGMVAIEEIMDAVARSLGKDPLEVRKLNYYGKDERNVTHYHQTVEHNLLAEMTAELEASSEYARRREEIRAFNAASPVLKKGLALTPVKFGISFTATFLNQAGALIHIYTDGSIHLNHGGTEMGQGLNTKVAQVVAEVFQVDVERIQITATNTDKVPNTSPTAASSGTDLNGKAAQNAAETIKRRLVEFAARHWKVSEEDIEFRNNQVRIRELILPFEELIQQAYFGQVSLSSTGFYRTPKIFYDREQARGRPFYYFAYGAACSEVIVDTLTGEYRMLRTDILHDVGDSLNPAIDIGQVEGGFVQGMGWLTMEELVWNAKGKLMTSGPASYKIPAVADMPLDLRVKLLENRKNPEQTVFHSKAVGEPPFMLGISVWCAIKDAVASLADYRAQPAIDAPATPERVLWGVEQMRRLKAAQAQAADAAVEPA

SEQ ID NO: 66294 - protein, 1162 aa, Pseudomonas aeruginosa
MRLKSIKLAGFKSFVDPTTVNFPSNMAAVVGPNGCGKSNIIDAVRWVMGESSAKNLRGESMTDVIFNGSNTRKPVSQASIELIFDNAETTLVGEYAQYAEISIRRRVSRDGQNTYFLNGTKCRRRDITDIFLGTGLGPRSYSIIEQGMISKLIEARPEDLRNFIEEAAGISKYKERRRETESRIRRTQENLARLTDLREELGRQLERLHRQAQSAEKYQEHKAEERQLKAQLGAVRWRDLNEQVGQRERVIGDQEIAFEALVAEQRGADAGIERLRDGHHELSERFNQVQARFYSVGGDIARVEQSIQHGQQRQRQLQDDLREAERTRQETESHLGHDRTLLATLAEEMAMLAPEQELSAAAAEEAGIALEQAEQGMQAWQQQWDAFNQQSAEPRRQAEVQQSRIQHLEQSLERLQDRERRLQEERGQLAADPEDAAILELNEQVAIAELALEELQLQEQGQAERLEQLRQELQQLAAEQHQAQGELQRLNGRIASLEALQQAALDPGQGALEWLREQGLEQRPRLAEGLRVEPGWELAVETVLGADLQAVLLDGFDGLALAGFGKGELRLLSPARGAATAAGSLLDKVRADADLSPWLARVKPVETLEQALAQRGALDDGESLISRDGYWVGRHFLRVRRSDEAQGGMLARAQELEALQERREALETRVAEGEERLAAARDEQRELEGAREQVRRQVQEEGRRHGELKAQLSAQQAKVEQLVLRRRRLDEEVAELAEQRALEQEQLSEARLTLQEALDSMALDTERRESLLAERDALRERLDRIRQDARTHKDHAHQLAVRVGSLKAQHNSTQQALERLDQQSARLNERCEQLNLNLEEGAAPLEELRMKLEELLERRMAVEDELKQARLALEDADRELREVEKRRGQAEQQSQLLRGQLEQQRLEWQGLVVRRKALQEQLAEDGYDLHTVLANLPLDASERDWEERLESLAARIQRLGPINLAAIEEYQQQSERKRYLDSQNDDLAEALETLENVIRKIDRETRNRFKETFDQINAGLQALFPKVFGGGTAYLELTGEDLLDTGVAIMARPPGKKNSTIHLLSGGEKALTALALVFAIFQLNPAPFCMLDEVDAPLDDANVGRYARLVKEMSEKVQFIYITHNKIAMEMADQLMGVTMHEPGCSRLVAVDVEEAVALAEA

SEQ ID NO: 66295 - protein, 289 aa, Pseudomonas aeruginosa
MDIGLREWLIVIGLIVIAGILFDGWRRMRGGKGKLKFKLDRSFANLPDDDGDSAELLGPARVVEHREPSFDEQDLPSVSAREAKERKGGKRQEEPRQGDLDLDEGLALEADPSDAAETVEPRKGKSKGRKEKEREKAPAVAAEPAPVDEVLIINVIARDESGFKGPALLQNILESGLRFGDMDIFHRHESMAGNGEILFSMANAVKPGTFDLDDIDNFSTRAVSFFLGLPGPRHPKQAFDVMVAAARKLAHELNGELKDEQRSVLTAQTIEHYRQRIIDHERRSLMQKR

SEQ ID NO: 66296 - protein, 794 aa, Pseudomonas aeruginosa
MTDTQAAAERIAQLRTELDTHNYRYYVLDEPSIPDAEYDRLFRELQALEAEYPQLLTPDSPTQRVSGTPASAFGEVRHEIPMLSLGNAFEEQDLLDFDRRVREGLADLLPGGDLLGGGAEVEYSCEPKLDGLAVSLLYERGQLVRGATRGDGSTGEDITSNVRTIRNVPLKLHGEGWPEILEVRGEVFMSKAGFEALNAKAVETGGKTFANPRNAAAGSLRQLDSKITASRPLEFCAYGFGQVSGTLPDTQVGILEAFRGWGIPISRELRLVKGAQACRDYYDDIGRRRDALAYEIDGVVFKVNRIAFQRELGFRAREPRWAIAHKFPAREELTELLGVEFQVGRTGAVTPVARLKPVQVAGVTVSNATLHNMDEVARLGLRIGDTVVIRRAGDVIPQVMQVVLERRPADAQAIEVPEHCPVCGSAVERTQLVKRSKGKESISEGAIYRCVGRLSCQAQLKQAIIHFVSRRAMDIDGLGDKIVEQLVDRGLVASPADLYTLTYEQVFELEGFAELSTNNLLTAIADSRKPSLARFIFALGIPDVGEETAKLLARSLGSLERIGKALPEVLTYLPDVGAEVAYEIHNFFADEHNRQVIAQLRDAEHGVQLQEEGEVAAEFAACASLAGFIDKLNIPFIAATGAEKLASRFGSLDGIIRADWLDLRQVERLPERAAKSLRDFFDEPANVQRALAIEAQLREFGMHWQSERKAVEGLPLAGQTWVLTGTLEAMSRDVAKDKLEGLGAKVAGSVSAKTHCVVAGPGAGSKLAKANELGVKVLDEDGLLKLFDEHGVAR

SEQ ID NO: 66297 - protein, 681 aa, Pseudomonas aeruginosa
MSYQVLARKWRPRSFREMVGQTHVLKALINALDNQRLHHAYLFTGTRGVGKTTIARILAKCLNCETGVSSTPCGECSVCREIDEGRFVDLIEVDAASRTKVEDTRELLDNVQYSPTRGRYKVYLIDEVHMLSSHSFNALLKTLEEPPPHVKFLLATTDPQKLPVTILSRCLQFSLKNMPPERVVEHLTHVLGAENVPFEDDALWLLGRAADGSMRDAMSLTDQAIAFGEGKVLAADVRAMLGTLDHGQVYGVLQALLEGDARALLEAVRHLAEQGPDWGGVLAEILNVLHRVAIAQALPEAIDNGQGDRERVLALAQALPAEDVQFYYQMGLIGRRDLPLAPDPRSGFEMVLLRMLAFRPADADGVPRTPLKDLGISKATTDPANSPVAGAASPAPVATVAPAPVVAAPVEAPAAPPAAPSAPPAAVEARVTEAVVEEPAAAAEVVDLPWEEPAPSLAAEPEPEPEPEPLAVEAPSVPPAVAVEAVVETVLEALPAALPVAPDEQDEQDDEPPPADDYYEVDMDTLAYLDATPEPDVVVVEEPLPAAKPATGLAAEWLELFPRLGLGGLTASIGANCTLVAADDDHWHLHLDPGQSALFNATQQRRLNDALNQHLGRTLKLEVTLQKPEQETPAQAAARRRAERQRAAEASIDADPLVRQLREQFAAVVRDGTIEPLEAKA

SEQ ID NO: 66298 - protein, 108 aa, Pseudomonas aeruginosa
MMKGGMAGLMKQAQQMQEKMQKMQEELANAEVTGQSGAGLVSVVMTGRHDVKRVSLDDSLMQEDKEILEDLIAAAVNDAVRKIEQNNQEKMSGFTSGMQLPPGFKMPF

SEQ ID NO: 66299 - protein, 198 aa, Pseudomonas aeruginosa
MSFSPLIRQLIESLRILPGVGQKSAQRMALMLLERDRSGGLKLAQALTAAMEGVGHCRQCRTLSEEELCPQCADPRRDDSLLCVVEGPLDVFAVEQTGYRGRYFVLKGHLSPLDGLGPEAIGIPELEARIRDGAFSEVILATNPTVEGEATAHYIAQLLAGRGLTLSRIAHGVPLGGELELVDGGTLAHALAGRRPIS

SEQ ID NO: 66300 - protein, 475 aa, Pseudomonas aeruginosa
MSTAISQTAYNYKVVRQFAVMTVVWGVIGMGLGVLIAAQLVWPELNFDLPWTSFGRLRPLHTNAVIFAFGGCALFATSYYVVQRTSQARLISDTLAAFTFWGWQAVIVGAVLTLPQGFTTSKEYAELEWPLAILLAIVWITYAIVFFGTIVKRKVKHIYVGNWFYGAFILVTAMLHIVNHMSLPVSWFKSYSAYSGATDAMVQWWYGHNAVGFFLTTGFLGMMYYFVPKQAERPVYSYRLSIVHFWALISLYIWAGPHHLHYTALPDWAQSLGMVMSLILLAPSWGGMINGMMTLSGAWHKLRTDPILRFLVVSLAFYGMSTFEGPMMAIKTVNALSHYTDWTIGHVHAGALGWVAMISIGSLYHLIPKVFGRPQMHSIGLINAHFWLATIGTVLYIASMWVNGITQGLMWRAVNEDGTLTYSFVEALVASHPGFIVRMIGGGFFLTGMLLMAYNTWRTVRAAKPAEYEAAAQIA

SEQ ID NO: 66301 - protein, 288 aa, Pseudomonas aeruginosa
MTAVAFLGLGTMGYPMAGHLQREGYDVCVYNRSSAKALRWVEEYAGRRADTPREACAGAELVFCCVGNDDDLRAVALGEQGAFAGMAPGSLFVDHTTASAEVARELSLLAAERELGFLDAPVSGGQAGAVNGALTVMVGGEEAFYRRAEPLLRSYARMVRRMGDVGSGQLTKMVNQICVAGLLQGLAEALHFARCAGLDGEAAMQVIGKGAAQSWQLENRHQSMLAGEFDFGFAVDWMRKDLSILLAEARRNGAQLPVTALVDQFYAEVQAMGGGRWDTSSLIARLRS

SEQ ID NO: 66302 - protein, 428 aa, Pseudomonas aeruginosa
MADKKAQLIIEGSAPVELPVLSGTMGPDVVDVRGLTATGHFTFDPGFMSTASCESKITYIDGDKGVLLHRGYPIEQLAEKSDYLETCYLLLNGELPTAAQKEQFVGTIKNHTMVHEQLKTFFNGFRRDAHPMAVMCGVIGALSAFYHDSLDINNPKHREVSAHRLIAKMPTIAAMVYKYSKGEPMMYPRNDLNYAENFLHMMFNTPCETKPISPVLAKAMDRIFILHADHEQNASTSTVRLAGSSGANPFACIASGIAALWGPAHGGANEAVLRMLDEIGDVSNIDKFVEKAKDKNDPFKLMGFGHRVYKNFDPRAKVMKQTCDEVLQELGINDPQLELAMKLEEIARHDPYFVERNLYPNVDFYSGIILKAIGIPTSMFTVIFALARTVGWISHWQEMLSGPYKIGRPRQLYTGHTQRDFTALKDRG

SEQ ID NO: 66303 - protein, 590 aa, Pseudomonas aeruginosa
MASIRTLSFDAIIVGGGGAGMRAALQLAQGGHKTAVVTKVFPTRSHTVSAQGGITCAIASADPNDDWRWHMYDTVKGSDYIGDQDAIEYMCSVGPEAVFELEHMGLPFSRTETGRIYQRPFGGQSKDFGKGGQAARTCAAADRTGHALLHTLYQANLKNGTSFLNEWYAVDLVKNQDGAVVGIIAICIETGETVYIRSKAVVLATGGAGRIYASTTNALINTGDGVGMALRAGVPVQDIEMWQFHPTGIAGAGVLVTEGCRGEGGYLINAHGERFMERYAPNAKDLAGRDVVARSMVKEVLAGNGVGPNKDHVLLKLDHLGEEVLHSRLPGICELSKTFAHVDPVVAPIPVIPTCHYMMGGVATNIHGQAITQDANGNDQIVEGLFAVGEVACVSVHGANRLGGNSLLDLVVFGRAAGLHLEKALKEGIDARGASESDLEASFKRLNGVNERTSGEEVAPLKRELQSCMQNYFGVFRTGEYMQKGIAQLADLRERIANVKINDKSQAFNTARIEALELQNLLEVAEATAIAAEHRKESRGAHAREDFEERDDENWLCHTLYFPGEKRVSKRSVNFAPKTVPAFEPKVRTY

SEQ ID NO: 66304 - protein, 943 aa, Pseudomonas aeruginosa
MHESVMQRMWNSAHLSGGNAAYVEELYELYLHDPNAVPEEWRTYFQKLPADGNPAPDVSHSTVRDHFVLLAKNQRRAQPVSAGSVSSEHEKKQVEVLRLIHAYRLRGHQASTLDPLGLWQRPAPADLSIDHYGLTGADLDTTFRTGELYIGKEEATLREIVDSLKSTYCGTFGAEFMHIVDSEQRKWFLQRLESVRGRPGFSAEARAHLLERLTAAEGLEKYLGTKYPGTKRFGLEGGESLIPMVDEIIQRCGSYGAKEIVIGMAHRGRLNVLVNTLGKNPRDLFDEFEGKKIVELGSGDVKYHQGFSSNVMTSGGEVHLALAFNPSHLEIVSPVVEGSVRARQDRRKDSSGDKVVPISIHGDAAFAGQGVVMETFQMSQTRAYKTGGTIHLVINNQVGFTTSRQDDARSTEYATDVAKMIQAPIFHVNGDDPEAVLFVTQLAVDYRMQFKRDVVIDLVCYRRRGHNEADEPSGTQPLMYQQIAKQRTTRELYADALVNAGVLSAEQVQSKIDDYRDALDNGLHVVKSLVKEPNKELFVDWRPYLGHAWTARHDTRFDLKTLQELSSKMLEVPEGFVVQRQVSKIYEDRQKMAAGGLPINWGFAETLAYATLLFEGHPVRMTGQDVGRGTFSHRHAVLHNQKDDSVYVPLANLFDGQPRLDIYDSFLSEEAVLAFEYGFATTTPNSLVIWEAQFGDFANGAQVVIDQFITSGESKWGRLCGLTMLLPHGYEGQGPEHSSARLERYLQLCAEQNIQVCVPTTPAQVYHMLRRQVIRPLRKPLVVMTPKSLLRHKLAISTLEDLANGSFQTVIPEIDSLDPKKVDRVVLCSGKVYYDLLEKRRAEGREDTAIVRIEQLYPFPEDDLAEVLAPYKNLKHIVWCQEEPMNQGAWFCSQHHMRRVIAAHKKGLNLEYAGREGSAAPACGYASMHAEQQEKLLQDAFTV

SEQ ID NO: 66305 - protein, 478 aa, Pseudomonas aeruginosa
MSQKFDVVVIGAGPGGYVAAIRAAQLGLKTACIEKYIGKEGKVALGGTCLNVGCIPSKALLDSSYKYHEAKEAFKVHGIEAKGVTIDVPAMVARKANIVKNLTGGIATLFKANGVTSFEGHGKLLANKQVEVTGLDGKTQVLEAENVIIASGSRPVEIPPAPLTDDIIVDSTGALEFQAVPKKLGVIGAGVIGLELGSVWARLGAEVTVLEALDKFLPAADEQIAKEALKVLTKQGLNIRLGARVTASEVKKKQVTVTFTDANGEQKETFDKLIVAVGRRPVTTDLLAADSGVTLDERGFIYVDDHCKTSVPGVFAIGDVVRGAMLAHKASEEGVMVAERIAGHKAQMNYDLIPSVIYTHPEIAWVGKTEQTLKAEGVEVNVGTFPFAASGRAMAANDTTGLVKVIADAKTDRVLGVHVIGPSAAELVQQGAIGMEFGTSAEDLGMMVFSHPTLSEALHEAALAVNGHAIHIANRKKR

SEQ ID NO: 66306 - protein, 295 aa, Pseudomonas aeruginosa
MSVLINKDTKVICQGFTGSQGTFHSEQAIAYGTKMVGGVTPGKGGTTHLGLPVFNTVKEAVEATGAEASVIYVPAPFCKDSILEAAFGGIKLIVCITEGIPTLDMLDAKVKCDELGVRLIGPNCPGVITPGECKIGIMPGHIHLPGKVGIVSRSGTLTYEAVKQTTDAGFGQSTCVGIGGDPIPGSNFIDILKLFQEDPQTEAIVMIGEIGGSAEEEAAAFIKANVTKPVVSYIAGVTAPPGKRMGHAGAIISGGKGTADEKFAALQDAGVKTVRSLADIGKALAELTGWEVKKA

SEQ ID NO: 66307 - protein, 634 aa, Pseudomonas aeruginosa
MSVETQKETLGFQTEVKQLLHLMIHSLYSNKEIFLRELISNASDAADKLRFEALANPELLEGGAELKIRVSFDKEANTVTLEDNGIGMSREDVVTHLGTIAKSGTADFLKNLSGDQKKDSHLIGQFGVGFYSAFIVADKVDVYSRRAGQPASEGVHWSSKGEGEFDVATIDKPERGTRIVLHLKKGEEEFADGWRLRNVIKKYSDHIALPIELPKEFHGEEADKPAEPEWETVNRASALWTRPRAEVKDEEYQEFYKHVAHDFENPLSWSHNKVEGKLEYTSLLYVPGRAPFDLYHREAPRGLKLYVQRVFIMDQADEFLPLYLRFIKGVVDSNDLSLNVSREILQKDPVIDSMKSALTKRVLDMLEKLAKNEPEQYKTFWKNFGQVLKEGPAEDFGNKEKIAGLLRFASTGDDSGEQSVALADYIGRMKEGQDKIYYLTGESYSQVKNSPHLEVFRKKGIEVLLLTDRIDEWLMSYLPEFDGKQFVDVARGDLDLGSLDSEEDKKAQEEVAKSKEGLIERLKKVLDEQVSEVRVSHRLTDSPAILAIGEQDLGLQMRQILEASGQKVPDSKPIFEINPQHPLIEKLDAEPDEDRFGELSHILFDQAALAAGDSLKDPGAYVRRLNKLLVELSA

SEQ ID NO: 66308 - protein, 340 aa, Pseudomonas aeruginosa
MTEQQPIAVLGGGSFGTAIANLLAENGQAVRQWMRDPEQAEAIRTRRENPRYLKGVKVHPGVDPVTDLERTLADCQLIFVALPSSALRKVLQPHQAALTDKLLVSLTKGIEAHTFKLMSEILEEIAPQARIGVISGPNLAREIAEHELTATVVASEDDELCARVQAALHGRTFRVYASRDRFGVELGGALKNVYAIMAGLAAAMDMGENTRSMLITRALAEMTRFAVKLGANPMTFLGLAGVGDLIVTCSSPKSRNYQVGHALGEGLSLEEAVSRMGETAEGVNTLKVLKEKSDEMQVYMPLVAGLHAILFEGRTLAQVIQLLMRGEPKTDVDFIPTTGF

SEQ ID NO: 66309 - protein, 355 aa, Pseudomonas aeruginosa
MFDNDRLLLRVLLFGLLGASLWVLAPFWSALFWAAVLAFASWPLMRMLTRLLGGRESLAAGLLTLGWIVLVALPLIWLGFGLADNVRSLMELLKNLQVEGLPPPPSWMAGVPLIGDRLIGWWDSIDQQGVAFFYVLKPYVGEVGNWLLARSAKIGGGILELVLSLILIFFFYRDGPRLESIVHRALERLIGNRAEHYRDLVAGTVQRVVNGVIGTAAAQALLAWIGFMIAGVPGAMLLGLLTFACSLLMVPPLVWGPATAWLFFKGDYGHGVFLGLWGFFIISGVDNILKPYLISRGGNLPLVVVLLGVFGGLLAFGFMGLFLGPILLAVAYNLLSDWIASTPRTPPGEGRGPDA

SEQ ID NO: 66310 - protein, 509 aa, Pseudomonas aeruginosa
MPDIRCIAVVGTGAMGTGIAQIAAQAGLTVWLFDSRAEAAAEARQRLRQTFESLCGKGKLSAADAEAAQNRLRVAERLEQLGDCELVVEAIVERLEAKQELLRRLEAIVAPESILASNTSSLSITAIAAACERPQRVAGFHFFNPVPLMRVVEVVDGLASAPEVGDALLALAARLGHRGVRTKDSPGFIVNHAGRAYGTEALRILGEGVAECAEIDRVLRECAGFRMGPFELLDLTGLDVSHPVMESIYQQYYQEPRYRPHPLTRQLLAAGRLGRKSGQGFYRYVDGQPQDKPGPQPVPQAAARPPVWLGCENEDDRRTLAELLHRLGVEPETGERPSAAALCLLAAWGEDLSSAVQRFACPAERSVGIDLLCDLERRRCLMLSPLTAPAMRDAAHALLAGDGVGVTVLRDSPGFVVQRVLAMIVNLACDIAQQGIASVEDIDQAVHLGLGYPHGPLEWGDRLGPRRLLSILQRLQALTGDPRYRPSPWLRRRAQLGMSLRAGETAAVD

SEQ ID NO: 66311 - protein, 369 aa, Pseudomonas aeruginosa
MRDNTQHYRELFLDDIPLMDVRAPVEYHKGAFPNTVNRPLMNDIERQKVGTSYKQHGQQAAIALGHELVCGALKAERLAAWKAFAEANPNGYLYCFRGGLRSQIVQQWLKQDAGIDYPRVIGGYKALRNFLFETTRAAVDECDFVLVGGLTGCGKTEVIAALDNSLDLEGHANHRGSSFGRRATPQPAQIDFENRLAIDILKKRHRGVGQFVLEDEGRIVGSCSLPLELYQGMQGYPLVWLEDAFEQRVERILRDYVIDLRSEFERVVGVEEGFAAFSAYLQKSLAGIVKRLGGERYQRLAAILVQALEEQGRDGSVDTHRGWIEGLLKEYYDPMYAFQRQSKEDRVEFRGNQAEVIGYLRQRQALRPS

SEQ ID NO: 66312 - protein, 253 aa, Pseudomonas aeruginosa
MSKLLSGQVALVTGGAAGIGRATALAFAAAGVKVVVADLDSAGGEGTVEAIRQAGGEALFIRCDVTRDAEVKALVEGCAAAYGRLDYAFNNAGIEIEQGKLADGNEAEFDAIMAVNVKGVWLCMKHQIPLMLAQGGGAIVNTASVAGLGAAPKMSIYAASKHAVIGLTKSAAIEYAKKGIRVNAVCPAVIDTDMFRRAYEADPRKAEFAAAMHPLGRVGRVEEIAAAVLYLCCDNAGFTTGIALPVDGGATAI

SEQ ID NO: 66313 - protein, 158 aa, Pseudomonas aeruginosa
MPDLKNHAVQQQAMMEAFFFAYQAFTTKPDEMLARRGLGRVHHRVLFFIARYPGLSVKELLALLGVTKQALNIPLRQLLEMNLIGSATADDDKRKRLLGLTAEGVRLEKALRREQSRLLQRCFEEAGGEAVSGWLAVNRTLARAHAGSRGEAATEAAD

SEQ ID NO: 66314 - protein, 363 aa, Pseudomonas aeruginosa
MSGNTYGKLFTVTTAGESHGPALVAIVDGCPPGLELSARDLQRDLDRRKPGTSRHTTQRQEADEVEILSGVFEGKTTGTPIGLLIRNTDQKSKDYSAIKDLFRPAHADYTYHHKYGVRDYRGGGRSSARETAMRVAAGAIAKKYLAGLGIQVRGYMSQLGPIEIPFRSWDSVEQNAFFSPDPDKVPELEAYMDQLRRDQDSVGAKITVVAEGVPPGLGEPIFDRLDAELAHALMSINAVKGVEIGAGFASIAQRGTEHRDELTPQGFLSNNAGGILGGISSGQPIVAHLALKPTSSITTPGRSIDTAGEPVDMITKGRHDPCVGIRATPIAEAMMAIVLLDQLLRQRGQNADVRVDTPVLPQL

SEQ ID NO: 66315 - protein, 700 aa, Pseudomonas aeruginosa
MDQTEVRTTQSPPRLFQPTIRSHLAFTALSALVLLVMFSLLRLALLIYNRELIGATPASTFLEAFGNGVRFDLRVVVYAVAPLVLSLFAVRAMAARGLFRTWLTLFASITLFLGVLELDFYREFHQRLNSLVFQYMSEDPKTVMSMLWYGFPVVRYLLAWAFATWVLYRVFKAIDLVTRPSQRKPREDSVIARPSAAAPWYVRGVVLFLCVLVCVLAARGTLRQGPPLRWGDAFTTESMFANQLGLNGTLTLVKAAKERFSEDRANIWKATLDDKVALETTRQMLLTPNDKLVDADEAAVRREFTPPAANTLPIRNVVVVLLESFAGHYVGALGAPGNITPYFDKLSKEGLLFTQFFSNGTHTHQGMFATMACFPNLPGFEYLMQTPEGGHKFSGLPQLLSARQYEDVYVYNGDFAWDNQSGFFSNQGMTTFIGRNDYVDPVFSDPTWGVSDQDMFARGNEELDKLASTGKPFYALLQSLSNHVPYALPKDLPVERVTGYGSLDEHLTAMRYSDWALGQFFEKAKKSPYYKDTLFVVVGDHGFGSPEQLTEMDLHRFNVPLLLIAPGIQEKFGTHLPTVGTQVDIVPTIMGLLGGETVHQCWGRDLLNLPEGDTGFGVIKPSGSEQNVAIVSGNRILVRPKDGDVRVYDYQLGGDAKAVITKEVPDQAELQKKLESFIQTATKSLLENTAGVVHGIPDKD

SEQ ID NO: 66316 - protein, 167 aa, Pseudomonas aeruginosa
MNQPTPSDTDQQQALEAFLRDGGTLAMLRGLSEDTLEQLYALGFNQYQAGKWDDAQKIFQALCMLDHYDARYFLGLGACRQSLGLYEQALQSYSYGALMDINEPRFPFHAAECHLQLGDLDGAESGFYSARALAAAQPAHEALAARAGAMLEAVTARKDRAYESDNA

SEQ ID NO: 66317 - protein, 764 aa, Pseudomonas aeruginosa
MNRLCVLGLLIGLSGSPALAAGQGESGNPPATDKERFIASLMARMSNAEKIGQLRLVSVGADHPKEALMADIRAGKVGAIFNTVTRPDIRAMQDQVRHSRLKIPLFHAYDVAHGHRTIFPISLGLAASWDPEVVARSARISALEASADGLDMSFSPMVDITRDARWGRVSEGFGEDTYLTSLLSGVMVRAYQGSNLAAPDSIMAAVKHFALYGAAEGGRDYNTVDMSLPRMFQDYLPPYKAAVDAGAGAVMVSLNTINGVPATANRWLLTDLLRQQWGFKGLTISDHGAVKELIKHGLAGNERDATRLAIQAGVDMNMNDDLYSTWLPKLLAAGEIDQADIDRACRDVLAAKYDLGLFADPYRRLGKPDDPPFDTNAESRLHRQAAREVAREGLVLLKNRDGLLPLKKQGRIAVIGPLAKSQRDVIGSWSAAGVPRQAVTVYQGLANAVGERATLLYAKGANVSGDQAILDYLNSYNPEVEVDPRSAEAMLEEALRTARDADLVVAVVGESQGMAHEASSRTDLRIPASQRRLLKALKATGKPLVLVLMNGRPLSLGWEQENADAILETWFSGTEGGNAIADVLFGEHNPSGKLTMSFPRSVGQVPVYYNHLNTGRPMDHDNPGKYTSRYFDEANGPLYPFGYGLSYTEFSLSPLRLSSERLARGATLEARVTLSNSGKRAGATVVQLYLQDPVASLSRPVKELRGFRKVMLEPGESREIVFRLGEADLKFYDSQLRHTAEPGEFKVFVGLDSAQTESRSFTLL

SEQ ID NO: 66318 - protein, 304 aa, Pseudomonas aeruginosa
MKKPDLAGLAAFVAIARERSFRRAAATLGVTPPTLSHTLRELETQLGIRLLNRTTRNVSPTEAGEHLLAHLDPAFEDIAAALDSLNRFRETPHGLVRINAPRNAIGLVLAPRFGELARDYPGITLEVVADEGFANIVEAGFDAGIRLGEDLQHGMRAVRVGPDLRLAIVATPAYFRRQGRPGSPEELLGHRCIGWRKVSSGELYKWQFSKGTKALSVAMSGPLVLDDPRLMLQAALADVGIAFAIEEEVAEHLAAGRLERVLADWCAPFPGFHLYYPNRRNHPAALSAVINLLRYPGEEHPGPA

SEQ ID NO: 66319 - protein, 453 aa, Pseudomonas aeruginosa
MPSCHVHPLPYHSDPSCLFAIIHEAPGAVMLDSGRPIATRGRYDLMSAWPLAELAPLPDESANRFFARLREAAGSLGPAQLPAPYELPFAGGLLGYLSYDLGRRIERIGEHARDDLGLPLASVGLYAWALISDHQAGTSQLVFHPRLDERERQRLIALFSEEAQGTAGNFKLLGKFRRSISASDYRQAIRRIQDYIQAGDCYQVNYSQRFQAACSGSPWPAYRALREACPTPFSGYLRLADGAILSLSPERFLKLGKGKVETRPIKGTRPRGKTPEEDMALAASLLASPKDRAENLMIVDLLRNDIGRSCQPGSVRVPELFALESYPNVHHLVSSVTGELAPGKDALDLLEGSFPGGSITGAPKIRAMQIIDELEPSRRGIYCGSLFYLDVRGEMDSSIAIRTLLVRDGQVSCWGGGGIVADSHWEDEYQETLDKVRVLLETLEGMAGTASPE

SEQ ID NO: 66320 - protein, 274 aa, Pseudomonas aeruginosa
MQMKRTAFFISDGTGITAETLGQSLLAQFENISFVKLTRPYIDTEEKARAMVQQINNAAESDGARPIIFDTIVNRDIRAVLAQSNGFMIDIFATFLSPLEQELSADSSYSVGKSHSIGHNSNYMDRIEAVNFALDNDDGARTHYYDKADLILVGVSRCGKTPTCLYMALQYGIRAANYPLTEEDMERLQLPNALKQYKHKLFGLTIDPDRLTAIRNERKPNSRYASFAQCEFEVREVESLFRRENIAYINSTHFSVEEISAKILVEKGVERRFK

SEQ ID NO: 66321 - protein, 908 aa, Pseudomonas aeruginosa
MSTDSPLRTTASTCCYCGVGCGVLIEHDGERILGVQGDPRHPANFGRLCSKGASLHLTGDLQARALYPQLRLGKQLARARSDWESALEHAAGRFAETIREHGPDSVAFYISGQLLTEDYYAFNKLARALVGTNNIDSNSRLCMSSAVVGYKRSLGADAPPCSYEDLDCADCVLIAGSNMAFAHPVLFRRLEAAKAARPEMRIVVIDPRRTDTCELADLHLALLPGTDVALFHGILHILLWEDWIDRSFIAEHTEGFADLKELVRDYTPAAVADICGIDRADLQRCAEWIGRSPRFLSLWCMGLNQSSAGSAKNSALINLHLATGKIGRAGCGPFSLTGQPNAMGGRETGSLANLLPGHREAADPGHRAEVAHYWGVEQLPTSPGLSAIELFDAVHDGRIKALWIACTNPAQSLPDQRKIHEALARCPFVVVQEAFAGTETCQYADLLLPAASWGEKEGSVTNSERRISHVRRAVPPPGEARQDWNIVCDFARRLEGHLRPAKPGLFAFADSRSLFDEYKLLTAGRDLDLSGLSYALLDRLGPQQWPFPTGAEQGTARLYADGRFPTASGRAQLVAEPYRAAQEKRDARYPLTLNTGRLRDQWHGMSRTGTCARLFGHEEEALVHLHPEELRRRQLLDGQLVRLKSRRGALVLPVSADDSVRPGQAFLPMHWGDRFLKGLGCNVLTLPAFDPLSKQPELKHAGVQVESVELPWRLFALVETDIQARFEALRALCEVFDHASFSLAGRERPALLVSAAHHEAPGADLLERIDRQLELLDGPILAYDDPRRAIGKRVRLEDGRIVAVRLAGETLARDWLKELWLTGRADSELRRWLLAPLGAAPGRPSQGAGGKTLCSCQNVSQQTVLGGIARGLDLDGLKREFGCGTGCGSCVPEIKRLLAAPRPMAANA

SEQ ID NO: 66322 - protein, 108 aa, Pseudomonas aeruginosa
MNWLDICSLDEINPLGSRVVAGPKGDIAIFRAADDQVFALDDRCPHKGGPLSQGLIYGKRVACPLHNWQIELESGEAVAPDQGCAHRHPVRVENGRVLLGLDSVALCA

SEQ ID NO: 66323 - protein, 816 aa, Pseudomonas aeruginosa
MKKIKLVMVGNGMAGVRTLEELLKLNSDFYDITVFGAEPHPNYNRILLSPVLAGEQTFEEIVLNDLNWYAENGIKLLLDRKVVQIDRLRRRVVAADGSEAEYDRLLLATGSLPFILPIPGNRLQGVIGYRDIADTQAMIDCARTHSHAVVIGGGLLGLEAANGLKQRGMDVTVVHLSDWLLERQLDRTAGKLLQGALEARGIRFRLNTQTQELMDNGSGRVCAVQFNDGDVIPADLVVMAAGIRPNTELAESAGIPCNRGILVNDTLQTYDPRIYAVGECANHRGIAYGLVAPLFEQAKVCANHLAHLGYARYQGSVTSTKLKVTGIDLFSAGDFIGGEGSETITLSDPIGGVYKKLVIKDDVLVGACLYGDTADGGWYFRQIRENHNVAQIRDHLMFGENALGDVGHQGQNSAASMPDTAEVCGCNGVCKGTIVKAIQEHGLFSVDEVKKHTKAASSCGSCAGLVEQILISTVGGAADVKPKSEKAICGCSDLNHGQIRKAIREHRLTSLDAAMRFMDWKTPNGCATCRPALNYYLISTWPGEAKDDPQSRLINERAHANIQKDGTYSVVPRMWGGVTNAAELRRIADVADKYQVPMVKVTGGQRIDLLGVKKDDLPAIWKDLDMPSGHAYGKSIRTVKTCVGSEFCRFGTQNSTQLGIDLEHDLFNMWSPHKVKLAVSGCPRNCAEAGIKDVGIIGVDSGWEMYIGGNGGIKTEVAEFFVKLKTAEEVREYNGAFLQLYREEAFYLERTVHYLQRVGMEHIRKAVVEDAENRKALNDRLQFALSFEQDPWKQRIEQPQLKKEFERISLKQLENV

SEQ ID NO: 66324 - protein, 869 aa, Pseudomonas aeruginosa
MLEAYRKHVEERAAQGVVPQPLNAEQTAGLVELLKNPPAGEEEFLLDLITNRVPPGVDEAAYVKAGFLSAIVKGEATSPLIDKQRAAELLGTMQGGYNIATLVELLDDAELANTAAEQLKHTLLMFDAFHDVAERAKKGNAAAKSVLQSWADGEWFKAKPEVPEKLTLTVFKVPGETNTDDLSPAPDAWSRPDIPLHALAMLKMARDGIEPVQPGSVGPLKQIEAVKAKGFPVAYVGDVVGTGSSRKSATNSVLWFFGDDIPFVPNKRAGGFCFGTKIAPIFYNTMEDAGALPIEFDCTNLAMGDVIDVYPYEGKVVRHDSGEVVTTFELKTPVLLDEVRAGGRIPLIVGRGLTEKARAELGLGASDLFRKPEAPADSGKGFTLAQKMVGRACGLPEGQGVRPGTYCEPKMTTVGSQDTTGPMTRDELKDLACLGFSADLVMQSFCHTAAYPKPIDVKTHHTLPDFIMTRGGVSLRPGDGIIHSWLNRMLLPDTVGTGGDSHTRFPIGISFPAGSGLVAFAAATGVMPLDMPESVLVRFKGKLQPGITLRDLVHAIPYYAIQQGLLTVEKKGKKNIFSGRILEIEGLNDLTVEQAFELSDASAERSAAGCTIKLPEQAIAEYLKSNITLLRWMIGEGYGDPRTLERRAQAMEAWLAKPELLEADKDAEYAAVIEIDLADVKEPVLCAPNDPDDARLLSSVQGRKIDEVFIGSCMTNIGHFRAAGKLLDKVKGGIPTRLWLAPPTKMDAHQLTEEGYYGIYGKAGARMEMPGCSLCMGNQARVQTGSTVVSTSTRNFPNRLGDATDVFLASAELAAVSSILGKLPTVEEYMAYAKDIDSMAADVYRYLSFDQIAEFREAAANAKIPVVQA

SEQ ID NO: 66325 - protein, 556 aa, Pseudomonas aeruginosa
MSKPETTAAPNFLRQIVQADLDAGKHAKIVTRFPPEPNGYLHIGHAKSICLNFGLAQEFAGDCHLRFDDTNPAKEDQEYIDAIEADIKWLGFQWSGEVCYASNYFDQLHAWAVELIKAGKAFVCDLGPEEMREYRGTLTEPGRNSPYRDRSVEENLDLFARMKAGEFPDGARSLRAKIDMGSPNMNLRDPILYRIRHAHHHQTGDKWCIYPSYDFTHGQSDAIEGITHSICTLEFEDHRPLYEWFLANLPVPAQPRQYEFSRLNLNYTVTSKRKLKQLVDEGHVSGWDDPRMSTLSGYRRRGYTPESIRNFCEMIGVNRASGVVDIGMLEFSIRDHLDATAPRAMCVLKPLKVVITNYPEGQVENLELPRHPKEDMGVRVLPFGRELFIDAGDFEEVPPAGYKRLIPGGEVRLRGSYVIRADEAIKDADGNIVELRCSYDPDTLGKNPEGRKVKGVIHWVPAEGSVECEVRLYDRLFRSANPEKAEEGGSFLDNINADSLQVLAGCRAEPSLGQANPEDRFQFEREGYFVADLKDSRPGKPVFNRTVTLRDSWGQG

SEQ ID NO: 66326 - protein, 460 aa, Pseudomonas aeruginosa
MLQIYNTLSKTKEVFTPLVGNQVRMYVCGMTVYDYCHLGHGRSMVAFDVITRWLRHRGYDLTYVRNITDIDDKIINRANENGEPFDVLTERMIAAMHEDEARLNILKPDQEPRATDHIAGMHAMIQTLIDKGYAYAPGNGDVYYRVGKFAGYGKLSRRRVEDLRIGARIEPGEAKEDPLDFVLWKGAKPGEPSWSSPWGEGRPGWHIECSVMSTCCLGDSFDIHGGGNDLEFPHHENEIAQSEAATGKPYAKSWLHCGMITINGEKMSKSLGNFFTIREVLEKYHPEVVRYLLIASHYRSPINYSEENLREAKAALDRFYNALKGLPEAAPAEAAEYVERFAAAMDDDFNTAGACSVLFELAREVNRLRESDLSAAAALAARLKQLAGLLGVLQLEPEAFLQAGAEGKVDAAEVEALIQARLEARAAKNWAESDRIRDQLTAMGVVLEDGKGGTTWRLAD

SEQ ID NO: 66327 - protein, 426 aa, Pseudomonas aeruginosa
MTDTRNGEDNGKLLYCSFCGKSQHEVRKLIAGPSVFICDECVDLCNDIIREEVQEAQAESSGHKLPAPKEIRTILDQYVIGQERAKKVLAVAVYNHYKRLNQRDKKDDIELGKSNILMIGPTGSGKTLLAETLARLLNVPFTIADATTLTEAGYVGEDVENIIQKLLQKCDYDVEKAQMGIVYIDEIDKISRKSDNPSITRDVSGEGVQQALLKLIEGTVASVPPQGGRKHPQQEFLQVDTRNILFICGGAFAGLERVIQNRSARGGIGFNAEVRSQEMGKKVGEAFKEVEPEDLVKFGLIPEFVGRLPVIATLDELDEAALMQILTEPKNALTKQYAKLFEMEGVDLEFRPDALKAVARKALERKTGARGLRSILEGILLDTMYEIPSQQDVSKVVIDESVIDGSSQPLMIYENSEKPAKAAPEA

SEQ ID NO: 66328 - protein, 798 aa, Pseudomonas aeruginosa
MKTLVELPLLPLRDVVVYPHMVIPLFVGREKSIEALEAAMTGDKQILLLAQKNPADDDPGEDGLYRMGTVATVLQLLKLPDGTVKVLVEGEQRGQVERFIEEEGHIRAAVQAIDDANVGEREAEVFTRSLLSQFEQYVQLGKKVPAEVLSSLNSIDEPSRLVDTMAAHMALKIEQKQDILEITDLSSRVEHVLALLDAEIDLLQVEKRIRGRVKKQMERSQREYYLNEQMKAIQKELGDIDEGHNEVEELKKRIDAAGLTKEAHTKATAELNKLKQMSPMSAEATVVRSYIDWLLNVPWKAESKVRHDLAKAEDILDADHYGLEEVKERILEYLAVQKRVKKLKGPVLCLVGPPGVGKTSLAESIARATNRKFVRMALGGVRDEAEIRGHRRTYIGSMPGRLIQKMTKVGVRNPLFLLDEIDKMGSDMRGDPASALLEVLDPEQNHNFNDHYLEVDYDLSDVMFLCTANSMNIPAPLLDRMEVIRLPGYTEDEKVNIAAKYLIPKQVQANGLKKGELTFEEGALRDIIRYYTREAGVRSLERQIAKVCRKAVKEHAKLKRIQAVVSSETLENYLGVRKFRYGLAEQQDQIGQVTGLAWTQVGGELLTIEAAVVPGKGQLTKTGSLGDVMAESITAALTVVRSRAQSLGIAADFHEKRDIHIHVPEGATPKDGPSAGIGMCTALVSAITQIPVRADVAMTGEITLRGQVLAIGGLKEKLLAAHRGGIKTVIIPEENVRDLKEIPDNIKSDLVIKPVKWIDEVLQIALQYAPEPLPDAAPEMVAKDEKREPDSKERISTH

SEQ ID NO: 66329 - protein, 90 aa, Pseudomonas aeruginosa
MNKSELIDAIAASADIPKAVAGRALDAVIESVTGALKAGDSVVLVGFGTFAVKERAARTGRNPQTGKPIKIAAAKIPGFKAGKALKDAVN

SEQ ID NO: 66330 - protein, 265 aa, Pseudomonas aeruginosa
MGFLTGKRALIVGVASKLSIASGIAAAMHREGAELAFTYQNDKLRGRVEEFASGWGSRPELCFPCDVADDSQIEAVFAALGKHWDGLDIIVHSVGFAPGDQLDGDFTAVTTREGFRIAHDISAYSFIALAKAGREMMKGRNGSLLTLSYLGAERTMPNYNVMGMAKASLEAGVRYLAGSLGAEGTRVNAVSAGPIRTLAASGIKSFRKMLAANERQTPLRRNVTIEEVGNAGAFLCSDLASGISGEILYVDGGFNTTAMGPLDDD

SEQ ID NO: 66331 - protein, 536 aa, Pseudomonas aeruginosa
MSENILEIRDLAVEFLSGEQRQRVVEGVSFDIRQGETLALVGESGSGKSVTAHSILRLLPYSVASHPAGSIHYQGEDLLKLPERRLRGIRGNRIAMVFQEPMTSLNPLHTIEKQLAEVLALHKGLGGAKASARILELLELVGIPEPAKRLKAYPHELSGGQRQRVMIAMALACEPQLLIADEPTTALDVTVQLKILDLLKDLQARLGMSLLLITHDLNLVRRIAHRVCVMQQGRIVEQASCQELFAAPRHPYTRELLNAEPSGAPASNPPGETLLAVDDLRVWFPIRKGVFRRTVDHVKAVDGVNFELPRGQTLGIVGESGSGKSTLGLAILRLLESQGGIRFEGTRLDGLAQHDVRPLRREMQVVFQDPYGSLSPRMCVGEIVGEGLRIHRIGSEAEQEQAIIDALVEVGLDPQTRYRYPHEFSGGQRQRIAIARALVLKPALILLDEPTSALDRTVQRQVVELLRQLQGKYNLTYLFISHDLAVVKALSHQLMVVRHGKVVEQGSAEAVFASPQHPYTQQLLEAAFMAPASAEN

SEQ ID NO: 66332 - protein, 615 aa, Pseudomonas aeruginosa
MIRPRFTPLLAALLLGCCGPLLAAPKHALTLYDEPPKYPADFKHFDYVNPDAPKGGILRQADFGGFDSLNPFIGKGVSAPSLGLIYDTLAFQSQDEPFTEYGLLAEKIEKAPDNSYVRFYLRPQARFSDGTPVTAEDVVFTFETLVSKGDPMYRNYYADVDKVVAEDKLRVRFDFKHAGNRELPLILGQIAILPKHWWADRDFSKTGMEIPVGSGPYRIAKVDPGRSISYERVKDWWAKDLPVSRGLYNFDTITIDSYRDMSVALEAFKAGQYDVNLEYSAKDWATGYESPALRDGRFIKASIHNHNPVGMQGFAFNIRRPVFQDRRVRQAISLLFDFEWSNKQLFFSSYKRTNSYFENSEMAAHQLPSEAELKILEPLRGKIPDEAFDQVFQNPVNDGSGVIREQRRKAYQLLTEAGYRIENNRMVGPDGQPLSFEFMLFQANMERVILPFKRNLAELGIDMQIRRVDVSQFVNRLRSRDFDMTSATWPQSNSPGNEQREFWHSSSADKAGSRNFIGLKDPAIDSLVESLIQSDSRQSLIDHTRALDRVLSWGYYVVPNYYVDTWRVAYWNRFGRPKVTPLYDWGLMTWWQTSDKALPSKAQAEATQDAEPERE

SEQ ID NO: 66333 - protein, 1234 aa, Pseudomonas aeruginosa
MSSPLTDRSARLQALQHALRERILILDGGMGTMIQSYKLEEADYRGERFADWPSDVKGNNDLLLLSRPDVIQAIEKAYLDAGADILETNTFNATQVSQADYGMQSLAYELNVEGARLARQVADAKTAETPDKPRFVAGVLGPTSRTCSISPDVNNPGYRNVTFDELVENYVEATRGLIEGGADLILIETIFDTLNAKAAIFAVQGVFEELGVELPIMISGTITDASGRTLSGQTTEAFWNSVRHARPISVGLNCALGAKELRPYIEELSTKADTHVSAHPNAGLPNAFGEYDESPAEMAVVVEEFAAAGFLNIVGGCCGTTPAHIEAIAKAVAKYPPRAIPEIPRACRLSGLEPFTIDRSSLFVNVGERTNITGSAKFARLIREENYAEALEVAQQQVEAGAQVIDINMDEGMLDSKAAMVTFLNLIASEPDISRVPIMIDSSKWEVIEAGLKCIQGKGIVNSISMKEGVEAFKHHARLCKRYGAAVVVMAFDEDGQADTQARKEEICKRSYDILVDEVGFPPEDIIFDANIFAIATGIEEHNNYAVDFINACAYIRDNLPYALSSGGVSNVSFSFRGNNPVREAIHSVFLYYAIRNGLTMGIVNAGQLEIYDEIPKALRDRVEDVVLNRTPEATEALLAIADDYKGGGAVKEAEDEEWRSYSVEKRLEHALVKGITTWIVEDTEECRQQCARPIEVIEGPLMSGMNVVGDLFGAGKMFLPQVVKSARVMKQAVAHLIPFIEAEKGDKPEAKGKILMATVKGDVHDIGKNIVGVVLGCNGYDVVDLGVMVPAEKILQTAIAEKCDIIGLSGLITPSLDEMVHVAKEMQRQNFQLPLMIGGATTSKAHTAVKIDPQYSNDAVVYVTDASRAVGVATSLLSKELKADYVARTRADYAVVRERTANRSARTERLSYEQAIANKPAFDWAGYQAPTPSFTGVRVLDEIDLAVLAEYIDWTPFFISWDLAGKYPRILTDEVVGEAATSLFNDAQAMLKKLIDEKLIKARAVFGFWPANQVEHDDLEVYGADGETLATLHHLRQQTIKPDGKPNLSLADFVAPKESGVRDYIGGFITTAGIGAEEVAKAYEAKGDDYNSIMVKALADRLAEACAEWLHERVRKEYWGYARDEHLDNEALIKEQYVGIRPAPGYPACPDHTEKGTLFELLDPQGLSGVSLTEHYAMFPAAAVSGWYFAHPQAQYFAVGKIDKDQVERYSQRKGQEASVSERWLAPNLGYDD

SEQ ID NO: 66334 - protein, 361 aa, Pseudomonas aeruginosa
MDGLRLRFRRAYPGFELDIDLALPGRGVTALFGHSGSGKSTCLRCIAGLEKAAEGEVTINGETWQDSRRNLFVAPHRRALGYVFQDANLFRHLTVRRNLAFGLKRIAAAERRVELEQACALLGIEHLLERMPERLSGGEQQRVGIARALLTSPRLLLMDEPLASLDLKRKGEILPYLERLHEELDIPVLYVSHSPDEVARLADHLVLLENGKVRASGPIGETLARVDLPLALDDDAGVVIEGTVSDHDPAYGLLTLVLPGSALQMRVAHAPLAPGKRLRFKVQARDVSLNLRDDAQSSILNRLPVRVLELVDTDTAAHVLVRLDAGGNPLLARITRYSRDQLQLRPGQLLWAQIKSVAVLA

SEQ ID NO: 66335 - protein, 2468 aa, Pseudomonas aeruginosa
MSIQAKVTPIDQSISSAAAVEVPENGILKLSQSSNVALDVAPESVAGYSKSGSDLIVQLKTGESVRIANFYAEGQPSSQLFLADKDKLVAVDLPPVAADGPLMAGYIPQESLAGFESLTGAGVLGGMSAGTALLVGAAAIGAGVAISNSSGGGGGGGSSVPPDTTPPKAASGLKIAPDGSSISGQAEAGASVGIDTNGDGKPDLTVIADANGNFTAPLNPPLTNGQTVTVVVTDPAGNASPPAQVTAPDTTAPAPATDVQVAPDGSSVTGKAEPGSTVGVDTDGDGQPDTTVVVGPGGSFEVPLNPPLTNGETVTVIVTDPAGNNSTPVTVEAPDTTAPAPATDVQVAPDGSSVTGNAEPGATVGVDTDGDGQPDTTVVVGPGGSFEVPLNPPLTNGETVTVIVTDPAGNSSTPVTAEAPDFPDAPQVNASNGSVLSGTAEAGVTIVITDGNGNPIGQTSADANGNWSFTPGSQLPDGTVVNVVARDAAGNSSPATSITVDGVAPNAPVVEPSNGSELSGTAEPGSSVTLTDGNGNPIGQTTADANGNWSFTPSTPLPDGTVVNVVARDAAGNSSPPASVTVDAVAPATPTVDPSNGTTLSGTAEPGSSVTLTDGNGNPIGQVTADGSGNWTFTPSTPLPNGTVVNATATDPSGNASSPASVTVDAVAPATPVVNPSNGTTLSGTAEPGATVTLTDGNGNPIGQVTADGSGNWSFTPTTPLPNGTVVNATATDASGNTSAGSSVTVDSVAPATPVINPSNGTTLSGTAEPGSSVTLTDGNGNPIGQVTADGSGNWSFTPSTPLADGTVVNATATDPAGNTSGQGSTTVDGVAPTTPTVNLSNGSSLSGTAEPGSTVILTDGNGNPIAEVTADGSGNWTYTPSTPIANGTVVNVVAQDAAGNSSPGASVTVDSQAPAAPVVNPSNGTTLSGTAEPGATVTLTDGNGNPIGQVTADGSGNWSFTPGTPLANGTVVNATASDPTGNTSAPASTTVDSVAPAAPVVNPSNGAEISGTAEPGATVTLTDGSGNPIGQVTADGSGNWSFTPSTPLADGTVVNATATDPAGNTGGQGSTTVDAIAPATPTVNLSNGSSLSGTAEPGSTVILTDGNGNPIAEVTADGSGNWTYTPSTPIANGTVVNVVAQDASGNSSPPATVTVDSSAPPAPVINPSNGVVISGTAEAGATVTLTDAGGNPIGQVTADGSGNWSFTPGTPLANGTVIVATATDPTGNTGPQAATTVDAVAPPAPVIDPSNGTTISGTAEAGAKVILTDGNGNPIGETTADGSGNWSFTPGTPLANGTVVNAVAQDPAGNTGPQGSTTVDAVAPNTPVVNPSNGNLLNGTAEPGSTVTLTDGNGNPIGQTTADGSGNWSFTPGSQLPNGTVVNVTASDAAGNTSLPATTTVDSSLPSIPQVDPSNGSVISGTADAGNTIIITDGNGNPIGQVTADGSGNWSFTPGIPLPDGTVVNVVARSPSNVDSAPAVITVDGVAPAAPVIDPSNGTEISGTAEAGATVILTDGGGNPIGQATADGSGNWTFTPSTPLANGTVINAVAQDPAGNTSGPASVTVDAIAPPAPVINPSNGVVISGTAEAGATVILTDGNGNPIGQVTADGSGNWSFTPGTPLANGSVINALAQDAAGNNSSPTSATVDSLAPAAPVIDPSNGSVIAGTAEAGATVILTDGNGNPIGQVTADGSGNWSFTPGTPLSNGTVVNAVAQDAAGNTSGPVSTTVDAVAPATPVIDPSNGVELSGTAEPGVRVILTDGNGNPIGQTLADGSGNWSFTPGTPLANGTVVNAVAQDPAGNTSGPASTTVDTVAPATPVINPSNGSVITGTAEVGAKVILTDGNGNPIGETTADGSGNWTFTPGTPLANGTVINAVAEDAAGNASGPASTTVDSVAPSAPLLSISADGALLTGTAEPNSQVRIVVNGDTANPITVTVDGAGNFSLPFAPPLITGELIAGVAVDAAGNVSGPATINAPDLAPPTISVPEAADTWINAAEIGDGIQVDVTVRPTMQVGQVVTVKFAGQNGYEAEVSHTLTAGDIAAGNLTLTLTPPGGMGPFPEGASTVTADINGGTASTPVPFTIDTIPPATPVLSLVGNILTISAEPGTELTVTVDVGGVTATATVTADNSGLASLNLLTDLDIDFSWDQLLNAQVSVVGRDPAGNPSNTASIGVGTSIEQPVTIGNFGLDVSLNPLNPRFGFSGTTEPDSSVVIRVITPALNVELLPIQADSSGNFSLNLLSPTILTQLGLNITDILNLGSQISFNLVSTDSNGNDSAAYGITLTPNGLSLNIGQIDVNGTSGDDVLSGANGSSEHINGGDGSDLIFNVGTGDHVVAGNGNDTIQITATDFVSIDGGAGFDTLVLANGIDLDYNAVGVGTLSNLERIDLGKGDSGSVLTLTAAEVDAITDANNTLQITGENNDTLNVVGAVNTGTTQLINGITYDVYTFGSTTLLIEDNTVQVVV

SEQ ID NO: 66336 - protein, 389 aa, Pseudomonas aeruginosa
MIPDIDSRLSRNILKSISYGLPLAEVVPDHTYAQLETRLGELKRRYLELRISHGARELPFSNYLFYLILQSRHQEFDFKLRQGNSVVTNIHRFKSKGRIPSLTTLLLADAVNAKSELELKHPDIPQLDRHARDIERWLAAGNVMPPSERALRGLVEALERAAGEGRPLHLVSAVCPDYSHSSDAEGKPRYTFERVGDQPGLAGAKLVSAGQAVAELARARQVEIRHAILGGEFEYLSFNRNPATGETREGFLGKVERQLERIAGALPCPAATCSFFEMCGGEDGWHQAHGEIVQRLEQGDYGQTGLDYPALESIFLSRLPLYEKWFASQSREQIWASFVSQAAEYALMGKLFGERFDNFVVLAVDHYRMEPFYSFFATVPTLYIRTDYL

SEQ ID NO: 66337 - protein, 207 aa, Pseudomonas aeruginosa
MSGIPEITAYPLPTAQQLPANLARWSLEPRRAVLLVHDMQRYFLRPLPESLRAGLVANAARLRRWCVEQGVQIAYTAQPGSMTEEQRGLLKDFWGPGMRASPADREVVEELAPGPDDWLLTKWRYSAFFHSDLLQRMRAAGRDQLVLCGVYAHVGVLISTVDAYSNDIQPFLVADAIADFSEAHHRMALEYAASRCAMVVTTDEVLE

SEQ ID NO: 66338 - protein, 319 aa, Pseudomonas aeruginosa
MKRVASRRLLAAVVLTACSSFLPLSAVHAETPEKPRIALVMKSLANEFFLTMEDGAKAYQKEHADRFELVSNGIKDETDTSSQIRIVEQMIVSGVDALVIAPADSKALVPVVKKALDAGIVVVNIDNRFDPQVLQAKKIGVPFVGPDNRKGARLVGEYLAKRLKVGDEVGIIEGVSTTTNAQQRTAGFKDAMDAAGMKIVSLQSGNWEIEKGNAVASAMLNEHPDLKALLAGNDSMALGAVSAVRAAGRAGQVKVVGYDNIQAIKPMLKDGRVLATADQFAAKQAVFGIQTALKLLAGQTPEHEKDGVVETPVELVTAP

SEQ ID NO: 66339 - protein, 332 aa, Pseudomonas aeruginosa
MSDPTSSATAAAAPTLRRGNYFGLGTYLGLAGALLAMIALFSALSSHFLSYGTFLAIANQIPDLVVLAVGMTFILIVGGIDLSVGSVLALAASAVSLATLGWGWGVLPAAMLGMACATLAGCVTGSITVAWRIPSFIVSLGVLEMARGLAYQMTDSRTAYIGDAYAWLSNPLAFGISPAFVIALLVMFAAQAVLTRTVFGRYLIGIGTNEEAVRLAGVNPKPYKIAVFALMGLLAGLAALFQISRLEAADPNAGVGLELQVIAAVVIGGTSLMGGRGSVVSTFFGVLIISVLAAGLAQIGASEPTKRIITGAVIVVAVVLDTYRSHRARRQG

SEQ ID NO: 66340 - protein, 506 aa, Pseudomonas aeruginosa
MIYAAPGTPGAVVTFKPRYGNYIGGEFVPPVKGQYFTNTSPVNGQPIAEFPRSTAEDIDKALDAAHAAAEAWGRTSVQERSNILLKIADRIEQNLELLAVTETWDNGKAVRETLNADIPLAADHFRYFAGCIRAQEGSAAEINDSTVAYHIHEPLGVVGQIIPWNFPLLMAAWKLAPALAAGNCVVLKPAEQTPLGICVLLELIGDLLPPGVLNVVQGFGREAGEALATSKRIAKIAFTGSTPVGSHILKCAAENIIPSTVELGGKSPNIYFEDIMQAEPAFIEKAAEGLVLAFFNQGEVCTCPSRALVQESIYPAFMEEVLKKVRAIKRGDPLDTETMVGAQASQQQYEKILSYLDIAQQEGAELLAGGSVEKLEGNLASGYYIQPTLLKGHNGMRVFQEEIFGPVVGVTTFKDEAEALAIANDTEYGLGAGLWTRDINRAYRMGRGIKAGRVWTNCYHLYPAHAAFGGYKKSGVGRETHKMMLDHYQQTKNLLVSYDINPLGFF

SEQ ID NO: 66341 - protein, 387 aa, Pseudomonas aeruginosa
MSHDLSQLRKFVSPEIIFGAGCRHSVANYVKTFGARKVLLVSDPGVLAAGWVADIQASLEGQGIDYCLYTDVSPNPRVDEVMLGAEFYRSEGCNVIVAVGGGSPMDCAKGIGIVAAHGRSILEFEGVDRLRVPSPPLILIPTTAGTSADVSQFVIISNQDERMKFSVVSKAVVPDVSLIDPETTLTMDPFLSACTGIDALVHAIEAFVSTGHGPLTDPHALEAMRLIDGNLVQMIANPGDIALREKIMLGSMQAGLAFSNAILGAVHAMSHSLGGYLDLPHGLCNAALVEHVVAFNYSAAPERFKVIAETFGIDCRGLTQGQVRQRLVDHLIAFKHAVGFHESLALHGVGSSDIPFLSRHAMQDPCILTNPRESSQRDVEVVYGEAL

SEQ ID NO: 66342 - protein, 393 aa, Pseudomonas aeruginosa
MQDVVIVAATRTAVGSFQGSLAGIPAPELGAAVIRRLLEQTGLDAGQVDEVILGQVLTAGSGQNPARQAAIKAGLPVGVPAMTLNKVCGSGLKALHLGAQAIRCGDAEVIVAGGQENMSLAPYVMPGARTGLRMGHAKLVDSMIEDGLWDAFNDYHMGITAENLAEKYGLTREEQDAFAAASQQKAIAAIEGGRFRDEITPIQVPQRKGEPLGFDTDEQPRAGTTVEALAKLKPAFRKDGSVTAGNASSLNDGAAAVLLMSAAKAKALGLPVLARIASYASAGVDPAIMGIGPVSATRRALDKAGWSLEQLDLIEANEAFAAQSLAVGRELGWDAARVNVNGGAIALGHPIGASGCRVLVTLLHEMIRRDAKKGLATLCIGGGQGVALTLARD

SEQ ID NO: 66343 - protein, 279 aa, Pseudomonas aeruginosa
MIKKCLFPAAGYGTRFLPATKAMPKEMLPVVNKPLIQYAVEEALEAGLSEIGIVTGRGKRSLEDHFDISYELEHQIRNTDKEKYLVGIRRLIDECTFAYTRQVEMKGLGHAILTGRPLIGDEPFAVVLADDLCLNLEGDSVLKQMVKLYNQFRCSIVAIQEVPPEETNKYGVIAGEMIRDDIFRVNTMVEKPKPEEAPSNLAIIGRYILTPDIFDLIEQTEPGKGGEIQITDALMKQAQDGCVLAYKFKGKRFDCGSAEGYIEATNFCYENLYKTGKAH

SEQ ID NO: 66344 - protein, 451 aa, Pseudomonas aeruginosa
MSFDFDLFVIGAGSGGVRAARFAAGFGARVAVAESRYLGGTCVNVGCVPKKLLVYGAHFSEDFEQARAYGWSAGEAQFDWATLIGNKNREIQRLNGIYRNLLVNSGVTLLEGHARLLDAHSVEVDGQRFSAKHILVATGGWPQVPDIPGKEHAITSNEAFFLERLPRRVLVVGGGYIAVEFASIFNGLGAETTLLYRRDLFLRGFDRSVREHLRDELGKKGLDLQFNSDIARIDKQADGSLAATLKDGRVLEADCVFYATGRRPMLDDLGLENTAVKLTDKGFIAVDEHYQTSEPSILALGDVIGRVQLTPVALAEGMAVARRLFKPEEYRPVDYKLIPTAVFSLPNIGTVGLTEEEALSAGHKVKIFESRFRPMKLTLTDDQEKTLMKLVVDAHDDRVLGCHMVGAEAGEILQGIAVAMKAGATKQAFDETIGIHPTAAEEFVTLRTPTR

SEQ ID NO: 66345 - protein, 602 aa, Pseudomonas aeruginosa
MPGRILVFACCLLASLARSEPRHAITLYDEPAKYPPGFQHFDFVDPQAPKGGSLRRMESGSFDTLNPFANRGTPISMTQAALIYETLGFQSLDEPFTEYGYLARYIEKAPDNSWVRFHIDPRARFSDGVAVTAEDVKFSFDSLVEQGSPFWRAYYKEVREPVVEDRLRIRFDFRHAGNRELPLVLAQLYVLPRHWWQGRDFNRSSMQPPLGSGPYRLEKAEAGRSVSYRRNPDWWARDLPVGRGLYNFERIRFDYYRDSGVALQAFKAGQADINVETSVKAWSSGYDSPALRDGRLRQESFPYPYPASLQGLVFNLRRPLFEDRRVRQALSLLFDFEWTNRQLFGGRYKRLRSYFDNSEMAARGLPGADELALLEPLRGQIPEEVFGQAYAPPVNDGSGDIHERLVQAYRLLGEAGWHAVDGRLLDTAGRPLRFDLLLQGKSLERALLPFQRNLARIGIDMRLRQVDASQYIERIRARDYDMIVSSFSQSNSPGNEQYSFWHSSSYADPGGYNRIGLKDPAIDRLVQAVVEADSRAALETAVRALDRVLQWGYYLIPTWYSDEVWIASWNRFGRPPQAPRYSLGLNTWWEVRERAAPSREAQ

SEQ ID NO: 66346 - protein, 407 aa, Pseudomonas aeruginosa
MDDLSPDSALPPAGSAQDNDAPRQLVVCIDGTSNRFGDQPTNVVRLYRSLSRDPRRVLAYYDQGVGTFGLKETLFEWQKFPSRIAGLAFGWGLKRNVEGAYRFLAEHYRPGDQIFLFGFSRGAYAVRVLAAMLRAVGLIDAHQPHLFDYAWTLLTTRMPPRDEDKRAGTRRRGPDFGLLGRFRKVFGRQVKVHFLGLFDTVTSVGWVYDPLTVPYSSNNEMVDVVRQALAIDECRCFFRQNLWFGEKDRKSDVLQVWFPGMHSDVGGGYAPKDSRLALVAFTWMLGEALEAGLHVDPARSRDQLRARSKQGPDPTAPILPVMTRPWRLAEWLPLLVWDRRSGNRAWRWSRGRPRSRPLEPVGQETRVKLHRSVQRRLDECPDYRPCNLPALERCDLIDDSPLLDGYR

SEQ ID NO: 66347 - protein, 702 aa, Pseudomonas aeruginosa
MARTTPIELYRNIGIVAHVDAGKTTTTERILFYTGVNHKMGEVHDGAATMDWMVQEQERGITITSAATTAFWQGSTKQFPHRYRFNIIDTPGHVDFTIEVERSLRVLDGAVVVFSGADGVEPQSETVWRQANKYHVPRLAYVNKMDRQGADFLRVVAQIKQRLGHVPVPIQLAIGSEENFSGQIDLVKMKAIYWNDADQGTSYREEEIPAELRALAEEWRAHMVEAAAEANDELMNKYLEGEELSIEEIKAGLRQRTLANQIVPAVLGSSFKNKGVPLVLDAVIDYLPAPSEIPAIRGTDPDDEEKHDERHADDDEPFSALAFKIATDPFVGTLTFARVYSGVLTSGDAVLNSVKGKKERVGRMVQMHANQRDEIKEVRAGDIAALIGMKDVTTGDTLCAIDKPIILERMDFPDPVISVAVEPKTKADQEKMGIALSKLAQEDPSFRVKTDEETAQTIISGMGELHLDIIVDRMRREFGVEANIGKPQVAYRETIRNTCEIEGKFVRQSGGRGQFGHCWIRFAPADEGQEGLEFHNEVVGGVIPREFIPAIQKGIEDQMQNGVLAGYPLIGLKATVYDGSYHDVDSSEMAFKIAASMATKQLSQKGGAVLLEPVMKVEVVTPEDYMGDVMGDLNRRRGLIQGMEDTPAGKVIRAEVPLGEMFGYATDVRSMSQGRASYSMEFVRYAEVPASVAEGIVARQGR

SEQ ID NO: 66348 - protein, 610 aa, Pseudomonas aeruginosa
MCGITGWTDWSRDLGEQRSILERMTRTLAPRGPDAEGLWLSRHALLGHRRLAIIDLENGAQPMLAEAGGRVALTYSGEVYNFRELRAELETLGQVFRTRSDTEVVLRAYLQWGEASFVRLRGIYGFALWDEREQSLWLVRDRFGVKPLYYYPTAGGVLFASEPKAIFANPEANPVLDASGIAELFALTTAPTPGHGLYKGLRQVRPGQALRFDRNGVRELVYWALRAERHEEGAEDSAERAGQLLREAVAEQLVADVPLGSLLSGGLDSSAISAFAVAALDGDARRLPTFSVDFPGEGRGFVPTPWQSSWDEPYAQLAANFLGTPHRTVLVAPEEVLEQDEAVLQARDLPGWGELDASLYLLFRQVREHTTVALSGESADEVFGGYPFFHDPSALAHDGFPWLAGKSGPWQLLRREVAERVAAPEYIRARYREALAEVPRLDGEDAAQRRQREVAYLALSRWLPAMLERKDRMSMAVGLEVRVPFCDHRLVEYVWNLPWALKSVAGESKSLLRRALRGHLPQAILERRKSGFPANPDPRYLALLRERVGRLLDDGRSPLFELVDAGRVRQALEQGTPLPSPRASASPTAGLAYLLNLDRWLTRHGVDISL

SEQ ID NO: 66349 - protein, 427 aa, Pseudomonas aeruginosa
MSGVAREAMEDVAPAAPGVGEFGVASCGVLLASVVGVIFGPTGLVISSFSLFIEPIAADLDWDRGQSALPVTLLGLAVALSSPLKGWLVDRWGARALVLPLTAALALCLASLALARSGWQLYLLFALLGLLTPGNIPYARILGGWFERRRGAAYGILGLGFGVGGPLALYLGSACIDAFGWRATFLVYGLLEGLLALPLLYALFRERPGDLPQARRTPADALPGATPGQAWRSADFWLIVGNLILGVFAVTGVMVHGVPLLQERGLSREVATDVLAALWVGMIVSQPALGYLLDRYDTPRIALPFALLAALGLLLLLLGGPPALLWGAVFLIGLGAGGETGTTQYFVSRYFGLRHFSVIYGSIQPFTFAIAISLGSWLLGYFYDRAGSYAGSTLVLLGAFGVAAGLLVMLGRYRYAIDGEARSHGRD

SEQ ID NO: 66350 - protein, 344 aa, Pseudomonas aeruginosa
MPTPPWSPRRSAISAHLLIQFGIDRGLGLEQCLAGSGLDIRLLGDPSGEIDAAQELSVVRNLVRHLGDACAPGLAAGLRYHLNAYGIWGFALLSSPTFLSAAQLGLRYLDLTFAFHGIRLEVHDDEAHLVLDDAGIPEDLRIFLLERDAGGVLRIQRDLTGQRLPILRAGFRRPPPADPAPYVRELGLCPAFGQADNRVVFERRFLDLPLPGANPEVARACEEQCRALLARRQVRGGLAGRIRDRLLRTPGHLPDMQTLAMELHLTVRTLRRRLDDEGSSYRLLLDEVRQALAEELLATGAIRLEEIAERLGYGEVSNFSHAFRRWKGMTPRQYRQRRRLDAMS

SEQ ID NO: 66351 - protein, 590 aa, Pseudomonas aeruginosa
MSSTVADQLLERLSQWGVKRVFGYPGDGINGIMGAMGRRAEAFDYIRVRHEEMAAFMAGAHAKFTGEVGVCLATSGPGAIHLLNGLYDARMDHQPVLAIVGQQAATALGSDYQQEVDLQSLFKDVSAYVETVVSPAQLLHVLDRALRVAVGERQVATVIVPNDVQQMAAPKRQPHEHGHVMSAVGFVQPRPYARDADLEAAAAILNRGRRVAILAGAGALGAHRQLEAVAERLAAGVAKALLGKAAVSDDLPYVTGSIGLLGTRASSMLMEHCDTLLIVGSTFPYSEFLPKAGQARAVQIDLYPRNIGIRYPIDQALLGDAGETLERLLPLLEQKKHGAWRRRVERAVTASREEARRQAEEPADPINPQRVFRSLSEQLPDDAILCGDSGSHTNWYARDIRMRPGMLGSLSGKLATMGSGVPYAIAAKLAYPQRPVVAMVGDGAMQMNGNAELVTVQQYWQRWDSPTFIVLVLNNGDLNQVTWEQRALAGDPEFSPAQEVIDFPYARYADMLGFKGIRVDRPEDIDAAWAEAFAADRPVLLEVVTDPNVPPLPPHISFEQAKHLLGAMLQDDPKRWGVIRQSARQVLARH

SEQ ID NO: 66352 - protein, 247 aa, Pseudomonas aeruginosa
MNNLLLNCDIGESFGAWRMGLDAEVMPLIDCANIACGFHAGDPGTMRRTVALAVEHGVRIGAHPGYPDLVGFGRRSLACSAQEVEDLLLYQIGALDGLCRAQGTRVRYVKPHGALYQDMMRDPAILAAVLRALAAYDRTLPLMLMSTRDNTAARALGEAHGIELWFEAFADRAYDGAGYLVSRSQPGAVHHDAETVLAQALLLARGAALRASDGSALALEAQTLCVHGDNPASLAAVRRIRDALEAA

SEQ ID NO: 66353 - protein, 423 aa, Pseudomonas aeruginosa
MTLDAGPDASRDGHFGWYRALDKQERRAFWSCKIGYGLDGMDTQMLSFVIPTLIALWGIGTGEAGFIHTMTLLASAAGGWIAGILSDRIGRVLTLQLTVLWFAFFTFLCGLAQNYEQLLVARTLMGFGFGGEWTAGAVLIGEVIKARDRGKAVGLVQSGWAIGWGLTAILYSLMFSLLPPEEAWRALFMLGLLPALFVLVVRRLVKEPEIYREARQRNQGADKVSFYEIFAPGMLSITLRASLLTTGALGGYYAITAWLPTFLKTERGLTVLGTSGYLAMVILGSYVGYVVSAFLTDLIGRKKNFVLFAVGSFTVVLLYTQLPVSNGAMLWLGFPLGFFASGIFSGMGSFLTELFPTRIRGSGQGFCYNAGRAIAALFPMLIGMLGQKLSLGLGIGAFAAVSYGVVILAALSLPETRGKQLEL

SEQ ID NO: 66354 - protein, 237 aa, Pseudomonas aeruginosa
MSSRRALALLAMLCLAPTSEAGVTAERTRLVFVEGQREASLLLVNQNPYPVLVQAWVDDGALDGEPDTALAPFLPLPPVFRLEPGRQRSLRLLATGQAQARDRESLYWLNIYEIPPQATAEAAGRPRLTVTLRTQMKVLYRPHGLHPHAEDAAAELGFALRDETLRVDNPTPYFVSLAGLALEIGETRLDLPGTLLAPRSQRRLGLPRRVDGGTRGEVAFDWIDDNGVSRQERKALQ

SEQ ID NO: 66355 - protein, 286 aa, Pseudomonas aeruginosa
MSEQRQTLPAQHQDQRPGHESQMQPKPEFVSADYRPAAKLEGKVALVTGGDSGIGRAVAVAFAREKADVVLVYLDENEDAAKTREIIESLGRQCLAFAGDVADAGFCRQVVDTLRQKWGRLDVLVNNAGEQHPQARLEDISEEQWEKTFRTNIFGMFQLTKAALPLMGKGGAIINTTSITAYKGNPQLIDYSSTKGAITSFTRSLSMNLVNRGIRVNAVAPGPIWTPLIPSTFSAEKVAHFGADTPMGRPGQPEELAASYVYLACNDSSYVSGQVLHVNGGTVVNG

SEQ ID NO: 66356 - protein, 1100 aa, Pseudomonas aeruginosa
MARREKPVFLNDPQWYKDAVIYQVHVKSFYDANNDGIGDFAGLIEKLDYIADLGVNTLWLLPFYPSPRRDDGYDIAQYRGVHSDYGSLADARRFIAEAHRRGLRVITELVINHTSDQHPWFIRARHAKKGSRARDYYVWSDSDEKYQGTRIIFIDTEQSNWTWDPVAQQYYWHRFYSHQPDLNFDNPQVLREVLGVMRYWLDMGVDGLRLDAIPYLIERDGTSSENLPETHQVLKRIRAELDAHYPDRMLLAEANQWPEDTRPYFGGEDGGEGDECHMAFHFPLMPRMYMAIAQEDRYPITDILRQTPDIPANCQWAIFLRNHDELTLEMVTDDERDYLWNHYAADRRARLNLGIRRRLAPLVERDRRRIELLHSLLLSMPGTPTLYYGDEIGMGDNIYLGDRDGVRTPMQWSVDRNGGFSRADPAKLVLPPILDPLYGYQTINVEAQARDPHSLLNWMRRLLAVRSQQKAFGRGSLKMLAPSNRRILAYLREYAEGERQDSILCVANLSRAAQAVELDLASHAGKVPVEMIGGMSFPPIGELTYLLTLPPYGFYWFYLADATQMPSWHVAADERLPELPTLVVKQRLGELLQGASRNILEGETLPAYLPKRRWFAGEKGQPRLCYIVPLDEAEPRCALCEVEIDGLRYQLPLGFLDADQRGDSLPQLLALARLRRGRKVGLLTDAASLPLFARKVLAQLRAEAVIAHGDGEIQFIPAAGLAEMDDIADEDVLPFSVEQSNSSIRFGERMVLKVLRKILPGLHPEIEVGGYLTRHGYPGIAPLLGEVRRVGADGEPHTLMILQGYLNNQGDAWNWTLDNLERAVRDEISAASEALEGQYDSLAELRGFAANLGARLGEMHSVLAGESDDPAFGSRESDEASVQAWALRIAEQLREAGKRLSEPPRPLQGEAAEQARRLLERLPALLERLPLLARQAAGGLLIRVHGDLHLGQVLMVQGDARFIDFEGEPARSLEERRQRHSPMKDVGGMLRSFDYAAAMVLRNAQSTDSSEQADSARRKVAMRYRSEARDAFLAGYRAAAAGLMHAWHGREGEGAALALACLEKAAYELLYEADYRPDWLEVPLAGLAELTEHLLKGKNR

SEQ ID NO: 66357 - protein, 316 aa, Pseudomonas aeruginosa
MPSLNDPRLDVLVSLGNWLRGQDYRFVTVTPATHERVNARPENRMARDLAGIFGWSRAFAGESLPADWLTLLAGADLIRREADGWRSQVRVSSLGEQLFVHSAFPTLAADAVFFGPDTYRFDRLIRSHLASSDPARIRRAADIGCGAGPGAIRIAMACPDAEVHGLDINPAALDLARVNAALAGVGNLTLARSDLLSQAPGRFDLIVANPPYLLDASERAYRHGGGMLGAGLSLAIVDAALERLEAGGSLLLYTGVAMVEGGDPFLARIRERLASREWDWDYQELDPDVFAEELDSPAYREAERIAVVGLRVTRSA

SEQ ID NO: 66358 - protein, 531 aa, Pseudomonas aeruginosa
MSERGTAAEGRINWRRILPILLTTTLVGGVCGIFVINELDRQHDGAHLRSYTERALERALEISSAADQMLREMNAGSAPACSDRDLEMLRSIVLESRFMSDVGRISGDRVMCTGVRGRLRAPWGLSAPDRVDAAGTRFWSEGMPLPLQALPTGLVSRGNAVVFIAPHAYFDVDHPAPGISAAAVSSGGDYIYHRFAWDDDQPLEALGRPGWPRFIGARQISLCDPTQDICVVSLLRERGLLGTEPGRAAMAAAIGGGLLFGVMLLLSYLFGFLNDEKLPARLLRALKREALEVHYQPIVRLASGRCAGVEALARWTDSSLGRVSPDVFIGALEESGDIELLTRFVFRRALKQLGPLLREQRSFYVSVNVTGKDIADPGFIDFAMRQMARESVRPEQVALELTERTTEAQGCLLAGMNRLRELGLKIYVDDFGTGHSNLVYLANLPVDAIKIDKVFTQSIGDSSAVELIFDKLCSMAEHLEIGVVVEGIETQAQADHVLRRSPEALGQGWHFGKALPLEAFLDYYRNQPAGR

SEQ ID NO: 66359 - protein, 238 aa, Pseudomonas aeruginosa
MFGELLAPQYLRWLLDGFLLTLGLALLSCLLATLIGAPLAIARLSRRRLLSWPARAYLALFRNTPLLVQLFFWYFGVPALLPEALVSWLNTPHETPLLDWPSFEFLAGAWGLTLYTSAFVAEEFRAGIASVRPEQRAAGLALGLTQRQVWRVVVLPQALRTALPPLLGQYMNALKNSSLAMAIGLAELSYASRQVETETFKTFQAFGIATLLYIGAIALIEAFGQALQQTRRYRQGGA

SEQ ID NO: 66360 - protein, 441 aa, Pseudomonas aeruginosa
MAQAQTAVLQADPAQDKATAAKPSNVRWRIFAIVFALTVINLVDRVSLSIAMPTIAGEFQLTPSMQGLILSSFFWAYALLQIPGGWLIDRYGPRRVIGWSTGLWGAFQTLAAFASGGLSLMFARVALGAAEAPLFPSGGKLNSLWLGSSERSRGAVLMDCGGPLGVALGGLVIAYLIAVLGSWRSAFFIAGIATLAMAWLAWHYLRDDPAEHPGVNAAELDRINADRTTPLAEADCQAGGRLGIAGRSLVGIVLGRASWAMVFFGLLTWGPSYLAQARGFDIKGIGAATFVIFLCGAVGSLVGGFLCDLLIRKGVRRGLAAKGLLTVSGLAALVAFLLLPSLEDAYAAVTLLALTAFFLMWGSLYWSFPALLATPARVGLVGGVMNMAGSLGGIAVPILVGLLLQHLGGYAAVLGFFALCSAAFIAGTLLISLDKTEAKHG

SEQ ID NO: 66361 - protein, 367 aa, Pseudomonas aeruginosa
METKHSNRARSRKGALRGAVLAGALMALVGCQTSPAATTSSNTGGTNMQLQLTQEWDKTFPLSAKVEHRKVTFANRYGITLAADLYLPKNRGGDRLPAIVIGGPFGAVKEQSSGLYAQTMAERGFVTLAFDPSYTGESGGQPRNVASPDINTEDFSAAVDFISLLPEVNRERIGVIGICGWGGMALNAVAVDKRVKAVVTSTMYDMTRVMSKGYNDSVTLEQRTRTLEQLGQQRWKDAESGTPAYQPPYNELKGGEAQFLVDYHDYYMTPRGYHPRAVNSGNAWTMTTPLSFMNMPILTYIKEISPRPILLIHGERAHSRYFSETAYAAAAEPKELLIVPGASHVDLYDRLDRIPFDRIAGFFDEHL

SEQ ID NO: 66362 - protein, 442 aa, Pseudomonas aeruginosa
MARKGLYLGGSALLLAVVLLLVFWGRPADAEIQVLKAPRAVVWKDFLGVNAQFLWFSPERYNKQIDRLQDLGLEWVRLDLHWDRLETAEDQYQLASLDQLVKDLEARQLKSVFYLVGSARFITTAPFYSPFQDQYPPRDPEVFARRMAMLSQRYPSVAAWQVWNEPNLIGFWRPKADPEGYAKLLQASTIALRMVDPEKPVVSAGMAFFSEMPDGRTMFDALGHLGVESLGTIATYHPYTQLPEGNYPWNLDFVSHANQINRALRNAGVPAIWSTEWGWSAYKGPKELQDIIGVEGQADYVLRRLALMSALDYDRIFLFTLSDLDQRASVRDRDYGLLDLDANPKPVYLALQRFLKVTGPKLRPADPPVTEDLPDGSFSIGWTREDGRNVWLFWSARGGNVRLPKLKEATLHDPLSGKVTPLSGSDGLEVPVKSSLQMLVWE

SEQ ID NO: 66363 - protein, 355 aa, Pseudomonas aeruginosa
MKKRWIQMDVTRGVGILIIVFGHSWFVASSPTVLYPLLSPFILPLFFFISGVFFRTEQPFGEMALRKADALLKPFFVTMLGYVILRDLLRGQPLLPDIGGVLYASVDTLPWQALWYLPHFWVATLFAWFMLRVIQRLGLSLAASCVLLAVQLGLGILFLKTFWQIPVEFGGEQYLLPGLPFSLDITLISSAHFMFGYVLRDVLRRHQSSLLTLCIALAVTTASFLYYPTVVDMAQRRYDHWFWATVQAVSGVYLCWALSGLMMKIDWLGKAMTYIGQSTLILLIFHGEIQHKTFNLLVHLGLSEPAAASVALVISVIVSLLIGEVIKRVALLRALYFPFPVRKKTAAVQGGGEAR

SEQ ID NO: 66364 - protein, 350 aa, Pseudomonas aeruginosa
MNAMNPQHENAQTVTSMTMIQALRSAMDIMLERDDDVVVFGQDVGYFGGVFRCTEGLQKKYGTSRVFDAPISESGIIGAAVGMGAYGLRPVVEIQFADYVYPASDQLISEAARLRYRSAGDFIVPMTVRMPCGGGIYGGQTHSQSPEAMFTQVCGLRTVMPSNPYDAKGLLIACIENDDPVIFLEPKRLYNGPFDGHHDRPVTPWSKHPASQVPDGYYKVPLDKAAIVRPGAALTVLTYGTMVYVAQAAADETGLDAEIIDLRSLWPLDLETIVASVKKTGRCVIAHEATRTCGFGAELMSLVQEHCFHHLEAPIERVTGWDTPYPHAQEWAYFPGPARVGAAFKRVMEV

SEQ ID NO: 66365 - protein, 428 aa, Pseudomonas aeruginosa
MGTHVIKMPDIGEGIAEVELVEWHVQVGDSVNEDQVLAEVMTDKATVEIPSPVAGRILALGGQPGQVMAVGGELIRLEVEGAGNLAESPAAATPAAPVAATPEKPKEAPVAAPKAAAEAPRALRDSEAPRQRRQPGERPLASPAVRQRARDLGIELQFVQGSGPAGRVLHEDLDAYLTQDGSVARSGGAAQGYAERHDEQAVPVIGLRRKIAQKMQDAKRRIPHFSYVEEIDVTDLEALRAHLNQKWGGQRGKLTLLPFLVRAMVVALRDFPQLNARYDDEAEVVTRYGAVHVGIATQSDNGLMVPVLRHAESRDLWGNASEVARLAEAARSGKAQRQELSGSTITLSSLGVLGGIVSTPVINHPEVAIVGVNRIVERPMVVGGNIVVRKMMNLSSSFDHRVVDGMDAAAFIQAVRGLLEHPATLFLE

SEQ ID NO: 66366 - protein, 464 aa, Pseudomonas aeruginosa
MSQILKTSLLIVGGGPGGYVAAIRAGQLGIPTVLVEGAALGGTCLNVGCIPSKALIHAAEEYLKARHYASRSALGIQVQAPSIDIARTVEWKDAIVDRLTSGVAALLKKHGVDVVQGWARILDGKSVAVELAGGGSQRIECEHLLLAAGSQSVELPILPLGGKVISSTEALAPGSLPKRLVVVGGGYIGLELGTAYRKLGVEVAVVEAQPRILPGYDEELTKPVAQALRRLGVELYLGHSLLGPSENGVRVRDGAGEEREIAADQVLVAVGRKPRSEGWNLESLGLDMNGRAVKVDDQCRTSMRNVWAIGDLAGEPMLAHRAMAQGEMVAELIAGKRRQFAPVAIPAVCFTDPEVVVAGLSPEQAKDAGLDCLVASFPFAANGRAMTLEANEGFVRVVARRDNHLVVGWQAVGKAVSELSTAFAQSLEMGARLEDIAGTIHAHPTLGEAVQEAALRALGHALHI

SEQ ID NO: 66367 - protein, 565 aa, Pseudomonas aeruginosa
MSSQRRNYRFILVVTLFVLASLAVSGRLVYLQVHDHEFLADQGDLRSIRDLPIPVTRGMITDRNGEPLAVSTEVASIWCNPREMAAHLDEVPRLAGALHRPAAALLAQLQANPNKRFLYLERGLSPIEASEVMALGITGVHQIKEYKRFYPSSELTAQLIGLVNIDGRGQEGTELGFNDWLSGKDGVREVAINPRGSLVNSIKVLKTPKASQDVALSIDLRLQFIAYKALEKAVLKFGAHSGSAVLVNPKSGQILAMANFPSYNPNNRASFAPAFMRNRTLTDTFEPGSVIKPFSMSAALASGKFDENSQVSVAPGWMTIDGHTIHDVARRDVLTMTGVLINSSNIGMSKVALQIGPKPILEQLGRVGFGAPLSLGFPGENPGYLPFHEKWSNIATASMSFGYSLAVNTAELAQAYSVFANDGKLVPLSLLRDNPQNQVRQAMDPQIARRIRAMLQTVVEDPKGVVRARVPGYHVAGKSGTARKASGRGYADKSYRSLFVGMAPASDPQLVLAVMIDSPTRIGYFGGLVSAPTFSDIMAGSLRALAIPPDNLQDSPAVADRQHHG

SEQ ID NO: 66368 - protein, 116 aa, Pseudomonas aeruginosa
MPSPAEVFKCLADETRVRATLLIVDQGELCVCELMCALADSQPKISRHLAQLRSAGLLLDRRQGQWVYYRLNPALPAWIHEVLQVTLRANGDWLQADAARLRDMDGRPQRASACCQ

SEQ ID NO: 66369 - protein, 450 aa, Pseudomonas aeruginosa
MFGMSHDAYLLLDALVTIIGLIVLITRFKVHPFIALIIAAGFLGLTSGMPVEKIVKSFQDGFGGVLGFVGVILALGTMLGKLMADSGGADQIARTLIRAFGKERVHWSMMLAAFLVGIPLFFEIGFILLIPLVFIVARRSGVSLIKIGIPLLAGLSAVHGLVPPHPGPLLAIGVFGADIGKTILYGLIVALPTAAIAGPLFGALVSRYIPGTPSAELVEQIAHEPETQDLPSFGVTLATVLLPVFLMLLKTFADVAFPDGHAFRAWMDMIGHPISALLLALLVALYTFGYARGFDSKKILRLLDQSLAPTAAIVMIIGAGGGFKQMLVASGVGDVIGHLAVNAQISPILLAWLVAAVIRIATGSATVATITGAGIVVPVIDLIPGVNRELLVLATGAGSLILSHVNDAGFWLVKQYFNMSVSETFKTWTAMETILSVVGLVFILLLSLVL

SEQ ID NO: 66370 - protein, 399 aa, Pseudomonas aeruginosa
MCLDDPTHSRRDILKLAALLSAAGALPLLSSLQARAAAEPDAPVRIGYLPITDATPLLVAHANGLFEAEGIQAERPVLLRSWAQVIEAFISGQVNVIHLLSPMTVWARYGSKVPAKVVAWNHVGGSGLTVAPEIADVRQLGGKSVAIPFWYSIHNVVLQQLLRDNGLRAVSRAVGAALAADEVNLVVLPPSDMPPALASKRIHGYIVAEPFNALAENLKVGRVQRFTGDVWRNHACCVVFMHEHDLERRPQWSQKVVNAIVKAQLWTREHRAEAAQLLSKAGANRYTPHAPEVLGRVLAPGAEEQQAYLASGAIRHADWQERRIDFQPYPYPSYTEELVRRLKDTLIEGNNAFLASLDPRQVASDLVDDRFVRQALAEVGGLQAFGLAEGFQRSEEISP

SEQ ID NO: 66371 - protein, 301 aa, Pseudomonas aeruginosa
MPRASKVTDPSYELMDDHEGHSLIYRQHGFPSPLVRWHFHKEYELHLIVASSGKVFIGDYIGNFAPDTLFLTGPNLPHNWISQVEPDEVVARRDMLVNFTDEVLEDGSGVFSELNRLAPLLARARYGIEFRDPALIGESRRLLQRIADSGGMTRLGYFFILMEQLAECEDYQLLSTVTSSQLADEHNVERINRAVDYIFQHYAQDLTQEQVAAHLGMTPTYFSRFFKQAAGRGFVEFVNRLRISKSCELLARSELPVTEVCFESGFSNLSNFNRRFQQLKGMTPTGYRRLVTQRLTEQNLL

SEQ ID NO: 66372 - protein, 436 aa, Pseudomonas aeruginosa
MNDSIKACLAAACLALPLLAQGAETLTIATVNNNDMIRMQRLSKVFEESHPDIALKWVVLEENVLRQRLTTDIATQGGQFDLLTIGMYEAALWGAKGWLEPMSGLPADYALDDLLPSVRDGLSVKGTLYALPFYAEASITYYRKDLFQQAGLRMPEQPTWTQLGEFAARLNRPDQGQYGICLRGKAGWGENMALIGTLANAFGARWFDERWQPEFSGGEWKKALDFYVSTLKRYGPPGASSNGFNENLALFNSGKCAIWVDASVAGSFVTDKSQSKVADATGFAFAPREVTDKGASWLYSWALAIPASSRAKDAAKAFATWATSQAYGKLVADREGVANVPPGTRASTYSEAYLAAAPFARVTLESLKRVDPNHPTLKPVPYVGIQLVTIPEFQAIGTQVGKLFSAALTGQMSSDQALAAAQQSTAREMKRAGYPK

SEQ ID NO: 66373 - protein, 370 aa, Pseudomonas aeruginosa
MADLKIRNLQKGFDGQAIIKGIDLDVRDREFVVFVGPSGCGKSTLLRLIAGLEEASGGSIALDGTDITDTPPAKRDLAMVFQTYALYPHMTVRRNLSFALDLAGVDKREVAAKVDAAARILELQALLERKPRQLSGGQRQRVAIGRAIVRNPKIFLFDEPLSNLDAALRVQMRLELARLHQELAATMIYVTHDQVEAMTLADKVVVLNGGRVEQVGSPLELYHHPANLFVAGFLGTPKMGFLRGHLSRNQGERCEVALECGARVGLPLCAGELATGSPVTLGIRPEHLNIARPGHAFQGLLRVAADVSERLGSDSFCHVRADSGEMLTLRVRGDFAPDYGAPLELGFDPEHCHLFDSNGQALDKRLQQAA

SEQ ID NO: 66374 - protein, 491 aa, Pseudomonas aeruginosa
MKLNRQHLPLLATAVARPSYDPAQLRQGIVHIGVGGFHRAHQAAYTDALMNRGEALDWAICGAGLRSDDRAMHDALAAQDYLYTLYELGDQPDTEVRVIGAISGMLLAEDGAEALLEKLAEPAIRIVSLTITEGGYCIDDGSGEFLAELPLVRHDLANPRTPRGVFGFLCEALRRRRDTGVPAFTVMSCDNLPHNGEVARKALLAFAERLDPGLARWIATHVSFPNAMVDRITPMTSPAHRRQLAQRHDVEDAWPVVCEPFVQWVLEDRFSAGRPAWEKVGVQFTDDVTPYEEMKIGLLNGSHLALTYLGFLRGYRFVHETLGDPLLRRYVRAFMDRDVAPLLAPVPGIDLERYKDSLVERFANRAIADQLERVCSDGSSKFPKFIVPTANRLIAAGRPLERVALVVAAWALYLGGVDEHGERYPIPDPRAAECQALVAERHGLGRRLLGVETVFGPAIPASAAFVEAFERLYDSLRRHGVSETLRQVLGE

SEQ ID NO: 66375 - protein, 217 aa, Pseudomonas aeruginosa
MSPMLERLWQGFLDTLLMIGASSAIVLLVGIPLALVLVTTGPGGIFEARLLNRILGGLVNVLRSVPFLILMVALIPFTRMIVGTSYGVWAAVVPLTIAATPFFARIAEVSLREVDHGLVEAAQAMGCERRHIICNVLLPEARPGIVGGFTITLVTMINSSAMAGAIGAGGLGDLAYRYGYQRFDTQVMLTVIIVLVLLVTLIQFGGDRLARLLNKRL

SEQ ID NO: 66376 - protein, 376 aa, Pseudomonas aeruginosa
MNASTHTPDRLLTLPRSPNLATSIRATAQVFEDPKSQALLEHLRQVAPSEASVLVIGETGTGKELVARHIHNLSARRTGPFVAVNCGAFSESLVEAELFGHEKGAFTGALAAKAGWFEEANGGTLFLDEIGDLPMPIQVKLLRVLQEREVVRLGSRKSIPIDVRVLAATNVQLERAINAGHFREDLYYRLNVVSLELSPLRERPGDILPLTRHFIAEYSRRLGYGQSQLSPEAAQKLRAYSWPGNIRELENVIHHTLLICRDGLIRADDLHLSNLRLERGEELARGGPASGAAEHLLQQAFQRLFEEQGENLHGRVEDALLRAAYRFCHGNQVHTANLLGLSRNVTRTRLIAIGELVVNKRGGQRIDGERAVRLSI

SEQ ID NO: 66377 - protein, 361 aa, Pseudomonas aeruginosa
MSVITHPHARELTKSVRATVLVFNDPRSRELLERIERLAPSEANALVIGETGTGKELVARHIHALSGRNGGPFVAVNCGAFAESLVESELFGHEKGAFTGALQSKAGWFEAANGGTLFLDEIGDLPPSIQVKLLRVLQEREVVRLGSRRPIPIDVRLVAATNVDLADAVVAGHFREDLFYRLHVATIQLPPLRERRGDILPLAEYFIVEHCRRLGYTSASLSPEAERKLLGHSWAGNIRELENAIHHALLVCRNRLIQPADLHLIDMRARQEPNGLRRAPESAAGSALEAALQALFEENREDLYEHIEETVFRAAYRFCHGNQLQTGRLLGISRNIVRARLEKIGELETSPRHNVVSLVGK

SEQ ID NO: 66378 - protein, 1317 aa, Pseudomonas aeruginosa
MTAERFLPDPFGEPGSRLYRTGDLARRRGDGVIEYMGRADHQVKIRGFRIELGEVEARLLDLEGIREAAALALDGQLVAYLVAEGGEDETRQPALRERIRTALRASLPDYMVPSHLLFLERMPLSPNGKLDRRALPKPDAGLMQRDHMAPASALEKDVAAIWGELLGVERVGLTDNFFELGGHSLLATRLVSRIRQDLGIEVSLKSLFEQPVLQGFVESLGEKPAEVPPITPVTREQPLPLSYAQERQWFLWQLEPESAAYHIPAALRLRGGLDVVALQRSFERLAQRHESLRTRFRQEGLRTVQVVDADGQLQVSRHNLANVDDASLRAAVEAEMARPFDLRTDALLRISLFEVAPNDHVLVMVQHHIVSDGWSMQLMVEELVQLYAAYSQGREAALPALPIQYPDYAVWQREWMEAGERERQLAYWIGLLGGEQPVLELPFDRPRPAEQSFRGARLEFELGAERARRLKALAQRQGASTFMLLLASFQALLYRYSGQSDIRVGVPVANRNRVETERLIGFFVNTQVLKADIDGQMGFDRLLHQVRQRSLEAQAHQDLPFEQLVEALQPERSLSHSPLFQVLFNYQAERGEHGLPEVAGLSIEEQAWESHTAQFDLVLDTCESESDIWAALVYATDLFDASTAERLVRHWQNLLDAILAMPDARLGELDMLDREEREVIGQLWNRSDSGYPATPLVHQRVAERARMAPDAVAVIFDEEKLTYAELDNRANRLAHALIARGVGPEVRVAIAMQRSAEIMVAFLAVLKAGGAYVPLDIEYPRERLLYMMQDSRAHLLLTHSHLLERLPIPEGLSCLSVDREEEWAGFPAHDPEVALHGDNLAYVIYTSGSTGMPKGVAVSHGPLIAHIVATGERYEMTPEDCELHFMSFAFDGSHEGWMHPLINGARVLIRDDSLWLPERTYAEMHRHGVTVGVFPPVYLQQLAEHAERDGNPPPVRVYCFGGDAVAQASYDLAWRALKPKYLFNGYGPTETVVTPLLWKARAGDACGAAYMPIGTLLGNRSGYILDGQLNLLPVGVAGELYLGGEGVARGYLERPALTAERFVPDPFGAPGSRLYRSGDLTRGRADGVVDYLGRVDHQVKIRGFRIELGEIEARLREHPAVREAVVVAQPGAVGQQLVGYVVAQEPAVADSPEAQAECRAQLKTALRERLPEYMVPSHLLFLARMPLTPNGKLDRKGLPQPDASLLQQVYVAPRSDLEQQVAGIWAEVLQLQQVGLDDNFFELGGHSLLATQVIGRLRERLHLEVPIKSMFTAETLGEFCHGVETLKAESAPVEDALAKSLEALKRLSADELEKLIS

SEQ ID NO: 66379 - protein, 819 aa, Pseudomonas aeruginosa
MSFARLPIPQTRQEMDNLPLSYAQERQWFLWQLEPESSAYHIPTALRLRGRLDIASLQRSFAALVERHESLRTRIARMGDEWVQVVSADVSLALEVEVQRGLDEQRLLERVEAEIARPFDLEQGPLLRVTLLEVDADEHVLVMVQHHIVSDGWSMQLMVEELVQLYAAYSQGLDVVLPALPIQYADYALWQRSWMEAGEKERQLAYWTGLLGGEQPVIELPLDHPRQPLRSYRGAQLDLELEPHLALALKQLVQRKGVTMFMLLLASFQALLHRYSGQADIRVGVPIANRNRVETERLIGFFVNTQVLKADINGRMGFDELLAQARQRALEAQAHQDLPFEQLVEALQPERSLGHNPLFQVMFNHQADSRSANQGVQLPGLSLERMEWRSSSVAFDLTLDVHEAEDGIWASFGYATDLFEASTVERLARHWQNLLRGIVAEPGRPVAELPLLLDEERDCLSRAWAENADEGGLPPLVQLQIQEQARLRPQAQALALEGQALSYAELNARANRLAHCLIARGVGPDVLVGIAVERSLDMVVGLLAILKAGGAYVPLDPTYPQDRLRHMLEDSAVGLLLSQEHLLPGLPLHEGLEVLSIDRLERDASVSTDDPVVNLRPENLAYVIYTSGSTGKPKGVAISHAALAQFSRIASGYSALTPEDRILQFATLSFDGFVEQLYPALTRGACVVLRGGDLWDTGELYRQIVEQGVTLADLPTAYWNLFLLDALAEPRRSYGALRQIHIGGEAMPLEGPKLWRQAGMGRVRLLNTYGPTEATVVSSVFDCSAENARVGNASPIGQALPGRTLLVLDEHLGLLPVGR

SEQ ID NO: 66380 - protein, 104 aa, Pseudomonas aeruginosa
MAKPNDTSNPEVTESSPRFVPLLPTSQADMCPRSATLYVDTHALPTHLFDNAKVRLRSAINILAMTRLLDEKEEPGGTLAYINGALLSLLSDALSEIEAGHPSL

SEQ ID NO: 66381 - protein, 334 aa, Pseudomonas aeruginosa
MNLLQGKWPRLATLLAVLVAAALVFLAWERYTRTPWTRDARVRADVVTLSADVSGLITRLPLSDNQPVEKGELLLSIDPARYELAVLRAERAVNVARAALGESRAAIEASQAQLRQRRSEAQRRSALQKRSMLSVEENEKAQTDVSLAQAELLRNQASLGLAQANVELAEAALQQARLDLERTQVRAPVSGYVTNLQTREGDYAHAGVPLLALVDRDSFYVSGYFEETKLPGIHVGSRARVELMSGERFDGRVQSIAHAITDRENAEGSRLLANINPSYTWVKLAQRIPVRIAIDPAYRQRNTLRAGVTATIRVLPAEDTAKVDSAAPGTALRP

SEQ ID NO: 66382 - protein, 458 aa, Pseudomonas aeruginosa
MSLSVFDLFKIGIGPSSSHTVGPMRAAARFAEGLRREGLLEATASIKVELYGSLGATGKGHGSDKAVLLGLEGEQPDTVDTAAIPARLDAIRSSGELRLLGERPIRFVEKEHLALIRKPLAYHPNGMIFRAFDAAGLQVRSREYYSVGGGFVVDDEAAGLDRIVEDRTPLAFPFKTARQLLDHCAREGLSISQLMAENEKAWRPAEETRTGLLRIWQVMQDCVEAGCRNEGIMPGGLKVRRRAAALHRQLCQRPEAGLRDALSVLDWVNLYALAVNEENASGGRVVTAPTNGAAGIIPAVLHYYARFIPGADDDGVVRFLLTAAAIGILYKENASISGAEVGCQGEVGVACSMAAGALCEVLGGSVQQVENAAEIGMEHNLGLTCDPVGGLVQVPCIERNAMASVKAINAARMALRGDGQHFISLDKVIRTMRQTGADMKSKYKETARGGLAVNIIEC

SEQ ID NO: 66383 - protein, 820 aa, Pseudomonas aeruginosa
MTATAVVLRNAPSSLDFPRASRLSRSVRAALLSLAMAAGAAPLCASAAEAAAEQARPYAIPAGQLGDVLNRFAREAGITLSATPAQTGGYSSQGLRGSFTVQQGLARLLADTPLEAEDQGDGSFVLREAPAKDGDVLNMQAVEVFALGNNLGSTDGYLATHSQIATKTSKPLLETSQTVSVITREQIDDTASKTVQQAMRYTPGIFTGQVGASNRYDYVVMRGFADNSVDNIYLDGLKAMGDSGTFSSMQVDPYFLERIDVLKGPSSVLYGRSLPGGLVALTSKKPLYEDYRQITGSIGNMGQKEMGFDFSGPLDEEKRIAYRLIGLGKGSDTQFDHVKEERYAIAPTLAIDFSDDTTLTLQGYLQHDPNGGYHGGVPADGTLSHHNGRHISREFFDGEPSKDDFDRTQRMFGYQLEHRIDDVWSARQNFRYLDSDVDLSQVYAYGWSASEPNKLNRYFSGAREHLQAYIVDNMLQAEFATGAARHTLLTGLDYQRRRTVVDWRSGSASALDAFNPVYGDDAISYFPDDNHTRRLEQTGVYLQDLIDIDQWRFSLGLRQDWVSVTDKNRSTGSKADDDWEKFTGRIGALYLFDNGLAPYVSYSESFNPNAYSDASGTPLAPTEGKQWELGLKFQAPGSNSFYTASLFHITQENVASKEPQDNFYTSVGEVRSQGLELEAHTQLSDNLKLLGSYTYTDITYTKSLDGNQGHTPNQAPKHMASLWADYAFDAGPLSGLSIGGGARYVGETWADKENTLRVPDYTLVDARIGYDLGKLGLKGLDVSLNANNLLDKDYVASCYSLDFCYFGEKRNVTATVNYQF

SEQ ID NO: 66384 - protein, 1036 aa, Pseudomonas aeruginosa
MSLSTPFIRRPVATTLLTLALLLAGTLSFGLLPVAPLPNVDFPAIVVSASLPGASPETMASSVATPLERSLGRIAGISEMTSSSSLGSTTVVLVFDLEKDIDGAAREVQAAINGAMSLLPSGMPNNPSYRKANPSDMPIMVLTLTSETQSRGEMYDLASTVLAPKLSQVQGVGQVSIGGSSLPAVRVDLNPDAMSQYGLSLDSVRTAIAAANSNGPKGAVEKDDKHWQVDANDQLRKAREYEPLVIHYNADNGAAVRLGDVAKVSDSVEDVRNAGFSDDLPAVLLIVTRQPGANIIEATDAIHAQLPVLQELLGPQVKLNVMDDRSPSIRASLEEAELTLLISVALVILVVFLFLRNGRATLIPSLAVPVSLIGTFAVMYLCDFSLNNLSLMALIIATGFVVDDAIVVVENIARRIEEGDPPIQAAITGARQVGFTVLSMTLSLVAVFIPLLLMGGLTGRLFREFAVTLSAAILVSLVVSLTLTPMLCARLLRPLKRPEGASLARRSDRFFAAFMLRYRASLGWALEHSRLMVVIMLACIAMNLWLFVVVPKGFLPQQDSGRLRGYAVADQSISFQSLSAKMGEYRKILSSDPAVENVVGFIGGGRWQSSNTGSFFVTLKPIGERDPVEKVLTRLRERIAKVPGAALYLNAGQDVRLGGRDSNAQYEFTLRSDDLTLLREWAPKVEAAMRKLPQLVDVNSDSQDKGVQTRLVIDRDRAATLGINVEMVDAVLNDSFGQRQVSTIFNPLNQYRVVMEVDQQYQQSPEILRQVQVIGNDGQRVPLSAFSHYEPSRAPLEVNHQGQFAATTLSFNLAPGAQIGPTREAIMQALEPLHIPVDVQTSFEGNAGAVQDTQNQMPWLILLALLAVYIVLGILYESYVHPLTILSTLPSAGVGALLALILCRSELSLIALIGIILLIGIVKKNAIMMIDFALEAERNHGLSPREAILEACMMRFRPIMMTTLAALLGALPLIFGIGGDAALRRPLGITIVGGLIGSQLLTLYTTPVVYLYLDRLRHWVNQKRGVRTDGALETPL

SEQ ID NO: 66385 - protein, 426 aa, Pseudomonas aeruginosa
MTPTTGKSKFRTLRPWLITALAFAAVIGLVMWLAAPASAPSSDGRPGRGGKPGAALPKANALTVGVARVEQGDLALHFNALGTVTAFNTVNVKPRVNGELVKVLFQEGQEVKAGDLLAVVDPRTYKAALAQAEGTLMQNQAQLKNAEIDLQRYKGLYAEDSIAKQTLDTQEAQVRQLQGTIRTNQGQVDDARLNLTFTEVRAPISGRLGLRQVDIGNLVTSGDTTPLVVITQVKPISVVFSLPQQQIGTVVEQMNGPGKLTVTALDRNQDKVLAEGTLTTLDNQIDTTTGTVKLKARFENADGKLFPNQFVNVRLLAQTLKGVLTIPANAVQRGTNGIYVYVVGADNKVSQRSVAIGTSENERVVVESGLKAGEQVVVEGTDRLRDGMEVRVAEASPQVLEGEPQKPQTGRPSGLQGDSVGSGSAE

SEQ ID NO: 66386 - protein, 331 aa, Pseudomonas aeruginosa
MKTRQLGHNGPSVSAIGLGCMGMTDFYTTGGDRQEAIATLHRAVELGLNFFDTADMYGPHSNEELLGEALRGKREQVFLASKFGIVRDPANPRARGVDGSPAYIRRAIEGSLKRLGTDRLDLYYQHRMDPQVPIEDSVGALADLVKAGKIRHIGLSEASAETLERAHRVHPISALQSEYSLWTRDPEDTGVLAACRRLGIAFVPYSPLGRGFLTGTLKRPEDFAADDYRRFSPRFQGENFAKNLKLVDKVGELAAAKGVKPSQLALAWVLAQGDDLIPIPGTKQRRYLEENVAATELRLSAAELAELDAIFPAEAVAGSRYSEEGMRLVNL

SEQ ID NO: 66387 - protein, 311 aa, Pseudomonas aeruginosa
MNEQTWMLFGGIGALLLLASLVGFVLKWRAGPGPNAVIDNLNARINAWWAMVLVIGFAFWLGQAAVILLFYGVSFYALREFITLTPTRRSDYPALVAAFYFVLPMQYLLIYIDWYSMFSIFIPVYVFLLLPILASLGGDTKHFLERASKVQWGLMLAVFCISFVPALLTLDIPGFEGRNLLLIAYLVIVVQLSDVMQYICGKLFGKRKIAPNLSPSKTVEGFVGGIALATAIGASLWWITPFNLWQAALIALLINLLGFFGGLVMSAIKRDRGVKDWGHMIEGHGGMLDRLDSVCFAAPIFFHVVRYWWTP

SEQ ID NO: 66388 - protein, 437 aa, Pseudomonas aeruginosa
MLWLLFLGPFFFASYGLANWLTSQRGDVGSLVFDWERGMPLWPWTILPYWSIDLLYGLSLLLPRDKRELDTHCLRLLSAQVLSVTCFLLFPLRFTFERPELGGVFGWLFDVLMGFDKPYNQAPSLHIALLVVLWVCYARYASGAWRWLLHGWFALIGLSVLTTWQHHFIDVPTGALAGWLCVWLWPQAQPAPFARASLSRDRQRRRLAACYGLGALACAAVAFAVGGAALWLCWPALALALVALNYLLFGAAGFQKGSTGRLSAAARWLLAPYLLAARINAWLWTRRRPQPDEVLPGLWLGRLPSSAELADGRFRALLDATAELSCEPQGLAYRSLPLLDLVAPDVEDCRRAAVLIDELLAQGPLLVACALGYSRSATLVAAWLLLSGRAADVESAVAVLRRARPQVLLGEAQRRTLAALSGSVPEPSAELGEVRHA

SEQ ID NO: 66389 - protein, 586 aa, Pseudomonas aeruginosa
MRDVQELRFTTHDGVELFYRHWPASRPAPDGTRQAVLLFHRGHEHSGRIAHLVDELDLPEHDFFAWDARGHGLSPGARGDSPSFATSVRDVQTFVDHIQAVHGIAEERMAVVAQSVGAVLVSTWAHDYAPKVRALVLASPAFQVKLYVPFARSGLKLMRLWRGNFFVNSYVKARFLSHDPERIASYDSDPLIAKAISVNVLLGLYEAAERVVADAQAIQIPTQLLISGADFVVHRAPQERFFERLGSLRKEKHILPGFFHDTLGERDRHLAVGRARRFLLEAFATAPERPSLLDADRLGHTCAEAEALAAPLPKNSPRDLYWRATRAGLRLGSLWSDGVKLGFDTGFDSGSTLDYVYRNQPCGSGPLGRLIDRNYLDSIGWRGIRQRKLHVEELLRLAMQRLREEQREVRIVDIAAGHGRYILEALQGVEPLPESILLRDYSEINVRDGSALIESKGLAGIARFVKGDAFDRADLAALQPKPSLGVVSGLYELFADNRMVGDSLAGLGEALEEGGYLVYTGQPWHPQLELIARALTSHRQGQAWVMRRRTQAEMDQLVAAAGFRKITQRVDQWGIFSVSLAQKVAR

SEQ ID NO: 66390 - protein, 1221 aa, Pseudomonas aeruginosa
MKALKITLLAIVGLLLALLLGLAALLGTQTGSAWLLGRVPGLQVSGFEGRLGGAWQAQRLSWAQDGTQLVVERPELRWSPACLAGLRLCLQRVAAERVALDLPPSGDSADSGPISLPTLKLPLSIELGEVAVGSFLLDGNQQVAELKLAAHWLADGLHIDSLTARGFGLDLALQGRLQPSGDWPLQAEATLGLPAPEGKPWKLAVQVGGELQQALTLKGRSSGYLDGSLEGQLQALAENLPARLLIRADGFKGAAGLPDTLTLNAIQLDASGDLKSGYLIRGGASLPGEGGAVALSLDGRVDAQGADIRQLRLDAGGEQRLELVGRLDWRESLAADATLDWKDFPWLRLYPLAEPPPVTLKTFKAEVHYQDQRYLGNFSAAASGPAGDFTLASPVSGDLVQLNLPSLQLRAGQGQAEGRVTLRFDNGVAWDTALQLSELNPAYWVAELPGSLAGPLRSQGSVRDERLALGVDLDVKGRLRGQPALFQARAEGEGQRWTLGNLDLRLGDNKVQGSGALDQRLQGRLDIALNRLGQLWPQLFGRLDGRLDLAGSLAAPQGRLNLKGQQIAYAEQRIAGLDLQANLDARQNGTLALVASGLRSGETDLGLFKANARGDQRRQQLELDLQGALLKLGLAFDGQLERGNWRGRLARGELSSGGQDWKLQQPARLERLADGRVNFGAHCWVSGAASLCGGEQRLLPEPRLRYTLRDFPLDSLKQWFPEDFAWQGKLNGDLQLDVPARGPSGVVSLDAGSGTLRLRDQGQWVDVGYDSLRLESRLAPNRVDTSLDFRGPKLGELRVQAQIDPRPASKPLSGEFSLAGLDLSLARPFVPMVEKLQGRLNGSGRLSGGLLAPRVDGRVTLSDGNIGGGELPTSFENLSLDARIAGESLELGGGWRSGRYGQGSLSGNLSWGDALNVALNIRGNRLPVVVDPYAQLEVEPDLKIGMAGQELAISGKVLVPRGDITIRQLPPSTVKVSDDAVIVGSEQPAQRPLKMKMDIDVEVGQDKLAFSGFGLSAELAGHLHIGDNLDTRGELNLNKGRYRAYGQRLTIRRARLFFAGPIDQPYLDIEAIRRVDDVVAGLRLTGSAEQPTSAVFSEPAMSQEQALSYLVLGRPMSTGEDSNMLGEAALALGLAGSAPLTGEIAKQLGIQDFQLDTEGTGNSTSVVASGNITDKLSLRYGVGVFEPANTIALRYQLTKRLYLEAASGLASSLDLFFKRDF

SEQ ID NO: 66391 - protein, 347 aa, Pseudomonas aeruginosa
MAALHAFLTEPFLGTATWFWLAFLAIVIVLLVLDLGVLQRDHHEIGVRESLLLSAGYFACGLAFGGWVWYAFGPTSAVEYYTGFLVEQSLSMDNVFVMAMIFSFFGIPRRYQHQVLFWGILGAIVLRAIMIGLGAALVKEFDWIMYVFGAFLLFSGVKMLFNKHEEEPDLEHNPVLRFLRKHMRVTKELHEHHFFVRLPDASGKLVRYATPLFFALVLIELADLVFAVDSVPAIFAITQDPFIVYTSNIFAILGLRALYFSLAAMIHRFVYLKYALALVLVFIGAKIMLHGVIGKIPAGLSLGVTFGLLAGGILLSLLKTRTPKATVEDKAEPNAEHALDRTSGHPR

SEQ ID NO: 66392 - protein, 495 aa, Pseudomonas aeruginosa
MLQTLKQNWFSNLRGDLLAGLVVALALIPEAIAFSIIAGVDPKIGLYASFSMAVVIAFAGGRPGMISAATGAMALLMVNLVKDHGLQYLLAATLLCGVLQILAGYLRLGSLMRFVSRSVVTGFVNALAILIFMAQLPELTDVGWPVYAMTAAGLAIVYGFPHLPRIGRLLPSPLVCILVLTGISIYLGLDIRTVGDMGQLPDSLPLFLWPDVPLNLDTLLIVLPYSAALAVVGLLESLMTATIVDEMTDTGSDKNRECKGQGLANIATGLLGGMAGCAMIGQSVINVKSGGRSRLSTLVAGVALLLMVVFLSDWVGRIPMAALVAVMIMVSIGTFRWESIRNLKRYPLSTNLVMLVTVGVVLATHNLAFGVVAGVLLASLFFANKIGHYLDIDSERSADGTRRHYQVSGQVFFASSGRFVAAFDLKETLEHVLIDLRHAHLWDVTAVAALDKVVLGFRQRGVQVDVLGLNAASATLVDRFGAYDKPGAVDILSDH

SEQ ID NO: 66393 - protein, 535 aa, Pseudomonas aeruginosa
MNIRQRILASGAIGIVAVVLLGGVGFWGQLRLGKALSENELSVNALRNHMEGDMMHDALRADVLAAFVVQPGDGAAAEQVRQDLQEHSQWFRKVVEQNQGLPLNDAIHQALVELRPDLEAYIGAAESIVGKALLDPVAARAELPQFVQAFKELEGRNEALSSLIEKHVEQTNRAREDSMRYSAWMLAGGILVACLVLGQLCRQLLRAVLQPLRKLVSSARVIAQGNLQEPIGVDSNDEAGQLQRALGEMQENLRQMITIIRQESEELHDTSQSIGQTSQSIVHGASQQADSATSMAASMEEMITNISQISDHADNARVISAKSEELASSGGQVILNVVEGMSRIADVVNQSSTSITALGQSSDEIHSIIQVIKGIAEQTNLLALNAAIEAARAGEAGRGFAVVADEVRGLAARTTQSTQEITAMIERIRASTGQAINSMEAGVSRVNEGVSFARQAGVSINEILDGTRHAASVVDEISQTIREQSRASDEIAQRVELIAQRSQQNTQAMHEMAATARRLNEVAATMRSSVERFKI

SEQ ID NO: 66394 - protein, 342 aa, Pseudomonas aeruginosa
MSPSENIQYDFEWRPLNNYLAVQRITPPDMRQGSAAEPRLPSEALYEWIVLNGRSPLEGLSLGEHYRLSDYGVAGLALQSAGTVGEALQLIKTNMLLFRKDIRGIAVRRSSCDTVDVDIDLQDKPDWPQSARLYHANVLASAAYAVFRDLLLGELELVRLRLPERNGDVRAYEEYFRVPVYFAGAGITFTLPEELLEAEIATANSAVFQASLALGSKAFNTRVTREMGGYRQRIVALLEVLQDRYPSIAWVARQLKVTERTLRRRLADEGTNYREVLDLVRHDRARQLLRDERLRIEEVAERLGYMDTSSFRHAFRRWTGQCANDYRQARLAGKTARRQGER

SEQ ID NO: 66395 - protein, 101 aa, Pseudomonas aeruginosa
MATTLHVLSRSPFNDGRLGSCLYLLNPGDGLLLCGDAVHALLAGSHACQALELMPAEIELFALLEDLQARGIEDVPARLVAVDYPGFVELATRFDKVNSWL

SEQ ID NO: 66396 - protein, 465 aa, Pseudomonas aeruginosa
MDFLPLFHSLQGRLALVVGGGEVALRKARLLADAGARLRVVAPQIHIELRHLVEQGGGELLERDYQDGDQPGCALIIAATDDEPLNAEVSRAANARGIPVNVVDAPALCSVIFPAIVDRSPLVVAVSSGGDAPVLARLIRAKLETWIPSTYGQLAGLASRFRHRVKELLPDLQQRRVFWENLFQGEIAERVLAGRPAEAERLLEEHLAGGLAHIATGEVYLVGAGPGDPDLLTFRALRLMQQADVVLYDRLVAPSILELCRRDAERLYVGKRRAEHAVPQDRINRLLVELASQGKRVLRLKGGDPFIFGRGGEEIDELAAHGIPFQVVPGITAASGCAAYAGIPLTHRDHAQSVRFVTGHLKDGTTDLPWQDLVAPGQTLVFYMGLVGLPVICEQLVAHGRSAQTPAALIQQGTTAQQRVFTGTLENLPQLVAEHEVHAPTLVIVGEVVQLRDKLAWFEGAREDA

SEQ ID NO: 66397 - protein, 426 aa, Pseudomonas aeruginosa
MLDPKLVRTQPQEVAARLATRGFQLDVARIEALEEQRKSVQTRTEQLQAERNARSKAIGQAKQRGEDIAPLLADVDRMGSELEEGKRQLDAIQGELDAMLLGIPNLPHESVPVGADEDANVEVRRWGTPKTFDFEVKDHVALGERHGWLDFETAAKLSGARFALMRGPIARLHRALAQFMINLHTAEHGYEEAYTPYLVQAPALQGTGQLPKFEEDLFKIGRDGEADLYLIPTAEVSLTNIVSGQILDAKQLPLKFVAHTPCFRSEAGASGRDTRGMIRQHQFDKVEMVQIVDPATSYEALEGLTANAERVLQLLELPYRVLALCTGDMGFGATKTYDLEVWVPSQDKYREISSCSNCGDFQARRMQARYRNPETGKPELVHTLNGSGLAVGRTLVAVLENYQQADGSIRVPEVLKPYMAGIEVIG

SEQ ID NO: 66398 - protein, 441 aa, Pseudomonas aeruginosa
MDLFRSEPVAQPLAARLRPANLDEYVGQEHLLARGKPLREALEQGALHSMIFWGPPGVGKTTLARLLAQVSDAHFETISAVLSGVKEIRQAVEVAKQHAAQYGRRTILFVDEVHRFNKSQQDAFLPYVEDGTLIFIGATTENPSFELNNALLSRARVYVLKSLDEAALRKLVGRALNEDKGLGKRKLRLPEESFQVLLAAADGDGRRLLNLLENAADLAEDGSEISPELLQNLLGDTRRRFDKGGEAFYDQISALHKSVRGSNPDAALYWFARMLDGGCDPLYIARRVVRMASEEVGNADPRALGLCLSAWDVQERLGSPEGELAVAQAIVYLACAPKSNAVYSAFNAAMRDVAESGSREVPLHLRNAPTKLMKSLGYGEEYRYAHDEPDAYAAGEDYFPEDLEPRRYYQPVPRGLELKIRDKLEHLAELDRTSPRQRRKS

SEQ ID NO: 66399 - protein, 811 aa, Pseudomonas aeruginosa
MRRKNSDLKDSTTASHAAAWRQQLHSRLKEGVLIALGALCLYLWMALLTYDSADPSWSHSSQVDQVQNAAGRLGAVSADILFMTLGYFAYLFPLLLGIKTWQVFRRRNLPWEWNTWLFSWRLVGLIFLILAGSALAYIHFHASGHMPASASAGGAIGQSLGRVAVDALNVQGSTLVFFALFLFGLTVFADLSWFKVMDVTGKITLDFFELIQNAFNRWMGARAERKQLVAQLREVDERVAEVVAPSVPDRREQSKAKERLLEREEALAKHMSEREKRPPPKIDPPPSPKAPEPSKRVLKEKQAPLFVDTAVEGTLPPLSLLDPAEVKQKSYSPESLEAMSRLLEIKLKEFGVEVSVDSVHPGPVITRFEIQPAAGVKVSRISNLAKDLARSLAVISVRVVEVIPGKTTVGIEIPNEDRQMVRFSEVLSSPEYDEHKSTVPLALGHDIGGRPIITDLAKMPHLLVAGTTGSGKSVGVNAMLLSILFKSTPSEARLIMIDPKMLELSIYEGIPHLLCPVVTDMKEAANALRWSVAEMERRYRLMAAMGVRNLAGFNRKVKDAEEAGTPLTDPLFRRESPDDEPPQLSTLPTIVVVVDEFADMMMIVGKKVEELIARIAQKARAAGIHLILATQRPSVDVITGLIKANIPTRIAFQVSSKIDSRTILDQGGAEQLLGHGDMLYLPPGTGLPIRVHGAFVSDDEVHRVVEAWKLRGAPDYIEDILAGVDEGGGGGGSFDGGDGSGEGSEDDPLYDEAVRFVTESRRASISAVQRKLKIGYNRAARMIEAMEMAGVVTPMNTNGSREVIAPAPVRD

SEQ ID NO: 66400 - protein, 72 aa, Pseudomonas aeruginosa
MSKEDSFEMEGTVVDTLPNTMFRVELENGHVVTAHISGKMRKNYIRILTGDKVRVELTPYDLSKGRITYRAR

SEQ ID NO: 66401 - protein, 418 aa, Pseudomonas aeruginosa
MGYQKIQVPATGDKITVNADMSLSVPKNPIIPFIEGDGIGVDISPVMIKVVDAAVEKAYKGERKIAWMEVYAGEKATQVYDQDTWLPQETLDAVRDYVVSIKGPLTTPVGGGIRSLNVALRQQLDLYVCQRPVRWFEGVPSPVKKPGDVDMVIFRENSEDIYAGVEWKAGSPEAEKVIKFLTEEMGVKKIRFTENCGIGIKPVSQEGTKRLVRKALQYAVDNDRSSVTLVHKGNIMKFTEGAFKDWGYEVARDEFGAELLDGGPWMQFKNPKTGKNVVVKDVIADAMLQQILLRPAEYDVIATLNLNGDYLSDALAAEVGGIGIAPGANLSDSVAMFEATHGTAPKYAGQDKVNPGSLILSAEMMLRHMGWTEAADLIIKGTNGAIAAKTVTYDFERLMDGATLLSCSEFGDAMIAKM

SEQ ID NO: 66402 - protein, 375 aa, Pseudomonas aeruginosa
MSESAPTPRRERVIVGMSGGVDSSVSALLLLQQGYQVEGLFMKNWDEDDGTEYCTAREDLADAQAVCDRIGIKLHTANFAAEYWDNVFEHFLAEYKAGRTPNPDILCNREIKFKAFLDYALMLGADLIATGHYVRRRDRDGRTELLKGLDPNKDQSYFLHAVGGEQIARSLFPVGELEKPEVRAIAEKHGLATAKKKDSTGICFIGERRFTDFLKQYLPAQPGDIETTEGKVIGRHSGLMYHTIGQRQGLGIGGLKEAGDDPWYVLGKDLQRNVLLVGQGNDHPLLFSRALLASRIYWVNPVELERPRRLRAKVRYRQSDQDCVLEKTAEGYRAVFDEPQRAVTPGQSVVFYDGDVCLGGGVIETAEAWDFGGRP

SEQ ID NO: 66403 - protein, 456 aa, Pseudomonas aeruginosa
MQLSSLTAVSPVDGRYAGKTSSLRPIFSEYGLIRFRVMVEVRWLQRLAAHAGIPEVAPFSAEANALLDSLASDFQLEHAERIKEIERTTNHDVKAVEYLLKEQAAKLPELAAVSEFIHFACTSEDINNLSHALMLREGRDSVLLPLMRQIAEAIRELAVKLADVPMLSRTHGQPASPTTLGKELANVVYRLERQIKQVAGIELLGKINGAVGNYNAHLSAYPEVDWEANARQFIEGDLGLTFNPYTTQIEPHDYIAELFDAIARFNTILIDFDRDVWGYISLGYFKQKTVAGEIGSSTMPHKVNPIDFENSEGNLGIANALFQHLASKLPISRWQRDLTDSTVLRNLGVGIAHSIIAYEASLKGIGKLELNAQRIAEDLDACWEVLAEPVQTVMRRYGVENPYEKLKELTRGKGISAEALQTFIEELAIPAEAKVELKKLTPAGYVGNAAAQAKRI

SEQ ID NO: 66404 - protein, 118 aa, Pseudomonas aeruginosa
MELFKEFTFESAHRLPHVPEGHKCGRLHGHSFRVAIHIEGEVDPHTGWIRDFAEIKAIFKPIYEQLDHNYLNDIPGLENPTSENLCRWIWQQLKPLLPELSKVRVHETCTSGCEYRGD

SEQ ID NO: 66405 - protein, 435 aa, Pseudomonas aeruginosa
MIRVRPVGRLALFLALGGTSPCHAATEEAKAPDYLEWRLLNRNYFLYNDYRRADAGRGYRKEWAHGLIVDLESAYTPGRVGFGLDLHGFAGFKLDGGRGHAGTGLLPLDSSGDNASEYSDAGAALKLRLGESLLKVGEMTVETPVFDTSDKRLQPQYARGFFLQSDDLDRVRIQAGRFTAFKEQASSSGHGDFDGYGASTAGSAIGFAGASLAASDNLSGSLFAAQLDNVWRQVYLNMNLQRAAFSLDGNLYRTRDQGRSRAGAIDTLAYSLQLKYRVGAQGFSLAYQRVHGDTPFDFVGGDSIYLANSIKYADFNGPGERSWQARYDLDLAPFGLPGLSFMARYVSGRAIDGSHAPAGGAYNPLGADGRYRPLQGSGGKHWERDLDLRYLFASGPFKDLSLNVSHLSHRANAAQAGDDIDRLYLIVEYPLKGSL

SEQ ID NO: 66406 - protein, 324 aa, Pseudomonas aeruginosa
MSRIFADNAQSIGNTPLVQINRIAPRGVTILAKIEGRNPGYSVKCRIGANMIWDAEASGRLKSGMTLVEPTSGNTGIGLAFVAAARGYKLILTMPASMSLERRKVLKALGAELVLTEPAKGMKGAIQKAEELVAGDPGKYFMPQQFDNPANPAIHEKTTGPEIWNDTEGAVDVLVSGVGTGGTLTGVSRYIKNTRGKPILAVAVEPVTSPVISQTLAGEEVKPAPHKIQGIGAGFVPKNLDLSLVDRVEKIGDDEAKNMALRLMQEEGILCGISSGAAMAAAVRLAEEPNMQGKTIVVILPDSGERYLSSMLFDGLFSEQELTQ

SEQ ID NO: 66407 - protein, 1146 aa, Pseudomonas aeruginosa
MKPTDTSEKALEQLIVRHLAGISEHASVPPNAVQSPGAIYALGGYVLGRATDFNRDVALDTVQLLAFLQATQPDAVETLELAHEGIKRTQFLHRLQGEITKRGVVDVLRKGVSHGPVRVDLYRLLPTPGNTNAAEAFGRNIFSITRQVRYSHDSGNELDLVIFVNGLPVLTFELKNSLTKQTVADAIVQYQSTRSPQELLFQPGRCIAHFAVDDAEVYFCTELKGKASWFLPFNQGWNNGAGNPPNPNGLKTDYLWKQVLAKESLANIIESFAQVVEEQETDATTGRKKKKRKPVFPRFHQLRTVRALLRRTRSDGVGKRYLIQHSAGSGKSNTIAWLAHQLVELRSVADPLMPQFDSIIVITDRRALDTQIARTIKGYDHVASIFGHSDNAQELRDYLRRGRKIIVTTVQKFPFILEEIGDLSGRTFALLIDEAHSSQGGKTTARMHEALSGKTDEEAFEEDATQDAVNTEIEKRIQSRRMLSNASYFAFTATPKNRTLELFGEKTVVDDKVEFRSPEELTYTTKQAIQEGFILDVIAHYTTLDSFYQVAKTVENDPDFDKARALKKIRHYVESHDKAIRRKAEIMVDHFVAQVMGAKKIGGKARAMIVCNGIARAIDYWREVSDYLEQIKSPYKAIVAYSGEFEIGGEKKTEADLNDFPSKEIPDRLRQDPYRFLIVANKFVTGFDEPLLHTMYVDKKLAGVQAVQTLSRLNRAHPQKHDTFVLDFADNAEAVKKAFQDYYRATIQTGETDANKLHDLKADLDDKQIYSWPQVEDLVALYLSGADRDKLDPILDHCVEQYQANLDEDNQVEFKGKAKAFVRSYGFLAAILSYGHPAWEKLSIFLNFLIPKLPAPKEEDLSKGVLESIDIDSYRVEARAALKMAMDDTDATVEVAPVGGGGGKGEPDIDKLSNILKTFNDLFGNIDWKDADKIGKVIAEEIPVRVAQDKAYQNAQVNSDRQNAKLEHDKALNRVVLELLSDHTELFKQFSDNPNFKRWLTDMVFDVTYQQNPAHGVEDVRMRALDIVRDRFDAAVVWSQAVDMLLDRLAAGGRNSLGIADLALIEETSGLSVSHVLFPVLNLLSAHDVGILNREFVRVGSTDTPQTMSFDEVRLLAQKDPEGDDWAECLSIRWALQDAQRIAHGR

SEQ ID NO: 66408 - protein, 431 aa, Pseudomonas aeruginosa
MLRNGRLFGHRVETGFPDLPILEVSLRTGVRVRDMDNLKRKQVMSQKEKYKRAVKGDIAYNMMRMWQGAVGPVPEDGLVSPAYVVVKPYAEANSTYFSYLFRTAAYMQEVNKFSRGIVADRNRLYWESFKQMPSLVPPRPEQDQIVTYLRTQDAHIACFIRAKRDLIALLTEQKLRIIDHAVTRGLDASVKLKPSDIEWLGEVPAHWEVKRLKFLAGNITSQTTTKADDEIYLALEHVQSWTGVARPLGGEVEFASTVKRFVADDVLFGKLRPYLAKVTRVVCAGVCVSEFLVLRSRQELILPAYLEQLLRCKRVIDLISSSTAGAKMPRADWNFIGNVRLPIPRKDEQEAILSHIGRETKDLDETIARAEDEIKLIREYRDRLIADAVTGQVDLRGWQPGPDDVVSDDDLAALGDDDAGSSDDEEADAED

SEQ ID NO: 66409 - protein, 792 aa, Pseudomonas aeruginosa
MQKRQQDQSQIKWVADFIWNIADDRLRDVYVRGKYRDVILPFTVLRRIDAVLEPTKQAVLERKKLLDSAKVANQNGALQAAAGQAFYNVSEFTLAKLKASAAGQRLREDFIAYLDGFSPNVQEVLTKFNFRNQIQKLVDAHILGYLIEDFLDPEVNLSPLPVKDADGRTKLPALDNHGMGTVFEELIRRFNEENNEEAGEHFTPRDVVQLMAKLLFLPVADRIESSTYSLYDGSCGTGGMLTVAEEALKELAEQHGKDVSIHLFGQEISDETYAICKADLLLKGEGAEAENIVGGADKSTLSADQFRSREFDFMISNPPYGKSWKTDLERMGGKKEFSDPRFIVNHGGDAEFKLITRSSDGQLMFQVNKLSKMKHDTALGSRIALVHNGSALFTGDAGQGESNIRRWVLENDWLEAIIALPLNIFYNTGIATYIWVLANKKAEHRKGRVQLIDASQWFAPLRRNLGKKNCELAEGDIRRILDLYLGEAQETDSSTDQSKWFDTQDFGYWKITVERPLRLKSQLKTSAIDTLRFASGDEELRTEIYAEHGDKLYTSFAKLKPEIEAWLKGGSEDDDDAEDGDEEGTHAKKAVPEKRRKRLLDATTWQRDKGLLDLALLAQKVLGDAVFDDHNVFRAEFDIAMKAHDKKLTAADKKAIFKAVSWRDDTAPPVVAKRHKLKASDAFIPSFDGRYFIETGKHREVVWYEPDADLRDTEQVPLKELGGIDAFFEREVLPHAPDAWIDGEKTQIGYEISFARYFYKPTPLRPLDDIRADILKLEQQTEGLLHKIVGTA

SEQ ID NO: 66410 - protein, 792 aa, Pseudomonas aeruginosa
MKFSEKWLRSWANPQVSHDELVARLSMVGLEVDADLPVAGAFSGVVVGEVLSTEQHPDADKLRVCQVSNGSETFQVVCGAPNVRAGLKIPFAMIGAELPDDFKIKKAKLRGVESFGMLCSAKELQISEENAGLLELPADAPVGQDVRTYLELADYTIEVGLTPNRGDCLSLAGLAREVSAIYDVPLAPVAVDAVAAQHDETRPVELAAPAACPRYLGRVIRNVDLSRPTPLWMVERLRRSDIRSIDPVVDVTNYVMIELGQPMHAFDLAEINGGVRVRMAEDGEKLVLLDGQEITLRADTLVIADHQRALAIAGVMGGEHSGVSDSTRDLFLEAAFFDTIALAGKARSYGLHTDSSHRFERGVDSQLARKAMERATRLILDIVGGEPGPIVEQVSEAHLPKVAPITLRAERVTQMLGMPLDAAEIVRLLQALELTVVADGEGQWSVGVPSHRFDISLEVDLIEELARLYGYNRLPVRYPQARLAPNNKPEARAALPLLRRLLVARGYQEAITFSFIDPALFELFDPGTQPLTLANPISADMAAMRSSLWPGLVKALQHNLNRQQSRVRLFESGLRFVGQLEGLKQEAMLAGAICGKRLPEGWANGRDGVDFFDAKADVEAVLASAGALGDFSFVPGEHPALHPGQTARIEREGRLVGYLGALHPELAKKLDLEQPVFLFELLLAEVVDGHLPKFRELSRFPEVRRDLALLVDQDVPAQDILTQIRAAAGEWLTDLRLFDVYHGKGIDPHRKSLAVGLTWQHPSRTLNDDEVNSTTQNIVTSLEERFNATLRK

SEQ ID NO: 66411 - protein, 338 aa, Pseudomonas aeruginosa
MENLDALVSQALEAVRHTEDVNALEQIRVHYLGKKGELTQVMKTLGDLPAEERPKVGALINVAKEKVQDVLNARKTELEGAALAARLAAERIDVTLPGRGQLSGGLHPVTRTLERIEQCFSRIGYEVAEGPEVEDDYHNFEALNIPGHHPARAMHDTFYFNANMLLRTHTSPVQVRTMESQQPPIRIVCPGRVYRCDSDLTHSPMFHQVEGLLVDEGVSFADLKGTIEEFLRAFFEKQLEVRFRPSFFPFTEPSAEVDIQCVICSGNGCRVCKQTGWLEVMGCGMVHPNVLRMSNIDPEKFQGFAFGMGAERLAMLRYGVNDLRLFFDNDLRFLGQFR

SEQ ID NO: 66412 - protein, 183 aa, Pseudomonas aeruginosa
MIIKREMRQDKRAQPKPPINENISAREVRLIGADGQQVGVVSIDEAIRLAEEAKLDLVEISADAVPPVCRIMDYGKHLFEKKKQAAVAKKNQKQAQVKEIKFRPGTEEGDYQVKLRNLVRFLSEGDKAKVSLRFRGREMAHQELGMELLKRVEADLVEYGTVEQHPKLEGRQLMMVIAPKKKK

SEQ ID NO: 66413 - protein, 640 aa, Pseudomonas aeruginosa
MPIITLPDGSQRSFDHPVSVAEVAQSIGAGLAKATLAGKVDGRLVDACDTIDRDATLQIITPKDEEGLEIIRHSCAHLVGHAVKQLYPTAKMVIGPVIEEGFYYDIFFERPFTPEDMAAIQQRMRELIDKDYDVIKKMTPRAEVIELFKSRGEDYKLRLIDDMPDEKAMGLYFHEEYVDMCRGPHVPNTRFLKAFQLTKISGAYWRGDSKNEQLQRIYGTAWADKKQLAAYIQRIEEAEKRDHRRIGKQLDLFHLQEEAPGMVFWHPNGWSVYQVLEQYMRKVQRDHGYVEVRTPQVVDRILWERSGHWSNYAENMFTTSSESRDYAVKPMNCPCHVQIFNQGLKSYRDLPLRLAEFGACHRNEPSGALHGIMRVRGFTQDDAHIFCTEEQVKKEAADFIKLTLQVYRDFGFTDIAMKLSTRPAKRVGSDELWDRAEGALADALNESGLAWEYQPGEGAFYGPKIEFTLKDCLGRNWQCGTLQYDPNLPERLDASYIAEDNNRKRPVMLHRAILGSFERFIGMLIEHYAGAFPAWLAPTQAVVMNITDKQADFAAEVVRILGESGFRAKSDLRNEKIGFKIREHTLLKVPYLLVIGDREVESKAVAVRTREGEDLGSMPVTQFAELLAQAVSRRGRQDSE

SEQ ID NO: 66414 - protein, 237 aa, Pseudomonas aeruginosa
MLSRLFVGLFALLLASAGQANAPRTFSEAKKIGWKLYARQSVEFYCGCRYSGNRVDLASCGYKPRKNANRARRIEWEHIVPAWVIGHQRRCWQNGGRSNCARHDSTYQRAEADLHNLVPSIGEVNGDRSNFGFGWLPQKPQQYGACPMVVDFKARKAMPRPQIRGMIARTYFYMSDRYGLRLSKQDRQLYNAWHKQYPPQTWERQRNHMVGCVMGWGNPYVGPVDLATCSNLSSRRR

SEQ ID NO: 66415 - protein, 332 aa, Pseudomonas aeruginosa
MRPEPTNAPAALSRRFSVAPMMDWTDRHCRFFLRQLSRHTLLYTEMVTTGALLHGDRQRFLRYDECEHPLALQLGGSVPAELAACARLAEEAGYDEVNLNVGCPSDRVQHNMIGACLMGHPALVADCVKAMLDAVEIAVTVKHRIGINGRDSYAELCDFVGQVREAGCRSFTVHARIAILEGLSPKENREVPPLRYEVAAQLKKDFPDLEIVLNGGIKTLEACREHLQTFDGVMLGREAYHNPYLLAAVDSQLFGSEAPPLSRSEALLRLRPYIERHQAEGGAMHHVTRHILGLAQGFPGSRRFRQLLSVDVHKAADPLRVFDQALELLAGR

SEQ ID NO: 66416 - protein, 307 aa, Pseudomonas aeruginosa
MTSKLEQLKQYTTVVADTGDFDAIARLKPVDATTNPSLLLKAAALPRYAEHLRQATAGSGGDAGLACDRFAVAVGKDILGVIPGRISTEVDARLSFDSEATLARAHRLIELYDEQGIDRERVLIKIASTWEGIRAAEILEREGIQTNLTLLFSFAQAVACADAGVFLISPFVGRIYDWYKKSENRDYAGAEDPGVQSVSRIYRYYKANGYKTVVMGASFRNLGQIEQLAGCDRLTISPDLLQQLADAQGELPRLLLPGEGEPRQVLDESAFRWQMNEDAMATEKLAEGIRLFARDQEKLEYQLATRH

SEQ ID NO: 66417 - protein, 234 aa, Pseudomonas aeruginosa
MRARGVNWIERSARILACASLALAPTLSLAASEEDPWESINRPIFTFNDTLDTYALKPLAQGYQKVTPNFVQDGVHNFFNNLGDVKNLANNLLQAKFHNAGVDTSRLLFNSTFGLAGLIDVATPMGLQRNDEDFGQTLGYWGVGSGPYVMLPFLGPSTLRDAPAKIPDIYVSPYHYMDDVRARNVMFGINTVDTRANLLKSEKLISGDKYIFIRNAYLQNREFKVKDGEVEDDF

SEQ ID NO: 66418 - protein, 239 aa, Pseudomonas aeruginosa
MPVDQSRQYLRIRDQLAADIAQGVLQVKLPSERELAERFLCTRITLREALQQLETEGLVYRENRRGWFVAPPRIRYNPTRTTGFMEYVSAQGRQPRTETLHAERRAAGAWLAKRMGLEDSAPVYFLQRRRWVDERPVLIELIALDAGWCPGLLDHDLDTSLMSLLRERFGLQPTRCQLAMHPTALNAAQAEPLQLAPGSPALYLERLSYAEGQRVVEFDQEFWRPDALEIVLDAAYPGA

SEQ ID NO: 66419 - protein, 443 aa, Pseudomonas aeruginosa
MSAGFGSRMSLGVRLSLLFAACTAAVSLIAGLIFSRAIDEHFVELDHMAMSAKLAVFRDELRGLGSEQQMRRREAELLRELARHPDLGLRLNGPDGNLWFERLPQPAHPGLPANRELGAPLEPGNDASPRLTVILDISHHQHFLQRMRQLIWLTMSLSALATALLGAWATGASLAPLRRMREVAARVSANSLTTRLDASRMPEELRGLAGELNAMLARLEEAFQRLSAFSADIAHELRTPLTSLLTQTQVVLSRPRSLEDYREALHGNLEELERLTAMVNDMLLLAKADHGLLAPSRQALDLGAEVDSLLEFYQPLAEDRDIRLLREGSLSLPGDRGMLRRVLANLLDNALRFTADGGEIRIRLGDRRLSVENQGPAIPPERLPRLFDRFYRADPARREGQGEHAGLGLAICRSIVQAHGGEIRCESADGWTRFVIDFARPRR

SEQ ID NO: 66420 - protein, 567 aa, Pseudomonas aeruginosa
MGLCGCIRGKPMTQETVGFAALGIHPNVLAAIVAVGYEEPSPIQAQSIPLILEGHDMIGQAQTGTGKTAAFALPLLSRIDPSRREPQMLVLVPTRELALQVATACETYSKQLPGVGVVAVYGGAPMGPQLKALRQGAQILVATPGRLCDHLRRDEKLLATVQRLVLDEADEMLKLGFMDDLEVIFEALPESRQTVLFSATLPASIRGIAERHLKQPKHVKIAAKTQTVARIEQVHLMVHADQKAGSIQRLLEVEQFDALIAFVRTKQATLDYAELLERQGYRAAALNGDMPQAQRERVIESLKDGSLDIVIATDVAARGLDVPRITHVLNIDMPYDPESYVHRIGRTGRAGREGRALLLVTPRERRMLQVIERVTGQKVGEVRLPDAETVLEARLARLAASLTPLLDSAVEQRGAVRDELCRRLGCDAETLAAALLARLTAGKALDLESVRREQPLTPSAPRERADRGERGERPERSGERRPMAPPSEGRARCRTALGARDGVAAKNLLGAILNEGGLSREDIGRIQIRDTFSLIELPEANLERLLTKLKDTRVAGKALRLRRYRED

SEQ ID NO: 66421 - protein, 201 aa, Pseudomonas aeruginosa
MRALLLSGCLALVLLTQQAAAQTLLVVGDSISAALGLDTSQGWVALLQKRLADEGYDYRVVNASISGDTSAGGLARLPALLAEEKPALVVIELGGNDGLRGMAPAQLQQNLASMAQKARAEGAKVLLLGIQLPPNYGPRYIEAFSRVYGAVAAQEKTALVPFFLEGVGGVQGMMQADGIHPALAAQPRLLENVWPTLKPLL

SEQ ID NO: 66422 - protein, 261 aa, Pseudomonas aeruginosa
MTRTLGSIALSLLLAAPAGAADWTGKVLRLGVDPTYPPLEYKQPDGRLAGFGIEIGEALCAELRARCEWVESNWDGIIPALLSRKIDAIVSSMTITPKRAQHIAFTDRVSNAPSRLVVRRGSALLPDAESLRGKRVGVGQGSNQEAYAKAEWAAKGVRVVSYQNQDQVYADLVMGRLDASLQGAVQASYGFLDKPVGKDFELAGAVLDDPRYFGVGDGIGLRKEDVALREDLNKALATIRANGTYARINARYFDFDLYGTP

SEQ ID NO: 66423 - protein, 229 aa, Pseudomonas aeruginosa
MFLDGFGPQILAGTLVTLKLALGSLLGAVLIGLLGASAKLAANRPLRALASGYTTLIRSVPDLVIMLLLFFSLQILLNRVTDALGIGQVDIDPFAAGCVTLAFIYGAYFTETFRGAFQAVPAGQVEAAQAYGMGRWRVFRRVLLPQMLRYALPGIGNNWQVLVKSTALVSIIGLGDLVKATQDAGKGTLQFFHFTLVCGLIYLAITAISNAALLWLERRSSLGVRRPLP

SEQ ID NO: 66424 - protein, 196 aa, Pseudomonas aeruginosa
MATRGRPRAFDRDTALQRAMDVFWVRGYEGASLAALTEAMEIRPPSLYAAFGSKEGLFREALAHYLGQHGRYRRDVLDGAPSAREGVAELLRETVARFCSDEFPRGCLVVLAALTGTPESEAVRDALSAERGESIRLFRERMRRGIADGDLAADTDVEELATFYATVLFGLSVQAKDRVPCERLLAVVERALRAWP

SEQ ID NO: 66425 - protein, 551 aa, Pseudomonas aeruginosa
MEREYMEFDVVIVGAGPAGLSAACRLKQKAAEAGQEISVCVVEKGSEVGAHILSGAVFEPRALNELFPDWKELGAPLNTPVTGDDIYVLKSAESATKVPNFFVPKTMHNEGNYIISLGNLCRWLAQQAEGLGVEIYPGFAAQEALIDENGVVRGIVTGDLGVDREGNPKEGYYTPGMELRAKYTLFAEGCRGHIGKQLIKKYNLDSEADAQHYGIGIKEIWDIDPSKHKPGLVVHTAGWPLNDENTGGSFLYHLENNQVFVGLIIDLSYSNPHLSPFDEFQRYKHHPVVKQYLEGGKRVAYGARAICKGGLNSLPKMVFPGGALIGCDLGTLNFAKIKGSHTAMKSGMLAADAIAEALAAGREGGDELSSYVDAFKASWLYDELFRSRNFGAAIHKFGAIGGGAFNFIDQNIFGGKIPVTLHDDKPDYACLKKASEAPKIDYPKPDGKLSFDKLSSVFLSNTNHEEDQPIHLKLADASIPIEKNLPLYDEPAQRYCPAGVYEVVANDDGSKRFQINAQNCVHCKTCDIKDPAQNITWVAPEGTGGPNYPNM

SEQ ID NO: 66426 - protein, 258 aa, Pseudomonas aeruginosa
MLVDSHCHLDRLDLAAHGGSLDAALDAARARGVGQFLCIGVSADNAQAVKALAERYADVHCSVGVHPLDLEPGSAPALDWLLGELAHPRVVAIGETGLDYHYEPEAAELQQEAFRLHLEAARITAKPVIVHTREARADTLALLREAALPQAGVLHCFTEDWEMARSALDLGFYISLSGIVTFRNADALREVARQVPADRLLVETDSPYLAPIPHRGKPNLPEYVRDVAEFLATLRGVSLETLAEQTTANFHRLFPLAR

SEQ ID NO: 66427 - protein, 328 aa, Pseudomonas aeruginosa
MADIYPWQQALWSQLGGRAQHAHAYLLYGPAGIGKRALAEHWAAQLLCQRPAAAGACGECKACQLLAAGTHPDYFVLEPEEAEKPIRVDQVRDLVGFVVQTAQLGGRKVVLLEPAEAMNVNAANALLKSLEEPSGDTVLLLISHQPSRLLPTIKSRCVQQACPLPGAAASLEWLARALPDEPAEALEELLALSGGSPLTAQRLHGQGVREQRAQVVEGVKKLLKQQIAASPLAESWNSVPLPLLFDWFCDWTLGILRYQLTHDEEGLGLADMRKVIQYLGDKSGQAKVLAMQDWLLQQRQKVLNKANLNRVLLLEALLVQWASLPGPG

SEQ ID NO: 66428 - protein, 210 aa, Pseudomonas aeruginosa [sequence omitted]

SEQ ID NO: 66429 - protein, 271 aa, Pseudomonas aeruginosa
MLDWVDGRPAAELSVRDRGLAYGDGLFETLAVRAGTPRLLERHLARLEEGCRRLAIPLDTAALRQELLAFCAALGDGVAKLIVTRGEGLRGYAPPAEASPRRILSGSPRPAYPERHWQQGVRLFACRTRLAEQPLLAGLKHLNRLEQVLARAEWSDAGHAEGLMLDVHERVVEGVFSNLLLVLDGTLVAPDLRRCGVAGVMRAELLERAEGIGVPLAIRDVSMAELATADEVFLCNSQFGIWPVRALDEHVWPVGELTRKLQDQLRDDLDF

SEQ ID NO: 66430 - protein, 414 aa, Pseudomonas aeruginosa
MSRRRVVITGMGMLSPLGLDVPSSWEGILAGRSGIAPIEHMDLSAYSTRFGGSVKGFNVEEYLSAKEARKLDLFIQYGLAASFQAVRDSGLEVTDANRERIGVSMGSGIGGLTNIENNCRSLFEQGPRRISPFFVPGSIINMVSGFLSIHLGLQGPNYALTTACTTGTHSIGMAARNIAYGEADVMVAGGSEMAACGLGLGGFGAARALSTRNDEPTRASRPWDRDRDGFVLSDGSGALVLEELEHARARGARIYAELVGFGMSGDAFHMTAPPEDGAGAARCMKNALRDAGLDPRQVDYINAHGTSTPAGDIAEIAAVKSVFGEHAHALSMSSTKSMTGHLLGAAGAVEAIFSVLALRDQVAPPTINLDNPDEGCDLDLVAHEAKPRKIDVALSNSFGFGGTNGTLVFRRFAD

SEQ ID NO: 66431 - protein, 78 aa, Pseudomonas aeruginosa
MSTIEERVKKIVAEQLGVKEEEVTNSASFVEDLGADSLDTVELVMALEEEFETEIPDEKAEKITTVQEAIDYIVAHQQ

SEQ ID NO: 66432 - protein, 247 aa, Pseudomonas aeruginosa
MSLQGKVALVTGASRGIGQAIALELGRLGAVVIGTATSASGAEKIAETLKANGVEGAGLVLDVSSDESVAATLEHIQQHLGQPLIVVNNAGITRDNLLVRMKDDEWFDVVNTNLNSLYRLSKAVLRGMTKARWGRIINIGSVVGAMGNAGQTNYAAAKAGLEGFTRALAREVGSRAITVNAVAPGFIDTDMTRELPEAQREALLGQIPLGRLGQAEEIAKVVGFLASDGAAYVTGATVPVNGGMYMS

SEQ ID NO: 66433 - protein, 312 aa, Pseudomonas aeruginosa
MSASLAFVFPGQGSQSLGMLAELGAQQALVRDTFAEASEALGYDLWALVQNGPEERLNQTDKTQPAILTVSIALWRLWLAEGGARPAFVAGHSLGEYSALVAAESLAFADAVKLVERRGQLMQQAVPAGQGGMAAILGLEDADVLAACAEAAQGEVVSAVNFNAPGQVVIAGAAAAVERAIEACKARGAKRAVALPVSVPSHCELMRPAAEQFAASVESLQWQAPKISLVQNVSAAVPADLDTLRRDLLAQLYSPVRWVESIQLLAEKGVTELVECGPGKVLAGLNRRCAKGINTHGLDGVEAFAATRAALA

SEQ ID NO: 66434 - protein, 192 aa, Pseudomonas aeruginosa
MPDLILASSSPYRRELLTRLRLPFESASPDIDESHRAGESAEELVRRLSASKAEALAGRYPQHLVIGSDQVAVLDGNILGKPHTPERAIQQLRDASGKSVTFLTGLALLNSASRRIQVACVPFTVHFRHLDESRIRRYVEAERPLDCAGSFKAEGLGVSLFRSTEGEDATSLVGLPLIRLVDMLLEEGVEIP

SEQ ID NO: 66435 - protein, 1057 aa, Pseudomonas aeruginosa
MKRMLINATQPEELRVALVDGQRLFDLDIESGAREQKKANIYKGRITRVEPSLEAAFVDFGAERHGFLPLKEISREYFKKSPEGRINIKEVLSEGQEVIVQVEKEERGNKGAALTTFISLAGRYLVLMPNNPRAGGISRRIEGEERNELREALNGLNAPADMGLIVRTAGLGRSTEELQWDLDYLLQLWSAIKEASGERGAPFLIYQESNVIIRAIRDYLRQDIGEVLIDSIDAQEEALNFIRQVMPQYASKVKLYQDSVPLFNRFQIESQIETAFQREVKLPSGGSIVIDPTEALVSIDINSARATKGGDIEETALQTNLEAAEEIARQLRLRDIGGLIVIDFIDMTPAKNQRAVEERVREALEADRARVQVGRISRFGLLEMSRQRLRPSLGETSGIVCPRCNGQGIIRDVESLSLAILRLIEEEALKDRTAEVRARVPFQVAAFLLNEKRNAITKIELRTRARIFILPDDHLETPHFEVQRLRDDSPELVAGQTSYEMATVEHEEAQPVSSTRTLVRQEAAVKTVAPQQPAPQHTEAPVEPAKPMPEPSLFQGLVKSLVGLFAGKDQPAAKPAETSKPAAERQTRQDERRNGRQQNRRRDGRDGNRRDEERKPREERAERQPREERAERPNREERSERRREERAERPAREERQPREGREERAERTPREERQPREGREGREERSERRREERAERPAREERQPREGREERAERPAREERQPREDRQARDAAALEAEALPNDESLEQDEQDDTDGERPRRRSRGQRRRSNRRERQREVSGELEGSEATDNAAAPLNTVAAAAAAGIAVASEAVEANVEQAPATTSEAASETTASDETDASTSEAVETQGADSEANTGETADIEAPVTVSVVRDEADQSTLLVAQATEEAPFASESVESREDAESAVQPATEAAEEVAAPVPVEVAAPSEPAATEEPTPAIAAVPANATGRALNDPREKRRLQREAERLAREAAAAAEAAAQAAPAVEEIPAVASEEASAQEEPAAPQAEEITQADVPSQADEAQEAVQAEPEASGEGAADTEHAKKTEESETSRPHA

SEQ ID NO: 66436 - protein, 339 aa, Pseudomonas aeruginosa
MSLELQEHCSLKPYNTFGIDVRARLLAHARDEADVREALALARERGLPLLVIGGGSNLLLTRDVEALVLRMASQGRRIVSDAADSVLVEAEAGEAWDPFVQWSLERGLAGLENLSLIPGTVGAAPMQNIGAYGVELKDVFDSLTALDRQDGTLREFDRQACRFGYRDSLFKQEPDRWLILRVRLRLTRRERLHLDYGPVRQRLEEEGIASPTARDVSRVICAIRREKLPDPAVLGNAGSFFKNPLVDATQAERLRQAFPDLVGYPQADGRLKLAAGWLIDKGGWKGFRDGPVGVHAQQALVLVNHGGATGAQVRALAERIQEDVRRRFGVELEPEPNLY

SEQ ID NO: 66437 - protein, 154 aa, Pseudomonas aeruginosa
MRVLFVCLGNICRSPTAEGVFRRKVEEAGLASRIHVDSAGTAGWHVGKAPDQRTRLAAQRRGYDLSALRGRQVGIEDFSRHDLILAMDLSNLADLETLRAGRGAAELDLFLRRYGSERDEVPDPYYGGEEGFEQVLDLIEHACDRLLIEAKGRL

SEQ ID NO: 66438 - protein, 240 aa, Pseudomonas aeruginosa
MTLIYGHRGAKGEAPENTLASFQRCLEHGVNRCELDLHLSRDGELMVIHDPTLKRTTGRRGKVAEHDAATLATYDARKGGPGWVRPTPIPRLEELFEKCPFEHWQLEVKSASRERAARTVTRIRELTERFGNRDKVTVTSGSRTVLKALNELTPELSRGLVAEYAWLDPLKVAQHYGCALLALNWTLCTPERLLKAQRQGLHVSVWTVNEPALMRRLADFGVDSLITDFPGLASATLGNR

SEQ ID NO: 66439 - protein, 1148 aa, Pseudomonas aeruginosa
MSVLRLPSLPASAGKQHWGNLPGAALSLAVAEAASSAKRFTLLLTADSQNAERLEQELRFFAPDLPVLHFPDWETLPYDVFSPHQDIISQRIAALYQLPQLKHGVLVVPISTALHRLAPTRFLLGSSLVLDVGQKLDVERMRLRLEGAGYRCVDTVYEHGEFAVRGALIDLFPMGSELPFRIDLFDDEIETLRTFDPETQRSIDKVESIRLLPAREFPLNKEAVTGFRGRFRERFDVDYRRCPIYQDLASGLTPSGIEYYLPLFFEETATLFDYLPQDTQVFSLPGIEQAAEQFWNDVRSRYEDRRVDPERPLLPPAEVFLPVEDCFARLKNWPRVVASQEDVEPGVGRERFPALPLPNLAIEAKAAEPLAALRRFIEEFPGRVLFCAESAGRREVLLELLARLKLRPEEVDGWPAFLASQARLAISIAPLDEGLLLDHPALALVAESPLFGQRVMQRRRREKTRDGGDAVIKNLTELREGAPVVHIDHGVGRYLGLITLEVDNQQAEFLMLQYAEDAKLYVPVANLHLIARYTGADDALAPLHRLGSETWQKAKRKAAEQVRDVAAELLDIYARRAAREGFAFKDPQADYATFSAGFPFEETPDQQSAIEAVVADMLAPRPMDRLVCGDVGFGKTEVAMRAAFVAVHSGKQVAVLVPTTLLAQQHYNSFRDRFADWPVSVEVMSRFKSAKEVENAARLLAEGKIDILIGTHKLLQEDVKFANLGLVVIDEEHRFGVRQKEQLKALRSEVDILTLTATPIPRTLNMAVSGMRDLSIIATPPARRLSVRTFVMEQQNAVIKEALLRELLRGGQVYYLHNEVKTIEKCARDLAELVPEARIGIGHGQMHERELEQVMSDFYHKRFNVLVASTIIETGIDVPSANTILIERADKFGLAQLHQLRGRVGRSHHQAYAYLLTPPRRQMTPDAEKRLEAIANAQDLGAGFVLATHDLEIRGAGELLGDGQSGQIQAVGFTLYMEMLERAVKAIRKGEQPNLEQPLGGGPEVNLRVPALIPEDYLPDVHARLILYKRIANAPDEEGLRELQVEMIDRFGLLPDPAKNLMRLTLLKLQAEKLGILKVDAGPQGGRIEFAADTQVDPLVLIKLIQGQPNRYKFEGATLFRFQVPMERPEERFNTLEALFERLTPQTT

SEQ ID NO: 66440 - protein, 715 aa, Pseudomonas aeruginosa
MIYQGKAITVKPLEGGIVELNFDLKGESVNKFNRLTLSELRAAVDAIKADASVKGVIVTSGKDVFIVGADITEFVDNFQLPDEELMAGNLEANKIFSDFEDLDVPTVAAINGIALGGGLEMCLAADFRVMSATAKVGLPEVKLGIYPGFGGTVRLPRLIGCDNAVEWIASGKENKAEDALKVGAVDAVVAPEQLQAAALDLAKRAVAGELDHKARRQPKLEKLKLNAIEQMMAFETAKGFVAGQAGPNYPAPVEAIKSIQKAANFGRDKALEVEAAGFVKLAKTSVAQSLIGLFLNDQELKKKAKKYDEVAKDVKLAAVLGAGIMGGGIAYQSALKGTPILMKDIREEGIQMGLNEAAKLLGKRVEKGRLTPAKMAEALNGIRPTMSYGDFGNVDIVVEAVVENPKVKQAVLAEVEGAVKEDAIIASNTSTISISLLAQALKRPENFCGMHFFNPVHMMPLVEVIRGEKTGETAIATTVAYAKKMGKSPIVVNDCPGFLVNRVLFPYFGGFAKLLSFGVDFVRIDKVMEKFGWPMGPAYLSDVVGIDTGHHGRDVMAEGFPDRMAVEGKTAVDVMYEANRLGQKNGKGFYAYETDKRGKPKKVTDPQAYEVLKPIVVEQREVTDEDIVNFMMIPLCLETVRCLEDGIVETAAEADMGLIYGIGFPPFRGGALRYIDSIGVAEFVALADKYAELGALYHPTAKLREMAKNGQKFFG

SEQ ID NO: 66441 - protein, 302 aa, Pseudomonas aeruginosa
MDKDKVLLVLHGKQAGNEEVRAAVAAQREAGRELAVRVTWEDGDARRIVEEALAAGYATLVAGGGDGTLREVAEALARGRGEASLAILPLGTANDFARAAGIPLEPAAALALLDQTARPIDLGEVNGKLFLNMATGGFGSKVTANTSEDLKKVLGGAAYLLTGLTRFSEVHAAQGRFSAPDFQWEGEFLALGIGNGRQAGGGHVLCPQARVDDGLLDVSILPTPQDMVGTLGTLLGGGNGVESLFVRARVPWLEVEAAEGLDVNLDGEPLEGRKLRFSVSPGALRVHLPAGSPLLREPPRED

SEQ ID NO: 66442 - protein, 405 aa, Pseudomonas aeruginosa
MSGCCEQPGLMPVETALERLLELAAQTPIDTCEQVPLEQAGGRVLAVDLLAGLDLPPWPNSAMDGYALRLADWNGEPLPVSQKIFAGQAPKPLQAGTCARIFTGAPLPEGADLVEMQENAEALDDGRVRFTQPLRVGQHVRPRGQEIRQGDLVLPAGTRLRSIELGLAASLGYAALEVRRKPRVALLSTGDELVEAGQPLQAGQIYNSNRPLLKDWLQRLGCDVLDAGILPDDLARTRERLAGLAGVDLILSTGGVSVGEADFLGMALREAGELTLWKLAIKPGKPLTVGQFQGIPVIGLPGNPASTLVTFALLARPYLLRRLGVAQVAPLRVEVPAGFAWTKAGQRREYLRGRLEQGRAVLYPNQSSGVLRSASWAEGLVEVREGRTLVEGEGVAFIPLSELLD

SEQ ID NO: 66443 - protein, 179 aa, Pseudomonas aeruginosa
MSHKAETAFVPLNIAVLTVSDTRTLETDTSGQLFVDRLTEAGHNLAARVLLKDDLYRIRAQVATWIAEDSVQVVLITGGTGFTGRDSTPEAVACLLDKQVDGFGELFRQISLADIGTSTIQSRALAGLSNGTLVCCLPGSTNACRTAWEGILVEQLDARHRPCNFVPHLKQAAPCESRG

SEQ ID NO: 66444 - protein, 185 aa, Pseudomonas aeruginosa
MTSRKREQLLSTAVDLFYREGYHATGIDRILAESGVAKMTLYKHFRSKDELIMAALEVRRQRTAERMLEAEARLQPRAAILAVFDGLQEFLQDEAFRGCAFIHAAAEFHERSHPIHRQAAEQKAFVEAYFQRQLERLGVRSAALLARQLQYLMEGALVMAHIHGPADQAREARQAAESLLQVAGI

SEQ ID NO: 66445 - protein, 741 aa, Pseudomonas aeruginosa
MKFQKRSACMLGLLLIFACMAGYAVPARATAGEYSSMLRIPAPDRPGDADVVDEAPLRQAADGLRSPSPSSLVLGLLVACLVCVGCLGWNTVLQLRLRRWQRTEADLSGRLALKQALVDGIPYPVSIRTLDGRLLACNRNYLESLRMTREQARGTLLTDSDWVEGSKARLMHQQCLAVARGGTASFTDMAVRIGGQLLEIHHWVTPYRDRQGRVLGLMNGWIDITERERLARQLREAMRQADEANRAKSVFLATMSHEIRTPMNAVIGILELVLQRLAPEQRERASLEVAYEAAGSLQLLIGDILDVAKIESGHLTLTPERVRLRHVVESVRRMFEGLARQKGLRLVVELDDAPGRDVLIDPLRFKQVLSNLVSNAIKFTERGQVTIRLQERSLDEGRAIVRVDVEDSGIGIAPADQARLFQPFIQVAKGRTVQGGTGLGLAICRKLVDLMGGDVEMHSEPGKGTRVSLDLLLRQCGPKMPESGQDPLAASMEPSRRLHILIADDYPPNRVLLRQQLEFLGHRVAEAEDGQVALELWADERFEVLISDCNMPRLNGYQLARRIRIQERCERRAPILILGYTADAEPDEVQRCRDAGMDDCLFKPLGLETLRNYLATSFGRDAAQPRGLYDAAALSSLGGDRPERLRELLETLLGSNRQDLQRLAILLREGDRTRLAEHAHRIKGAARMIGARTLLEACEALEDACRRSGDGECLQAPGERLRLALEALQEELQEQLAGAAV

SEQ ID NO: 66446 - protein, 885 aa, Pseudomonas aeruginosa
MRTEQPKVIHLKDYQAPDYLIDETHLKFELFEDHSLVHAELKLRRNPERGAGLPPLLLHGQQLELLALELDGQALGADDYQLDDEQLGVQPRQAEFVLRSTVRIHPESNTALEGLYKSGKMFCTQCEAEGFRKITYYLDRPDVMSRFTTTVSAEQQRYPVLLSNGNPVASGSEGNGRHWATWEDPFKKPAYLFALVAGDLWCVEDSFRTMSQRDVALRIYVEPENIDKVQHAMDSLKKSMRWDEEVYGREYDLDIFMIVAVNDFNMGAMENKGLNIFNSSCVLARAETATDAAHQRVEGVVAHEYFHNWSGNRVTCRDWFQLSLKEGFTVFRDSEFSADMNSRTVKRVEDVAFLRTNQFAEDAGPMAHPVRPDSFIEISNFYTLTVYEKGSEVVRMIHTLLGAEGFRKGSDLYFQRHDGQAVTCDDFVKAMEDANGVDLTQFKRWYSQSGTPRLAVEGEYDAAARRYTLTVRQSCPPTPGQPSKEPFVIPLELGLLDGQGHELPLRLEGEAVAQGGNRVLAVTEAEQRFVFVEVPEQPLPSLLRGFSAPVKLSFPYSRDQLLFLMQHDSDGFNRWEAGQQLSVQVLQELIGQHQRGEQLVLDPRLIEAYRTLLADEALDQAMVAEMLSLPSEAYLTEISEVADVDAIHAAREFARQRIGEALFEPLWQRYQANRKISRDTAYLAEASHIARRSLQNIALSYLSLSGREEILAACLEQYEGCDNMTERLTALAVLVNSGFEAEKGKALAMFADYFKDDPLVMDQWFSVQAGSPLPGGLERVQELMQHPAFTLKNPNKVRALIGAFANQNLVNFHRPDGAGYRFLADQVIVLNALNPQIASRLLVPLTRWRKYDEARQALMRGELERILASGELSSDVYEVVSKSLA

SEQ ID NO: 66447 - protein, 295 aa, Pseudomonas aeruginosa
MEPFRNIGIIGRLGSTQVLDTIRRLKKFLIDRHLHVILEDTIAEVLPGHGLQTCSRKIMGEICDLVVVVGGDGSMLGAARALARHKVPVLGINRGSLGFLTDIRPDELEAKVGEVLDGQYIVESRFLLDAQVRRGIDSMGQGDALNDVVLHPGKSTRMIEFELYIDGQFVCSQKADGLIVATPTGSTAYALSAGGPIMHPKLDAIVIVPMYPHMLSSRPIVVDGNSELKIVVSPNMQIYPQVSCDGQNHFTCAPGDTVTISKKPQKLRLIHPIDHNYYEICRTKLGWGSRLGGGD

SEQ ID NO: 66448 - protein, 235 aa, Pseudomonas aeruginosa
MIPRRSSDITIKTRSDVLPFSGASSRWLQRYAPALLAVALIIAMSISLAWQAAGWLRLQRSPVAVAASPVSHESIRSDPTRLARLFGTSAQDPNAPPPATNLDLVLKGSFVQSDPKLSSAIIQRQGDKPHRYAVGGEISDGVKLHAVYRDRVELQRGGRLESLPFPHRSGGLLASADDITSENDSIEQLQSLQDENAAALRERLDALRQQMEATPIAEPAEEDSSEPTTTPTESD

SEQ ID NO: 66449 - protein, 658 aa, Pseudomonas aeruginosa
MSQPLLRALFAPSSRSYVPAVLLSLALGIQAAHAENSGGNAFVPAGNQQEAHWTINLKDADIREFIDQISEITGETFVVDPRVKGQVSVVSKAQLSLSEVYQLFLSVMSTHGFTVVAQGDQARIVPNAEAKTEAGGGQSAPDRLETRVIQVQQSPVSELIPLIRPLVPQYGHLAAVPSANALIISDRSANIARIEDVIRQLDQKGSHDYSVINLRYGWVMDAAEVLNNAMSRGQAKGAAGAQVIADARTNRLIILGPPQARAKLVQLAQSLDTPTARSANTRVIRLRHNDAKTLAETLGQISEGMKNNGGQGGEQTGGGRPSNILIRADESTNALVLLADPDTVNALEDIVRQLDVPRAQVLVEAAIVEISGDIQDAVGVQWAINKGGMGGTKTNFANTGLSIGTLLQSLESNKAPESIPDGAIVGIGSSSFGALVTALSANTKSNLLSTPSLLTLDNQKAEILVGQNVPFQTGSYTTNSEGSSNPFTTVERKDIGVSLKVTPHINDGAALRLEIEQEISALLPNAQQRNNTDLITSKRSIKSTILAENGQVIVIGGLIQDDVSQAESKVPLLGDIPLLGRLFRSTKDTHTKRNLMVFLRPTVVRDSAGLAALSGKKYSDIRVIDGTRGPEGRPSILPTNANQLFDGQAVDLRELMTE

SEQ ID NO: 66450 - protein, 290 aa, Pseudomonas aeruginosa
MSNWLVDKLIPSIMRSESQKSSVPEGLWHKCPSCEAVLYRPELEKTLDVCPKCDHHMRINARTRLDIFLDEDGREELGADLEPVDRLKFRDSKKYKDRLAAAQKDTGEKDALIAMSGKLQGMPVVACAFEFSFMGGSMGAIVGERFVRAANVALEKRCPLICFSASGGARMQEALISLMQMAKTSAVLARLREEGIPFVSVLTDPVYGGVSASLAMLGDVIVGEPKALIGFAGPRVIEQTVREKLPEGFQRSEFLLEHGAIDMIVHRAELRPRLANLLSAFTHSPSPVSA

SEQ ID NO: 66451 - protein, 919 aa, Pseudomonas aeruginosa
MVRLRTLVRAIAAASVLTSGMAHGLGLGEITLKSALNQPLDAEIELLEVRDLGSGEVIPSLASPEEFSKAGVDRLYYLTDLKFTPVVKPNGKSVIRVTSSKPVQEPYLNFLVQVLWPNGRLLREYTVLLDPPLYSPQAAASAPQAPVSAPRATGAPRAPQAPAPVRTTAPAGSDTYRTVSNDTLWEIAQRNRTDRVSVPQAMLAFQELNPGAFVDGNINRLKSGQVLRIPTEQQMLERSPREALSQVQAQNQSWRGSRNPAAGSAGARQLDATQRNAAGSAPSKVDATDNLRLVSGEGKASKGADKGGKGDSKAIADTLAVTKESLDSTRRENEELQSRMQDLQSQLDKLQKLIQLKDAQLAKLQGQLGAEGQGAAQPNAALPDASQPNAAAQAPAQPGTPAAAAPTPAPAGEAPAAPAQPPVAPPPAPAAEKPPAPAVPAPAPVQAAEQPAPSFLDELLANPLWLAVIGGSALLALLVLLMILSRRNAQKEKEEAQAFAADTGEEQEDALDLGKDGFDDLTLDEPEPQVAAVAPQVEKTTAQTSDALGEADIYIAYGRFNQAAELLQNAIYDEPQRTDLRLKLMEVYAEMGDREGFARQENELREIGGAQPQVEQLKSRYPAMVAVAAVAGLAGAKLAQDELDSFSLDDLSLDDSGHAAKPDAAGQDLDDAFDLSLDDLGGDDVQADLKSDSGALDDLTLDSDLDLAASTPADKPVDDLDFGLDFAELAETPSQPKHDDLGDFSLDLDAPEDKLSDDDFLLSLNDEVPAAAPADNEFTLDTEAAEEPALSLPDDFDLSLADEPTEPAAPEKGEDSFAAQLDEVSAQLDELASNLDEPKSATPSFSAEDAAVASALDGDADDDFDFLSGADEAATKLDLARAYIDMGDSEGARDILDEVLAEGNDSQQAEARELLERLA

SEQ ID NO: 66452 - protein, 336 aa, Pseudomonas aeruginosa
MSQPLNVAVVGATGSVGEALVGLLDERDFPLHRLHLLASAESAGQRMGFAESSLRVGDVDSFDFSSVGLAFFAAAAEVSRAHAERARAAGCSVIDLSGALEPSVAPPVMVSVNAERLASQAAPFLLSSPCAVAAELCEVLAPLLATLDCRQLNLTACLSVSSLGREGVKELARQTAELLNARPLEPRLFDRQIAFNLLAQVGAVDAEGHSAIERRIFAEVQALLGERIGPLNVTCIQAPVFFGDSLSVTLQCAEPVDLAAVTRVLDATKGIEWVGEGDYPTVVGDALGQDETYVGRVRAGQADPCQVNLWIVSDNVRKGAALNAVLLGELLIKHYL

SEQ ID NO: 66453 - protein, 494 aa, Pseudomonas aeruginosa
MTTVRTRIAPSPTGDPHVGTAYIALFNLCFARQHGGQFILRIEDTDQLRSTRESEQQIYDALRWLGIEWDEGPDVGGPHGPYRQSERGHIYKKYSDELVEKGHAFTCFCTPERLDAVRAEQMARKETPRYDGHCMHLPKDEVQRRLAAGESHVTRMKVPTEGVCVVPDMLRGDVEIPWDRMDMQVLMKADGLPTYFLANVVDDHLMGITHVLRGEEWLPSAPKLIKLYEYFGWEQPQLCYMPLLRNPDKSKLSKRKNPTSITFYERMGYLPQALLNYLGRMGWSMPDEREKFTLAEMIEHFDLSRVSLGGPIFDLEKLSWLNGQWIREQSVEEFAREVQKWALNPEYLMKIAPHVQGRVENFSQIAPLAGFFFSGGVPLDASLFEHKKLDPTQVRQVLQLVLWKLESLRQWEKERITGCIQAVAEHLQLKLRDVMPLMFPAITGHASSVSVLDAMEILGADLSRYRLRQALELLGGASKKETKEWEKIRDAIPG

SEQ ID NO: 66454 - protein, 665 aa, Pseudomonas aeruginosa
MLDNLRIKLLGLPRRYKRMLQVAADVTLVWLSLWLAFLVRLGTEDMISPFSGHAWLFIAAPLVAIPLFIRFGMYRAVMRYLGNDALIAIAKAVTISALVLSLLVYWYRSPPAVVPRSLVFNYWWLSMLLIGGLRLAMRQYFMGDWYSAVQSVPFLNRQDGLPRVAIYGAGAAGNQLVAALRLGRAMRPVAFIDDDKQIANRVIAGLRVYTAKHIRQMIDETGAQEVLLAIPSATRARRREILESLEPFPLHVRSMPGFMDLASGRVKVDDLQEVDIADLLGRDSVAPRKELLERCIRGQVVMVTGAGGSIGSELCRQIMSCSPSVLILFEHSEYNLYSIHQELERRIKRESLSVNLLPILGSVRNPERLVDVMRTWKVNTVYHAAAYKHVPIVEHNIAEGVLNNVIGTLHAVQAAVQVGVQNFVLISTDKAVRPTNVMGSTKRLAEMVLQALSNESAPVLFGDRKDVHHVNKTRFTMVRFGNVLGSSGSVIPLFREQIKRGGPVTVTHPSITRYFMTIPEAAQLVIQAGSMGQGGDVFVLDMGPPVKILELAEKMIHLSGLSVRSERSPHGDIAIEFSGLRPGEKLYEELLIGDNVNPTDHPMIMRANEEHLSWEAFKVVLEQLLAAVEKDDYSRVRQLLRETVSGYAPDGEIVDWIYRQRRREP

SEQ ID NO: 66455 - protein, 354 aa, Pseudomonas aeruginosa
MKILTIIGARPQFIKASVVSKAIIEQQTLSEIIVHTGQHFDANMSEIFFEQLGIPKPDYQLDIHGGTHGQMTGRMLMEIEDVILKEKPHRVLVYGDTNSTLAGALAASKLHVPIAHIEAGLRSFNMRMPEEINRILTDQVSDILFCPTRVAIDNLKNEGFERKAAKIVNVGDVMQDSALFFAQRATSPIGLASQDGFILATLHRAENTDDPVRLTSIVEALNEIQINVAPVVLPLHPRTRGVIERLGLKLEVQVIDPVGYLEMIWLLQRSGLVLTDSGGVQKEAFFFGKPCVTMRDQTEWVELVTCGANVLVGAARDMIVESARTSLGKTIQDDGQLYGGGQASSRIAEYLAKL

SEQ ID NO: 66456 - protein, 629 aa, Pseudomonas aeruginosa
MSSSSSKLLNGMVAVSSGRNIRLDVQGLRAVAVLAVLAYHANSAWLRAGFVGVDVFFVISGFIITALLVERGVKVDLVEFYAGRIKRIFPAYFVMLAIVCIVSTILFLPDDYVFFEKSLQSSVFFSSNHYFANFGSYFAPRAEELPLLHTWSLAIEMQFYLFYPVLFMCLPCRWRLPVFILLAILLFIWSGYCVFSGSQDAQYFALLARVPEFMSGAVVALSLRDRELPARLAILAGLLGAALLVCSFIIIDKQHFPGFWSLLPCLGAALLIAARRGPASLLLASRPMVWIGGISYSLYLWHWPILAFIRYYTGQYELSFVALLAFLTGSFLLAWFSYRYIETPARKAVGLRQQALKWMLAASVVAIVVTGGAQFNVLVVAPAPIQLTRYAVPESICHGVQVGECKRGSVNAVPRVLVIGDSHAAQLNYFFDVVGNESGVAYRVLTGSSCVPIPAFDLERLPRWARKPCQAQIDAVAQSMLNFDKIIVAGMWQYQMQSPAFAQAMRAFLVDTSYAGKQVVLLGQIPMFESNVQRVRRFRELGLSAPLVSSSWQGANQLLRALAEGIPNVRFMDFSTSAFFADAPYQDGELIYQDSHHLNEVGARRYGYFASRQLQRLFEQPQSSVSLKP

SEQ ID NO: 66457 - protein, 559 aa, Pseudomonas aeruginosa
MSESFAELFEESLKSLDMQPGAIITGIVVDIDGDWVTVHAGLKSEGVIPVEQFYNEQGELTIKVGDEVHVALDAVEDGFGETKLSREKAKRAESWIVLEAAFAADEVVKGVINGKVKGGFTVDVNGIRAFLPGSLVDVRPVRDTTHLEGKELEFKVIKLDQKRNNVVVSRRSVLEAENSAEREALLESLQEGQQVKGIVKNLTDYGAFVDLGGVDGLLHITDMAWKRIKHPSEIVNVGDEIDVKVLKFDRERNRVSLGLKQLGEDPWVAIKARYPEGTRVMARVTNLTDYGCFAELEEGVEGLVHVSEMDWTNKNIHPSKVVQVGDEVEVQVLDIDEERRRISLGIKQCKSNPWEDFSSQFNKGDRISGTIKSITDFGIFIGLDGGIDGLVHLSDISWNEVGEEAVRRFKKGDELETVILSVDPERERISLGIKQLEDDPFSNYASLHEKGSIVRGTVKEVDAKGAVISLGDDIEGILKASEISRDRVEDARNVLKEGEEVEAKIISIDRKSRVISLSVKSKDVDDEKDAMKELRKQEVESAGPTTIGDLIRAQMENQG

SEQ ID NO: 66458 - protein, 229 aa, Pseudomonas aeruginosa
MNGAVPMLAIDGPSGAGKGTVAGLLARRLGWNLLDSGALYRLLAFAAVNHGVDLTNEEALKVLAAHLDVQFVAADGSHGQRIILEGEEVTDVIRTEQVGAGASQVAALPAVRDALLQRQRAFREAPGLVADGRDMGTVVFPDAPLKIFLTASAEERARRRYLQLKAKGADVDQSALLEEIRERDERDSQRAVAPLKPADDAILLDSTEMSIEAVVETIIRHCERQGWDV

SEQ ID NO: 66459 - protein, 923 aa, Pseudomonas aeruginosa
MGELAKEILPVNIEDELKQSYLDYAMSVIVGRALPDARDGLKPVHRRVLYAMSELGNDWNKPYKKSARVVGDVIGKYHPHGDTAVYDTIVRMAQPFSLRYMLVDGQGNFGSVDGDNAAAMRYTEVRMAKLAHELLADLEKETVDWVPNYDGTEQIPAVMPTKIPNLLVNGSSGIAVGMATNIPPHNLGEVIDGCLALMDNPDLTVDELMQYIPGPDFPTAGIINGRAGIIEAYRTGRGRIYIRARAVVEEMEKGGGREQIIITELPYQLNKARLIEKIAELVKEKKIEGISELRDESDKDGMRVVIELRRGEVGEVVLNNLYAQTQLQSVFGINVVALVDGQPRTLNLKDMLEVFVRHRREVVTRRTVYELRKARERGHILEGQAVALSNIDPVIELIKSSPTPAEAKERLIATAWESSAVEAMVERAGADACRPEDLDPQYGLRDGKYYLSPEQAQAILELRLHRLTGLEHEKLLSEYQEILNLIGELIRILTNPARLMEVIREELEAVKAEFGDARRTEIVASQVDLTIADLITEEDRVVTISHGGYAKSQPLAAYQAQRRGGKGKSATGMKDEDYIEHLLVANSHATLLLFSSKGKVYWLRTFEIPEASRTARGRPLVNLLPLDEGERITAMLQIDLEALQQNGGADDDLDEAEGAVLEGEVVEAAEVEEVEGETAELVAEPTGAYIFMATAFGTVKKTPLVQFSRPRSSGLIALKLEEGDTLIAAAITDGAKEVMLFSSAGKVIRFAESVVRIMGRNARGVRGMRLGKGQQLISMLIPESGAQILTASERGFGKRTPLSKFPRRGRGGQGVIAMVTNERNGALIAAVQVQEGEEIMLISDQGTLVRTRVDEVSLSGRNTQGVTLIKLASDEVLVGLERVQEPSGGDDEDLPEGEEAAESLGESAESESEPAAEAEGNEE

SEQ ID NO: 66460 - protein, 386 aa, Pseudomonas aeruginosa
MNDTPENPHVPVGEKLQKVLARLGVGSRRDVEVWIAEGRVNVNGSVASLGQRVDSHDAITVDGHLIRREEAAESVRRVLIYNKPEGEVCTRDDPEGRPTIFDRLPRLRTGRWINVGRLDINTTGLLLFTTDGELANRLMHPSYEMDREYAVRVRGEVTEEMIERLLNGVMLEDGPAKFSDIQQAPGGEGFNHWYHCVVMEGRNREVRRLWESQGLVVSRLKRVRFGPVFLTSELTMGRYREMDQREIDILSEEVGLKPVALPGMTTKAREKAERQQRKQARPLARSERPEAGRKRAPRREDGENAARRAPASRPARGPQPSAERKGREQGTPVAERPRESNRKPRPSKPRDERPASAPGDKPAARKPQVKRRPKPAGDGMRPGFRR

SEQ ID NO: 66461 - protein, 334 aa, Pseudomonas aeruginosa
MTIRLAINGFGRIGRNVLRALYTGHYREQLQVVAINDLGDAAVNAHLFQYDSVHGHFPGEVEHDAESLRVMGDRIAVSAIRNPAELPWKSLGVDIVLECTGLFTSRDKAAAHLQAGAGKVLISAPGKDVEATVVYGVNHEVLRASHRIVSNASCTTNCLAPVAQVLHRELGIEHGLMTTIHAYTNDQNLSDVYHPDLYRARSATQSMIPTKTGAAEAVGLVLPELAGKLTGLAVRVPVINVSLVDLTVQVARDTSVDEVNRLLREASEGSPVLGYNTQPLVSVDFNHDPRSSIFDANHTKVSGRLVKAMAWYDNEWGFSNRMLDSALALAAARD

SEQ ID NO: 66462 - protein, 195 aa, Pseudomonas aeruginosa
MKQFIDFIPLILFFIVYKIDPQNVEFAGFNLSGIYGATATLILASVIVYGALWLKHRHLEKSQWFTLGACLVLGGLTLAFHEDTFLKWKAPLVNWLFALAFAGSHFIGDKPMIQRIMGHAIQLPQGLWVRLNIAWVVFFLVCGFANLYVVFTYPNFWVDFKVFGSLGMTLLFLIGQGLFLARHLHDADTGEKPKD

SEQ ID NO: 66463 - protein, 146 aa, Pseudomonas aeruginosa
MRKTLTALFIAAALPTFAMAAPAANDLPPPPMEGGHMMGQHGPRHGGPMKELDLTREQRQQMGKLMGEQMKARHEITQRYLAKLPAAEQKALKDELKASHEKTQKDIRALLTPEQQKKFDELQKKREQRKAEWAEFQQWKADKKSN

SEQ ID NO: 66464 - protein, 186 aa, Pseudomonas aeruginosa
MEALDALLTRVSHARLSDPAPSPEQLDRLFRVALRAPDHGQLRPWRFILVEGEGRRALGDLYARALASRQPDAAEEALAKARNMPLRAPLLVVAVACLQDHPKVPHAEQLLAAGCAAHGLVLGAYAQGLGAMWRTGEMATDPVVHAGLGLGEQERIIGFVYLGTPMGELRTPAELDPTAFVSAWPG

SEQ ID NO: 66465 - protein, 484 aa, Pseudomonas aeruginosa
MALPTLRILGFIIGIFLITLAASMLVPILTMLAFDRTEGIQAFIWSSVATFVTGLGLVLPGRPEHVHLRPRDMYMLTVSSWVLVCIFAALPFVLQQHISYTDAFFESMSGITATGSTVLSGLDDMSPGILIWRSLLHWLGGIGFIAMAVAILPMLRIGGMRLFQTESSDRSEKVLPRSHMVAKYIVATYVGITLLGSLAFWGAGMSPFDAVNHAMSAISTGGFSTSDQSLAKWKQPAVHWTAVVVMILGSLPFALYVATLRGHRKALIKDQQVRGLLGLLLVTWLLMGTWYAVTSKLPWMDAFRIVAVNVTSVVTTTGFALGDYSMWGHFSIMLFFYLGFIGGCSGSTAGGIKIFRFQVAYTLLKANLYQLIHPRAVLKQNYNGHRLDEEIVRSILTFSFFFAIVVCLLALGLSLIGLDWMTALTGAASTVAGVGPGMGPIIGPSGNFASLPDAAKWLLAAGMLLGRLEIITVLVLLTPAFWRH

SEQ ID NO: 66466 - protein, 601 aa, Pseudomonas aeruginosa
MKYGAGCTTGPFSLRRERSMTVTEQLSALDSILAHGDLHCLFQPILSLSERRLVGYEALTRGPSNSPLHSPLALFAVARQCGRLSELELLCRQRAFSRFRDIQGDAMLFLNISPESLLEAGHPPGRTLQLLQQLGISPNRVVIELTEQTPIDDFDLLDTALHHYRSMGFSIALDDLGAGYSSLRLWSELRPDYVKIDRHFVDGIHLDTVKREFVGSILKMARASRAQVIAEGIELPEELAVLSEMGVDLVQGYLFGRPQEHPASDVQQMLPSADAPSQSSSDEHGDLRALLLEQRAVDVRTSTQEVVEIFRRQANLNSLAILDEEGRPIGIVHRHALTDALLRPFACDLFLRKPISRLMSDDFLAVELGQTLQQVSRLLTSRARQRIEEDFIVTRGGHYAGMGRVIDVLRLITEEKLQQARHANPLTLLPGNVPIQQCLERLLQQRREAVICYIDVDSFKPFNDLYGYARGDEVLLCLAQCLSERIDPGSDFVGHIGGDDFMLVLGPEDWRTRIDRLLETFQSQCRRFYSREHLEAGCFVAHNRHGQREEYPLLSLSVGVVHLPAEACQGMDAAHLATLASEAKRQAKAVPGYSLHLIEAA

SEQ ID NO: 66467 - protein, 69 aa, Pseudomonas aeruginosa
MSNRQNGTVKWFNDAKGFGFITPESGNDLFVHFRSIQGTGFKSLQEGQKVSFVVVNGQKGLQADEVQVV

SEQ ID NO: 66468 - protein, 1448 aa, Pseudomonas aeruginosa
MPISSSSARRAEPAPRPLAEFHPVVRQWFERHFAAPTPAQVEAWPAIREGLSTLVAAPTGSGKTLTAFLAAIDALVVEGLAAGGELADATQVVYVSPLKALSNDIRINLEQPLAGIREELARLGLPDVDIRSAVRTGDTPQVERGAMRKRPPHILVTTPESLYILLGSESGRQMLAGVRSVIVDEIHALAGSKRGSHLALSLERLQALCPRPLLRIGLSATQKPIEKVARFLVGASGNPRDPACRIVDVGYTRPRDLGIEVPPVALEAVMSNDTWELVYDRLAHLAGEHRTTLVFVNTRRMAERVTRFLAERLGSRQVAAHHGSLAKELRLDAEQRLKAGQLKVLVATASLELGIDIGDVELVCQLSSPRSIAAFLQRVGRSGHSVGGTPKGRLFPTSRDDLVECAALLDSVRRGELDSLVLPRQPLDVLAQQIVAEVACQEWREDDLYRLVIRAEPYAGLERERFDEVLRMLAEGYHSRLGVRGAYLHRDALNGLLRGRRGARLTALTSGGTIPDTGDYSVLLEPQGLLVGTVNEDFAVESLAGDVFQLGNTSYRIIRIEPGRVRVEDAQGQPPNIPFWLGEAPGRSDELSASVARLRDTLDELLGEGQALPEGRRLEPAIAWLGATLGLDDGAARQIVEYLARARQALGGLPGSRRLVLERFFDESGGMQLIIHSPHGSRLNRAWGLALRKRFCRSFNFELQAAATEDAIILSLSTSHSFPLDEVWRYLHSASAEHLLVQAVLDAPLFGVRWRWNLTTSLGLPRYAGGRKVPPQLLRMKSEDLLASVFPDQVACLENIVGEREVPDHPLVAQTLDDCLHEAMDCEGWLALLRDMESGAVDLLARDLPAPSALAAEILTARPYAYLDDAPLEERRTQAVQNRRWSDPESADDLGALDLEAIEAVRGEAWPEASNADEMHEALNSLGFLTSGEAEANPGWGEWLAQLSEQRRAGRLDCAGSTLWLAAERLPAMRLVHPAAKVPDAFQAPRGYPPPDSAEAATVELTRARLGGFGPRTAGQLAADLGIGLADQQYALAALEREGYVLRGRFSPGATEEEWCERHLLARIHRYTVKRLRREIEPVERADFMRFLFDWQRLAPGTRGRGAESLATVVEQLEGFQAAAAAWESELLAARVADYASHWLDQLCRSGRIVWARLAGRSKAAGGPLRSAPIVLLPRRELGLWSVLQRDAPEPELSPRAARVLEVLREQGASFFDELSQDAHLLRSELENALGELVSVGRVNADSFAGLRTLLMPADKRSRQERRSRGLPGGMQDAGRWAPLRRAKAEEAGQRLPAEVLEHVARTLLRRYGVVAWRLLEREADWLPPWRELLRVYHRLEARGEIRGGRFIAGLAGEQFALAEAVGLLREVRKRPPDGAMLVVSAVDPLNLVGGLLPGERVPAVTGNRLLYRDGAPLAALVAGKVRMLAEVDGETAQQIRALLIRRH

SEQ ID NO: 66469 - protein, 440 aa, Pseudomonas aeruginosa
MIRRHSCKGVGSSVAWSLLGLAISAQSLAGTVTTDGADIVIKTKGGLEVATTDKEFSFKLGGRLQADYGRFDGYYTNNGNTADAAYFRRAYLEFGGTAYRDWKYQINYDLSRNVGNDSAGYFDEASVTYTGFNPVNLKFGRFYTDFGLEKATSSKWVTALERNLTYDIADWVNDNVGTGIQASSVVGGMAFLSGSVFSENNNDTDGDSVKRYNLRGVFAPLHEPGNVVHLGLQYAYRDLEDSAVDTRIRPRMGMRGVSTNGGNDAGSNGNRGLFGGSSAVEGLWKDDSVWGLEGAWALGAFSAQAEYLRRTVKAERDREDLKASGYYAQLAYTLTGEPRLYKLDGAKFDTIKPENKEIGAWELFYRYDSIKVEDDNIVVDSATREVGDAKGKTHTLGVNWYANEAVKVSANYVKAKTDKISNANGDDSGDGLVMRLQYVF

SEQ ID NO: 66470 - protein, 476 aa, Pseudomonas aeruginosa
MTPGYPLALSLAVSMAVLGSALPAQARQDDPSLFNRQARGELSEYGGARRVEQDLTQALKQSLSKKKAKNVILLIGDGMGDSEITVARNYARGAGGYFKGIDALPLTGQYTHYSLHKDSGLPDYVTDSAASATAWSTGVKSYNGAIGVDIHEQPHRNLLELAKLNGKATGNVSTAELQDATPAALLAHVTARKCYGPEATSKQCPSNALENGGAGSITEQWLKTRPDVVLGGGAATFAETAKAGRYAGKTLRAQAEARGYRIVENLDELKAVRRANQKQPLIGLFAPGNMPVRWLGPTATYHGNLNQPAVSCEANPKRTADIPTLAQMTSKAIELLKDNPNGFFLQVEGASIDKQDHAANPCGQIGETVDLDEAVQKALAFAKADGETLVIVTADHAHSSQIIPPETAAPGLTQLLTTKDGAPLAISYGNSEESSQEHTGTQLRIAAYGPQAANVTGLTDQTDLFFTIRRALNLRD

SEQ ID NO: 66471 - protein, 316 aa, Pseudomonas aeruginosa
MPAAAYWLPASDETPLYTRHWPSATAVGAVMLSHGMAEHAGRYERLAAALNAAGYHFYAIDQRGHGRTAEADELGHFADQGGWGKVVGDLASLNHHIRQQHPELPIFLLGHSMGSYISMAYLLHHSCSLQGAILSGSNYQPQALYRIARLIARFERWRQGPLGKSALIDFLSFGSFNKAFKPNRTAFDWLSRDPQEVDRYVADPLCGFRCSNQLWVDLLGGLADITPPTHLRQIDADLPLLIIGGERDPVSQGKRLGDLADALRGAGLRQVTLKTYPEARHELFNESNRDAVTQDLIDWLEQALRHRRDHSTKERT

SEQ ID NO: 66472 - protein, 391 aa, Pseudomonas aeruginosa
MDLRLLLLSLTTFAAGLAESILIGILPPLAEDLRVSISLAGQLTTLFSLGFALAAPLLGWLTRRIERRRLLLATLLLFALSNALAALAPGYLGLLLARLGMSACCGLLIVLASLLAAELAAPAQRGRAIGLIFMGISGSLVFGVPLGVQISDWFGWRWIFAGIAVYSLPLCLLLWRYLPQRQAGDLPGREGYLRQLRQPALWLAQLVSILLLGGHFTLFAYFTPYLASMAGIRSPSEISLILLLIGLAALSGGYIGGWLADHLGHRRALRLVPAAFALALAAVPLSLGSIGFLPVLMVWSAISWMISPVVQSFLLRSDPASGSAGVALNTSAMHLGVGLGAALGGLVVAALGVAATPWVGLALVLAALACALGASTLDGATQALPFSPPAR

SEQ ID NO: 66473 - protein, 285 aa, Pseudomonas aeruginosa
MRASLRVVVTLLVVAAAVLAGIWLWRYYMLSPWTRDARVRADVVVVAPDVSGWVTDLEVKDNQVVKVGDVLMRIDQERYQANLEQARAVAETRHQQYLLRQNEAARRSRLGIGAISAEDKENAQINAAIARSEYQEALAQVKIAELNLKRSELRAARNGQVTNLRLAQGNYATAGQAVMALVDQQSFYVVAYFEETKLPGIRVGMRAQVRLMSGDQPIDGTVESISSGITDRNSTPDGQLLANVEPTFNWVRLAQRIPVRIRLDQVPADVHLSAGMTASVTVQGD

SEQ ID NO: 66474 - protein, 664 aa, Pseudomonas aeruginosa
MPIHWKPFLAPSTLALKFAIKTLLAGGLALWCAFRFDLEQPQWALMTVLIVSQPLSGMVVAKGLFRLLGTLVGTAMSVLMIALFAQAPWLFLLAISLWLGLCTAASTSLRNHVSYAFVLSGYTVAIIGLPAVDQPLLVFEQAVARCTEICLGIICASAVSAILWPQRVEQNLDKQAHATWLLGMQAARGEIDPRQRQPQGLLNALSKIVEVDAQRDHAWFEGERGRRRAGALALLSRDLLSLLRTARGVARQRARLSEEEERRVERWLAALASALEGTDPASMQALREELAQVAVEPQWSNDQRYLLTRCSVLLLKAVNAEKGMRAVASGEVEGRVGSAGTLSWHRDLQMALFYGTRSALALLGLSVYWIYTAWPAASGAMLLAAVVCSLFANRDNAVAIGLSFLRGIVYAIPAAMLVSQWLLPQWNGFPLLCLAMGVPLFFATLGMAVPVTAGTATSFAIHFIVLVAPRNQMDYNLATLLNSAQGVLIGVGFAVVIFRLLTLRPGWLTRRLLDATCVDLGRLTRRPLAQAENWFGGRMADRLLRLARHANLLPEQERRRWDDGLLALDLGNELIHLRACLEGARGVLRKARDRFLGELGELLEAGPAGPRSDRLERISLPLREALERDARHDDEASRLARAALAQLLFTWQQWCHQEESHESA

SEQ ID NO: 66475 - protein, 330 aa, Pseudomonas aeruginosa
MPRAAVVCGLGSYLPEAVLSNDMLAAELDTSDAWISSRTGVRQRHIAGDLGSGDLALRAASAALASAGLERVDAVVLATSTGDFCCPATAPRVAARLGLVGALAFDLSAACTGFVYGLASVGSLISAGLADSALLVGVDTFSHTLDPADRSTRALFGDGAGAVVLRAGDAEEEGALLAFDLGSDGHQFDLLMTPAVSRAERSSGQASNYFRMDGKAVFGQAVTQMSDSVRRVLDRVGWQASDLHHLVPHQANTRILAAVADQLDLPVERVVSNIAEVGNTVAASIPLALAHGLRQGILRDGGNMVLTGFGAGLTWGSVALRWPKIVPTMD

SEQ ID NO: 66476 - protein, 712 aa, Pseudomonas aeruginosa
MREQALRILKDVFGYDAFRGNQARIIERVAEGGDALVLMPTGGGKSLCFQVPALLREGLTVVVSPLIALMEDQVATLDELGVPAVALNSTLNPEQQRDIAERLQRGEIKLLYLAPERLVQPRMLAFLQRLPVGLFAIDEAHCVSQWGHDFRPEYLQLGQLAELFPQVPRIALTATADMRTREEMIQRLHLQNAEQFLSSFDRPNIFYRIVPKEQPRKQLLGFLSERRGDAGIVYCLSRKKVEEVAEFLGNQGFPALPYHAGLSNELRAHHQKRFLNEEGLIMVATIAFGMGIDKPNVRFVAHLDLPKSLEAYYQETGRAGRDGLPADAWMAYGLQDVLLLRQMMQSSEGDERHKRVERHKLEAMLALCEETRCRRQALLAYFDEEMPQPCGHCDNCVDGVETWDATESARQALSAIYRSGQRYGVGHLVDILLGRETEKIRSLGHQHLAVFGIGKGRGEDEWRTLFRQLVARGLADVDLDGFGGLRLTEACRPLLRGEVRLELRRDLKPQRAKGSSSGGASAASQLVRSEEREMWEALRALRRKLAEEHSVPPYVIFPDATLLEMLRSQPRSLSDMAQVSGVGARKLERYGQAFLDVLTDSPAAPAAPPQDLRHELASLACAGMTPAQIARQLNCSEKNVYAMLAEAIAGQQVSLEQALDLPEELLGEIQDAFLEEDGELPPVAALEERFGKRVPSGVLHCVRAALQVELES

SEQ ID NO: 66477 - protein, 336 aa, Pseudomonas aeruginosa
MSANDLRQCLRIAGGGTLGFFVCKLMNWDYGSFFGVYPMLLLGLTPVINLHIVRQFLANSVVISVEVLVLYGLFGDRPLLMTPIVFGLFVYRFALMARGPLFFFGALSSVFLSMLLHFASYPDVDLFDMLASNMVATWLTVAIAVLMFYLFPDVEPRSPRQAPAKDAPSRRHETLLGATVATLSFVVFQTFDLKDSLSAQIASILVLFPMHWKGVHFAGRIRALGTLLGCALAVGLQVLLYDHYDILPFVALLLWISAMFCARIHMLENGVPGIGFGALTTLAIVLGQYLTPTHDMMYSVLYRFTSVCFAVLITLMTVLVIHLFLNRFAATRHYSH

SEQ ID NO: 66478 - protein, 231 aa, Pseudomonas aeruginosa
MTHSVSPIGYIRSCFMEKFAIPRQPLLAPAARGTLELLPPFDQVEALEGLEQVSHVWLLFLFHQALEDKPRLKVRPPRLGGNRSLGVFATRATHRPNGIGQSVVRLEGFEAGRLWLSGIDLLDGTPVLDIKPYVPYADAVADARNGIADAPPPGIAVEWSEQARRQAHEHGQRLRQPVAELIEQCLAQDPRPAYQKPEPGRRYGVRLWDLDVHWHYPRPDLIRVLDVAGGD

SEQ ID NO: 66479 - protein, 333 aa, Pseudomonas aeruginosa
MNERNGEAKRLALLEAVNLALHRAMAEDETVVVLGEDVGVNGGVFRATLGLRERFGFKRVLDTPLAENMIAGLSIGMAAQGLKPVMEIQFMGFIYAAMEQLVSHASRLRNRTRGRLACPLVLRTPMGAGIRAPEHHSEATEAMFAHIPGVRVLVPSSPARAYGLLLAAIDDPDPVIFLEPTRLYRMNPQPLADDARRLPLDSCFTLREGGDLTLVSWGASVHETQQAAERLAQRGIEAEVIDVACLKPLDLDTLEASVRKTGRCVIVHEAPKSGGLGGEIAASLYERVLFDLRAPIQRVAAADIPPPLYRLEPLYMPAVEDILAACDTVLGYA

SEQ ID NO: 66480 - protein, 365 aa, Pseudomonas aeruginosa
MVHNRIDPPFTRYLDSDGRPLGELPAWAGDSDALVGLYRQMLLTRLFDQKAVALQRTGRIGTYAPTLGQEAIGVAIGSQMRAEDVLVPYYRDTAVQLMRGVRMEDILLYWGGDERGSDYAEPLAAQDFPICVPIATQALHACGVASAFRIRGEHRVAVTTCGDGATSKGDFLEALNVAGAWQLPVLFVVNNNQWAISVPRRIQCGAPTLAEKAVGAGFPGEQVDGNDVLAVAERVRAALERARQGKGPTLLECISYRLCDHTTADDASRYRSAEEVNQAWREEPIKRLRAFLAGRGQWDEEREQALVGECQARVQEAVERFETFAAQAPQALFEHVYARWPAVLEEQREQLLERAARRRGGAEHE

SEQ ID NO: 66481 - protein, 523 aa, Pseudomonas aeruginosa
MKKILLMLLCVSVLGCSKNSVESEKPVDVLLIGGGIMSATLGTYLNELEPGWTIEMVERLDKVAEESSNGWNNAGTGHSAFCELNYTSEAADGSMDISKAVAINENFEISKQFWAYQVDRKVLNDPKSFINNVPHMSFVWGDDNVAFLKKRHAALQHSSLFRGMEYSEDPEQIKQWVPLVMEGREPGQKIAATRMSIGTDVNFGEITRQLVGSLSAKDTFKLRLQHEVRDLKRNDDNTWTVTMADLANGDKETSVKARFVFIGAGGGALKLLQMSGIPEAEGYAGFPVGGSFLATTNPDVVKRHLAKVYGKASVGSPPMSVPHLDTRMIDGKPVLLFGPFATFSTKFLKNGSLWDLPGSVTSGNIGPMFNAGIDNFDLSQYLIGQLMLSQDDRMASLREYFPEARDEDWKLVQAGQRVQIIKKDAEKGGVLQFGTEVVTAADGSVAALLGASPGASTAAPIMLSVLEKAFKDKVATPEWQARLKEIVPSYGRKLNNDIELTNSTRAWSSERLQLIHVPVQPEA

SEQ ID NO: 66482 - protein, 589 aa, Pseudomonas aeruginosa
MCGISGEFRFDNQAADLAAVERITHHLAPRGPDAWGFHAQGPIALGHRRLKIMDLAEASGQPMIDPDLGLAMVFNGAIYNYPELRGELESLGYRFFSGGDTEVLLKGYHAWGADLLPRLNGMFAFAVWERDRQRLFLARDRLGIKPLYYSLDRSRLRFASSLPALLKGGDIASDLDPQALNFYLNFHAVVPAPHTLLEGVKKLPPATWMSVDLDGSCEQRTWWTLDYGPRPDERELTLDDWQERVLDGLREAVAIRQRAAREVGVLLSGGVDSSLLVGLLHEAGVDNLLTFSIGFEDAGGERGDEFQYSDLIAERYHTRHHRLRIGEHEVIEQLPAAFRAMSEPMVSHDCIAFYLLAREVSKHCKVVQSGQGADELFAGYHWYPKVDGADDAFAAYRAAFFDRDHEEYLATVGERFRVEDVAGRFVRDHFASPGAEAAVDKALRLDSTIMLVDDPVKRVDNMTMAWGLEARVPFLDYRLAELSARIPARFKLGDGGKQVLKGAARKVIPSEVIDRPKGYFPVPGLKHLQGRTREWVRELLLDPSQDRGLFQPAIFDRLLSDPDGDLTPLRGSKLWQLAALNLWLSEQGL

SEQ ID NO: 66483 - protein, 398 aa, Pseudomonas aeruginosa
MTPLPQPDLNYLQRVLLEMLAIPSPTGFTDTIVRYVAEQLDELGVPFEMTRRGTIRATLQGRLNTPDRAVSAHLDTIGALVREIKPNGRLGLAPVGCWSSRFAEGSRVTVFTEQGVFRGSVLPLLASGHAFNTEVDNLKISWDNIELRLDAYTASRADSESLGISVGDYVAFDPLPEFTESGHISARHLDDKAGVAALLAALKAVKESGQEPPIDCHPLFTITEEVGSGAAGALPWDVSEFVGIDIAPVAEGQNSNEHSVSVAMQDSGGPYDFHLSRHLLRLGERHDIALRRDLFRYYHSDAQSAIAAGHDTRAALLAFGCDATHGYERTHIDSLAALSRLLTAYILSPPVFASDAKPRETSLERFNKQLEHPVHMESCTHVPPVDEVLDSSNNSDKG

SEQ ID NO: 66484 - protein, 152 aa, Pseudomonas aeruginosa
MTDNLLSISAACLFDDQGNLLLVRKRGTQAFMLPGGKREPGETPLAALQRELLEELRLPMGASTFEHLGSFQAPAANEANTRVDADIYVARLPHAVCAQAELEELAWLVPGQAQPDNLAPLLRDHVLPALARRAAENPETQAEHRTRPDHVR

SEQ ID NO: 66485 - protein, 677 aa, Pseudomonas aeruginosa
MSEPRKILVTSALPYANGSIHLGHMLEYIQTDMWVRFQKMRGNQAVYVCADDAHGSAIMLRAEREGITSEQLIDAVRAEHMGDFADFLVDFDNYHSTHSEENRELSSAIYLKLRDAGHIDTRPVTQYFDPEKQMFLADRFIKGTCPKCGTADQYGDNCEACGATYAPTELKDPKSAISGATPVLKESLHYFFKLPDFEAMLKQWTRSGALQESVANKLAEWLDSGLQQWDISRDAPYFGFEIPDAPGKYFYVWLDAPIGYMASFKNLCARRPELDFDAFWGKDSGAELYHFIGKDIVNFHALFWPAMLEGAGYRKPTALNVHGYLTVNGQKMSKSRGTFVKARTYLDHLDPEYLRYYYASKLGRGVEDLDLNLEDFVQKVNSDLVGKVVNIASRCAGFIHKGNAGVLVGADPAPELLAAFREAAPGIAEAYEARDFNRAMREIMALADRANAWIAEQAPWALAKQEGQQDKVQAVCGLGINLFRQLVIFLKPVLPKLAAAAEAFLNVAPLTWADHQTLLANHQLNPFQPLMTRIEPAKVEAMIEASKEDLAAASQPAGNGELVKEPIAAEIDFDAFAAVDLRIALIEKCEFVEGADKLLRLSLDIGDAKRNVFSGIKSAYPDPSALEGRLTLYVANLAPRKMKFGVSEGMVLAAGPGGEEIYLLSPDSGAKPGQRVK

SEQ ID NO: 66486 - protein, 211 aa, Pseudomonas aeruginosa
MRLQVTRKRDIQVACGQSNTWQFKGRINQASPIYERAQPVEVGHVVFFVKDVNACERFYRERFGFVCSDRYPNRGAFLRCAEEGGHHDLFMLQLPQPRAGLNHVAFTVRDIHEVFGGGMHIARCGWDTEIGPGRHPVSSAYFWYFRNPAGALVEYYADEDQLTGEWQAREFEPGPTVFAEWAIAGGLDGNTRRQKSVEAPQGRFLTDKPRS

SEQ ID NO: 66487 - protein, 483 aa, Pseudomonas aeruginosa
MDAESLEMLARSSCTAHPQSFGGAPAESSCKHEHSHIVDSKTHGGGYAGPVSRRIFCSHCRLQRWLDVEAALALAQADVGVIPPEAALEIAKAARLSAVDLQQIADGVASTGHSLMPLLGALQRNCSPSAREYVHFGATTQDIQDTAQSLEMRDVLDETERALDILLDRLSVLASGTRNALMVARTHSIPALPTTFGLKVAGWIDELLRHRERLGEARKRILVVQLFGGVGTMAAFGDEAMLLLESFARRLSLDVPLAGWHVSRDRVTEFVSTLAMVTASLARIADEIRTLNRWEIGELEVGWTQQQIGSSTMPHKRNPEGCEQVVVLARLAKAQVLLALDAMILEHERDYRGTRLEWCAVADVSHYALMALSLLTDTIDGLTVHDETMARTANAYSDAICTEAFVFEMAKQLGKSSAYEIIFEITQACQRKRIPMRQALESDPRVGAVMPKETLARLFEPRTHLGMAGTIVDKVLDKVASHH

SEQ ID NO: 66488 - protein, 477 aa, Pseudomonas aeruginosa
MPSHITESRIHGGAYSSPAFAAIFSDTNQVRRWLDVERALAATQAEMGIIPHEAAREIDRAAQVERFDLTQLGRESLETGHLLVPTIRALARSCEGSWGEYVHYGVTTQDILDTGLMLQVKEAWGHALGLLHSIRGHLLALALRHQHTPMVARTHGQQALPTTFGYKVAVWVDEIDRHLARFDEARERVLVGNLTGAVGTLASFGAQGFELQRRTLARLGLGAPSTSWHSARDRVLEVAGLLVQVSVTLGRVANEIYHLQRSEIDEVREGSRPGQVGSSTMPHKRNPSSVDLVSALSRLVRAQMVALTDAAFQLHERDGTAWRIEWAALPELFVYAGALLTRMEAVLAEGLEVREERMRANLDLLGGLILSERVMLALAGQFGKQTAHELLHEITQASQRQGVPFREALLGQPRLRGCFSAEALEELLDPVGYVGLAAEMVDLVADKPRTGASGDRPEGAASSQGNPGQSQYVMEDR

SEQ ID NO: 66489 - protein, 348 aa, Pseudomonas aeruginosa
MSDRLTLLRPDDWHIHLRDGAALANTVGDAARTFGRAIVMPNLVPPVRNAAEADAYRQRILAARPAASRFEPLMVLYLTDRTSTEEIRTAKASGFVHAAKLYPAGATTNSDSGVTRIDNIFEALEAMAEVGMPLLVHGEVTRAEVDVFDREKQFIDEHLRRVVERFPTLKVVFEHITTGDAAQFVREAPANVGATITAHHLLYNRNHMLVGGIRPHFYCLPILKRNTHQEALLDAAVSGNPKFFLGTDSAPHARHAKEAACGCAGCYSAYAAIELYAEAFEQRNALDKLEGFASLHGPDFYGLPRNTDRITLVREEWQAPASLPFGDFDVVPLRAGETLRWKLLEAGA

SEQ ID NO: 66490 - protein, 662 aa, Pseudomonas aeruginosa
MTSKAVVFAYHDIGCTGIEALLNAGYEIAAVFTHADDPRENTFYASVARLCAERGIPLHAPEDVNHPLWLERIRQLRPDFLFSFYYRRLLGAELLACAARGAYNLHGSLLPRYRGRAPANWVLVNGETQTGVTLHRMIERADAGPILAQQAVAIDPEDTALSLHGKLRKAAGALLRDSLPLLALGVLPEVEQDESQASHFGRRTPADGLLDWHRPARQLYDLVRAVTQPYPGAFCQVGEQKLIVWSAEVVAGNHGREPGSVLSCDPLRIACGEDSLVLRFGQRGERGLYLAGTQLATELGLVEGARLRGAACSPQRRTRVLILGVNGFIGNHLSERLLRDGRYEVHGMDIGSDAIERLKADPHFHFVEGDIGIHSEWLEYHVKKCDVILPLVAIATPIEYTRNPLRVFELDFEENLRIVRYCVKYGKRVVFPSTSEVYGMCQDPDFDEDRSNLVVGPINKQRWIYSVSKQLLDRVIWAYGQQGLRFTLFRPFNWMGPRLDRLDSARIGSSRAITQLILHLVEGTPIRLVDGGAQKRCFTDVDDGIEALARIIDNRDGRCDGQIVNIGNPDNEASIRQLGEELLRQFEAHPLRAQFPPFAGFREVESRSFYGDGYQDVAHRKPSIDNARRLLDWQPTIELRETIGKTLDFFLHEALREREAQA

SEQ ID NO: 66491 - protein, 137 aa, Pseudomonas aeruginosa
MNALRGWLAALGSVLLASAAQLGMRWGMSRLPLPEAWAGQTPERAALLAVALAVAAYAASLLCWLAALRHLPLGRAYSLLSASYALVYLLAASLPAFDETFSTSKTLGVGLVVLGVLTVNARRTAAAPAHHPSRKAP

SEQ ID NO: 66492 - protein, 464 aa, Pseudomonas aeruginosa
MKISVFGSGYVGLVQAAVLAEVGHDVLCMDIDRNKVERLAQGLASIYEPGLDALLREGLDSGRLRFSSDARLAVEHGRVQFIAVGTPPGEDGAADLGAVFVVADAIAEHRRKPVIVVEKSTVPVGTGDRLRAHIERRLEADGRELEFEIVSNPEFLKEGSAVADCRRPDRIVVGCDNEEVRQVMRELYEPFNRNHDRMLFMGLRSAELTKYAANGMLATKISFINQIAELAEHLGADIEAVRQGIGADPRIGYHFIYPGCGYGGSCFPKDMRALIHSAEQAHCSSDLLQAVEAINRRQKHKLFERIRVFYDGDLRGKTFALWGLAFKPNTDDMRDAPSRELMEALWRHGAQVRAYDPEAMQETQRLYGHDERLSLMGTPEATLGGADALVICTEWQQFKAPDFELLKERLKAPVIFDGRNLYDPERMARHGFHYYPMGRGQSCSLPINEASLAQEDGMRLLRQA

SEQ ID NO: 66493 - protein, 585 aa, Pseudomonas aeruginosa
MKLAIVTACPGGQVTSVLAARLLRGAAERLGWETCVEANAGSRPEGELSAEQIAEADWVLLVGVEPLAAARFVGKPVYRARPAEALADPRAFLQRAAALASVEVAGDEAGLVAPEAGAAPRIVAVTACPTGVAHTFMAAEALQLAAGQLGFALQVETQGSVGARNPLDPADIAAADVVLLAADIDVDTARFAGKKIYRCGTGVALKQARATLERALAEGQVESAGAASAVVARDEKRGVYKHLLTGVSFMLPMVVAGGLLIALSLAFGIDAYKQPGSLAAVLRTVGDTAFVLMVPMLAGYIAYSIADRPGLAPGMLGGLLAGTLGAGFIGGIVAGFIAGYAARAISHGLRLPASLEALKPILVIPLLASLVTGLLMLYVVGKPVAGMLAALTGFLDGMGTSNAILLGLLLGGMMCVDLGGPVNKAAYAFSVGLLSSHSYAPMAAVMAAGMVPPIGMGLATLLARRKFAESERQAGKAASVLGLCFISEGAIPFAAKDPLRVIPASIAGGALTGALSMYFGCKLQAPHGGLFVMLVPNAINHALAYLLAIVAGSLLTGLLYAVLKRGAEPGLALGTSSSREPAAGG

SEQ ID NO: 66494 - protein, 956 aa, Pseudomonas aeruginosa
MLELDTRQIRMGQRAADKAEALRLLGAALVADGLAAPGYAEGLKAREAQGSTYLGQGIAIPHGTPDTRELVFSTGVRLLQFPEGVDWGDGQQVYLAIGIAAKSDEHLQLLQLLTRALGEADLGPALSAAASAEEVLGLLQGAPQELALDAQLVGLGQNAEDLDELAWLGARLLKKAGCVENGFAAVLQQTEPLPLGDGLCWLHSEQLVKRPGLAFVTPAQPLQHQGQLVTGLFCLASLGEAHQALLERLCDLLLEGRGAELVRATSSRSVLAALGGELPPDWPSARAVLANPHGLHARPAQALAQLAKGFAGEIRVRLADSEAAPVSAKSLSKLLALGARRGQTLEFSAEPAIAEDALPALLAAVREGLGEEVEALAEEALPDAVGEAEEDARPAPLRAGERLQAIAASPGIASGPAHVQVAQRFEFQPRGESPAHERERLLRAKRAVDEEIVGLVERSTVKAIREIFVTHREMLDDPELAEQVQLRLNRGESAEAAWSRVVEDSAAQQEALHDALLAERAADLRDLGRRVLARLCGVEAPREPEQPYILVMDEVGPSDVARLDAQRVAGILTARGGATSHSAIIARALGIPALVGAGAAVLGLEPGTALLLDGEHGWLQVAPSTEQLQQAAAERDARQQRQARADAQRLEPARTRDGHAVEVCANLGDTAGAARAVELGAEGVGLLRTEFVFMNNARAPDLATQEAEYRRVLDALDGRPLVARTLDVGGDKPLPYWPIPHEENPYLGLRGIRLTLQRPQILETQLRALFRAAGERPLRVMFPMVGSLDEWRQARDLALRLREEIPLADLQLGIMVEVPSAALLAPVLAREVDFFSVGTNDLTQYTLAIDRGHPSLSAQADGLHPAVLQLIDMTVRAAHAEGKWVGVCGELAADPLALPLLVGLGVDELSVSARSIALVKAGVRELQLVAARGLARKALGLASAAEVRALVEAEVQ

SEQ ID NO: 66495 - protein, 337 aa, Pseudomonas aeruginosa
MKAVGYYQSLPIDHPDALLDLELPEPTPGPRDLLVEVRAISVNPVDTKVRQRAQPEAGQAKVLGWDAAGVVRAVGSEVSLFRPGDRVWYAGDITRPGSNSELHRVDERIAGHLPKSLDFAQAAALPLTTITAWELLFERLQIAEGKADQGQSLLVVGAAGGVGSILVQLARQLTGLNVIGTASRAETQAWVRDLGAHHVIDHGKPLAEELKRIGVAEVSHVASLTHTDQHLEQIVAALRPQGRLALIDDPASLDIGKLKQKSLSLHWEFMYTRSMFQTDDMIEQHRLLERVAGLIDEGVLKTTVGEHFGRIDAANLRRAHALLESGRAKGKIVLEGF

SEQ ID NO: 66496 - protein, 279 aa, Pseudomonas aeruginosa
MTTAAPTPSLFGQCLAEFLGTALLIFFGTGCVAALKVAGASFGLWEISIIWGVGVSMAIYLSAGVSGAHLNPAVSIALWLFAGFEGRKLPFYITAQVAGAFCAAALVYTLYSSLFIEFEQAQNIVRGSQDSLALASVFSTYPHPALSVGQAFLVEVVITAILMAVIMALTDDGNGLPRGPLAPLLIGLLIAVIGSAMGPLTGFAMNPARDFGPKLMTYLAGWGPIAFTGGREIPYFLVPIFAPILGACLGAGGYRVLIARHLPSAAAPAEAEPEKVRAS

SEQ ID NO: 66497 - protein, 505 aa, Pseudomonas aeruginosa
MTDKHNKKYVVALDQGTTSSRAIVFDRDANVVSQAQREFAQFYPQAGWVEHDPMEIWATQSSTLVEALAQASIEHDQVAAIGITNQRETTVVWDRHSGRPIHNAIVWQCRRSAAICAQLKRDGLEDYIRETTGLVTDPYFSGTKLKWILDNVEGARERARNGDLLFGTIDTWLIWKLTEGKVHVTDYTNASRTMLFNIHSRDWDARMLEVLDIPRSMLPEVRNSSEVYGNARIGGVGGGELPIAGIAGDQQAALFGQMCVEPGQAKNTYGTGCFLLMHTGDKAVKSTHGLLTTIACGPRGEVGYALEGAVFNGGSTVQWLRDELKVINDSFDSEYFATKVKDSNGVYLVPAFTGLGAPYWDPYARGAVFGLTRGVKADHLIRATLESIAYQTRDVLDAMQRDAGERLRALRVDGGAVANNFLMQFQADILGTRVERPVMRETTALGAAYLAGLACGFWSSLDELKSKAVIERVFEPECDEPRREKLYAGWKKAVERTRGWDDGEL

SEQ ID NO: 66498 - protein, 510 aa, Pseudomonas aeruginosa
MSEPSIVLIGIVGTGAMGQGIAQLAACAGLSVLLYDSRQGVALQAREQIATVLARQVERGRLEAEAVERAMGNLRVVEDLRVLGGCQLVIEAIVENLEAKQALFRQLEEVVGDEAILASNTSSLSVTAIASACRDPGRIAGLHFFNPVPLMRLVEVIEGLATRTGIAERLCALVATFGHQAVRATDSPGFIVNHAGRAFGTEALRILGEGVAPVAAIDEVLREGAGFRMGPFELFDLVGLDVSLPVMESIYRQYYEEPRYRPHPLLRQMLAAGRLGRKSGQGFYRYDGAGQVPVAAPAVAPGAALPPVWLGVDDEHDRAPLLMLLQRLGAEVESGERPSGAPLCLLAPLGADVSAAARRFAVDPTRSLAIDVLSDLERHRCLMACPATRAELQQAARTLFARDGVGVTLIRDSAGFIVQRTLASIVNLACDIAQQGIASVEHIDLAVRLGLGYPLGPLEWGDRLGAGRVLRILERLHALSGDPRYRPSPWLRRRAQLGLSLRQPDSPLAS

SEQ ID NO: 66499 - protein, 440 aa, Pseudomonas aeruginosa
MARLKRTLSLGSVVLFGIAYMTPIIVLGTFGILAETTQGHVPAAYIAASLAMLFTALSYGRMAAAFPVAGSAYTYVRKAIDSRLGFIAGWAVLLDYLFLPMAIWLIGAAYLHSAFPAVPNAVWVLAFIGVTTTINIVGLRLAKNVNGLLMLVQFLVLGAFVALCVHYVLGDPGKPLWSLQPLLGGDLQVPLVMSGAAIACYSFLGFDAVSTLTEETRDPRRNIPRAILLITLLGGLIFIVTSYFVQLAHPSFAFDSADSAAYEIARNIGGDLFVTFFLVGLIVGQFTSGLSAQASASRLLFAMGRDGVLPRPFFGRLGKRFETPANSIILCGVVALLALQMDVTTSTSFINFGAFLAFSLVNLSVVFHYYLGAERRGPRETLLFLVFPGIGLVADLWLMASLDHLAIILGLCWLALGAVYLAAITHGFREPPPEMRFEEG

SEQ ID NO: 66500 - protein, 87 aa, Pseudomonas aeruginosa
MKPGIHPEYRPVLFHDTSADVYFLIGSTAETDKTHTHTDGKTYPYVTLDVSSASHPVYTGEQRKTKSEGRVAGFNKRFAGFVGGKGA

SEQ ID NO: 66501 - protein, 536 aa, Pseudomonas aeruginosa
MNLSLLSRYAFFACIALFTLLSLPFLGSTEWLWPFTLLGVALSLLGLFDLIQTPHAVRRNYPILGNIRYLVEGIRPEIRQYLLEADGDALPFSRAQRSLVYSRAKNESSEKPFGTLIDVYTAGYEFISHSMRPAPLSDPCEFRVDIGGPQCSKPYSASLFNVSAMSFGALSANAIRSLNRGAQMGNFYHDTGEGSISPYHRENGGDLVWELGSGYFGCRTRDGKFDPERFAAQALDPQVKMIEIKLSQGAKPGHGGILPKHKVTPEIAATRGVPMGEDCVSPSRHSAFSTPIELMQFIAQLRELSGGKPVGFKFCLGHPWEFMGIAKAMLETGILPDFIVVDGKEGGTGAAPLEFTDHIGVPLREGLLFVHNTLVGLNLRDKIKVGASGKIVSAFDIASVLATGADWANSARGFMFAIGCIQSQSCHTNKCPTGVATQDPLRQRALVVPDKAERVRNFHRNTLKGLAEMLAAAGLEHPSQLEAKHLVRRITDTEIRLFSQLHYFLKPGELLSGKIEGEFYERMWNMARADSFDAAA

SEQ ID NO: 66502 - protein, 123 aa, Pseudomonas aeruginosa
MSPSPFKGQTGLKRILNATGYSLAGFLAAFRGEAAFRQLVLLNVVLIPVAFLLDVSRGERALMIAVCLLALIVELLNSAIEATVDRVSLERHPLSKNAKDMGSAAQFVALTVITVTWATILLG

SEQ ID NO: 66503 - protein, 467 aa, Pseudomonas aeruginosa
MASLTFLGAAQEVTGSCYLLETLDGVKVLLECGMRQGRREADNGNRAPFPFDPASIDAVVISHAHLDHSGLLPRLAAEGFKGPIFATEATCELLELMLLDSAHIQEKDAEWENRWRNRIGKPSIKPLYTQADTERALKLRRPISLGSTVAVARGVRVTFHNAGHILGSSIVEVQFHDQVQPRRLVFSGDLGNTCSPLMRAPSPLSRADVVMLESTYGDRDHRDSNDTLEELAAILDQAHRDGGNVLIPSFAVGRTQDLLYYLGRFYQEGRLPQQAVFLDSPMAARANGIYLRHSNEFDDRDREYIRGTGTTRLEEWLPVLRVTRSADESMAINRIKSGAVIIAGSGMCTGGRIVHHFKHNLWRPECHVVFPGFQARGTLGRNIVDGASAVRVFHQRIAVKAQIHTLGGFSAHAGQSQLLDWVGHFAHRPALYLIHGEREKMEALQSAIRERLDWDAEIPEPGERIEI

SEQ ID NO: 66504 - protein, 153 aa, Pseudomonas aeruginosa
MAIVLDTPVAVRRAAMDLLARREHGRAELSRKLRQRGASAELIDPALDRLAEEGLLDESRYLESFIASRARSGHGPLRIREELAQRGLPRADIERALGACEVDWSAQLREVWRRKFARLPQDAREKAQQGRFLAYRGYSMESISRLLNGRSDD

SEQ ID NO: 66505 - protein, 346 aa, Pseudomonas aeruginosa
MDENKKRALAAALGQIERQFGKGAVMRMGDHERQAIPAISTGSLGLDIALGIGGLPKGRIVEIYGPESSGKTTLTLSVIAEAQKQGATCAFVDAEHALDPDYAGKLGVNVDDLLVSQPDTGEQALEITDMLVRSNAVDVIIVDSVAALVPKAEIEGEMGDAHVGLQARLMSQALRKITGNIKNANCLVIFINQIRMKIGVMFGNPETTTGGNALKFYASVRLDIRRTGAVKEGDEVVGSETRVKVVKNKVSPPFRQAEFQILYGKGIYRTGEIIDLGVQLGLVEKSGAWYSYQGSKIGQGKANAAKYLEDNPEIGSVLEKTIRDQLLAKSGPVKADAEEVADAEAD

SEQ ID NO: 66506 - protein, 855 aa, Pseudomonas aeruginosa
MTDLSQHTPMMQQYFKLKHQHPDQLMFYRMGDFYELFYEDAKKAAKLLDITLTARGQSGGKAIPMAGIPFHSAEGYLAKLVKLGESVAICEQIGDPATSKGPVERQVVRIITPGTVSDEALLDERRDNLLAAILGDERLFGLAVLDITSGRFSVQEIKGWETLLAELERLNPAELLIPDDWPQGLPAEKRRGVRRRAPWDFDRDSAHKSLCQQFGTQDLKGFGCQNLTLAIGAAGCLLAYAKETQRTALPHLRSLRHDRLDDTVILDGASRRNLELDINLSGGRENTLQSVVDRCQTAMASRLMSRWLNRPLRDRAVLEARQESIACLLERYRFENLQPQLKEIGDLERILARIGLRNARPRDLARLRDALAALPDLQNAMTELEAPHLQALATTIGTYPELAELLAKAIIDNPPAVIRDGGVIKTGYDAELDELQALSENAGQFLMDLEAREKARTGLPNLKVGYNRIHGYFIELPRVQAEQAPADYIRRQTLKGAERFITPELKAFEDKALSAQSRALAREKALYEELLERLIGHLAPLQDSASALAELDVLANLAERALNLDLNRPRFVEHTCLHIEQGRHPVVEQVLETPFVANDLALDADTRMLVITGPNMGGKSTYMRQTALIVLLAHIGSFVPAARCELSLVDRIFTRIGSSDDLAGGRSTFMVEMSETANILHNATDKSLVLMDEVGRGTSTFDGLSLAWAAAEDLARTRAFTLFATHYFELTVLPESQPAVANVHLNATEHNERIVFLHHVLPGPASQSYGLAVAQLAGVPAPVIQRAREHLKRLETTSLPHEMPSQQSGKPASPMQSDLFASLPHPVIDELSRINPDDISPRQALDLLYAWKMRV

SEQ ID NO: 66507 - protein, 157 aa, Pseudomonas aeruginosa
MRIGHGYDVHRFGEGDFITLGGVRIPHKHGLVAHSDGDVLLHALSDALLGAAALGDIGKHFPDTDPRFKGADSRALLRHVVAIVAEKGWKVGNVDATIVAQAPKMAPHIETMRGLIAEDLGVAVDQVNVKATTTERLGFTGREEGIAVHAVALLMAR

SEQ ID NO: 66508 - protein, 283 aa, Pseudomonas aeruginosa
MKDSLELIGSQKTFGGWHQRYRHFSRTLNCEMVFAIYLPPQAEPEAALPALYWLSGLTCTDENFMQKAGAQRVAAELGLVLVAPDTSPRGSGVPGDPDGAWDFGLGAGFYLNATQEPWAAHYRMHDYVVHELPALIEAHFPVSRRRGISGHSMGGHGALVCALRNPGRYLSLSAFAPICHPSDCPWGQKAFSRYLGEDPAAWREWDACALLEGASERLPILVDQGERDDFLAVQLKPEALRNAADKAGHPLELRLQPGYDHSYYFIASFIEDHLRHHAGVLNG

SEQ ID NO: 66509 - protein, 234 aa, Pseudomonas aeruginosa
MTTSDLPAFWTVIPAAGVGSRMRADRPKQYLDLAGRTVIERTLDCFLEHPMLRGLVVCLAEDDPYWPGLDCAASRHVQRAAGGAERAGSVLNGLLRLLELGAQADDWVLVHDAARPNLTRGDLDRLLEELAEDPVGGLLAVPARDTLKRSDRDGRVSETIDRSVVWLAYTPQMFRLGALHRALADALVAGVAITDEASAMEWAGYAPKLVEGRADNLKITTPEDLLRLQRSFPH

SEQ ID NO: 66510 - protein, 429 aa, Pseudomonas aeruginosa
MAKIVDIKGREVLDSRGNPTVEADVILDNGIVGSACAPSGASTGSREALELRDGDKSRYLGKGVLKAVANINGPIRDLLLGKDAADQKALDHAMIELDGTENKAKLGANAILAVSLAAAKAAAQAKGVPLYAHIADLNGTPGQYSMPVPMMNIINGGEHADNNVDIQEFMVQPVGAKNFAEALRMGAEIFHHLKAVLKARGLNTAVGDEGGFAPNLSSNEDALAAIAEAVEKAGYKLGDDVTLALDCASSEFFKDGKYDLEGEGKVFDAAGFADYLAGLTQRYPIISIEDGMDESDWAGWKGLTDKIGAKVQLVGDDLFVTNTKILKEGIEKGIGNSILIKFNQIGSLTETLEAIQMAKAAGYTAVISHRSGETEDSTIADLAVGTAAGQIKTGSLCRSDRVSKYNQLLRIEEQLGAKAPYRGRAEFRG

SEQ ID NO: 66511 - protein, 281 aa, Pseudomonas aeruginosa
MAQKIVRVGDIQIGNDLPFVLFGGMNVLESRDLAMQVCEEYVRVTEKLGIPYVFKASFDKANRSSIHSFRGPGLEEGMKIFEEIKKTFKVPVITDVHEPFQAQPVAEVCDIIQLPAFLSRQTDLVVAMARTNAVINIKKAQFLAPQEMKHILTKCEEAGNDRLILCERGSSFGYNNLVVDMLGFGIMKQFEYPVFFDVTHALQMPGGRADSAGGRRAQVTDLAKAGLSQKLAGLFLEAHPDPEHAKCDGPCALRLNKLEAFLSQLKQLDELIKSFPAIETA

SEQ ID NO: 66512 - protein, 542 aa, Pseudomonas aeruginosa
MTRYIFVTGGVVSSLGKGIASASLAAILEARGLKITMLKLDPYINVDPGTMSPFQHGEVFVTQDGAETDLDLGHYERFVRTTMTQNNNFTTGRVYMDVLRKERRGDYLGATVQVIPHITDEIKRRIIKGAGDADVALVEIGGTVGDIESQPFLEAIRQLRVEIGAKRAMLMHLTLVPYIATAGETKTKPTQHSVKELRSIGLQPDVLVCRSDHPIDVSSRRKIALFTNVEERAVIALEDVDTIYRIPSVLHAQGLDDIVVERFGLECGQADLSEWDRVVDAKLNPEREVTIAMVGKYMELLDAYKSLIEAMTHAGIQSRTKVNLRYIDSEDIEQQGTSLLEGVDAILVPGGFGLRGVEGKISTVQYARENKIPYLGICLGMQVAVIEYARNVLGWSDANSTEFDKSSGHPVVGLITEWQDATGATEIRTEASDLGGTMRLGAQECQLQTGTLVHDCYAKDVIVERHRHRYEVNNNLLPQLEQAGLKISGRSGDGALVEVVEAPEHPWFVACQFHPEFTSTPRDGHPLFSGFVNAALKYSGKA

SEQ ID NO: 66513 - protein, 316 aa, Pseudomonas aeruginosa
MNPNFLDFEQPIADLQAKIEELRLVGNDNALNISDEISRLQDKSKALTENIFGNLSSWQIAQLARHPKRPYTLDYIGYLFSDFEELHGDRHFADDPAIVGGVARLDGSPVMVIGHQKGREVREKVRRNFGMPRPEGYRKACRLMEMAERFKMPILTFIDTPGAYPGIDAEERGQSEAIAWNLRVMARLKTPIIATVIGEGGSGGALAIGVCDQLNMLQYSTYSVISPEGCASILWKTAEKAPEAAEAMGITAERLKGLGIVDKVIDEPLGGAHRDPASMAESIRGELLAQLKMLQGLEMGELLERRYDRLMSYGAP

SEQ ID NO: 66514 - protein, 1173 aa, Pseudomonas aeruginosa
MTVSFVHLRLHTEFSLVDGLVRVKPLAKAVAGLGMPAVAVTDQSNMCSLVKFYKTAMGAGIKPICGADIWLASREEDGPLSRLSLLAMNAKGYRNLTELISRGWSEGQRNGEIIIERDWVKEAAEGLIALSAAKEGEIGHALLDGEEAKAEALLREWMEVFPERFYVEVQRTSRVNDEEHLHAAVALASRCNAPLVATNDVRFIKQEDFEAHETRVCIGEGRTLDDPRRPRTYSDQQYLKSPAEMAELFSDLPEALENTVEIAKRCNIEVQLGKYFLPDFPTPNGMGIDDYLRHASFEGLEERLEVLLPKDTPDYEAKRQVYVDRLNFELDIIIQMGFPGYFLIVMDFIKWAKNNGVPVGPGRGSGAGSLVAYVLKITDLDPLAYDLLFERFLNPERISMPDFDVDFCMEGRDRVIDYVADAYGRNAVSQIITFGTMAAKAVVRDVARVQGKSYGLADRLSKMIPFEVGMTLDKAYEQEEMLRDFLKSDEEAAEIWEMALKLEGITRGTGKHAGGVVIAPTKLTDFSPIACDEEGGGLVTQFDKDDVEAAGLVKFDFLGLRTLTIIKWAMEIINREQAKKGLEPVNIDFIPLDDKPTYSLLQKAETTAVFQLESRGMKELIKKLKPDCLEDLIALVALFRPGPLQSGMVDDFINRKHGRAELSYPHPDYQYAGLEPVLKPTYGIILYQEQVMQIAQVMAGYTLGGADMLRRAMGKKKPEEMAKQRGGFIEGCKNNGIDADLAGNIFDLVEKFAGYGFNKSHSAAYGLVSYQTAWLKTHFPAPFMAAVLTADMQNTDKVVTLIEECRHMKLRIVAPDVNNSEFRFTVDDDGRIVYGLGAIKGVGEGPVEAITECRAEGGPFNTLFDFCDRVDLKRINKRTLEALIRAGALDRLGPHYHDELKAYQATVDLNRAVLLAAMEEAIQAAEQTARSHDSGHMDLFGGVFAEPEADVYANHRKVKELTLKERLKGEKDTLGLYLTGHPIDEYEGEVRRFARQRIVELKPARDTQTVAGLIVNLRVMKNKKGDKMGFVTLDDRSGRIEASLFSEAFAAAQSLLQTDALVVVEGEVSQDDFSGGLRLRAKRVMSLEEARTGLAESLRMKLHADLLKGDRLRWLGELFNRHRGSCPITLDYTSADAKALLQFGESWRVDPADDLIQALRDQFGRDNVFLNYR

SEQ ID NO: 66515 - protein, 201 aa, Pseudomonas aeruginosa
MQLGLDFNLVEDLVAGVDEVGRGPLCGPVVTAAVILDPSRPILGLNDSKKLSEARREALFEEIREKALAWCIARAEVEEIDRLNILHATMLAMQRAVEGLSVIPRLALIDGNRCPKLAVPCAPVVKGDSQVPAIAAASILAKVSRDREMVELDRVYPGYGMAGHKGYPTAVHLEALSRLGPTPIHRRSFAPVRELLDVSVQ

SEQ ID NO: 66516 - protein, 146 aa, Pseudomonas aeruginosa
MMDINEIREYLPHRYPFLLVDRVVELDIEGKRIRAYKNVSINEPFFNGHFPEHPIMPGVLIIEAMAQAAGILGFKMLDVKPADGTLYYFVGSDKLRFRQPVLPGDQLQLHAKFISVKRSIWKFDCHATVDDKPVCSAEIICAERKL

SEQ ID NO: 66517 - protein, 353 aa, Pseudomonas aeruginosa
MMSTLSYTLGQLAAHVGAEVRGDADLPIQGLATLQEAGPAQLSFLANPQYRKYLPESRAGAVLLTAADADGFAGTALVVANPYLAYASLSHLFDRKPKAAAGIHPTAIVAADAEVDPSASVGAYAVIESGARIGAGVSIGAHCVIGARSVIGEGGWLAPRVTLYHDVTIGARVSIQSGAVIGGEGFGFANEKGVWQKIAQIGGVTIGDDVEIGANTTIDRGALSDTLIGNGVKLDNQIMIAHNVQIGDHTAMAACVGISGSAKIGRHCMLAGGVGLVGHIEICDNVFVTGMTMVTRSITEPGSYSSGTAMQPAAEWKKSAARIRQLDDMARRLQQLEKRLAAVTSSGDASSDA

SEQ ID NO: 66518 - protein, 251 aa, Pseudomonas aeruginosa
MEKTRKDVCVPRHVAIIMDGNNRWAKKRLLPGVAGHKAGVDAVRAVIEVCAEAGVEVLTLFAFSSENWQRPADEVSALMELFLVALRREVRKLDENGIRLRIIGDRTRFHPELQAAMREAEAATAGNTRFLLQVAANYGGQWDIVQAAQRLAREVQGGHLAADDISAELLQGCLVTGDQPLPDLCIRTGGEHRISNFLLWQLAYAELYFSDLFWPDFKHAAMRAALADFSKRQRRFGKTSEQVEAEARPSC

SEQ ID NO: 66519 - protein, 185 aa, Pseudomonas aeruginosa
MINEIKKEAQERMGKTLEALGHAFAKIRTGRAHPSILDSVMVSYYGADTPLRQVANVTVEDSRTLALAVFDKSMIQAVEKAIMTSDLGLNPATAGTTIRVPMPALTEETRKGYTKQARAEAEQARVSVRNIRRDALAQLKDLQKEKEISEDEERRAGDDVQKLTDKFIGEIEKALEAKEADLMAV

SEQ ID NO: 66520 - protein, 245 aa, Pseudomonas aeruginosa
MAQQLSARQPRYKRILLKLSGEALMGSEEFGIDPKVLDRMALEIGQLVGIGVQVGLVIGGGNLFRGAALSAAGMDRVTGDHMGMLATVMNGLAMRDALERSNIPALVMSAISMVGVTDHYDRRKAMRHLGGGEVVIFSAGTGNPFFTTDSAACLRAIEIDADVVLKATKVDGVYTADPFKDPNAEKFERLTYDEVLDRKLGVMDLTAICLCRDQNMPLRVFNMNKPGALLNIVVGGAEGTLIEEG

SEQ ID NO: 66521 - protein, 289 aa, Pseudomonas aeruginosa
MAEITAAMVKELRERTGLGMMECKKALTAAGGDIEKAIDDMRAAGAIKAAKKAGNIAAEGSIAVKIAADNKAAVIIEVNSQTDFLALQDDFKGFVAESLEKAFNEKLTDAAPLVEAREEARLALVAKTGENVNIRRLTRVEGDVVGAYLHGHRIGVVVNLKGGNPELAKDIAMHVAASNPQFLSASEVSEEAIAKEKEIFLALNADKIAGKPENIVENMVKGRISKFLAEASLVEQPFVKNPEVKVGDLAKQAGAEIVSFVRYEVGEGIEKAEVDFAAEVAAQVAATKQ

SEQ ID NO: 66522 - protein, 246 aa, Pseudomonas aeruginosa
MSQVNMRDMLKAGVHFGHQTRYWNPKMGKFIFGARNKIHIINLEKTLPMFNEALTFVERLAAGKNKILFVGTKRSAGKIVREEAARCGMPYVDHRWLGGMLTNYKTIRQSIKRLRDLETQSQDGTFDKLTKKEALMRSRDLEKLERSLGGIKDMGGLPDALFVIDVDHERIAITEANKLGIPVIGVVDTNSSPEGVDYVIPGNDDAIRAVQLYLNSMAEAVIRGKQGAATSADEFVEEAPAESAEG

SEQ ID NO: 66523 - protein, 900 aa, Pseudomonas aeruginosa
MPQVDPELFDRGQFQAELALKSSPIAAFKKAIRQFREVLDNRFNSGRDIRRLIEDRAWCVDQILQQAWQRFDWGDDADIALVAVGGYGRGELHPYSDVDLLILLDSEDQESFREPIEGFLTLLWDIGLEVGQSVRSVQQCAEEARADLTVITTLMECRTICGPDSLRQRMLQVTGSAHMWPSKEFFLAKRHEQQRRHAKYNDTEYNLEPNVKGSPGGLRDIQTILWMARRQFGSLNLHALVREGFLVESECSMLASSQEFLWRVRYALHMLAGRAEDRLLFDHQRSIARLFGYEDNDVKLAVERFMQKYYRVVMAISELNDLIIQHFEEVILPCEQPVQIQPLNSRFQLRDGYIEVTHPNVFKRTPFALLEIFVLMAQHPEIKGVRADTIRLLRDSRHLIDDEFRHDIRNTSLFIELFKSSQGIHRNLRRMNRYGILGRYLPEFGHIIGQMQHDLFHIYTVDAHTLNLIKHLRKLNRPEMAEKYPLASKIIDRLPKPELIYIAGLYHDIAKGRGGDHSELGAVDAEAFCQSHQLPLWDTQLVSWLVQNHLVMSTTAQRKDLSDPQVIFDFAQLVGDQTHLDYLYVLTVADINATNPTLWNSWRASLLRQLYTETKRALRRGLENPVDREEQIRQTQTAALDQLVRNGIDQDDAEQLWSQLGDDYFLRHTAGDVAWHTEAILQHPDDGTPLVLIKETTQREFESGSQIFIYAADQHDFFAVTVAAMDQLNLSIQDARIITSTSQFTLDTYIVLDADGDSIGNNPERIAEIREGLIDALKNPDDYPTIIQRRVPRQLKHFAFAPQVTISTDALRQVSVLEVIAPDRPGLLARIGGIFLDFDLSVQNAKIATLGERVEDVFYITDARNQPLADPDLCKRLQAALVEQLSQDNGRDTLPTRINF

SEQ ID NO: 66524 - protein, 581 aa, Pseudomonas aeruginosa
MSDSCLPIAMVQSAQSHRPGTKPEIPALMQTVYTVLTLLLVVGATRLAAQLLPLPLPLIQIAAGALLALPSLGLHIALDPELFLFLFIPPLLFVDGWRIPKREVWRMRWPILMMAFGLVFFTVVGAGYFIHLLIPEIPLAASFALAAVLSPTDALAVSAITQGRLPKRLMHLLEGEALMNDASGLVAFKFAIAAAMTGVFSLVDASLNFLVVAVGGLAIGVFLSWSLGRIRAWMISRGWDDPATHVVLMLLLPFASYMVAEHLGVSGILSAVAAGMMQSWVDLLPRQTSTRLLNRSVWSMLEFAFNGVVFLLLGLQLPDIMKSVANHHGDLLWRSSLLLAYVAAITAVLMLIRYGWVYGYWKLSLRIDRWRGKSPPGLSGISLRRLSALSALSGVRGAVTLAAVLSVPMSLMDGSAFPQRDLIIFIATSVILISLIGATIGLPLLLRGLPASNNGAHERERREAWRKTAEAAIRALESEELPQVEGNDAANTSRVAEARAQIMAEYRQSLDTAPTTDEARDQAQALEIADKALRLKALRAQRLELYRQRRNNEIDDETLGDILRELDQQESWLTNRFARWV

SEQ ID NO: 66525 - protein, 615 aa, Pseudomonas aeruginosa
MKRVLSSGAGLLLIALAFLAFNMVSGLLFSGARLDLTEQKLYTISPGTKRILAGLDEPINLYFFYSDSGARELVPLRNYARRVEELLRAYEREANGRIRLQVIDPEPFSENEDKATEFGLQGIPLQQGGDNLYFGLAGSNALDGVQVIPFFPLDQEEFLEYDISRLVQTLAQPQRPVVGLMSSLPLNGGFDMASRQPTSPWMVMEEIRQQFDLRSLKSDATEIPPEVSVLLLVHPKQLPEQTLYAIDQFVLRGGKLLAFVDPFSEADSGSDFAATLDGDKSSDLAPLFEAWGLRLLPGKVLGDGAYAMSISLGRDQRPARHPAWLSLPREALDQDDIATAGLESLTLATPGILERLPGASTSFTPLLQSSAQAMPFDASRFGLLRDPGDLMRELRPSGRRHTLAARIQGPAKSAFAEGIEGHREGLKEARNINVIVVADTDLLSDRMWVQVQDFFGQRVPQPWADNGALVVNALDNLSGTDALISVRSRGRFSRPFVVVERLQREAETSFRQKEEQLKQRLADTEQQLAALQQGADPEKAVELTPEQQATVRQYMQEKLRIRKELREVQYQLNADIDALGRTLKLVNIALVPSLLTVGVLLGWLWRRRRMARGGH

SEQ ID NO: 66526 - protein, 307 aa, Pseudomonas aeruginosa
MIETRNLGKRFGSRVAVDDLSFQVETGEVLGFLGPNGAGKSTTMKMLTGFLAPCAGTASIFGFDIRNRTLQAQRLIGYLPEGSPCYAEMTVQGFLDFIAEIRGYRGAGKRERVARALGLLELDEVRRQTIETLSKGFRRRVGLAQAILHEPRALVLDEPTDGLDPNQKHQVRELIRGLAQERIVIISTHILEEVSALCSRALVIGGGRLLADSTPLELASRSRYHQAVTLYSDEPLDAVALAVLPGVAGIEENPAEGSLTVLAQPGAVIFPQVSGLVAERGWRIRELDVERGRLDEVFRNLTRGTEA

SEQ ID NO: 66527 - protein, 132 aa, Pseudomonas aeruginosa
MKKLPLLLAASILAGCGTQQSTSNASFDGEVFYRERIALPPSARLSVSLEDVSLADAPSVQLASQTREITSQVPLAFHLEYDPKQVKPGHSYAVSARIELNGQLLFINTTRHSVKLDGSDPQPYRVQVESAR

SEQ ID NO: 66528 - protein, 425 aa, Pseudomonas aeruginosa
MQQTIDCPIRRRLAHLPWANDGRAGVRHWLEMQRDPLAWLQKMHVAQPDLAVARMGPQRLWCLFHPQAVQELMVDRRDDLQRWQPALCMLKQWNGRSFMMREGAPAQARRKEVRPHLAPPPASEVRRLAAEWGERVEEGREYDLDLEMAAFSVTLSGHALFDVDLQPSAYRIAKAVRLLSRVALLEMSTGLPLGHWFPSKLCPRKRWALGQLREAVGEVAERSPRPLADLRDELCTLLMASHQSTGVTLTWSLLLLAQRPELLARLRAELAGVNWTAIRSVADLRDCALLRAVLQECLRLYPPAYGLAPRQVTADIEVFGQRLKRGDVTMVSSWITQRDPRWFEAPLEFRPERFLEPARWPRGAYFPFGLGDRACPGTAMAMIDLAAALAYWVEHWDIMHDGDLAPRGWFSLRPQRARVRFRRRA

SEQ ID NO: 66529 - protein, 215 aa, Pseudomonas aeruginosa
MRVILLGAPGAGKGTQARFITEKFGIPQISTGDMLRAAVKAGSPLGQQVKGVMDSGGLVSDDIIIALIKERITEADCAKGFLFDGFPRTIPQAEALKDAGVTIDHVVEIAVDDEEIVSRIAGRRVHPASGRVYHTEHNPPKVAGKDDVTGEELIQREDDKEETVRHRLSVYHSQTKPLVDFYQKLSAAEGTPKYHSIAGVGSVEQITAKVLSALS

SEQ ID NO: 66530 - protein, 173 aa, Pseudomonas aeruginosa
MTEVRVWQGDITRLAVDAIVNAANSSLLGGGGVDGAIHRAAGAELVAACRLLHGCKTGEAKITRGFRLPAAHVIHTVGPVWRGGDNGEAELLASCYRRSLALAEQAGAASVAFPAISCGIYGYPLEQAAAIAVEEVCRQRPAHSSLEEIVLVAFDSSMAERYQRLLGERPVAR

SEQ ID NO: 66531 - protein, 501 aa, Pseudomonas aeruginosa
MSDQQLDQHELQQEENKLIAQRKEKLAAVREARAIAFPNDFRRDAYFADLQKQYADKTKEELEAAAIPVKVAGRIMLNRGSFIVLQDSSERLQVYVNRKTLPEETLAEIKTWDLGDIIGAEGVLARSGKGDLYVDMTSVRLLTKSLRPLPDKHHGLTDTEQRYRQRYVDLMVNEETRHTFRVRSQVIAHIRRFLSERGFLEVETPMLQTIPGGAAAKPFETHHNALDMAMFLRIAPELYLKRLVVGGFEKVFEINRNFRNEGVSTRHNPEFTMLEFYQAYADYEDNMDLTEELFRELAQSVLGTTDVPYGDKVFHFGEPFVRLSVFDSILKYNPEITAADLNDVEKARAIAKKAGAKVLGHEGLGKLQVMIFEELVEHKLEQPHFITRYPFEVSPLARRNDEDPSVTDRFELFIGGREIANAYSELNDAEDQAERFMLQVKEKDAGDDEAMHYDADFINALEYGMPPTAGEGIGIDRLVMLLTNSPSIRDVILFPHMRPQA

SEQ ID NO: 66532 - protein, 571 aa, Pseudomonas aeruginosa
MRIEPRPLPETLPDLGDLPPLLARLYAARGVRCAEELDKGLARLIPYQRLKGIEEGVALLVDALEGGQRILIVGDFDADGATASSVGVLALRMLGAAWVDYLVPNRFEYGYGLTPEIVGVALEKRPDLLVTVDNGISSVDGVQAAKAAGLKVLVTDHHLPGPELPAADAIINPNQPGCEFPSKAMAGVGVIFYVMLALRARLRELDWFARRGLKEPNLAELLDLVALGSVADVVPLDANNRILVHQGLARIRAGRARPGLRALLEVAGRPPVRITSTDLGFILGPRLNAAGRLDDMSLGIECLLCDDEALARDMAVQLDQLNQDRKAIEQGMQREALAQLKELSLEQLPFGLCLFDADWHQGVIGILASRLKERYHRPTIAFADAGDGSLKGSARSIPGFHIRDALDAVAARHPGLISKFGGHAMAAGLSLPQENFGAFSAAFDAEVRRQLAEEDLAGRLLSDGQLSIQEFHLELARALRQAGPWGQHFPEPMFHGVFQLVQQRIVGERHLKLVLKSECGSLQLDGIAFNIDREQWPNPTVRWAELAYKLDVNEFRGQESVQLMIVHMAPR

SEQ ID NO: 66533 - protein, 469 aa, Pseudomonas aeruginosa
MRYISTRGQAPALNFEDVLLAGLASDGGLYVPENLPRFTLEEIASWVGLPYHELAFRVMRPFVAGSIADADFKKILEETYGVFAHDAVAPLRQLNGNEWVLELFHGPTLAFKDFALQLLGRLLDHVLAKRGERVVIMGATSGDTGSAAIEGCRRCDNVDIFIMHPHNRVSEVQRRQMTTILGDNIHNIAIEGNFDDCQEMVKASFADQGFLKGTRLVAVNSINWARIMAQIVYYFHAALQLGAPHRSVAFSVPTGNFGDIFAGYLARNMGLPVSQLIVATNRNDILHRFMSGNRYDKDTLHPSLSPSMDIMVSSNFERLLFDLHGRNGKAVAELLDAFKASGKLSVEDQRWTEARKLFDSLAVSDEQTCETIAEVYRSSGELLDPHTAIGVRAARECRRSLSVPMVTLGTAHPVKFPEAVEKAGIGQAPALPAHLADLFEREERCTVLPNELAKVQAFVSQHGNRGKPL

SEQ ID NO: 66534 - protein, 298 aa, Pseudomonas aeruginosa
MSTLEHPLIDRFLDALWLEKGLADNTREAYRNDLQQFNAWLDGRGLRLEGIGRDAILDHLAWRLEQGYKARSTARFLSGLRGFYRYCLRDGLIAEDPTLQVDLPQLGKPLPKSLSEADVEALLAAPEVDDPLGLRDRTMLEVLYACGLRVSELVGLTLEQVNLRQGVVKVFGKGSKERLVPLGEEAIGWLERYLREARGDLLGGRPSDVLFPSLRGEQMTRQTFWHRIKHHAQVAAIGTSISPHTLRHAFATHLLNHGADLRVVQMLLGHSDLSTTQIYTHIARARLQDLHARHHPRG

SEQ ID NO: 66535 - protein, 116 aa, Pseudomonas aeruginosa
MTNKIIQQIEAEQMNKEIPAFAPGDTVIVQVKVKEGDRQRLQAFEGVVIAKRNRGLNSAFTVRKISNGVGVERTFQTYSPIVDSLSVKRRGDVRKAKLYYLRALSGKAARIKEKLV

SEQ ID NO: 66536 - protein, 252 aa, Pseudomonas aeruginosa
MDKRLWVGVVSIFPEMFRAISDYGITSRAVKQGLLTLTCWNPRDYTEDRHQTVDDRPFGGGPGMVMKIKPLEGALADARQAAGGRKAKVIYLSPQGRQLTQAGVRELAEEEALILIAGRYEGIDERFIEEHVDEEWSIGDYVLSGGELPAMVLVDAVTRLLPGALGHADSAEEDSFTDGLLDCPHYTRPEVYADKRVPEVLLSGNHEHIRRWRLQQALGRTWERRADLLDSRSLSGEEQKLLAEYIRQRDDS

SEQ ID NO: 66537 - protein, 175 aa, Pseudomonas aeruginosa
MPTPADDLVVIGKIVSVYGIRGEVKVYSFTDPLDNLLDYRRWTLRRDGEIRQAELVRGRLHGKVLAAKLKGLDDREEARTFTGYEICIPRSELPSLEEGEYYWHQLEGLKVIDQGRQLLGVIDHLLETGANDVMVVKPCAGSLDDRERLLPYTGQCVLSIDLAAGEMRVDWDADF

SEQ ID NO: 66538 - protein, 83 aa, Pseudomonas aeruginosa
MVTIRLARGGSKKRPFYHLTVTNSRNARDGRFVERIGFFNPVATGGEVRLSVDQERATYWLGQGAQPSERVAQLLKDAAKANA

SEQ ID NO: 66539 - protein, 457 aa, Pseudomonas aeruginosa
MFENLTDRLSQTLRHVTGKAKLTEDNIKDTLREVRMALLEADVALPVVKDFVNKVKERAVGTEVSKSLTPGQAFVKIVRAELEELMGAANEDLALSVAPPAVILMAGLQGAGKTTTAGKLARFLKERKKKSVMVVSADVYRPAAIKQLETLAGEVGVTFFPSDVSQKPVAIAEAAIREARLKFIDVVIVDTAGRLHIDADMMDEIKQVHAAIKPAETLFVVDAMTGQDAANTAKAFNDALPLTGVVLTKVDGDARGGAALSVRAITGKPIKFLGMGEKSEALDPFHPDRVASRILGMGDVLSLIEQAEQNLDRDKAEKLAKKIKKGKGFDLEDFRDQLQQMKNMGGLGGLMDKLPMLGGVNLAQMGNAQGAAEKQFKQMEAIINSMTPGERRDPEMISGSRKRRIALGSGTQVQDVGRLIKQHKQMQKMMKKVTAKGGMAKMMRGMGSMFPGGMPKL

SEQ ID NO: 66540 - protein, 266 aa, Pseudomonas aeruginosa
MHPLLPSLIAAVLYLGTAAYQGACVSKRTAPGKPLLLLFGLLALVAHAFSLYQQLLTPAGLVLDFFNAASLIAAAVILLTLLATLRIPVENLLLLLFPLGALTTLLAVLIPHGTVEPINEQPGILAHILLSILAYGLLTIAVFQALLLLLQDYRLKHKHPSGLIRNFPPLQTMESLLFGFLWGGWSLLSLSLLSGWLFVDNLFAQHLAHKTILSCFAWVVFAVLLWGRHQLGWRGHKAIRWTLAGFCLLMLAYFGSKLVREFILHI

SEQ ID NO: 66541 - protein, 203 aa, Pseudomonas aeruginosa
MNCTLDELRQRIEAHRPRQLDTDQRFPQAAVLVPITRSDDPELVLTLRAAGLSTHGGEVAFPGGRRDPEDADLVRTALREAEEEIALPPGLVEVVGPLSTLVSRHGIEVTPYVAFIPDFVEYQPNDGEIAAVFNVPLSFFRDDPREVTHRIDYFGRSWYVPSYRFGEFKIWGLTAIMVVELVNLLYDDPIDLHTPPASFIKLS

SEQ ID NO: 66542 - protein, 247 aa, Pseudomonas aeruginosa
MKTAHDLLLALRPDEAQPTPLYLQLARNLESAIHAGQWKAEEALPSERNLSETLNISRVTARKALEVLFEQGLIRRNQGSGTFITPRLEQPLSRLSSFSEMLRLKGFTPGSTWLERGIALPTHDELIRLGLSPTEKVTRMKRLRKADGTVMAIENSTLPARLLPDPTAVGDSLYEYLDGIGRPVVRALQHVRAINSSASDAALVGIAPGTAMLLMTRIGYLEDNTPIELTDTYCRNDYYDFVAELRR

SEQ ID NO: 66543 - protein, 363 aa, Pseudomonas aeruginosa
MLEGNILTPQGWVLGRLHIQDGRIQRIEGEPCDPAGNADPYLLPGFIDLHVHGGGGRDIMEGGDAFATIARTHRRFGTTSLLATTMTAPREEIADILSQLGAYCRRSLEGGSRILGVHLEGPYINSGKLGAQPNFAHAAVLEEVEDYLRRAPIRVITIAPEIAGHRPLIRALAERGVRLQIGHTLGSYEDGVAALEAGASSFTHLYNAMTGLHHREPGIVGAALAHARYAELIPDLLHVHPGAIRVALRSIPCLYCVTDSTAAAGMPDGQYKLGSHTVTKCLGGVRLPDGTLAGSTLTMDQALRNLVKIGLPLAEASQRLSQFPADYLGLAERGRLAPAAWADVVRLDRSLELDAVMVEGELE

SEQ ID NO: 66544 - protein, 842 aa, Pseudomonas aeruginosa
MNNKNLALKAPLSGPVMPLNRVPDPVFSSGTLGEGIAIDPLNDCLHAPCAGLVSHLARTRHALSLRADNGAELLLHVGLDTVQLQGEGFEALVEEGARVIEGQPLLRFDLDRVARGSRSLITVMILTNGDGFQVRPLTTNPVEVGAPLLQLSPEKAEQRPANPAPGEGSAQRQVRGRARVAHHGGLHARPAALLRKTAQGFSSQAELHFAGQVASVDSLVGIMGLGVAEQDEVEVICRGEDSEAALGALLAALASATAGAPKDAPRAIAPGEPARPAAVAGTLAGVCASPGLASGPLARLGAISLPADDGRHRPEEQHLALDQALQRVRDDVQGSLQQARLGGDENEAAIFSAHLALLEDPGLLDAADMLIDQGVGAAHAWHRAIQAQCEILQALGNLLLAERANDLRDLEKRVLRVLLGDTAPLRVPAGAIVAAREITPSDLAPLVDAGAAGLCMAEGGATSHVAILARSKGLPCLVALGAGLLELEEGRQVVLDAGQGRLELSPDARRLEQVALQVAQREEQRRRQQADAQREALTRDGRRIEIGANVASPREAAEAFANGADGVGLLRTEFLFLERRAAPDEEEQRNAYQEVLDAMGQRKVIIRTIDVGGDKHLDYLPLPVEENPALGLRGIHLGQARPELLDQQLRALLRVEPLERCRILLPMVSEVDELRAIRRRLGELATQLGIERLPELGVMIEVPSAALLADQLAEHADFLSIGTNDLSQYALAMDRCHAGLADRIDALHPALLRLIAQTCAGAARHGRWVGVCGALASDPLATPVLVGLGVEELSVGPNLVGEIKTRVRQLDAAECRRHAQALLDLGSARAVRDACLQHWPLA

SEQ ID NO: 66545 - protein, 570 aa, Pseudomonas aeruginosa
MPPFLIESLQRLGRALMLPIAILPIAGLLLRLGDVDLLDIPLVHDAGKAIFANLALIFAIGIAVGFARDNNGTAGLAGAIGYLVMISVLKVIDPGIDMGVLSGIISGLVAGALYNRFKDVKLPEYLAFFGGRRFVPIATGISAVCLGLLFGVIWPPLQQGINGLGQLMLESGSFGAFAFGVLNRLLIVTGLHHILNNLVWFVFGSFTDPETGRVVTGDLARYFAGDPKGGQFMAGMFPVMMFGLPAACLAMYRNARPERRKLIGGLLLSMALTAFLTGVTEPVEFAFMFLAPLLYLLHALLTGLSMALTDLLDIRLGFTFSGGAIDLALGWGRSTHGWMLWPLGLLYAGIYYLVFDFCIRRFNLKTPGREDDASSESGDNAEAERAPAFIRALGGAANLEVVDACTTRLRLRLVDRNKASDAQLKALGAMAVVRPGKAGSLQVVVGPQADSIADEIRRALPFDTQPGEAVPPLGSPHTAEEVVAMQATVDAAEAQAWLGALGGAGNLREVRDVALTRLRVSVADERKLATEQLRRLGGQGVSSLAGGICHILVGPRAAALSQALQPLLRR

SEQ ID NO: 66546 - protein, 1298 aa, Pseudomonas aeruginosa
MLILRGAPALSAFRHGKLLEQLTQHVPAVTGLYAEFAHFADVTGALTADEEQVLARLLKYGPSVPVQEPSGRLFLVVPRFGTISPWSSKASDIARNCGLAKIDRLERGIAYYVQGELSESDAQQVAARLHDRMTQLVLDRLEGAAELFSHAQPRPLTAVDVLGGGRAALEKANVELGLALAEDEIDYLLKSFGELGRNPHDVELMMFAQANSEHCRHKIFNASWDIDGQAQDKSLFGMIKNTYEMNREGVLSAYKDNAAVIVGHVAGRFFPDPQTREYAASREPVQILMKVETHNHPTAIAPFPGASTGSGGEIRDEGATGRGAKPKAGLTGFTVSNLQIPGFEQPWEVPYGKPERIVTALDIMVEGPLGGAAFNNEFGRPALTGYFRTFEQKIATPHGEEVRGYHKPIMLAGGMGNIRDEHVQKGEISVGAKLIVLGGPAMLIGLGGGAASSMATGASSADLDFASVQRDNPEMERRCQEVIDRCWQLGERNPISFIHDVGAGGLSNALPELINDGGRGGRFELRAVPNDEPGMSPLEIWCNESQERYVLSVDAADFETFKAICERERCPFAVVGEAIEQRQLTVADSHFDNKPVDMPLEVLLGKAPRMHRAVTREAELGDDFDAAGLELQESVERVLRHPAVASKSFLITIGDRTITGLVARDQMVGPWQVPVADCAVTATSFDVYTGEAMAMGERTPLALLDAPASGRMAIGETVTNLAAARVGKLSDIKLSANWMAAAGHPGEDARLYDTVKAVGMELCPELGITIPVGKDSMSMKTRWQDNGEDKSVTSPVSLIVTGFAPVADVRQSLTPQLRLDKGETDLILIDLGRGKNRLGGSILAQVHGKLGRAVPDVDDAEDLKAFFAVIQGLNADGHILAYHDRSDGGLITSVLEMAFAGHCGVELNLDALADSREELAAVLFSEELGAVIQVREGATPEVLAQFSAAGLDDCVAVIGQPVNGYEINLNYNGETVYSAQRRILQRIWSETSYQIQRLRDNADCAEQEFDALLDEDNPGLSIKLSYDVNDDIAAPYIKKGVRPKVAILREQGVNGQVEMAAAFDRAGFAAIDVHMSDILAGRVDLDAFKGLVACGGFSYGDVLGAGEGWAKSILFNARARDGFQAFFARKDSFALGVCNGCQMMSNLHELIPGTEFWPHFVRNRSEQFEARVAMVQVQESSSIFLQGMAGSRLPIAIAHGEGHAEFESEEALLEADLSGCVSLRFVDNHGKVTEAYPANPNGSPRGITGLSSRDGRVTIMMPHPERVFRAVQNSWRPDDWQEDGGWLRMFRNARVWVD

SEQ ID NO: 66547 - protein, 525 aa, Pseudomonas aeruginosa
MSQDIHAHRILILDFGSQYTQLIARRVREIGVYCEIHPFDMSNEAIIAFAPRGIILAGGPESVHEADSPRAPQAVFDLKVPLFGICYGMQTMAEQMGGKVQGSDLREFGYARVDVVGKARLLDGIEDHVDDDGVLGLDVWMSHGDKVTEMPAGFHILASTPSCPIAAMADDARAYYGVQFHPEVTHTKQGLRILSRFVLDICGCAALWTPSNIVDDAIATVRAQVGSSKVLLGLSGGVDSSVVAALLHKAIGDQLTCVFVDNGLLRLHEGDQVMAMFAENMGVKVIRANAEDKFLGRLAGVADPEEKRKIIGRTFIEVFDEEATKLQDVKFLAQGTIYPDVIESAGAKTGKAHVIKSHHNVGGLPEDMQFELVEPLRELFKDEVRKIGLELGLPYDMVYRHPFPGPGLGVRILGEVKKEYADLLRQADHIFIEELRAFDWYHKTSQAFVVFQPVKSVGVVGDGRRYAWVVALRAVETIDFMTARWAHLPYELLEKVSNRIINEIAGISRVTYDVSSKPPATIEWE

SEQ ID NO: 66548 - protein, 459 aa, Pseudomonas aeruginosa
MRNDPFQRLGLDREVLTVSQLNQRARLLLEDVFPQVWVEGELSNLARPASGHVYFTLKDSNAQIRCALFRQNALRVRQALRDGLAVKVRGKISLFEGRGDYQLIADTVEPAGDGALRLAFEALKEKLAGEGLFASERKRPLPAHPRRIGIVSSPSGAVIRDIISVFRRRAPQVELTLVPTAVQGREAVAQIVRALQLADRQGFDALILARGGGSLEDLWCFNEEAVARAVAACATPIVSAVGHETDVSISDFVADVRAPTPSAAAELLAPNAGDLQQRLDGLRRRLVLRMRDQLLRERLRLEGVARRLRHPGERLRQQAQRLDDLDMRLRRAFERQLAVRHERLVRLETRLAAQHPGRTLALLRQKLDSLAARLPRAAREVLKDRRQRLEGLAQTLNVVSPLATLGRGYSILLDERGRAIRDAGQTQPGQRLKARLAEGELEVRVEDNHRTPVTLSLLD

SEQ ID NO: 66549 - protein, 493 aa, Pseudomonas aeruginosa
MVPVIALVGRPNVGKSTLFNRLTKSRDAIVAEYAGLTRDRQYGEARWQGRTYIVIDTGGISGDEEGIDAKMAEQSLQAIEEADAVLFLVDSRAGMTAADQMIAEHLRKRNKRSFLIANKVDTIDPDLARAEFSPLGLGDALPIAAAHGRGINHMLQEALGIFPKDNAEEEGEGEPASEEVAEGEEPTRIPGPSEKDGIKIAIIGRPNVGKSTLVNRMLGEERVIVYDQAGTTRDSIYIPFERNEEKYTLIDTAGVRRRGKIFEAVEKFSVVKTLQAIQDANVVIFVMDAREGVVEHDLNLLGFVLETGRALVIALNKWDGMEAAERDYVKTELERRLLFVDFADIHFISALHGTGVGHLYKSVQESFRSAVTRWPTSRLTSILEDAVQVHQPPMVNGRRIKLRYAHLGGANPPLIVIHGNQVDAVPKAYTRYLEKTYRRVLKLVGTPIRIEYKGGENPYEGKKNSLTARQVNKKRRLMSHHKKAEKKKKDKRR

SEQ ID NO: 66550 - protein, 380 aa, Pseudomonas aeruginosa
MVQWKHAALLALALAVVGCSSNSKKELPPAELTDFKEEVVLSKQWSRSVGDGQGDLYNLLEPAVDGSTIYAASAEGRVMAIQRETGDVLWKKDLERPVSGGVGVGYGLVLVGTLRGDVIALDEATGKKKWTKRVNSEVLSAPATNGDVVVVQTQDDKLIGLDAASGDQRWIYESTVPVLTLRGTGAPLIAGNMALAGLASGKVVAVDVQRGLPIWEQRVAIPQGRSELDRVVDIDGGLLLSGDTLYVVSYQGRAAALDVNSGRLLWQREASSYVGVAEGFGNIYVSQASGSVEGLDSRGASSLWNNDALARRQLSAPAVFSSNVVVGDLEGYVHLLSQVDGRFVGRERVDSDGVRVRPLVVGSWMYVFGNGGKLVAYTIR

SEQ ID NO: 66551 - protein, 429 aa, Pseudomonas aeruginosa
MSKSLQAIRGMNDILPEQTPAWRYLERTFAGLLDGYGYSEIRLPILEFTELFARGIGEGTDVVDKEMYTFLDRNGESLTMRPEGTAGCVRAVLEHGLSGGGQVQKLWYTGPMFRYEKPQKGRYRQFHQIGVEVFNLPGPDIDAELIILTWRLWQKLGMADAVTLQLNTLGSSEARARYREALVAYLQERFEQLDEDSQRRMTTNPLRILDSKVESTQALLVGAPTLHDYLDEESIAHFEGLKARLDAVGLRYEINQKLVRGLDYYCRTAFEWVTDKLGAQGTVCGGGRYDGLVSQFGGKPTPGVGFAMGVERLVLLLETLGVIPAELNRPADLYVCAFGEPAELAALTLAEQLRSAIPGIRLLVNAGAGSFKSQFKKADKSGARFALILGEDEVANRVVGFKPLRDEGEQQSIAWDALPEHLAACLAQA

SEQ ID NO: 66552 - protein, 371 aa, Pseudomonas aeruginosa
MSIHSASPIIRRKSRKIWVGNVPVGGDAPIAVQSMTNTETCDVAATVAQIRRLEDAGADIVRVSVPDMDAAEAFGKIKQQVNVPLVADIHFDYRIALRVAELGVDCLRINPGNIGREDRVKAVVDAARERNIPIRIGVNAGSLEKDLQKKYGEPTPEALLESAMRHVDHLDKLDFQNFKVSVKASDVFMAVAAYRLLARQIEQPLHLGITEAGGLRSGTVKSAVGLGMLLAEGIGDTIRISLAADPVEEIKVGFDILKSLHLRSRGINFIACPSCSRQNFDVVKTMNELEGRLEDLLVPMDVAVIGCVVNGPGEAKEAHVGLTGGTPNLVYIDGKPSQKLTNDNLVDELERLIRQKAAEKAEADASLIARG

SEQ ID NO: 66553 - protein, 347 aa, Pseudomonas aeruginosa
MMKAPQPEVVATASRQNPGETLRQAREQKGLSLSQVAGQLNLTENSLRQLENGAFDKLPGHTFSRGYIRAYAKLMGLDQAELVNSFDHFTGTNASGSTVQSLGRVAEPVRLSRNVLRIVSLLLLALLIGFGYFWWQEHSARTPETAGLSLEHVEVESADGTTEIHTLDEPEDQAVIEAQKEGEQAPAEVSPEVAAQAEGAPPVASEGAQVPAAPAQGTPAAPQQPVTAAPAGTAPAPGTAPAVPATASPAAPPAPSEPAAAPVVAGEGQGVVKVQFVADCWTQVTDANGKVLVSALKRKGDSLELAGKAPLELRLGFARGAQVSYNGQPVDVTPFVRGETARLKVGQ

SEQ ID NO: 66554 - protein, 128 aa, Pseudomonas aeruginosa
MAYSEKVIDHYENPRNVGKLDAADPNVGTGMVGAPACGDVMRLQIKVNEQGVIEDAKFKTYGCGSAIASSSLATEWMKGKTLDEAETIKNTTIAEELALPPVKIHCSVLAEDAIKAAVRDYKQKKGLL

SEQ ID NO: 66555 - protein, 163 aa, Pseudomonas aeruginosa
MRLTTKGRYAVTAMLDLALHAQQGPVSLADISERQGISLSYLEQLFAKLRRGNLVTSVRGPGGGYQLSRHMSGIHVAQVIDAVNESVDATRCQGQGDCHSGDTCLTHHLWCDLSLQIHEFLSGISLADLVSRQEVQEVALRQDERRCSGKTPRLDKIEASAID

SEQ ID NO: 66556 - protein, 258 aa, Pseudomonas aeruginosa
MFERVREDIQSVFHRDPAARNALEVLTCYPGLHAVWLHRLAHGLWTSGWKWLARLVSNFGRWMTGIEIHPGARIGRRFFIDHGMGIVIGETAEIGDDVTLYQGVTLGGTTWNKGKRHPTLGNNVVVGAGAKVLGPFTVGEGAKVGSNAVVTKEVPPGATVVGIPGRIIMREDSEQQAKRQAMAEKLGFDAYGVSQDMPDPVARAIGQLLDHLQAVDGRLEGMCQALTALGSDYCAKDLPVLREEDFAGVKDEDGNPAA

SEQ ID NO: 66557 - protein, 372 aa, Pseudomonas aeruginosa
MNFELLATDGKARRGRLTFPRGVVETPAFMPVGTYGTVKGMLPRDIEDIGAQIILGNTFHLWLRPGTEVIQRHGDLHDFMQWKGPILTDSGGFQVFSLGAMRKIKEEGVTFASPVDGAKVFMGPEESMAVQRALGSDIVMIFDECTPYPADHDVAKRSMELSLRWAKRSKIAHGDSPSALFGIVQGGMHEDLRLRSLDGLQEIGFDGLAIGGLSVGEPKEEMIRVLDFLPPQMPADKPRYLMGVGKPEDLVEGVRRGVDMFDCVMPTRNARNGHLFVDSGVIKIRNSVHKHDDSTLDPTCDCYTCKHFSRAYLHHLDKCGEMLGSMLNTIHNLRHYQRVMAGLREAIQQGTLAAFVDAFYAKRGLPTPPLDA

SEQ ID NO: 66558 - protein, 347 aa, Pseudomonas aeruginosa
MRVADFHFDLPEALIARHPLPERRASRLLALDGPTGTLAHRQFADLLDYLRPGDLMVFNNTRVIPARLFGQKESGGKLEVLVERVLDQHRVLAHIRASKAPKPGTRILVEGGGSAEMLQRHDALFELAFAEPVLPLLERVGHMPLPPYIDRPDDAADRERYQTVYAQRAGAVAAPTAGLHFDEALLEAIRAKGVDTAFVTLHVGAGTFQPVRVERIEDHVMHREWLEVGQDVVDAVSVCRARGGRVVAVGTTSVRSLESAARDGELKPFSGDTDIFIYPGRPFHVVDALVTNFHLPESTLLMLVSAFAGYPETMAAYAAAVAQGYRFFSYGDAMFITRNPAPRGPED

SEQ ID NO: 66559 - protein, 495 aa, Pseudomonas aeruginosa
MEFLVKSVRPETLKTATLVLAVGEGRKLGASAKAVDDATGGAISAVLKRGDLAGKVGQTLLLQSLPNLKAERVLLVGAGKERELGDRQYRKLASAVLSTLKGLAGADAALALGDLAVKGRDAHAKARLLVETLADGLYVFDRYKSQKAEPLKLKKLTLLADKADSAAVEQGSKEAQAIANGMALTRDLGNLPPNVCHPTFLGEQAKGLAKEFKGLKVEVLDEKKLRELGMGSFLAVAQGSDQPPRLIVLQYNGAKKDQAPHVLVGKGITFDTGGISLKPGLGMDEMKFDMCGAASVFGTFRAVLELQLPINLVGLLACAENMPSGGATRPGDIVTTMSGQTVEILNTDAEGRLVLCDALTYAERFKPQSVIDIATLTGACIVALGSNTSGLMGNNEALVRQLLKAGEFADDRAWQLPLFDEYQEQLDSPFADIANIGGPKAGTITAGCFLSRFAKKYHWAHLDIAGTAWISGGKDKGATGRPVPLLTQYLLERAK

SEQ ID NO: 66560 - protein, 142 aa, Pseudomonas aeruginosa
MTRVDFYVIPSADPSARLQVACRLAEKAWRQGMQVYLHCADEAQRSELDGRLWSFRGEAFIPHSLAEEDAEAPVALGLGEPPGNHRDLLINLTLEAPGFVPNFSRVAELVVEEPAIRQAARDKFRFYREQGYPLQDHRLPRI

SEQ ID NO: 66561 - protein, 950 aa, Pseudomonas aeruginosa
MDKTYQPHAIETSWYETWESNDYFAPSGEGQPYTIMIPPPNVTGSLHMGHGFNNAIMDALIRYRRMQGRNTLWQPGTDHAGIATQMVVERQLGAQGVSRHDLGREKFLEKVWEWKEQSGGNITRQIRRLGSSVDWSRERFTMDDGLSEAVKEAFVRLHEDGLIYRGKRLVNWDTKLHTAISDLEVENHDEKGHLWHLRYPLVNGAKTSEGLDYLVVATTRPETLLGDAAVAVHPEDERYAKLIGQFAELPIVGRHIPIIADEYVDREFGTGCVKITPAHDFNDYEVGKRHDLPLINIFDKNAAVLAQAQVFHLDGSVNPNLDPSLPQSYAGMDRFAARKAIVAEFEAMGLLEKVDDHALKVPKGDRSGTVIEPWLTDQWYVSTKPLAEDAIAAVEDGRIQFVPKQYENMYFSWMRDIQDWCISRQLWWGHRIPAWYDEAGNVYVGRDEVEVRTKHKLGNEAELRQDEDVLDTWFSSGLWTFSTLGWPQQTEFLKTFHPTDVLVTGFDIIFFWVARMIMLTMHLVKNPDGTPQIPFKTVYVHGLVRDGQGQKMSKSKGNVLDPLDIVDGIDLDTLLQKRTSGMMQPKLAEKIAKQTRAEFPEGIASYGTDALRFTFCSLASTGRDIKFDMGRVEGFRNFCNKIWNAANFVIENTDGQDTGVNGEPVELSSVDRWIISQLQRTEQEVTRQLDAFRFDLAAQALYEFIWDEYCAWYLELVKPVLWDENAPIERQRGTRRTLIRVLETALRLAHPFMPFITEEIWQRIKGQAGKEGPTLMLQPWPVADEGRIDAAAEGDIEWVKALMLGVRQIRGEMNISMAKRIDIILKNASPSDHRRLADNEPLLMKLAKLESIRVLEAGEEAPMSATALVGDMEVLVPMAGLIDKSAELGRLDKEIQRLEGEVKRVGGKLSNEGFVAKAPADVIEKERAKLAEAEQALAKLAEQRQKIAAL

SEQ ID NO: 66562 - protein, 229 aa, Pseudomonas aeruginosa
MGYLKNHWWKRWIRRRGCKLAGGPASVGKRTTLVLEERVELGHLRIVPPRLEIGAYSYVRSGTDLSLVASIGRFCSIGSDCFIGQEKHTHPSDWVSSHPFQHTGTALRYEPALSYAEIGHDVWIGHSAMVMEGVKVGTGAIIATRAVVTRDVPPYAIVAGTPAQVIRYRHPPEIIEGLLASRWWELDSAFLTGLPLDRPREFLAALEAREAPRAAYRRMTITRQGCRLD

SEQ ID NO: 66563 - protein, 227 aa, Pseudomonas aeruginosa
MSTNLLFFGIYPYVALLICLVGSWARFDLSQYTWKAGSSQMLSKKGMRVYSNLFHVGVLFILAGHFVGLLTPASVYHHLISTENKQLLAMVSGGFFGVLCFIGLSGLILRRLTDARVRATGNASDLMILLVLYAQLILGLSTIVASTHHMDGSVMVMLAEWAQAIVTLRPLAAAEAIAPVGLVYKLHVGLGLTLFVLFPFTRLVHIVSAPVWYLGRRYQIVRQKRPA

SEQ ID NO: 66564 - protein, 513 aa, Pseudomonas aeruginosa
MKIRSQVGMVLNLDKCIGCHTCSITCKNVWTSREGMEYAWFNNVETKPGIGYPKEWENQEKWKGGWVRAADGSIRPRIGGKFRVLANIFANPDLPEIDDYYEPFDFDYQHLHTAPKAEHQPVARPRSLVSGQRMEKIEWGPNWEEILGTEFAKRRKDKNFDQVQADIYGEYENTFMMYLPRLCEHCLNPACVASCPSGAIYKREEDGIVLIDQDKCRGWRMCISGCPYKKIYFNWKSGKSEKCIFCYPRIEAGQPTVCSETCVGRIRYLGVLLYDADRIHEVASCENERELYEKQLEIFLDPFDPAVIAQARKDGVADSVIEAAQKSPVYKLAMDWKLALPLHPEYRTLPMVWYVPPLSPIQNAAAEGHIGSDGVIPDVESLRIPVQYLANLLTAGDTAPVLLALKRLLAMRAYKRAEHVEGRQDLEVLAKVGLSVEQVEEMYRYLAIANYEDRFVIPSAHREEALSDAFAERSGCGFSFGNGCSGGSNSAVNLFGGKPTNRRDVIQVVQIQE

SEQ ID NO: 66565 - protein, 1261 aa, Pseudomonas aeruginosa
MSHLLDRLQFFKKKQGEFADGHGETSNESRAWEGAYRQRWQHDKIVRSTHGVNCTGSCSWKIYVKNGLITWETQQTDYPRTRPDLPNHEPRGCPRGASYSWYIYSANRLKYPKVRKPLLKLWREARAQHGDPVNAWASIVEDAAKAKSYKSQRGLGGFVRSSWDEVTEIIAAANVYTAKTYGPDRVIGFSPIPAMSMVSYAAGARYLSLIGGVCLSFYDWYCDLPPASPQIWGEQTDVPESADWYNSSYIIAWGSNVPQTRTPDAHFFTEVRYKGTKTVSITPDYSEVAKLTDLWLNPKQGTDAALGMAFGHVILKEFHLDRPSAYFVDYCRQYTDMPMLVLLEEHAGGAFKPTRYLRAADLADNLGQDNNPEWKTIAYDERSGGLVSPTGAIGYRWGESGKWNIAELDGRSGDQTRLQLSLLDGPEHACEVAFPYFAGQEHPHFKGVANDEVLLRRVPFREIVAADGKRLRVATVYDLQMANYSIDRGLGGDNVATSYEDADTPYTPAWQERITGVPAARATQVAREFADSADKTRGKAMVIIGAAMNHWYHMDMNYRAVINMLMMCGCIGQSGGGWAHYVGQEKLRPQTGWAPLAFGLDWSRPPRQMNGTSFFYLHSSQWRHEKLSMHEVLSPLADASRFAEHALDYNIQAERLGWLPSAPQLNRNPLRIAAEAEAAGLPVADYVVRELKSGGLRFASESPDDPQNFPRNMFIWRSNLLGSSGKGHEYMLKYLLGAKNGVMNDDLGKAGGPRPTEVDWVDDGAEGKLDLVTTLDFRMSSTCMYSDIVLPTATWYEKDDLNTSDMHPFIHPLSAATDPAWEAKSDWEIYKAIAKKFSAVAEGHLGVEQDLVTVPLLHDTPTELAQPFGGDGHDWKKGECEPVPGRNLPTLHLVERDYPNVYRKFTSLGPLLDKLGNGGKGIGWNTEKEVKLVGDLNHRVVESGVSQGRPRIDSAIDAAEVVLALAPETNGQVAVKAWEALSKITGREHAHLALPKEDEKIRFRDIQVQPRKIISSPTWSGLEDEHVSYNAGYTNVHELIPWRTITGRQQFYQDHPWMQAFGEGFVSYRPPVNTRTTEKLLNRKPNGNPEITLNWITPHQKWGIHSTYSDNLLMLTLSRGGPIIWLSEHDAAKAGIVDNDWVEVFNANGAATCRAVVSQRVKDGMVMMYHAQERIVNVPGSETTGTRGGHHNSVTRVVLKPTHMIGGYAQQAWGFNYYGTVGCNRDEFVVVRKMSKVDWLDEPRHGGLGGDALPQPLPQDI

SEQ ID NO: 66566 - protein, 220 aa, Pseudomonas aeruginosa
MDFFSVLSHLDWSQVGQLTLQHLLLVLVAVGLAILVGVPLGVLMTRFTWLAGPLQGAATVMLTIPSIALFGLLMPVYSVFGQGLGPLPAITAVFLYSLLPILRNTYLALTGVEAGIREAGKGIGMTFWQRLRMVDIPLAVPVILAGVRTAVVMNIGVMTIAAVIGAGGLGVLILTSISQSNMPMLVVGAVLVSLLAIVADLLLQWLQRILTPKGLRASAH

SEQ ID NO: 66567 - protein, 387 aa, Pseudomonas aeruginosa
MIELDKLSKTFTQKNGKEFRAVDSVSLTVEKGEICVFLGPSGCGKTTTLKMINRIIPPTSGRVLIDGQDTADLDEVTLRRHIGYVIQQIGLFPNMTIEENIMVVPRLLGWDKARCKEKARELMSMVKLEPKQYLQRYPRELSGGQQQRVGVIRALAADAPLLLMDEPFGAVDPINRESIQNEFFEMQRKLGMTVIMVSHDIDEAIKLGDKVAVFKSGRLLQYDHPDTLLAHPADEFVSAFTGQDSTLKRLLLVRAEDAADSSLVTARPQTPVAEALELMDENDRRYLIVVDDQGKGLGYVRRKDLRRQEGTCAPFVTPFRVTASHDEHLRILLSRMYEFNSSWLPVLDPDQQFLGEVTQESIADYLSSGRSRGGKGLIVSPAEQVGA

SEQ ID NO: 66568 - protein, 317 aa, Pseudomonas aeruginosa
MDTLQNMRAFVCVAETGSFTAASQQLNTTTAYVSRAVANLETHLRTRLLNRTTRRIALTEAGQRYLLRCEQILAYVEEAEAEASDAHARPAGKLKLHSMTGIGQHYVIRAIAGYRQQYRDVTFDLTMANRVPDLLDEGFDVAIVVASELPDSGFISQRIGETYSILCASPEYLRLNGTPSEPSELASHDCLRLVSPVVPLDRWLFDGPNGQEMVSIGASPFQVNVGDAMTEAIRSGLGIGILPVYSAIEDLGKGTLVRVLPQHRLQQLNVYALYPSRQYLDAKIKTWVEYLKESLPGLLQRDEAALVELGLELGRPS

SEQ ID NO: 66569 - protein, 317 aa, Pseudomonas aeruginosa
MSLPAAPKVPPQVAEQAVRWLVELQGGADDERLRQAWQRWRQAAPEHEQAWRHIEAVNQRLAGIGTPLALAAINAPHSPQRRRALKTLLLVLAAGGSAWGLRESGSLQRWSADYATGVGERRRLALADGSRLELNSDTAVDVRFDAGERRLLLLRGEIQLSTGHDPRPLHVYSAEGRLRPVGTRFDVRQFAGRTRVAVHEGAVQVENRAGQGLLLPSGRQLDFDRERLGAPQPLPVGSGAWTDGMLVAAGMRLDEFLAEVARYRPGRLGCDPRIGGLRISGSYPLDDSERILATLPAVLPVEVRRVTRYWVGVHPRE

SEQ ID NO: 66570 - protein, 784 aa, Pseudomonas aeruginosa
MSPSRALSPLSRALLLACLGGPVLVSAGSACAAEIRTDARQYYRLPAEPLEQALNHLGRQAGVLIAFSPEQTAARRSQALDGEYTLEEALAALLVGSGLEARARGDGAYTLEALPVEDPANLQALTVVGDWLADASAADVFEHPGARDVVRREQFQAQGAASTREVLERIPGVSAPLNNGTGSHDLALNFGIRGLNPRLASRSTVLMDGIPVPFAPYGQPQLSLAPVSIGNMDAVDVVRGGGAVRYGPQNVGGIVNFVTRAIPEDFATKLDVHSELSPSSSQDGLKTTHNVLIGGTGANGLGGALLYSGTRGGDWREHSDTRIDDLILKGRFQPSDEHTFSAMTQYYDGEADMPGGLGTAAYHDDPYQSTRPYDKFWGRRTLASASYEYTPNASQKLNVTGFFTKTLRSGYLDQGRNLTLSPREYWVRGLETRFSQGFELGESRHEVGIGHRYVNEASHELRYWTRADSGQLPSTGSRNDRDTRGSTEANAFYIDDRIDIGNWTITPGIRYEKIDSEQKNLLKNSKDSGRYNASLPALNVIYHLTPSWNLYANTEGSFGTVQYSQMGKAVRSGDIEPEKARTWELGSRYDDGILRAELGAFLINFDNQYESNQQTDSVTARGKTRHKGIEAAIAYDLADLDPLLSGFDVYASYAYVDASIREDGPNKGNQVPFSSKHKGTLGANYRTGAWSYNLDGSFQTSQYADNANTESESADGSTGRIAGWMVWSARGTYDFGPQLNDLKLGLGVKNLFDRRYYTRSFDDNNKGLYVGQPRTLYVQASVGF

SEQ ID NO: 66571 - protein, 527 aa, Pseudomonas aeruginosa
MTTQAAEVAKRRTFAIISHPDAGKTTITEKLLLMGKAIAVAGTVKSRKSDRHATSDWMEMEKQRGISITTSVMQFPYREHMINLLDTPGHEDFSEDTYRTLTAVDSALMVLDGGKGVEPRTIALMEVCRLRDTPIVSFINKLDRDIRDPIELLDEIEAVLKIKAAPITWPIGCYKDFKGVYHLADDRIIVYVPGHGHERIETKVIEKLDSDEARAHLGDLYDNFVEELELVQGACHEFDKDAFLKGEMTPVFFGTALGNFGVDQVLDCIVDWAPQPLSRATHERSVEPTEEKFSGFVFKIQANMDPKHRDRIAFMRICSGKYEKGMKMRHVRLGKDVKIADALTFFSSEREQLEEAYAGDIIGLHNHGTIQIGDTFSEGENFGFTGIPHFAPELFRRVRLKDPLKSKQLRQGLQELAEEGATQVFFPERNNDIILGAVGVLQFDVVASRLKEEYKVECAYEAINVWSARWIECDDEKKLKEFKDKAFENLSVDGGGHLTYLAPTRVNLSLMEERWPDIRFRATREHH

SEQ ID NO: 66572 - protein, 407 aa, Pseudomonas aeruginosa
MSACACDGGQLRPLDEALAELLARAPRPPACESLALERALGRVLGEDLLAPMDLPHWDNSAMDGYALCSADLPRSGGSLTVGARIAAGDTRGMSLPLGQAARIFTGAPLPTGADCVVPQELCVVDGERVQLPPVSAGQHVRRRGEELRRGAPVLRAGQRLRPQELGLLASLGVATVSVRRRLRIGLLSSGDELREPGQTLLAGQIYNANRYCIGALLRGLGFEVHDEEVLADELVASRDALSLAASEWDALVTSGGVSVGEEDHLKRAIAELGEVNLWRLAIQPGKPFAFGSVAGKPWLGLPGNPAAALVTALLVARPFLLRQQGLFDVVPRPLALPAAFDWPQPRARRQYLRARLDERGRVEIHPQQGSAMLLAASWADGLAVIERGATLGVGDAIDFLPFSALMA

SEQ ID NO: 66573 - protein, 185 aa, Pseudomonas aeruginosa
MSHLATSTFQPLNIAILTVSDTRTLETDTSGQTLADALLAAGHRLHQRSLKTDDIYQIRAVVSAWIADPEVQVGLITGGTGFTARDNTPQAVGPLFERDVEGFGELFRQVSQREIGTSTIQSRALAGLSNGTLVCCLPGSPGACRTAWNEILLAQLDSRTRPCNFVPHLKTPPAVAPVAGCGCRS

SEQ ID NO: 66574 - protein, 792 aa, Pseudomonas aeruginosa
MNSATLTELDLPVSGMTCASCAGRVERALKKVPGVAAASVNLASEQARVQAPADSLPALVAAVEQAGYQVPARSLELSIEGMTCASCVGRVERALKKVPGVREVSVNLASERAHLELLGAVDSQALLQAVEQAGYKARLLDAGQPRQDDAERRLRRERWWVIAALLLALPLVLPMLVEWAGLHWMLPPWAQFLLATPVQFVIGARFYVSAWRAVKAGAGNMDLLVALGTSAGYGLSVYLWLTAPPGHMPHLYFEASTVVIALILLGKYLESRAKRQTASAIRALEALRPERAVRLRDGREEEVAIAELRLGDEVVVRPGERFPVDGEVLDGSSHADEALITGESLPVPKAPGDKVTGGAINGEGRLLLRTTALGGETVLAKIIRLVEDAQAAKAPIQKLVDKVSQVFVPVVILIALVTLGAWLVAGVGLEQALVNAVAVLVIACPCALGLATPTAIMAGTGVAARHGILIKDAESLEVAHAVTSVAFDKTGTLTSGRPQIIHLGGDDQEQLLRLAGALQRGSEHPLAKAVLERCAERDLEVPPVNASQALSGRGIQGEVEGRRLALGNRRLLDEQELKPGALASAAADWEAEGRTLSWLLELAPEKRVLGLFAFGDSLKDGAAEAVEALRGRDIHSHLITGDNRGSAAVVAKALGIDDVHAEVLPADKAATVAELKGRGRVVAMVGDGINDAPALAAADVGIAMGGGTDVAMHAAGITLMRGDPRLVPAALDISRRTYAKIRQNLFWAFIYNVIGIPLAAFGLLNPMVAGAAMAFSSVSVVGNALLLRRWKP

SEQ ID NO: 66575 - protein, 641 aa, Pseudomonas aeruginosa
MTTRNPFSRRARLPLAVSLASSLAAPAFGVTFNIGEIEGSFDSALSVGASWSTAKPNKNLIGVNNGGKGLSQTSDDSHLNFKRGETFSKVFKGIHDLELKYGDTGVFLRGKYWYDFELKDEHREFKDIDDSGRKTLAKSSGAELLDAFIYHNYAIGDLPGSVRLGKQVVNWGESTFIQNGISAINPIDVTAFRRPGSEIKEGLIPVNMFYLSQNLTDNLSAEGFYQIEWDQTVVDNCGTFFSQPDVVADGCDQNLAVLTNNKASINLLNNVLAGAGLSVTPSPWDEGILVRRGPDRDARDSGQYGFALRYFADELNTEFGAYYMNYHSRLPIFSGQGASASTMAAINDLATRLAAINPALAAQAAAAATAGNSSYFIEYPEDIRMFGLSFSTTLPNGTAWSGEVSYRPNAPVQLNTTDILFAGLDPVSIGGNRPYDNASVLNGQAGQDLHGYRRKEITQLQTTLTHFFDQVMGAERLTLVGEIGWTHVGGLESTSKARYGRDPVFGPGPLPGTISGLASCQALNVSTLGTAEANNVSRYCENDGYTTSDAWGYRARAIWDYNDVFMGVNLKPSVAWSHDVDGYSPGPGANFEEGRKAVSLGVDAEYQNTYTASLSYTNFFDGKYTTVDDRDFVALSFGMNF

SEQ ID NO: 66576 - protein, 1212 aa, Pseudomonas aeruginosa
MRSKLFLLFFCLLLSGGRLFAVEAHPSLTLFSQLRIEHEDMAIAEDDWAWLRHKGHLRLGAALDETSPFNVRLDDENYEGITADVATLVGQLLGMRIKVVSFDTHADAVAALAAGKIDLLGSHYSSAGDSSLVLSQPYARDRLAVFKRMGEKRNSPEDLAGLSVAVAREHVGELRQRFPRARFVVFGSHDEAVAAVAFGHTDLYLDDVLSAYHRINRSYYGYVRFERFADARLEGGYGFLLRRGDTNLLRVVNSAIGAINQDRLESIARRWVGSGSLPTGQRIALTPQESRWIARHPVVRLVINDDLAPLAFFNSDETFSGIASDLLDMISRRTGLHFQVTPRSGGFPEQIGVLARKEADLAIMSRSSKREEMLRFTRSFLSTSYVLVTRADDKGRAEIPGSLDGKRIAIPAGHVGMQQVRERYPQASMVEVGVALDAMNLVYEGRADAAVVPLVTARYYIVRLFRERLAIADLVPIGAATAHFAVRRGDAELQSILDKALLSISPDDLSDIVNRWRSPPGMSGQTWVDYILVITEILAIAAALLLLCLGWVTYQRRQIRVRARVEQALSDQLRFVEALTDCMPPPLYVRDVNGRMLSCNRSYLQSVGLSSEEVMNRTVLELPMENFETAPEFHRSYLMAMREGRTIEAVYPVALGGRERWIDHWIQPFRDSSGTIRGVICGWLDITEHRQLIDELEEAKNLADEASRAKTTFLATMSHEIRTPMNAVIGILELALKRAETGRVDRSSIEIAYASAKSLLELIGDILDIARIESGRLSLSPKRANLRELVESVARVFEGLARQKRLSLVLEIDSSINGDVLLDAMRFKQILSNLVSNAIKFTDEGSIRIRIDGRQVEPSLLQVNLCVEDTGIGISLGDQQQLFRPFAQVNRNLQNTEGTGLGLVISRSLCEMMGGRLVMSSELGQGTRIDVELRLQVLEPIVENVRAIPLGSRQARRLQVLVVDDHAVNRQILHQQLSFLGHDVEEAENGLSALNLWHGQPFDMVITDCHMPLMSGSDLARSIRQEERENGEEPVVIIGLTADAQPEEIERCIQAGMNECLIKPIGLDVLEERLLALGFAADELPVTIDAEPVAIPTAPRLYDLDSLHALTGGEPTMLRRLLDELLTSNRKDLETLEGLVQRQETGELAELAHRIKGAARVVRGEQLVESCRRLEDACLSPNASFAWVEECAVGVKLAILALDESLVEECTD

SEQ ID NO: 66577 - protein, 838 aa, Pseudomonas aeruginosa
MISLPIDAVVPALRQALGAQHQAVLEAPPGAGKTTRVPLALLDEPWLAGQRILMLEPRRLAARAAAERLAAELGEKVGETVGYRIRLESRVGPKTRIEVVTEGILARRLQDDPALDGVGLVIFDEFHERSLDADLALALTLNGRELLRDEPPLKVLVMSATLEGERLAALLGEAPVVRSEGRMFPVDIRWGRPAQPGEFIEPRVQQAVLQALAEESGSVLVFLPGQAEIRRVHEGLREALGGRPEVLLCPLHGELDLAAQRAAIEPASRGTRKVVLATNIAETSLTIDGVRVVIDAGLARVPRFDPGSGMTRLETQRISRASATQRAGRAGRLEPGVCYRLWSESQHEQLPAYGTAEILQADLAGLALQLARWGVAPEELAWLDAPPAAAYAQARELLGRLGALNASGALSAHGQAMAELPTHPRIAHLLLRGQALGLGELACDVAALLGERDIQRGGGADLHSRLALLAGEARTGASRGAVQRARQLARQFRGYLRGAASEAVVDPGHPRWLGCLLAFAYPDRIARQRRAGGGDYRLANGRAAQFGEPDSLMKQPWLVIADLGSRQGQREERIYLAAELDPRLFDTVLAEQVSQRDELQWDEREGVLRAERQRRVGELVLSSEALPGLDEAARSQALLGLVRRKGLELLPWTPELRQWQARIGLLRRLDLEDKGESEWPDVSDAALLERLEEWLPAYLGKVTRLAHFANLDLASILAGLLPWPLPQRLDEWAPKTLEVPSGSRIRLDYSETPPILAVRLQELFGLGDTPRIAQGRLAVKLHLLSPAHRPVQVTQDLANFWRSTYAEVRKDLKGRYPKHYWPDDPLVAEATARAKPRK

SEQ ID NO: 66578 - protein, 499 aa, Pseudomonas aeruginosa
MRTDRKPTMSIDSDDGFVVARTAEEAVDRLAELHRQATAALSQALKRYIKERIEPSEAERQNFHYPQLRIGYRCQGEVPSTTRAYAKVQVPGEYSVTVTHPDAFRKYLLEQLRPLMDDFTVQVQVGPSQQDIPYPYVVEQGDELAGSGVTAAELARVFPSTDLSAASDDIADGLYEWERADQLPLALFDAARVDFSLRRLVHYTGSDWRHVQPWILLTNYHRYVDQFIRLGLTRLREDPRFVRMVLPGNVIIERGMDEGEANAIVAGVVWHRYQMPAYHLIAADGDGITLVNIGVGPSNAKNITDHLAVLRPHCWLMIGHCGGLRQSQTIGDYVLAHAYMRRDGILDRALPPHIPIPALAEVQVALQEAAAEVTGERGESLKRRLRTGTVLTYDDRNWELRWAQERPLINLARAIAVDMESGTIAAQGYRLRVPYGTLLCVSDKPLHSEIKLPGSANAFYERAVNQHLRIGIAALDLLRSQLNSLHSRKLRSFDEPPFR

SEQ ID NO: 66579 - protein, 209 aa, Pseudomonas aeruginosa
MKLRGLYAITDSQLLDDGRLLPYVEAALRGGARLLQYRDKSSDQARRLREAESLRELCERHGAQLIVNDDAELAARLGVGLHLGQTDGSLSAARALLGRQAIIGATCHAQLELAEQAVAEGASYVAFGRFFNSSTKPGAPAASVELLDQARPRLHLPITAIGGISLDTAPGLIARGVDLVAVIHALFAAASAAEVERRARAFSALFEPA

SEQ ID NO: 66580 - protein, 279 aa, Pseudomonas aeruginosa
MSEDRSSNGHKSWLDKITQAFAHEPRNRQELLELLRDAHDNKLLDSEALSIVEGAIQVADLQVRDIMVPRSQMMSIRSTQTPKEFLPAIIEAAHSRYPVVGESLDDVMGVLLAKDLLPLILHNDERPFDIKELLRPATFVPESKRLNVLLREFRANRNHMAIVIDEYGGVAGLVTIEDVLEQIVGDIEDEHDVEEDSYIKPLPSGDFIVKALTPVDAFNDFFGSEFSDEEFDTVGGLVMSAFGHLPKRNEVVELGEFRFRVLNADSRRVHLLRLSPLQN

SEQ ID NO: 66581 - protein, 873 aa, Pseudomonas aeruginosa
MHEQYQPLEIETQAQNYWKEHQSFLVRELPDKEKFYCLSMFPYPSGKLHMGHVRNYTIGDVISRYHRMQGRNVLQPMGWDAFGMPAENAAMKNNVAPAAWTYDNIAYMKSQLDSLGLAIDWSREVTTCKPDYYRWEQWLFTRLFEKGVIYRKNGTVNWDPVDQTVLANEQVIDGRGWRSGALIEKREIPMYYFKITAYAEELLESLDNLPGWPEQVKTMQRNWIGKSRGMEIGFPYDQASIGHAGQLKVFTTRPDTLMGATYVAVAAEHPLATQAAQNDPQLQAFIDECKRGGVAEADIATQEKKGMATSLFVEHPLTGDKLPVWVANYVLMNYGEGAVMAVPGHDERDFEFANKYGLPIRQVIAKVEGDNDFESSVWKEWYGAKDESVLTVNSGKYDNLGYQAAFDAIGADLEAKGLGQARTQFRLRDWGISRQRYWGCPIPIIHCEACGDVPVPADQLPVVLPEDVVPDGSGSPLAKMPEFYECNCPKCGQPAKRETDTMDTFVESSWYFARYACPQFEGGMLDRKAADYWLPVDQYIGGIEHAILHLLYARFFHKLMRDEGLVGSDEPFKNLLTQGMVVADTYYRTTANGGKDWFNPADVEVERDAKAKVVGARLKSDGQPVEIGGTEKMSKSKNNGVDPQSMIDQYGADTCRLFMMFASPPDMSLEWSDAGVEGANRFLRRVWRLAHAHVSAGLPGALDVAALSDAQKQVRRAIHLAIRQASQDVGQHHKFNTAIAAVMTLMNVLEKAPNQDAQDRALIQEGLETVVLLLAPITPHICHVLWGQLGHAEAVIDARWPSVDESALVQDTLQLVVQVNGKLRGHIDVAASASREDVEAAARANENVLRFTEGLSIRKVIVVPGKLVNIVAN

SEQ ID NO: 66582 - protein, 327 aa, Pseudomonas aeruginosa
MSTVVEKSGEAKPGKVEVGVKLRGAEKVARIPVKIIPTEELPKKPDWIRVRIPVSPEVDRIKQLLRKHKLHSVCEEASCPNLGECFSGGTATFMIMGDICTRRCPFCDVGHGRPKPLDVDEPTNLAIAIADLRLKYVVITSVDRDDLRDGGAQHFADCLREIRKLSPGIQLETLVPDYRGRMDIALEITANEPPDVFNHNLETVPRLYRSSRPGSDFEWSLDLLQKFKQMVPHVPTKSGLMLGLGETDDEVIEVMQRMREHDIDMLTLGQYLQPSRNHLPVQRFVHPDTFAWFAEEGEKMGFKNVASGPLVRSSYHADQQAHGNKIG

SEQ ID NO: 66583 - protein, 155 aa, Pseudomonas aeruginosa
MRLRLIAVGSRMPRWVEEGWQEYVKRLPAELSLELVEIPLNTRGKNADVARLIRQEGEAMLARVQPGERVVTLEVEGRPWSTEQLARELDRWRLDARTVNLMVGGPEGLAPEVCARSEQRWSLSPLTLPHPLVRILVGEQIYRAWTVLSGHPYHK

SEQ ID NO: 66584 - protein, 421 aa, Pseudomonas aeruginosa [sequence omitted]

SEQ ID NO: 66585 - protein, 437 aa, Pseudomonas aeruginosa
MSLDSFNAWMAANPEWLGLAIFLIAFLECAAIVGIVLPGVVLLFGVAVIAGSGALGLGETLLLAYAGGVLGDLSSYWIGRRFHQNIRRLPGLRSHPQWITAAEVYFERYGIASLLVGRFIGALRPMLPMVAGMLDMPFGRFLGVSLIAAAGWAVAYLLPGWATGAALRLPLPEGFWSEAGIVAACLAVLVGVVVQASLRRKRWATAVAAALSLVLLLAMTVAWPYLQDLDQGLMTLVQEHRNADLNPVMVVVTRLGDFRTQFIAGALLGGILLLTRQWRPAIFAIGTLVGTALANQTLKTLFARARPEVLAEPLSSFSFPSGHSSASFAFFLTLGVLASRQQPPRWRLTWVLLAVIPSLSIALSRVYLGVHWPSDIVAGALLATTVCAASLWLSQRRESLPALPQRVWWLLLPVCVATLAIAAGWALPEAIARYRPL

SEQ ID NO: 66586 - protein, 506 aa, Pseudomonas aeruginosa
MRYAHPGSEGAIVSFKARYGNYIGGEFVPPVKGQYFTNTSPVNGQPIAEFPRSTAEDIDKALDAAHAAADAWGRTSVQERSNILLKIADRIEQNLELLAVTETWDNGKAVRETLNADIPLAADHFRYFAGCIRAQEGSAAEINDSTVAYHIHEPLGVVGQIIPWNFPLLMAAWKLAPALAAGNCVVLKPAEQTPLGICVLLELIGDLLPPGVLNVVQGFGREAGEALATSKRIAKIAFTGSTPVGSHILKCAAENIIPSTVELGGKSPNIYFEDIMQAEPAFIEKAAEGLVLAFFNQGEVCTCPSRALVQESIYPAFMEEVLKKVRAIKRGDPLDTETMVGAQASQQQYEKILSYLDIAQQEGAELLAGGSVEKLEGNLASGYYIQPTLLKGHNGMRVFQEEIFGPVVGVTTFKDEAEALAIANDTEYGLGAGLWTRDINRAYRMGRGIKAGRVWTNCYHLYPAHAAFGGYKKSGVGRETHKMMLDHYQQTKNLLVSYDINPLGFF

SEQ ID NO: 66587 - protein, 276 aa, Pseudomonas aeruginosa
MWSFRAWRRRRLLARHPVAEELWQRVRRHLPILDGLDADEDRRLRERAVLFLADKHLTALAGVDLDDFGRLLLAAQAQLPLLHLPELNWYQGFHELVLYPDDFVSPQKHRDASGVVHEFDDERSGETSLQGPVVLAWPGVVGGGGWDAYNLVIHELAHKLDMLNGDANGLPPLHAGMRIGDWASAMQAAYDEMNALLDRDPDAQTAIDPYAAEDPAEFFAVTSEYFFTAPDLLHEAYPAVYRQLQLFYRQDPLQRLRRLQAEHPDYREAAGDTTNG

SEQ ID NO: 66588 - protein, 229 aa, Pseudomonas aeruginosa
MKQYGAEFFGTFWLVLGGCGSAVLAAGVPELGIGYLGVALAFGLSVLTMAYAIGPISGAHLNPAVSVGLWVGGRFPASQLLPYVVAQVLGGLAAGGVLYLIASGKAGFDLAAGFASNGYGEHSPGGYSLQAALVSEVVLTGMFLLIILGATSKRAPQGFAPIAIGLTLTLIHLISIPVTNTSVNPARSTAVALYVGDWAVSQLWLFWVAPILGAVLGALAYRLIGDKND

SEQ ID NO: 66589 - protein, 295 aa, Pseudomonas aeruginosa
MIAAYQARCQARVDAALDALFVAPREELQRLYEAMRYSVMNGGKRVRPLLAYAACEALGGAPQRADAAACAVELIHAYSLVHDDLPAMDDDDLRRGQPTTHRAFDEATAILAADGLQALAFEVLADTRRNPQEHAVCLEMLTRLARAAGSAGMVGGQAIDLGSVGVALDQAALEVMHRHKTGALIEASVRLGALASGRAEPASLAALERYAEAIGLAFQVQDDILDVESDTATLGKTQGKDQAHNKPTYPALLGLEAAKGYALELRDLALAALDGFPPSADPLRQLARYIVERRN

SEQ ID NO: 66590 - protein, 265 aa, Pseudomonas aeruginosa
MRSFWLLACLLLSLSAGAAQRVVSLAPSLTDSVLELGAARRLVGVLDGGERPAAIGDLPSVGRYGQVNLERLLELQPDLILVWPGSVPEAQLQRLRDFGIALFIAEPHSLDELALQLAALGEALGEAEAGQRLSARFREGMRRLAERYRRDKPLKVFYQVWDRPLYTIGGRQVISDALRVCGAENLFGDLPQPAPQVSVEAVLARDPAVIVAGSHAQLELWRQWPALAATRRGQLYRIEDKNLERPSFAMLAATEKLCRSLAGAR

SEQ ID NO: 66591 - protein, 322 aa, Pseudomonas aeruginosa
MGEFELIRRFFAAAACAAPAADVALGIGDDCALLAPPAGEQLAVSTDTLVEGVHFPAGCDPFLLAQRALAVSASDLAAMGAAPLAFTLALTLPQADAEWLQGFARGLDAMARQCGLALVGGDTTRGPLSMTLTVFGRVPAGQALTRAGARPGDLLCVGGPLGEAGAALELVLERRSAPAEVAEPLLARYWTPAPQFGLGLALRGKASAALDISDGLLADCGHIARASGVALLVECQRLQASAALSGLLAGEEALRQQLAAGDDYVLVFTLPPEYLGEIRAAWPAMAVIGRVEAGQGVHLLDADGKELIPAAAGYQHFGTQRD

SEQ ID NO: 66592 - protein, 159 aa, Pseudomonas aeruginosa
MSNQDSGNPAAKPPKGKTAARRKARSLAVQALYSWQIAGQPLHEIEAQFRTDNDFSEVDGAYFHEILHGVPRQKSELDSTFEPCLDRPLAEIDPVELAILRLSTYELRNRIDVPYKVVINEGIELAKTFGATDGHKFVNGVLDKLAPRLRAAELRGGKR

SEQ ID NO: 66593 - protein, 158 aa, Pseudomonas aeruginosa
MTLKTIEGTFIAPKGRYALVVGRFNSFVVESLVSGAVDALVRHGVAESEITIIRAPGAFEIPLVTQKVAQQGGFDAIIALGAVIRGGTPHFEYVAGECTKGLAQVSLQFGIPVAFGVLTVDSIEQAIERSGTKAGNKGAEAALSALEMVSLLAQLEAK

SEQ ID NO: 66594 - protein, 365 aa, Pseudomonas aeruginosa
MALNTIDELIEDIRQGKMVILMDDEDRENEGDLIMAAECVRTEDINFMVKHARGLVCMPMTRERCERLGLPLMVQRNGSGFGTKFTVSIEAAEGVTTGISAADRARTVQAAAAKNAVAADIVSPGHIFPLMAQPGGTLARAGHTEAACDLARMAGFEPSGVICEVMNDDGSMARRPELEAFAAEHGIKIGTIADLIHYRLIHERTVERIAEQPLDSELGHFNLITYRDSVEGDVHLALTLGKVCAEEPTLVRVHNMDPLRDLLQVNQPGRWSLRAAMTKVAEAGSGVVLLLGHQIGGDDLLAHVREIASAPAPAPKATTTYSTVGAGSQILRDLGVRKMRLLSAPMRFNAISGFDLEVVEYLPAE

SEQ ID NO: 66595 - protein, 219 aa, Pseudomonas aeruginosa
MFTGIIESIGSVRAMTPKGGDLRVYIATGKLDLGDVKLGDSIAVNGVCLTAVELPGDGFWADVSRESLARTAFQHLKVGSRVNLEKALTPTTRLGGHLVSGHVDGVGEVLKREENARAIQFTVRAPRELARYIAHKGSITVDGTSLTVNAVNGAEFELTIVPHTLSETIMAEYQPGRRVNLEVDLLARYLERLLLGDKAAEPSASGISEAFLAENGFLK

SEQ ID NO: 66596 - protein, 373 aa, Pseudomonas aeruginosa
MNAADPLYMARALELARQGLYSTQPNPRVGCVLVKDGQVVGEGWHVRAGEPHAEVHALRQAGENARGATAYVTLEPCSHFGRTPPCADALVGAGVARVVAAMQDPNPEVAGRGLLRLMQAGIAVQSGVLEAEARELNIGFIKRMEHGLPFVRVKLAMSLDGRTAMASGESQWITGPSARSAVQRLRARSSVVLSGADTLLADDARLNVRPDELGLNAELTALAAARQPLRVLVDGRLRVPLESAFYQAGPALVATCAAASARERFQDAGHELLALPSAEGHVDLHKLLLELAARGANEVLVEAGPRLAGAFARLGLVDEYRLFVAPKFLGSSARPLLDWPLARMADAAQLRIDDIRAVGDDWLVTARPHLRDA

SEQ ID NO: 66597 - protein, 214 aa, Pseudomonas aeruginosa
MSLHRIRVMVADDHPAISLGISYELSQCGSLEMLGQVSNSTELIGRLNEGDCDVVIVDYTMPGGKYGDGLALLSLLRRRYPHLQLVVFTMLNNPGLIRAILKQGINCILSKSDSTSHLLAAVSAAYSRNQYFSPSIRDIFVNQVLSSHNERLTPREAEIVRLFGSGLTITEIAERSHRSVQTISTQKVSAMKKLGIKRDADLIRYAAEGYCRMP

SEQ ID NO: 66598 - protein, 1018 aa, Pseudomonas aeruginosa
MNKCYALVWNVSQGCWNVVSEGSRRRGKPAGAKAAIASVLALLGATALAPAYALPSGGTVVGGSANGEIHLSGGNSLSVNQKVDKLIANWDSFSVAAGERVIFNQPSSSSIALNRVIGTKASDIQGRIDANGQVFLVNPNGVLFGRGAQVNVGGLVASTLDITDAEFNGNSSRYRFTGPSTNGVLNHGGAITAAEGGSIALLGAQVDNRGTVLAQMGGVGLGAGSDLTLNFDGNKLLDIRVDAGVANALASNGGLLKADGGRVLMAARTANALLNTVVNSQGAIEARSLRGKNGRIVLDGGPDGKVMVGGALSANALNGPGHGGTVEVRGQAVEVALGTQVNTLASNGLNGTWKIAADKIDVRPSAVSDGVTVHADTLSRNLASTNIELVSTKGDLDLDGSVNWASGNRLGLGSAADLTLNGRLNASGAKAGLELKAEGAIDINDKIVLGGAGSALAMDAGEGHRVNGTASVSLAGANATYVSGGYYYTVVQNLAQLQAINKNLDGLYVLGGNILGGSYYCTALQSIGGPAGVFSGTLDGLGNSIGNLSISNTGPNVGLFARSSGTLSNLKLNNLRVSDNTYGSGPSSLGALVGINSGRIANVSASGVSVVGSRLRSNALGGLVGRNISGQIANASVSGGVTGYAASTAVGGLVGENFTTAWGPEAVIENAHSNVHVAAQSTERNSLGGVGGLVGLNAKGMIRASGSQGKVETYRPGLNVGGLVGYNMFGHVSDSSASGQVEAGGAGNTGGLVGLSSGGEIFRSQASGSVYSKGGLATGGLIGKAEGNGMLGNLKASGSVTDQGGADLGGLVGNNSQSAIETAEATGKVSGGSNSRVGGLIGHNLGGSVAHAISRGDVSGGFNSLVGGLVGHNGGELVNVDASGRVSAAASASVGGLVGSNAGSILSARSSSTVNGSGRSRIGGLVGENQIQGRIVSSMSEGTVSGDYYVSMGGLAGLNLGSIEYSGVSGKIDFKPQSHYGQIYGAQVGENHGVLGGNYVIGEAALLPPAGIDYGNIW

SEQ ID NO: 66599 - protein, 844 aa, Pseudomonas aeruginosa
MAVASPAGGLDAPSRRIVFDAQMLALGPGGRSIDTSRFERGDVIEPGRYRLDLLLNSRWRGVEEVELRRQPGRESAVFCYDRGLLERAGIDLEKSARGQDRSSARDPLPEGLHCDPLERYVPGARVKLDIAEQSIYVSVPSYYLSLDSSKTYVDPASWDSGISAALLNYNSNLHVRENHGRSATSGYAGMNAGFNFGRARLRHNGTATWSRRMGSHYQRSATYVQTDLPAWRAQLLLGENSTSSEFFDAVSFRGVQLSSDDRMLPDSLRYYAPVVRGTASTNARVSVYQRGYLIYETTVAPGAFALDELQTASYGGDLEVRVTEASGEVRSFIVPFATTVQLLRPGTTRYSLTAGRLNDPSLERRPNMLQGVYQRGLGNDVTAYAGGAFTGSYMSGLMGAALNTPVGGFSGDVTLARTEVPGDDRLSGSSYRLAYSKNLPNTGTNFSLLAYRYSTGGYLGLRDAAFMQDRVERGEPLESFSRLRNRLDANISQQLGNGGNLYLNGSSQRYWSGGGRAVNFSVGYSNQWRDVSYSISAQRLRSQYEGFSSGDRRGETSTLFSLNLSIPLGGAGRGSPTLSSYLTRDSNSGTQLTSGVSGMLGKRGEASYSLSASHDRDSRQTSKSASLDYRLPQVELGSSLSQGPGYRQLSVKAAGGLVAHSGGITAAQTLGETIGLVHAPNARGAAAGYSGSRIDRHGYAVIPNLLPYQLNSVDLDPNGMADEIELRSSSRNVAPTAGAVVRLDYPTRVARPLLVDSRMPSGEPLPFAAEVLDAHSGQSVGAVGQGSRLVLRVEQDRGSVRVRWGNEPQQQCLVDYALGPRETTPPVLQLACRPASAADRERTL

SEQ ID NO: 66600 - protein, 248 aa, Pseudomonas aeruginosa
MAPLMHRFHSFVAASAVAIALCVGTAHAGLIAQGTRVVFPASEREVTLRVSNTSGTPVLAQAWIDDGRQDVPPEELQVPFSVTPAVTRVEPNGGAVLRIAYLKAPLPTDRESLFWLNILEVPPRDEDENNALQFSFRSRFKLFFRPSQLKSVDSAAGKLQWKFLESGGAGKKTVVQVNNPTPYYVSFASVELIVDGRVMSVGKGMVAPFSTKEFDWQGNPKNMEAASVRYEVINDYGGRNTHDRALGK

SEQ ID NO: 66601 - protein, 352 aa, Pseudomonas aeruginosa
MKALRWHAARDLRLSELERQAPRPGEVELEVAYCGICGSDLHEYQSGPHSIPQAEAHPLSGCRAPLTLGHEFCGVVAALGPGVEGPRIGDRVAVEPEYRCGECRYCREGRYNLCESMGFIGLMGDGGFAERARVPAYMLHRLPDAVGFRQAAVLEPAAVALHALRRSSLAPGQRCAVFGLGPIGLLLVMLARLRGIEDIAAVDVSPERLALAGEFGASRALDARDGDTAARLREGGALDCAFEAAGSQASLDAALASLRKGGELVLVSLMGEVRLDAFDLVNRELRLLGSVGYRDAYPELIALLADGRLDLARAVTRSVPLEQAVEHGFEALLRDKSQLKVLVNPNPALADA

SEQ ID NO: 66602 - protein, 241 aa, Pseudomonas aeruginosa
MVFQHDIYAGQQVLVTGGSSGIGAAIAMQFAELGAEVVALGLDADGVHAPRHPRIRREELDITDSQRLQRLFEALPRLDVLVNNAGISRDREEYDLATFERVLRLNLSAAMLASQLARPLLAQRGGSILNIASMYSTFGSADRPAYSASKGAIVQLTRSLACEYAAERIRVNAIAPGWIDTPLGAGLKADVEATRRIMQRTPLARWGEAPEVASAAAFLCGPGASFVTGAVLAVDGGYLCA

SEQ ID NO: 66603 - protein, 396 aa, Pseudomonas aeruginosa
MDSTSETRSGSWLSVIALALAAFIFNTTEFVPVGLLSDIGHSFEMPTSQVGLMLTIYAWVVSLASLPMMLLTRNIERRKLLVGVFLLFIASHVLSGLAWSFQVLMLSRIGIAFAHAVFWAITASLAVRVAPPGQQAKALGLLATGTTLAMVLGIPLGRVVGEALGWRTTFMAIAGLSVLTLLYLARSLPLLPSQNSGSLRSLPMLFRRPALVCLYVLTVVVISAQFTAYSYIEPFAKQVAQMSGEATTLLLLLFGGAGIFGSILFSRYSEAFPRGFLLAAILALGSSLALLLPLSAQPTWLMALSLLWGMSIMCFGLAQQSRVLRLASDATDVAMALFSGLYNVGIGAGALLGSVVSERMGLASIGNVGAALALAGLLLALFAALRYAEALKSTSL

SEQ ID NO: 66604 - protein, 268 aa, Pseudomonas aeruginosa
MDLPVNRFKQRLRSGEAQIGLWLGLADPYCAELAANAGFDWLLLDGEHAPNDLRSLLGQLQALAPYPGQPVIRPVQGDTALIKQLLDIGAQTLLVPMVDSAAQAEGLVRAVRYPPAGVRGVGSALARASRWNSVAEYLNHADEQMCLLVQVENLEGLANLDAIAAVEGVDGVFIGPADLSAAMGHRGNPGHPEVQAAIEDAIHRIRTAGKAAGILSADETLARRYLELGCAFVAVGVDTSLLMRSLRELAGRFKGGAPAPSASSSVYG

SEQ ID NO: 66605 - protein, 402 aa, Pseudomonas aeruginosa
MPASASRIQVGSGERRLLLLLSALVAFGPLSIDMYLPSLPAIAADLGASDAQVQRSISGFLVGFCVGMLFYGPLSDRFGRRPVLLAGIALYLFSSLACALADSAGQLVLLRVLQALGGGAASVLARAMVRDLYPLGEAARMLALMHMVTMLAPLAAPLLGGYLMLWAGWRALFVVLALFAGLCLLAVWRVAESHPPERRGGSLAQAFLAYGRLLGDRRALGYVLCMGLAFAGMFAYISAAPFVFIEHFGVRAERFGWFFGLNILGVMLATWCSARLVRRHGPRPLLRAGSLLACVSGLFLLGYAALGERGGLWALVPGLLCFVSVTGLLGANCIASLLALYPGQAGAASAVAVSGQFGLGCLASLAVGWLALPGVLPMALVMAVCGVGSLLALGLALHGGNR

SEQ ID NO: 66606 - protein, 412 aa, Pseudomonas aeruginosa
MSVPTHQQDLIALLEERGFVHQCTDRDGLAAHLAAGPATAYLGFDATADSLHVGHLQGLMLMRWLQKAGHRPLLLIGGATTRIGDPSFRDSSRPILTEAQIQANIDGIARVFSRYVELHDDSLVNNAEWLDGVGYLEFLDRVGRHFSINRLLTFDAIRQRLDREHSLSFLEFGYTLLQAYDFVELSRRRGCTLQLGGADQWANIINGVELSRRQGGAQLFGLTMPLLATSDGRKMGKSAQGAVWLNAERLAPFDFWQFWRNCDDRDVGRFLALFSELPMDEVRRLGALQGAELNEAKVVLANAATALAHGEHAARSAADAARGVFADGTRDSGLPVMKLSRARLAQGLSLTDLLLEHAIQPSRSAVRRLAAGGGLRLDGTPVSDPDTPLAGEVDGLRLSLGKKQHLHLRLED

SEQ ID NO: 66607 - protein, 363 aa, Pseudomonas aeruginosa
MNSSPQANAAMRAAVWHGRHDIRVEDVPLPAEPPPGWVQIRVHWCGICGSDLHEYLAGPVFIPVEAPHPLTGLKDQCILGHEFSGEIVRLGNGVTGFAVGQAVAADACQHCGTCYYCRHGLYNICENLAFTGLMNNGAFAEYVNVPANLLYALPAGFPSEAGALIEPLAVGMHAVKKAGSLLGQNVVVVGAGTIGLSTIMCARAAGAAQVIALEMSSARKAKALEVGASQVLDPSRCDALGEIRALTGGLGADVSFECIGNKHTAKLAIDAIRKAGKCVLVGIFEEPSEFNFFELVSTEKQLLGALAYNGEFADVIAFIADGRLDIAPLVTGRIGLEEIVERGFEELVNNKEHNVKIIVSPGG

SEQ ID NO: 66608 - protein, 301 aa, Pseudomonas aeruginosa
MPTRRRSALPLLALALSLFAILAAAGEPKPARIVSTTPSVTGILLAMDAPLVASAATTPSRLTDAKGFFSQWAKVADQRGVEVLYRNLRFDIEAVIAQDPDLLVASATGADSAAPYRAELEAQGVPTLVVDYSKHSWQELATELGRHTGLERQAQAAIQRFDAYTAEVAAAIAPPQGPVSVVGYNIAGSYSIGRQASPQARLLEALGFQVAELPEALAGKVTRASDFQFISRENLPAAIAGDSVFLLGASDDDVQAFLADPVLANLSAVREKRVYALGPSSFRIDYYSGRQMIDNVARHFR

SEQ ID NO: 66609 - protein, 272 aa, Pseudomonas aeruginosa
MSSTIHPLPSFGLGTFRLTGQVVVDSVRSALELGYRAIDTAQIYGNEADIGRAIAESGVPRSELFLTTKVWVDNYAREKLLASLRESLEKLRTDRLDLVLIHWPAPGNGVELGEYMAALAEAKSLGLTRRIGVSNFNIELTRQAIAAVGAGEISTNQIELSPYLQNRALTAYLEEQGIAVTSYMTLAYGKVLKDPTLAGIAARHRATVAQVALAWAMQLGYAVIPSSTRRENLASNLLARDLRLDAEDMARIAGLERNGREVSPQGLAPAWD

SEQ ID NO: 66610 - protein, 547 aa, Pseudomonas aeruginosa
MAKAADVVVQCLENEGVQYVFGIPGEENLDLLESLRKSQIRLVLTRHEQSAGFMAATYGRLTGKTGVSLSTLGPGATNLVTAGAYAYLGGMPMLMITGQKPIKKSKQGRFQILDVVGMMQPLTKYTHQLASADNIPSRVREAFRLAEEEKPGAVHLELPEDIAAEQTDSLPIPPSLSRRPLAEYKAICAAVEKLRAARSPILVIGAGANRKMTAKVLKQLIDKTGIPFVTTQMGKGVVDERHPRFLGNAALSAGDFVHRAVEAADLIVNVGHDVIEKPPFFMVRGGTEVIHVNFRSAEVDPVYFPQIEVVGDIANAIWQIGEALDDTAHWDFTRLLAIREANEAQVAEGADDPRFPLYPQRLVADVRRALPSQGIVALDNGMYKIWFARNYKAHMPNTVLLDNALATMGAGLPSAMAAHLVYPDRPIVAVCGDGGFMMNSQELETAVRLKMNLTVIILRDNGYGMIRWKQSNMGFADFGLDYGNPDFVHYAEAYGAHGHRVDSAEGFLPLLERCLGTPGVHVIDCPVDYSENDRILNVELRERALAV

SEQ ID NO: 66611 - protein, 346 aa, Pseudomonas aeruginosa
MGQDKLKVAVLFGGSSEERDVSIASGAQVIQALRSAGHQVLAVDTASGLLGAEEERRLLASKVKEVPPDSDSLAIIRSGKQSLLSAGELAGVDVFFLALHGGTGEDGTLQALLDAGGFAYTGSGHLASAMAMDKDVAKRLFLAAGVETASWLMAPASEEEVREQLGFPLVVKPNSQGSTVGLSIVHSQAELQPAIELAGRYGDEVMLERFVAGREVTVGVLDDQALPVGEILLGGQEVFDYEHKYQAGAVREVFPADLPPAIAAEAQRLALKVHRALKLSGYSRTDFRLDEQGRLWCLEVNTLPGMTATSLLPQAAAAAGIGFAELCERICRLGIERCKGARKARS

SEQ ID NO: 66612 - protein, 351 aa, Pseudomonas aeruginosa
MTDRFTRLLGIQQPIIQAPMLGVSTPALAAAVSNAGGLGSIAITGSAAEKGRALIREVRGLTDKPFNVNLFCHRPGQADPARERAWLDYLKPLFAEFGAEPPVRLKNIYLSFLEDPTLLPMLLEERPAAVSFHFGAPPRDQVRALQAVGIRVLVCATTPEEAALVEAAGADAVVAQGIEAGGHRGVFEPERGDAAIGTLALVRLLAARGSLPVVAAGGIMDGRGIRAALELGASAVQMGTAFVLCPESSANAAYREALKGPRAARTALTVTMSGRSARGLPNRMFFDAAAPGVPPLPDYPFVYDATKALQTAALARGNHDFAAQWAGQGAALARELPAAELLRTLVEELRG

SEQ ID NO: 66613 - protein, 207 aa, Pseudomonas aeruginosa; identical to SEQ ID NO: 66337

SEQ ID NO: 66614 - protein, 547 aa, Pseudomonas aeruginosa
MTSSPVTPSAVDDAPDWPAAFVRRYLDAGHWQDQSFAEALATSAARHPRRIALCDDDQRLSYADLLQRCRRLAAGLRQAGLAHGDTVVLHLPNGIAFVETCFALFQLGVRPVLALPAHRQHEISGFCRFAEAKAYIGAERIDGFDPRPMARELLASGACRMALIHGEAEAPLQALAPLYQADALEDCAARAEDIACFQLSGGTTGTPKLIPRRHREYLYNVRASAEVCGFDEHTVYLTGLPMAHNFTLCCPGVIGTLLASGRVVVSQRADPEHCFALIARERVTHTALVPPLAMLWLDAQESRRADLSSLRLLQVGGSRLGSSAAQRVEPVLGCQLQQVLGMAEGLICYTRLDDPPERVLHTQGRPLSPDDEVRVVDAEGREVGPGEVGELTVRGPYTIRGYYRLPEHNAKAFSADGFYRTGDRVSRDKDGYLVVEGRDKDQINRGGEKIAAEEVENLLIAHPQVHDATVVAMPDSLLGERTCAFVIPRQPAPSALKLKQYLHACGLAAFKVPDRIELVPAFPQTGIGKISKKDLRERLRRELEARA

SEQ ID NO: 66615 - protein, 165 aa, Pseudomonas aeruginosa
MARGVNKVILVGNVGGDPETRYMPNGNAVTNITLATSESWKDKQTGQQQERTEWHRVVFFGRLAEIAGEYLRKGSQVYVEGSLRTRKWQGQDGQDRYTTEIVVDINGNMQLLGGRPSGDDSQRAPREPMQRPQQAPQQQSRPAPQQQPAPQPAQDYDSFDDDIPF

SEQ ID NO: 66616 - protein, 945 aa, Pseudomonas aeruginosa
MDKILIRGARTHNLKNVDLTLPRDKLIVITGLSGSGKSSLAFDTLYAEGQRRYVESLSAYARQFLSMMEKPDVDTIEGLSPAISIEQKSTSHNPRSTVGTITEIYDYLRLLYARVGTPRCPDHDIPLEAQTVSQMVDQVLALPEGSKLMLLAPVIRERKGEHLAVFDEMRAQGFVRARVDGKLYELDEVPKLDKQKKHSIDVVVDRFKVRADLQQRLAESFETALSLADGIALVAPMDEDEDVEEIIFSARFACPVCGHSISELEPKLFSFNNPAGACPTCDGLGVKQFFDARRVVNGELTLAEGAIRGWDRRNVYYFQMLGSLAQHYGFSLEEPFDELGAEHQKVVLYGSGRENVDFRYLNDRGDIVKRSHPFEGILPNLERRYRETESATVREELAKFLSTQPCPDCHGTRLRREARHVWVGDRTLPAITAMPVGEACEYAAGLSLTGRRGEIAAKILKEIRDRLQFLVNVGLDYLTLDRSADTLSGGEAQRIRLASQIGAGLVGVMYILDEPSIGLHQRDNERLLGTLTHLRNLGNTVIVVEHDEDAIRLADYVVDIGPGAGVHGGQVVAEGTPDQVMNHPDSLTGKYLSGRKKIAVPAKRTPRDKKKLLKLKGARGNNLQNVNLEIPVGLFTCITGVSGSGKSTLINNTLFPITATALNGATTLEVAPYDSFDGLQHLDKVVDIDQSPIGRTPRSNPATYTGLFTPIRELFSGVPEARSRGYGPGRFSFNVKGGRCEACQGDGVIKVEMHFLPDIYVPCDVCKGKRYNRETLEIRYKGKSIHEVLEMTIEEAREFFDAVPALARKLQTLMDVGLSYIKLGQSATTLSGGEAQRVKLSRELSKRDTGKTLYILDEPTTGLHFADIQQLLDVLHRLRDHGNTVVVIEHNLDVIKTADWLVDLGPEGGSKGGQIIANGTPEQVAEMPQSHTGHFLKPLLERDRA

SEQ ID NO: 66617 - protein, 333 aa, Pseudomonas aeruginosa
MQSSVNEFLTPRHIDVQVVSQTRAKITLEPLERGFGHTLGNALRRILLSSMPGCAVVEAEIDGVLHEYSAIEGVQEDVIEILLNLKGLAIKLHGRDEVTLTLAKKGSGVVTAADIQLDHDVEIINGDHVIANLADNGALNMKLKVARGRGYEPADARQSDEDESRSIGRLQLDASFSPVRRVSYVVENARVEQRTNLDKLVLDLETNGTLDPEEAIRRAATILQQQLAAFVDLKGDSEPVVEEQEDEIDPILLRPVDDLELTVRSANCLKAENIYYIGDLIQRTEVELLKTPNLGKKSLTEIKDVLASRGLSLGMRLDNWPPASLKKDDKATA

SEQ ID NO: 66618 - protein, 206 aa, Pseudomonas aeruginosa
MARYIGPKCKLSRREGTDLFLKSGARALDSKCKAENVPGQHGQRRGRLSDYGLQLREKQKVRRIYGVLERQFRGYYQEASRRKGSTGENLLQLLECRLDNVVYRMGFGSTRSESRQLVSHKAITVNGQTVNIPSYQVKAGDVVAVREKSKNQLRIAQALELCGQRGRVEWVEVDLDKKAGTFKSAPARSDLSADINENLIVELYSK

SEQ ID NO: 66619 - protein, 129 aa, Pseudomonas aeruginosa
MAKPAARPRKKVKKTVVDGIAHIHASFNNTIVTITDRQGNALSWATSGGSGFRGSRKSTPFAAQVAAERAGQAALEYGLKNLDVNVKGPGPGRESAVRALNACGYKIASITDVTPIPHNGCRPPKKRRV

SEQ ID NO: 66620 - protein, 118 aa, Pseudomonas aeruginosa
MARIAGVNIPDNKHTVISLTYIYGVGRTTAQSICAATGVNPAAKIKDLSDEQIDQLRNEVAKITTEGDLRREINMNIKRLMDLGCYRGLRHRRGLPVRGQRTKTNARTRKGPRKPIRK

SEQ ID NO: 66621 - protein, 38 aa, Pseudomonas aeruginosa
MKVRASVKKLCRNCKIIRRDGIVRVICSAEPRHKQRQG

SEQ ID NO: 66622 - protein, 273 aa, Pseudomonas aeruginosa
MAIVKCKPTSAGRRFVVKVVNQELHKGAPYAPLLEKKSKSGGRNNNGRITTRHIGGGHKQHYRLVDFRRNKDGIPAIVERVEYDPNRTAHIALLKYADGERRYIIAPKGVAAGDQLISGIGAPIKAGNSMPLRNIPVGSTVHGIELKPGKGAQIARSAGASAQLVAREGAYVTLRLRSGEMRKVLAECRATLGEVSNSEHSLRSLGKAGATRWRGVRPTVRGVAMNPVDHPHGGGEGRTSAGRHPVSPWGLQTKGKKTRSNKRTDNMIVRRRK

SEQ ID NO: 66623 - protein, 397 aa, Pseudomonas aeruginosa
MAKEKFERNKPHVNVGTIGHVDHGKTTLTAALTKVCSDTWGGSARAFDQIDNAPEEKARGITINTSHVEYDSAVRHYAHVDCPGHADYVKNMITGAAQMDGAILVCSAADGPMPQTREHILLSRQVGVPYIVVFLNKADMVDDAELLELVEMEVRDLLNTYDFPGDDTPIIIGSALMALEGKDDNGIGVSAVQKLVETLDSYIPEPVRAIDQPFLMPIEDVFSISGRGTVVTGRVERGIIKVQEEVEIVGIKATTKTTCTGVEMFRKLLDEGRAGENVGILLRGTKREDVERGQVLAKPGTIKPHTKFECEVYVLSKEEGGRHTPFFKGYRPQFYFRTTDVTGNCELPEGVEMVMPGDNIKMVVTLIAPIAMEDGLRFAIREGGRTVGAGVVAKIIE

SEQ ID NO: 66624 - protein, 706 aa, Pseudomonas aeruginosa
MARTTPINRYRNIGICAHVDAGKTTTTERVLFYTGVNHKLGEVHDGAATTDWMVQEQERGITITSAAVTTFWKGSRGQYDNYRVNVIDTPGHVDFTIEVERSLRVLDGAVVVFCGTSGVEPQSETVWRQANKYGVPRIVYVNKMDRQGANFLRVVEQIKKRLGHTPVPVQLAIGAEENFVGQVDLIKMKAIYWNDDDKGMTYREEEIPAELKDLAEEWRSSMVEAAAEANEELMNKYLEEGELSEAEIKEGLRLRTLACEIVPAVCGSSFKNKGVPLVLDAVIDYLPAPTEIPAIKGVSPDDETVEDERHADDNEPFSSLAFKIATDPFVGTLTFARVYSGVLSSGDSVLNSVKGKKERVGRMVQMHANQREEIKEVRAGDIAALIGMKDVTTGDTLCSIEKPIILERMDFPEPVISVAVEPKTKADQEKMGIALGKLAQEDPSFRVKTDEESGQTIISGMGELHLDIIVDRMKREFGVEANIGKPQVAYRETITKDNVEIEGKFVRQSGGRGQFGHCWIRFSAADVDEKGNITEGLVFENEVVGGVVPKEYIPAIQKGIEEQMKNGVVAGYPLIGLKATVFDGSYHDVDSNEMAFKIAASMATKQLAQKGGGKVLEPIMKVEVVTPEDYMGDVMGDLNRRRGLIQGMEDTVSGKVIRAEVPLGEMFGYATDVRSMSQGRASYSMEFSKYAEAPSNIVEALVKKQG

SEQ ID NO: 66625 - protein, 1357 aa, Pseudomonas aeruginosa
MAYSYTEKKRIRKDFSKLPDVMDVPYLLAIQLDSYREFLQAGATKEQFRDVGLHAAFKSVFPIISYSGNAALEYVGYRLGEPAFDVKECVLRGVTFAVPLRVKVRLIIFDRESSNKAIKDIKEQEVYMGEIPLMTENGTFIINGTERVIVSQLHRSPGVFFDHDRGKTHSSGKLLYSARIIPYRGSWLDFEFDPKDCVFVRIDRRRKLPASVLLRALGYSTEEILNAFYATNVFHIKGETLNLELVPQRLRGEVASIDIKDGSGKVIVEQGRRITARHINQLEKAGVSQLEVPFDYLIGRTIAKAIVHPATGEIIAECNTELTLDLLAKVAKAQVVRIETLYTNDIDCGPFISDTLKIDNTSNQLEALVEIYRMMRPGEPPTKEAAETLFGNLFFSAERYDLSAVGRMKFNRRIGRTEIEGPGVLSKEDIIDVLKTLVDIRNGKGIVDDIDHLGNRRVRCVGEMAENQFRVGLVRVERAVKERLSMAESEGLMPQDLINAKPVAAAIKEFFGSSQLSQFMDQNNPLSEITHKRRVSALGPGGLTRERAGFEVRDVHPTHYGRVCPIETPEGPNIGLINSLATYARTNKYGFLESPYRVVKDSLVTDEIVFLSAIEEADHVIAQASATLNEKGQLVDELVAVRHLNEFTVKAPEDVTLMDVSPKQVVSVAASLIPFLEHDDANRALMGSNMQRQAVPTLRADKPLVGTGMERNVARDSGVCVVARRGGVIDSVDASRVVVRVADDEVETGEAGVDIYNLTKYTRSNQNTCINQRPLVSKGDVVARGDILADGPSTDMGELALGQNMRVAFMPWNGFNFEDSICLSERVVQEDRFTTIHIQELTCVARDTKLGPEEITADIPNVGEAALNKLDEAGIVYVGAEVQAGDILVGKVTPKGETQLTPEEKLLRAIFGEKASDVKDTSLRVPTGTKGTVIDVQVFTRDGVERDSRALSIEKMQLDQIRKDLNEEFRIVEGATFERLRAALVGAKAEGGPALKKGTEITDDYLDGLERGQWFKLRMADDALNEQLEKAQAYISDRRQLLDDKFEDKKRKLQQGDDLAPGVLKIVKVYLAIKRRIQPGDKMAGRHGNKGVVSVIMPVEDMPHDANGTPVDIVLNPLGVPSRMNVGQILETHLGLAAKGLGEKINRMLEEQRKVAELRKFLHEIYNEIGGREENLDELGDNEILALAKNLRGGVPMATPVFDGAKEREIKAMLKLADLPESGQMRLFDGRTGNQFERPTTVGYMYMLKLNHLVDDKMHARSTGSYSLVTQQPLGGKAQFGGQRFGEMEVWALEAYGAAYTLQEMLTVKSDDVNGRTKMYKNIVDGDHRMEAGMPESFNVLIKEIRSLGIDIELETE

SEQ ID NO: 66626 - protein, 231 aa, Pseudomonas aeruginosa
MAKLTKRQKAIAEKVVAGKQYSFEEAAKLLAELSTIKFKESVDVAVNLGVDPRKSDQVVRGATVLPNGTGKSVRVAVFTQGPAAEAALAAGADKVGMDELAAEMKGGDLNYDVVIASPDAMRVVGQLGQILGPRGLMPNPKVGTVTPDVATAVKNAKAGQVRFRTDKNGIIHSSVGKVDFEPAKLQQNVEALLADLKRLKPSSSKGVYVKRVTLSTTMGPGLQIDLASLEA

SEQ ID NO: 66627 - protein, 122 aa, Pseudomonas aeruginosa
MNAKAEAKESRFDLLKWLLVAVLVVVAVVGNQYFSAQPILYRVLGILVLAVIAAFLALQTAKGQAFFSLAKEARVEIRKVVWPSRQETTQTTLIVVAVVLVMALLLWGLDSLLGWLVSMIVG

SEQ ID NO: 66628 - protein, 397 aa, Pseudomonas aeruginosa; identical to SEQ ID NO: 66623

SEQ ID NO: 66629 - protein, 409 aa, Pseudomonas aeruginosa
MRLIHTSDWHLGQTLHGQDRDHEHARFLDWLLRQLEEQRADVLLIAGDIFDTINPPLKAQERLYDFIVSAHRRLPRLEIVMIAGNHDSGARIELPAPLMKRLNAHAIGRIGWIDESLDSDRLLLPLHDADGQVAAWCLALPFLRPAEVTGGGLGDDYLAGIRQVHERLVAAAHARRTPGQALVAVSHAHMAGGSVSEDSERNLIIGNVEALPASLFPEQIAYVALGHLHKPQKVAGQERIRYSGSPLPLSFAEVNYRHQVLLVTLEGERLKDVQSLPVPRAVELLRIGPAPLGEVLDRIGELAEADLLNEQRPWLEVRVMLDQPQPDLRQQVESALLGKACRLVRIASEYQRRDEEQAPLLGLDQLNPQELFSRAWESAYGSGPDAQALDDFASLLQSVELATEEPPGK

SEQ ID NO: 66630 - protein, 1211 aa, Pseudomonas aeruginosa
MKILAIRLKNLASLAGEQEIDFTREPLSSAGLFAITGPTGAGKSTVLDALCLALFGSTPRLESTSASSKVPDGRNELSSNDERNLLRRGCASGYAEVDFVGIDGHRYRARWETRRSRDKADGALQKSQQSLQDLETQQMLAANKKSEFREQLEQKLGLNFAQFTRAVLLAQSEFSAFLKASDNDRGALLEKLTDTGLYSQLSKAAYQRASQADEQRKQLEQRLEGSLPLAEQARAGLEAALESHAQARLQEQQALQRLEGQQQWFTEEQRLLQSCEHAQGQLAEARQAWDALATERETLQWLERLAPVRGLIERLKQLEQELRHSEQQQRQRTEQQAAGTERLQGLQARLQEARERQAQADNHLRQAQAPLREAFQLESEARRLERTLAERQELHRQSNQRHAQQSDAARQLDMEQQRHVAEQAQLQAALRDSQALAALGDAWVTHQGQLATFVQRRQRALESQAQLPELEKSLAHAGEPLERLQAQWTALHGSEPDDLAARLVELRRQTDSLERQQALHKEWQQVLDQRAGLARRLGELDQRMVEQEQALLDLKRQGSQCAEEVKAAEQALQVTRELLQRQRLARSASVEQLRAGLVDGEACPVCGSQEHPYHHSEQLLAALGEHDDQEQVRAEQSLERLRQTLVGLREGYSSQRERLNQSRQEQQELTGQLAALDRQLDQWTLPEELRLLQPSAQLEWLAQRLDDLAGQRQQCQRDFDRLIARQRQTQQLQQELRAAETILQQRQQALTEQRQRYEHLQQQVEEDSQQLRPLLSDEHWQRWQADPLRTFQALGESIEQRRQQQARLQQIEQRLQELKQRCDESSWQLKQSDEQRNEARQAEERAQAELAELNGRLGAHLGQHACAQDWQLSLEHAAQAAQSAVETLQAPLDSLREEQLRLAEALEHLQQQRQRQQDEFQRLQADWQAWRERQDNLDDSRLDALLGLSEEQATQWREQLQRLQEEITRQQTLEAERQAQLLQHRRQRPETDREALEDNLRQQRERLAASEQAYLETYSQLQADNQRREQSQALLAELERARAEFRRWGRLNELIGSSSGDKFRRIAQGYNLDLLVQHSNVQLRQLARRYRLQRGGSELGLLVVDTEMGDELRSVYSLSGGETFLISLALALGLASMASSKLRIESLFIDEGFGSLDPESLQLAMDALDNLQAQGRKVAVISHVQEMHERIPVQVRVQREGNGMSSLKVVG

SEQ ID NO: 66631 - protein, 721 aa, Pseudomonas aeruginosa
MNPTLKQLAGEVRDGRDDQVAQPLAARHDLLRQLDLWVARGWLRALDRAFVAFLVELQPQADPRVLLAAALTSHQLGHGHVCLDLEATVGAPDAALSLPPEGDEGRDVLLPSQLLHGVRLDAWREALAASPLVEVVDERPGDPEPSETATSPLVLCAQRLYLRRYWRHELEIALALRERLGRQAPLAADLAPRLAALFAQAPTEDGQRVTDWQKLACALAARGYFSLITGGPGTGKTTTVVRLLGLLQAPAVAAGQPLRIRLAAPTGKAAARLSESIGQQVRALPLAEDVLQAIPAEVTTLHRLLGSRPDTRHFRHHRDNPLALDVLVVDEASMIDLEMMASLLDALPPQARLILLGDKDQLASVEAGAVLGDLCRDAEEGWYSAETRAWLQRVSGETWQGLREGSSQAHPLAQQTVMLRHSRRFGASSGIGRLARLVNRQQAGDARALLDSPPADLFDLRLRGERDAAFARLFVDGHPQAPGTPYGYRHYLQRLAEGRPAAGLALEDGAWERWAQSVLTAFDAFRLLCALRRGPWGVEGLNQRVAAELLRLGLIEADHGWYEGRPVLVTRNDYSLGLMNGDIGIALRLPERNDDGSLRFALRVAFPRNDGSGGVRFVLPSRLVEVDTVFAMTVHKSQGSEFAHTALVLPDALNPVLTKELVYTGITRARDWFSLVESLPGVFEEAVRRKVRRLSGLMLHLRPEREEQPPHAPGEQTELPF

SEQ ID NO: 66632 - protein, 1245 aa, Pseudomonas aeruginosa
MSQQQMPVALDPLDFPLHGSRLIEASAGTGKTFTIALLYVRLVLDHGGENAFGRPLSPPEILVVTFTDAATQELRERIRSRLGEAARCFAEPQERHDGLLVALRQQYPTERWPGCARLLRLAAEWMDEAAVSTIHSWCYRMLREHAFDSGSLFTQNLETDQSELLAEVVRDYWRRNFYGLTAPAAQAVASCYSGPEALGKALQPLLARQDADFRYADQALSAPESLAALLEQGGDWYRQLDQLDAQARAAWRAARVELEALLRDLRPYLNGNSYRGKDSDETFDAWLQALADWSEGGEQPANLGKFGQTRIKLTAKRVAPEHAALRAIDAWAAHQEERPDLAPHLLLHALGEVGHELEIEKQRRAEIGFDDLLSRLDRALQGPGGERLAQLIREQFPVALIDEFQDTDPVQYRIFERIYRIAADPDEPQARETGLFMIGDPKQAIYAFRGADIHTYLRAREATRGRHYTLGKNFRSTAAMVAAANRCFAFAEEHPRGAFRFAREGLENPVPFHAVDAQGRAERLLIDGAEAPAMTFWNLDVEAGVLGSAAYRQEMAERSASAIRRWLSLADLGRAGFADEQGGWRALRPADIAILVRGRAEAEAIRSALAARRLASVYLSDRDSVFDSQEAADLLHWLRACADPGADALLRVALATRSLHLDWATLERLNQDELFWERMVLRFRDYRRSWQAQGVLPMLRRLLADFELPARLLRHADGERSLTNLLHLAEWLQRAAVELDGEHALIRHLAEQVQSPGSEEILRLESDADLIKVVTIHKSKGLEYPLVLLPFICSWRELDGNSGAPASFHEDGAAGRVIELARRKEQAARAYEQANDERLGEDMRLLYVALTRARHSVWLGIAPLVASNSKSPELHKGALGYLLAGGATIGSDGLGQCLAALRGECREIVVEPAPEADAERYVAGRGQGLGQARETRRSSREKWWVASYSGLQLQASAGLDDDEVLESDESQEPISAEEATFHEEGRSAEQPPVAHASEMRDDLHRFPRGPAPGTFLHGLLEWAGREGFDVARADAQRRRELVARRCDLRGWKDWAEPLDLWLEQYLAEPLRWPGGETSLAGLVAYQVEMEFWFATHQVQAEAIDALVRRHTLGGAARPALAPTLLNGMFKGFVDLVFEHQGRFYVADYKSNWLGADDGAYSPEAMTAAVLENRYDLQYVLYLLALHRQLKARLPDYDYDRHMGGAVYLFLRGTRAATQGLHFERPPRELIERLDALFSGQPGAER

SEQ ID NO: 66633 - protein, 227 aa, Pseudomonas aeruginosa
MVEVFSVQDGLDAERALLDEVCGGAREHGLLLWQPCDRALVMPRRMERLEGFAPASAAVAERGWPVLLRDTGGEPVPQSPGVLNIALSYALGPGDNEQTRIETAYLRLCQPICDWLRERGLDAGVGAVAGSFCDGRYNVTLDGRKLAGTAQRWRRNGAGRPVVLAHAALLVGAEREEMVEVVNTFTRRCASAPDCQADSHLGLSERWSDFRMADSLELERRFVAARS

SEQ ID NO: 66634 - protein, 489 aa, Pseudomonas aeruginosa
MFDLFSGLDAWVGISLVLALAFVLTFEFINGFHDTANAVATVIYTKAMSPYRAVMLSGVFNFLGVLLGGVGVAYAIVHLLPVELLINVNTGHGLAMVFSLLAAAIAWNLGTWYFGIPASSSHTLIGSILGVGLANALITDVPLAEGINWQKAIDIGLSLIFSPLAGFMVAALVLLGLKWWRPLSKMHKTPETRRELDEKKHPPFWNRLVLVLSAMAVSFVHGSNDGQKGIGLIMLVLIGIVPAKFVLDLNSTTYQIERTRDAALHLSQFYQRHTDTLGDMLALGKSNGSEMPQFYRCDPKQTEPTINALLRDLRGVPSYNDLDADERVQVRRYLLCLDDTAKKVGKLSDLPAREKADLEKLRKDLTATTEYAPFWVIIAVALALGIGTMVGWKRVVLTVGEKIGKQGMTYAQGMSAQITAAAAIGMANIYSLPVSTTHVLSSGVAGTMVANKSGLHGGTVRNILMAWVLTLPTSMALSAGLFWLASQFI

SEQ ID NO: 66635 - protein, 283 aa, Pseudomonas aeruginosa
MRTFRLVIACPDGVGIVAKVSNFLATYNGWITEASHHSDNDNGWFFMRHEIRADSLPFDLDGFRQAFAPIAREFSMEWRITDSEVKKRVVLMASKESHCLADLLHRWHSGELDCEIPCVIANHDDLRSMVEWHGIPYFHVPVDPQDKQPAFDEVSRLIDEHGADCIVLARYMQILPPDLCRKYAHQVINIHHSFLPSFIGAKPYHQASKRGVKLIGATSHYVTEELDAGPIIEQDVVRVTHRDNVEDMVRLGKDVEKLVLARGLRYHLEDRVLVHGNKTVVFD

SEQ ID NO: 66636 - protein, 483 aa, Pseudomonas aeruginosa
MSVRRTKIVATLGPASNSPEVLEQLILAGIDVARLNFSHGTPDEHRARARLVRELAAKHGRFVALLGDLQGPKIRIAKFANKRIELQVGDKFRFSTSHARDAGTQEVVGIDYPDLVKDCGVGDELLLDDGRVVMVVEEVAADELRCRVLIGGPLSDHKGINRRGGGLTAPALTDKDKADIKLAADMDLDYVAVSFPRDAKDMEYARRLLTEAGGKAWLVAKIERAEAVADDDALDGLIRASDAVMVARGDLGVEIGDAELVGIQKKIILHARRNNKVVITATQMMESMIHSPMPTRAEVSDVANAVLDYTDAVMLSAESAAGEYPVEAVKAMARVCQGAEKHPTSQKSSHRLGQTFDRCDESIALASMYTANHFPGIKAIICLTESGFTPLIMSRIRSSVPIYAYSPHRETQARVAMFRGVETIPFDPAALPAEKVSQAAVDELLKRGVVTKGDWVILTKGDSYTAQGGTNTMKVLHVGDLLV

SEQ ID NO: 66637 - protein, 418 aa, Pseudomonas aeruginosa
MAVPADASPLRKLALFVGPGLLVSVGYMDPGNWATAIEAGSRFGYALLFVVVLASFSGMLLQSLCSRLGIATGRDLAQLSRERYRPGVARGQWLLAELSIVATDLAEVLGAALAFHLLLGVSITTGVVLTAFDTLIVLALQGANFRRLEAIVLGLIATIGACFFVELVLIGPYWPDVAAGLRPSWDTLSSQEPLYLAIGILGATVMPHNLYLHSSVVQTRVSGDDAASKRSAIRFSRLDTIGSLSLALLVNAAILILAAAAFHGSGHTEVVEIQDAYHLLDPLVGGALASFLFGFALLAAGQSSTFTGTIAGQVVMEGFLRAKIPCWQRRLITRGLALVPALIGVLWLGEAAVGKLLVLSQVVLSLQLPFALWPLIRFSSDRGLMGEFVNPRWVSALAWSLFGLISAANLTLLYFWFG

SEQ ID NO: 66638 - protein, 100 aa, Pseudomonas aeruginosa
MPLDIDEIIKALSHPVRRDMLRWLKEPEKYFVEQDHPFEIGVCAGKFDQRTGLSQSTVSVHLATLQRAGLVTSRRVGQWNFFKRNEETIQAFLDQLGDEL

SEQ ID NO: 66639 - protein, 75 aa, Pseudomonas aeruginosa
MSALQPSRSYRITGYSPAISNGYRQRLFSMGLLPGAALRVVRIAPLGDPIQVETRQTSLALRRKDLALLTLVPLD

SEQ ID NO: 66640 - protein, 329 aa, Pseudomonas aeruginosa
MRILVTGATGFIGGRFARFALEQGLSVRVSGRRADAVEHLVARGAEFVPGDLADPALVLRLCEDVEAVVHCAGAVGVWGPRERFLAANVGLAESVVEACMRQKVRRLVHLSSPSIYFDGRDHLDLNEEYVPRRFSDHYGATKYQAEQLVLSARDLGLEVLALRPRFVVGAGDTSIFPRMIQAHRKGRLRILGNGLNRVDFTSVHNLNDALFSCLLAGEPALGKVYNISNGQPVPFWDAVNYVMRQLDLPPVGGHLPYAVGYGLAALNEGVCRILPGRPEPVLFRLGMAVMAKNFTLDINRAREYLDYDPRVSLWTALDEFCAWWRAQGL

SEQ ID NO: 66641 - protein, 398 aa, Pseudomonas aeruginosa
MAESAFSERIVQNLLDTDFYKLTMMQAVLHNYPNAEVEWEFRCRNQEDLRLYLPAIREQLEYLAGLAISDEQLAFLERIPFLAPDFIRFLGLFRFNPRYVQTGIENDEFFLRLKGPWLHVILFEVPLLAMISEVRNRARYPAATVEQARERLQEKFDWLRREASAEELAGFKMADFGTRRRFSYRVHEAVVSGLKEDFPGCFVGTSNVHLARKLDLKPLGTMAHEWLMAHQQLGPRLIDSQSAALDCWVREYRGLLGIALTDCITTDAFLRDFDLYFAKLFDGLRHDSGDPLLWAEKTIAHYLKLGIDPLTKTLVFSDGLDLPRALKIYRALQGRINVSFGIGTHFTCDLPGVEPMNIVVKMSACNGHPVAKISDTPGKAQCRDPDFIHYLKHVFQVA

SEQ ID NO: 66642 - protein, 547 aa, Pseudomonas aeruginosa
MAAKEVKFGDSARKKMLVGVNVLADAVKATLGPKGRNVVLDKSFGAPTITKDGVSVAKEIELKDKFENMGAQLVKDVASKANDAAGDGTTTATVLAQAIVNEGLKAVAAGMNPMDLKRGIDKATVAIVAQLKELAKPCADTKAIAQVGTISANSDESIGQIIAEAMEKVGKEGVITVEEGSGLENELSVVEGMQFDRGYLSPYFVNKPDTMAAELDSPLLLLVDKKISNIREMLPVLEAVAKAGRPLLIVAEDVEGEALATLVVNNMRGIVKVAAVKAPGFGDRRKAMLQDIAILTGGTVISEEVGLSLEGATLEHLGNAKRVVINKENTTIIDGAGVQADIEARVLQIRKQIEETTSDYDREKLQERLAKLAGGVAVIKVGAATEVEMKEKKARVEDALHATRAAVEEGVVPGGGVALVRALQAIEGLKGDNEEQNVGIALLRRAVESPLRQIVANAGDEPSVVVDKVKQGSGNYGFNAATGVYGDMIEMGILDPAKVTRSALQAAASIGGLMITTEAMVAEIVEDKPAMGGMPDMGGMGGMGGMM

SEQ ID NO: 66643 - protein, 211 aa, Pseudomonas aeruginosa
MALTIVIGNRNDSSWSLRGWLALRMSGAAFDEILVPLGRPDTRERILQYSPTGKVPLLKSEDGDIWDSLAIAEYLAERFPEAHLWPRGEAARALARSVCAEMHSGFAALRGELPMDLRRQQPLVELSEATRQDIQRICEAWADCLRRFGQDGPFLFGHASLADAFYAPVAARFRSYAVELPDIARTYVETIYQWPAFRAWYDAALREQAGS

SEQ ID NO: 66644 - protein, 916 aa, Pseudomonas aeruginosa
MFAPLLKKLFGSKNERDVKRMAKAVQAINALEPQMVALSDEQLKAKTAEFQQRYAKGETLDQLLPEAFAVVREAGKRVMGMRHFDVQLIGGMTLHDGKIAEMRTGEGKTLVGTLPVYLNALSGKGVHVVTVNDYLARRDANWMRPLYEFLGLSVGVVTPFQPPEDKRAAYAADITYGTNNEFGFDYLRDNMAFSLDDKFQRELNFAVVDEVDSILIDEARTPLIISGQAEDSSELYIKINKLIPRLKRQVEEVEGKPTEEGHYSIDEKTRQVELNEQGHQFIEDLLSQNGLLGEGESLYSAHNLSLLTHVYAALRAHTLFHRNVEYIVQGDQILLIDEHTGRTMPGRRLSEGLHQAIEAKEGLPIQAESQTLASTTFQNYFRLYNKLAGMTGTADTEAFEFRQIYGLDVVVIPTHRPIARKDFNDLVYLTQEEKYAAIITDIKQCQALGRPILVGTASIESSEYVSKLLQEAGIEHKVLNAKYHEKEAEIIAQAGAPGSVTIATNMAGRGTDILLGGNWEVEVAALENPTEEQIAQIKAEWQKRHQQVIEAGGLHVIASERHESRRIDNQLRGRAGRQGDPGSSRFYLSLEDNLMRIFASDRVKNFMKALGMQSGEAIEHRMVTNAIEKAQRKVEGRNFDIRKQLLEFDDVANEQRKVIYHMRNTLLSAEDVGETIKEFREETLSATINQHIPPQSLPEQWDIEGLEAALYSDFAVRLPIQQWLDEDDKLYEETLRSKILEQIVAAYYEKEELAGAEALRAFEKQMLLRVLDDLWKDHLSTMDHLRHGIHLRGYAQKNPKQEYKRESFTLFQELLDSIKRDTIRVLSHVQVRREDPAEEEARLRREAEELAKRMQFQHAEAPSMEQAVAGEEEELPEGPAPVVPLEPVRNEQKIGRNEPCPCGSGKKYKHCHGQLD

SEQ ID NO: 66645 - protein, 307 aa, Pseudomonas aeruginosa
MHIIFLSRHHGAARSVHLQPRLLMLAGACVVGASLLAGGFMGAWLFRAPAPVAGIEVDAALQAQSAEISSAREDAQRQMDALSVHLGELQARLVRLDALGERLTELADVDPDEFDFSLSVGQGGVDEPLEGSAYAPPSFMATLDELAARLDTREQQLEVLEQLLADKHISQSTYLAGQPVRQGYISSPFGRRVNPVSGRLSMHKGIDFAAPAGSDVVAVAAGVVTWSGRKNGYGNVVEVGHADGYTTLYAHNQKNLVEVGDLVKRGQVLAKVGSTGRSTGYHVHFEVMKDGRVMNPQSFIARASVSE

SEQ ID NO: 66646 - protein, 303 aa, Pseudomonas aeruginosa
MIKQRTLKNIIRATGVGLHSGEKVYLTLKPAPVDTGIVFCRTDLDPVVEIPARAENVGETTMSTTLVKGDVKVDTVEHLLSAMAGLGIDNAYVELSASEVPIMDGSAGPFVFLIQSAGLQEQEAAKKFIRIKREVSVEEGDKRAVFVPFDGFKVSFEIDFDHPVFRGRTQQASVDFSSTSFVKEVSRARTFGFMRDIEYLRSQNLALGGSVENAIVVDENRVLNEDGLRYEDEFVKHKILDAIGDLYLLGNSLIGEFRGFKSGHALNNQLLRTLIADKDAWEVVTFEDARTAPISYMRPAAAV

SEQ ID NO: 66647 - protein, 394 aa, Pseudomonas aeruginosa
MFELVDNIAQTAVIKVIGVGGGGGNAVNHMAKNNVEGVEFICANTDAQALKNIAARTVLQLGPGVTKGLGAGANPEVGRQAALEDRERISEVLEGADMVFITTGMGGGTGTGAAPIIAEVAKEMGILTVAVVTRPFPFEGRKRMQIADEGIRALAESVDSLITIPNEKLLTILGKDASLLAAFAKADDVLAGAVRGISDIIKRPGMINVDFADVKTVMSEMGMAMMGTGCASGPNRAREATEAAIRNPLLEDVNLQGARGILVNITAGPDLSLGEYSDVGNIIEQFASEHATVKVGTVIDADMRDELHVTVVATGLGARLEKPVKVVDNTVQGSAAQAAAPAQREQQSVNYRDLDRPTVMRNQSHGSAATAAKLNPQDDLDYLDIPAFLRRQAD

SEQ ID NO: 66648 - protein, 417 aa, Pseudomonas aeruginosa
MASVQSGKMIVGLDIGTSKVVALVGEVTADGQLEVVGIGTHPSRGLKKGVVVNIESTVQSIQRAIDEAQQMAGCRIHSAFVGIAGNHIRSLNSHGIVAIRDREVNPADIERVLDAAQAVAIPADQRVLHTLAQDYVIDNQEGVREPLGMSGVRLEAKVHVVTCAVNASQNIEKCVRRCGLEVDDIILEQLASAYSVLTEDEKELGVCLVDIGGGTTDIAIFTEGAIRHTAVIPIAGDQVTNDIAMALRTPTQYAEEIKIRYACALAKLAGAGETIKVPSVGDRPPRELSRQALAEVVEPRYDELFTLVQAELRRSGYEDLIPAGIVLTGGTSKMEGAVELAEEIFHMPVRLGVPYSVKGLTDVVRNPIYSTGVGLLMYGLQKQSDGMSMSVSGSSYSSDEPKAPVLERLKRWVQGNF

SEQ ID NO: 66649 - protein, 287 aa, Pseudomonas aeruginosa
MNGVLLRHQQPGGLGRAPRKPMPRGASRLVAKEPLSVRLPKADFSFLKYLAWPLLLAVLGYGAYRGAEYILPYADRPIAKVSVEGDLSYISQRAVQQRISPYLAASFFTIDLAGMRGQLEQMPWIAHAEVRRVWPDQVVIRLDEQLPIARWGDEALLNNQGQAFTPKELANYEHLPRLHGPQRAQQQVMQQYQLLSQLLRPLGFSIARLEMSDRGGWALTTAQGVEIQIGRDHVVDKIRRFVSIYDKALKDQISNIARIDLRYPNGLAVAWREPVTPATVATASAVQ

SEQ ID NO: 66650 - protein, 480 aa, Pseudomonas aeruginosa
MVKEPNGVTRTMRRIRRIHFVGIGGAGMCGIAEVLLNLGYEVSGSDLKASAVTERLEKFGAQIFIGHQAENADGADVLVVSSAINRANPEVASALERRIPVVPRAEMLAELMRYRHGIAVAGTHGKTTTTSLIASVFAAGGLDPTFVIGGRLNAAGTNAQLGASRYLVAEADESDASFLHLQPMVAVVTNIDADHMATYGGDFNKLKKTFVEFLHNLPFYGLAVMCVDDPVVREILPQIARPTVTYGLSEDADVRAINIRQEGMRTWFTVLRPEREPLDVSVNMPGLHNVLNSLATIVIATDEGISDEAIVQGLSGFQGVGRRFQVYGELQVEGGSVMLVDDYGHHPREVAAVIKAIRGGWPERRLVMVYQPHRYTRTRDLYEDFVQVLGEANVLLLMEVYPAGEEPIPGADSRQLCHSIRQRGQLDPIYFERDADLAPLVKPLLRAGDILLCQGAGDVGGLAPQLIKNPLFAGKGGKGA

SEQ ID NO: 66651 - protein, 357 aa, Pseudomonas aeruginosa
MKGNVLIMAGGTGGHVFPALACAREFQARGYAVHWLGTPRGIENDLVPKAGLPLHLIQVSGLRGKGLKSLVKAPLELLKSLFQALRVIRQLRPVCVLGLGGYVTGPGGLAARLNGVPLVIHEQNAVAGTANRSLAPIARRVCEAFPDTFPASDKRLTTGNPVRGELFLDAHARAPLTGRRVNLLVLGGSLGAEPLNKLLPEALAQVPLEIRPAIRHQAGRQHAEITAERYRTVAVEADVAPFISDMAAAYAWADLVICRAGALTVSELTAAGLPAFLVPLPHAIDDHQTRNAEFLVRSGAGRLLPQKSTGAAELAAQLSEVLMHPETLRSMADQARSLAKPEATRTVVDACLEVARG

SEQ ID NO: 66652 - protein, 448 aa, Pseudomonas aeruginosa
MSLIASDHFRIVVGLGKSGMSLVRYLARRGLPFAVVDTRENPPELATLRAQYPQVEVRCGELDAEFLCSARELYVSPGLSLRTPALVQAAAKGVRISGDIDLFAREAKAPIVAITGSNAKSTVTTLVGEMAVAADKRVAVGGNLGTPALDLLADDIELYVLELSSFQLETCDRLNAEVATVLNVSEDHMDRYDGMADYHLAKHRIFRGARQVVVNRADALTRPLIADTVPCWSFGLNKPDFKAFGLIEEDGQKWLAFQFDKLLPVGELKIRGAHNYSNALAALALGHAVGLPFDAMLGALKAFSGLAHRCQWVRERQGVSYYDDSKATNVGAALAAIEGLGADIDGKLVLLAGGDGKGADFHDLREPVARFCRAVVLLGRDAGLIAQALGNAVPLVRVATLDEAVRQAAELAREGDAVLLSPACASLDMFKNFEERGRLFAKAVEELA

SEQ ID NO: 66653 - protein, 360 aa, Pseudomonas aeruginosa
MLLLLAEYLQQFYKGFGVFQYLTLRGILSVLTALSLSLWLGPWMIRTLQIRQIGQAVRNDGPQSHLSKKGTPTMGGALILTAIAISTLLWADLSNRYVWVVLVVTLLFGAIGWVDDYRKVIEKNSRGLPSRWKYFWQSVFGIGAAVFLYMTAETPIETTLIVPMLKSVEIQLGIFFVVLTYFVIVGSSNAVNLTDGLDGLAIMPTVMVAGALGIFCYLSGNVKFAEYLLIPNVPGAGELIVFCAALVGAGLGFLWFNTYPAQVFMGDVGALALGAALGTIAVIVRQEIVLFIMGGVFVMETLSVMIQVASFKLTGRRVFRMAPIHHHFELKGWPEPRVIVRFWIITVILVLIGLATLKLR

SEQ ID NO: 66654 - protein, 458 aa, Pseudomonas aeruginosa
MLEPLRLSQLTVALDARLIGEDAVFSAVSTDSRAIGPGQLFIALSGPRFDGHDYLAEVAAKGAVAALVEREVADAPLPQLLVRDTRAALGRLGALNRRKFTGPLAAMTGSSGKTTVKEMLASILRTQAGDAESVLATRGNLNNDLGVPLTLLQLAPQHRSAVIELGASRIGEIAYTVELTRPHVAIITNAGTAHVGEFGGPEKIVEAKGEILEGLAADGTAVLNLDDKAFDTWKARASGRPLLTFSLDRPQADFRAADLQRDARGCMGFRLQGVAGEAQVQLNLLGRHNVANALAAAAAAHALGVPLDGIVAGLQALQPVKGRAVAQLTASGLRVIDDSYNANPASMLAAIDILSGFSGRTVLVLGDMGELGSWAEQAHREVGAYAAGKVSALYAVGPLMAHAVQAFGATGRHFADQASLIGALATEQPTTTILIKGSRSAAMDKVVAALCGSSEESH

SEQ ID NO: 66655 - protein, 487 aa, Pseudomonas aeruginosa
MPMSLNQLFPQAERDLLIRELTLDSRGVRPGDLFLAVPGGRQDGRAHIADALAKGAAAVAYEAEGAGELPPSDAPLIAVKGLAAQLSAVAGRFYGEPSRGLDLIGVTGTNGKTSVSQLVAQALDLLGERCGIVGTLGTGFYGALESGRHTTPDPLAVQATLATLKQAGARAVAMEVSSHGLDQGRVAALGFDIAVFTNLSRDHLDYHGSMEAYAAAKAKLFAWPGLRCRVINLDDDFGRRLAGEEQDSELITYSLTDSSAFLYCREARFGDAGIEAALVTPHGEGLLRSPLLGRFNLSNLLAAVGALLGLGYPLGDILRTLPQLQGPVGRMQRLGGGDKPLVVVDYAHTPDALEKVLEALRPHAAARLLCLFGCGGDRDAGKRPLMAAIAERLADEVLVTDDNPRTEASAAIIADIRKGFAAADKVTFLPSRGEAIAHLIASAAVDDVVLLAGKGHEDYQEIDGVRHPFSDIEQAERALAAWEVPHA

SEQ ID NO: 66656 - protein, 579 aa, Pseudomonas aeruginosa
MKLNYFQGALYPWRFCVIVGLLLAMVGAIVWRIVDLHVIDHDFLKGQGDARSVRHIAIPAHRGLITDRNGEPLAVSTPVTTLWANPKELMTAKERWPQLAAALGQDTKLFADRIEQNAEREFIYLVRGLTPEQGEGVIALKVPGVYSIEEFRRFYPAGEVVAHAVGFTDVDDRGREGIELAFDEWLAGVPGKRQVLKDRRGRVIKDVQVTKNAKPGKTLALSIDLRLQYLAHRELRNALLENGAKAGSLVIMDVKTGEILAMTNQPTYNPNNRRNLQPAAMRNRAMIDVFEPGSTVKPFSMSAALASGRWKPSDIVDVYPGTLQIGRYTIRDVSRNSRQLDLTGILIKSSNVGISKIAFDIGAESIYSVMQQVGLGQDTGLGFPGERVGNLPNHRKWPKAETATLAYGYGLSVTAIQLAHAYAALANDGKSVPLSMTRVDRVPDGVQVISPEVASTVQGMLQQVVEAQGGVFRAQVPGYHAAGKSGTARKVSVGTKGYRENAYRSLFAGFAPATDPRIAMVVVIDEPSKAGYFGGLVSAPVFSKVMAGALRLMNVPPDNLPTATEQQQVNAAPAKGGRG

SEQ ID NO: 66657 - protein, 313 aa, Pseudomonas aeruginosa
MNATYRHITVLLEEAVSALAPREDGCYLDGTFGRGGHSRALLEKLGAGGRLLGFDKDPQAIQTGKALAAEDGRFVIVQRSFAELGDEVRARGLEGRVDGVLLDLGVSSPQLDDPERGFSFLNDGPLDMRMNPGQGISAAEFIANATEEEIARVFKEYGEERFAKRMARAIVQRRQERPFERTADLAEVITVANPAWEKGKNPATRAFQGLRIHVNNELGDLERGLDAALESLAVGGRLVVISFHSLEDRIVKLFMRKHAKGEADNLPRDLPIRSKVFEPRLKLLGKPQYASEEELKANPRSRSAVMRVAEKLR

SEQ ID NO: 66658 - protein, 151 aa, Pseudomonas aeruginosa
MFRGANAISLDAKGRLAMPSRYRDELVSRCAGQLIVTIDAVDPCLTVYPLPEWELIEAKLRELPSLREETRRLQRLLIGNAVDLELDGNGRFLIPPRLREYAKLDKRAMLVGQLNKFQLWDEDAWNAMAEADLAAIKQPGGLPDELRDLIL

SEQ ID NO: 66659 - protein, 282 aa, Pseudomonas aeruginosa
MSAGTLFVVATPIGNLDDISPRALRVLREVALVAAEDTRHSIRLFQHFGIETPLAACHEHNEREEGGRFISRLQGGEDVALISDAGTPLISDPGFHLVRQAQALGIRVVPVPGSCALIAALSAAGLPSDRFIFEGFLPAKAAGRRSRLQAVQEEPRTLIFYEAPHRLLESLADMRDVFGGERRAVLARELSKTFETIRSLPLAELHDWVASDSNQQRGECVVLVAGWQAPEGEESIGAEALRVLDLLLAELPLKKAAALAAEITGVRKNLLYQQALQRQGKS

SEQ ID NO: 66660 - protein, 205 aa, Pseudomonas aeruginosa
MASINKLTCYSDPADHYCHRIRLVLAEKNVAVEVIDIEAGRCPPMLAEVNPYGSVPTLVDRDLALYEPTVVMEYLDERYPHPPLLPDYPVKRANSRLLIHRIQRDWCSLVDRILDARSKEAERVQARKELRESLTGVSPLFADKAYFLSEDFSLVDCCLLPILWRLPLLGIELPRQAKPLLDYMERGFARESFRASLSSVERDMR

SEQ ID NO: 66661 - protein, 130 aa, Pseudomonas aeruginosa
MSATQNYGTGRRKTATARVFLRPGTGKISINNRGLDQFFGRETARMVVRQPLELTETVEKFDIFVTVVGGGVSGQAGAIRHGITRALIEYDETLRSSLRKAGYVTRDAREVERKKVGLRKARKRPQYSKR

SEQ ID NO: 66662 - protein, 448 aa, Pseudomonas aeruginosa
MTTRILTGITPTGTPHLGNYAGAIRPAILASRRSDVDSFYFLADYHALIKCDDPARIQRSRLEIAATWLAGGLDVERATFYRQSDIPEIPELTWLLTCVSAKGLLNRAHAYKAAVDRNVEAGEDPDAGVTMGLYSYPVLMAADILMFNAHKIPVGRDQVQHVEMARDIGQRFNHLFGNGREFFVLPEAVIEENVATLPGLDGRKMSKSYDNTIPLFSPSRQLKDAIARIVTDSRAPGEPKDPDSSHLFLLYSAFASAEQVAAFRQELLEGLAWGEAKQRLFQLLDNELGEARERYQALIAKPDDIEDILLAGAAKARRIATPFIAELREAVGLRSLREPLKSAESGKKKAAKAARLVSFRDDDGSFRFRLLDAAGEQLLLSRAFADGKAAGAVSKRLLAGETADLRAEGNAFGLWLDGEAVAQSPAFADAAARDAAIERTREALAPQE

SEQ ID NO: 66663 - protein, 148 aa, Pseudomonas aeruginosa
MEQSLTAWLLPALALVAGVAIGFLIARLLPNAAPNKVQRQMDDLQDRFDSYQREVVTHFNTTASLVKKLTQSYQDVQEHLSDGAQRLALDEQTRQRLLAALHADEAYPAERRERLTPPASGEVPKDYAPKSPDSPGTLDATYGLKGKY

SEQ ID NO: 66664 - protein, 367 aa, Pseudomonas aeruginosa
MRRTALALPLFLLVSACSSEPTPPPKPAAKPQARTVISPRPVRQSVQPILPLRGDYANNPAAQHFIDRMVSQHGFNRQQLHDLFAQTQRLDWVIRLMDRQAPTYTPPSGPNGAWLRYRKKFVTPGNVQNGVLFWDQYETDLQRASRVYGVPPEIIVGIIGVETRWGRVMGKTRIIDALSTLSFSYPRRAEFFSGELEQFLLQARKEGTDPLALRGSYAGAMGYGQFMPSSFTKYAVDFDGDGHIDLWNPRDAIGSVANYFKQHGWVSGDRVAVPASGRAPSLEDGFKTLYPLDVLASAGLRPQGPLGGHRQASLLRLDMGRNYQYWYGLPNFYVITRYNHSTHYAMAVWELGKEVDRVRHRSVVRQD

SEQ ID NO: 66665 - protein, 211 aa, Pseudomonas aeruginosa
MLTIALSKGRILDDTLPLLAAAGIVPSENPDKSRKLIIPTSLSDVRLLIVRATDVPTYVEHGAADLGVAGKDVLMEYGGQGLYEPLDLRIANCKLMTAGAIGAPEPKGRLRVATKFVNVAKRYYAEQGRQVDVIKLYGSMELAPLVGLADKIIDVVDTGNTLRANGLEPQELIATISSRLVVNKASMKMQHGRIQSLIDTLRDAVEARHRH

SEQ ID NO: 66666 - protein, 421 aa, Pseudomonas aeruginosa
MDKLIITGGNRLDGEIRISGAKNSALPILAATLLADTPVTVCNLPHLHDITTMIELFGRMGVQPIIDEKLNVEVDASSIKTLVAPYELVKTMRASILVLGPMLARFGEAEVALPGGCAIGSRPVDLHIRGLEAMGAQIEVEGGYIKAKAPAGGLRGGHFFFDTVSVTGTENLMMAAALANGRTVLQNAAREPEVVDLANCLNAMGANVQGAGSDTIVIEGVKRLGGARYDVLPDRIETGTYLVAAAATGGRVKLKDTDPTILEAVLQKLEEAGAHISTGSNWIELDMKGNRPKAVNVRTAPYPAFPTDMQAQFISMNAVAEGTGAVIETVFENRFMHVYEMNRMGAQILVEGNTAIVTGVPKLKGAPVMATDLRASASLVIAGLVAEGDTLIDRIYHIDRGYECIEEKLQLLGAKIRRVPG

SEQ ID NO: 66667 - protein, 326 aa, Pseudomonas aeruginosa
MNMSQNLDFIHSAQRTIGLERDAVDSLLARIGDDFVKACELLLAGKGRVVVVGMGKSGHVGKKIAATLASTGTPSFFVHPAEASHGDMGMITKDDVVLALSNSGSTAEIVTLLPLIKRLGITLISMTGNPESPLAKAAEVNLDASVGQEACPLNLAPTSSTTVTLVLGDALAIALLEARGFTAEDFAFSHPGGALGRRLLLKVEDVMHVGEGLPQVLLGTSLTGALMEMTRKGLGMTVVLDEHGKLAGIFTDGDLRRALDRGIDVRQVTIDQVMTVHGKTVRAEILAAEALKIMEDNKIGALVVVDADDRPVGALNMHDLLRAGVM

SEQ ID NO: 66668 - protein, 286 aa, Pseudomonas aeruginosa
MRLIIVSGRSGSGKSTALNVLEDNGFYCIDNLPASLLPDLAQRALLHTELLQPQVAVSIDARNLPSQLQRFPELLQEVRDNHINCDVLYLDADDETLLKRFSETRRRHPLTTDTRSLAEAIGDESQLLGPIADLADLKLDTTSLNLYQLRDTIKLRLLNKPEPGTAFLVESFGFKRGMPVDADLVFDVRCLPNPYWKPELRDHSGLEPEVREYLAAQPDVEEMYQDIVGYLNKWLPRFAASNRSYVTVAIGCTGGHHRSVYLAERIGAALRDSLKNVQIRHRDLSS

SEQ ID NO: 66669 - protein, 1276 aa, Pseudomonas aeruginosa
MADVGSLGTRLLRIVLGLCALVLVLLALYVSLGRQLVPLVAEYRQQLEDEAGKQLGIPVRIAELTGSWRGFEPLVVARDIQVGDGEQSLRLARVRLAPDLLGSLLARQVRIGSLELEGLKLTLREGEDGQWSLDGLPHSDKPSDPRKLLQFLLQTQRISLLDSQLEVAPRGSAALSLSAVGATLRSSSVGGQSLDARLQLPDGQPLALHAEGRIDSEDWPRSSARFYLSLPQSDWAQWLPAGLTQEWTIVRAKAGGDFWFDWRDGKAQRLVARLLAPQLKASYAARKPVEINDLGMNLFFDREAQGWKVRVGDLAANFGEQRWGEVELLLRRDQQNNEPHWKLQADRVDLTPLVPAIEALAPLPDAAAEWVAGLKPKGILHNLNADFWPQREVPERVSYATNLEKVGISAFHEVPAVENVSGTLTGTLAGGQLDASAQDFMLHLAKVFPEPWRYREARTRMFWSLDDRAFTLGSHLMRVEGEEGSLAGDMLIRLMRDPGAEDYMDLQVGLSDGDARFTAKYLPTQLPGMNKSLANWLKTAIRSGHVEQGYFQWQGSLNRGAAAEAHVMNLYFKVRDGELAYQPGWPALSKTVGEVFVEDSGVRVLASSGNLLNSRVSDVKVDIPLGRPGQTPHLYVDGAVDSNLKDGIKLLQEAPIPTRKIFAGWEGDGPLQGHLTLDIPLDHDEAGKTGVVVDFSTVGATLKMPSPKLDMSEVKGDFRFDLAKGLSAPAVQARVLGSEVRGRIVAEGRGDARTRLLLNGQVAVKSLSDWLGAGQRPLPVSGRLPFQLNLLLDGKDSQLQIDSDLKGAVVDLPAPFGKTAAQARPTQWRMTLDGAERRYWARYDGLASLAYAAPADKPLNGRGALRLGGDPALLPSAQGLRVRGRLAELDWDAWQATLKRYGNGDQAASSAAGLLRGADLRIDSFKGFGQELKNLTVDLARQERAWQLVLVSDLASGRLVLPDARGAPIVVDLDRLNLPKSTLPDENKVEDSDPLAAVDPRSLPAVDVKIGQVALGGQPLGAWSLKVRPGSNGVAFNDLDLDLRGLHVNGSLRWDGSPGNTRSTYQGRIEGKNLADVLKAWNFAPSATSERFRMDINGQWPGSPAYMALKRFSGSMDASLRKGQFVEVEGSAQALRVFGLLNFNAINRRLRLDFSDILGKGLSYDRVKGVLSATDGVYVTREPLKLEGPSSNLELNGTLDLAHDRIDAKLLVTLPLTNNLTLAALIVGGPAVGGAVFVVDKLLGDRVSRFASVQYSVKGPWQDPKISFDKPFEKPR

SEQ ID NO: 66670 - protein, 345 aa, Pseudomonas aeruginosa
MFKKLRGMFSSDLSIDLGTANTLIYVRERGIVLNEPSVVAIRSHGSQKSVVAVGTEAKRMLGRTPGNIAAIRPMKDGVIADFSVCEKMLQYFINKVHENSFLQPSPRVLICVPCKSTQVERRAIRESALGAGAREVFLIEEPMAAAIGAGLPVEEARGSMVVDIGGGTTEIALISLNGVVYAESVRVGGDRFDEAIVTYVRRNYGSLIGESTAERIKQEIGTAFPGGDVREVDVRGRNLAEGVPRSFTLNSNEVLEALQESLATIVQAVKSALEQSPPELASDIAERGLVLTGGGALLRDLDKLLAQETGLPVIVAEEPLTCVARGGGRALEMMDRHSMDLLSTE

SEQ ID NO: 66671 - protein, 96 aa, Pseudomonas aeruginosa
MALERSDVEKIAHLARLGLSEADLPRTTETLNNILGLIDQMQAVDTSGVEPLAHPLEATQRLRPDAVTETDHRDAYQTIAPAVEEGLYLVPKVIES

SEQ ID NO: 66672 - protein, 484 aa, Pseudomonas aeruginosa
MLHQLTLAEIARALADKQFSAEELTRTLLGRIRQLDPQLNSFISITDDLAIAQAKAADERRANGENGALLGAPIAHKDLFCTQGVRTSCGSKMLDNFVSPYDATVVEKLTAAGAVTLGKLNMDEFAMGSSNQSSHYGAVKNPWSLDRVPGGSSGGSAAAVAARLLPAATGTDTGGSIRQPAALTNLTGIKPTYGRVSRWGMIAYASSLDQGGPLARTAEDCALMLGVMAGFDPKDSTSVEQPVDDYLAALQKPLSGLRIGLPREYFGAGLDSRIADAVLAVVEELKTLGATVKDISLPNMQHAIPAYYVIAPAEASSNLSRFDGVRYGYRCDAPQNLEDLYKRSRAEGFGSEVKNRIMVGTYALSAGYYDAYYLQAQKIRRLIKNDFVSAFAEVDVILGPTTPNPAWKIGEKNDDPVSQYLEDIYTITANLAGLPGLSMPAGFVDGLPVGVQLLAPYFQEGRLLNVAHQYQQVSDWHTRTPAGF

SEQ ID NO: 66673 - protein, 481 aa, Pseudomonas aeruginosa
MQWETVIGLEIHAQLATQSKIFSGSSTAFGAAPNTQASLVDLAMPGTLPVLNEEAVRMACLFGLAIDARIDRQNVFARKNYFYPDLPKGYQTSQMDHPIVGKGHLDITLEDGTTKRIGITRAHLEEDAGKSLHEDFQGMSGIDLNRAGTPLLEIVSEPDIRSAKEAVAYVKAIHALVRYLGICDGNMAEGSLRCDCNVSVRPKGQAEFGTRAEIKNVNSFRFIEKAINHEIQRQIELIEDGGKVVQETRLYDPNKDETRSMRGKEEANDYRYFPCPDLLPVVIEPEYLAKLREQLPELPVQKRERFESQYGLSAYDASVLSASREMADYFEKVQGICGDAKLAANWVMVELGSLLNKDGLEIEQSPVSAEQLGGMILRIKDNTISGKLAKMVFEAMANGEGSADQIIEAKGLKQVTDSGAIEKMLDEVLAANAEQVEQYRAADEAKRGKMFGFFVGQAMKASKGKANPQQVNELLKKKLEA

SEQ ID NO: 66674 - protein, 1516 aa, Pseudomonas aeruginosa
MSNLRRFSRSLAVAALVLLPFAAVQAEDTVEPSGYTPMAGESFFLLADSSFATDEEARVRLEAPGRDYRRYRMEPYGGVDVRLYRIEQPLEFLKRQKNLHRVLAEGQFKGEGLSNTLAYLWDNWYRKSRRVMQRAFSYESRQQVTEAVPELKMGNAMTAPTPYDAQPQYAPIPGLPLVSQFRYPLWDAKPIEPPQDVKLAGSSSEFINVVPGNVYIPLGKLKPGLYLVEALVGKYRATTVVFVSNSVAVSKVAGDELLVWTARKHEGTPVPDTKVLWTDGLGVMSSGNTDADGLLRLKHASPERSYVIGEDREGGVFVSENFYYDSEIYDTKIYAFTDRPLYRPGDWVSLKMVGREFKDARQSQAAASAPVRLSVIDASGTVLQSLDLRFDAKSGANGRFQLPENAVAGGYELRFDYRGQTYSSAFRVAEYIKPHFEVALDLAKPDFKTAEPVKGEIVLLYPDGKPVANARLQLSLRAQQLSMVDNELQYLGQFPVELSSTELTTDGKGRAAIELPPAEKPSRYMLTIFASDGAAYRVKTSKEILIERGAARYRLSAPQRFSAAGEKVEFSYASEQPTPLKPSSYQWIRLEDRATDSGPVADGRFALTFERPGTYSVELRDDKGQLLGATGHSVSGEGVKSVPGTVEVVFDKPEYRTGEEASALITFPEPVEDALLSLERDKVEATALLSKGADWLRLEKLNPTQYRVWIPVREEFSPNLTFSVLYTKGGDYSFQNAGIKVGMPQVEIDIATDKERYEPGETVTVTLATRFAGKPVSSHLTVSVVDEMVYALQAEIAPGIDQFFYHPRRNNVRTSASLAFISYDVALPGSTSAPGRANRSERGVKVLERPRREDVDTAAWQPELVTDAQGKASFSFRMPDSLTRWRITARAIDDNGQVGQKKQFLRSEKPLYLKWSGPTRFRQGDQPDLGLFVFNQGEQPVKAELLSGPPGSQRSQTLELAKGVNYIPLAQQPLSDGDWSAELRQDGQVRDRLAVRFNLLADGWQVEQMQNLSLAAASNPLQLPADARDVRLRLADGPAAAYLGNLDDLLEYPYGGVEQTASQLLPLSIAYPALAGGEPRIRDRLRLIMQNSRLRLVQMAGPDAWFAWWGGDVDGDAFLTAYAYYADWYASRALEIQLPAEHWQRILEPYAKQATQTPLLQRALILAFARDMQLPVNTLLGGLLNDLANAGEGQARAEPLEADDGLVLGDPDSAVGLAAARVLAVDLARQLRVAVPAPLAAQAETATQRLREAGLPFTDALLASRSAVDGQQASALLQRLAPAQSTLERALALTWLQGALAQAPQGKLPQPPKDWQAQRGASGETYWQWRGRGIPSWVDLDEAPARPLPVALSYRSAQAPSGQLPVQISRRLLRLVPGEGAFEFKVEEVGDKPLSSDELYLDEVTLNVPEDTALRYGMLELPLPPGADVERTTWGIKISGLAGDEATTLERARNEPGELFYGVPVDSLSGEQRFRHLVRFSQKGSFNLPPARYLRLYAPEQQALEAKPALAKVKVE

SEQ ID NO: 66675 - protein, 537 aa, Pseudomonas aeruginosa
MRRNAVIRSAIIPSLLGAALVAAVPQAFASNLIFCSEGSPAGFDPAQYTTGTDFDAAAETVFNRLTQFERGGTKVLPGLAESWDVSDDGKTYTFHLRKGVKFHSTDYFKPTREFNADDVLFTFERMLDKDHPFRKAYPTEFPYFTDMGLDKNIARVEKLDEHTVKFTLNEVDAAFIQNLAMPFPSIQSAEYAAQLLKQGKASDINQKPIGTGPFVFSRYQKDAQIRFKGNKDYWKPDEVKVDNLIFAINTDASVRAQKLKAGECQITLNPRPADLDALKKDPNLNLPSQAGFNLGYIAYNVTHKPFDKLEVRQALDMAVNKKAIIDAVYQGAGQLASNGMPPTQWSYDETIKDAPYDPAKARELLKKAGVAEGTEITLWAMPVQRPYNPNAKLMAEMLQNDWAKIGIKAKIVTYEWGEYIKRAKGGEHDAMLIGWSGDNGDPDNWLGTLYGCDAVDGNNFSKWCDAGYDKLVKDAKRTTDQGKRTELYKQAQHILKEQVPITPIAHSTVYQPMRKTVHDFRISPFGLNSFYEVSVGK

SEQ ID NO: 66676 - protein, 533 aa, Pseudomonas aeruginosa
MRKILPLRAWLAAGLILGSPFSHAASNLVFCSEGSPAGFDPAQYTTGTDYDATSVTLFNRLVQFERGGTRAIPALAESWDIGDDGKTYTFHLRKGVKFHSTDYFKPTREFNADDVLFTFQRMLDKNHPFRKAYPTEFPYFTDMGLDKNIARVEKLDEHRVKFTLNEVDAAFIQNLAMDVASIQSAEYAGQLLEAGKPQQINQKPIGTGPFILSRYQKDAQIRFKGNKDYWKPEDVKIDNLIFSINTDAAVRAQKLKAGECQITLNPRPADLKALQEAANLKVPSQPGFNLGYIAYNVTHKPFDQLEVRQALDMAVNKQAIIDAVYQGAGQLAVNGMPPTQWSYDETIKDAPFDPAKARELLKKAGVAEGTEITLWAMPVQRPYNPNAKLMAEMIQADWAKIGIKARIVSYEWGEYIKRAHAGEHDAMLFGWTGDNGDPDNWLATLYGCDSINGNNVSKWCDAAYDKLVKAAKRVSDQDKRSELYKQAQHILKEQVPITPIAHSTVYQPMSKSVHGFKISPFSRNAFYGVANQP

SEQ ID NO: 66677 - protein, 336 aa, Pseudomonas aeruginosa
MLSFIARRLGLLIPTFFGVTLLTFALIRLIPGDPVEVMMGERRVDPQMHAEALHRLGLDKPLYQQYLDYVGNLAQGNLGKSIRTHEPVWNEFLTLFSATLELSFAAMLFAGTLGLLAGVVAALKRGSIFDHGVMTISLAGYSMPIFWWGLLLIMLFSVSLGWTPVSDRIGVLYEVEPKTGFMLIDTLLSDEEGAFLDAVRHLILPAIVLGTIPLAVIARMTRSAMLEVLREDYVRTARAKGLSPARVVFVHALRNALIPVLTVLGLQVGTLLAGAVLTETIFSWPGIGKWLIDAISARDYPVVQNGILLVATLVILVNFVVDILYGLANPRIRHQR

SEQ ID NO: 66678 - protein, 1417 aa, Pseudomonas aeruginosa
MNKSYTLVWNQATGCWNVASEGTRRRSKSGRGKALVVAGASLLGLFCQAPAFALPSGATVVSGDAGFQTSTDGRHMVIDQQSHKLITNWNEFSVRADERVSFHQPGQDAVALNRVIGRNGSDIQGRIDANGKVFLVNPNGVVFGKSAQVNVGGLVASTLDLADRDFLAGNYQFSGDSGATVSNAGSLQASEGGSIALLGARVSNDGLIQAQLGDVALGAGQGINLNFDGDGLLNLQVDKGSVDALAHNGGLIRADGGQVLMSARSADSLLKTVVNNQGTLEARTLRSAEGRIVLDGGEQGTVRVAGKQDASAIGGGNGGLVLNQGANVEIQRTAQVDTHADQGATGTWRILSHEVSVAAVGQANAAGDGSGQVHVAQGPAGANASDSNGVTIVQQQPAVDLAAGANGTSAVQSQSGANIGSGANGISVVQSQNSPNIGSGANGISVVQSQNGANIGAGASGISVVQSQNSPNIGSGVNGVTVVQSQNGANIGSGASGITVVQSQNGANIGSGASGISVVQSQSGPSIGSGVNGVTIVQSQSGANIGPGVSGIDVVQTQTLPNLSPGANGSSIVQVQTLPDIAADAGNVHVVQVQTGGNKVFGNSATNVRSRTVQARSNENVGSGLANPSSAGKGSTLHADTLARNLSTSNVEVVATRGNAHVGAPLSWDSGNGLTLTAERGDLRINGALTAQGENASLTLNAGQRPLRIDDSLSLTGQGARVEFNSDKGYALAEGTRITLSGKNAGFRANGRDYSVIQDLQQLRGIDRDLGGSYVLGNRIAGGNSSFLSIGNASAFGGTFDGLGNTIDNLAVYGTGAYSGLFSVNRGTLRNLNLERISADGAQATHYNVQVGSLAAVNLGRIDNVNASDIRIAAASKLNSLGGLVALNLGSIDNASASGTLVGNRHTYALGGLAAENISTARGVASISNSRADFAISGQLKDHASHYGAGGLVGRNRGGLIRSSGSQGTLSLSGHGMNLGGLVGYSSAGGLADVSASVDVSGNGQRGLYGGLIGLNVNSGIAHATASGKVRGTDAEALGGLIGRNLNAAINNASAHGDVSLQAGRYLGGLIGHNQAGNLANVSTSGNLSGGSLLQAGGLIGLNANASLVNASAKGNVATRGAEAVGGLLGENLYGSVINGSASGEVTDGSGKTLGGLIGSNLGGNHSNLKASGWVNAGANSDVGGLIGHNRGGNHSTLAASGNVTGGKGSRVGGLVGYNDAASLTNVSASGNVSASGSRAIGGLIGSDLRGSLMLASSHGIVNDKTSHNLGGLVGRGENTSIRSAKASGAVSGGAGIRAGGLVGSLEGWQALILGASAGGDVTAGYDSYIGGLVGFSTATISGASASGKVGGSGLLGGLVAWNQGNVMGSSASGRLEPQIPNQIHGGLIGINFGWQSWNSVYGAAATVPMIGRHYNL

SEQ ID NO: 66679 - protein, 943 aa, Pseudomonas aeruginosa
MTDYKATLNLPETAFPMKAGLPQREPETLKFWNDIGLYQKLRAIGGDRPKFVLHDGPPYANGSIHIGHAVNKILKDIIVRSKTLAGYDAPYVPGWDCHGLPIEHKVETTHGKNLPADKTRELCREYAAEQIEGQKADFIRLGVLGEWDNPYKTMNFANEANEIRALAEMVKQDFVFKGLKPVNWCFDCGSALAEAEVEYADKKSPTIDVGFPVADADKLAAAFGLAALDKPAQIVIWTTTPWTIPANQALNVHPEIDYALVDAGDRYLVLAEALVESCLARYQREGKVVATAKGEALELINFRHPFYERLSPVYLADYVALDAGTGIVHSSPAYGEDDFYTCKRYGMSNDDILSPVQSNGVYVDSLPFFGGQFIWKANPNVVAKLEEVGSLLAHETINHSYMHCWRHKTPLIYRATAQWFVGMDKQPRQGASLRERALEAITQTEFVPGWGQARLHGMIAGRPDWCISRQRNWGVPIPFFLHKASGELHPRTVELMEEVAQRVEKEGIEAWFKLDAAELLGEEAAQYEKINDTLDVWFDSGTTHWHVLRGSHRIGHASGPVADLYLEGSDQHRGWFHSSLLTGCAIDNHAPYRQLLTHGFTVDESGRKMSKSLGNTVVPQTVIDTLGADILRLWVASTDYSGEIAVSQQILQRSADAYRRIRNTTRFLLSNLNGFDPATDLLPPQEMLALDRWAVDRALLLQREIEEAYREYRFWNVYSKVHNFCVQELGGFYLDIIKDRQYTTGANSVARRSCQTALFHIAEALVRWIAPILAFTAEEVWKFLPGERAESVMLATWYDGLNELPADVTLNRQYWEQVMAVKAAVNKELENQRAAKAVGGNLQAEVTLYAEDALQAQLAKLGNELRFVLITSTATLAPLSAAPADAVDSEVAGLKLKVVKSTHAKCGRCWHHREDVGQHAAHPDLCGRCIENIEGSGEVRHYA

SEQ ID NO: 66680 - protein, 312 aa, Pseudomonas aeruginosa
MQLLRGLHNLQPLAGGCVATIGNFDGVHLGHQAILARLRERSLELGVPSCVVIFEPQPREFFSPDSAPVRLTRLREKLELLRGQGVDVVLCLAFNRRLRELSAAEFVRQVLVDGLAVRHLEVGDDFRFGCDRSGDFAFLVNASREQGFTVEAATTVELDGVRVSSTRVRQALAEGDLHLAERLLGRPFSLSGRVLHGQKLGRQLGSPTANIQLKRRKAPLNGVYLVSTLVDGQRCQGVANIGTRPSVNGDGRPHLEVHLLDFAGDLYGRHLQVTFHQKLRDEQRFASLEALKAAILADIAAARAYWLGQPLD

SEQ ID NO: 66681 - protein, 512 aa, Pseudomonas aeruginosa
MNLLKSLAAVSSITMLSRVLGFVRDTILARIFGAGLATDAFFVAFKLPNLLRRIFAEGAFSQAFVPILAEYKNQQGEEATRTFIAYVSGLLTLVLALVTALGILAAPWVIWVTAPGFADTPEKFALTTDLLRVTFPYILLISLSSLAGAILNTWNRFSVPAFVPTLLNVAMIGFALFLTPYFDPPVMVLGWAVLAGGLLQLLYQLPHLRKIGMLVLPRLNLRDSGVWRVMKLMLPAILGVSVSQISLIINTIFASFLAAGSVSWMYYADRLMELPSGVLGVALGTILLPMLAKTYSNKDRHEYSRLLDWGLRLCFLLVLPCSLALAILAEPLTVSLFQYGKFTTVDAAMTQRALVAYSVGLLGIILVKVLAPGFYAQQNIRTPVKIALFTLVSTQLMNLAFIGPLQHAGLALSIGLAACLNAGLLYWQLRKQRLYLPQPGWAKFLVKLVVAVLAMSAVLLATMHWLPAWEQGAMLERFLRLGLLVVAGLLAYFGMLALLGFRLRDFSRRAVL

SEQ ID NO: 66682 - protein, 91 aa, Pseudomonas aeruginosa
MANTPSAKKRAKQAEKRRSHNASLRSMVRTYIKNVVKAIDAKDLEKAQAAFTAAVPVIDRMADKGIIHKNKAARHKSRLSGHIKALSTAAA

SEQ ID NO: 66683 - protein, 406 aa, Pseudomonas aeruginosa
MKFVDEVSIHVKAGDGGNGLMSFRREKFIEKGGPNGGDGGDGGSIYLEADVNLNTLVDYRYTRRFDAQRGENGGSKDCTGAKGDDLILPVPVGTTVIDANTQEIIGDLTEPGQRLMVAQGGWHGLGNTRFKSSTNRAPRQTTPGKPGEARDLKLELKVLADVGLLGLPNAGKSTFIRAVSAAKPKVADYPFTTLVPNLGVVSVGRYKSFVVADIPGLIEGAAEGAGLGIRFLKHLARTRILLHLVDMAPLDESDPADAAEVIVRELGRFSPALTERERWLVLNKMDQILDPAEREARKQAVIERLGWEGPVYVISALERDGTEALSQDIMRYLDERTLRLEEDPQYAEELAELDRRIEDEARARLQALDDARALRRSGLKNAGAVDDDDFDDEEDDGDGPEIFYVP

SEQ ID NO: 66684 - protein, 85 aa, Pseudomonas aeruginosa
MAHKKAGGSTRNGRDSESKRLGVKLFGGQAVKAGNILVRQRGTKFHAGYGVGLGKDHTLFAKVDGVVKFETKGAFGRKYVSIVAA

SEQ ID NO: 66685 - protein, 103 aa, Pseudomonas aeruginosa
MYAVIVTGGKQHKVTEGEFLKVEKLDVATGEAIDFDRVLLVANGEDVKIGLPVVEGAKVTAEVVSHGRHDKVRIIKFRRRKHHMKRQGHRQWFTEIKITGIQA

SEQ ID NO: 66686 - protein, 322 aa, Pseudomonas aeruginosa
MQPQAFYRVVAEDFTAVDGIIRRQLTSRVPLVEKIGDYIISAGGKRLRPLLVLLAGKTLGYKGDDLCLLAATIEFLHTSTLLHDDVVDASGLRRGRSTANALWGNAPSVLVGDFLYARSFEMMVELGSMPVMRIISQATRVIAEGEVLQLSKVRDASTTEETYMEVIRGKTAMLFEASTHSAAALCQAGEEQSEALRRFGDYLGIAFQLVDDLLDYRGDAATLGKNVGDDLAEGKPTLPLIVTMRDGTEEQAALVRKAIQQGGSQDLESVCAAVEAAGALDYTANLARDYAARAIACLDTLPDNEYRSALVELSEFAVARTH

SEQ ID NO: 66687 - protein, 445 aa, Pseudomonas aeruginosa
MTQSVDAFLERLKRRDPDQPEFHQAVEEVLRSLWPFLEANPHYLEAGIIERIVEPERAILFRVPWVDDQGRVRVNRGYRVQMSSAIGPYKGGLRFHPSVNLGVLKFLAFEQVFKNSLTTLPMGGGKGGSDFDPKGKSDAEVMRFCQSFMSELYRHVGADLDVPAGDIGVGAREIGYLFGQYKRLSNQFTSVLTGKGLSYGGSLIRPEATGFGCVYFAQEMLKDRGRGFDGQRVAISGSGNVAQYAARKVMEMGGKVISLSDSEGTLYAEAGLSDEQWEYLMELKNVRRGRIREMAEQFSLQFLEGRRPWGLACDIALPCATQNELDAEDARRLLANGCVCVAEGANMPSTLEAVDLFLEAGILYAPGKASNAGGVAVSGLEMSQNAMRLRWSEGEVDTKLHGIMQSIHHACLLYGEEQGRVNYVKGANIAGFVKVADAMLAQGVV

SEQ ID NO: 66688 - protein, 554 aa, Pseudomonas aeruginosa
MAQYVYTMHRVGKIVPPKREILKDISLSFFPGAKIGVLGLNGAGKSTLLRIMAGVDTEIEGEARPMPGINVGYLPQEPKLDPQATVRDIVEEAVGQIKQAQARLDEVYAAYAEPDADFDALAAEQAKLEAILQASDGHNLERQLEVAADALRLPPWDAKVEHLSGGEKRRVALCRLLLSAPDMLLLDEPTNHLDADSVAWLEHFLHDFPGTVVAITHDRYFLDNVAGWILELDRGHGIPFEGNYSGWLESKAARLAQEAKQEASHAKAMKAELEWVRQGAKGRQAKSKARLQRFEELQSQEFQKRSETNEIYIPAGPRLGDKVIELHNVTKGYGDRVLIDNLSLSIPKGAIVGVIGGNGAGKSTLFRMLTGKEQPDSGTIEIGETVQIASVDQSRDSLEGNKTVWEQVSDGFEQIKIGNYEVPSRSYVGRFNFKGADQQKFVKDLSGGERGRLHLALTLKQGGNVLLLDEPSNDLDVETLRALEEALLDFPGAAIVISHDRWFLDRIATHILSYEDDGKVTFFEGNYTEFEADRKKRLGDAASQPHRVRYKKLA

SEQ ID NO: 66689 - protein, 1415 aa, Pseudomonas aeruginosa
MSTPSLTPSPPPAGDPLTVPDRPAAKAGLLLLVLLMLGLLLWQMSQELRQQERFEHERAAAQLDRLNDRLSLTLELKARTALALLPGVPPSERGEIQGRLLPRISDALPQVRQLQWVDSAPQTDSPSPETTLPEQLRQHAGSGLYHYCLDPRDGESLYLTLREPGSRRDSGFWLLHLASDSLAQWSPDLPTGNLLWRLEDQYAGRVLWHTPGSTALLDDMQTLGVEPLRNSDWQLRGLYDSTRVRLGLLPGIGGELAIFLLLVGVTVYMLLRLHREQQGLRAMTLASQRSLRQAATALAAIDERVLVTRADGRLSYLNPQAERLFGISSAQARQHHLLGLLPDLEPGWLTDAGGDGETRSELLPLRVRGEPRTFTLSRHPLASYPALADQAWTLREQILQGGQVWVLRDVTEEQHALGVLEETRRRYQDIFEGVGVALCVLDLSALRQALVEQGLDSCAALRAWLAGEPGRQQALLERIRITEINDVSRRLLQIDSTEQAWQRLLDHGPLQPDSLRLQVIEALIERRPVLELEATLRCGKSTPRHLWLQLRLPENPGEWHAVTLSLSDVTSRKEVELSLIEREKFWSDAVQAVPDTLYIHDLHARRVIFSNHHLGQQLGYNQEELARMGENFWETLLHPDDQEYYWRIRNLQHVVGDGLLLDSQLRWRHRDGRWHWFDIREQAFSRDRSGRVARLIGVAKDITFTVEANNALRENGRRYRMLAENISDVIFSTDAELNASYVSPSVQHVFGYSPEWALLNGLHQTATNPRQLGRLNGLLRRVRHAIGDRQKLAELRENPGQHLFALDCLRADGRKIPIELRIVLMWDEHDRFEGLLGIARDISQQRRAERELRMAATVFEHSTAAIMVTDPAGYIVQVNDSFSRLTGYSPADVLDQQPRLLTADRQEANQLKHVLASLQHSGSWEGEILQKRKTGELYPSWVGITAVRDEEGDLVSFVCFFSDISERKASERRIHRLAYYDALTHLPNRTLFQDRLHTALQQAERNGQWVVLMFLDLDRFKPINDSLGHAAGDRMLQEVATRLSACVSQDDTVARMGGDEFTLLLPSQGDREIALKRAIQVAELILGRLARPFTLEGREFFVTASIGVALSPQDGAELSLLMKNADTAMYHAKEMGKNNFQFYQAEMNARALERLELESDLRRALELGEFVLHYQPQFTGDGRRLTGAEALLRWQHPRRGLVPPSEFIPVLEEIGLVAQVGDWLLAEACKQLRSWHKAKVRVPKVSVNLSARQFADGQLGERIAAILYETGIPPACLELELTESILMSDVAEAMQILSGLKRLGLAIAVDDFGTGYSSLNYLKQFPIDVLKIDRSFVDGLPHGEQDAQIARAIIAMAHSLNLMVIAEGVESQAQLDFLREHGCDEVQGYLFGRPMPAEQFGMLYASDVLFMFNEG

SEQ ID NO: 66690 - protein, 417 aa, Pseudomonas aeruginosa
MFSRDLTLARYDAELFAAMEQEAQRQEEHIELIASENYTSPAVMEAQGSVLTNKYAEGYPHKRYYGGCEYVDIVEQLAIDRAKQLFGADYANVQPHAGSQANAAVYLALLSAGDTILGMSLAHGGHLTHGASVSSSGKLYNAVQYGIDANGLIDYDEVERLAVEHKPKMIVAGFSAYSQVLDFARFRAIADKVGAYLFVDMAHVAGLVAAGVYPNPVPFADVVTTTTHKTLRGPRGGLILARANEEIEKKLNSAVFPSAQGGPLEHVIAAKAVCFKEALQPEFKTYQQQVLKNAQSMAQVFLDRGFDVVSGGTQNHLFLLSLIKQDITGKDADAALGRAFITVNKNSVPNDPRSPFVTSGLRIGTPAVTTRGFKEAECRELAGWICDILENMGDESVVDGVREKVKAICAKFPVYGN

SEQ ID NO: 66691 - protein, 334 aa, Pseudomonas aeruginosa
MSEVANDNHAPIPVTVLTGFLGAGKTTLLKYLLQAEHGMKIAVIENEYSETPIDGQLLGVEPVQVMTLSNGCVCCSINTDLEKALFLLLERRDNGEIDFDRLVIECTGLADPAPVAQTFFADEELCQRYVLDGIITLVDAANAERHLQETIAQAQVGFADRILVSKTDLVDAATFEALGQRLQRINRRALVHVVEHGRIDLAHLLDVRGFNLNADLGPGIGLRPLRAVAAKDSRDRIGTLVLRSDTPLDLERLSEFMDDLLQWHGNSLLRYKGVLNIADEPRRLVFQGVLRLYGFDWDSEWRDDEARESVIVFIGDNLPEDSIREGFERIVEGR

SEQ ID NO: 66692 - protein, 67 aa, Pseudomonas aeruginosa
MFNDLSRMGKYLGQAARMLVGMPDYDTYVEHMRNKHPDKPVMTYEEFFRERQEARYGGGKGRPIRCC

SEQ ID NO: 66693 - protein, 688 aa, Pseudomonas aeruginosa
MNNNNSLLRHLAWLVVAIVGAAALGVVALRRGEAINALWIVVAAVAIYLVAYRYYSLFIASKVMQLDPNRATPAVLNNDGLDYVPTNKHILFGHHFAAIAGAGPLVGPVLAAQMGYLPGTLWLIAGVVLAGAVQDFMVLFISSRRNGRSLGELVREEMGQVAGTIALFGAFLIMIIILAVLALIVVKALADSPWGMFTVLATIPIALFMGVYMRFIRPGRIGEISIIGVFLLLGSIWLGGQVAASPEWAPHFTFSGIQITWMLIGYGAVASVLPVWLLLAPRDYLSTFLKIGTIIGLAIGILIVMPELKMPALTQFTDGTGPVWKGSLFPFLFITIACGAVSGFHALISSGTTPKLLNREPDARYIGYGGMLMESFVAIMAMVAASVIEPGIYFAMNSPPAVVGADVNAVAATVSSWGFAITPEQLTQTAQDIGETTILARAGGAPTLAVGIAHILHQVLPGENTMAFWYHFAILFEALFILTAVDAGTRAGRFMLQDLLGNFVPALKKTESWTANIIGTGGCVALWGWLLYQGVVDPLGGINTLWPLFGISNQMLAGIALMLATVVLIKMKRQQYVWVTILPAAWLLICTTTAGLIKIFDSNPAVGFVALGEKYATALDAGQVLAPAKDIGQMQHVVLNAYINAGLTVLFLLVVFSVLFYAIKVGIAAWGKSERTDKETPFEPIPDA

SEQ ID NO: 66694 - protein, 453 aa, Pseudomonas aeruginosa
MAKAKRMYGCTECGATFPKWAGQCADCGAWNTLVETVVEAAPSGSGRGGWAGQQANLKTLAEVSVEEMPRFTTGSTELDRVLGGGLVDGSVVLIGGDPGIGKSTILLQTLCNLASRVPALYVTGEESQQQVAMRARRLSLPEDKLKVMTETSIETIIATARQEQPRVMVIDSIQTIFTEQLQSAPGGVAQVRESAAMLVRYAKQSGTAIFLVGHVTKEGALAGPRVLEHMVDTVLYFEGESDGRLRLLRAVKNRFGAVNELGVFGMTDKGLKEVSNPSAIFLTRAQEAVPGSVVMATWEGSRPMLVEVQALVDTSHLANPRRVTLGLDQNRLAMLLAVLHRHGGIPTYDQDVFLNVVGGVKVLETASDLALMAAVMSSLRNRPLPHDLLVFGEVGLSGEVRPVPSGQERLKEAGKHGFKRAIVPLGNAPKEAPAGLQVIAVTRLEQALDALFE

SEQ ID NO: 66695 - protein, 2154 aa, Pseudomonas aeruginosa
MVRPDSQRGKRTSSKAGREGRFVLAASSTLMFAIASINAAMAAPTGAQFNPNEIKISQQGKTTLIDQSTQRAIINWKGFDVSADEAVRFNQPGVTSSTLNRVTAGQESVIAGRISAPGQVIIYNSNGVVFSGSAKVDVGSLITTTANISDEHFRQGKLIFDQPGNPDARIVNDGSISVAEKGLAAFVAPSVANNGVINARLGTVAMAAGNAATIDLYGDGLVSIAVTDPVTRKPQDAQALVSNGGAIQADGGSVLITAEQASRVVDNAVNLSGVILARGTEVREGSVALVSKSGDIQIAGKIDVSGPKNGGDVLVSGQQVALASTASIDARGTAQGGSVRIGGDFQGRGELPRAKNATLAKGASIDVSATGKGNGGLAVVWSDGNTRMDGRILARGGAQGGNGGLVETSGKVNLSIADSAYVSVAAPYGNGGTWLLDPTTLRIVASGGTSGSVGGANGASGDATVNASVVTGALAGGKVTLSASDRLSVEAPLITSNLGGASRGLELIATGPAGAVDISAPILFRNGSLAIRAGGNINFLSGGTPQTSGIVDLGSGTLWMQTSTAGKISQQAGTALIAANLAGRAGSIDLASWDNYAGNLALQTFNGTLKYRQSNATGVTTSGTVFDPFINQSMTGTAQNIVSSVGTRILEANSVGTTGNYTLTADGNSEFDRLVFTALPYRRVSGSASFPTNDSSDYLVTNLRYQVNGSNVTATPNGGAPSGFTVAAGNGSVTTWTGNWGTSWGVKGFGGVIGVTDELQYDVGTGLTEELIFGLGGKTSRVDTRLDLFMREGAFNSFAERAQVEMFKTTTTAGDILSRQQTATLTANDATRVYGDVNPTLTATMSGINAIDAYVNSQFNDLYQATASTTATQASNVGQYAITGNANGSEYFSQRYQLVRQDGRLTVTPAQLIVSADAKTKVYGDADPTLTYQVSGLKNSDTAAGVLSGNLGRVAGENVGNYGILQGGLGLNTANYTLSYVGNDLRITPAQLNVIADAKTKVYGDLDPALTYQVSGLKRGDTAGAVLNGGSLSRVAGENVGVYGINQGGLGLVSSNYTLNYQGNNLTITKALLNVIADAKTKVYGDADPALTYQVSGLKNGDTAGAVLNGGSLSRVAGENVGVYGINQGGLGLLSANYDLSYQGNNLTITKALLNVIADAKTKVYGDADPSLTYQVSGLKNGDTAGSILTGGLNRAAGENVGVYGINQGDLALNSGNYDLSYQGNNLTITKALLNVIADAKTKVYGDADPSLTYQVSGLKNGDTAGAVLNGGGLVRVSGENVGNYAIQQGGLGLVSGNYDLAYQGNNLTITKALLNVIADAKTKVYGDADPSLTYQVSGLKNGDSAGSILTGGLNRAAGENVGVYGINQGDLALNSGNYDLSYQGNNLTITKALLNVIADAKTKVYGDADPSLTYQVSGLKNGDTAGAVLNGGGLVRVSGENVGNYAIQQGGLGLVSGNYDLAYQGNNLTITKALLNVIADAKTKVYGDADPSLTYQVSGLKNGDTAGAVLNGGSLSRVAGENVGVYGINQGDLALNSGNYDLSYQGNNLTITKALLNVIADAKTKVYGDADPSLTYQVSGLKNGDTAGAVLNGGGLVRVSGENVGNYAIQQGGLGLVSGNYDLAYQGNNLTITKALLNVIADAKTKVYGDADPSLTYQVSGLKNGDSAGSILTGGLNRAAGENVGVYGINQGDLALNSGNYDLSYQGNNLTITKALLNVIADAKTKVYGDADPSLTYQVSGLKNGDTAGAVLNGGGLVRVSGENVGNYAIQQGGLGLVSGNYDLAYQGNNLTITKALLNVIADAKTKVYGDADPSLTYQVSGLKNGDTAGAVLNGGSLSRVAGENVGVYGINQGGLGLVSGNYDLAYQGNNLTITKALLNVIADGKTKVYGDADPSLTYQVSGLKNGDSAGSILTGGLNRDAGENVGVYGINQGGLVLTSGNYDLAYQGNDLTITKALLNVFADAKSKQVGTADPALTYQVSGLKNGDSAGQVLAGGLGRVGGEAVGQYDILQGGLALTSGNYQLNYQGNLLSILPLPVTPGDLGQLAALSDLRELQKGRDPDTPGDAVYRTTTLENPFLENPFLRAYALGMDVSDPNLLPATAAGPAEDASAKRVGQFTDRPLRAEAESGAGCSNQSYLADYWSCFNKPLNF

SEQ ID NO: 66696 - protein, 332 aa, Pseudomonas aeruginosa
MDPRSEVLLRQRHLFATPLLLAGLPADDLLAELPQAQGWSWHAGEQAQLDARFPGRSRFDTRAPTGAWTSAVLFLPKSRELTDYLLASLAARLPGGELFLVGEKRGGIERASKQLAAYGKPRKLDSARHCQLWQVRIEQAPAEPDLHALAQRYSLPLADGELQVVSLPGVFSHGRLDRGSALLLGQLQALPGGHLLDFGCGAGVLGAVLKRRYPASRLSLLDVDAFAVESSRLTLAANGLDGEVIAADGIDGAPRELAAIVSNPPFHQGVHTDYQASERLLQRAAEHLAPGGELRLVANSFLKYPPLIERHLGPCRTLAEGDGFRIYSARRS

SEQ ID NO: 66697 - protein, 212 aa, Pseudomonas aeruginosa
MPVHEIRHPLIRHKLGLMRRADISTKNFRELAQEVGALLTYEATKDLPLEQYEIPGWAGPVTVEKISGKKITVVPILRAGIGMLDGVLSLIPGAKVSAVGVARNEETLEARTYLEKLAPDIAERRSLIIDPMLATGGSMVATIDLLKKAGSKEIRAMVLVAAPEGIEAVRKAHPDVIIYTASIDEKLDENGYIIPGLGDAGDKIFGTKQKEA

SEQ ID NO: 66698 - protein, 305 aa, Pseudomonas aeruginosa
MHILLTGGTGLMGRRLCARWRQAGHRLTVFSRRPQQVESLCGVGVRGIDRFDEYGDQPLDAVVNLAGEPIADKPWSHKRKALLWESRVRLTERLVEWLDAREQRPDLLLSGSAVGWYGDSGERPVTEEGAAAGEDFASELCLAWEQIAREAEKLGTRVVLLRTGLVLAPEGGFLGRLLPLYRLGLGGPLGDGRQWMPWIHIEDQIELIDFLLRRPDASGPYNACAPNPVRNRDFAKALGRALHKPARIPTPGFVLRLGLGEMSGLLLGGQRALPQRLQDAGYRFQFTDLDVALADVLDARRKDQA

SEQ ID NO: 66699 - protein, 265 aa, Pseudomonas aeruginosa
MAVESAAVGVFDSGVGGLSVLREIRARLPSESLLYVADNAHVPYGEKSAEYIRERCERIGDFLLEQGAKALVLACNTATAAAAAELRERYPQVPLVAMEPAVKPAAAATRNGRVGVLATTGTLKSARFAALLDRFASDVQVFTQPCPGLVERIEAGDLYGPQTRALLERLLAPILEQGCDTLILGCTHYPFVKPLLAELIPAEMAVIDTGAAVARQLERVLSARALLASGQAATPRFWTSALPEEMERILPILWGSPESVGKLVV

SEQ ID NO: 66700 - protein, 252 aa, Pseudomonas aeruginosa
MLSDEELLRYSRQILLAQVDVEGQLRLKRSRALIVGLGGLGSPVALYLAAAGVGELHLADFDTVDLTNLQRQVIHDGASVGIGKVESAMRRLGALNPQIRLVSHSAALDEDSLDAAVAAVDLVLDCTDNFATREAVNVACVRAGKPLVSGAAIRLEGQLSVFDTRRDESPCYHCLYGHGSEAELTCSEAGVIGPLVGLVGSLQALEALKLLAGFGEPLVGRLLLVDALGTRFRELRVRRDPSCAVCGQRHGG

SEQ ID NO: 66701 - protein, 276 aa, Pseudomonas aeruginosa
MTTICTLLKDSQLPDSPSARLDTELLLAAAMGKPRSFLRTWPERIVPREANERFDDWIARRRNGEPVAYILGHQGFWSLDLEVAPHTLIPRPDTELLVETALATLAADTATVLDLGTGTGAIALALASERPLWTVTAVDRVEEAVALAERNRQRLLLENVEVRRSHWFSALDGRRFRMIVGNPPYIPASDPHLSEGDVRFEPKSALVAGSDGLDDIRQIVAQAPRHLLDEGWLLLEHGYDQGAAVRELLGARGFAGVHTLRDLGGNERITLGQWAC

SEQ ID NO: 66702 - protein, 422 aa, Pseudomonas aeruginosa
MAFIALGINHKTASVAVRERVAFTPEQMVEALQQLCRLTTSREAAILSTCNRSELYLEIDHPTADDVLAWLADYHRLTLDELRACAYVHQDEDAVRHMMRVASGLDSMVLGEPQILGQMKSAYAVAREAGTVGPLLGRLFQATFSTAKTVRTDTAIGENPVSVAFAAVSLAKQIFSDLHRSQALLIGAGETITLVARHLFEQGVKRIVVANRTLERASLLAEQFGAHAVLLSEIPEELANSDIVISSTASQLPILGKGAVERALKQRKHKPMFMVDIAVPRDIEPEVGELDDVYLYSVDDLHEVVAENLKSRQGAAQAAEELVGSGVAEFMQRLRELAAVDVLRAYRQQAERLRDEELGKAQRQLANGADPAEVMAQLARGLTNKLLHAPSVQMKKMSAEGRIDALALAQELFALDEGAPRH

SEQ ID NO: 66703 - protein, 313 aa, Pseudomonas aeruginosa
MSKMMVFTGNANPDLARRVVRQLHIPLGDVSVGKFSDGEISVEINENVRGKDVFLIQPTCAPTNDNLMELVVMADAFRRSSATRITAVIPYFGYARQDRRPRSARVAISAKVVADMLTVVGVNRVLTVDLHADQIQGFFDIPVDNIYGSPVLVDDIEDQRFENLMIVSPDIGGVVRARAVAKSLGVDLAIIDKRRPKANQSEVMHIIGDVEGRTCVLVDDMVDTAGTLGHAAKALKEHGAAKVIAYCTHPVLSGRAIENIEKSVLDELVVTNTIPLSAAAQACGRIRQLDIAPVVAEAMRRISNEESISAMFR

SEQ ID NO: 66704 - protein, 366 aa, Pseudomonas aeruginosa
MGFNCGIVGLPNVGKSTLFNALTKSGIAAENFPFCTIEPNSGIVPMPDARLNALAEIVKPERVLPTTMEFVDIAGLVAGASKGEGLGNKFLANIRETDAIAHVVRCFEDDNVIHVSNSVDPKRDIEIIDLELIFADLDSCEKQLQKVARNAKGGDKEALAQKALLEKLIPHFTEGKPARSLLKNLGDEEKRLVRSFHLLTSKPVMYIANVAEDGFENNPHLDVVKAIAEEEGAVVVPVCNKIEAEIAELEDGEEKDMFLESLGLEEPGLNRVIRAGYGLLNLQTYFTAGVKEVRAWTVRVGATAPQAAGVIHTDFEKGFIRAEVVAYDDFIQFKGEQGAKEAGKWRLEGKDYIVKDGDVMHFRFNV

SEQ ID NO: 66705 - protein, 335 aa, Pseudomonas aeruginosa
MPVRLLNRFRHAALACLLGSLSLNAAADPVTLTLYNGQHAATGIAIAKAFQDKTGIQVKIRKGGDGQLASQITEEGARSPADVLYTEESPPLIRLASAGLLAKLEPETLALVEPEHAGGNGDWIGITARTRVLAYNPKKIDEKDLPKSLMDLSDPSWSGRFGFVPTSGAFLEQVAAVIKLKGQEEAEDWLTGLKAFGSIYTNNVTAMKAVENGEVDMALINNYYWYTLKKEKGELNSRLHYFGNQDPGALVTVSGAAVLKSSKHPREAQQFVAFMLSEEGQKAILSQSAEYPMRKGMQADPALKPFAELDPPKLTPADLGEASEALSLERDVGLN

SEQ ID NO: 66706 - protein, 338 aa, Pseudomonas aeruginosa
MRVFYDKDCDLSIIQGKKVAIIGYGSQGHAHACNLKDSGVDVTVGLRSGSATVAKAEAHGLKVADVKTAVAAADVVMILTPDEFQGRLYKEEIEPNLKKGATLAFAHGFSIHYNQVVPRADLDVIMIAPKAPGHTVRSEFVKGGGIPDLIAIYQDASGNAKNVALSYACGVGGGRTGIIETTFKDETETDLFGEQAVLCGGCVELVKAGFETLVEAGYAPEMAYFECLHELKLIVDLMYEGGIANMNYSISNNAEYGEYVTGPEVINAESRAAMRNALKRIQDGEYAKMFITEGAANYPSMTAYRRNNAAHPIEQIGEKLRAMMPWIAANKIVDKSKN

SEQ ID NO: 66707 - protein, 163 aa, Pseudomonas aeruginosa
MRHIISLLLENEPGALSRVVGLFSQRNYNIESLTVAPTEDPTLSRLTLTTVGHDEVIEQITKNLNKLIEVVKLVDLSESAHIERELMLVKVKATGAQRAEVKRTTDIFRGQIVDVTSSVYTVQLAGTSDKLDSFIQAIGTASILEVVRSGVTGIARGDKTLSI

SEQ ID NO: 66708 - protein, 574 aa, Pseudomonas aeruginosa
MELLSGAEMVVRSLRDEGVKYIYGYPGGALLHIYDALFKEHDVTHILVRHEQAATHMADGYARATGKPGVVLVTSGPGATNAITGIATAYMDSIPMVILSGQVPSNMVGTDAFQETDMVGISRPIVKHSFIIKHPSEIPEVIKKAFYLAQSGRPGPVVVDIPKDMGDPTQKFEYSYPKKVKLRSYSPAVRGHSGQIRKAAEMLLAAKRPVVYSGGGVIMGNAAAPLTELAQMLNLPVTNTLMGLGGYPGADRQFLGMLGMHGSFTANLAMHHSDVILAVGARFDDRVINGAAKFCPNAKIIHIDIDPASISKTIKADIPIVGPVDSVLTEMVAIVREIGETPNQDAQAAWWKQIDEWRGNRGLFPYDKGDGSIIKPQTVIETLYEVTHGDAFITSDVGQHQMFASQYYKFNKPNRWINSGGLGTMGFGFPAAMGIKLNFPDDDVACVTGEGSIQMNIQELSTCLQYDLPVKIVNLNNGALGMVRQWQDMQYNSRYSHSYMESLPDFVKLAEAYGHVGMRITDLKDLKPKMEEAFAMKNRLVFLDIQVDASEHVYPMQIRDGAMRDMWLSKTERT

SEQ ID NO: 66709 - protein, 774 aa, Pseudomonas aeruginosa
MTRPRSPRSRNSKARPAPGLNKWLSWALKLGLVGLVLLAGFAIYLDAVVQEKFSGRRWTIPAKVYARPLELFNGLKLSREDFLRELDALGYRREPSVSGPGTVSVAASAVELNTRGFQFYEGAEPAQRVRVRFNGNYVSGLSQANGKELAVARLEPLLIGGLYPAHHEDRILVKLDQVPTYLIDTLVAVEDRDFWNHHGVSLKSVARAVWVNTTAGQLRQGGSTLTQQLVKNFFLSNERSLSRKINEAMMAVLLELHYDKRDILESYLNEVFLGQDGQRAIHGFGLASQYFFSQPLAELKLDQVALLVGMVKGPSYFNPRRYPDRALARRNLVLDVLAEQGVATQQEVDAAKLRPLGVTRQGSMADSSYPAFLDLVKRQLRQDYRDEDLTEEGLRIFTSFDPILQEKAETSVNETLKRLSGRKGVDQVEAAMVVTNPETGEIQALIGSRDPRFAGFNRALDAVRPIGSLIKPAVYLTALERPSKYTLTTWVQDEPFAVKGQDGQVWRPQNYDRRSHGTIFLYQGLANSYNLSTAKLGLDVGVPNVLQTVARLGINRDWPAYPSMLLGAGSLSPMEVATMYQTIASGGFNTPLRGIRSVLTADGQPLKRYPFQVEQRFDSGAVYLVQNAMQRVMREGTGRSVYSQLPSSLTLAGKTGTSNDSRDSWFSGFGGDLQAVVWLGRDDNGKTPLTGATGALQVWASFMRKAHPQSLEMPMPENVVMAWVDAQTGQGSAADCPNAVQMPYIRGSEPAQGPGCGSQNPAGEVMDWVRGWLN

SEQ ID NO: 66710 - protein, 327 aa, Pseudomonas aeruginosa
MLVLWLSLALGPVSLPLGDTLRAALRLAGLPLDGTGLAQAEMILGQIRLPRTLLGLAVGAVLALSGVAMQGLFRNPLADPGLVGVSSGAALGAALAIVFGASLGGLPAFLAPYLLSLCAFGGGLGVTWLVYRLGRRDGQTSVATMLLAGIALTALSGAVIGLFTYLADDATLRTLTFWNLGSLNGASYPRLWPLLLVALLVACWLPRRADALNALLLGESEARHLGFDVERLKAELVLCTALGVGAAVAAAGMIGFIGLVVPHLIRLVAGPDHRTLLPASMMAGAILLLLADLLARLALAPAELPIGIVTALIGAPFFLYLLLRGRA

SEQ ID NO: 66711 - protein, 411 aa, Pseudomonas aeruginosa
MAESRPARRFARIDRLPPYVFNITAELKMAARRRGEDIIDLSMGNPDGPTPPHIVEKLCTVAQREDTHGYSTSRGIPRLRRAISHWYRDRYDVQIDPESEAIVTIGSKEGLAHLMLATLDHGDTILVPNPSYPIHIYGAVIAGAQVRSVPLVPGIDFFNELERAIRESIPKPRMMILGFPSNPTAQCVELDFFERVVALAKQYDVMVVHDLAYADIVYDGWKAPSIMQVPGAKDIAVEFFTLSKSYNMAGWRIGFMVGNPELVSALARIKSYHDYGTFTPLQVAAIAALEGDQQCVRDIARQYQQRRDVLVKGLREAGWMVENPKASMYVWAKIPEPYAHLGSLEFAKKLLQDAKVSVSPGIGFGDYGDDHVRFALIENRDRLRQAVRGIKAMFRADGLLSPQRKVDSLAE

SEQ ID NO: 66712 - protein, 148 aa, Pseudomonas aeruginosa
MSTKAKQQSSQQMTRGFEPYQETKGEEYMSERMRAHFTAILNKWKQELMEEVDRTVHHMQDEAANFPDPADRASQEEEFSLELRARDRERKLIKKIDETLQLIEDEEYGWCDSCGVEIGIRRLEARPTATLCIDCKTLAEIREKQLGS

SEQ ID NO: 66713 - protein, 293 aa, Pseudomonas aeruginosa
MTSSYVGRFAPTPSGYLHFGSLVAAVASYLDARAVGGRWLVRMEDLDPPREVPGAQQAILETLERYGFEWDGAVERQSERFPAYAAVVEQLLRSGLAYACTCSRKQLEGFAGIYPGFCRDAGHAREDAAIRLRVPELEYRFVDRVQGEVRQHLGREVGDFVIQRRDGLYAYQLAVVLDDAWQGITDIVRGADLLDSTPRQLYLQELLGLSQPRYLHVPLIVQPDGHKLGKSYRSPPLPAEQAAAPLTRALRALGQRPPAELAQASASEALAWGVAHWDATRIPRCATLPEERL

SEQ ID NO: 66714 - protein, 467 aa, Pseudomonas aeruginosa
MLKKLIQTIRSPLRRPRAVRTTPEVIGNNQHSLRRDQFSRNAVKVVEILQRAGYQAYVVGGCVRDQMLGIAPKDFDVATSATPEQVRAEFRNARIIGRRFKLVHVHFGREIIEVATFRAHHPEGQDDGDSRASSNESGRILRDNVYGSLEDDAQRRDFTINALYFDVTSERLLDYANGVHDIRNRLIRLIGDPEQRYLEDPVRMLRAVRFAAKLDFEIEKHSAAPIRRLAPLLREIPSARLFDEVLKLFLAGRAERTFELLVEYELFAPLFPASAKALQANPDYTGKLIRQALANTDARIRQGKPVTPAFLFAALLWPALPARVAQLQEKGMPAIPAMQEAAHELISEQCQRIAIPKRFTLPIREIWDMQERLPRRQGKRADLLLENPRFRAGYDFLLLRESAGEETEGLGQWWTDYQEVSDSERRNMIRDLVSQEDGSAPRKRRRGGNSGRRRRGPRKEGSGGSGE

SEQ ID NO: 66715 - protein, 162 aa, Pseudomonas aeruginosa
MIQRVYVALGSNLAEPREQIQAALDAFERLPETRLVAVSPLYISDPLGPADQPRFVNGVAALDTNLAPLDLLDALQAIELEQGRVRDLRWGPRTLDLDILLFGEQLLDLPRLKVPHYHMQARAFVLYPLADLAPDLRLPDGRHLPELLAACPFEGIERLPGA

SEQ ID NO: 66716 - protein, 266 aa, Pseudomonas aeruginosa
MPDVTLTTLQGLKQSGEKIAMLTCYDATFAHTASQAGVDVLLVGDSLGMVLQGHDSTLPVSNEEMAYHTACVKRGNKGSLIVTDLAFESSHSVAQTLADAVRLMQAGAHMVKLEGGVWLAEPIARLAQMGVPVCAHLGLTPQAVNLFGGFKVQGRQETQARQLRADAIALEQAGAAMLLLECVPSVLAEEITQAVKIPVIGIGAGAATDGQVLVMHDMLGLSLTGRSPKFVKDFMQGQESIPAAIAAYVRAVKDVSFPAAEHGFNA

SEQ ID NO: 66717 - protein, 554 aa, Pseudomonas aeruginosa
MKHHLTPLDATQLDSWRALAAHRQELQDFRMRQAFIDDPERFKRFSFSACGLFLDFSKNLIRQDTIDLLVKLAEEARLSDAIRAMFDGEAINASERRPVLHTALRRPIGDKVLVDGVDVMPEVHRVLHQMTELVGYVHNGLWRGYTEKPITDVVNIGIGGSFLGPQLVSEALLPFAQKGVRCHYLANIDGSEFHELASRLNAETTLFIVSSKSFGTLETLKNAQAARAWYLAQGGTEEELYRHFIAVSSNKEAAIAFGIREENIFPMWDWVGGRYSLWSAIGLPIAMSIGISNFKELLSGAYNMDQHFQTAPFERNIPVLLGLLGVWYGDFWGANSHAILPYDYYLRNITDHLQQLDMESNGKSVRQDGTPVTSGTGPVIWGGVGCNGQHAYHQLLHQGTQLIPADFIVPVSSYNPVADHHQWLYANCLSQSQALMLGKSREEAEAELRAKGLPEAEVQRLAPHKVIPGNRPSNTLVVERISARRLGALIAMYEHKVYVQSILWGINAFDQWGVELGKELGKGVYSRLVGSEETPAEDASTQGLIDFFRGRHRG

SEQ ID NO: 66718 - protein, 645 aa, Pseudomonas aeruginosa [sequence omitted]

SEQ ID NO: 66719 - protein, 65 aa, Pseudomonas aeruginosa
MNSDVIKGKWKQLTGKIKERWGDLTDDDLQAADGHAEYLVGKLQERYGWSKERAEQEVRDFSDRL

SEQ ID NO: 66720 - protein, 701 aa, Pseudomonas aeruginosa
MNPVTKQFQFGQSTVTLETGRIARQATGAVLVTMDDVSVLVTVVGAKSPAEGRDFFPLSVHYQEKTYAAGRIPGGFFKREGRPSEKETLTSRLIDRPIRPLFPEGFMNEVQVVCTVVSTNKKSDPDIAAMIGTSAALAISGIPFAGPIGAARVGFHPEIGYILNPTYEQLQSSSLDMVVAGTEDAVLMVESEADELTEDQMLGAVLFAHDEFQAVIRAVKELAAEAGKPAWDWKAPAENTVLVNAIKAELGEAISQAYTITIKQDRYNRLGELRDQAVALFAGEEEGKFPASEVKDVFGLLEYRTVRENIVNGKPRIDGRDTRTVRPLRIEVGVLGKTHGSALFTRGETQALVVATLGTARDAQLLDTLEGERKDAFMLHYNFPPFSVGECGRMGSPGRREIGHGRLARRGVAAMLPTQDEFPYTIRVVSEITESNGSSSMASVCGASLALMDAGVPVKAPVAGIAMGLVKEGEKFAVLTDILGDEDHLGDMDFKVAGTDKGVTALQMDIKINGITEEIMEIALGQALEARLNILGQMNQVIAKPRAELSENAPTMLQMKIDSDKIRDVIGKGGATIRGICEETKASIDIEDDGSVKIYGETKEAAEAAKLRVLAITAEAEIGKIYVGKVERIVDFGAFVNILPGKDGLVHISQISDKRIDKVTDVLQEGQEVKVLVLDVDNRGRIKLSIKDVAAAEASGV

SEQ ID NO: 66721 - protein, 89 aa, Pseudomonas aeruginosa
MALSVEEKAQIVNEYKQAEGDTGSPEVQVALLSANINKLQDHFKANGKDHHSRRGLIRMVNQRRKLLDYLKGKDVSRYTALIGRLGLRR

SEQ ID NO: 66722 - protein, 304 aa, Pseudomonas aeruginosa
MAQVKRIRRSISGILVLDKPRGMSSNQALQKVRWLLNAEKAGHTGSLDPLATGVLPLCFGEATKFSQYLLDADKGYETVMRMGITTTTGDAEGELLAERDVTVGRDDLEQALPRFRGDIEQVPPMYSALKKDGQPLYKLARAGEVVEREARSVTITRLDLLSFEPPCATLAVSCSKGTYVRTLVEDLGQVLGCGAHVAALRRTQAGPFALAQAITLETLERVHAEGGPEALDQFLMPEDSGLLHWPVLQLSEHSAYYWLHGQPVRAPEAPKFGWLRVQDHTGRFIGIGEVTDDGRIAPRRLIRS

SEQ ID NO: 66723 - protein, 493 aa, Pseudomonas aeruginosa
MSKEVLLVVESVSNEKGVPAGVIFEALELALATATKKRFEDEVDLRVEINRHNGSYETFRRWHVVADEDYQDPATEITVEDVQEQKPGAKVGEVIEEKIESIEFGRIAAQTAKQVIVQKVREAERAQVVDAYREKVGEIISGTVKKVTRDNVIVDLGNNAEALLARDQIIPRETFRVGTRVRALLKEIRTENRGPQLVLSRTAPEMLIELFRIEVPEIAEQLIDVMAAARDPGSRAKIAVRSKDKRIDPQGACIGMRGSRVQAVSGEIGGERVDIVLWDDNPAQFVINAMAPAEVAAIIVDEDTHTMDIAVAEDNLAQAIGRSGQNVRLASQLTGWTLNVMTEADIQAKQQAETGDILQRFVDELDVDEELAQVLVEEGFTTLEEIAYVPMEEMLSIDGFDEDIVNELRSRAKDRLLTKAIATEEKLADAQPAEDLLSLDGMSKELALDLALRGVTTREDLAEQSIDDLLDIDGMDEERAGKLIMAARAHWFE

SEQ ID NO: 66724 - protein, 445 aa, Pseudomonas aeruginosa
MSRKYFGTDGIRGRVGEFPITPDFVLKLGWAVGMAFRRQGNCRVLIGKDTRSSGYMFESAFEAGLSASGADTLLLGPMPTPGIAYLTRTFHAEAGVVISASHNPHDDNGIKFFSGQGTKLPDDVELMIEELLDAPMTVVESARLGKVSRINDAAGRYIEFCKSSVPTSTDFNGLKVVLDCANGATYKIAPSVFRELGAEVTVLAASPNGLNINDKCGSTHLDGLQAAVVEHHADLGIAFDGDGDRVMMVDHTGAVVDGDELLFLIARDLQESGRLQGGVVGTLMSNLGLELALQELHIPFVRAKVGDRYVMAELLARNWMLGGENSGHIVCCQNTTTGDAIIAALQVLMALKHRGQTLAEARQGIRKCPQVLINVRFKGENDPLEHPSVKEASVRVTEQMGGRGRVLLRKSGTEPLVRVMVEGDEEASVRAHAEQLAKIVSEVCA

SEQ ID NO: 66725 - protein, 283 aa, Pseudomonas aeruginosa
MSNPQYPTRLPCGSRVLDLARPHVMGILNVTPDSFSDGGRYDRLDDALRHAERMVLEGATLIDVGGESTRPGARSVSPTEELERVAPVVERIARELDVVISVDTSTPAVMRETARLGAGLINDVRSLQRDGALDAAVDSGLAVCLMHMRGEPQTMQDAPAYQDVVAEVGAFLQERVDACVAAGIDRERLLLDPGFGFAKTLEHNLVLFRHLQALHGLGLPLLVGVSRKSMIGKVLGREVDERLYGSLALAALALAKGARIIRVHDVAATVDVMRMISAVEMAD

SEQ ID NO: 66726 - protein, 639 aa, Pseudomonas aeruginosa
MAKNLILWLIIAAVLVTVMNNFSSPSEPQTLNYSDFIQQVKDGKVERVTVDGYVITGKRSDGDTFKTIRPAIQDNGLIGDLVNNNVVVEGKQPEQQSIWTQLLVASFPILVIIAVFMFFMRQMQGGGGGRGGPMSFGKSKARLLSEDQVKTTFADVAGCDEAKEEVSELVEFLRDPGKFQRLGGRIPRGVLMVGPPGTGKTLLAKAIAGEAKVPFFTISGSDFVEMFVGVGASRVRDMFDQAKKHAPCIIFIDEIDAVGRHRGAGLGGGHDEREQTLNQLLVEMDGFEMNDGIIVIAATNRPDVLDPALLRPGRFDRQVVVGLPDIRGREQILKVHMRKVPLGDHVDPAVIARGTPGFSGADLANLVNEASLFAARSNKRIVDMREFELAKDKIMMGAERKTMVMSEKEKRNTAYHEAGHAIVGRLVPEHDPVYKVSIIPRGRALGVTMFLPEEDRYSLSKRALESQICSLFGGRIAEEMTLGFEGVTTGASNDIMRATQLARNMVTKWGLSEKLGPLMYAEEEGEVFLGRSAGSQHANVSGETAKMIDQEVRRIIDDCYGTAKRLLDENRDKLEMMADALMKYETIDSDQIDDIMAGRVPREPRDWQGGSGTGTPPANLEESGRRENTPPIGGPAGEH

SEQ ID NO: 66727 - protein, 1073 aa, Pseudomonas aeruginosa
MPKRTDIKSILILGAGPIVIGQACEFDYSGAQACKALREEGYRVILVNSNPATIMTDPAMADATYIEPIKWATVAKIIEKERPDALLPTMGGQTALNCALDLERHGVLEKFGVEMIGANADTIDKAEDRSRFDKAMKDIGLACPRSGIAHSMEEAYGVLEQVGFPCIIRPSFTMGGTGGGIAYNREEFEEICARGLDLSPTNELLIDESLIGWKEYEMEVVRDKKDNCIIVCSIENFDPMGVHTGDSITVAPAQTLTDKEYQIMRNASLAVLREIGVETGGSNVQFGICPNTGRMVVIEMNPRVSRSSALASKATGFPIAKIAAKLAVGYTLDELQNDITGGRTPASFEPAIDYVVTKIPRFAFEKFPKADARLTTQMKSVGEVMAIGRTFQESVQKALRGLEVGATGFDPKLDLNDPEADSILKRELTVPSAERVWYVADAFRAGKSVEEVFELTRIDEWFLVQIEDLVKDEEKVKTLGLSSIDRELMYKLKRKGFSDARLAKLLGVTEKNLRSHRHKLKVLPVYKRVDTCAAEFATDTAYMYSTYEEECEANPSSREKIMILGGGPNRIGQGIEFDYCCVHAALAMREDGYETIMVNCNPETVSTDYDTSDRLYFEPVTLEDVLEIVRVEQPKGVIVQYGGQTPLKLCRALEEAGVPIIGTSPDAIDRAEDRERFQQMVQRLNLRQPANATARSEDEALAASKAIGYPLVVRPSYVLGGRAMEIVYQEEELKRYMREAVQVSNDSPVLLDHFLNCAIEVDIDAVCDGEIVVIGAIMQHIEQAGVHSGDSACSLPPYSLPQHIQDEIREQVKKMALELGVVGLMNVQMAVQGEDIFVIEVNPRASRTVPFVSKCVGESLAKVAARVMAGKTLAEVGFTQEIIPPFFSVKEAVFPFAKFPGVDPILGPEMKSTGEVMGVGDSFAEAFAKAQLGASEILPTAGCAFISVREDDKPFAAQVAGDLVALGFEVVATAGTARVIEAAGLPVRRVNKVTEGRPHVVDMIKNDEVTLIINTTEGRQSIADSYSIRRNALQHKICCTTTIAGGQAICEALKFGPEKTVRRLQDLHAGIKA

SEQ ID NO: 66728 - protein, 378 aa, Pseudomonas aeruginosa
MTKPAILALADGSIFRGEAIGADGQTVGEVVFNTAMTGYQEILTDPSYAQQIVTLTYPHIGNTGTTPEDAEANRVWAAGLIIRDLPLIASNWRSKQSLPDYLKANGTVAIAGIDTRRLTRILREKGSQNGCILAGADATEERALELARAFPGLKGMDLAKEVTTAERYEWRSSVWNLESDSHPEIPAGELPYHVVAYDYGVKLNILRMLVARGCRLTVVPAQTPASEVLALNPDGIFLSNGPGDPEPCDYAIQAIREFLDTEIPVFGICLGHQLLALASGAKTLKMGHGHHGANHPVQDLDSGVVMITSQNHGFAVDESTLPDNLRATHKSLFDGTLQGIERTDKVAFSFQGHPEASPGPHDVAPLFDRFISAMAERR

SEQ ID NO: 66729 - protein, 268 aa, Pseudomonas aeruginosa
MRRIAVVGAAGRMGKNLIEAVQQTGGAAGLTAAVDRPDSTLVGADAGELAGLGRIGVPLSGDLGKVCEEFDVLIDFTHPSVTLKNIEQCRKARRAMVIGTTGFSADEKLLLAEAAKDIPIVFAANFSVGVNLCLKLLDTAARVLGDEVDIEIIEAHHRHKVDAPSGTALRMGEVVAQALGRDLQEVAVYGREGQTGARARETIGFATVRAGDVVGDHTVLFAAEGERVEITHKASSRMTFARGAVRAALWLEGKENGLYDMQDVLGLR

SEQ ID NO: 66730 - protein, 637 aa, Pseudomonas aeruginosa
MGKIIGIDLGTTNSCVAILENGNVKVIENAEGARTTPSIIAYTNDGETLVGQPAKRQAVTNPQNTLYAVKRLIGRRFEENVVQKDIQMVPYSIVKADNGDAWVEVKGQKMAPPQISAEVLKKMKKTAEDYLGEPVTEAVITVPAYFNDSQRQATKDAGRIAGLDVKRIINEPTAAALAYGLDKAKGDHTVIVYDLGGGTFDVSVIEIAEVDGEHQFEVLATNGDTFLGGEDFDIRLIDYLVDEFKKESGINLKGDPLAMQRLKEAAEKAKIELSSTQQTDVNLPYVTADASGPKHLNVKVSRAKLESLVEDLVQRTIEPCRTALKDAGLDVSDIHEVILVGGQTRMPLVQKTVAEFFGKEARKDVNPDEAVAVGAAIQGAVLAGDVKDVLLLDVTPLTLGIETLGGVMTGLIEKNTTIPTKKSQVFSTADDNQGAVTIHVLQGERKQAAQNKSLGKFDLADIPPAPRGVPQIEVTFDIDANGILHVSAKDKATGKQQSIVIKASSGLSEDEIQQMVRDAEANAEEDRKFEELAAARNQGDALVHATRKMITEAGDKATAEDKATIEKALGELEAAVKGDDKAEIEAKMNALSQASTPLAQKMYAEQAQQGEDAPQGEQAKAADDVVDAEFEEVKDNK

SEQ ID NO: 66731 - protein, 159 aa, Pseudomonas aeruginosa
MAKQKKHPSGTIAQNKKALHDYFIEQRFEAGVALAGWEVKSLRAGKAQLVDSYVLLKDGEAWLLGSHITPLTTASTHVIADPVRTRKLLLHKRELGKLFGAVQQKGYACVALSMYWKKHLVKCEIALAKGKKDFDKRHTEKERDSDREIQRAMRHGKDD

SEQ ID NO: 66732 - protein, 257 aa, Pseudomonas aeruginosa
MEFGQVRQRRLSDDIVAQLEAMILEGTLKSGERLPAERVLAEQFGVSRPSLREAIQKLVAKGLLVSRQGGGNYVTESLGATFSDPLLHLLEGNPEAQRDLLEFRHTLEGSCAYYAALRATSLDHQRLTEAFEALQACYARNDQVSAEEGAADARFHLAIAEASHNTVLLHTIKGLFDLLRRNVVTNIGGMYAQRTETRAQLMEQHQRLYDAIISGQAELAREVSNQHIHYVQEVLAEVQEEARRMKRSQRRRSVQED

SEQ ID NO: 66733 - protein, 425 aa, Pseudomonas aeruginosa
MTQLRRVAIVGGNRIPFARSNTVYATASNQEMLTSALEGLVERYNLHGERLGEVVAGAVLKHSRDFNLTRECVLGSRLAPETPAYDIQQACGTGLEAAILVANKIALGQIDSGIAGGVDTTSDAPIGVNEGLRKILLEANRGKSNLDKLKSLLKIRPRHVVPAIPRNGEPRTGLSMGESCELMAQTWQIPRDEQDRLAFESHHKLAAAYEEGWQNDLMTPFRGLTRDQNLRPDIDLEKIGTLKPVFERGSRGTLTAANSTPLTDGASVVLLASEEWAKARGLPILAYFKDGEAAAVNFVDRQEGLLMAPVYAVPRLLARNGLSLQDFDYYEIHEAFAAQVLCTLKAWEDPEYCKTRLGLDQPLGSIDRSKLNVKGSSLAAGHPFAATGGRIVANLAKLLSLAEQGRGLISICAAGGQGVTAIIER

SEQ ID NO: 66734 - protein, 309 aa, Pseudomonas aeruginosa
MSRTILQPGQIEAAANIPPHLHQPSRDLFARRGERLLQLAEGHPMGDYLRLVAGLCRLQQALLDNPPALAPLDPERLRKSREHGMPPLAYDLLVREGAWLPWLDALLAGYPAPANAAVGAALEQLREAEEGQRKAWAIALLSGQFDLLPAALVPFLGAALQVAWSHWLLGLEEGAVVETESRTLCPACGSPPMAGMIRQGGKETGLRYLSCSLCACEWHYVRIKCSHCEESKHLAYLSLEHDGQPAEKAVLRAETCPSCQGYLKQFYLEFDRHADALADDLASLALDMRLAEDGYLRRSPNLLLAPGGE

SEQ ID NO: 66735 - protein, 903 aa, Pseudomonas aeruginosa
MSVATQRNTQLDTERRNDRLSMRAAREAQNSLETTLTNVRGRQDGLDQAEAAARLHADGPNEVAHDRPPHVLVQLLQAFNNPFIYVLMTLSAISFFTDFWLPLQDGEETDLTGVIIVLCMVLVSGLMRFWQEYRSGKAAEALKAMVRNTATVLRRDERGMRGELREIPMGELVVGDIVRLSAGDMIPADIRLIESRDLFISQAVLTGEALPVEKYDTLGAVREKSAKRIAADQQDLLELPNICFMGTNVVSGTATAVVVATGARTYFGSLARSIVGSRAQTAFDRGVNSVSWLLIRFMLVMVPIVLLINGFTKGDWTEAFMFALAVAVGLTPEMLPMIVSANLAKGAVAMSRRKVVVKRLNAIQNFGAMDVLCTDKTGTLTQDRIILEHHVDVAGRRCDRVLQMAWLNSFHQSGMKNLMDRAVVAFVEQNPRITPSDAWRKVDELPFDFVRRRLSVILEGKDGEQLLVCKGAVEEMLEIATRVHQDGVDLPLDEERRRALLALAEQYNRDGFRVLLLGTRSLSRTESQAQYGASDERDLVIAGLLTFLDPPKETAGPAIAALRENGVAVKVLTGDNPVVSAKICREVGLDVGEPLLGRDIDLMDDATLQRLAEERTVFAKLTPLQKSRVLKALQGNGHTVGFLGDGINDAPALRDADVGISVDSGTDIAKESADIILLEKSLMVLEEGVIKGRETFGNIMKYLNMTASSNFGNVFSVLVASAFIPFLPMLAIHLLLQNLMYDISQLSLPWDKMDKEFLAKPRKWDSKNIGRFMVWIGPTSSIFDITTYALMWFVFAANSPEMQSLFQSGWFIEGLLSQTLVVHMLRTQKIPFIQSTAALPVMLMTGLVMALGIYVPFSPLGAVVGLQPLPWEYFPWLVGTLLCYCVTAQTMKTLYIRRFGQWF

SEQ ID NO: 66736 - protein, 205 aa, Pseudomonas aeruginosa
MYHGERLNAWTHLIGAVAACTGAVWLTVQASLNGSPWKIVGVGVYGVTLTLLYSISTAYHSVRGRAKVVMRKLDHLSIYLLIAGSYTPFCLVTLRGPWGWTLFGIVWGLAVLGMLQEIKPRSEARVLSVVIYAVMGWIVLIAVKPLLAALGSAGFTWLAAGGVLYTVGIVFYAYDHRFRHWHGIWHLFVIAGSLLHFVAIWRYVL

SEQ ID NO: 66737 - protein, 433 aa, Pseudomonas aeruginosa
MNAADESLGNVLLVGLGAVAIQVALDLRRHGAGRLGALNHPGRRSQRIAEALARGACLQLEGQGQHRWLSGNAALDVFHQDPAELRDDWQTLVLCVPADSYLDVVRGLPWERLGGVRTLLLVSAFIGANLLVRSALPAGCQATVLSLSSYYAATKVIDETQPLRALTKAVKRRVYLGSSRPDCPARETWRRVLAGSGVEVVPLATPEAAEGRNVTTYVHSPFFLGEFALARILSEQGPPGFMYKLYPEGPITPGAIGAMRRLWCELSELLRRMGAEPLNLLRFLNDDNYPVHETMLPRASIDGFAEAGAERQEYLLFVRYAALLVDPFSPADEQGRHFDFSAVPFRRVSRDEDGLWRLPRVPLEDYRKLALIVALAAHFDLAMPQARSLLASYENAVSRFIDCQGASQCHPSLYPIDSRPAADAIYRQWCSTC

SEQ ID NO: 66738 - protein, 263 aa, Pseudomonas aeruginosa
MQGRTPLLETLRELECEIRLLTVYARECCGCYEILRRKLDRLSGLIGEDCSRAQWQADSDDPALQALGLRLRDAAVQALCELEKHLCQGVLHEPGEMGRYLGSLLESIRGELDSAGIDADARVLFVGSGALPTSALVLAREVGAHLCCLDIDEEALGCAREIARCQGLEARMQFSSLPPAELAFSRDATHFLIASLVQQKSAVLAQIRQVMRADAKVLLRHGSGIKGLFNYPVEPAELDGWRVCAERVSQPLYDTLILEKAGR

SEQ ID NO: 66739 - protein, 156 aa, Pseudomonas aeruginosa
MDIRKVKKLIELLEESGIDELEIREGEESVRISRHSKTAAQPVYAQAPAFAAPVAAPAPAAAAPAAAAAESAPAAPKLNGNVVRSPMVGTFYRAASPTSANFVEVGQSVKKGDILCIVEAMKMMNHIEAEVSGTIESILVENGQPVEFDQPLFTIV

SEQ ID NO: 66740 - protein, 449 aa, Pseudomonas aeruginosa
MLEKVLIANRGEIALRILRACKELGIKTVAVHSTADRELMHLSLADESVCIGPAPATQSYLQIPAIIAAAEVTGATAIHPGYGFLAENADFAEQIERSGFTFVGPTAEVIRLMGDKVSAKDAMKRAGVPTVPGSDGPLPEDEETALAIAREVGYPVIIKAAGGGGGRGMRVVYDESELIKSAKLTRTEAGAAFGNPMVYLEKFLTNPRHVEVQVLSDGQGNAIHLGDRDCSLQRRHQKVIEEAPAPGIDEKARQEVFARCVQACIEIGYRGAGTFEFLYENGRFYFIEMNTRVQVEHPVSEMVTGVDIVKEMLRIASGEKLSIRQEDVVIRGHALECRINAEDPKTFMPSPGKVKHFHAPGGNGVRVDSHLYSGYSVPPNYDSLVGKVITYGADRDEALARMRNALDELIVDGIKTNTELHKDLVRDAAFCKGGVNIHYLEKKLGMDKH

SEQ ID NO: 66741 - protein, 332 aa, Pseudomonas aeruginosa
MSVVRIGPYTLPNRLILAPMAGVTDRPFRQLCRRLGAGMVVSEMVTSDVRLWNSRKSRLRLIHDGEDEPRSVQIAGGDPAMLAEAAQRNVELGAQIIDINMGCPAKKVCNKAAGSALLRDEALVAEILDAVVRAVDVPVTLKIRTGWDRDNRNGVTVAKLAEQAGIQALAVHGRTRADLYTGEAEYETIAAIKQAVSIPVFANGDIDSPEKARKVIEQTGVDALLIGRAAQGRPWIFREIDHYLRTGEHLPAAPLPEVQSILLEHLAELHLFYGEEMGVRIARKHVGWYLATLPGAREFRAQFNRLQDTDAQCASVRQFFAERQNNGTGVAA

SEQ ID NO: 66742 - protein, 100 aa, Pseudomonas aeruginosa
MDLSPREKDKLLIFTAGLLAERRLARGLKLNYPEAVALISAALLEGARDGRSVAELMHYGTTLLNREQVMEGVPEMIPDIQVEATFPDGTKLVTVHQPIA

SEQ ID NO: 66743 - protein, 566 aa, Pseudomonas aeruginosa
MKISRQAYADMFGPTVGDRVRLADTDLWIEVERDFTVYGEEVKFGGGKVIRDGMGQSQLGAAQVVDTVITNALILDHWGVVKADVGLKDGRIQAIGKAGNPDIQPGVNIAIGAGTEVIAGEGMILTAGGIDTHIHFICPQQIEEALMSGVTTMIGGGTGPAAGTNATTCTSGPWHMARMLQAADAFPMNIGFTGKGNASLPLPLEEQVLAGAIGLKLHEDWGSTPAAIDNCLEVAERHDIQVAIHTDTLNESGFVETTLGAFKGRTIHTYHTEGAGGGHAPDIIKACGFANVLPSSTNPTRPFTRNTIDEHLDMLMVCHHLDPAIAEDVAFAESRIRRETIAAEDILHDLGAFSMISSDSQAMGRVGEVITRTWQTADKMKRQRGRLDGDGARNDNFRARRYIAKYTINPAITHGISHEVGSVEAGKWADLVLWRPAFFGVKPSLILKGGAIAASLMGDINGSIPTPQPVHYRPMFASYAGSRHATSLTFVSQAAFAAGVPQQLGLRKAIGVVSGCRGVQKTDLIHNGYLPTIEVDAQNYQVRADGQLLWCEPADVLPMAQRYFLF

SEQ ID NO: 66744 - protein, 421 aa, Pseudomonas aeruginosa
MNPSTAARALGIDFGTSNSTVGWWRPEVEPLIELEDGKITLPSVVFFNVEERRPVYGRQALGEYLEGYEGRLMRSLKSLLGSKLLKSETTVLGSALPFKDLLGLFIGQLKARGEAAAGQAFDAVVLGRPVFFVDDDPEADREAQDTLVQVANKLGFKEVSFQYEPIAAAFDYERCIQREELVLIVDIGGGTSDFSLVRLAPERRNLAERQDDILATGGVHIGGTDFDKQLSLEGVMPLFGYGSRMKSDAFMPTSYHLNLATWHTINAVYAQKSQLALKNMRYDIVDSTGIDRLFRLIEERAGHWLAMQVEDSKIRLTETERLHLSLERIEAGLGVELTRGLFENAVDGLLERVRNSVAQLLASAGVDPDRVDTVFFTGGSSGIPALRRSVSAMLPNARHVEGNLFGSIGSGLAIEAKKRYG

SEQ ID NO: 66745 - protein, 463 aa, Pseudomonas aeruginosa
MPARRSLTLYAALLFAAVAALVVSAVGFYLYRSVEEAMLRRSDVMVAGRVEHFRNLLRDNLTLAELKARPRLFENMLGNEQDILLLGQPGEAPIVAVNPRHERLPSLRVVAAGQALNPSVVHAALTHDGIPMRVLAAEVLVGGREPLQITAAHLLLGETRMLAQYRDRVIAAVLLAFLGTALLGWLVLRHGLRPLRTLAAKAAEIHPTSLDTRLDVAAAPAELQQVAQSFNAMLERLDDGYQRLQQFSADLAHEIRTPIGSLMGHGQVALRQPRSNEEYQALIASNQEELERIARMVESILFLARADDVRAAVERSRLDLGEELRRQAEYFEGLAEERGLSLDVQVSGQLRADPQLFRRALSNLLANAIRYASADSLIEVRGLRRSGEFLLSVENACDRLPAEPLSRLFDRFYRGDAARSDAQSSGLGLAIVQAIMRLHGGRAEASAPAPGRIRFDLAFPAQD

SEQ ID NO: 66746 - protein, 223 aa, Pseudomonas aeruginosa
MNSIWARLRLASSQLPIGGYSYSQGLEAALDNGWVRDAESARTWLVDQLQLNLARFEAPLLAGLLRAALIGDWAACDAASERHRASRETRELAQESRQMGFSLHQLLEALPELDAPGRAWLARQDPPNLAAAWAMAARAWRLDAEEALSAWFWSWLENQLAVLMKTLPLGQLAAQKLASSLLPELDRACAEALRRPAVEGSAAFGLALASMTHETQYSRLFRS

SEQ ID NO: 66747 - protein, 204 aa, Pseudomonas aeruginosa
MTSQPLRVGIGGPVGSGKTALTLALCRELRERYNLAVVTNDIYTQEDAEFLVRNEALAPERIIGVETGGCPHTAIREDASINLEAVDQLNRRFPGLELILVESGGDNLSATFSPELSDLTLYVIDVSAGDKIPRKGGPGICKSDLLVINKIDLAPLVGASLDVMDRDARRMRGDKPFVFSNQKTGQGLDEIIAFIERQGLLTAA

SEQ ID NO: 66748 - protein, 310 aa, Pseudomonas aeruginosa
MHSLRFFSNAEVAERLAYPQLIEALRIGLAKPCSAPLRNCHALPAQASLLQMPVWQAGAGIGVKLVTVFPGNGARGLPAVAAVFALFDGEDGRPLALLEASELTARRTACSSALAADYLARDDARRLLVVGCGTLAAHMVRAHACVRDYRHIDIWGRDPAKAAALAARLREEGYPARAADGLRAAVEAADCVSCVTTSREALVRGAWLKPGVHLDLVGAFLPSMRETDVLAVARARVVVDTRAGALEEAGDLLQAIAEGAIGREAISTELRDLLSGAGRRGDPGEITLFKSVGYALEDLVAARRVVDNAA

SEQ ID NO: 66749 - protein, 399 aa, Pseudomonas aeruginosa
MAESVFAERIVQNLLDTDFYKLTMMQAVLHNYPNAEVEWEFRCRNAEDLRPYLAEIRYQIERLAEVEVTADQLAFLERIPFMKPDFIRFLSLFRFNLRYVHTGIEDGQLAIRLRGPWLHVILFEVPLLAIVSEVRNRYRYREVVLEQVGEQLYRKLDWLSAQASSEELAEFQVADFGTRRRFSYRTQEEVVHILKRDFPGRFVGTSNVHLAREYDLKPIGTMAHEWLMAHQQLGPRLVDSQQAALDCWVREYRGQLGIALTDCITMDAFLDDFDLYFAKLFDGLRHDSGDPLAWAEKAIAHYRRLGIDPLSKTLVFSDGLDMPKALQLFRALRGKINVSFGIGTNLTCDIPGVEPMNIVLKMTACNGHPVAKISDAPGKTQCRDENFVAYLRHVFNVPA

SEQ ID NO: 66750 - protein, 275 aa, Pseudomonas aeruginosa
MQQIQRDIAQALQVQPPFQSEADVQAQIARRIAFIQQCLKDSGLKTLVLGISGGVDSLTAGLLAQRAVEQLREQTGDQAYRFIAVRLPYQVQQDEADAQASLATIRADEEQTVNIGPSVKALAEQLEALEGLEPAKSDFVIGNIKARIRMVAQYAIAGARGGLVIGTDHAAEAVMGFFTKFGDGACDLAPLSGLAKHQVRALARALGAPENLVEKIPTADLEDLRPGHPDEASHGVTYAEIDAFLHGQPLREEAARVIVDTYHKTQHKRELPKAP

SEQ ID NO: 66751 - protein, 195 aa, Pseudomonas aeruginosa
MTLRSVCVFCGASPGASPVYQEAAVALGRHLAERGLTLVYGGGAVGLMGTVADAALAAGGEVIGIIPQSLQEAEIGHKGLTRLEVVDGMHARKARMAELADAFIALPGGLGTLEELFEVWTWGQLGYHAKPLGLLEVNGFYDPLLTFLDHLVDERFVRAEHRGMLQRGASPEALLDALAAWTPSVAPKWVDRTPQ

SEQ ID NO: 66752 - protein, 747 aa, Pseudomonas aeruginosa
MQAAKPLFDYPKYWAECFGPAPFLPMSREEMDQLGWDSCDIIIVTGDAYVDHPSFGMAIIGRLLEAQGFRVGIIAQPDWQSKDDFMKLGEPNLFFGVAAGNMDSMINRYTADKKVRSDDAYTPGGLAGKRPDRASLVYSQRCKEAYSHVPVILGGIEASLRRIAHYDYWQDKVRRSILMDATADILLYGNAERAVVEIAQRLAQGELVSAITDVRGTAFVRRDTPEGWFEIDSTRIDRPGKIDKIINPYVNTQDTAACAIEQEKGAQEDPQEAKVVQLLANPRLTREKTVIRLPSFEKVRNDPVLYAHANRVLHLETNPGNARALVQKHGEVDVWFNPPPIPMSTEEMDYVFGMPYARVPHPAYGKAKIPAYEMIRFSVNIMRGCFGGCTFCSITEHEGRIIQNRSHDSIIREIEEMRDKVPGFTGVVSDLGGPTANMYRIACKSPDIERHCRKPSCVFPGICENLDTDHSSLIELYRKARALPGVKKILIASGLRYDLAVESPEYVKELVTHHVGGYLKIAPEHTERGPLDKMMKPGIGTYDRFKQMFEKFSKEAGKEQYLIPYFIAAHPGTTDEDMMNLALWLKRNGFRADQVQAFYPSPMATATAMYHSGKNPLRKVTYKSDGVTIVKSDQQRRLHKAFLRYHDPKGWPLLREALERMGRADLIGNGKHHLVPTYQPDTGEYQSARRKNSTPAGSKKAGKLLTQHTGLPPRASDGGKPWSKGQQNKATAFAKGKKKSRQPNIPR

SEQ ID NO: 66753 - protein, 358 aa, Pseudomonas aeruginosa
MRPLVATVDLSAIRHNYALAKRCAPQRQAFAVVKANAYGHGAREVVTALHDDADGFAVACLEEAAEVRALHASARILLLEGCFEASEYALAGQLRLDLVIQGAEQGEAFLAAGLDIPLNVWLKLDSGMHRLGFDPAALRAWHARLRSHPGVRELNLISHFACADERNHPLTEQQLESFLGLLDLDFDQRSLANSAAVLTIPAAHMDWLRPGIMLYGSTPLADLSAAELGLKPAMSLGAQLISLREVAVGESVGYGATWIAERPARIGTVSCGYADGYPRTAPAGTPVLVGGRRAILAGRVSMDMLAVDLSDLPEARVGDPVELWGAGLSVDEVARACGTLGYELLSKVTARVPRRYSH

SEQ ID NO: 66754 - protein, 464 aa, Pseudomonas aeruginosa
MNEITSPEQYDLETTALKVPPHSIEAEQAVLGGLMLDNNAWERVSDSVSDGDFYRHDHRLIFRAIYKLAEANQPIDVVTLSEQLEKEGQLAQVGGLAYLGELAKNIPSVANIKAYAQIIRERATLRQLIGISNEIADSAFHPEGRGANEILDEAERKIFEVAEARPKTGGPVGISDILVKTIDRIDYLFNTTEALTGVSTGFTDLDEKTSGLQPADLIIVAGRPSMGKTTFAMNLVENAVMRTDKAVLVYSLEMPSDSIVMRMLSSLGRIDQTKVRSGKLDDEDWPRLTSAINLLNDKKLFIDDTAGISPSEMRARTRRLVREHGDLALIMIDYLQLMQIPGSSGDNRTNEISEISRSLKALAKEFNCPVIALSQLNRSLEQRPNKRPVNSDLRESGAIEQDADVIMFVYRDEVYHPETEFKGVAEIIIGKQRNGPIGTVRLAFIGKYTRFENLAAGMYNFEDE

SEQ ID NO: 66755 - protein, 148 aa, Pseudomonas aeruginosa
MEVILLEKVANLGNLGDKVNIKGGYARNFLLPQGKATVATAENVAAFEARRAELEKAAAEKKAAAEARAAQLSELVVTLGAHAGDEGKLFGSIGTRDIAEAVSAAGYPLEKAEVRLPNGALRNTGEFDVAVHLHTDVETTLKLIIVAE

SEQ ID NO: 66756 - protein, 76 aa, Pseudomonas aeruginosa
MARFFRRRKFCRFTAEGVKEIDYKDLNTLKAYVSETGKIVPSRITGTKAKYQRQLATAIKRARYLALLPYTDSHGR

SEQ ID NO: 66757 - protein, 139 aa, Pseudomonas aeruginosa
MRHYEIVFLVHPDQSEQVGGMVERYTKAIEEDGGKIHRLEDWGRRQLAYAINNVHKAHYVLMNVECSAKALAELEDNFRYNDAVIRNLVMRRDEAVTEQSEMLKAEESRNERRERRERPNDNAEGADGDDNSDSDNADE

SEQ ID NO: 66758 - protein, 430 aa, Pseudomonas aeruginosa
MGKNVVVLGTQWGDEGKGKIVDLLTEQAAAVVRYQGGHNAGHTLVIDGEKTVLHLIPSGILREGVQCLIGNGVVLAPDALLREITKLEEKGVPVRERLRISPSCPLILSYHVALDQAREKARGEAKIGTTGRGIGPAYEDKVARRGLRVGDLFHRERFAAKLGELLDYHNFVLQHYYKEPAIDFQKTLDEAMEYAELLKPMMADVAATLHDLRKHGKDIMFEGAQGSLLDIDHGTYPYVTSSNTTAGGTATGSGFGPLYLDYVLGITKAYTTRVGSGPFPTELFDDVGAYLAKRGHEFGATTGRARRCGWFDAVILRRAIEINSISGLCLTKLDVLDGLDVVRLCVGYKNADGDVLEAPTDADSYIGLQPVYEEMPGWSESTVGAKTLEELPANARAYIKRVEELVGAPIDIISTGPDRNETIILRHPFA

SEQ ID NO: 66759 - protein, 633 aa, Pseudomonas aeruginosa
MSEAPRIQLLSPRLANQIAAGEVVERPASVAKELLENSLDAGSRRIDVEVEQGGIKLLRVRDDGRGIPADDLPLALARHATSKIRELEDLERVMSLGFRGEALASISSVARLTMTSRTADAGEAWQVETEGRDMQPRVQPAAHPVGTSVEVRDLFFNTPARRKFLRAEKTEFDHLQEVIKRLALARFDVAFHLRHNGKTIFALHEARDELARARRVGAVCGQAFLEQALPIEVERNGLHLWGWVGLPTFSRSQPDLQYFYVNGRMVRDKLVAHAVRQAYRDVLYNGRHPTFVLFFEVDPAVVDVNVHPTKHEVRFRDSRMVHDFLYGTLHRALGEVRPDDQLAPPGATSLTEPRPTGAAAGEFGPQGEMRLAESVLESPAARVGWSGGSSASGGSSGYSAYTRPEAPPSLAEAGGAYKAYFAPLPAGEAPAALPESAQDIPPLGYALAQLKGIYILAENAHGLVLVDMHAAHERITYERLKVAMASEGLRGQPLLVPESIAVSEREADCAEEHSSWFQRLGFELQRLGPESLAIRQIPALLKQAEATQLVRDVIADLLEYGTSDRIQAHLNELLGTMACHGAVRANRRLTLPEMNALLRDMEITERSGQCNHGRPTWTQLGLDELDKLFLRGR

SEQ ID NO: 66760 - protein, 475 aa, Pseudomonas aeruginosa
MGWGLRLRTLLTGVMILLACQVGEVLAAAQIKSVRIWRAPDNTRLVFDLSGPVQHSLFTLAAPNRIVIDVSGAQLATQLNGLKLGNTPITAVRSAQRTPNDLRMVLDLSAQVTPKSFVLPPNQQYGNRLVVDLYDQGADLTPDVPATPTPSVPVTPVTPTQPVAKLPLPTKGGTRDIVIAIDAGHGGEDPGALGPGGLHEKNITLSIARELQRQINQVRGYRAELTRTGDYFIPLRKRTEIARKKGADLFVSIHADAAPSRSAFGASVFALSDRGATSETARWLADSENRSDLIGGDGSVSLGDKDQMLAGVLLDLSMTATLSSSLDVGHKVLTNVGRITSLHKRRVEQAGFMVLKSPDIPSILVETGFISNVNESRKLASASHQQALARSITSGIRQYFQQSPPPGTYIASLRAQGKLSMGPREHVVRPGETLAMIAQRYEVSMAALRSSNSLSSDNLKVGQALSIPSTALAAQ

SEQ ID NO: 66761 - protein, 429 aa, Pseudomonas aeruginosa
MPGSASLGCAGKRVEWRLLPGGAYALREIVLINITGEDRPGLTAAITGVLAQGGVNILDIGQAVIHDTLSFGILVEIPDTEAGSSVLKDVLFTAYKLDQQVRFTPVSEEDYRQWVDGQGKARHIVTLLTRRVTAEQLQRVSSITAKYALNIDHIDRLSGRMPLDMPADQGKGCIEFSVRGEPADPAALRAEFLSVAQELNVDIAFQQDSVFRRNRRLAVFDMDSTLIEAEVIDELAKAAGVGEKVAAITERAMRGELDFRASFKERLALLQGLSEDVLEEIGASLRLTEGAETLFAELKRLGYKTAILSGGFTYFARQLQAKLGIDYVFANELQIVDGKVTGVAVEPIVDAQRKADLLRELAAKEGLSLEQTIAVGDGANDLPMLGLAGLGVAFRAKPLVKQSAKQAISTLGLDGILYLLGYRDREGRA

SEQ ID NO: 66762 - protein, 754 aa, Pseudomonas aeruginosa
MSESLDLSLEGVERRSLAEFTEQAYLNYSMYVIMDRALPHIGDGLKPVQRRIVYAMSELGLDADSKHKKSARTVGDVLGKFHPHGDSACYEAMVLMAQPFSYRYPLVDGQGNWGAPDDPKSFAAMRYTEARLSRYSEVLLSELGQGTVDWVPNFDGTLDEPAVLPARLPNLLLNGTTGIAVGMATDVPPHNLREVASACVRLLDQPGATVAELCEHVPGPDFPTEAEIITPRADLQKVYETGRGSVRMRAVYRVEDGDIVIHALPHQVSGSKVLEQIAGQMQAKKLPMVADLRDESDHENPTRIVIIPRSNRVDVEELMTHLFATTDLETSYRVNLNIIGLDGKPQVKDLRQLLSEWLQFRIGTVRRRLQFRLDKVERRLHLLDGLLIAFLNLDEVIHIIRTEDQPKAVLMERFELSEVQADYILDTRLRQLARLEEMKIRGEQEELLKEQKRLQTLLGSEAKLKKLVREELIKDAETYGDDRRSPIVARAEARALSETELMPTEPVTVVLSEKGWVRCAKGHDIDAAGLSYKAGDGFKAAAPGRSNQYAVFIDSTGRSYSLPAHSLPSARGQGEPLSGRLTPPPGASFECVLLPDDDALFVIASDAGYGFVVKGEDLQAKNKAGKALLSLPNGSAVVAPRPVRDVEQDWLAAVTTEGRLLLFKVSDLPQLGKGKGNKIIGIPGERVASREEYLTDLAVLPAGATLVLQAGKRTLSLKGDDLEHYKGERGRRGNKLPRGFQRVDSLLVDIPPQD

SEQ ID NO: 66763 - protein, 629 aa, Pseudomonas aeruginosa
MATYNADAIEVLSGLDPVRKRPGMYTDTTRPNHLAQEVIDNSVDEALAGHAKSVQVILHQDNSLEVIDDGRGMPVDIHPEEGVPGVELILTKLHAGGKFSNKNYQFSGGLHGVGISVVNALSTRVEVRVKRDANEYRMTFADGFKDSDLEVIGTVGKRNTGTSVHFWPDPKYFDSAKFSVSRLKHVLKAKAVLCPGLSVVFEDKNTGERVEWHFEDGLRSYLTDAVAELPRLPDEPFCGNLEGSKEAVSWALLWLPEGGESVQESYVNLIPTAQGGTHVNGLRQGLLDAMREFCEFRNLLPRGVKLAPEDVWERIAFVLSMKMQEPQFSGQTKERLSSREAAAFVSGVVKDAFSLWLNEHAEIGLQLAELAISNAGRRLKAGKKVERKKITQGPALPGKLADCAGQEPMRAELFLVEGDSAGGSAKQARDKEFQAIMPLRGKILNTWEVDGGEVLASQEVHDIAVAIGVDPGASDLAQLRYGKICILADADSDGLHIATLLCALFVRHFRPLVEAGHVYVAMPPLYRIDLGKDIYYALDEAERDGILERLAAEKKRGKPQVTRFKGLGEMNPLQLRETTMDPNTRRLVQLTLEDATGTLEIMDMLLAKKRAGDRKSWLESKGNLAEVLV

SEQ ID NO: 66764 - protein, 272 aa, Pseudomonas aeruginosa
MSRHSNTPATDASVLLVQLSDSHLFAEDGARLLGMDTAHSLEKVVERVAREQPRIDLILATGDVSQDGSLDSYTRFRRLSAPLDAPLRWFAGNHDEREPMQRATEGSDLLEQVVDVGNWRVVLLDSSIPGAVPGYLEEDQLELLRRAIDSAGERFLLVSFHHHPVPIGSDWMDPIGLRNPQALFDLLAPYPQVRCLLWGHIHQEFDRQRGPLRLLASPSTCVQFAPGSSDFTLDRLAPGYRWLRLHDDGRLETGISRVDDVVFEVDYDTAGY

SEQ ID NO: 66765 - protein, 152 aa, Pseudomonas aeruginosa
MGLNLLRERYRVDLASLQATCEANYARLMRLLPDMREAQASRRVALSEGERLLGVLALEVTEACPYTTTLQVRQELGLPWLPAPRLEVRVYHDARMAEVIGAEQARRLMAIYPYPNQAMHQPDEKNQLNLFLGEWLAHCLACGHEMEPVAQR

SEQ ID NO: 66766 - protein, 263 aa, Pseudomonas aeruginosa
MTDLSPLQTRVEAGIAWLVLNRPQQRNALDIPTLEALHVRLDACERDPAVRAVVLGGSGRSFCAGADLAEWAAAEARGELESYGWTEAAHALMGRLHALDKPTVAAVNGSAVGAGMDLALCCDFRIAAASARFKAGYTGMAYCPDAGASWHLPRLLGSEAAKRLLFLDEAWSAERALGAGLVGEVVADEHLVEAVGAFAARLASGPTFAFAQTKRLLRDGAGRSLAEQLRAEQAAGLLCGRSEDAAEALRAVAEKRSPQFSGR

SEQ ID NO: 66767 - protein, 470 aa, Pseudomonas aeruginosa
MADGKERLQLTRALASRHIFMLSLGGVIGTGLFMGSGVTINQGGPAGAVLAYLVAGVLMYLVMVCLGELSVQMPVSGSFQAHATRFIGPATGFMIGWVYWMSWASTVGLEFTAAGMLMTRWFPEVPVWLWSGFFVVVLFSLNALATRAFGEAEYWFAGIKVAAILVFIVVGGLVIFGGIELKSGAPAPMFSNLVGERLFPNGLSAVFAVMMTVVYAFQGCEIMGVAAGETERPEKSIPRAVRNVVFRVLIFYVLAIVVLSAIIPWQQAGLMESPFVQVFDMVGIPYAADLMNFVILTAILSVGNSGLYASTRILWAMSRSGMAPRGLSKLSARGVPLYALLITLCFALLSLLTSVVAADTLFMVLMAVSGMSGTVTWIVIAYAQYRFRREHMASGGTVAELKYAAPLFPLVPLACIAVCCSLFVFLALDPTQRPSLYWGFGFIAACYLAYYVVRRRQPQGLGDPALGRAG

SEQ ID NO: 66768 - protein, 998 aa, Pseudomonas aeruginosa
MAAGRPGTGCGDHPLLRLSGIPADFLERRPAGPGAGAGAGEAAVRRAGLPGRGGGAGQLAALPARRRRRTGRPDTGLPHARARSRPGVFRRAGAARGGGDLLQPPAAGAHPIPRRPRRLSRRAVVRRKLRGGLRPLRRPPRQRRMGFRQPTELRQAGAPAHRLHRPRTTHRHAVRRAPGRRREHPCAARTADGGLPAGGGLAALAAGGEDGRDRPGPAWLSRRRQHPALAGRQRARLSAPRRQPRGRLVSGHGGVLARRLLWRVLLFSLCFTVLAGAVQLFFEYRREMREIEARLELIRSGYLASFERSLWDLNQEQLNVQLRGLGDFPDIARVSLQSADFNLLQGDQRPRGMLRVERFPLSYQPPGGERRQLGELEIAIDLAAVYRRLVSGGLASLLWMGSFLCGLAVALSWLFHSLVTRHLWRMSEFAGHIAEGDLQQPLRLDKVDRERDEIDAVAAALEDMRQALRTDRRRRDADRDELRRQVERRTASLRRAKDQAEAADRAKSRFLATMSHEIRTPLNGILGMAELLREASLGERDRQRLRALATAGEGLLAILNEVLHFARLEEAPDVPEAVDFSLRSLLEDVLTLLEPRARENATRLDLWLDPQVHDGHRGAEQFLRQVLTNLLGNAVKFTEAGEVRVRVERLARSAGSERLRLSVADDGIGIPEEMRERIFERFTQGGDAVTRRYGGTGLGLAISKRLVEALGGRIGVESRVGQGSTFWFEIELALASLSGATPPAASVSALEVLLVEDVALNREVAQGLLERDGHRVMLAEDAGPALALCRQRRFDLILLDMHLPGMAGLELCAGIRRQLDGLNRATPIFAFTASIQPDMVRRYFAAGMQGVLGKPLRMDELRRALGEVGTSVPALAVDAALDRQMLETHRRLLGRHKLAGLLGNLLGSLDEQLPLLAEALDQADLAEAANIAHRLSGSCHSMGLVALGAGLGELEREALGAAGVDPRAWGARLGSLRRDGAEALRRAGFLGEADSAAG

SEQ ID NO: 66769 - protein, 474 aa, Pseudomonas aeruginosa
MKLSMPRFDQAPVLVVGDVMLDRYWHGATSRISPEAPVPVVRVEQHEDRPGGAANVALNIAALGAQALLVGVTGRDEAADSLANSLKAAGVDARFQRIDSQPTIVKLRVMSRHQQLLRVDFEEPFRTDAAALAVDVESLLAKVKVLVLSDYGKGALQNHQVLIQAARARNIPVLADPKGKDFAIYRGASLITPNLSEFETIVGRCADEAELVAKGQALMSELDLGALLVTRGEHGMTLLRHGQPALHLPARAREVFDVTGAGDTVISTLAAALAAGEELPSAVGLANLAAGIVVGKLGTAAISAPELRRAVQREQGSERGVLGLEQLLLAIEDARAHGEKIVFTNGCFDILHAGHVTYLEQARAQGDRLIVGVNDDASVTRLKGVGRPINSVDRRMAVLAGLGAVDWVVSFAEDTPERLLEQVRPDVLVKGGDYGVEQVVGAQIVKAYGGEVRVLGLVENSSTTAIVEKIRQKG

SEQ ID NO: 66770 - protein, 355 aa, Pseudomonas aeruginosa
MRVLLVKTSSLGDVIHTLPALTDAARAIPGIQFDWVVEEGFAEIPAWHPAVARVIPVAIRRWRKNLWQTLRNGEWRRFKQRLKEVDYDLVIDAQGLLKSAWLTRYVGKTPVAGLDRDSAREPLASRFYRRAYPVAWGQHAVERTRQLFAQALDYPLPESVGDYGLDREQLADADPGAPYLVFLHGTTWVTKHWPEAYWRELAERMCERGWSVRLPWGSAAERERAGRLAAGLENAAVLPRLSLAGMAKVLAGARACVAVDTGLGHLAAALDVPTLSLFGPTNPGFTGAYGRSQVHLGSDFPCAPCLKKTCTYQPTEEDRKLFDLKREQPLCFTRLNPQRVATQLEAMLLAPETLR

SEQ ID NO: 66771 - protein, 307 aa, Pseudomonas aeruginosa
MSMADRDGVIWYDGELVQWRDATTHVLTHTLHYGMGVFEGVRAYDTPQGTAIFRLQAHTDRLFDSAHIMNMQIPYSRDEINEATRAAVRENNLESAYIRPMVFYGSEGMGLRASGLKVHVIIAAWSWGAYMGEEALQQGIKVRTSSFTRHHVNISMTRAKSNGAYINSMLALQEAISGGADEAMMLDPEGYVAEGSGENIFIIKDGVIYTPEVTACLNGITRNTILTLAAEHGFKLVEKRITRDEVYIADEAFFTGTAAEVTPIREVDGRKIGAGRRGPVTEKLQKAYFDLVSGKTEAHAEWRTLVK

SEQ ID NO: 66772 - protein, 547 aa, Pseudomonas aeruginosa
MSELIRVPDIGNGEGEVIELLVKPGDKVEADQSLLTLESDKASMEIPSPKAGVVKSIKAKVGDTLKEGDEILELEVEGGEQPAEAKAEAAPAQPEAPKAEAPAPAPSESKPAAPAAASVQDIKVPDIGSAGKANVIEVMVKAGDTVEADQSLITLESDKASMEIPSPASGVVESVSIKVGDEVGTGDLILKLKVEGAAPAAEEQPAAAPAQAAAPAAEQKPAAAAPAPAKADTPAPVGAPSRDGAKVHAGPAVRMLAREFGVELSEVKASGPKGRILKEDVQVFVKEQLQRAKSGGAGATGGAGIPPIPEVDFSKFGEVEEVAMTRLMQVGAANLHRSWLNVPHVTQFDQSDITDMEAFRVAQKAAAEKAGVKLTVLPILLKACAHLLKELPDFNSSLAPSGKALIRKKYVHIGFAVDTPDGLLVPVIRDVDRKSLLQLAAEAADLADKARNKKLSADAMQGACFTISSLGHIGGTGFTPIVNAPEVAILGVSKATMQPVWDGKAFQPRLMLPLSLSYDHRVINGAAAARFTKRLGELLADIRTLLL

SEQ ID NO: 66773 - protein, 278 aa, Pseudomonas aeruginosa
MNYRHAYHAGNHADVFKHLVLARIFALLGRKDTPYAYLDSHSGVGLYDLQGDEASRTGEWEQGIARLWEREGLPEQLDDYLDVIRHLNPDGSLRYYPGSPELARRLTRAQDRVLLNELHPEDGRLLKANMAGERRVAVHQGDGWLLPRAFLPAPEKRAVLLIDPPFEQADELQRCVAALDEAIGRMRQTVVVIWYPIKDQRQLKRFYQALERSVAPKLLRAELHVHPIDDAERFNGSGLAIVNPPWPLEDELRDLLPWLAEVMAQSQGGWRLDWLVAE

SEQ ID NO: 66774 - protein, 1118 aa, Pseudomonas aeruginosa
MPALRSLIAILFLGLCLASPPLLAQSEPPSAEAVQQSLDKLAERKLAEADQKVAKASLEQTLKFLAARDEALQSLEDLKKRLSDAPRQIEENQRELERLKKTKERPVSERYSGESAARLEMLLNDRTTQQAEWQKALGEANSLSITAETRPERAQAGISSMQARILEIGSLLKAGKESGKTINADRRGELLAEQAALTVQSQLLRQELAGNNLLQDLGKSQHDLLTEKISRLEKETLDLQALISEKRREQSEKTVAELSKEGAQGAGTDSLLSQENAKNLRLSDYLLRATDRLNVLTRRNLETKQQLDNLTQSNQALEEQINVLRGSLLLSRILYKQKQALPKIKADQSLADEIADLRLGQFELNQERDKLATPQQYLDDLLAQQPSEQVTPELRKDLDTLLATRSELLERLNHELNALLNEAITLQLNQKQLLSTSESLRTTLDEQMFWIPSNQPLDLSWFKMTPTLLKNQLTEIPWGSGVRELGEGLVDRPLLFLPLFLLIAALLWKRRYLYDKLAELNDDIGHFKRDSQLHTPLAILITILLALPGTLTFAVAGLALLLDARGQNATLGSALLEMAQVWLLFYTAHRILTPGGIAERHFHWSREQVGFLDRHLVRLGVVVLALVGVVTVAEHQPASLADDVIGIAVVLLGYAAMAWLLSRLLFSSPGDERPSLIKMIVGILFTALPLVLFVAVCFGYYYTSLKLTDRLIDTLYLLLLWFVIEAAFVRGLGVAARRLAYARALAKRQNAAKEGVDGETNVEEPTLGIEQINQQSLRLIRLALLIGFIVCLYWVWADLISVISYLDNVTLYQYTAGTGEAATSVPISLRDFLAALAIAVVTVALARNLPGLLEVLVLQRLTLAQGSAYATTTLLSYAISGIGIVSALSTLGVSWDKLQWLVAALSVGLGFGLQAIFSNFVSGLIILFERPVRIGDVVTIGNLSGTVSRIRIRATTITDFDRKEIIVPNQTFITGQLVNWSLSDTVTRVTIKIGLAYETDLPLARKLMMQAVKENPRVLRDPEPLLYFLTISASTFDYELRFHVRELGDRNPSTDEILTKIATSFREHKIDMAFNQVDVFVKNLQGQQVQLFVGEPQHSGVGNPPALKGQDGPAEPTR

SEQ ID NO: 66775 - protein, 477 aa, Pseudomonas aeruginosa
MSERLNSDRLNNDFQFIEVGRKDPKKKLLRQRKREFVEIHDLFKPQQAADQAHRCLGCGNPYCEWKCPVHNFIPNWLKLVSEGNILAAAELSHQTNTLPEVCGRVCPQDRLCEGACTLNDGFGAVTIGSVEKYITDTAFAMGWRPDLSKVKPTGRRVAVIGAGPAGLGCADVLVRNGVTPVVFDRNPEIGGLLTFGIPEFKLEKHVLSRRREVFTGMGIEFRLNTEIGKDVTMEQLLDEYDAVFMGMGTYTYMKGGFPGEDLPGVHDALDFLIANVNRNLGFEKSAEDFVDMKGKRVVVLGGGDTAMDCNRTSIRQGAKSVTCAYRRDEENMPGSRKEVKNAKEEGVKFLFNRQPIAIVGEDRVEGVKVVETRLGEPDARGRRSPEPIPGSEEIIPAEAVLIAFGFRPSPAPWFERFEIATDSQGRVVAPAQAQFKHQTSNPKIFAGGDMVRGSDLVVTAIFEGRTAAEGILDYLGV

SEQ ID NO: 66776 - protein, 822 aa, Pseudomonas aeruginosa
MRLLKFLWWTCVTLICGVLLSFSGAYLYLSPSLPSVEALRNVQLQIPLKVYSEDGKLISEFGEMRRTPIRFADIPQDFIHALLSAEDDNFANHYGVDVKSLMRAAAQLLKSGHIQTGGSTITMQVAKNYFLTNERSFSRKINEILLALQIERQLTKDEILELYVNKIYLGNRAYGIEAAAQVYYGKPIKDLSLAEMAMIAGLPKAPSRYNPLVNPTRSTERRNWILERMLKLGFIDQQRYQAAVEEPINASYHVQTPELNAPYIAEMARAEMVGRYGSEAYTEGYKVITTVRSDLQNAASQSVRDGLIDYDQRHGYRGPETRLPGQTRDAWLKHLGQQRSIGGLEPAIVTQVEKSGIMVMTRDGKEEAVTWDSMKWARPFLSNNSMGPMPRQPADVAQAGDQIRVQRQEDGTLRFVQIPAAQSALISLDPKDGAIRSLVGGFSFEQSNYNRAIQAKRQPGSSFKPFIYSAALDNGFTAASLVNDAPIVFVDEYLDKVWRPKNDTNTFLGPIPLREALYKSRNMVSIRVLQGLGIERAISYITKFGFQRDELPRNFSLALGTATVTPMEIAGAWSVFANGGYKVNPYVIERIESRDGQVLYQANPPRVPVEEQVAADAEDAGNPGDPEHPESAEGEGSIEAQQVAAKAQTTFEPTPAERIIDARTAYIMTSMLQDVIKRGTGRRALALKRTDLAGKTGTTNDSKDGWFSGYNSDYVTSVWVGFDQPETLGRREYGGTVALPIWIRYMGFALKDKPMHTMAEPPGIVSLRIDPVTGRSAAPGTPGAYFEMFKNEDTPPSVNELPPGSFPGSPLPDDEGAPIDLF

SEQ ID NO: 66777 - protein, 587 aa, Pseudomonas aeruginosa
MKDTIRQLIQQALDQLTADGTLPAGLTPDIQVENTKDRSHGDFASNIAMMLAKPAGMKPRDLAARLVEAIPAHEQLAKVEIAGPGFLNFFQDHVWLAASLDRALADERLGVRKAGPAQRVVIDLSSPNLAKEMHVGHLRSTIIGDAVARVLEFLGDTVIRQNHVGDWGTQFGMLLAYLEEQPVDAEAELHDLEVFYRAAKKRFDESPEFADRARELVVKLQAGDPDCLRLWTRFNEISLSHCQKVYDRLGVKLSMADVMGESAYNDDLAQVVADLTAKGLLTEDNGALCVFLEEFKNAEGNPLPVIVQKAGGGYLYATTDLAAMRYRHNVLHADRVLYFVDQRQALHFQQVFEVARRAGFVPAGMELEHMGFGTMNGADGRPFKTRDGGTVKLIDLLEEAESRAYALVKERNEQRAERGEEPFDEVQLREIGRVVGIDSVKYADLSKHRTSDYSFNFELMLSFEGNTAPYLLYACTRVASVFRKLGQGREQLGGKIVLEQPQELALAAQLAQFGDLINNVALKGVPHLLCAYLYELAGLFSSFYEHCPILTAEDPAQKDSRLRLAALTGRTLEQGLELLGLKTLERM

SEQ ID NO: 66778 - protein, 177 aa, Pseudomonas aeruginosa
MTTIVSVRRNGKVVMGGDGQVSLGNTVMKGNAKKVRRLYHGQVLAGFAGATADAFTLFERFEQQLEKHQGHLVRAAVELAKDWRTDRSLSRLEAMLAVANKDASLIITGNGDVVEPEHGLIAMGSGGGFAQAAALALLQHNAELSAREVAETALNIAGSICVFTNQNLTIEELDSAV

SEQ ID NO: 66779 - protein, 256 aa, Pseudomonas aeruginosa
MNDPRKGADAEPTTHFGYQNVPESQKAKKVAEVFHSVAAKYDLMNDLMSGGIHRLWKRFTIELSGVRSGNRVLDIAGGTGDLTRQFSRLVGPTGEVVLADINASMLKVGRDKLLDKGVSGNVSFVQADAEKLPFPDNHFDCVTIAFGLRNVTHKDEAIRSMLRVLKPGGRLLVLEFSKPSSNLLSKAYDAYSFSLLPLMGKLVTNDSESYRYLAESIRMHPDQETLKAMMVEAGFDRVTYHNMTGGIVALHRGIKP

SEQ ID NO: 66780 - protein, 320 aa, Pseudomonas aeruginosa
MTKKKRSVWPWHLLTGLILLVLAWALWFSTSLISYEWRWNRVPQYFAYQAEEPLRANEIGRVEAIEEQGRDARVTLLGESGEKQVVTVAQDSLQFSEGDDVAEGDAVGVTRHWAAGPLLWGLWTTLWLSLVSGAIGLAIGLVAGLCRLSKNPTLHDLSTIYVELVRGTPLLVQIFIFYFFIGTVLNLSREFAGVAALALFTGAYVAEIIRAGVQSIARGQNEAARSLGLNAGQSMRYVILPQAFKRVLPPLAGQFISLVKDTSLVSVIAITELTKSGREAITTSFSTFEIWFCVAALYLLLNLPLSHMASRLERRLGQSD

SEQ ID NO: 66781 - protein, 213 aa, Pseudomonas aeruginosa
MHNLANLYRTGWPGGVEKDTQKALDLYQKMIDLDVPQGFYDMGAMIGNRAGVKNPATDGLTFLDKAASLGNPPALTELGKFYIYVAKKKDLGLAYTHCAASQGYAPASYELGAYYKIVEHNFPKALVYYQVSVSQGGKSAAFFLSRVFGSETPPASAMWYAPDEKLREAYYSIYKKLEADPDLRFPNLIEDYPLPPHPTQGYDADRPDWKPER

SEQ ID NO: 66782 - protein, 289 aa, Pseudomonas aeruginosa
MAIGLWAVLCLAGVPVMANSKPFVCANEKDHLPPLDPQADAWYREAAALAKPDTLRPWGRIVEIYSKAVERGHWKAMHNLANLYRTGWPGGVEKDPQKALDLYQKMIDLDVPQGFYDMGAMIGNRAGVKNPATDGLTFLDKAASLGNPPALTELGKLYIYVAKEKELGLAYASCASSQGYAPASYELGSYYELVENNYPKALSYYQVSVSQGGRSAAFFLSRVFGKRTPPSSAMWYTPDEKLEKFYYSLYLQIDADPDLRFPNLVKYNPLPPHPVQGYDAARPDWKPGQ

SEQ ID NO: 66783 - protein, 467 aa, Pseudomonas aeruginosa
MTHDTGLRRGLNARHIRFMALGSAIGTGLFYGSASAIQMAGPAVLLAYLVAGAAVYMVMRALGEMAVHEPVSGSFGHYASSYLGPLAGFVTGWTYAFEMIIVCLADVTAFGIYMGFWFPDVPRWIWVLSIVLFIGGLNLCHVKVFGELEFWLSLVKVGAIVAMILAGLGIMFFGFSLGGAATSATGVHNLWQHGGFLPNGWAGLVASLSVVVFAFGGIEIIGITAGEAQDPQRVIPRAINAVPLRILLFYVLTLFVLMAIFPWQQIGSNGSPFVQIFDGLGIESAAAILNVVVITAAISAINSDIFGAGRMLYGMARQGQAPVGFSRVSRHGVPWMTVLLMAVALLLGVALNYLIPQSVFLLIASIATFATVWVWLMILLAQVGMRRRMGPRQVAALKFPVPLWPFAPAAAIVFMLFIFVVLGYFPDTRPALWVGAIWIALLVIAYRRWVRPKGDAAHGVLQAQGGL

SEQ ID NO: 66784 - protein, 509 aa, Pseudomonas aeruginosa
MSLHLKPGQLTLADLRQAYLAPVRLSLDPSADAPIAASVACVENIIAEGRTAYGINTGFGLLASTRISPADLEKLQRSIVLSHAAGVGEALDDAMVRLVMLLKVNSLARGFSGIRRKVIDALIALINAEVYPHIPLKGSVGASGDLAPLAHMSLVLIGESRARHRGEWLPAAEALAVAGLEPLTLAAKEGLALLNGTQVSTAYALRGLFEAEDLFAAATVCGGLSVEAMLGSRAPFDARIHAARGQRGQIDVAAAYRDLLTASSEVARSHEKCDKVQDPYSLRCQPQVMGACLTQMRQAAEVLEIEANAVSDNPLVFAAEGDVISGGNFHAEPVAMAADNLALALAEIGSLSERRISLMMDMHMSQLPPFLVANGGVNSGFMIAQVTAAALASDNKALAHPASVDSLPTSANQEDHVSMAPNAGKRLWAMAENVRGILAVEWLGACQGLDFREGLKSSPKLEQARRLLRDKVPYYQEDRFFAPDIEAASQLLASGCLNALLPARLLPSL

SEQ ID NO: 66785 - protein, 559 aa, Pseudomonas aeruginosa
MTTPSKFRDIEIRAPRGTTLTAKSWLTEAPLRMLMNNLDPEVAENPRELVVYGGIGRAARNWECYDRIVETLKQLNDDETLLVQSGKPVGVFKTHANAPRVLIANSNLVPHWATWEHFNELDAKGLAMYGQMTAGSWIYIGSQGIVQGTYETFVEAGRQHYDGNLKGRWVLTAGLGGMGGAQPLAATLAGACSLNIECQQSRIDFRLRSRYVDEQAKDLDDALARIQRYTAEGKAISIALLGNAAEILPELVRRGVRPDMVTDQTSAHDPLNGYLPAGWSWEEYRDRAQTDPAAVVKAAKQSMAVHVRAMLAFQQQGVPTFDYGNNIRQMAKEEGVANAFDFPGFVPAYIRPLFCRGIGPFRWAALSGDPQDIYKTDAKVKQLIPDDAHLHRWLDMARERISFQGLPARICWVGLGLRAKLGLAFNEMVRTGELSAPIVIGRDHLDSGSVASPNRETEAMQDGSDAVSDWPLLNALLNTASGATWVSLHHGGGVGMGFSQHSGMVIVCDGSDEAAERIARVLTNDPGTGVMRHADAGYQVAIDCAKEQGLNLPMITAQR

SEQ ID NO: 66786 - protein, 605 aa, Pseudomonas aeruginosa
MIENLRNIAIIAHVDHGKTTLVDKLLKLSGTLDRKEAESERVMDSNDQEKERGITILAKNTAIKWNGYNINIVDTPGHADFGGEVERVMSMVDSVLLVVDAQDGPMPQTRFVTQKAFKAGLRPIVVVNKIDRPGARPDWVIDQIFDLFDNLGATDEQLDFPIVYASALNGIAGLDHEKMDDNMDALFQAIIDHVPAPVVDTEGPFQMQISQLDYNSFLGVIGIGRITRGKVKSNTPVVAISDDGSKRNGRILKIMGHHGLQRVEVAEAEAGDIVCVSGMEELFISDTLCDPQNVEALPPLTVDQPTVSMTFQVNDSPFAGREGKFVTSRNIKERLEKELLHNVALRVEPGDSPEKFKVSGRGELHLSVLIETMRREGFELAVGRPEVVIIEKDGEKQEPYENVTIDIEEQHQGSVMEQMGLRKGDLSNMIPDGKGRVRLEYTIPARGLIGFRNNFLTLTSGTGILTSTFSHYGPIKAGEVSNRQNGVLVSMATGTALTYSLETLQSRGKLFLGPGDEIYEGQLAGINSRDNDLVINPTKGKKLDNMRASGKDEVIALVPPIRFTLEQALEFIADDELVEVTPKSIRLRKKMLNENDRKRYERSKV

SEQ ID NO: 66787 - protein, 469 aa, Pseudomonas aeruginosa
MSYKSHQLIKDHDVKWVDLRFTDTKGKQQHVTMPARDALDDEFFEAGKMFDGSSIAGWKGIEASDMILMPDDSTAVLDPFTEEPTLILVCDIIEPSTMQGYERDPRNIAKRAEEYLKSTGIGDTVFVGPEPEFFIFDEVKFKSDISGSMFKIFSEQASWNTDADIESGNKGHRPGVKGGYFPVPPVDHDHEIRTAMCNALEEMGLVVEVHHHEVATAGQNEIGVKFNTLVAKADEVQTLKYCVHNVADAYGKTVTFMPKPLYGDNGSGMHVHMSISKDGKNTFAGEGYAGLSETALYFIGGIIKHGKALNGFTNPSTNSYKRLVPGFEAPVMLAYSARNRSASIRIPYVSSPKARRIEARFPDPAANPYLAFAALLMAGLDGIQNKIHPGDAADKNLYDLPPEEAKEIPQVCGSLKEALEELDKGRAFLTKGGVFTDEFIDAYIELKSEEEIKVRTFVHPLEYDLYYSV

SEQ ID NO: 66788 - protein, 735 aa, Pseudomonas aeruginosa
MPIIARFTLRSRVLAALLLCLCAALFYSPPGAAALPNPLAGSSSGGEKVSDAQLEQSLNQVIQTLENDRQRADLLKKLKQLRDVTKKGKESEGGVLGLIGDTLTSLEKQFQGANSPVALWGNQFQLARAELEERFPSWRDLPAMVFDFSVVILLWACLASALLWLSRRMRERFGLSAELPQHPKTRDLLLFSLRKLGPWLVAFLITLYLSVVLPDSLSKTLAMVMAYVLVCGTLFSALCVISLSLLSGPHRQRALDILRRQAFRPLWLIGSLAALGEVAHDPRLIAGLGEHTSICLSTLANASAALFTALFVMRFRRPIAHLIRNQPLERRLKRRSLHDLVQLVGSLWFVPVLVLVGISLFATFVSAGDSSSALRRALVCAVLAVVAMTVIGLIRRRSSRVGAGPRRSAPYIEQLQSFGYTLLHIFVVLFFIEVALRVWGMSLIRYAEGEGEQISMKVVSFGTTLLVAWLIWILTDTAIQHSLGLGGKSRPNTRALTMLPLIRNVLFATIAVIALIVALANMGMNVTPLLAGAGVIGLAIGFGAQSLVADLITGLFIIIEDSLSIDDYVDVGGHLGTVEGLTIRTVRLRDLDGVVHTIPFSEIKSIKNYSRQFGYAMFRWPVPASMPIDDAVALVREVAMELRSDPAVYRNLWSPMELQGVESFDNGQAILRFRFKTAPIKQWEVQRAFNLRLRRRLDQAGLELSMPRLNVQLSRAPKAKSAEPDEQGTPADGGI

SEQ ID NO: 66789 - protein, 358 aa, Pseudomonas aeruginosa
MPTDTLHRLLLDNLTTAVILLNGELRLEYMNPAAEMLLAVSGQRSHGQFISELFTESPEALNSLRQAVEQAHPFTKREATLTSITGVSITVDYAVTPILNRNETLLLLEVHPRDRLMRITREEAQLSKQETTKLLVRGLAHEIKNPLGGIRGAAQLLSRELPEESLKDYTNVIIEEADRLRNLVDRMLGSNKLPNLAPTNIHEVLERVSSLVEAESQGSITLVRDYDPSIPDLLLDREQMIQAVLNMVRNAMQAIAGQNDLRLGRITLRSRTLRQFTIGHTRHRLVCKVEIIDNGPGIPAELQETIFYPMVSGRPDGTGLGLAIAQNIISQHQGLIECESHPGHTVFSLFLPLEQGVH

SEQ ID NO: 66790 - protein, 153 aa, Pseudomonas aeruginosa
MFHVILFQPEIPPNTGNIIRLCANAGCSLHLIEPLGFELDDKRLRRAGLDYHEYASVRRYPYLQSCLEALGQPRLFAFTTKGSRAFHEVAYQRGDAFLFGPESRGLPEDVRNALPTDRRLRLPMREGCRSLNLSNTVAVTVYEAWRQLGFAMD

SEQ ID NO: 66791 - protein, 84 aa, Pseudomonas aeruginosa
MPPVVIYTTAWCPYCIRAKQLLQRKGVDFQEIACDGKPELRAELARKAGSTTVPQIWIGETHVGGCDDLHALERAGKLDALLSA

SEQ ID NO: 66792 - protein, 139 aa, Pseudomonas aeruginosa
MQFVSRLIEFATNHYLLVAALLVLLVLLLLHELRKGGKSLSTRELTALVNADQAVVLDIRPAKEFASGHIVDALNIPADKLNSRMTELEKYKGKTIILVDAMGQHSGTWGGVLKKAGFNAAKLSGGIGSWRGDNLPLVK

SEQ ID NO: 66793 - protein, 257 aa, Pseudomonas aeruginosa
MSAFRVALLGLCLLFNQAQARQDPVPYQRPPLLTVVIDDLGQNLARDRRVLDLPPGVTLAIIPETPHAAELAREAHQRGRTVILHMPMDPAGGPYAWRPELTQEERARRLDAALAKVPFVQGLNNHEGSRMTAVRPAMAWLAEELQRRGLYLVDSRTSAATVAASEAQRIGLASVSRDVFLDNEATPEAVSAQLQAGVALARKQGSALLIGHPHKATLDVLARELPKLRAQGIELVPPQMLIGERGNRNVNPRQAPH

SEQ ID NO: 66794 - protein, 750 aa, Pseudomonas aeruginosa
MKAFGKVLGLFFLGLLLLVVALGFALTHLFDPNDYKDEIRQIARDKANLELDLKGDIGWSLFPWLGLELHDTSIASAATPTKPFADLQMLGLSVRVLPLLRKDVQMSAIRVEGLSLDLVRDKQGKGNWENIGKPAQPQAPAAPSETPPAADGKGAQAQAPEQAPQNDSPRTPIKLDIDSLNVNNARVTYTDEASGKQYNVEGIELSTGAIREGSSIPLKLNAYLGTNQPVVRVKTELTGNLRFDTALRRYQLEDARLSGEASGEPLQGKTATFSAQGQLLLDQSAQIAEWNGLKLSVNQLRALGELKARELDKDTKFSGGLSIAPMNLREFLAGIGVTLPAMADANTLGKFELNTRLAGSRNSLNLEDLKLGLDDTAFSGRFGIADFARQSLRAQLKGDKLDLDRYLPAKAKQAQDAASATRKAEVDATVASAAQGNTPLPEKPTRQAWSDAPLLPIATLRKLDLDVALNFGRLTVEKLPIDDASLKLRGQGGVISLDDMRGGLYNGRFNAKANLDVRQDSAVLTATKHIANVPVERLLEAQGKKPPVKGLLDLDADIRTSGNSEKSWIDHLNGNARFSLINGVLPDANLEQQLCQGIATLNRKALAGTHGGKDTPFRELKGSLNFTNGVASNPDLKVAIPGLAVSGHGDIDLRVLGMDYRIGVEIQGDKSDMPDPACQVNQRYAGIEWPLLCRGPLELGAKACRLDKEGMGKVAAKLAGNRLNEKLEEKLGDKVSPELKDALKGLFNRK

SEQ ID NO: 66795 - protein, 360 aa, Pseudomonas aeruginosa
MTPSLSGLPPIRTALIGYGFAGKTFHAPLIRAVPALCLEHVVSRDPGRVHADLPEARVSADPDEAIEAADIDLVVIASPNATHASLAERALRAGKHVVVDKPFTVTLAEARRLADLARERPGQVLSVFQNRRFDSDFLAVEAALQAGSIGPVRYFESAIERFRPQVRDRWREHDLPGSGLWFDLGPHLLDQALCLFGVPQRVHGHLRRLREGALTDDWFEVLLDYPHCQVALRASMLAANPAPRFNVHGDHGSLLKAGADIQEAQLLQGLHPGSAGWGRDPDLLQHIDGQGLRQSLVTPAGDQSRYYQALAAAIRGQSRNPVSAQQACALMALLELARRSAEEGRSLPVELRDEERQAWN

SEQ ID NO: 66796 - protein, 250 aa, Pseudomonas aeruginosa
MKNYKKILLAAAATLAFALDASAADKLRIGTEGAYPPFNGIDASGQAVGFDLDIGKALCAKMKTECEVVTSDWDGIIPALNAKKFDFIVASMSITDERKQAVDFTDPYYTNKLQFVAPKSVDFKTDKDSLKGKVIGAQRATIAGTWLEDNMADVVTIKLYDTQENAYLDLSSGRLDGVLADKFVQYDWLKSDAGKEFEFKGEPVFDNDKIGIAVRKGDPLREKLNAALKEIVADGTYKKINDKYFPFSIY

SEQ ID NO: 66797 - protein, 331 aa, Pseudomonas aeruginosa
MLKHTAKALVCALSLTVAGIVQAADPIVIKFSHVVAEHTPKGQGALLFKKLVEERLPGKVKVEVYPNSSLFGDGKEMEALLLGDVQIIAPSLAKFEQYTKKLQIFDLPFLFDNIQAVDRFQQSPQGKELLTSMQDKGITGLGYWHNGMKQLSANKPLREPKDARGLKFRVQASKVLEEQFKAVRANPRKMSFAEVYQGLQTGVVNGTENPWSNIYSQKMHEVQKYITESDHGVLDYMVITNTKFWNGLPEDVRGVLAKTMDEVTVEVNKQAEALNQGDKQRIVEAKTSEIIELTPEQRAEWRKAMQPVWKKFEGEIGADLIKAAEAANQAQ

SEQ ID NO: 66798 - protein, 336 aa, Pseudomonas aeruginosa
MAFNMHNRNLLSLMHHSTRELRYLLDLSRDLKRAKYTGTEQQHLKRKNIALIFEKTSTRTRCAFEVAAYDQGANVTYIDPNSSQIGHKESMKDTARVLGRMYDAIEYRGFKQEIVEELAKFAGVPVFNGLTDEYHPTQMLADVLTMREHSDKPLHDISYAYLGDARNNMGNSLLLIGAKLGMDVRIAAPKALWPHDEFVAQCKKFAEESGAKLTLTEDPKEAVKGVDFVHTDVWVSMGEPVEAWGERIKELLPYQVNMEIMKATGNPRAKFMHCLPAFHNSETKVGKQIAEQYPNLANGIEVTEDVFESPYNIAFEQAENRMHTIKAILVSTLADI

SEQ ID NO: 66799 - protein, 310 aa, Pseudomonas aeruginosa
MRIVVALGGNALLRRGEPMTADNQRENVRIAAEQIAKVAPGNELVIAHGNGPQVGLLALQGAAYDKVSPYPLDVLGAETEGMIGYMIEQEMGNLLPFEVPFATILTQVEVDGKDPAFQNPTKPIGPVYSREEAERLAAEKGWSIAPDGDKFRRVVPSPRPKRIFEIRPVKWLLEKGTIVICAGGGGIPTMYDEAGKKLSGVEAVIDKDLCSSLLAQELVADILIIATDVDAAYVDWGKPTQKAIAQAHPDELERLGFAAGSMGPKVQAAIEFARATGKDAVIGSLADIVAITEGKAGTRVSTRKAGIEYR

SEQ ID NO: 66800 - protein, 145 aa, Pseudomonas aeruginosa
MGIFAFVKEAGEKLWDTLTGHEAQAAESLKEHVAKVGLGNPNIQVSVEGDKVIASGEVASQEEKEKILLALGNVAGVSSVEDKITVAQAAPEARFVTVKKGDTLSAIAKAEYGNANAYMKIFEANKPMLSHPDKIYPGQVLRIPE

SEQ ID NO: 66801 - protein, 135 aa, Pseudomonas aeruginosa
MRKSLLVIAFGLLSAQAALAGDSTKTAVGGGVGGALGNVVGGAIGGSTGAAIGAGLGGAAGGAMTAKDGRKTEAALGGGLGAAGGSVIGNKLGGSTGATIGAGLGGAAGGAVGNNLGKDNDSGHRGKKHRKHKHR

SEQ ID NO: 66802 - protein, 513 aa, Pseudomonas aeruginosa
MTQANNAVYTDISAAQLVEEAIRRGEGELAANGSLVVRTGHRTGRSPVDRFIVEEPSTKDAIAWGNINRPFPADKFDALWARVEAFNNAQDHFVSHVHVGSAEAYYLPVKMTTATAWQNLFGRCLFIEPEQYNPAGKDEWQVLNVANFECVPERDGTNSDGCVILNFAQKKVLIAGMRYAGEMKKAMFSVQNFLLPERDVLPMHCAANIGEAGDVTLFFGLSGTGKTTLSADESRYLIGDDEHGWGEGVVFNVEGGCYAKCIDLSEKNEPVIWKAIKFGAVLENVVLDEERVPNYADDSLTQNSRAAYPLEHVEKRSEKNLGGEPNAVIFLTCDLTGVLPPVSILNNEQAAYHFLSGYTALVGSTEMGSGGGIKSTFSTCFGAPFFPRPAGVYAELLIKRIKAFGSKVYLVNTGWTGGGYGVGKRFNIPTTRGVIAAIQSGALIGAETEHLEIINLDVPKAVPGVETNLLNPRNTWADKAAYDEAAKGLAKQFIENFKKFEVSDAIKAAGPQL

SEQ ID NO: 66803 - protein, 131 aa, Pseudomonas aeruginosa
MSEKDDDKVRLDKWLWAARFFKTRALAKAAIEGGKVHCRGERCKPSKEPRVGEELTIRTGFDERTVTIRALAVVRRGAQEAQALYEETADSVESRERAAAMRKAGALGVQTEGRPSKKQRRQIHQLRGGQD

SEQ ID NO: 66804 - protein, 779 aa, Pseudomonas aeruginosa
MDSINTRIAEELSALPSGRVQPQQVAAAVALLDEGSTVPFIARYRKEVTGSLDDTQLRMLEERLRYLRELEERRGAILASIEEQGKLTPELARDIKLADTKTRLEDLYLPYKQKRRTKGQIALEAGLGALADALFDDPTLVPESEAARFVDAEKGFADVKAVLEGAKYILMERFAEDATLLDKLRVFMKNEATLTARVVPGKEQEGAKFSDYFEHDEPLKSAPSHRALAIFRGRNEGVLSASLKVGEEAPGTLHPCEVMIAERFGLSNQGRAADKWLAEVVRWTWKVKLYTHLETDLFGELRDGAEDEAISVFARNLHDLLLAAPAGPRATLGLDPGLRTGVKVAVVDATGKLLDTATVYPHAPKNQWDQTLAVLAALCAKHQVELIAIGNGTASRETDKLAGELIKKYPGMKLTKIMVSEAGASVYSASELAAKEFPELDVSLRGAVSIARRLQDPLAELVKIEPKSIGVGQYQHDVSQLKLARSLDAVVEDCVNAVGVDVNTASAALLARISGLNSTLAQNIVAHRDANGAFRTRDELKKVSRLGEKTFEQAAGFLRVMNGDNPLDASAVHPETYPLVQRIAADTERDIRSLIGDSAFLKRLDPKKFTDETFGLPTVTDILKELDKPGRDPRPEFKTAEFQEGVESLKDLKPGMVLEGVVTNVTNFGAFVDIGVHQDGLVHISALSEKFVKDPYEVVKAGDIVKVKVMEVDIPRNRVGLSMRMSDTPGEKVEGQRGGRPTGSGQPRQERGAPRGQSAPPANNAMAALFANAKQLKKK

SEQ ID NO: 66805 - protein, 233 aa, Pseudomonas aeruginosa
MSEYFHHVLIGLLAVLPVANPLTSVSLLLGLGGSLPPAERNRQIFKASLYVALIMLVSFYGGSLVMQVFGISIPGLRIAGGLIVAYIGFTMLFPATTPDETEVQHDLLSDEEKITPHFRDLSFVPLALPGTAGPGTIALVVSSASTLQSTYGSIPLFIHLAAITVTLLTALIFWIALQSSGRIMKFLGESGIDAISRVVGFLLVAMGVQFVINGGFELVAGHAALQSAAGVRQ

SEQ ID NO: 66806 - protein, 958 aa, Pseudomonas aeruginosa
MSQTPSLAQLQPADAFLRRHLGPDPAEQQAMLAFLGVSTRAELIVQTVPPAIRLNRPLELPAALDEQAALARLRGYAGLNQRWTSLIGMGYYGTVTPSVILRNVLENPGWYTAYTPYQPEIAQGRLEALLNFQQLTIDLTGLDLASASLLDEATAAAEAMALARRVAKARSNRFFVDAHCHPQTVSVLRTRAEAFGFELVVDEPDNLAAHAVFGALLQYPDSRGEIRDLRPLIEALHGQQALACVASDLLALLLLTPPGELGADVVLGSAQRFGVPMGYGGPHAAFFATREGYKRAMPGRIIGVSRDARGNPALRMALQTREQHIRREKANSNICTAQVLLANIASLYAVYHGPQELKRIAQRVQRLTALLAAGLKSKGLRRLNRHFFDTLTYEVGERQAAILERARAARVNLRVVDDRRLALSLDETCDAATLATLFEIFLGAGHGLDVAHLDGGAVADGIPAVLQRTSAYLQHPVFNAHHSETEMLRYLRQLEGKDLALNQAMIPLGSCTMKLNASSEMIPITWPEFAELHPFVPREQAEGYRRMIDELEAWLRAITGFDAICMQPNSGAQGEYAGLLAIRRYHQSRGDSQRDICLIPASAHGTNPASAIMASMRVVIVECDPRGNVDLDDLRLKAAEAGDRLSCLMITYPSTHGVYEEGIGEICEVVHRHGGQVYMDGANLNAQVGLARPADIGADVSHMNLHKTFCIPHGGGGPGMGPIGVKRHLAPFVANHPVIRVEGPNPLNDAVSATPWGSASILPISWMYIAMMGPQLADASEVAILSANYLANRLDGAFPVLYRGRNERVAHECILDLRPLKAQTGITEEDVAKRLMDYGFHAPTMSFPVPGTLMVEPTESESKAELDRFVEAMLSIRAEIGKVESGAWPAEDNPLKRAPHTLADVTGIWQRPYEIAEAVTPSEHARAFKYWPAVNRVDNVYGDRNLFCACVPLDDYRE

SEQ ID NO: 66807 - protein, 360 aa, Pseudomonas aeruginosa
MGLRTPLYELHVALGAKMVDFGGWDMPLHYGSQVEEHHQVRRDCGVFDVSHMTVVDVAGEQATAYLQHLLANDVARLGETGKALYSAMLNEEGGVVDDLIVYLTEHGYRVVVNASTRDKDIAWMQAQAAGFKVDLQERGDLAMLAIQGPNARVHSSELVSPARAALIRELKPFQGRAEGDWFIARTGYTGEDGLEIMLPAAEAPGFLNELVGAGISPAGLGARDTLRLEAGLNLYGQDMDESVSPLAANMGWTVAWEPVARDFVGRRALEAQKAAGDQPKLVGLVLEERGVLRAHQVVRVAGIGEGEITSGSFSPTLNKSIALARVPAATGDRAEVEIRGKWYPVRVVQPSFVRHGKPLI

SEQ ID NO: 66808 - protein, 405 aa, Pseudomonas aeruginosa
MHADLVIVGAGMVGSALALALEGSGLEVLLVDGGSLDVAPFKPEAPYEPRVSALSEASRRILQRLHAWDGIVARRAEPYREMQVWDGSGTGRIGFSAASVHAEVLGHIVENRVVQDALLERLHDSTTGLLANARLEQMRHSGDDWLLTLADGRQLRAPLVVAADGANSAVRRLAGCATREWDYLHHAIVTSVRCENAHRATAWQRFTDDGPLAFLPLPDRGDEHWCSIVWSTTPEQAERLMALDEDGFRAALGEAFEQRLGAILHADRRLCIPLRQRHAKRYVEPGLALVGDAAHTIHPLAGQGVNLGFLDAAVLSEVLLHALERGERLADERVLSRFERRRMPHNLGMMTAMEGFERLFQADRLPLRWLRNAGLRLVDGHHEAKALFVRQALGLSGDLPMLARV

SEQ ID NO: 66809 - protein, 203 aa, Pseudomonas aeruginosa
MIESQDLSRPALRRKLRQARRALSPLQQRLAARALYRQLAQHPLFRRARHIALYLPNDGEIDPRPLLRAAQKRGKATYLPVLAPWPRTRMVFQRVGSGERWTRNRFRISEPLADAGRQRKAWALDLVLLPLVGFDEQGGRLGMGGGFYDRSLAYLARRKNGHKPTLIGLAHECQKVDRLALASWDIPLAGTVTDAGWYVAGKR

SEQ ID NO: 66810 - protein, 374 aa, Pseudomonas aeruginosa
MRSLANIFNLGIKEFRSLGRDYAMLALIVWAFTLGVYSSATGIPETLHHAPIAVVDEDRSQLSSRIVNAFQPPYFRPPEMIGHAEMDRGMDVGLYTFTLDIPPDFQRDVLAGRKPSIQVNVDATQTGQAFSGAGYIQNIVATEVREFVSRYRAEPSMPAQIEVRMEFNPNLTQAWFGGVMEVINQITMLSIILTGAALIREREHGTVEHLLVMPLSAFEIMMAKVWSMGLVVLVAAGLSLQWVVRGWLDVPISGSVGLFLLGAGLHLFATTSMGIFLGTVARSMPQLGLLTILVLLPLNILSGGTTPRESMPELVQNIMLAAPTTHFVSLAQAILFRGAGFDIVWPQFAGIVVIGSAFFFGALWRFRRTISQMA

SEQ ID NO: 66811 - protein, 322 aa, Pseudomonas aeruginosa
MRIVLQPSGACLELLPGERILDGARRLGYDCPQSCRNGNCHICAALLVEGRVRQNGEVRDHGELFTCLAEPLEDCVLHWDGVLAPGELPLRKLTCQLSFCEEVGGDVYRVGLRAPAGKPPRYHAGQYLLLERDGGDSAAFSLASAPHAGRDLELHILAKEDSAVALIAQLQRERLARIQLPFGDAHLAELPDGPLVLIAAGTGMSQMHSLIEHCRAAGFAHPVHLYWGVRRPEDFYRLPHWTEWEGLPNLFLHRVVSDLCGWEGRCGLLHEAVREDFADLSSLHVYASGSPAMVYATLDALVEAGMDAHQMRADVFAYAPRD

SEQ ID NO: 66812 - protein, 419 aa, Pseudomonas aeruginosa
MNLTELKQKPIAELLEMSDAMGLENMARSRKQDIIFALLKKHAKSGEEISGDGVLEILQDGFGFLRSADSSYLAGPDDIYVSPSQIRRFNLRTGDTIIGKIRPPKEGERYFALLKVDSINFDRPENAKNKILFENLTPLFPNERMKMEAGNGSTEDLTGRVIDLCAPIGKGQRGLIVAPPKAGKTIMLQNIASNITRNNPECHLIVLLIDERPEEVTEMQRTVRGEVVASTFDEPPTRHVQVAEMVIEKAKRLVEHKKDVVILLDSITRLARAYNTVIPSSGKVLTGGVDAHALEKPKRFFGAARNIEEGGSLTILATALVETGSKMDEVIYEEFKGTGNMELPLDRKIAEKRVFPAININRSGTRREELLTSEDELQRMWILRKILHPMDEISAIEFLIDKLKQTKTNDEFFDSMKRK

SEQ ID NO: 66813 - protein, 337 aa, Pseudomonas aeruginosa
MSFTPANRAYPYTRLRRNRRDDFSRRLVRENVLTVDDLILPVFVLDGVNQRESIPSMPGVERLSIDQLLIEAEEWVALGIPALALFPVTPVEKKSLDAAEAYNPEGIAQRATRALRERFPELGIITDVALDPFTTHGQDGILDDDGYVLNDVSIDVLVRQALSHAEAGAQVVAPSDMMDGRIGAIREALESAGHTNVRIMAYSAKYASAYYGPFRDAVGSASNLGKGNKATYQMDPANSDEALHEVAADLAEGADMVMVKPGMPYLDIVRRVKDEFRAPTFVYQVSGEYAMHMGAIQNGWLAESVILESLTAFKRAGADGILTYFAKQAAEQLRRGR

SEQ ID NO: 66814 - protein, 209 aa, Pseudomonas aeruginosa
MLVSTWFAFFLACWAISLSPGAGAIASMSCGLQYGFARGYWNALGLQIGLALQIAIVAAGVGALLATSALAFSLIKWFGVAYLVYLAVRQWQAPPQALSTDGERPLGRPLTLVLRGFLVNASNPKAVIFMLAVLPQFIDPHQPLLAQYLIMGGTMIVVDLIVMAGYTGLAARVLRVLRSPRQQKLVNRTFASLFVGAAGLLATVRRAPL

SEQ ID NO: 66815 - protein, 352 aa, Pseudomonas aeruginosa
MSANKKPVTTPLHLLQQLSHSLVEHLEGACKQALVDSEKLLAKLEKQRGKAQEKLHKARTKLQDAAKAGKTKAQAKARETISDLEEALDTLKARQADTRTYIVGLKRDVQESLKLAQGVGKVKEAAGKALESRKAKPATKPAAKAAAKPAVKTVAAKPAAKPAAKPAAKPAAKPAAKTAAAKPAAKPTAKPAAKPAAKPAAKTAAAKPAAKPAAKPVAKPAAKPAAKTAAAKPAAKPAAKPVAKPTAKPAAKTAAAKPAAKPAAKPAAKPAAKPVAKSAAAKPAAKPAAKPAAKPAAKPAAKPVAAKPAATKPATAPAAKPAATPSAPAAASSAASATPAAGSNGAAPTSAS

SEQ ID NO: 66816 - protein, 313 aa, Pseudomonas aeruginosa
MSSREIRIATRQSALALWQAEYVKARLEQAHPGLTVTLLPMTSRGDKLLDAPLAKIGGKGLFVKELETALLEGAADIAVHSMKDVPMDFPEGLGLYTICEREDPRDAFVSNTYASLEQLPAGSVVGTSSLRRQAQLLARRPDLQIRFLRGNVNTRLAKLDAGEYDAIILAAAGLIRLGFESRIRSSISVDDSLPAGGQGAVGIECRTADSDLHALLEPLHHTDTALRVTAERALNKRLNGGCQVPIACYAIREGDQLWLRGLVGQPDGTQLLRAEGRAPLAEAEALGVRVAEDLLEQGAEAILEAVYGEAGHP

SEQ ID NO: 66817 - protein, 248 aa, Pseudomonas aeruginosa
MNVLIVDDEPLARERLARLVGQLDGYRVLEPSASNGEEALTLIDSLKPDIVLLDIRMPGLDGLQVAARLCEREAPPAVIFCTAHDEFALEAFQVSAVGYLVKPVRSEDLAEALKKASRPNRVQLAALTKPPASGGSGPRSHISARTRKGIELIPLEEVIFFIADHKYVTLRHAQGEVLLDEPLKALEDEFGERFVRIHRNALVARERIERLQRTPLGHFQLYLKGLDGDALTVSRRHVAGVRRLMHQL

SEQ ID NO: 66818 - protein, 358 aa, Pseudomonas aeruginosa
MPIRFKPGRSTRPAVQDDFFIPELCEAEALFTLVLLAELLVLVLVLAEPMTPSFNWVRLALASLFVQWIVLLSAALFCRLRPLLARLPVALAGSACCLLVVALTLGCTAVAEHYQLGGELTRAGEVNLYLRHALIALIMSALVLRYFYLQSQWRRQQQAELQARLESLQARIRPHFLFNSLNSIASLIELDPLKAEHAVLDLSDLFRASLAKPGTLVSWEEELALARRYLSIEQYRLGDRLQLDWQVHGVPANLPIPQLTLQPLLENALIYGIQPRVEGGLVQVEAVYREGVFQLCVSNPYDEALESPPSKGTRQALHNIDARLGALFGPKASLSVERRDGRHYTCLRYPCARLMQEA

SEQ ID NO: 66819 - protein, 464 aa, Pseudomonas aeruginosa
MSVEKTNQSWGGRFSEPVDAFVARFTASVDFDKRLYRHDIMGSIAHATMLAKVGVLSDAERDAIVDGLQQIQAEIEAGSFDWRVDLEDVHMNIEARLTDRIGVTGKKLHTGRSRNDQVATDIRLWLRDEIDTILAEITRLQEGLLGLAEAEADTIMPGFTHLQTAQPVTFGHHLLAWFEMLGRDYERLVDCRKRVNRMPLGSAALAGTTYPIQREITCQLLGFDAVGGNSLDGVSDRDFAIEFCAAASLAMMHLSRFSEELVLWTSAQFQFIDLPDRFCTGSSIMPQKKNPDVPELVRGKSGRVFGALTGLLTLMKGQPLAYNKDNQEDKEPLFDAADTLRDSLRAFADMVPAIRPRREIMREAARRGFSTATDLADYLVRKGLPFRDCHEIVGHAVKYGVDSGKDLAEMSLDELRRFSEQIDADVFDVLTLEGSVNARDHIGGTAPNQVRAAVARGRKLLAQR

SEQ ID NO: 66820 - protein, 303 aa, Pseudomonas aeruginosa
MRADLDAFLEHLRSERQVSAHTLDGYRRDLLKILALAEKAGLSDWNALDTRSLRTFVARLHQQGQSSRSLARLLSATRGLYQYLLREGRCRHDPANGLSAPKSPRKLPRTLDADRALQLLDGAVEDDFIARRDQALLELFYSSGLRLSELVGLDLEWLDLKEGLVRVRGKGNKVRELPVGKAARQALEAWLPLRTQAAPEDGAVFIGRSGKRLTPRAIQLRVRQAGVRELGQHLHPHMLRHSFASHLLESSGDLRAVQELLGHADIATTQIYTHLDFQHLASVYDRAHPRAKRKGNADGGNDP

SEQ ID NO: 66821 - protein, 232 aa, Pseudomonas aeruginosa
MSSLRLVTFDLDDTLWDVAPVMNNAEALLREWLASNAARLGPVPIEHLWAIRTRLLDREPMLRHRLSELRRRILFHALLDAGYPQAEAESLAEAGFQVFLEARHRVTLFPEVHPTLEILADRFTLGVLTNGNADVRRLGLADYFRFALCAEELGVGKPDPTPFREALKRAGVEASAAIHIGDHPSDDIAGARRAGMRAIWFNPSGKPWAGEEEPSAEIRSLAELPALLARLQ

SEQ ID NO: 66822 - protein, 669 aa, Pseudomonas aeruginosa
MSRLNPRQQEAVNYVGGPLLVLAGAGSGKTSVITRKIAYLVQQCGIRAQYIVAVTFTNKAAREMKERVGTLLRGGEGKGLTVSTFHNLGLNIIRKEHERLGYKPGFSIFDESDIKALLTDIMQKEYSGDDGVDEIKNYIGAWKNDLILPEEALEKARNPKEQTAAIVYLHYQRTLRAYNAVDFDDLILQPVKLFQEHPDVLQKWQNKVRYMLVDEYQDTNASQYLLVKLLVKDRAQFTVVGDDDQSIYAWRGARPENLMQLKEDFPSLKVVMLEQNYRSTSRILKCANVLIANNPHVFEKQLWSEMGHGDPIRVIRCRNEDAEAERIAMEILTLHLRTERPYSEFAILYRGNHQAKLMELKLQHHQIPYRLSGGTSFFGRQEVKDLMSYFRLLVNPDDDNAFLRVINVPRREIGSATLEKLGNYATQRKISMYAACDEMGLAEHLDSRFHERLQRFKRWMDGIRRQCAENEPIAVLRSMVMDIDYENWLRQNASSDKVAEFRMSNVWFLIEALKNTLERDEEGDMTIEQAIAKLVLRDMLERQQEEEEGAEGVQMMTLHASKGLEFPYVFIMGMEEEILPHRSSIEADTVEEERRLAYVGITRARQNLAMTFAAKRKQYGEIIDCSPSRFLDELPPEDLEWEGMEDAPQEVKAAKGNAALADIRAMLKR

SEQ ID NO: 66823 - protein, 572 aa, Pseudomonas aeruginosa
MSSKKVAEIVVETLEAAGVRHCYGIVGDTLNHVTDAIHRSQIQWVHVRHEEAAAFAAGAESYISGRLTACAGSCGPGSLHFINGVYEAQRNRAPMVLIASQIVTPQLGMEFPQEVDFKAVYASCSVFCEQVHSPEQARRVVALACQAALNRRGVAVVILPADISQATVKDDLPFSVHFPQPVLRPSDAELQDVARLLAHGKKIGIYAGSGCQGAHDLLVALADRLKAPIAHTSRAKDFVEYDNPFNMGMTGMLGIESGFHMMTECDTLLLLGADFAWAQFYPQKATLIQVDRDGSHLGRRHPIDLGVVGDVIPTLEALLPLLEAREERSFLDECLEHRERSLRTLEKEEQAGKGELIHPQHLVSLLDQHASEDALFTADGGSAMVWLLRHIHSNGKRRTLTSLVHGTMANAMPQALGLKKAYPERQVISISGDGGLAMLLGDLLTAIQEKLPIKVVVLNNASLNFVELEQKVEGLLDNYTDLLNPDFARLAEVIGFHGRKVTRSEELEAAVQEFLAQPGPALLDVHTNPAELVMPPKIEFGQVADTALYAAKAVLSGRFKDVETLLVNNLLK

SEQ ID NO: 66824 - protein, 51 aa, Pseudomonas aeruginosa
MRELIRLVSSAGTGHFYTTDKNKRTKPEKIEIKKYDPVVRQHVIYKEAKIK

SEQ ID NO: 66825 - protein, 224 aa, Pseudomonas aeruginosa
MSIRDWPEAERPREKLLEQGAAALSDAELLAIFLRTGVTGCSAVELSRRLLSEFGGLRALLEADLASFCGHLGLGVAKYAQLQAVLEMGRRHLAERLRRDSILESPQAVRDYLKARLRHEQHEVFACLFLDTRHRVLSFEVLFQGSIDGASVYPRQVVKRTLAHNAAALILTHNHPSGDARPSLADRQLTARLKEALALIDVRVLDHFIIGDGEPLSLAEYGWL

SEQ ID NO: 66826 - protein, 213 aa, Pseudomonas aeruginosa
MQAYQRDFIRFAIERGVLRFGEFTLKSGRTSPYFFNAGLFDSGLALARLGRFYAEAVIDSGIDFDVLFGPAYKGIPLAATTAVALAEQHQRDLPWCFNRKEAKDHGEGGTLVGAPLSGRVLIIDDVITAGTAIREVMQIIDAQGARAAGVLIALNRQERGKGELSAIQEVERDFGMPVVSIVSLEQVLEYLAEDAELKKHLPAVEAYRAQYGI

SEQ ID NO: 66827 - protein, 287 aa, Pseudomonas aeruginosa
MVHSMTAFARVEQAGTHGTLSWELRSVNHRYLEPHLRLPDAFRDLEGAVREALRQGLSRGKVECTLRFAEETAGKSLQVDQERARQLVAAAEGVAALIRQPAPLDPLAVLAWPGVLVADSADPQALNAAALEAFGQALEQLKAGRSREGLELAKLLNDRLDAMLVEVGNLRELVPTMLANQRQKILDRFAELKAELDPQRLEQELVLLAQKSDVAEELDRLATHVGEVRRVLKAGGAAGRRLDFLMQELNREANTLGSKAFDPRSTQAAVNLKVLIEQMREQVQNIE

SEQ ID NO: 66828 - protein, 701 aa, Pseudomonas aeruginosa
MPGIDAFADRLSSYLGPDQVNLVRRAYYYAEQAHDGQRRRSGEPYVTHPLAVSNILADMHMDHQSLMAAMLHDVIEDTGIAKEALTAQFGETVSELVDGVSKLTQMNFETKAEAQAENFQKMAMAMARDIRVILVKLADRLHNMRTLEVLSGEKRRRIAKETLEIYAPIANRLGMHTMRVEFEDLGFKAMHPMRAERIRQAVKKARGNRREIVGKIQESLVNCLAREGMEGQVIGREKHLYSIYQKMRGKRKAFNEIMDVYAFRIIVDKVDTCYRVLGAVHSLYKPFPGRFKDYIAIPKANGYQSLHTTLFGMHGVPIEIQIRTREMEEMANHGIAAHWLYKSNDETPKGTHARARQWVKGVLELQQRAGNSLEFIENVKIDLFPDEVYVFTPKGRIMELPKGSTAVDFAYAVHTDVGNSCIACRINRRLAPLSEPLQSGQTVEIVTAPGARPNPAWLSFVVTGKARTHIRHALKLQRRSESINLGERLLNKTLTGFDSHLEKIPQERIQAVLAEYRMEVFEDLLEEIGLGNRMAYVVARRLLSSEGEEAPSAEGPLAIRGTEGLVLSYAKCCTPIPGDPIVGHLSAGKGMVVHLESCKNISEVRHNPEKCIQLSWAKDVTGEFNVELRVELEHQRGLIALLATSVNAADGNIEKISMDERDGRISVVQLVVSVHDRVHLARVIKKLRALKGVIRITRLRS

SEQ ID NO: 66829 - protein, 446 aa, Pseudomonas aeruginosa
MDPSPSTSIATYFADAGLILFALFLVLLNGFFVAAEFAMVKLRATRVETIAKQHGWRGTILRKVHNQLDAYLSACQLGITLASLGLGWVGEPAFAELLEPLLAMIGVHSDELIRGISFFTAFFIISYLHIVVGELAPKSWAIRKPELLSLWTAVPLYLFYWLMYPAIWLLNASANAILKIAGQGEPGPHHEHHYSRDELKLILHSSRAQDPSDQGMRVLASAVELGELEVVDWANSREDLVYLEHDAPLADILAVIRRHKYSRYPVWDSHKGEFIGLLHIKDLLLALSALDSLPETFDLDELVRPLEIVTKHTPLSRLLEQFRKGGAHFAVVEEADHKVVGFLTMEDVLEVLVGDIQDEHRKTERGILAYQPGKLLVRGDTPLFKLERLLGIDLDHVEADTLAGLVYDTLKRVPEEEEVLDTEGLRIIVKKMRGPKIVLAKVVKLD

SEQ ID NO: 66830 - protein, 299 aa, Pseudomonas aeruginosa
MLGRLLLLCGLFAAAAPAAALTIYKYTDANGVVTYSDRAVAGAQVFVFRDRMVEHLEREVKLETKKHAGGETLQVRNDLYAPVEVELRIRNPRNAVGVPDGPIRWVVPARSQVRLATLAPRKAGKPMSYTPKLRYALGDPRQQPLLYRYPLPWRGGPFRLSQGANGKYSHFTPKGRYAMDIAMPEGTPIIAARGGTVVKIENNQSGRGNNPSGNFVRILHDDGTMGVYLHLMRHSVLVAEGQRVQVGTPLARSGNTGNSSGPHLHFVIQRNVGLALESIPYDFAQPVDSLPNFAIVREP

SEQ ID NO: 66831 - protein, 277 aa, Pseudomonas aeruginosa
MQNETASHGINFDALGRDRQSLDLASESVELEVPGLNLFYGAKQALFDVRMNIPKQRVTAFIGPSGCGKSTLLRCFNRMNDLVDGCRVEGEIRLDGHNIFAKGVDVAELRRRVGMVFQKPNPFPKSIYENVVYGLRIQGINKKRVLDEAVEWALKGAALWEEVKDRLHESALGLSGGQQQRLVIARTIAVEPEVLLLDEPCSALDPISTLKIEELIYELKSKFTIVIVTHNMQQAARVSDYTAFMYMGKLIEFGDTDTLFTNPAKKQTEDYITGRYG

SEQ ID NO: 66832 - protein, 134 aa, Pseudomonas aeruginosa
MIELEQEDPIPQGDLALQITALPRETNGFGDIYGGWLVSQMDLAGTAMASKIAGGRIATVAIDRMAFMVPVAVGAQLSFYTQTLEVGRSSIRMLVEVWSDDPLSSEWRKVTEAVFVFVAIDGSGRTRPVPPRRG

SEQ ID NO: 66833 - protein, 561 aa, Pseudomonas aeruginosa
MSQEFDYIIIGAGSAGNVLATRLTEDADVSVLLLEAGGPDYRFDFRTQMPAALAFPLQGRRYNWAYETDPEPYMNNRRMECGRGKGLGGSSLINGMCYIRGNALDFDGWAKEPGLEDWSYLDCLPYFRKAETRDIGPNDYHGGDGPVSVTTPKAGNNPLFHAMVEAGVQAGYPRTDDLNGYQQEGFGPMDRTVTPEGRRAATGRGYLDQARGRPNLTIVTHALSDRILFSGKRAIGVSYLVGNGDNPVTAHARREVLVCSGAIASPQLLQRSGVGPAALLRDLDIPVVHDLPGVGANLQDHLELYLQYACKQPVSIYPATKWWNQPAIGAQWLFLGKGLGASNQFEAGGFIRTREAFEWPNIQFHFLPVAINYNGSKGVQEHGFQAHMGSMRSPSRGRIHLKSRDPRQHPSILFNYMSHEQDWQEFRDGIRLTREIMNQPALDPYRGRELSPGVSVQSDAELDEFIRNHAETAFHPSCSCKMGSDDMAVVDGQGRVHGMEGLRVVDASIMPLIITGNLNATTIMMAEKIADRIRGRQPLPRSTAKYYVAGDAPVRGNPVRA

SEQ ID NO: 66834 - protein, 325 aa, Pseudomonas aeruginosa
MSPAELHADSIVIDGLIIAKWNRELFEDMRKGGLTAANCTVSVWEGFQATVNNIAASNKLIRDNSDLVIPVRSTADIRKAKEQGKTGILYGFQNAHAFEDQIGYVEVFKQLGVGIVQMCYNTQNLVGTGCYERDGGLSGFGREIVAEMNRVGIMCDLSHVGSKTSEEVILESKKPVCYSHCLPSGLKEHPRNKSDEELKFIADHGGFVGVTMFAPFLKKGIDSTIDDYAEAIEYVMNIVGEDAIGIGTDFTQGHGHDFFEWLTHDKGYARRLTNFGKIVNPLGIRTVGEFPNLTETLLERGMPERVVRKVMGENWVRVLRDVWGE

SEQ ID NO: 66835 - protein, 366 aa, Pseudomonas aeruginosa
MSSNFLNPVTTQTWANGRHLVRCVKVIQETWDVRTFCFMADQPILFFFKPGQFVTLELEIDGEPVMRSYTISSSPSVPYSFSITIKRVPGGRVSNWLHDNLKEGQELPVHGPVGLFNAIDFPADKVLFLSGGVGITPVMSMARWFFDTNANVDMVFVHSARSPKDIIYHRELEHMASRIDNFSLHIICERHGLGEAWAGYRGYLNLRMLELIAPDFLEREIFCCGPTPYMSAVKHLLQGHGYDMSRYHEEAFGPTPPEVRADVRELAAEAAEAPEVPVADQHQVEFTATGKSIRVSPGETVHAAAAKLGLHIPKACGMGICGTCKVMKTAGEVEMEHNGGITDEDVAEGYILSCCSVPKGDVVIDY

SEQ ID NO: 66836 - protein, 81 aa, Pseudomonas aeruginosa
MGLIGTIIVGLIVGLVARFLKPGDDSMGWIMTILLGIGGSLLATYGGQAIGFYQAGQAAGFIGAVVGAVVLLVIYGLIKKN

SEQ ID NO: 66837 - protein, 342 aa, Pseudomonas aeruginosa
MTLPQTMKAAVVHAYGAPLRIEEVKVPLPGPGQVLVKIEASGVCHTDLHAAEGDWPVKPPLPFIPGHEGVGYVAAVGSGVTRVKEGDRVGIPWLYTACGCCEHCLTGWETLCESQQNTGYSVNGGYAEYVLADPNYVGILPKNVEFAEIAPILCAGVTVYKGLKQTNARPGQWVAISGIGGLGHVAVQYARAMGLHVAAIDIDDAKLELARKLGASLTVNARQEDPVEVLQRDIGGAHGVLVTAVSNSAFGQAIGMARRGGTIALVGLPPGDFPTPIFDVVLKGLHIAGSIVGTRADLQEALDFAGEGLVKATIHPGKLDDINQILDQMRAGQIEGRIVLEM

SEQ ID NO: 66838 - protein, 488 aa, Pseudomonas aeruginosa
MSTPATPTSCDILVFGGTGDLALHKLLPALYRLHREDRLPADTRIFALARSALDNAAFLALAERNVRAVVARSEFAAEQWKGFAARLDYLAMDASQSADFGRLARHLKSSEGRVLVHYLATSPSLFAPIAQNLSIAGLAGPQARIVLEKPLGHSLDSARAINQSIGRVFDESRVFRIDHYLGKETVQNLMALRFANALFEPVWRAAHIDHVQISVNETLGVENRGGYYDHAGAMRDMVQNHLLQLLCLVAMEAPVRFDAEAVRNEKLKVLQALKPISGLDVQDKTVRGQYAAGRIGGQEVPAYYFEKNVDNDSDTETFVALQAEVENWRWAGVPFYLRTGKRMARKCSEIVIQFKPVPHSLIDGGGGPANRLWIRLQPEERISVQLMAKTPGKGMQLEPVELDLNLAEALSRNKRRWDAYERLLLDVIEGDSTLFMRRDEVEAAWGWVDPILAGWREHYQSPRPYPAGSNGPEQAQLLLELQGRRWLE

SEQ ID NO: 66839 - protein, 464 aa, Pseudomonas aeruginosa
MTATTLRPELLCPAGTLKSMRYAFAYGADAVYAGQPRYSLRVRNNDFDHAQLAEGIAEAHALGKRFYVVVNIAPHNAKLKTFLRDLEPVVAMGPDALIMSDPGLIMLVRQHFPQMPIHLSVQANAVNWAAVQFWRQQGLTRVILSRELSLEEIEEIRQQVPDMELEVFVHGALCMAYSGRCLLSGYINRRDPNQGTCTNACRWEYKAVEGREDELGNVVAREPTLGRGAPTEQVFLLEEGNRPGEPMAAFEDEHGTYIMNSKDLRAVQHVERLARIGVHSLKIEGRTKSHYYVARTAQVYRQAIDDAAAGKPFDRGLMDTLESLAHRGYTEGFLRRHVHDEYQNYQHGHSLSERQQFVGELTGERRDGLAEVEVKNRFQRGDSVELMTPRGNLSLRVEDLRNAAGEAIEVAPGNGHVVYLALPEGLDLCYALLMRDLQPGQDTRQPQAERSGGCAGKGACGCAH

SEQ ID NO: 66840 - protein, 582 aa, Pseudomonas aeruginosa
MLKLLDLLSAVALLVWGTHIVRTGILRVYGADLRRILSRSVEKRPLAFAAGIGVTALVQSSNATALLATSFVAQGLMALAPALAIMLGADVGTALMARVLTLDLSWLSPLLIFFGVIFFLSRKQTRLGQLGRVFIGLGLIILALQLIVAAAEPMTQAKGVKVLFSSLTGDIMLDALTGALFAMISYSSLAAVLLTATLAASKVISLKVALCLVVGANLGSGILAMLSATAQNAAGRRVALGSLLFKVAGCLLVLPLVGPLADWMDHWQFSTAELVIAFHVLYNAARCLACLPLTNAMASFCTRVMPDRALPDDVARPRHLDPAALDTPSLALANAVRETLRMGDTVEQMLNNLMQIIRGGDPLLGKDIRKLDDDVDALYTAIKLYLARMPREDLSERDSRRWAEIIELAINLEQAGDIIEHMLAAVQDKKTSRSRSFSDTGLEEIGTLYQQLVSNLRLGLSVFLNGDLDSAKRLRRAKQRFRLQERRYAHAHVDRLHQQVVQSIETSSLHLDLISDMKRLNSLFCAIAYAVLDNPDAPSSAADEGTRRDEDDWADEVDDMTSAPLAEPALAEERAETRRSRH

SEQ ID NO: 66841 - protein, 595 aa, Pseudomonas aeruginosa
MSMPLPMKLRTRLFLSISALITVSLFGLLLGLFSVMQLGRAQEQRMSHHYATIEVSQQLRQLLGDQLVILLRETPDGQALERSQNDFRRVLEQGRANTVDSAEQAALDGVRDAYLQLQAHTPALLEAPMADNDGFSEAFNGLRLRLQDLQQLALAGISEAETSARHRAYLVAGLLGLVGVAILLIGFVTAHSIARRFGAPIETLARAADRIGEGDFDVTLPMTNVAEVGQLTRRFGLMAEALRQYRKTSVEEVLSGERRLQAVLDSIDDGLVIFDNQGRIEHANPVAIRQLFVSNDPHGKRIDEILSDVDVQEAVEKALLGEVQDEAMPDLVVDVAGESRLLAWSLYPVTHPGGHSVGAVLVVRDVTEQRAFERVRSEFVLRASHELRTPVTGMQMAFSLLRERLDFPAESREADLIQTVDEEMSRLVLLINDLLNFSRYQTGMQKLELASCDLVDLLTQAQQRFIPKGEARRVSLQLELGDELPRLQLDRLQIERVIDNLLENALRHSSEGGQIHLQARRQGDRVLIAVEDNGEGIPFSQQGRIFEPFVQVGRKKGGAGLGLALCKEIIQLHGGRIAVRSQPGQGARFYMLLPV

SEQ ID NO: 66842 - protein, 197 aa, Pseudomonas aeruginosa
MDMFGVAVLIFLVTDPFGNIAVFLAALKGVAPGRRLRVAFRELAFALGLLLLFLTLGEHILSGLGLSREATGIAGGIILFVIAMRLIFPSPQGLLGEVPDGEPLLVPLATPAVAGPSALAMLITLRTTFDGPLWELYLAVVLAWAATALILLQAAFLQRFLGPRGLTAIERLAGMLLIMLSVDMLLDNLRSVLHIAA

SEQ ID NO: 66843 - protein, 225 aa, Pseudomonas aeruginosa
MDFFETMSFANIDWYEIWLASVDTFWMLGGSLLFTVVLGLPLGVLLFLTGPRQMFEQKAVYTLLSLVVNILRSLPFIILLIVMIPLTVLITGTSLGVAGAIPPLVVGATPFFARLVETALREVDKGIIEATQAMGASTRQIIWNALLPEARPGIIAAITVTAITLVSYTAMAGVVGAGGLGDLAIRFGYQRFQTDVMVVTVVMLLILVQILQTVGDKLVVHFSRK

SEQ ID NO: 66844 - protein, 260 aa, Pseudomonas aeruginosa
MKKLLAAFSAVAALGLTAAQAAESLTVAATPVPHAEILNVVKPLLAKEGVDLKIKEFTDYVQPNVQVSEKRLDANFFQHQPYLDEFNKAKGTDLVAVTGVHIEPLGAYSSKYKKLDELPSGATVVIPNDATNGGRALLLLDKAGVIKLKDNKSITATPKDIVDNPKNIKIRELEAATLPRVLTQVDMALINTNYALEAKLNPTKDALAIEGSDSPYVNILVARPDNKDSDAMQKLAKALHSAEIKQFIQEKYKGAVVPAF

SEQ ID NO: 66845 - protein, 567 aa, Pseudomonas aeruginosa
MHHTPLLTTLAAGFVLAFLFGALANRLRISPLVGYLLAGVLAGPFTPGYVADQALSQEIAELGVILLMFGVGLHFSLKDLLSVKAIAIPGALVQIGVATLLGIGLAKLLGWSFGGGLVFGLSLSVASTVVLLRALEQRQLLDTKRGRIAIGWLIVEDLAMVLTLVLLPALAGTLGGKTDGGDAGLLWPLLITLGKVAAFVALMIFGGRRVVPWVLERIAASGSRELFTLAVLAIALGIAYGSAVLFGVSFALGAFFAGMILNESELSHEAAENSLPLRDAFAVLFFVSVGMLFNPMILLQEPLTVLATFLVIVFGKSVAAYLIVRAFGHPNSTALVIAASLAQIGEFSFILIGLGIGLELVPEQSRDLVLAGAILSILVNPLLFIAIDRLQQRKEQRLAEAAGGVREMPAQDLPPPILEREHAVLIGHGRVGGLVSARLRTAGTPFVVVVDKRDKADELREQGYSVVLGNAASPGVLELANIAEARWLLIAIPNGFEAGQIASHARAVNPPLDIVARAHFDAEVDYLEQNGANLVIMGEREIACGMVHRLGLDRDERGADAPLPQSA

SEQ ID NO: 66846 - protein, 246 aa, Pseudomonas aeruginosa
MQLQPDAFPASGATGDPELTMAENLQERLYQRLREDLLAGRFQPGERLKIRDLANQWDTSPMPVRAALQRLVAEGALEGEAQRSLRVPLMTRERFLQILQVRLSLEGLAAESASGRLDEQALEGLEGCLRRMEDALRRREVQAYLDANSEFHLTLYRACGNPVLLRLIETLWLQVGPFFNRLFTEADLSLRLNDFHEDALDALRRGDGPAARAAIEQDLAYFGQYLLNLLELEARPRKRHRSGEHA

SEQ ID NO: 66847 - protein, 298 aa, Pseudomonas aeruginosa
MNALTLPDIARQTTTADLPLDWVGMQGIALPVQIGGQRVAAEADAGVSLDDPQARGIHMSRLYLALAELEQGELDLSCLRAVLQRFLDSHAGLSRRAYLRLRLAPLLRRPALVSPLSGWKRYPLVLDTRLEGDDFQAEVHLELTYSSTCPCSAALARQLIQERFDQDFAGQPLDHASVLAWLGSSAGIVATPHSQRSSAHLRIGLAEDCIGLPLEELADLGESALGTAVQTAVKRADEQAFALANGQNLMFCEDAVRRLHRALQGYPQASRFSIRVVHAESLHAHDAVAESHWQRGAA

SEQ ID NO: 66848 - protein, 611 aa, Pseudomonas aeruginosa
MCGIVGAIAERNITPILIEGLKRLEYRGYDSAGVAVFDNEGRLQRCRRVGKVASLEEGLAGTPLLGRLGIAHTRWATHGAPTEGNAHPHFSSDEVAVVHNGIIENHEPLRERLKGLGYVFTSQTDTEVIVHLLHHKLQSIGDLTLALKDAVKELHGAYGLAVISAAQPDRIVAARSGSPLVIGLGLGENFLASDQLALRQVTDRFIYLEEGDIAEIRRDSVRLWDVQGNDVQRETVQYHEGAEAADKGEYRHFMLKEIHEQPSVVQRTLEGRLGQNQVLVESFGPQAAELFAKVRNVQIVACGTSYHAGMVARYWLESLTGIPCQVEVASEFRYRKVAVQPDCLFVTISQSGETADTLAALRNAKELGFLSSVAICNVATSSLVRESDLTLLTQAGPEIGVASTKAFTTQLVALLLLTLGIGQVQKRLADGVEAELVDELRRLPTRLGEALAMNRTVEKVSELFAEKHHTLFLGRGAQFPVALEGALKLKEISYIHAEAYPAGELKHGPLALVDSDMPVVTVAPNNELVEKLKSNLQEVRARGGELVVFADEGAGIEAGEGTHVVGMPHIGDVLSPILYTIPLQLLSYHVAVLKGTDVDQPRNLAKSVTVE

SEQ ID NO: 66849 - protein, 454 aa, Pseudomonas aeruginosa
MSLEIVILAAGQGTRMRSALPKVLHPIAGKPMLGHVIDCARQLQPERIHVVIGHGADLVRERMAADDLNFVLQAEQLGTGHAVAQALPFLSADQVLILYGDVPLIQLDTLQRLLAQVTPDQLSLLTVDMLDPTGYGRIVRDDQGAVQAIVEHKDATPAQRQIGEINTGILAVPGKRLADWLGRLSNDNAQGEYYLTDVIAMAVGDGLVVASAQPLDAMEVQGVNDRMQQAQLERHYQRLRAEELMRQGVTLLDPQRLDVRGEISVGRDVLIDVNVVLEGRVVIEDDVRIGPNCVIRDSVLRRGAVIKANSHLEGAELGEGSDAGPFARLRPGSVLGARAHVGNFVELKNARLGEGSKAGHLSYLGDAELGANCNIGAGTITCNYDGANKFRTELGDDVFIGSNNSLVAPLKIGDGATTAAGSTITHEVPAKNLAFGRARQKNLENWKRPEKIKK

SEQ ID NO: 66850 - protein, 514 aa, Pseudomonas aeruginosa
MQQLNPSEISEIIKGRIEKLDVASQARNEGTIVSVSDGIVRIYGLADVMYGEMIEFPGGVYGMALNLEQDSVGAVVLGEYQGLAEGMNAKCTGRILEVPVGPELLGRVVDALGNPIDGKGPIDAKATDAVEKVAPGVIWRKSVDQPVQTGYKSVDAMIPVGRGQRELIIGDRQIGKTALAVDAIINQKDSGIKCVYVAIGQKQSTIANVVRKLEENGALANTIVVAASASESAALQYLAPYSGCTMGEYFRDRGEDALIVYDDLSKQAVAYRQISLLLRRPPGREAYPGDVFYLHSRLLERASRVSEEYVEKFTNGAVTGKTGSLTALPIIETQAGDVSAFVPTNVISITDGQIFLESAMFNSGIRPAVNAGISVSRVGGAAQTKIIKKLSGGIRTALAQYRELAAFAQFASDLDEATRKQLEHGQRVTELMKQKQYAPMSIAEMSLSLYAAERGFLQDVEIAKVGSFEQALISYFQREHAALLAKINEKGDFNDEIDAGIKAGIEKFKATQTW

SEQ ID NO: 66851 - protein, 178 aa, Pseudomonas aeruginosa
MAELTTLARPYAKAAFEYAQAHQQLADWSAALGVLAAVSQDDTVRQLLKEPQLTSSAKAQSLIDVCGDKLNAPAQNFVRTVAENKRLELLPTIAEMYEQLKAEQEKSVEVEVTSAFTLSKEQQDKLAKALSARLSREVRLHASEDASLIGGVIIRAGDLVIDGSVRGKLAKLAEALKS

SEQ ID NO: 66852 - protein, 156 aa, Pseudomonas aeruginosa
MNINATLIGQSVAFFIFVLFCMKFVWPPVIAALQERQKKIADGLDAANRAARDLELAHEKAGQQLREAKAQAAEIVEQAKKRANQIVDEARDQARTEGERLKAQAQAEIEQELNSVKDALRAQVGALAVTGAEKILGASIDANAHEQLVSKLAAEI

SEQ ID NO: 66853 - protein, 85 aa, Pseudomonas aeruginosa
METVVGLTAIAVALLIGLGALGTAIGFGLLGGKFLEGAARQPEMVPMLQVKMFIVAGLLDAVTMIGVGIALFFTFANPFVGQIAG

SEQ ID NO: 66854 - protein, 289 aa, Pseudomonas aeruginosa
MAAETASGYIQHHLQNLTFGRLPNGDWGFAHTAEQAKEMGFWAFHVDTLGWSVLLGVVFLFIFRLAAKKATSGQPGGLQNFVEVMVEFVDTSVKDTFHGRNPLIAPLALTVFVWIFLLNLIDLVPVDYLPMLAAKITGDEHLFFRAVATTDPNATLGLSISVFALIVFYSIKVKGIGGFLGELTLHPFSSKNIVVQILLIPVNFLLEFVTLIAKPVSLALRLFGNMYAGELIFILIAVMFGSGMFLLSALGVALNWAWAVFHILIITLQAFIFMMLTIVYLSMAHEDNH

SEQ ID NO: 66855 - protein, 214 aa, Pseudomonas aeruginosa
MSAVTQHHADELARGADELGVALDADKQRQLLAYLALLIKWNKAYNLTAVRDPDEMVSRHLLDSLSIVPYAEAGDNWLDVGSGGGMPGVPLAILFPEKRLTLLDSNGKKTRFLTQVKLELKLANLEVVHSRVEAFRPESPFDGIVSRAFSSLEDFANWTRHLGGQETRWLAMKGVHPNEELAALPEDFRVEAEHALAVPGCQGQRHLLILRRTA

SEQ ID NO: 66856 - protein, 630 aa, Pseudomonas aeruginosa
MDFPTRFDVIVIGGGHAGTEAALAAARMGVKTLLLTHNVETLGQMSCNPAIGGIGKSHLVKEIDALGGAMAEATDKGGIQFRILNSRKGPAVRATRAQADRVLYKAAIRHTLENQPNLWIFQQACDDLIVEQDQVRGVVTQMGLRFHADNVVLTTGTFLGGLIHIGLENYSGGRAGDPPSIALARRLRELPLRVGRLKTGTPPRIDGRSVDFSVMTEQPGDTPIPVMSFLGSKEQHPEQVSCWITHTNARTHEIIAANLDRSPMYSGVIEGIGPRYCPSIEDKIHRFADKESHQVFLEPEGLTTHELYPNGISTSLPFDVQLQIVRSIRGMENAHIVRPGYAIEYDFFDPRDLRYSLETKVIGGLFFAGQINGTTGYEEAGAQGLLAGANAALRSQGKDSWCPRRDEAYIGVLVDDLITLGTQEPYRMFTSRAEYRLILREDNADLRLTEKGRELGLVDDRRWAAFEAKREGIEREEQRLKSTWVRPNTPQGDAIAERFGTPLTHEYNLLNLLSRPEIDYAGLVEITGNAVDNPQVAEQVEIRTKYAGYIDRQQEEISRLRASEDTRLPVDIDYLGISGLSKEIQNKLNQARPETLGQASRIPGVTPAAISLLLIHLKKRASGRQLEQSA

SEQ ID NO: 66857 - protein, 578 aa, Pseudomonas aeruginosa
MDIQRSILIVALAVVSYLLVLQWNKDYGQPELPAASASMNTTQGLPDTPSASGTSSDVPTAQSSAAGSEAADKPVAVSDKLIQVKTDVLDLAIDPRGGDIVQLGLLQYPRRLDRPDVPFPLFDNGRERTYLAQSGLTGADGPDASSAGRPLFRSAQSSYQLADGQNELVVDLSFSHDGVNYIKRFTFHRGLKADCSDKEKAQKKIECINENAYQVGVSYLIDNQSGKTWSGNLFAQLKRDGSADPSSTTATGVSTYLGAAVWTPDSPYKKISTKDMDKEQFKESVQGGWVAWLQHYFVTAWVPTKGEQHQVMTRKDGQGNYIVGFTGPTLSVPAGSKVETDLTLYAGPKLQKHLKELSPGLELTVDYGFLWFIAQPIFWLLQHIHSLIGNWGWSIIALTVLIKLAFFPLSAASYRSMARMRAVSPKMQAIKEQHGDDRQKMSQAMMELYKKEKINPLGGCLPILVQMPVFLSLYWVLLESVEMRQAPWLGWITDLSVKDPFFILPIVMGGTMLIQQMLNPTPPDPMQAKVMKLMPIIFTFFFLWFPAGLVLYWVVNNCLSIAQQWYITRKIEAAAKTA

SEQ ID NO: 66858 - protein, 135 aa, Pseudomonas aeruginosa
MVSRDFDRDKRLLTARQFSAVFDSPTGKVPGKHVLLLARENGLDHPRLGLVIGKKNVKLAVQRNRLKRLIRESFRHNQETLAGWDIVVIARKGLGELENPELHQQFGKLWKRLLRNRPRTESPADAPGVADGTHA

SEQ ID NO: 66859 - protein, 44 aa, Pseudomonas aeruginosa
MKRTFQPSTLKRARVHGFRARMATKNGRQVLSRRRAKGRKRLTV

SEQ ID NO: 66860 - protein, 232 aa, Pasteurella multocida
MRLDKFLAENTGLTRSQANKVLKQSAVTVNGHVEKNGAQKVSQTDEICLEGEHLPWVSAGQYLMLYKPQGYVCSHEDGDYPTIYQFFDYPLAGKLHSAGRLDVDTTGLVLLTDDGKWSHRITSPKHHCEKTYLVTLADPVESHYQQACAEGMLLRGEKTPTKPATLEILDDYNVNLTISEGRYHQVKRMFAALGNKVVGLHRWKIGQIELDDRLAEGEYRSLSAEEIATFNK

SEQ ID NO: 66861 - protein, 398 aa, Pasteurella multocida
MNQHKRSTVSGLFIMTLALLSMLPPLGVDMYLPAFLLIAQDLSITPEQVQHTLTLFALGMAVGQLFWGPFGDSYGRKPIILLGVSISAIAALMLTATYSIGHFTTLRFLQGFFGAAPVVLVGAILRDLFHKNELSKIMSTITLVFMIAPLLAPIIGGYLVLWFHWHTIFYVIAVMGILCCLLTFFVVPETHQKGNRQPLHLRIISRNFFSLWQQKEVLGYMFSSAFGFGGLFAFITAGSIVYIGLYGVAVENFGYFFMLNIGVMIFSSFLNRRWVTKLGAETMLRLGLSVQFIAAVALVCISLFDLGFWPMALCCAIFVGQNPLISSNAMASILEKFPTIAGTANSMVGSVRFGTASLVGSLVAVMEMKTAAPMLFTMAFCSVMAIGCYYFLTYRSLK

SEQ ID NO: 66862 - protein, 221 aa, Pasteurella multocida
MIFLAIIKRELQIAMRKQAEILNPLWFFLLVITLFPLVIGPDPKLLARIAPGIAWVAALLSALLSFERLFRDDFVDGSLEQLMLTAQPLALTALAKVIAHWLLTGLPLILLSPIAALLLSLEVEIWWALVLTLLIGTPVLSCLGAIGVALTVGLRKGGVLLSLLVVPLFIPVLIFSASVLEAASLSLPYSGQLAILGAILAGSVTLSPFAIAAALRISLDQ

SEQ ID NO: 66863 - protein, 208 aa, Pasteurella multocida
MKLVQVQHPLVKHKLGLMRSAEINTKKFRELATEVGSLLTYEATADLETEKVIIDGWCGPVEIDQIKGKKVTVVPILRAGLGMMDGVLEHVPSARISVVGMYRDEETLEPVPYFQKLASDLEERLAIVVDPMLATGGSMIATIDLLKAKGCKHIKVLVLVAAPEGIKALEAAHPDIELYTASVDSHLNEQGYIIPGLGDAGDKIFGTK

SEQ ID NO: 66864 - protein, 407 aa, Pasteurella multocida
MNNYSDVIILGAGAAGLFCASQAAKLGKQVTLLDNGKKIGRKILMSGGGFCNFTNLEVTPQHYLSQNPHFVKSALARYTQWDFIAMVASYGIAYHAKELGQLFTDEGAEKIVDMLATECANYQVNIQLRQQVSDIRQLNQADAEQGRKGRFALLANGTTWYCDALVIATGGLSMPGLGATPFGYQVAEQFGIKVLPPRASLVPFTWREADKVYTTLSGVALPIVVTANCGKSFSNQMLFTHRGISGPAILQISNYWQPNESVEINLLPHQDIVEFLQQLRTTSPKLQLKNALARVLPKKLVEVWSEQQLIQDEPIAQLSKVRLQQLSDLIHHWQFLPNGTEGYRTAEVTMGGVDTRAVSSKTMEAQSVKGLYFIGEVLDVTGWLGGYNFQWAWSSAYACAMALVDDN

SEQ ID NO: 66865 - protein, 484 aa, Pasteurella multocida
MSKCPFDHGSKTLTNAAGAPIVENDNTMSAGPKGPLLLQDVWFQEKLAHFARERIPERVVHAKGSAAYGTFTVTHDISKYTKADLFNGIGKQTQVLLRFSTVAGERGAADAERDVRGFALKFYTEQGNWDLVGNNTPVFFIRDPLKFPDFIHTQKRNPQTNLRDANAAWDFWSRHPESLHQIMILFSDRGIPTDLRHMNGYGSHTYSFINAQNERFWVKFHFKTQQGHKFYTNEEAAKVVGENRESSQQDLYEAIERGEFPRWNVQVQIMPEADAHKHNYAFDLTKVWPHKDYPMIEVGVLELNQNPINYFAEVEQAAFAPSNIVPGIGFSPDRMLQGRLFSYQDAQRYRLGVNHHQIPVNAPKCPYHTTHRDGAMRVDNNGGTHPNYAPNRFDTYVPTHQQEPALELERSAAHFNFREYDEDYYTQPAALYNLFDVDQKARVAANFAAGLAGVTEPAIVERQLAHFDKVSKELADAIRANLAK

SEQ ID NO: 66866 - protein, 1159 aa, Pasteurella multocida
MSEPRFVHLRVHSDFSMINGIAKVKPLIKACVDNHMVAMGLTDFTNFCGLVRFYGEALSAGVKPIIGADVLVRSELCGDEPFELTLLAKNNIGYHNITLLLSKAYERGYQDLPYLDQAWLAEHREGIIVLSGGHNGDVGKKLLKGHAAEIESAVAFYQDFFPDHFYLSLSRTGRYEEERYVSLALTLAEEKGLPVVATNDVLFLHEDDFEAHEIRVAIHDSYTLDDPKRPKLYTNQQYFRSEQEMCDLFADVPSALENTLLIAQRCNVTIRLGEYFLPQFPTGDLSTEDFLVKKSKEGLEERLKFLFPDEKVRQARRPEYDERLQVELDVINQMGFPGYFLIVMEFIQWSKDNDIPVGPGRGSGAGSLVAYALKITDLDPLEFDLLFERFLNPERVSMPDFDVDFCMDGRDRVIDHVAETYGRGAVSQIITFGTMAAKAVIRDVGRVLGHPYGFVDRISKLIPPDPGMTLAKAFAAEPQLQAVYDSDEEVKALIDMARKLEGVTRNAGKHAGGVVISPGLITDFSPLYCDSEGKHPVTHFDKNDVEYAGLVKFDFLGLRTLTIIKWALDMINTRLAKEGKPPVDIATIPLDDPASFELLKRSETTAVFQLESRGMKDLIKRLQPDCFEDIIALVALFRPGPLESGMVQNFIDRKHGNEVVAYPDPEYQHDSLKPILEPTYGVIVYQEQVMQIAQELAGYTLGGADLLRRAMGKKKPEEMAAQREIFEKGAIQKGVDGELAMKIFDLVEKFAGYGFNKSHSAAYALVSYQTLWLKTHYPAEFMAAVMTSEMDNTDKIVGLYDECLRMGLKVAPPDINTGKHHFSVNEYGEIVYGIGAIKGVGEGPIEALISAREQGGIFKDLFDLCARVDLKKINRRTFESLILSGAFDKLGPHRAALSKNLEDALKASDQHAKDAAMGQADMFGVLTESHEDVEKAYASTPRWSEKVILEGERETLGLYLSSHPISPYLKELAHYSATRLKDLVPNSRGQMSTVSGLLVSSRFAVTKKGNRLGIATLDDRSGRLDITLFGEALDKYADKLQKDTVIIVSGQVSFDEFSGGLKMSVRELMSLDEARSRYAKSLAICLSEENMKPTFIRELKALLTPYSGGTLPIYVYYASTAGQCRVKMGVQWSVNPTDQLFTELAEKLGENAVELEFQS

SEQ ID NO: 66867 - protein, 455 aa, Pasteurella multocida
MISVFDMFKIGIGPSSSHTVGPMKAGKQFIDDLVSRHQLAQVSKLRVEVYGSLSMTGRGHNTDIAIIMGLAGYLPHDVDIELIPQFISTLKQTARLPIAQNTKEVTFNFNDDLIFHQTFLPRHENGMTITALAQDDTELYQQTYYSIGGGFIVDEEHFEHAMHTEISVPFPYQNAADMLKHCDDNGLPLSSVVMKNETALHGKTALSQHLQQVWQTMKACIQHGINTEGLLPGPLKVPRRAASLYRMLQANSSLSNDPMSIVDWVNMYALAVNEENAAGGRVVTAPTNGACGIVPAVFAYYEQFIADSIPDIIERYLLTCSFIGSLYKMNASISGAEVGCQGEVGVACSMAAAGLTEILGGSPEQVCIAAEIAMEHNLGLTCDPVGGQVQVPCIERNAIAAVKAINASRMALRRTTSPRVTLDKVIETMYETGKDMNAKYRETSQGGLAIKVVCS

SEQ ID NO: 66868 - protein, 413 aa, Pasteurella multocida
MATKSCVSWSKFDLVWALNLFGTAVGAGVLFLPINAGKGGFWPLVCMTLLVGPMTYLAHRGLTRFVLSSAKSGSDITEVVEEHFGQTAGKFITLLYFFAIFPILLIYGNGITNTVDSFIVHQLHMNSPNRALLAFILIAGLISVMLMNEKIMLKITEFLVYPLVCILLALSLYLIPEWNTSMLTEFPSTQALFSTLWITIPVLVFSFNHSPAISSFAQSQQREYGDLTNTETHTNRTLKITSSILLVFVMFFVFSCVLSLTPAELAQAKTQNISILSFLANKFDNPYISYLGPFVAFLAITSSFFGHYLGAKEGLEGLIIKMSGKKEIKCQKLNYFTALFFLLTLWIVAIINPSILGLIESFGGPIIAAILFIMPMYAIRKIPAMQRYQGRFSNLFVTIMGMFAISAVVYGLF

SEQ ID NO: 66869 - protein, 564 aa, Pasteurella multocida
MMGSQLQGFFTQLFHLARIFWGDKKNWSSWIILATVIAIGVFIVSLNVMINDWSKHFYDTLAELNVQLILPLIQEYLIYVALYILVSVYRSWLRKLLIIRWRQAMTEHFVERWFSKKIFYKLAQENKMDNPDQRIAEDIHLFAKYSLELTVSFVLNFVQLGSFLMILWNLSGSPTFNLFGYDIVIKGYLVWVAIIYAFLGSVVTHLIGRKLHPLNYSQQVYEATFRGNLVRRHEHAEQIALYGGEQTEKRKLADEFAHIVKNWRAIMDKERNLGFFTVGYSRFSSMLPVLCAIPLLLLKIITFGGLMQIRSAFGTVLSSLSWFIYAYTILPEWSATISRLAQFNREIEQFEKSYCTPQSPKKAMISVENLSLFTSDHQLLLKNIQFSVQEKEWLHLKGQSGLGKSSLLRTLCGIWQYYSGQYQICLKNHLFIPQKTYLNEGNLAELLRYPNQHHYSPQELNQVLNLVGLEKWQNRLEEVLPWHIVLSHGEQQRLAFARILLTKPQLLCLDEATSNLDETSALLLMQLIREQLPNTTVIFTSHQTKISQLADREVDLNSYLPEQN

SEQ ID NO: 66870 - protein, 449 aa, Pasteurella multocida
MSQVATLDAFLERVAQRDGTQPEFLQAVREVFTSIWPFLEANPKYRSQALLERLVEPERVIQFRVAWTDDQGQTQVNRAFRVQYNSAIGPFKGGMRFHPSVNLSILKFLGFEQIFKNALTTLPMGGGKGGSDFDPKGKSDGEVMRFCQALMAELYRHVGADTDVPAGDIGVGGREVGYLAGYMKKLSNQAACVFTGRGLSFGGSLIRPEATGYGLVYFAQAMLAEKGQSFAGKTVSVSGSGNVAQYAIEKALQLGAKVVTCSDSSGYVYDEAGFTTEKLAALMELKNEKRGRVEEYAKQFGLKYVAGKTPWEVKVDIALPCATQNELDLASANTLIANGVQLVAEGANMPTTIEATDAFLDAGVLFGPGKAANAGGVATSGLEMTQSSQRLYWSAEEVDKKLHSIMLDIHANCKKYGTIEGQANINYVVGANVAGFVKVADAMLAQGVY

SEQ ID NO: 66871 - protein, 472 aa, Pasteurella multocida
MVFPWQQIMRSEENRYTAIQSRGKLVVGTINNPISYFIDHAGQAAGLEYELSKAFADYLNVDLEILAMSNGDELFSALKNNKIDIAAANLLYQPNKLDMFQVGPTYNSASWQLVYRKGTERPRSLGELKGSLSIASGSELTELLKVEKEKYPDLIWRVNEKLTPEELLIQMADGKIDYVIANSIDVSAVQQIKPNVAVAFDVTDESTVHWYLPSNSYSELQASLLDFMNSAIETGLIARIEEKYFNHLAQFDYVDTRSYLRAIETVLPKFAPLFEKYKGDLDWCLLAAIAYQESHWNPDATSPTGVRGMMMLTKATAERMRIQDRTDPEQSIKAGSEYLHWLITQMPDTIKEDERIWFALAAYNMGLGHLLDARRLTKSLGGDPDNWLDVKKNLPLLAEKRYYTGLKYGYARGYEAYHYVENIRRYMNSIVHYYRVQQAQIEETLDTQAAEIENINEIKKETDTLATTVTTQ

SEQ ID NO: 66872 - protein, 306 aa, Pasteurella multocida
MNEIKTADNAKTYCGFIAIVGRPNVGKSTLLNKILGQKISITSRKAQTTRHRIVGIHTDGPYQAVYVDTPGLHIEEKRAINRLMNRAASSAIGDVDLIIFVVDGTHWNEDDEMVLNKLRAAKAPVVLAINKIDNIKNKEEMLPFITELTSKFDFAHVVPISAQGGKNIAELEKIVRESLHEGTHHFPEEYVTDRSQRFMASEIIREKLMRFTGDELPYSVTVEIEQFKLNERGTYEINGLILVEREGQKKMVIGNKGQKIKQIGIEARADMERLFDNKVHLELWVKVKSGWADDERALRSLGYMDE

SEQ ID NO: 66873 - protein, 340 aa, Pasteurella multocida
MSNFFLILLLVAGFGVWKVLDYFALPNTFSILLILLTVISGALWCYYRFTVQPRRARQIARAEQRSGKALSDEEKAKIEPISEGGEFLSSLFPVLAFVLILRSFLFEPFQIPSSSMEPTLRIGDFLVVKKYAYGIKDPVFQNTIIETGKPERGDIIVFKAPLQPSVDYIKRVVGAPGDKVQYNEYTRQLTLTYAKDGQECHSDCETKIFSYTEPKENPDFQFLIGRDHKGEYLYGPSPLETTETGDVSHQIHWYPEPISEGFRYKAYRSQSNYVTEWVVPEGHYFVMGDNRNNSEDSRFWGFVPEKNIVGKATYIWLSLDKKQDQWPTGVRFERFFTEIK

SEQ ID NO: 66874 - protein, 321 aa, Pasteurella multocida
MIKKIAVLTSGGDAPGMNAAIRGVVRSALAAGLEVYGIYEGYYGLYHNKVKQMTRYSVSDIINRGGTFLGSARFPEFKDPAVRAKCAEILRSHGIDALVVIGGDGSYMGAKLLTEEHGFPCVGIPGTIDNDVAGTDYTIGYQTALQTAVEAIDRLRDTSSSHQRISIVEIMGRHCSDLAISAGIAGGCEYIVASEVEFNREELIQQIERSIIKGKRHAIIAITELICDVNELAREIESRVKHETRATILGHIQRGGTPCAFDRILGSRMGVYAVDLLMQGKGGYCVGIQNEQLVHHDIIDAINNMRREFKADWLALSKRLD

SEQ ID NO: 66875 - protein, 351 aa, Pasteurella multocida
MSTLLIDLQGQELSQEEVELLSHPLVAGLILFTRNFHDRAQMQALIQSIRQRVKKPLLITVDQEGGRVQRFREGFTQLPAMQAFACLIDDPVQQTNMAQQAGWQMAAEMTALGIDLSFAPVLDLGHQCQAIGDRSFHSQAEMTLNLASAFIDGMHQVGMAATGKHFPGHGHVIADSHLETPYDERPKQQIFAQDIQPFQQLIQQNMLNAIMPAHVIYSQCDPQPASGSAYWLKQVLRQQLGFNGAIFSDDLGMKGAGFMGNFVQRCEQSLQAGCDLLLLCNEREGVIQVLDNLKLSETEPHFALRQQRLQQLFKRKTIRWSELEATSRWLENRKILTALQQRWLDNKANKH

SEQ ID NO: 66876 - protein, 283 aa, Pasteurella multocida
MKHYLELCQRIVDEGVWVENARTGKRCLTVIDADLTYDVANNQFPLITTRKSYWKAAIAEFLGYIRGYDNAADFRKLGTKTWDANANENSAWLNNPHRKGTDDMGRVYGVQGRAWRKPNGETVDQLRKIVNNLRNGIDDRGEIMTFFNPGEFELGCLRPCMHTHTFSLLGDTLYLTSYQRSCDVPLGLNFNQIQVFTFLALMAQITGKKAGKAYHKIINAHIYEDQLDLMKNVQLKRDPFPLPQLHINPEIKTLEDLETWVTMDDFKVTGYQCHDAIKYPFSV

SEQ ID NO: 66877 - protein, 297 aa, Pasteurella multocida
MKDSALIELFLNEIWIEKQLSQNTIASYRLDLTALIQWLEKQQLTLINLDAIDLQTFLGERLNQGYKATSTARLLSAMRKLFQYLYREKYRTDDPSAVLSSPKLPSRLPKYLTEQQVTDLLNSPDVDIPLELRDKAMMELLYATGLRVTELVSLTIENININQGIVRVVGKGNKERIVPIGEEATYWIRQFMLYGRPFLLHGQSSDVVFPSKRALQMTRQTFWHRIKHYALLSDIDINSLSPHVLRHAFATHLVNHGADLRVVQMLLGHSDLSTTQIYTHVAKERLKHLHERYHPRG

SEQ ID NO: 66878 - protein, 388 aa, Pasteurella multocida
MDSEKHTPENQHNPEQSELDLEFSQVEPITPKKMAKPTPSFFDSVKGVFAKKTSHDAALKTTRQAPAFNEATSSSNTQTDLNADELTSEQPTSEDMGAAVVASAVNWKNPETWPFLQILPQRHRRLFVALFGLILLLIIFFALKPSSQTVQSFEQQNSQAVPIQFQPLEKGQTVENTILDNLNQPADNSASATQDNTVTSAVTSETQPTSSASGTESTPTAIAPTKVEQPVAPKMGAADADKPSAVEKVVNEKVTNEKVVTEKPKTVEKPKAVEKAKVPEKPTHIEKAKVEKKVAPVVDANPAKASNSKTLTIPQGVSLMQVFRNHNLNIADVNAMTKASGAGNALSNFKAGDKVQISVNSQGRVNELRLENGAKFIRQADGSYIYKK

SEQ ID NO: 66879 - protein, 510 aa, Pasteurella multocida
MTTPVVALVGRPNVGKSTLFNRLTRTRDALVADFPGLTRDRKYGQANIAGYDFIVIDTGGIDGTEEGVEEKMAEQSLLAIEEADVVLFLVDARAGLTSADIGIANYLRQRQNKITVVVANKTDGIDADSHCAEFYQLGLGEVEQIAASQGRGVSALMEQVLAPIAEKMNAESPEQSAVENTDVSETGEQDEWDHDFDFANEEDTALLDDAIAEELEAQDKNIKIAIVGRPNVGKSTLTNRILGEDRVVVYDLPGTTRDSIYIPMERDGQHYTIIDTAGVRKRGKVHLAVEKFSVIKTLQAIQDANVVLLTIDAREGVSDQDLSLLGFILNAGRSLVIVVNKWDGLNQDIKDQVKSELDRRLDFIDFARVHFISALHGSGVGNLFDSIQEAYACATQKMTTSMLTRILQMATDEHQPPMMGGRRIKLKYAHPGGYNPPIIVVHGNQMDKLPDSYKRYLSNYYRRSLKIIGSPIRLLFQEGNNPFAGKRNKLTPNQLRKRKRLMKFIKKSKR

SEQ ID NO: 66880 - protein, 233 aa, Pasteurella multocida
MTIEQNLAQIQQNIQHAVQQAKRPESAVKLLAVSKTKPVEDIYQAYQAGQTAFGENYVQEGVEKIQYFAQKNIPLEWHFIGPLQSNKTKLVAEHFDWMQTLDRKKIADRLNEQRPHYKKPLNVLIQINISDEDSKSGIQPNEMLDLAKQIQNLPHLCLRGLMAIPAPTDDLATQEQAFTQMHSLFEQLKQALPDAQIDTLSMGMTDDMASAIQCGSTMVRIGTAIFGARDYSK

SEQ ID NO: 66881 - protein, 815 aa, Pasteurella multocida
MRVLKFGGTSLANPERFSQAAQLIEKAHFEEQAAGVLSAPAKITNHLVALSEKASLNQPTDANFNEAIEIFYHIIHGLHAENNRFDLEGTKALIDTEFAQISQLLEEIRQQGFVSDAVKATIDCRGEKLSIAMMKAWFEARGYDVTVIDPVEKLLAHGSYLESSVDIEESTKRVDAKSIPTKNVVLMAGFTAGNEKGELVLLGRNGSDYSAACLAACLGASACEIWTDVDGVFTCDPRLVPDARLLPSLSYREAMELSYFGAKVIHPRTIGPLVQTNIPCLIKNTGNPSAPGSIIDGNIQSEQLQVKGITNLDNVAMFNVSGPGMQGMVGMASRVFSAMSNAGVSVILITQSSSEYSISFCVPAKSVEVAKQALEKEFEQELKANDLEPIDVIRDLSIISVVGDGMKQAKGIAARFFSALAQANISIVAIAQGSSERSISAVVALNKAIEAVKATHQALFNNKKVVDVFLVGVGGVGGELIEQIKHQKSYLAKKDIEIRVCAIANSNKMLLKADGLNLENWQADLETATQPSDFDVLLSFIKLHHVVNPVFVDCTSADSVAGLYVRALGEGFHVVTPNKKANTRELAYYNALRESARNNQRKFLYDTNVGAGLPVIENLQNLLAAGDEVVKFSGVLSGSLSFIFGELENGLTLSEATALAREKGFTEPDPRDDLSGQDVARKLLILARETGAQLELTDIEVESVLPAGFAEGKTTQEFMAMLPQLDAEFSQRVANAKAEGKVLRYVGQIENNSCKVSVLEVDADDPLYKVKNGENALAFYTRYYQPIPLLLRGYGAGNSVTAAGIFADILRTLQH

SEQ ID NO: 66882 - protein, 314 aa, Pasteurella multocida
MLRIYAPASSANLSVGFDTLGTAVSPIDGSLLGDVVQIEALPSGFELESAGYFVRKLPKEAQKNIVYQAYVLFSERLKLRNIAVRPLRLTLEKNMPIGSGLGSSACSIVAALVALNKFHAEPFSKMELLEMMGELEGRISGSIHYDNVAPCYLGGVQLMVQSLGNICQQLPFFDEWYWVLAYPGIEVSTAEARAILPKSYTRQDVISQARHLGSFVHACHTRQAQLAALMMKDVIAEPYREALLPNFADVKQATRDLGALATGISGSGPTIFAIAPDLGTAMKLSTYLENHYLQNNEGFVHICKVDNQGARALD

SEQ ID NO: 66883 - protein, 424 aa, Pasteurella multocida
MNLYNIKHPEEQVNFAQAVRQGLGKNQGLFFPETLPHFEDMDALLALPLVERSQKILSALIGEEISPTQLAKMVENAFTFPAPVAKVEEGVYALELFHGPTLAFKDFGGRFMAQALATVRGEGKITILTATSGDTGAAVAHAFYGLENIDVVILYPQGKISPLQEKLFCTLGGNIRTIAINGDFDDCQALVKQAFDDAELRQAIGLNSANSINISRLLAQVCYYFEAVAQLPKAARDNLVVSVPSGNFGNLTAGLIAKSLGLPIKRFVASTNVNDTVPRYLRSGNWQPHDTVATLSNAMDVSRPNNWPRVEELFKRNGWALSDLHSDAVNDNETEQTLKDMYAKGYLCEPHGAVAYRVLKQDLQPGETGLFLCTAHPAKFKESVERILALELPLPDALAKHAALPLLSDIMENDFAKLRAYLLA

SEQ ID NO: 66884 - protein, 419 aa, Pasteurella multocida
MENVMSLNGSDQDPWGKPGQKKPESQRPDNEGGQPNWNDNQSGRKQNNQEQSPPDIEEIFNNLLKKLGGSGNGGKRNNSHSGGSLNLGKLLPIAAVIGAIVWGVSGFYTVKEAERGVVMRFGELHAIVQPGLNWKPTFIDRVIPVNVEQVKELRTQGSMLTQDENMVKVEMTVQYRVHDPAKYLFSVTNADDSLNQATDSALRYVIGHMSMDDILTTGRSVVRENTWKTLNTIIEPYNMGLEVVDVNFQSARPPEEVKDAFDDAIKAQEDEQRYIREAEAYAREREPIARGDAQRILEEATAYKDRVVLDAKGEVERFERLLPEFKAAPELLRERLYIQTMEKVMANTPKVMLDGNSGNNLTVLPLEQILKGQQTKGKSTNATSEEVRPVFRAETPNVMPTQTSTSSTRQENTRQGRFN

SEQ ID NO: 66885 - protein, 180 aa, Pasteurella multocida
MAKRGKNKIEWDNTDWEQEEEEIIWVSKSEIKRDAEALKKLGEKLVDLTKAKLEKIPLEEKLLEAIELAQRLQKEARRRQLQYIGKLLRNIDVEPIQDALEKLENKHQQQQAMLHKLEMLRDTLIDNPEAITQFLEQHPDADRQHLRNLVRAAQKEKAQNKPPKAYREIFQYLKDFMLED

SEQ ID NO: 66886 - protein, 240 aa, Pasteurella multocida
MKKLLLTALLASTALAANAKEITFAMEPSYPPFELTNEKGEIIGFDVDIANAICKEIQATCHFKGQAFDSLITGLRSKHFDAAISAIDITEARAKQVSFSDPYYDSSSSFISVKGKVDDLAQAKKVGVQNGTTYQQYIVAEAKQYQPVPYASLQNAILDLKNGRIDVIFGDTAVLVDMLAKEQSLAFVGDKVTNKKYFGNGFGIAVNKASKDLLDDLNKGLATIKANGEYQKIYDKWMTK

SEQ ID NO: 66887 - protein, 223 aa, Pasteurella multocida
MFFDYLSLMYTATLMTLGLAVCSLIVGLILSIIFVVLETSKWQWIRKPTSVFVTLLRGLPEILVVLLIYFGSTEVVEMLTGEFIQFSAFSCGVFALSIIFAAYASQSLRGAIQAIPLGQWESGAALGLSRGYTFVQIIMPQVWRHALPGLSNQWLVLLKDTALVSLIGVEDLMRQAELVNTVTHQPFTWYGIAALLYLTITLISQFIIRKLEFRFTRFERGVE

SEQ ID NO: 66888 - protein, 257 aa, Pasteurella multocida
MSLTVEHLQLAYQDKTIVSNLNLRLPSNKVIALIGPNGCGKSTLLKALARLLKPKSGQVKHQEQDIWQITAKSYAKTLAFLPQQHLVPEGIKVRELVAYGRSPYLNLWGKLSEKDEKIVTQAMQITQTDAFAERLATDLSGGQQQRVFLAMTLAQDANIVLLDEPTTYLDLNHQAELMSMMRRLQQQGKTVITVLHDLNQACRYCDYLVVLKQGELIAQGTPHEVMTEHLLKQVFDLNVEIHQDPISFTPMFILKAH

SEQ ID NO: 66889 - protein, 330 aa, Pasteurella multocida
MAANSKPLTRFKIPFYPTALLLLLILFCLSLQLGTYHLSISEIWQILHHPEDANHFTLMEYRLPRALLAILMGSALAVSGVLVQSVVRNPLASPDILGINNAAGLVAVISLIYFPGLAFYWLPIFAFIGGILSFLLLWLICGLHFRPLKMAIIGVALSALWAAASHYLMLSNPVDINSAMLWLTGSLWGRSWSYLLVVLPWLLVLLPLAFLFCRDLDTLALGENKAATLGVSLHKMQIIVLLLSVALATTAVAICGPIAFLGLVAPHFARHLVGGRHRTLLPAALLLGAILLLISDILARIIAPPVEIPAGVLTAILGAPYFFYLLMRTK

SEQ ID NO: 66890 - protein, 298 aa, Pasteurella multocida
MKTVLTSTLALTLLMASQFVSAVTVKDQKGEFTLDSVPKRVVALEYSYVDALAQIGVSPVGVADDNDKTRILQKVRDKVQPWESVGTRSQPSLEAISALKPDLIIADDNRHSAVYEELKKIAPTVVFNSRHENYQENLETAQKIGDLLGKSKEMQARIAKHKQDIADIAKTLPKGKKAIIGVSRETQFNLYNSESYAGGLVEVLGYQMPKARADNQPNASVGLEQVAAEKPDLMILIHYRDESIARKWENEALWKIIPAVKNGQVILANDNLWARARGIDAAEVMAKEVQDFVTKSAK

SEQ ID NO: 66891 - protein, 152 aa, Pasteurella multocida
MFRGASAINLDSKGRIAIPTRYRAEIIEQNAGQMVCTVDIRQPCLLLYPLKEWELVEQKLSALANFDLTHRSLQRVMLGYATECELDSAGRILISGPLRLHAKLEKSLMLVGQLNKFEIWSDAEWHAQIEQDMALGASGQFALSEELKMLSL

SEQ ID NO: 66892 - protein, 321 aa, Pasteurella multocida
MNDKDHFSSPAHITVLLNEAVAGLALKEKGIYIDGTFGRGGHSRLILSRLADNGRLIAIDRDPRAIAEAKTIQDPRFHIEHRSFSDIPRICERLNLVGKVDGILLDLGVSSPQLDEAERGFSFMKDGPLDMRMDTTQGLSASEWLQQVSEQDLAWVLKTFGEERFAKRIAQAIVNYNKQALQHGTEPLSRTLQLAELIANAVPFKDKHKHPATRSFQAIRIFINAELDELESVLKSAVQVLAPQGRLAIISFHSLEDRMVKHFMRKQSKGEDIPKGLPLRDDQIQRTQTLKVIGKAIMPTEQEQQQNPRSRSAVLRVAEKL

SEQ ID NO: 66893 - protein, 601 aa, Pasteurella multocida
MVKFNTTKKIKKVRFAKNDAIKLNKPKMVYENSFLKWRYFSSLLIIIGCLVVLIGKAASVQIINSDTLTDEADKRSLRIQEIQSVRGSILDRHGQLLSVSVPMYSIVADPKDIFDKNSFLDKERWKALAEVLGISYHDMIKRIEKNPKSRFVYLSRQVSPTVADYVRELKLKGVVLKNEARRFYPRVEEVAHLIGYTNIDGDGIEGIEKSFNSMLIGKSGSRTYRKDKFGNIVENIADVKKYDAQDVTLSIDEKLQSMVYREIKKAVAENKAESGTAVLVDVRTGEVLAMANAPSYNPNNRVGVKADFMRNRAITDTFEPGSTVKPFVVLAALQRGAAKRNEVINTGPLVLNGHEIRDVAPRDQLTLDGILEHSSNRGVSRLALRMPPSALMETYMHAGLGKPTDLGLIGEQSGLLNANRKRWSDIERANVAYGYGINATPLQIARAYVTLGSFGIYRPLSITKVDPPVIGQRVYPEKITREVVNMMEKVAIKNKKAMVEGYRVGIKTGTAKKLENGRYVDKYIAYTAGVAPISDPRYALIVLINDPKAGQYYGGAISAPVFSSIMGYALRVNNIPPDAMPQDKMARRVVRLNSDNGTTTN

SEQ ID NO: 66894 - protein, 494 aa, Pasteurella multocida
MRRLTALLGQVELAPNIELTEMILDSRAVKQGCLFVALQGHQVDGRQYIPQAIAKGASAVLAETEDAQQHLSTKIEQGVPIISFYQLGSHLSALAGLFYDNPSHKLTLVGVTGTNGKTTISQLLAQWTTLLGHRSAVMGTIGNGLLGQVKEATNTTGSAVEVQASLADFVKRGADFAAIEVSSHGLVQHRVEALAFDVAIFTNLSRDHLDYHQSMENYALAKKRLFTELNSRHQIINADDSVGQTWLQEQPNAVAVSCQTDFKPHQARWLKATAIQFSQKGARIQFESSWGKGELHSALIGQFNVSNLLLVFATLLSLGYDIEKLMKTVPQLTGVCGRMERLSASNQPTAIVDYAHTPDALEKALQAARLHCQGKLWCVFGCGGDRDRGKRPIMAKIAEQFADHVIVTDDNPRTESAAQIVQDILAGFEHPQHVEVCHARDQAIIQALQKADSDDVVLIAGKGHEDYQIIGTQKQHFSDQETVQQYFKVNHHHA

SEQ ID NO: 66895 - protein, 460 aa, Pasteurella multocida
MLKLTTKQLATILQAELVGEANVVVENISTDTRQRVASSLFFALKGEHFDAHNYLDKAVAQGANALVVERADTQISVPQLIVKDTRIALGELAKWVKQQVNPRTLAMTGSSGKTTVKEMTASILQSAVGVEQVLFTQGNFNNDIGVPLTLLRLTEQHQFAVIELGANHQGEIAYTTGLVQPNVALVNNVAAAHLEGFGSLEGVATAKGEIYRGLQPDGVAIINKEHDYRSTWAQDIGAHRVQYFAYQDNTADFYADNVIFHEAGSTFDLCTPQGKTTIHLPYLGEHNVKNALAASALAMNVGATLAQIKQGLEVRTQVKGRLYPVQPCDNLLLLDDTYNANVDSLQSAIRVLQKYDAFRILVVGDMAELGENSQICHQQVAECAKAAKLERVYSFGSESAVISQACLGKHFTDKALLCRELTQLLSEKLKENQKIVLLAKGSRRMQMEDVINTLRENFVC

SEQ ID NO: 66896 - protein, 360 aa, Pasteurella multocida
MLVWLGEFLQQYYSGFNVISYITVRAILALLTALLVSLWIGPKVIRRLQLLKFGQEVRHDGPESHFSKRGTPTMGGVMILFAITVSTLLWANLANPYVWFSLFVLLGYGAIGFVDDYRKITRKNTDGLIARWKYFWLSVIALVAAFGMYAIGKDTDATRLVVPFFKEIMPQLGLFYIILTYFVIVGTSNAVNLTDGLDGLAIMPTVLVAGAFALIAWATGNVNFAEYLHIPYIKFSAELVVFCTAIVGAGLGFLWFNTYPAQVFMGDVGSLALGGALGVVAVLVRQEFLLVIMGGVFVVETLSVILQVGSYKLRKQRIFRMAPIHHHFELKGWPEPRVIVRFWIISLMLVLVGLVTLKLR

SEQ ID NO: 66897 - protein, 434 aa, Pasteurella multocida
MQTSYKNKKVTVIGLGKTGLSCVDFLLAKQADVRVIDTRTQPAGAEQLAKNVPLHTGSLNQQWLLESDLIIISPGLAVKTPEIQTALAAGIEVIGDIELFCREAKKPIIAITGSNGKSTVTSLVAHMVNAAGLKVGMGGNIGIPALSLLEQAHDMYVLELSSFQLETTYSLKATSATVLNISEDHMNRYVDLEDYRQAKLKIYHHAQTAVINAEDALTAMDGLKNGVSFGEDNADYWLKTEKGRSYLMAKDERVLACDEMKLVGRHNYMNALAAIALAQAAGIPLESIRRALREFNGLDHRFQLAHFAHGVRWVNDSKATNVGSTVAALTGLQLNGTLHLLLGGDGKGADFSELASLINQPNIICYCFGQDGEQLAALSPRSQRFSTMEEAINALRPTLSAGDMVLLSPACASLDQFSSFEQRGDEFTRLAKLS

SEQ ID NO: 66898 - protein, 396 aa, Pasteurella multocida
MPFLDKVKQQYEDWTRITPSNLLYDRALLLLFFVLLLIGLLAVSSASIPVGTRLFKDPFYFAKRDAIYVFLSCVTCYLCVQVPMEKWEQWHVRLFAFAIFLLILVLIPGIGLSVNGARRWIPMVLFNFQPAEFAKLALTCFLASYFTRKYDEVRSRKLSAFKPFALMGLMGLFLLSQPDLGSTVVLFVITFGLLFIVGANFWQFVGLMAFGGLLFVWLVLSSAYRLKRFTGFLDPFKDPYGTGFQLSNSLMAFGRGEWVGEGLGNSIQKLEYLPEAHTDFVMAVVGEEFGFLGILVIVILLGLLIFRAMKIGRESLLLEQRFKGFFAFGISFWIFFQGFVNLGMSLGLLPTKGLTFPLISYGGSSLIIMSMTIGLLLRIDHENRLMRIGQARLRDD

SEQ ID NO: 66899 - protein, 354 aa, Pasteurella multocida
MSEQKKRLLVMAGGTGGHVFPAIAVAQYLQQQGWDICWLGTADRMEAQLVPKHHIPIQFIQISGLRGKGIKALLSAPFSIFRAILQARKIIKAYQPHAVLGMGGYVSGPGGIAAKLCGIPVILHEQNAVAGLTNSWLAKIARRVLQAFPTAFPNAEVVGNPVRQTLFSQPTPEQRFAGREGKLRVLVVGGSQGARVLNQTLPNVVAQLSDKLEVRHQVGQGAVEQVTTLYPEHASVTITEFIDNMADAYAWADIVICRSGALTVSELAAVGAAAIFVPFQHKDQQQYLNAKYLADAGAATIIPQAELTAEKLVSVLTQFDRETLQQMAIKAKAMATPLAAQRVAEVIIEEANQD

SEQ ID NO: 66900 - protein, 482 aa, Pasteurella multocida
MMNSKCGKAFQQRVRDMIPEMRRVRQIHFVGIGGAGMGGIAEVLLNEGYFVTGSDIMESAVTARLTSLGAKIAFSHAAENIDGASVVVVSSAIRADNVEVVAAQERRIPVIQRAQMLAEIMRFRHGIAVAGTHGKTTTTAMISMIYAEAGLDPTFVNGGLVKSAGTNAHLGCSRYLIAEADESDASFLHLQPMVSVVTNIEPDHMETYHGSFEEMKHTYVNFLHNLPFYGLAVLCADDDVLTELTPKVGRQVITYGFSEKADYRIEDYQQTGFQGHYTVITPSGERIDVLLNVPGRHNALNATAALVVAKEEGIGNEAILAALADFQGAGRRFDQLGQFIRPNGKVMLVDDYGHHPTEVGVTIQAARQGWENKRIAMIFQPHRYSRTRDLFDDFVQVLSQVDVLIMLDVYAAGETPIAGADSRSLCRSIRNLGKVDPIFVSDHRQLGEILDQVLQDGDLILAQGAGNVSKIARQLAETWTKE

SEQ ID NO: 66901 - protein, 309 aa, Pasteurella multocida
MKKTLKQEKIAVLLGGTSAEREVSLDSGQAVLNALLSAGFDAHPIDPKTFPVATLKEQGFDRVFNILHGRGGEDGTMQGLLEQIGIPYTGCGVMTSALTMDKMRTKMLWKAFGLPVAEMEIVTKANVGELNPSAVVEKLGLPVMVKPSLEGSSVGLTKVKRVEDLKSAVDFALKYDDTVLIEEWLSGAEFTVPVLDNEVLPSIRIVPEGEFYDYEAKYISDNTQYFCPSGLSAEREDELKQLVKQAYDVVGCRGWSRIDVMLDGNDAFRLVEVNTNPGMTSHSLFPKSAATVGYSFEQLVVKILELSAE

SEQ ID NO: 66902 - protein, 258 aa, Pasteurella multocida
MKGLKRKTTQGVKKSNETKIGMIKNLKLAFLLCCIAVFFYAYANWQQLMDKLDSKPISAFILTGTPTFTTYDDIRDVVLKMGDLKGFFGQDIDAVREQIETMPWIKGAVVRKIWPDKLSIALAEHTPIAIWNDAEFLSSDGAIFQLPFDKLKEKNLPHLSGPDYQSAKVLQAWNQVYLNLKEKGLALKAIAIDDRGAWQIVLDNNLVLKLGRGEWKAKLDRFVTIYPQIEIPENKKLSYVDLRYSVGAAVGFSEADIN

SEQ ID NO: 66903 - protein, 426 aa, Pasteurella multocida
MAKIVESKIIVGLEVGTSKVVALVGELLPDGVVNILGVGSCPAKGIDKGNITDLNAVVTSVQRAIELAESVADCEIISVTLAITGQHIQSWNDSGAAPIADTEVTQEDIDAALHTASSIKMPEGLVVLHRLPQEYAVDQQKNIKNPLGFQGGRLTSNVHLIACHQDWLNNLRQAVERCKLKIDKVIFSGIATSHSVLTEDEKDLGVCLIDFGAGTMEVMVYTNGALRFSKVIPYAGNRVTDDIAYDLTTSRVEAENIKVKYGSAVTPPRQNPEEQFDVMSIDGSVIERCSKTRLSNVTAGRYREILELVKEELIQLKYDLESKQMKFELIAGIVITGGGAQIKDLKECATDVFGLHVRIGNPLNITGVTHLVEKKPQYSTVLGLLQYEYSSNDESPINDAYSNESGFFGSLWSGMKKIAKKVGSEF

SEQ ID NO: 66904 - protein, 434 aa, Pasteurella multocida
MFEPVDYDLGEMDGALIKVVGVGGGGGNAVNHMVANMIKNDIGGTLLDEAVMNSDEHGKIIFYAVNTDAQALRKSQVQQTVQIGGSTTKGLGAGANPNVGRKAAEDDQEAIRAMLEGADMVFIAAGMGGGTGTGAAPIVAQIAKELGILTVAVVTKPFSFEGKKRMLFAEMGIKELSKHVDSLIIIPNEQLAKALPKNATLLQAFSAANDVLRNSVTGISDMITSPGLINVDFADVRTVMSEMGQAMIGFGSCKGTAGEGRAEEATRIAVKSDLLERVDLSGAKGVLVNITSGMDLGLDEFNVVGKTVAEFASQEATVVIGTTLVPEMVDEIRVTIVATGIGDIEAPEMPMPHRQQQPIQHTVGESRPLQPANLSGHPTPSSGYGAQQGHVPPRPTDLTKTSILDTPITARTSNNLQKDENLFNVQNFIRNTDK

SEQ ID NO: 66905 - protein, 305 aa, Pasteurella multocida
MIKQRTLKQSIKVTGVGLHSGNKVTLTLRPAMANTGVIYCRTDLNPPVTFPANANAVRDTMLCTCLVNEEGVRISTVEHLNAALAGLGIDNVIIEVDAPEIPIMDGSASPFIYLLLDAGIEEQNAAKKFIRIKQKVRVEDGDKWAEFTPYNGFRLDFTIDFEHPAIGKDVRNYVMDFSAQAFVQQISRARTFGFMKDIEYLQSQGLALGGSLDNAIVLDDYRILNEDGLRFKDELVRHKMLDAIGDLYMAGYNIIGDFKAYKSGHGLNNKLLRAVLANQEAWEFVTFDDKQAVPHGYEAPTQVLI

SEQ ID NO: 66906 - protein, 295 aa, Pasteurella multocida
MKKLQKLTTLASALMLSLAVSGTALAKETIALAVSTLDNPFFVTLKDGAQKKADELGYKLVVLDSQNDPAKELANVEDLTVRGVKVLLINPTDSEAVVNAVKMANRNKIPVITLDRGAVAGDVVSHIASDNVAGGKMAGDFIAEKLGAGAKVIQLEGIAGTSAARERGEGFKQAIDAHKFDVLASQPADFDRTKGLNVMENLLASKGDVKAVFAQNDEMALGALRAINAANKKVLVVGFDGTDDGVKAVQTGKMAATIAQQPDLIGALGVVTADKVLKGEKVEAKIPVDLKVIHK

SEQ ID NO: 66907 - protein, 322 aa, Pasteurella multocida
MTTQAKPFQFGKFLIEQRSIIALLVLIAIVSMINPDFFSVDNILNILRQTSVNAIIAVGMTFVILIAGIDLSVGSVLALTGAIAASMVSTELPILLVIPVTLLIGTLLGGISGVIVAKGKVQAFIATLVTMTLLRGVTMVYTDGRPISTGFSEGADTFSLLGTGYVFGIPVPIWIMAFVFAASWYVLKHTRIGRYIYALGGNEAATQLSGINVNKIKIFVFAVSGFLSALAGLIVTSRLSSAQPTAGVSYELDAIAAVVVGGTSLMGGKGRVMGTLIGALIIGFLNNALNLLDISSYYQMIAKALVILVAVLADNYLGTKKV

SEQ ID NO: 66908 - protein, 139 aa, Pasteurella multocida
MKKTALLNAPLSQVIATLGHTDSLTICDAGLPIPKQIERVDLALSAGVPSFLQTFHAVVTEMFVERAIIAEEIKEKNPKILTALLNSLAQLEQQQGNQIEVQYVSHDMFKTYTHASKAIVRSGECSPYANIILYSGVPF

SEQ ID NO: 66909 - protein, 470 aa, Pasteurella multocida
MSNKKIGLLSLTALVLSSMIGSGIFSLPQNMAEVAGAQALVIGWIITGIGIIFLGLSFFFISRLRPELDGGIYTYAREGFGDLVGFLSAWGYWLCATIGSVGYLVVAFEGIGLFTDSPNRIIFAQGNTIFAFLGSSLVVWLVHWLITRGVKEAAFLNLLATFVKAFPLVLFIVLAAWFFSPETFNHDIQATNLNHSITDQVKNTMLITLWVFVGVEGAAVLSAHAKKRSDVGLATVLGIVIALILYVAITVLSLGILPREMIANMPNPSMAGLLEHLIGSSGKIIITACLIVSVLASYISWTMYSAEVPYRGAQNGAFPKILNKINENDTPINSLWFTNLVVQFCLVLVLMTGKSYNALLLISTSMILVPYFLIGAYLLKLSIQQNSAWYIKLTGLLASIYGVWILYAAGLDHLLLSILLYVPGIGIYLYSRYQHQGKLHFNQKEKALLLFIAIAFVLAIYNSAVNVNWN

SEQ ID NO: 66910 - protein, 363 aa, Pasteurella multocida
MGFKCGIVGLPNVGKSTLFNALTKAGIEAANYPFCTIEPNTGVVPMPDPRLDALAEIVKPERVLPTTMEFVDIAGLVAGASKGEGLGNKFLANIRETDAIGHVVRCFENDDIVHVAGQINPAEDIDTINTELALADLDSCERAIQRLQKRAKGGDKDAKFELSIMEKILPVLENAGMIRSIDLDKDELQAIKGYNFLTLKPTMYIANVNEDGFENNPYLDRVREIAEKEGAVVVPVCAAIESEIAELDDDEKIEFLQDLGIEEPGLNRVIRAGYKLLNLQTYFTAGVKEVRAWTIPIGATAPKSAAVIHTDFEKGFIRAEVIAYDDFIQYKGEAGAKEAGKWRLEGKDYIVQDGDVMHFRFNV

SEQ ID NO: 66911 - protein, 445 aa, Pasteurella multocida
MSEHIYSVSQLNQTVRVMLENQLRQVWLTGEISNFTQPVSGHWYLTLKDENAQVRCAMFRMKNMRVSFRPQNGMQVLVHASVSLYEPRGDYQLIIESMHPAGEGLLQQQFEALKMQLAAEGLFAQHLKKSLPPFCKSVGIVTSQTGAALQDILQILRRRDPSLQVVIYPTAVQGKEASAEIVQMIELANRRQEVDALIVGRGGGSLEDLWCFNEEMVARAIFHSQLPIISAVGHETDVTIADFVADLRAPTPSAAAELVSRDQQALLQQLVYQRQRLEMALDRLFKQKDDRLQRLRLRLHNQHPQRQLSAQKQLMQQLAHRLDWSMQAVLQQKQAQLRVLWARVEKNPLPFTLQKQKQDLAQLKVRLDVALKRELTFKHHQFAALCTKLDSISPLKVFARGYSIAQNAQGVAITQLKQVSVGERVITRLADGEIVSQVTDLRPRS

SEQ ID NO: 66912 - protein, 288 aa, Pasteurella multocida
MEIIIISGHSGAGKSVALRCLEDIGYYCVDNLPLDLLPQLASILSTNQQSVAISLDIRNLPHSSKTLENLLTEVQQQHQIKLIFLDADRGTLIRRYSDSRRLHPLSTQDLSLEAAIDAERKYLDPLTQHADLIIDTTRLSTHELAERLRDFLCEKSDKALKIIFQSFGFKYGLPLDADYVFDVRFLPNPHWIPELRPLTGLDAPVAEFLNKQNEVNHFIYLTRNYIETWLPMLEQNNRSYLTIAIGCTGGKHRSVYITEQLGEYFQAKGKNVQIQHKSLAKHKKANTQ

SEQ ID NO: 66913 - protein, 241 aa, Pasteurella multocida
MSILYAEHLAKSYKSRQVVSDVSLTVNSNEIVGLLGPNGAGKTTTFYMVVGLVQHDQGKIRIDDEDISLLPMHNRAQRGIGYLPQEASIFRRLSVYDNLMAVLEIRKDLTPEQRRERADELINEFNIDHIRHNLGQSLSGGERRRVEIARALAANPKFILLDEPFAGVDPISVIDIKKIIMDLRDRGLGVLITDHNVRETLDVCERAYIVSAGKMIATGTPEQILNNEQVKRVYLGEEFKL

SEQ ID NO: 66914 - protein, 425 aa, Pasteurella multocida
MQKFRVYGQSRLRGSVNISGAKNAALPILFAAILAQEPVKLTNVPELKDIETTLKILRKLGVVVERDAEGAVHLDASKIDHFVAPYELVKTMRASIWALAPLVARFHRGQVSLPGGCSIGARPVDLHISGLERLGASIILEDGYVKAYVDHCLVGTRIVMEKVSVGATLSIMMAATLAKGKTIIENAAREPEITDTALFLNKMGAKIVGAGTDTITVEGVERLGGCEHSIVPDRIETGTFLVAAAISGGRIECKNTKADTLDAVIDKLREAGAQVDVTENSITLDMLGNRPRAVNIRTAPYPGFPTDMQAQFTLLNMVACGTSIITETIFENRFMHIPELIRMGGKAEIEGNTAICHGVDHLSGAEVMATDLRASISLVLAGCIATGETIVDRIYHIDRGYERIEEKLRGLGARIERFSAQSEES

SEQ ID NO: 66915 - protein, 658 aa, Pasteurella multocida
MFQNNPLLSQLKQQIRDSKQQVEGIVKGSDKAFGFLECDKKSYFIPPAAMKKVMHGDKIKALIEVVGEKEQAEPDALIEPMLTRFIARVRFNKDKKLQVLVDHPQINQAIGAAQDKSITETLQEGDWVVATLKTHPLRDDRFFFAQIQQFICRAEDELAPWWVTLARHGQSRYPVQGCADYPMIDQHTREDLTALHFITIDAETTLDMDDALYLEPIHQAEEQIGWRLVVAVADPTAYIPLDSQIEQEARQRCFTNYLPGFNIPMLPPELSDERCSLMQDEIRPALVCYIETDLTGNITEKPRFVSAYVQSKAKLAYDHVSDYLENCLDAWQPENPQIAQQIQWLHQFTQARIEWRKQHALLFKEKPDYSFILAENGSVQAIQAQYRRIANQMVEECMILANICAAHYLDEHAKCGIFNTHSGFDKKYLESAHQFLLNQLSDETNQAVLATRYSVANLTTLAGYCQMRHDIELLNSDYLELRLRRFLTFAEFKSEIAPHFGLGLSGYATWTSPIRKYSDMVNHRLIKAVLTQQTCEKPQDDLFVRLQEARRQNRLVERDIADWLYCRYLATQVEQKPTFQAEIQDVMRGGLRVQLLANGAPMFIPASLIHDNKEAIQVNTDTLTLSIQGEVKYKLGDIIQVQLLDVKEETRSIVGTLC

SEQ ID NO: 66916 - protein, 260 aa, Pasteurella multocida
MGFLTNKRILIAGVASNRSIAYGIAQAMKREGAELAFTYQNDKLKGRVEEFAKELGSDIVIPCDVGTDESIEQCFAELAKHWEKFDGFVHSIAFAPGDQLDGDYVDAVNREGFRIAHDVSSYSFVAMAKAARGMLNPNSALLTLSYLGAERAIPNYNVMGLAKASLEANTRFMAAALGKDGIRVNAISAGPIRTLAASGIKNFKKMLANFEQTAPLRRTVTIEDVGNSAAFLCSDLSAGITGEVVHVDAGFSIVAMGELE

SEQ ID NO: 66917 - protein, 141 aa, Pasteurella multocida
MFKIAKEFSFDMAHMLDGHDGKCKNLHGHTYKLQVELCGELHQTGPKKGMVIDFSDLKDIVKQHILDPMDHAFIYDCSSEKESKVAHLLQSLDSKTFALPTRTTAEEMARFMFNCLKYEAHLPVSAIRLWETPTSFCEYKE

SEQ ID NO: 66918 - protein, 501 aa, Pasteurella multocida
MSEQTQELDLNGEMLVRREKLAALRAKGNPFPNTFRRDALAQDLHANYDALEGEALKAQEVEVKVAGRIMTRRAMGKATFITLQDMSGRIQLYVARDNLPEGIYADDVGQWDLGDIIGVKGTLFKTKTNELTVRCTEVQLLTKALRPLPDKFHGLSDQETRYRQRYLDLIANEDSRRTFIIRSKVIAGIREYFLSKGFMEVETPMLQIIPGGASARPFVTHHNALDVDMYLRIAPELYLKRLVVGGFERVFELNRNFRNEGVSVRHNPEFTMLEYYQAYADYHDLMDNTEELLRKLAMDILGTTIVPYGELEFDFGKPFERITMHDAILKYGAEKGIVKEDLYDFDRAVAVAKKLGIEVQKSWGLGSLVNVIFEEVAEHHLIQPTFLMAHPAEISPLARRNDENPEVTDRFELFIGGREIGNGFSELNDAEDQNERFDAQVAAKEAGDDEAMFKDEDFVTALEHGLPPTAGEGLGIDRLAMLFANAASIRDVILFPAMKQK

SEQ ID NO: 66919 - protein, 320 aa, Pasteurella multocida
MWNEPEKAQALGKERVALEGVVNTIHTLDQGLEDVEGLLELAIEAEDEATFHEAVAELEELEQQLAKLEFRRMFSGQHDAADCYVDLQAGSGGTEAQDWTEMLLRMYLRWAESKGFKTELMEVSDGDVAGIKSATIKVSGEYAFGWLRTETGIHRLVRKSPFDSNNRRHTSFSAAFVYPEIDDDIDIDINPADLRIDVYRASGAGGQHVNKTESAVRITHIPSGIVVQCQNDRSQHKNKDQCMKQLKAKLYEMELQKKNADKQAMEDNKSDIGWGSQIRSYVLDDSRIKDLRTGVENRNTQAVLDGDLDRFIEASLKAGL

SEQ ID NO: 66920 - protein, 227 aa, Pasteurella multocida
MKKILSTLLMLGMSSLTFANSQQVVEQLQKMGLSGVEVSDSPVKGIKTAVTDNGIFYITEDAKYILDGKLYALSEKGLRDVSSSLLLDKLTAYKNEMVVYPAKDEKHVITVFMDTSCHYCKVLHKQIKEYNDLGITVRYLAFPRGGVQSKTAREMEAIFTAQDPQFALTEAINGNPPKTLKDANITKKHYQLGLQFGVNGTPSIVTEKGELIGGYLKPADLLSELAQ

SEQ ID NO: 66921 - protein, 573 aa, Pasteurella multocida
MNKLIQRRAVPLGEAVSSDPLLDRLYRARQIQHPQQLDRTLAALLHPQQLDGIEAAVTLFVQAYKQQEKIVIVGDFDADGATSTALAVLALRQLGFTQVAFLIPNRFEQGYGLSIAVAEQALEKDVQLLMTVDNGVSSVEGVAFLKAQGVKVLITDHHLPPTQLPDADAIVNPNLSSCAFPSKALAGVGVTFYLMLALRAKFRELGIFNQQTQPNFTDLLDLVALGTIADVVPLDQNNRILAYQGLARIRAERCRCGIRALAEVANRDMRQLSTSDLGFSLAPRLNAAGRLDNMSVGVELLLAEDMASARALALELDGLNQTRKEIEQGMKLEALEICRQLTALQQTLPFGIALYQADWHQGVLGIVASRIKDHFHRPVVAFAQEQAGILKGSARSVEGLHLRDALERIHCLYPDMILKFGGHAMAAGLTIQESRFADFQQAFNQIVGDWLDEGQRQGIVWTDGELDSVQLSLTTAECLKEAGPWGQAFPEPVFDGEFKILQQRLVGEKHLKMMVEPKQGGPLLDAIAFNVDTRYYPDLSIKLAKLAYKLDINEFRGNRHLQLLVDYIVPIGT

SEQ ID NO: 66922 - protein, 229 aa, Pasteurella multocida
MKIGIVGAMAQEVQMLADLMQDKRVTQVASCTIYEGMIHGKAVALLQSGIGKVAAAIGATLLLEMCKPDLVINTGSAGGVATGLNVGDIVISDETVYHDADVTAFGYAKGQLPACPARFQSDEKLVQLAEKIAVQQQQQVKRGLICSGDSFIQGGTPLAQIKADFPTVMAVEMEATAIAQVCHAFNVPFVVVRAISDSGDGEASMSFEEFLPLAAKQSSAMVLEMIDNL

SEQ ID NO: 66923 - protein, 494 aa, Pasteurella multocida
MEYRVKSTALLDIKSNIIIGLYENGELSPSAQKIDEISQGYLSKLIQSGEIKGKLGQVLVLRHVPNYSAERVFVVGAGKKGEINEKQFKQLIQDTINAVKATSAKEVISYLSDIKIKDRDLYWNIRFSVETLETSIYQFEQFKSKKSEQDVALTDVIFSAEGDVAQQAVNHAKAIALGVRAAKDVANCPPNVCNPVYLAEQANALATRSDLIKTTVLGEKDMADLGMNAYLAVSQGSVNEAQLSLIEYRNHPNPDAKPIVLVGKGLTFDAGGISLKPAEGMDEMKYDMGGAASVYGVMNAIAELKLPLNVIGVLAGCENLPDGNAYRPGDILTTMKGLTVEVLNTDAEGRLVLCDTLTYVERFEPELVIDVATLTGACVVALGAHNSGLISTDDKLAKDLELAAAQSTDKAWRLPLGEEYQEQLKSNFADLANIGGRWGGAITAGAFLSNFTDKYRWAHLDIAGTAWLQGANKGATGRPVPLLVQFLINQATGK

SEQ ID NO: 66924 - protein, 323 aa, Pasteurella multocida
MFEQENWQPSASIENLLARAKIIAEIRRFFTDRGLLEVETPVLSEFGVTDVHLSTFNTTFISPTAEKSKALWLSTSPEYHMKRLLAAGSGPIFQLCHVFRNEEAGQRHNPEFTMLEWYRPHFDMYRLINEVDDLLQQILDCKPTESLSYQFVFQEYVGLDPLSAEKAELVAKAKQYHLQQAEQEDRDTLLQFLFSTVVEPNIGKENPVAVYHFPATQAALAQISSEDHRVAERFEFYYKGLELANGFHELTDVNEQLHRFEQDNVQRQKMGLPQRQIDKRLLGALQAGVPNCSGIALGVDRLLMIALGANAIHEVMAFGIENA

SEQ ID NO: 66925 - protein, 868 aa, Pasteurella multocida
MSDFLQSYQQHVDERAALGIVPKPLDAEQTAQLIELLKNPPADKADFLLNLFETRIPAGVDEAAYVKASFLAAVAKRDVQSLLISAEKAVQLLGTMQGGYNIEPLLHALDDETLAPIAVEALSTTLLMFDNFHDVAERAKKGNLFAKQVLTSWANADWFLSRPKLAEKLTVTVFKVTGETNTDDLSPAQDAWSRPDIPLHALAMLKNTRDGIEPDDAGNVGPIKQLEQLKQKGFPLAYVGDVVGTGSSRKSATNSVLWFMGEDIPYIPNKRAGGVVLGGKIAPIFFNTMEDAGSLPIEVDVSELNMGDVIDIYPYQGKICRHDTDEVLAEFSLKTNVLLDEVRAGGRIPLIIGRGLTHKARCELGLPESDIFAKPQCSTESQKGFTLAQKMVGRACGVDGIRPGQYCEPRMTSVGSQDTTGPMTRDELKDLACLGFSADLVMQSFCHTAAYPKPVDVVTHHTLPDFIMNRGGVSLRPGDGVIHSWLNRMLLPDTVGTGGDSHTRFPIGISFPAGSGLVAFAAATGVMPLDMPESVLVRFKGEMQPGITLRDLVHAIPYYAIKQGLLTVEKKGKKNIFSGRILEIEGLENLKVEQAFELSDASAERSAAACTIKLAKEPIIEYLNSNIVLLKYMIAEGYGDARTLERRIKGMEQWLADPQLMEADPDAEYAAVIEIDLAEIKEPILCAPNDPDDARLLSEVQGDKIDEVFIGSCMTNIGHFRAAGKLLAKFKGMIPTRLWIAPPTKMDAALLSEEGYYSIYGKSGARIEIPGCSLCMGNQARVADNATVVSTSTRNFPNRLGQGANVYLASAELAAVSAILGKLPTSEEYLTFAADLQQDKDDTYRYMNFDQINSYTKKADNVIFQSAV

SEQ ID NO: 66926 - protein, 109 aa, Pasteurella multocida
MFGKGGLGNLMKQAQQMQDRMQKMQEEIAQLEVTGESGAGLVKITINGAHNCRRVEIDPSLMEDDKDMLEDLIAAAFNDAVRRAEELQKEKMASVTAGMALPPGFKMPF

SEQ ID NO: 66927 - protein, 200 aa, Pasteurella multocida
MQTSPLLEHLIESLRCLPGVGPKSAQRMAYHLLQRNRNGGMELARALTEAMSKIGHCSHCRTFTEEEVCTICNNPRRQHSGLLCVVEQPSDIQAIEQTGQFSGRYFVLMGHLSPLDGIGPKEIGLHLLQKRLQEESFHEVILATNPTVEGDATANYIAELCMQQNIKVTRIAHGIPVGGELEMVDGTTLTHSFLGRRQLG

SEQ ID NO: 66928 - protein, 650 aa, Pasteurella multocida
MRLFIAEKPSLARAIADVLPKPHQRGDGFIKCGADDYVTWCIGHLLEQAEPDAYDPKFKQWRLEHLPIIPEKWQLIPRKDVHKQLTIVEKLIHQADILINAGDPDREGQLLVDEVFSYANLSVDKLNQIQRCLISDLNPSAVEKAVNKLQSNRNFIPLATSALARARADWLYGINMTRAYTLRGRQAGYQGVLSVGRVQTPVLGLIVRRDLEIENFKPQDFFEVLAHIQAETPEKITALSAQEKANIPQFKALWQPSKACEDYQDEEGRVLSLGLVENVVKRIAQQPAEVVEYVDKREHESAPLPYSLSALQIDAAKRYGLSAQEVLDICQRLYETHRLITYPRSDCRYLPEEHFGERTKVFQAISRHISDYQPLPDILNPEQKNRCWNDKKVEAHHAIIPTAKNTPVNLNQREWQIYHLIARQYLMQFCPDAEYRKSKITLNIAGGTFIAQARNLQVAGWKQLLGKEDSDEQQEPLLPVVKKGQILFCEKGEIVSKKTQPPKPFTDATLLSAMTGIARFVQDKELKKILRETDGLGTEATRAGIIELLFKRGFLYKKGRNIHSTETGRILIQALPDVATQPDMTAHWESQLTSISQKEMSYQQFMSTLTNFLPELMRYVNFAALRQLSQVEKPQSFSKKMSAKSKKRPT

SEQ ID NO: 66929 - protein, 307 aa, Pasteurella multocida
MMLQGAGLGYRRDLAEDFLLLPDNSVVNFMEVAPENWIKMGGAARYKFDQAAERFPLAVHGLSLSLGGQAPLDKALLQGIKALMTQYQAVFFSEHLSYCECDGHLYDLLPMPFTEEAVKHVAQRIREVQDFLGMQISLENTSYYLHSPTSTMNEVEFLNAIAQEANCGIHLDVNNIYVNGVNHGLLNPYVFLDHVDVSRVNYIHIAGHDEEHGAANPISPSDEAFNKIKGEYRHLPQLLVDTHGEAVKSNVWDLLEYAYQRLPHIPPTLLERDFNFPPFAELYAEVEHIAQLQQKHAKLTVENRHAA

SEQ ID NO: 66930 - protein, 160 aa, Pasteurella multocida
MTKKKVKVGTNTIALNKRARHDYFIEDEMEAGLELQGWEVKSMRAGKANISDSYIIFKQGEAYLFGATIQPLNVASTHIVCDPTRTRKLLLKQKELASLFGKANRDGYTIVALSLYWKGAWAKLKIGLAKGKKQHDKREDIKEREWKVTKDRIMKNARLG

SEQ ID NO: 66931 - protein, 88 aa, Pasteurella multocida
MKKGIHPENYRTVLFYDSNAKQGFLIRSCARTTTTMKWEDGHEYPVFMCDTSSASHPYYTGKTRQIANEGRASDFVNRYGKFGTLKSK

SEQ ID NO: 66932 - protein, 420 aa, Pasteurella multocida
MLKRSMNIADYDPVLWQAIQDENRRQEEHIELIASENYASPRVMEAQGSQFTNKYAEGYPGKRYYGGCEYADIVEQLAIDRAKELFHADYVNVQPHSGSQANAAVYGALLQPHDTILGMSLAHGGHLTHGASVSFSGKIYNAVQYGITAEGLIDYEDVRQKALECKPKMIVAGFSAYSQVVDWAKMREIADEVGAYLFVDMAHVAGLIAAGVYPSPLPHAHVVTTTTHKTLGGPRGGLILSAAKDEDLYKKLQSSVFPANQGGPLVHVIAAKAVCFKEALEPEYKVYQQQVVKNAKAMVDVFKQRGYNVVSNGTENHLFLVDLVSHGLTGKAADAALGSANITVNKNAVPNDPQKPFVTSGIRVGTPSITRRGFKEAESAELAGWMCDVLDAMGKDNEAQVIAQTKEKVLAICKRLPVYA

SEQ ID NO: 66933 - protein, 385 aa, Pasteurella multocida
MKYELDKTDGNARRGRLVFERPQGTFTVETPAFMPVGTYGTVKGMTPEEVRATGAEILLGNTFHLWLRPGQEVMRKHGDLHDFMQWHRPILTDSGGFQVFSLGKLRKITEEGVKFQNPINGERIFLSPEKSMEIQYDLGSDIVMIFDECTPYPATFDYAKKSMEMSLRWAKRSRDRFDELGNKNALFGIIQGGVYEELRKVSVEGLVNIGFDGYAVGGLAVGEPKEDMHRILEYVCPQIPADKPRYLMGVGKPEDLVEGVRRGIDMFDCVMPTRNARNGHLFVSDGIVKIRNAKYREDTSPLDPECDCYTCKHYTKAYLYHLDKCGEILGARLNTIHNLRYYQRLMAQIRQAIEEDRFEAFVQEFYAKMGKPVPPMQSEIKSDEG

SEQ ID NO: 66934 - protein, 363 aa, Pasteurella multocida
MRVSDFYFDLPDELIARYPKPDRTASRLLQLNGENGEITHRTFADILDQIHEGDLLIFNNTRVIPARMFGRKASGGKVEVLVERILSDTRFLAHVRSSKAPKEGAELWLGEDKLGEHHGVKMIMVARHDTLFELEIAQKQTALLDVLQQIGHMPLPPYIDRPDEEADKERYQTVYNKVPGAVAAPTAGLHFDDALLAQLKAKGVNFAFVTLHVGAGTFQPVRVEQIEDHKMHAEYVEVPQEVCDAIIATKQAGKRVIAVGTTSVRSVESAALATEEKGEHALITPYFSDTSIFIYPGKTFRVVDCLITNFHLPESTLIMLVSAFAGYRHTMQAYQSAVENRYRFFSYGDAMFISKNPHVNGLD

SEQ ID NO: 66935 - protein, 456 aa, Pasteurella multocida
MTTFTPELLSPAGSLKNMRYAFAYGADAVYAGQPRYSLRVRNNEFNHANLKIGIDEAHALGKKFYVVVNIAPHNSKLKTFIRDLEPVIAMGPDALIMSDPGLIMLVREHFPDMAIHLSVQANAVNWASVKFWKQMGLTRVILSRELSLDEIAEIRQQVPEMEIEVFVHGALCMAYSGRCLLSGYINKRDPNQGTCTNACRWEYSVTEAKEDEIGNIVNVGEEIPVKNVAPTLGEGDTTSKVFLLAESQRPEEQMSAFEDEHGTYIMNSKDLRAVQHVEKLTALGVHSLKIEGRTKSFYYCARTAQVYRKAIDDAVAGKPFDESLMDTLESLAHRGYTEGFLRRHTHDEYQNYDYGYSISERQQFVGEFTGKRNEQGMAEVAVKNKFLLGDEVEMMTPKGNIVFKIERMLNRKNENVEAGLGDGHFVFLDVPEDVQLDYALLMRNLVNTNTRQPHQK

SEQ ID NO: 66936 - protein, 532 aa, Pasteurella multocida
MKKLTKLSLAVLAMTSTAAFAAAPKTFVYCSEASPSYLSPVLGTDGATIDASGQAMFNGLTTFERGTTNVIPALAEKWDVSEDGKTYVFHLRKGVKFHSNKDFKPTRDFNADDVVFSFNRQLDPNHPYHKVSGGSYEYFIGMDMQNIIDKVEKVDDYTVKISLKVPNAPFLANLAMDFASIYSAQYADAMAKAKTPEKLDSAPIGTGPFEFVSYQKDSAVRYKAFENYWQGKAKIDRLVFSITPDASVRYAKLQKGECHAAPYPNPADIAKLKADSNITLLTKPGLNVGYLNFNVQKAPFDNVKVRQALNYAVNKDAIIESVYQGAGQVAKNPIPPTMWSYNDEVKDYAYDPEKAKALLKEAGFENGFETDLWAMPVSRPYNPNARRMAELVQADWEKVGVKAKIVSYEWGEYLKRMRAGDHQTGMMGWTGDNGDPDNFLNTLLSCAAVESGSNYANFCHKEFNDLVTKAAQVTDPAERTALYQQAQLVFKEQAPWITIAHSTTYFPVRKEVKGYVIDPFGLHNFYAVELEK

SEQ ID NO: 66937 - protein, 334 aa, Pasteurella multocida
MFQFILKRLFMVIPTFIAITLITFALVHMIPGDPIEIRMGERGLTPEVHAEMMQKLGLDRPLPEQYFSYVKGVLQGDLGTSFRNNEPVLKEFFTLFPATVELAFFALLWSLILGIFLGVIAAVKKESWISHTVTSLSLTGYSMPIFWWGLILILYFSTPLGLPASGRLPAEYWIEADTGFMLIDTWNSDEPGAFLAAIKSLILPSIVLGTIPLAVITRMTRSSMLEVLGEDYIRTAKAKGLNTTRIVVVHALRNALIPVVTVVGLIIGQLLSGAVLTENIFSWPGIGKWIIDAINSRDYPVLQGSVLIIATLIIIVNLTVDVFYGIVNPRIRHT

SEQ ID NO: 66938 - protein, 326 aa, Pasteurella multocida
MQELERQASLLDAVNLKKYYPVKKGILSKPKLVKAVDGVSFTLERGKTLAIVGESGCGKSTLGRMLTMIEAPTEGELFYKGQNFLENDTATQKLRRKKIQIVFQNPYASLNPRKKIGTILEEPLLINTDLNAKERKQQVLEMMEKVGLKPEFYDRYPHMFSGGQRQRIAIARGLMLRPDIVVADEPVSALDVSVRAQVLNLMMDLQEEMGLSYVFISHDLSVVEHIADEVMVMYLGRCVEQGETKAIFNHPRHPYTQALLSATPRLEAEHRRERIKLTGELPSPLSPPKGCAFHARCRFAMEKCALEKPALKQYEDGSKIACFMLD

SEQ ID NO: 66939 - protein, 531 aa, Pasteurella multocida
MRHVKLARDRRRRKLQIKIAIFFSIILFIVLVVSLGKKEEGQDSSADSQTQTETQIEKQPALSTATVESPSSVQADSTLSPPPSEESVEKQAITEHHTESSAVSMDEKNSDTQVDASSQETTAKPAENTLDATSFYDDLEAKDDEVDEIKPDMLDELAAFPEPVRHALSDLFDVMDQAMRIKNQFSHTVVKGDSLKDVLELSGLDASVSERLIKAYPEFKNLKPGQQFYWILDNQGELEYLNWLVSEREEKIYEKTADGQYQREILKKQSVWKKEVLKGRIDGSFNTALRTLGLDIRQINQLANALQWQINLKRLKKGDKFAVLVTREYIEGKLTGQGNVDGIHIISAGKSYYAIQASNGRYYNRQGETLGKGFARYPLQRQARVSSHFNPYRRHPVTGRIAPHKGVDFAMPVGTPVIAPADGIVEKVAYQANGAGRYIVVRHGREYQTVYMHLSRALVKAGQNVKRGQRIALSGNTGRSTGPHLHYEFHINGRAVNPLTVKLPGTSSGMGTAERKQFLVKAKEIERQLRL

SEQ ID NO: 66940 - protein, 315 aa, Pasteurella multocida
MPDIKLFTGNATPELAKRISERLYLSLGDATVGRFSDGEIQVQINENVRGSDVFIIQSTCAPTNDNLMELIVMVDALRRASAGRITAVIPYFGYARQDRRVRSARVPITAKVVADFLSSVGVDRVLTCDLHAEQIQGFFDVPVDNVFGSPVLVHDMLKKIDMQNPIVVSPDIGGVVRARAIAKLLNDTDMAIIDKRRPRANVAQVMHIIGDVAGRDCILVDDMIDTGGTLCKAAEALKERGAKRVFAYATHAVFSGSAAKNLASDALDEVVVTDTIPLSPEIKALNKVRVLTLSGMLAEAIRRISNEESISAMFT

SEQ ID NO: 66941 - protein, 420 aa, Pasteurella multocida
MKIYLVGGAVRDQLLNLVVKDRDWVVVGATPDDLLSQGYQQVGKDFPVFLHPQTKEEYALARTERKAGSGYTGFICDFSPTISLEQDLSRRDLTINALAQDLDGKIYDFYGGLTDLKQRLLRHVSPAFAEDPLRVLRVARFAARYHALGFTIASETRELMQQLSQSGELSNLTAERVWLETEKALLEPHPEVYFQTLQEVGALQVLFPELAALQGVPNPAKYHPEIDTFVHTMLVLQQAVLLTENTDSDKSAVRFAAICHDLGKALTPKEILPHHYGHEKAGVMPTRRLCQRFKLPHAIQDFAELCCEYHSHIHKAFELRAETILKLFNRLDVWRKPERFKALLLVCIADTRGRTGFEQVDYPQREFLWQLYQSALQVNVQDIIQQGFQQQAIRDELNRRRIIAIKQTRAEILPRFTNPC

SEQ ID NO: 66942 - protein, 420 aa, Pasteurella multocida
MELLNQYGTLLVFITAAFGFFMAFGIGANDVSNAMGTSVGSGTITAKQAIIIAMIFESAGAYLAGGEVTETIKSGIIDPMKFVDTPDILVLGMMAALFASGLWLLIASRMGWPVSTTHSIVGAVVGFACVTVGKEAVEWSTIKNIVGSWFITPVIAGIVAYGIFASTQKLIFDTDEPLKNAQKYGPYYMGITAFILCIVTLTKGLKHIGLHLNGFEVFLISLLIGIISIVVCYFYFRSPNFIQKVQRGTFGGVEKVFSILMLLTACAMAFAHGSNDVANAIGPLSAVVSIVEHGGQILPKTQLAWWILPLGAIGIVMGLVVLGYKVMATIGTGITDLTPSRGFAAQFATAITVVVASGTGLPISTTQTLVGAVLGVGFARGIAALNLNVIRNIIASWIVTLPAGAFFAIIIYYVLSFIFH

SEQ ID NO: 66943 - protein, 356 aa, Pasteurella multocida
MGNEVELKLAVTPKFADLLHQELTNFRILAHNTIFLANTYYDTADRVLAKHKMGLRVRQENQQYTLTLKTDGEVHGGLHIRPEYNVTLPDAQPNISLLVEKYALTLPNYAQWELKPVFSTDFERESWLIECGNGTHIEVAFDQGKIVAGEKQTPICEVEFELKSGLPIDLLRFVQTLTLENEIRLSSASKAKRGYLLANPTSMTVTNWLEKWREFLQFTQNMTSALAKLRALFRLEQDLIEETFAIGADYFAADFLRTVERIGAFFNLYHYYVEQATLLDSALNQQVGEENLACEQTYLLDLLDSHHSLLQQVRELIRLHSESQDNRLVLDKLLGLLQTGHYVKRMIHLTFLTLSN

SEQ ID NO: 66944 - protein, 459 aa, Pasteurella multocida
MAKAPKTAYVCNDCGAEFSRWQGQCAACKAWNTISEVRLVSSSNSAKGDRFSGYAGETRAKIQTLAEISLQETPRFSSGFHELDRVLGGGVVPGSAILIGGHPGAGKSTLLLQVMCGLAQNMTALYVTGEESLQQVAMRAKRLGLPTDKLNMLSETSVEQICQLADQLKPQIIVIDSIQVMHLADIQSSPGSVAQVRECASFLTRYAKTRQVAIIMVGHVTKDGTLAGPKVLEHCIDCSILLEGEADSRYRTLRSHKNRFGAVNELGVFGMTEQGLREVKNPSAIFLSRGEEQTPGSSVMVIWEGTRPLLVEIQALVDHSMLANPRRVAVGLEQNRLALLLAVLHRHGGLQMSDQDVFVNVVGGVKVTETSADLALLLALISSFRNRPLPQDLVVFGEVGLAGEIRPVPSGQERIGEAAKHGFKRAIVPFANRPKSAVPNMDVFTVKKLSDALAILENF

SEQ ID NO: 66945 - protein, 930 aa, Pasteurella multocida
MIKRISEKFTPKQYLLAFFFLVGMLFGVYLIVAWSSYSPLDNSWASSSYIPTTINKAGRFGAWFIDLFFVLFGHVGHIIPFLIFGISFYFWRRKGKVPFSFFRLSLWLLGFSIFLCGVCVLFTLLFSNTPYYLSGGVLGGSLVTAFFPMLDFVGLMLSGTLLALLGFVLCSGTSLIRSCIYFYDWLTMKNPTQTQEEETISTTPVQQELALQEEPSIQSINEGERVFVSEAPSATMDEEKSLINIENLIQIQGLESASQAKESTIPTVPLDDVNQVELGGYAVEPELALPSVSVAFVEDTALSSSEAEHEDSKPFTTQIPHTAGEPLVATEFAMPKVSLSPLDTSLSDNSEIAREDESDLARQFAAQEQQRREEMALRAKALNAEEALQTILAEPEIRQNSTADVSDSTTPHYKPYGESLIHPALQQKVTTQVKPTTPMPSLDLLEHRPSQAHRITQEEIIETSQRIEHQLRNFGVKATVKDVLVGPVVTRYELELQPGVKASKVSSIDTDLARALMFRSIRVAEVIPGKPYIGIETPNVNRQMVTLREVLDSDVFRQSNSLLSMALGKDISGKPVVVDLAKMPHLLVAGSTGSGKSVGVNTMILSLLFRVKPEEVKFIMIDPKVVELSIYDGIPHLLTEVVTDMKKAANALRWCVDEMERRYQLLSALRVRNIEGYNEKIEEYEAMNMPIPNPIWRPGDTMDTLPPALEKLSYIVVIVDEFADLMMVAGKQVEELIARLAQKARAIGIHLILATQRPSVDVITGLIKANIPSRIAFTVASKIDSRTILDQVGAEALLGRGDMLYSGAGSSDLVRVHGAFMSDDEVARVVDDWKARGKPNYIEGILDSGEDEATESNGANSDAGELDDLFDEVVEFVTSTGTTSTSYIQRKFRVGFNRAARIMDQLEEQGIVSAMQNGKREVLARRSSDF

SEQ ID NO: 66946 - protein, 445 aa, Pasteurella multocida
MSNLSFDFAQQAFQPLAARMRPTTFAQYCGQSHLIGEGKPLRKALDAGHVHSMILWGPPGTGKTTLAEIIAHQIHADVERISAVTSGIKEIREAIERAKENRLAERRTILFVDEVHRFNKSQQDAFLPHIEDGTIIFIGATTENPSFELNNALLSRAKVYILKSLSTQEITEVLKQALLDEERGLGKVRFVLEENVLECLAEYVNGDARLALNSLELMADMAEETEAGKALTLSLLKNVLGERQARFDKQGDRFYDAISALHKSVRGSAPDAALYWYARILAAGGDPLYVARRLLAIASEDVGNADPRAMQVALAAWDCFTRVGAAEGERAIAQAIVYLAVAPKSNAVYRAFNQAKQHVKETPDYEVPAHLRNAPTHLMKTLGYGEAYRYAHDEEHAYAAGENYFPEALKDTQYYFPTHRGMEIKIKEKLDWLRQQDQQSKKKRY

SEQ ID NO: 66947 - protein, 428 aa, Pasteurella multocida
MIDPNLLRNNLEEVAEKLKVKRNFVLDVALLSELEEQRKSLQVKTESLQAERNARSKNIGQAKARGEDISALLNEVEHMGIELSTTKAHLDEVLAEINQIVLAIPNLPADEVPLGKDESENLEVFRWGTPKTFDFDVKDHVSLGEGLKGLDFAAGVKLSGSRFVVMKGQIAKLHRALSQFMLDLHTEQHGYTETYVPYLVNHATLYGTGQLPKFGEDLFHTNALEGEQPYALIPTAEVPVTNLVRDEILDEADLPLKMTAHTPCFRSEAGSYGRDTRGLIRMHQFDKVELVQIVAPETSMQVLEELTGQAEKVLQLLELPYRKVLLCTGDMGFGSCKTYDLEVWLPAQNTYREISSCSNMWDFQARRMQARCRSKTDKKTRLVHTLNGSGLAVGRTLVAILENYQNADGTITVPSVLRPYMGGLAQIG

SEQ ID NO: 66948 - protein, 348 aa, Pasteurella multocida
MKKLTGILTASVMMLGVSNYASAANNEVYLYTWTEYVPEGLLDEFTKQTGIKVIVSSLESNETMYAKLKTLGKDGGYDVIAPTSYFVSKMAREGMLKELDHSKLPVIKELDPNMLDRPYDKGNKYSLPQLFGATGIAYNTTNQDPSHFQSWGDLWNAEFKGKVQMLDDPRELFNIALLKMGKDPNTQDPAVLKEAYEELLKLRPNILSFNSDNPASTFISGETDIGLLWNGSIRIAKNEGATVEMIYPKEGTMLWIDNLAIPSNAKNTENAYKLINYLLSTDVSEKLTLNIGYPTSNLEALKRLPKELTDDHATFLTQEVIDRSQWQVDVDNAIDLYEGYYQKLKAAK

SEQ ID NO: 66949 - protein, 358 aa, Pasteurella multocida
MITLNRRMIEMKKFAGLVTAGIMTFGLAANAHATNDTVYLYTWTEYVPDGLLDDFTKETGIKVIVSSLESNETMYAKLKTQGETSGYDVIAPSNYFVSKMAREGMLKELDHSKLPVIKDLNPDWLDKPYDKGNKYSLPQLLGAPGIAFNTDSYKGENFTAWGDLWKPEFKGKVQLLDDAREVFNIALLKLGQDPNTTDPAIIKQAYEELLKLRPNVLSFNSDNPANSFISGEVEVGQLWNGSVRIAKKEQAPLNMVFPKEGPVLWVDTLAIPANSKNPDGAHKLINYLLSAKVAAQLAEEIGYPTSNLKALELLPSEVTQDPAVYPTAEILQNSHWQDDVGDAVELYENYYQQLKAAK

SEQ ID NO: 66950 - protein, 412 aa, Pasteurella multocida
MLNQQQTYKLLERFLHYTTYDTQSKSGAKISPSSAGQLKLAKHLQQELFALGLQDIDISKHSVVTAFLPSNVNPHSPTIGFIAHLDTATQCSGKNVQAEVIENYRGGDIALGVGEEFISPAHYQFLHQLIGKTLVVADGNTLLGADNKAGIAEIMTALAVLKEENLPHCNIRVAFTPDEEIGLGMQFFPVEKFPCDWAYTIDGGEVGELEYENFNAATAIVTIEGVNMHTGSAKDKMINALTLACEFQQGFPAEETPEQTEGKQGFYHLSHFTGHVEKVELQYLIRDFDRDGFEQRKIFIQQLVDRFNQQKRLKKPITLEIKDSYKNMNEVVKTVPQSVELADSAMRECGIEPIHKAIRGGTDGAWLAEQGLACPNVFTGGYNFHSKHELITLEGMQSAVNVITTIVRLATS

SEQ ID NO: 66951 - protein, 372 aa, Pasteurella multocida
MLKNRDLVHKFITKRFTSDRVFRYVVATTNRLKHNIEDTTMLKSTLKKAVSAMIISAAFSFSAWANEPIVIKFSHVVANETPKGQGALMFQKLVEERLAGKVKVEVYPNSSLYGDGKEMEALLLNNVQMLAPSLAKFDKYTKKIQIFDLPFLFDDIEAVQRFEQSEAGKSLLKSMEEKGITGLGYWNNDLKQLSANKELREPKDARGLKFRVQNSEVLDAQFKALKAVPRKMAFGEMYQGLQTGVVNGAENPYSNIYSQKIHEVQKFITESNHGLLSYMVIVNTNFWNSIPEDIRAELSKILDEVSVEVNKKSHDLNLADKQKIIDSKASTIITLTPEQREKWRDAVRPVWKQFEGEIGADLIQAAEASNKK

SEQ ID NO: 66952 - protein, 428 aa, Pasteurella multocida
MSELTAKLTLSDGREYDLPVHKGSLGYDAIDVQSLVKNKLFTFDPGFMSTACCRSEITYIDGDNGVLLHRGYPIAELAKNADYLEVAHLLLFGERPSPEEYKNFTQLVRRHTLVHEQISRFFHGFRRDSHPMAIMCGVSGALAAFYHDSLDINDITHREITAIRLLAKMPTLAAMCYKYSIGQPFMFPQNHLSYSGNFLYMMFATPCEPYIVNPVLERAMDRIFILHADHEQNASTSTVRTAASSGANPFACIAAGIASLWGPAHGGANEACINMLEEIGTVDRIPEFIARAKDKNDPFRLMGFGHRVYKNYDPRAKVMRQTCHEVLKELNIQNPLFDVAMELERIALSDPYFIDHKLYPNVDFYSGIILKAIGIPTSMFTVMFALARTVGWIAHWKEMFKPGNMKIVRPRQLYMGEKERSFEAMDKS

SEQ ID NO: 66953 - protein, 931 aa, Pasteurella multocida
MQKNTPISEWLTSSALGGTNQSYIEELYEDYLRDPDSVDASWQTIFNALPKSHTAVEQPHSQVRDYFKRLARDNSPNGVSVIDPNVSARLVKLLAYVNAHRNRGHLHADLDPLNLWQRMDAPTLDYKYHGFTESDLDETFDLGGEVAHRNQISLRELQDLLQKTYCGTIGLEFMHVNDVEARTWLQNKLESRVTQGFNKEEQLKFLEELTAADGLERYLGAKFPGAKRFSLEGSDSFILLMKEIVRHGKRNGIDEIAMGMAHRGRLNMLVNVLGKKPSELFDEFAGKHNGNGTGDVKYHQGFSSDFMTDDGIVHLVLAFNPSHLEIVSPVVIGSVRARQKRINDHEKAKVLPVTVHGDSAVIGQGVVQETLNMSGTRGYSVGGTIRIVINNQIGFTTSNPHDTRSTEYCTDIAKMIEAPVIHVNGDDPEAVAYAARMAVEYRTLFKRDIFIDLVSYRRHGHNEADEPSATQPLMYDRIKKHPTPRKVYADRLIAQGVINEEAATELVNNYRDALDRGDCVVAEWREMDLTTKDWTKYLSREWCEYESKFDAARFKGLAQKVCEYPAQHELHSRVNKIYADRTLMANGEKLLDWGMAETMAYATLLDEGYHVRLSGEDAGRGTFFHRHSVLHNQKDATLYIPLANLHGSQGRFEVWDSVLTENAVLAFEYGYATTDPKTLTIWEAQFGDFANCAQVVVDQFISSGEQKWGRMCGLVMLLPHGYEGQGPEHSSARLERYLQLCAQQNMQVCVPSTPAQIYHLLRRQMIRKVRRPLVVISPKSLLRHPLAVSTMEELIDGKFQNVIPEVDALDPKHVRRVVMCSGKVYYDLLEQRRKNNQSDVAIIRIEQLYPYPHEEMKQILADYSHVTDYVWCQEEPLNQGAWYCSQHNFVSSIPEHGKLRYVGRPASASPAVGYMSLHNEQQTALVNEALA

SEQ ID NO: 66954 - protein, 289 aa, Pasteurella multocida
MSILINKDTKVICQGFTGGQGTFHSEQALAYGTQLVGGVSPGKGGTTHLGLPVFNTVRDAVDATGATASVIYVPAPGCKDAILEAIDAGIQLVICITEGIPTLDMLQVKQRLNQTGVRMIGPNCPGVITPEECKIGIMPGNIHKKGKIGIVSRSGTLTYEAVKQTTDEGFGQSTCVGIGGDPIPGSNFIDILKLFQDDPQTEAIVMIGEIGGSAEEEAAAFIKDYVTKPVVSYIAGVTAPKGKRMGHAGAIISGGKGTADEKFAALEAAGVKTVRSLAEIGAALKALLK

SEQ ID NO: 66955 - protein, 214 aa, Pasteurella multocida
MKIILLGAPGAGKGTQAQFIMNKFGIPQISTGDMLRGAIKAGTDLGKQAKTLMDAGQLVPDDLIISLVKERVAQADCAKGFLLDGFPRTIPQADALKTVGIQIDYVLEFDVPDEVIVERMSGRRVHQASGRTYHVVYNPPKVEGKDDVTGEDLIIRADDKPETVLDRLKVYHSTTKPLVDYYQAEAKAGNTKYFRLDGTKKVEEVSQELDTILA

SEQ ID NO: 66956 - protein, 388 aa, Pasteurella multocida
MKDLSKMTCLEDLRRVAQRKVPKMFYDYVVSGSWSESTLHANRNDFQAIKLRQRVLVDMEGRSLESTMIGQQVKMPLAIAPTGFTGMVHPDGEIHAARAAEKFGIPFSLSTMSICSIEDVAEHTSAPFWFQLYVMRDREFMRNLIKRAQAAKCSALILTADLQVLGQRHRDIKNGLSAPPKPTLRNWINLATKLEWSLKMLGTQRRTFRNIVGHAKNVGDLSSLTSWTSEQFDPRLSWDDVAEIKALWGGKLIIKGIMEPEDAEMAVKSGADAIVVSNHGGRQLDGALSSIQALPNIVSAVGNEIEVWLDSGITSGQDMLKAWAMGARGFMTGKAFLHGLGAYGEAGVHRLLEIFYKEMDVSMAFTGHRNLKDVTEAILVKGTYPTAN

SEQ ID NO: 66957 - protein, 431 aa, Pasteurella multocida
MLLTQFQAEIAQLPPTQHQFLIGFSGGLDSTALLLLFAKLREKQPHLMLRAIHIHHGLSANADAWVTHCQQICQQVAIPLIVEQVKIDQHKGIEAGAREARYQAIRQHLLPNEMFATAHHQQDQTETFFLALKRGSGLAGLGAMQRKSTLYCLPICRPLLTFTRQMLLDYVKQAGCPWVEDESNTDSRYERNFLRHEVLPRLRQRWPHFDNAVQRSAQHCFEQQQLLNELLHAEFAQHFDKTERTFQLRDFATRSQLKQNALLRLWLAQCGLSMPSKVQLTQLIQDVILAKSDSQPQFQLGEYCVRRYQDTLYLTPHFADLSSLRLPIHIGETLTLPDHLGTLSLQQQAGQLQVIWSHPQHTFTSILPLTEDPIEVRFRYSGKVRLSPTSANKDIKKLWQQHAVPVWLRQRIPLIFYADRFKSAVGYFNAI

SEQ ID NO: 66958 - protein, 317 aa, Pasteurella multocida
MAQEYLDFELPIAELEAKIESLRSVASQDDEINLDDEIARLQKKSAELTKKTFANLDAWQVSKMARHPNRPYTLDYIERIFTEFEELAGDRAFADDKAIVGGLARLDGKPVMVIGHQKGRSVKDKVKRNFGMPAPEGYRKALRLMQMAERFNLPIITFIDTPGAYPGVGAEERGQSEAIARNLREMSTLKVPVICTVIGEGGSGGALAIGVGDKVNMLQYSTYSVISPEGCASILWKSAEKASTAAEVMGLTANRLKELNLIDSIIEEPLGGAHRDFDAMAHNLKQRLLDDLKELEMLDEDNLLHRRYNRLMDYGYC

SEQ ID NO: 66959 - protein, 523 aa, Pasteurella multocida
MNNIHNHKILILDFGSQYTQLIARRVREIGVYCELWAWDVSEADIREFNPTGIILSGGPESTTEENSPRAPEYVFNAGVPVLGICYGMQTMAMQLGGLTETSTHREFGYASVNLKAADALFAQLNDDVTSSQPKLDVWMSHGDKVTRLPDHFQVTAMTSTCPIAAMSDERRRFYGVQFHPEVTHTKSGLELLTNFVVKICGCERNWTPENIIEDAVARLKAQVGDDEVILGLSGGVDSSVTALLLHRAIGKNLHCVFVDNGLLRLNEAEQVMEMFGDKFGLNIIHVKAEDRFLDALKGIDEPEAKRKMIGKVFVDVFDDESKKLTSVKWLAQGTIYPDVIESAASKTGKAHVIKSHHNVGGLPDYMKLGLVEPLRELFKDEVRKIGLALGLPAEMLNRHPFPGPGLGVRVLGEIKKEYCDLVRLADAIFMEELHASGWYYKVSQAFTVFLPVKSVGVMGDGRKYDWVVSLRAVETIDFMTAHWAHLPYDLLGKISNRIINEVNGISRVVYDVSGKPPATIEWE

SEQ ID NO: 66960 - protein, 89 aa, Pasteurella multocida
MSLSTEKKAAIVAEFGRDAKDTGSSEVQIALLTAQINHLQSHFATHKKDHHGRRGLLRMVSRRRKLLDYLKRTNLELYTSTIARLGLRR

SEQ ID NO: 66961 - protein, 682 aa, Pasteurella multocida
MANSARDILVTCALPYANGAIHLGHLLEHIQADIWVRFQRMRGHKVHFICADDAHGTPIMLNADKLGITPEALIARSKADHVADFEGFNISYDNYHSTHSPENEALTAEMYKKLRANGFIKSRTISQLFDPEKGMFLPDRFVKGTCPKCKAEDQYGDNCEVCSSTYSPTELINPRSVVSGATPVLKESEHFFFDLPAFEGMLKAWIKSGSLQPEIANKMQEWFESGLQQWDISRDAPYFGFKIPDTEDKYFYVWLDAPIGYMASFKNLCDKTGLNFDDFWKKDSSAELYHFIGKDIVYFHSLFWPAMLDGCDLRKPTNVFAHGYVTVNGVKMSKSRGTFIQASTYLRHLAPEYLRYYYAAKLNNRIEDLDLNLEDFVQRLNADVVNKFVNLASRSAGFITKRFDGKLSAEIAEPELLAEFVEKAAQIATYYEEREFGKVVREVMQLADKANKYIDDKAPWVMAKEEGREAELQAVCSMALQLFRVLAIYLKPVIPQIIARAEAFLQDELTWESLNRPLLNHAILPFKALAQRLDPKQIEAIVNETKEQFVAQQALEQKNSAKAEPASQVEPIAETISIEDFAKLDLRVAKVMKCEAVPESNKLLRFELDLGDHTRQVFSGIKEAYNNPAELEGRFVVVIANLAPRKMRFGVSEGMILSAGTGGADLFLLNADQGVKPGMQVK

SEQ ID NO: 66962 - protein, 154 aa, Pasteurella multocida
MKLTSKGRYAVTAILDIALNSNRGPVSLSDISERQHISLSYLEQLFAKLRRHGLVKSVRGPGGGYQLGLPANRISVGMVINAVNENIDVTRCLGRGDCQEGTECLTHSLWKELSLRIEAFLNEITLEELVEKNRQKRATIEFRGDFDNLIILDN

SEQ ID NO: 66963 - protein, 128 aa, Pasteurella multocida
MAYSNKVIDHYENPRNVGSLDKKDANVGTGMVGAPACGDVMQLQIKVSEEGIIEDAKFKTYGCGSAIASSSLITEWVKGKSLDEAQAIKNSQIAEELELPPVKVHCSILAEDAIKAAIADYKAKKEAK

SEQ ID NO: 66964 - protein, 246 aa, Pasteurella multocida
MSKLKKTKHPFPCFSIWQQFKRKLYRTFALFLVLFLSSVVLFRFVPVPFSAYMLQQKIGYLFEGNLSSTIHYQWVPLEQISQSMQLAVIASEDQRFATHYGFDWDAIQSALQHNQRGKRIRGGSTISQQTAKNLYLWHGQSWLRKAIEMPTTLVLETLWSKKRILEVYLNIAEFGPNIFGVEAASQHYFRKPAKQLSNAEAALLAAVLPNPIIFKVNKPSAYVKKRQQHIQRQMGLLGKQHLSQLD

SEQ ID NO: 66965 - protein, 147 aa, Pasteurella multocida
MTTHVDTSKSCDTRGTLLLRTLAMPSDTNANGDIFGGWIMSQMDMGGAILAKEIAHGRVVTIAVDSMTFIRPIAVGDVVCCYGKCLSVGRSSIKIKVEVWVKKVASEPIGERYCVTEAVFTFVAVDKEGRPRAVPRENNPELTQALS

SEQ ID NO: 66966 - protein, 184 aa, Pasteurella multocida
MKQLLEFIPLILFFAVYKLVGIREAAITLIIATLIQLLILKIKYGKVEKQQLFMGIAVVFFGTLTAYFNQLEYLKWKVTIVYAIFALVLLVSQYGFNKNLIKLMLGKEDALELPEQVWNRLNLGWALFFLLCMLINLYISQYLSDDLWVDFKTFGILGMTLIATIITGIYIYRYLPQTKSNNKE

SEQ ID NO: 66967 - protein, 204 aa, Pasteurella multocida
MKKTVLALGVMAALVAGSAVAHQAGSVIVRGGPILVVPNASTNHDGFKFDVNSNAQLGLTATYMATDNLGVELLAATPFSHEITLGNTLVGKTKHLPPSLYAQYYFLDKDAKARPYVGAGVNYTTFFSEKAVLNGVTDLKLKDSWGPAFNAGVDIQVADNLFLNTAIWYAKIKSKATFKVGDVEHKVNVKLDPTVFFVGLGYRF

SEQ ID NO: 66968 - protein, 305 aa, Pasteurella multocida
MKHPNTIDIKALQSSFQIIGLLGKPRHDVTLQMHKNLFQWLLEKGYQVLVERPIGEQLGLSENYLASVDEIGQQAQLAIVIGGDGNVLGRARTLAKYDIALIGINRGNLGFLTDIDPKNAYSQLQACLEDGDCFVEERFILEASVERNGKIIARGNAVNEAVVHPAKIAHMIDFHVYINDKFAFSQRSDGLIISTPTGSTAYSLSAGGPILTPQLNAIALVPMFPHTLSSRPLVIDGDSKISIRFAEYNTSQLEVGCDSQVALEFSPDDIVHIQKSPDKLRLLHLKNYNYYKVLSSKLGWLRNSV

SEQ ID NO: 66969 - protein, 406 aa, Pasteurella multocida
MKRAVITGFGIISSIGNNKDEVLASLKAGKSGIEVMPEFVEIGMRSHVAGTVKLNPSELIDRKIYRFMGDAAAYAYLSMKEAIEDAGLTEDQVSNDRTGLVIGAGTGSAHNQLIACDAVRGPRGVKAVGPYAVTKTMASSVSACLATPYKIRGVNYSISSACATSAHCIGHALELIQLGKQDIVFAGGAEELSWECATEFDAMGAVSTKYNDTPEKASRAYDANRDGFVIAGGGAVVVVEELEHALARGAKIYAEIVGYGATSDGYDMVAPSGEGAERCMRQAMATVDTPIDYINVHGTSTPVGDVKELGAIKNVFGDKVPAISSTKSMTGHSLGAAGAHEAIYTLLMLDNDFIAPSINIETLDENAKGCNIVTETVENAGLKTVMSNSFGFGGTNAALIFKKYQA

SEQ ID NO: 66970 - protein, 398 aa, Pasteurella multocida
MTQYNREIFDQVMIQNYVPAQFIPVRGKGSHVWDQQGKDYIDFTSGIAVNSLGHCADEIVDVLKQQSEKLWHSSNWFTSEPTLALATKLVEKTFAERVMFVNSGAEANEAALKLARRYAVDHFGYQKSKIIAFKQSFHGRTLFTVSVGGQAKYSDGFGPKPADIVHVPFNDLAAVQAVMDENTCAVIVEPIQGESGILPASQDFLQGLRELCDQHNALLIFDEVQTGVGRTGYLYAYMKYEVVPDILTSAKALGNGFPIGAMLTTHEIAKSFAPGVHGTTFGGNPLACAVAEKVIDIISAPPFLQKIQRTSEKFMQKLQEINQQCGLFKEIRGEGLLIGAELIEQYHGRASEFVKKAADNGLMILVAGPNVLRFAPALNISEEALALGFERLAKTLHI

SEQ ID NO: 66971 - protein, 330 aa, Pasteurella multocida
MTKQHNLMSIDDIQKLIHRDMQKTNETILAQLNSDVTLINQLGYYIIQSGGKRIRPMIAILAARALGFHGEQPITCATFIEFIHTATLLHDDVVDESALRRGNPTANAEFGNAASVLVGDFIYTRAFQLMTQLDSLRILKVMSDATNVIAEGEVQQLMNVNDPNTTEENYMQVIYGKTARLFEAATHCAAILAHATEAQENALREYGCYLGTAFQLVDDILDYSADAQALGKNIGDDLAEGKPTLPLLHAMHHGNPAQAKLIREAIEQGGKRDILEDVLTIMTEHKSLDYAMMRAKQEAQKAVDAIALLPENEYKQALISLAYLSVDRAY

SEQ ID NO: 66972 - protein, 103 aa, Pasteurella multocida
MYAVFQSGGKQHRVSEGQVVRLEKLEVATGETVEFDSVLMIVNGEDVKIGAPVVAGGKVVAEVVAHGRGDKVKIVKFRRRKHSRKQQGHRQWFTEVKITGIQA

SEQ ID NO: 66973 - protein, 85 aa, Pasteurella multocida
MATKKAGGSTRNGRDSEAKRLGVKRFGGESVLAGSIIVRQRGTKFHAGSNVGMGRDHTLFATADGKVKFEVKGEKNRKYVSIIAE

SEQ ID NO: 66974 - protein, 390 aa, Pasteurella multocida
MKFIDEALIRVEAGDGGNGCVSFRREKYIPKGGPDGGDGGDGGDVYLVADENLNTLIDYRFEKRFAAGRGENGRSAGCTGHRGNDITLRVPVGTRAIDNDTKEVLGDLTKHGAKMLVAKGGYHGLGNTRFKSSVNRAPRQKTNGTPGEKRDLQLELMLLADVGMLGLPNAGKSTFIRAVSAAKPKVADYPFTTLVPSLGVVRVDENHSFVVADIPGLIEGAAEGAGLGVRFLKHLERCRVLIHLVDIAPIDESDPAENISIIESELFQYSEALADKPRWLVFNKIDTMSDEEAHERAQAITERLGWDDDYYLISAVTGKNVQPLCRDIMDFIEANPRHEVEQTADEAEVKFKWDDYHQAQLADHQFEDEDEDWDDWSEEDEEGVETIYKP

SEQ ID NO: 66975 - protein, 94 aa, Pasteurella multocida
MAKQDADCITLDLFANTRKVGRPKTNPLSREQQIRINKRNQLKRDKSIGLKRVELKLHTDLVEQLEDLAANLHVSRSELIVTILQDYFNIQEDR

SEQ ID NO: 66976 - protein, 262 aa, Pasteurella multocida
MSENNLLHFQFHQLKQEINAPTFVFIHGLFGDMNNLGIIARAFSEKYPILRVDLRNHGQSFHHEEMNYTLMAEDLANVIHTLQLEKVILIGHSMGGKTAMKMTALYPHLVEKLIVIDIAPVKYGHHGHDAVFAGLFATKQAKPKTRQEAKHYLAQYIPEEAIQQFMLKSFDANAKEYFRFNLSALHANYPHIMDWQPCHCTVPTLFIRGGQSNYIKTEDTQPILAQFPQATAFTINGCGHWVHAEKPEFVIRAIERFLISNK

SEQ ID NO: 66977 - protein, 1113 aa, Pasteurella multocida
MKKTHLVKKAFFALSLCFMFNAYTFAQLPTPNDIQAQLKVAKSAEQNDTNSKTVVQNLEETLALLAKIDKQKADIKDLEARIDGAAEQTTKAQKRLETLKSTPAPSATQFEKLSLADLQAKLLSTQQALQQIQADATGLNTELVTLRTAPERAQVTLNANLTRVQEINKLLANADTIPSGKVKLETELALLELQNSFNKLLLQGNNVLTTLYTLELEDKNLEVAQLQEQIKNLQDAINQKYLKESQQQVEQLTKSQLENKGTTHPEVASQLEQNVRLSQALVQQTTEMNTLSQDNLRIKNVLNNLQQTQRNIEDQISALQGSLVLSRIINKQKELLPQDEMIAGLSKRITDLRVRIFDLTEMRDNLYDPQSYIAALEKKQQVAFSAQEKASLDSILQERRKLLSDIISLLNNQLNLVINIELNQKQVALISDQLQSKLQQQSFWVKSNAPMDVDWVKQFLPAVQVQVTEIIKQIDFSNWREDLVPAALIIALLLVFTFLIQLQKAKIKQRLTNINQKINTLTSDSQWHTPEAILWTLVLCLPSTFIFTALLVFMVYLCFAEPLNLASWVVSMGGYWCFFAFMLSLLRPNGIAYRHFSMPKESVDRFYRVFGRSVWISALWINASLFTHLETGITNDVIGQVMTISVLFISLLIIGPRIQDAVKSYENSSEDNTKSIHMVLKIGRFFLVAAPIILIVLVVMGYYYTALNLMEHLMSSYFVVVTWLVLKNVIHRGLTVSSRRLSYNRLKEKIEQQAQPKVNTEEELNIGLELQQSESLGIAQVKDQVLRVTDLLLTVILLGMLYWVWSDLVTVAYYLQGVTLWQQSVTTAAGTVMESITLLNLLLAVVILIAMYALVRNIGGLLEVLVFSRVSFSQGTPYTITTLATYFIIAIGAGVAFSTLGMSWSKLQWLFAALSVGLGFGLQEIFANFVSGLIILFERPVRIGDVITIGEYSGTVSRIRIRSTTLIDFDRKEVIVPNKAFVTERLVNWALNDSVTRVVIRVGVGYGSDLELTKRLLLQAATECDRVLKDPEPVVYFLNFGASSLDHELRLYVGKLADRNPTVDCLNRRINSLFEENNIEISFNQLDVFIKNQVTNEEIKLNQQCFPTQKQEG

SEQ ID NO: 66978 - protein, 357 aa, Pasteurella multocida
MAGNTIGQLFQVTTFGESHGIALGCIVDGVPPGLSLSEADIQPDLDRRKPGTSRYTTPRREDDEVQILSGVFEGKTTGTSIGMIIKNADQRSQDYGDIKDRFRPGHADFTYQQKYGIRDYRGGGRSSARETAMRVAAGAIAKKYLREHFGVEVRGFLAQIGDVAIAPQVIEQIDWQQVNSNPFFCPDPSAVEKFDELIRQLKKEGDSIGAKLTVVAENVPVGLGEPVFDRLDADLAHALMGINAVKAVEIGDGFAVVNQRGSAHRDEMTPEGFLSNHAGGILGGISSGQPIVATIALKPTSSITIPGRSVNLANEPVEVITKGRHDPCVGIRAVPIAEAMVAIVLLDHLLRHKAQNR

SEQ ID NO: 66979 - protein, 714 aa, Pasteurella multocida
MSYQVLARKWRPKTFSDVVGQTHILTALSNGLKENRLHHAYLFSGTRGVGKTSIARLFAKGLNCVHGVTAEPCGECEHCKAIEQGNFIDLIEIDAASRTKVEDTRELLDNVQYKPVQGRYKVYLIDEVHMLSRHSFNALLKTLEEPPEYVKFLLATTDPQKLPITILSRCMQFHLKALEQQQIAQHLEFILTQEKIPFEFLALEKLAKAAQGSIRDSLSLTDQAIAMSNGNITLNVVHEMLGLLDDDQALDIIHALQQGQGESVMKGVQAVAEKGGDWDELLRDIGENLHKIAMQQLLPSSQLDDTSRIGFLASHISPEDVQFFYQVMLTGRKELPYAPNRRIGVEMTLLRALAFHPKFVAVAPTHATLVSEQDIGGSSTRHIEVPIVSQNIKSQYKSQVKSTVAAPAQVSPPVEEKVHTHTEETETYSPAFDALAQIDKLDHLTITPQKEKKKHSSSTEALAPRVSLSSDTSSSTLTSLLVIESKPRDTSFIKNKASALSTLSAPETALSSASPLNTPVLQATQHTEPEGEDEDDIIDDTLLAETYRWEWRNPELAKTQEGIKPSALKQRLEQEITPELRAKVIDIARKQDFWTDCVESLDIQNLTKELALNCILLSHDGEVFHLGVRDNKAHLHTTNAQQQLQQALSQLQQQAMNVLISPTDSDNLTPTEWYRQTYKALREKAQQALQQDEKLQLFLHEFSAEIELSTVKPI

SEQ ID NO: 66980 - protein, 441 aa, Pasteurella multocida
MNIYTYICFLSAISIFIGFVTRKLSDKIQYTIAITATSIIVSVLFLIFGHLSWFKLDIIATQVMEQLDFKSFLLNGILGFLLFAGALGIKLPVLKNQKWEITVFALFSTLASTFIIGVLLYSVAYLIGLPIDLIYCILFGALISPTDPIAVLAIIKNLKAPKRLSMQVEGESLFNDGVGLVIFTTIFAVAFGGHAPTLAGITELFLQEAVGGILFGLVIGFVAHLLISSTDDGSLEILLTLTIPTAGFMLANMLHVSGALAMVVAGILIGNWTRHTGFSKQSQLYLDHFWEMIDHFLNSLLFLLIGLALLLVDFGAQGFILLILAIPICLIGRYISVWMPFKVMQRFRSYNPYTLRILTWGGLRGGLSLAMALSIPKGMLYLEHIGMDVRDLLLVMTYAVVTFSILVQGSTIETMIKKSKESILHQRGYVGLHPNKTSSED

SEQ ID NO: 66981 - protein, 750 aa, Pasteurella multocida
MNIINYEGIEQTPLREFTEKAYLNYSMYVIMDRALPFIGDGLKPVQRRIIYAMSELGLNAAAKYKKSARTVGDVLGKFHPHGDSACYEAMVLMAQPFSYRYPLVDGQGNWGAPDDPKSFAAMRYTESRLAKIADILLSELGQGTVDYQPNFDGTLEEPQYLPARLPHILLNGTTGIAVGMATDIPPHNINELAEAAVMLIDNPKASLDDLLTVVQGPDYPTEAEIISSKEDIRKLYEQGRGSVRMRAVWKKEDGEIIITALPHQASPSKVIAQIAEQMSAKKLPMVEDIRDEADHENPIRIVLIPRSNRVDVDALMAHLFATTDLEKSYRVNMNMIGLDNRPAVKNLVQILTEWLQFRRTTVTRRLQYRLNKVLDRLHILQGLLIAYLNIDEVIHVIRHEDEPKAALIDRFGLSETQAEAILNLRLRHLAKLEENELQAEKDRLEEERDSLQLILGSERRLNTLIKKEIQQDAQTYASPRLSPLVQRAEAKAISESDMTPAEPVTVILSEMGWVRCAKGHDIDVQNLSYKAGDKYLSHAYGKSNQAAVFIDSTGRSYALDPLSLPSARSQGEPLTGKLSLPAGASVEHVLMEQDKQALLMASDAGYGFICQFDDLIARNKAGKALISLPENAKVLTPLRIDNENARLVALTSAGRMLIFPVKDLPSLAKGKGNKIVTIPAAHAKARTELLVRLFLINEQTSLVFHAGKRKITLKPEDWQKFSAERGRKGTQLPRGLHSHADIELLTPDSE

SEQ ID NO: 66982 - protein, 632 aa, Pasteurella multocida
MTSNYSAQEITVLKDLEPVQLRPGMYTDTTRPNHLGQEVIDNSVDEALAGYANKIEVVLHKDQSLEVIDNGRGMPVDIHPVEKLSGVEVILTKLHAGGKFSNKNYEFSGGLHGVGISVVNALSERVDVTVKRNGEVYKIAFENGRKVEELEVIGTCGRRNTGTTVHFKPNPKYFDSDKFSVSRLRHLLRAKAVLCSGLEIKFIDKINQTEDCWCYEDGLADYLSEAVNGLETLPETPFIGDFKGDTEAVSWALLWLPEGGDLLSESYVNLIPTIQGGTHVNGLRQGLLDAMREFCEFRNLLPRGVKLSADDIWERCAYVLSLKMQDPQFAGQTKERLSSRQSAVFVAGVVKDAFSLWLNQHVQQAELLAEMAISSAQRRLRAAKKVVRKKLVSGPALPGKLADCSQQDLDKTELFLVEGDSAGGSAKQARDREYQAILPLRGKILNTWEVSSEQVLSSSEIHDIAVALGIDPDNEDLSQLRYGKVCILADADSDGLHIATLLCALFLRHFPKLVQKGHVYVAMPPLYRIDLGKDVFYALDESEKDAILDRLKGKKGKPNVQRFKGLGEMNPLQLRETTMDPNTRRLVQLTYALEQEEQAATLELMDMLLAKKRAEDRKNWLQTKGDQVDLAV

SEQ ID NO: 66983 - protein, 334 aa, Pasteurella multocida
MSRLKTSFFFTALSTLSLSVFAQTQAVNVYTYDSFTSEWGAGPKVKKAFETHFPQCQVNFTAFGDSGTMFNRLRLEGKKTKADVVVGLDNYNLEEAEKSGLFVQHKVDLTPLSLPVEWKNQTFLPYDFGQFAFIYDKTKVQQPPKSLKELVERDDLKVIYQDPRTSSVGRGLLIWMNHVYTENEVAQAWQKLAKHTVTVGKGWSDTYGAFLKGEADVVLSYNTSPLYHMVFEQKDQYLATEFEEGGVLQIETAARVAQHDNHCADHFLAFLIHPEAQGHLVKNNVMLPVINTNIEPHFDALKATQMNTKVLDTSKVNAEQVKKWIAVWQTTLTQ

SEQ ID NO: 66984 - protein, 336 aa, Pasteurella multocida
MTTATAFEIRTLTPHPTLEYWSVCKIEALFETPFLDLVYRAAQVHRENFNPKAIQLSTLMSIKTGGCPEDCGYCPQSARYHTGVEKQQLLDVEEIVEKAKIAKARGAGRFCMGAAWRGPKPKDIEKVTAIIKAVKELGLETCGTFGLLQDGMAEDLKEAGLDYYNHNLDTAPEHYGNVIGTRQFDDRINTLGKVRKAGLKVCCGGIIGMNETRKERAGLIASLANLDPQPESVPINQLVKVEGTPLADAAELDWTEFVRTIAVARITMPKSYVRLSAGRQGMSEEMQAMCFMAGANSIFYGDKLLVTGNPEEDGDQRLMAKLDLEPETEENRYRAE

SEQ ID NO: 66985 - protein, 348 aa, Pasteurella multocida
MKKTIVALAVAAVAATSANAATVYNQDGTKVDVNGSVRLLLKKEKDKRGDLMDNGSRVSFKASHDLGEGLSALAYAELRFSKDVKNKDGEVIKQPIGNNVHAKRLYAGFAYEGVGTLTFGNQLTIGDDVGVSDYTYFLGGINNLLSSGEKAINFKSAEFNGLTFGGAYVFSDDFDKNGLRDGRGFVVAGLYNRKIGDVGFAFEAGYSQKYVKQEVASVLPPPPGSVTVYKDEKEKAFMVGAELSYAGLALGVDYAQSKVTNVDGKKRALEVGLNYDINDKAKVYTDFIWAKEGPKGATTRDRSIILGAGYKLHKQVETFVEGGWGREKDANGVTTKDNVVGVGLRVHF

SEQ ID NO: 66986 - protein, 350 aa, Pasteurella multocida
MKKTLIALAISSFAVTSVSAATVFDKEGTKVDVSGSVRLLLQRETNHRTDLKDKGSRVTFDVTHQLGEGLSALGQVEVRFSDKGIGDQTKISRLFAGFNHEAVGKLTFGKQLTIGDDIGLSDYTYNLGGVNKLVTSGEKVIHFKSADFAGFRFGADYVFDEDPSKTEAVNEKNINNNAYVLGVLYNRTVGDLGFALEAGYSSKKIGDAMLSVNQKAWTVGGELSYQDFAVAVDYSQVKSGDVSTILWRGQKHPGQPNQDDSFHKVREVELGLKYQFIPESKIYTDFIWGKAVTAYDRTVRLRAYIAGVDYKFHKNVVTYLEGGVFRYKHDNDLDPTLRDKKLGVGLRVFF

SEQ ID NO: 66987 - protein, 717 aa, Pasteurella multocida
MNNWFNAKIIATIPIFIAINIAAFAIWLLDISEQSMPLILGIIAGGLVDLDNRLTGRLKNIFYTLLAFSISSLVVQISIGHGFQFTLLMTAMTFMFTMVGAIGQRYSTIAFGTLVIALYTTLSYLPETIWFINPIMILCGTLLYSMITLVVHLFFPNRPVQESIAKSFLALGHYLDAKSQFFDPDEIEQLANKEVNLAMKDSALIEAFNATRIALFYRIRGQNRHSRTQKMIRYYFAAQDIHERANSSLFNYHTMAEQLKNTDLIFRIQRLFELQAQACREIGLSLQQNKEYHYNNKVEKAIVGLNQSFELYAKTHLENEQVVLNLKTLIENLQAVEWQLSHLDQETHQAERASTAKIHTEQVRGLRNILYAMKSHCHFNSQLFRHAVRLSIVVFTACSIVEFFQLERGYWILLTSVFVCQPNYSATKLRLRQRIIGTILGVIIGSLLPYINPTLELQLGLIVATSTLFFFFRTNNYSFSTFFITLQVLISFDVMGFDIHEAMYSRVIDTFIGAFIAWFAVSYLWPDWRYLQLDKVSRQAVKSNAKYLLYVISQLQFGKGDNLKYRIVRRHAHENATALSTTISNMNNEPNKYQAHLQKGFELLKINYSLLSYISALGAYRSNMKALQQNTEFLAGFYPIAKKIIYVLEHIEKLRPEVFQKMQERIESDLKHANAEQAGHLFQPQFSVPIQQLNMISQILPSLYHTFQQINLNLKQN

SEQ ID NO: 66988 - protein, 309 aa, Pasteurella multocida
MSIRILPDSEIKAAASSFHAPALLFANPKNLYQRRIARFTSLSNAHPLEDYLHFASQVAEAQLAVLQQQPIAQDPRLSAEKLSAEDLAKQPLNAQRWQRDPVWQTLLMAILAEMKPKANETILNTIETLEKYSKAERDSIADKLLAQEFEQISSAQAVFIWAALSLYWLQLVQQIPHSSHKESGESLHVCPICASAPVTSVIHFGAEQGLRYLHCALCETEWNMVRSKCTNCDQTGKLDYWSLDSEIAAVKAESCGDCHSYLKALYQERDPKVEAVADDLASIFLDVEMEEKGLQRSGLNPFLFPNPEA

SEQ ID NO: 66989 - protein, 726 aa, Pasteurella multocida
MDISALLDGLNDKQRDAVAAPLGNYLVLAGAGSGKTRVLTHRIAWLIAVEQVSEGSIMAVTFTNKAAAEMRHRIESTLANHASQRLFGMWVGTFHSIAHRLLRAHHLDANLPQDFQILDADDQLRLVKRLLKLHNFDEKIFIPKQVCWYINNKKDDGLRAHQIDDNNDRHEREWIKIYQIYQDTCDRAGLVDFAELLLRAYELWLKKPVILQRYQQRFQHILVDEFQDTNKIQYAWVKLLAGEQGKVMIVGDDDQSIYGWRGAKIENIQRFLDDFSNAQTIRLEQNYRSTGNILASANQLISNNSNRLGKNLWTDGEKGEPVGIYAAFNELDEALFVSSQIKQWIENGGKLKDCAILYRSNSQSRVIEEALIRSQLPYRIYGGMRFFERQEIKDALAYLRLIANRQDDAAFERVVNTPPRSIGERTLDMLRSVTREREVTLWQATQLAIHENLLTARAATALQRFLELINSLQQDTSEMPLFAQTDFVIKHSGLYAMYQQEKGEKGEVRIENLEELVTATKEFIKPDEAEQLSDLTAFLTHASLEAGEEQASPHQDYVEMMTLHSAKGLEFPRVFMVGVEEGLFPSFRSFEEPGRLEEERRLAYVGITRAKQKLTICYAESRRLYAKEERHLPSRFIAELPTECIQEIRLRGTVTRAMNQQKVGSVAPSLQESEWKMGQKVLHSKFGQGTIINVEGAENNTRLQIAFQNQGIKWLIAHLAKLEKIR

SEQ ID NO: 66990 - protein, 467 aa, Pasteurella multocida
MAKKNAQIPSKPLEQGIVPPHSLEAEQSVLGGILIHPAHWDSISDMLIADDFYLAAHRVIFQEMENLLRQGKPIDLINLYEFLREKNLSEDVGGFAYLAELSKNTPSVSNIVSYAAIVRDRAILRDLISVSNDVAQSCYTTKGMEVKDILDEAERKVFAISEKRTTSNEGPQNICAILEKTIDRIELLSKTEGHNGITGVSTGFDALDKKTAGLQPSDLIIVAARPSMGKTTFAMNLCENAALKSDKPVLVFSLEMPAEQIMMRSLASLSRVDQTKIRTGQGLDQSDWSKIGSTMGLFANKPNLYIDDSSGLTPTELRSRARRVYRENGGLSLIMVDYLQLMRAPGFADNRTLEIAEISRSLKALAKELEVPVIALSQLNRTLENRADKRPVNSDLRESGSIEQDADLIMFIYRDEVYNENSEDKGVAEIIIGKQRNGPIGRVRLAFRGQFSRFDNLAEQRDIRDDY

SEQ ID NO: 66991 - protein, 360 aa, Pasteurella multocida
MNMKPATAKISSVALKHNIQTIKQKAPQSKIIAVVKANAYGHGVVFVSAAVEELVDCFGVARLEEALSLRSNGITKPILLLEGFFCDKDLPVIAINNIQTVVHNVEQLEALKAAKVPNPIKVWLKIDTGMHRLGVALEDVEYFYQALRDSENVDPQIGFVSHFSRADELECDYTKLQLTRFLNATQNKAGEKSIAASGGILFWESSHLDWIRPGIIMYGISPINVPAQEYDLTPVMTLTSSLIAIKQHKKGEPVGYGGIWVSDKDTKIGVVAIGYGDGYPRDIPTGTPVYLNGRRVPIVGRVSMDMLTVDLGAEAQDKVGDEVILWGKELPIEEIADISGVISYELITKLTPRVLTEYID

SEQ ID NO: 66992 - protein, 651 aa, Pasteurella multocida
MKRKKEMTQKQMTKNPPQHEKENELNTFQNKIDSLKTTLNKDIISQQTLLAKQDSKHPLSASLENENKLLLKQLQLVLQEFEKIYTYNQALEAKLEKDKQTTSITDLYNEVAKSDLGLVKETNSVNPLVSIIMTSHNTAQFIEASINSLLLQTYKNIEIIIVDDDSSDNTFEIASRIANTTSKVRVFRLNSNLGTYFAKNTGILKSKGDIIFFQDSDDVCHHERIERCVNILLANKETIAVRCAYSRLAPETQHIIKVNNMDYRLGFITLGMHRKVFQEIGFFNCTTKGSDDEFFHRIAKYYGKEKIKNLLLPLYYNTMRENSLFTDMVEWIDNHNIIQKMSDTRQHYATLFQAMHNETASHDFKNLFQFPRIYDALPVPQEMSKLSNPKIPVYINICSIPSRIAQLRRIIGILKNQCDHFHIYLDGYVEIPDFIKNLGNKATVVHCKDKDNSIRDNGKFILLEELIEKNQDGYYITCDDDIIYPSDYINTMIKKLNEYDDKAVIGLHGILFPSRMTKYFSADRLVYSFYKPLEKDKAVNVLGTGTVSFRVSLFNQFSLSDFTHSGMADIYFSLLCKKNNILQICISRPANWLTEDNRDSETLYHQYRDNDEQQTQLIMENGPWGYSSIYPLVKNHPKFTDLIPCLPFYFL

SEQ ID NO: 66993 - protein, 549 aa, Pasteurella multocida
MKNINPTTTNAWKALQQHHKTQSAVTIQQLFAQEKDRFTDYSLSFNNEVLVDFSKNNVTKETLGLLRQLAQECALSEAVDAMFSGAKINKTEDRAVLHTALRNRSNSPVLVDGKDVMPEVNAVLAKMKDFCHRVISGEWKGYTGKAITDVVNIGIGGSDLGPYMVTEALRPYKNHLNLHFVSNVDGTHIAETLKKVNPETTLFLVASKTFTTQETMTNAHSARNWFLATAKDESHVAKHFAALSTNSKAVAEFGIDTNNMFEFWDWVGGRYSLWSAIGLSIALSIGFEHFEALLAGAHEMDKHFRTAPIEQNIPTTLALIGLWNTNFLGAQTEAILPYDQYLHRFAAYFQQGNMESNGKYVDRNGEVIDNYQTGPIIWGEPGTNGQHAFYQLIHQGTTLIPCDFIAPAQTHNPLADHHEKLLSNFFAQTEALAFGKTKEEVEAEFVKAGKSLDEVKEVVPFKVFTGNKPTNSILVQKITPFTLGALIAMYEHKIFVQGVMFNIYSFDQWGVELGKQLANRILPELANRETITTHDSSTNGLINQYKQWR

SEQ ID NO: 66994 - protein, 556 aa, Pasteurella multocida
MSSQFVYTMHRVGKIVPPKRHILKDISLSFFPGAKIGVLGLNGAGKSTLLRIMAGIDKEIEGEARPQPGIKIGYLPQEPKLDPQQTVREAIEEAVGEVKNALTRLDEVYALYADPDADFDKLAAEQAELEAIIQAHDGHNLDNQLERAADALRLPEWDAKIEHLSGGERRRVALCRLLLEKPDMLLLDEPTNHLDAESVAWLERFLHDYEGTVVAITHDRYFLDNVAGWILELDRGEGIPWEGNYSSWLEQKEKRLAQEQAAESARQKSIEKELEWVRQNPKGRQAKSKARMARFEELNNGEYQKRNETNELFIPPGPRLGDKVIEVQNLTKTYGDRTLIDNLSFSIPKGAIVGIIGPNGAGKSTLFRMLSGQEQPDSGTITLGETVVLASVDQFRDAMDDKKTVWEEVSNGQDILRIGNFEIPSRAYVGRFNFKGVDQQKRVGELSGGERGRLHLAKLLQAGGNVLLLDEPTNDLDVETLRALENAILEFPGCAMVISHDRWFLDRIATHILDYGDEGKVTFYEGNFSDYEEWKKKTFGAEATQPHRMKYKRIAK

SEQ ID NO: 66995 - protein, 259 aa, Pasteurella multocida
MNTQIIQLEDTKLEVNNLNFHYGDFHALKNINMRIAKHKVTAFIGPSGCGKSTLLRSFNRIFELYPNQYATGEIKLDGENLLTSPMDISLIRAKVGMVFQKPTPFPMSIYDNVAFGIRLFEKLSKADLNDRVEWALSKAALWNEVKDKLNQSGDSLSGGQQQRLCIARGIAIKPEVLLLDEPCSALDPISTAKIEELISELKHDYTVVMVTHNMQQAARCSDYTAFMYLGELIEFDETAKIFDKPRLQRTEDYIKGRMG

SEQ ID NO: 66996 - protein, 320 aa, Pasteurella multocida
MLRRKTQAETNRLNHHIIELLFRQTTRFFAIFVFLLLAAVMTSLVFGSWDSFSTFGFSFLWHNDWNPVQESYGAIIPIVGTLITSFLALIIAVPISFGIAIFLTELAPEWLRRPVGTAIEMLAAIPSIIYGMWGLFIFVPLFQEHIQPSLIEWFGDLPVFSYLFSGAPFGIGLFTAGLVLAIMIIPFIAAVMRDVFTIVPAILKESAYGLGSTTWEVMWKVVLPYTKTGVVGGIMLGLGRALGETMAVTFVIGNAFHLPESLFSPSTSIASAIANEFNEASGLQKSALMELGLILFLITTVVLSISRLLIMRIEKKEGRK

SEQ ID NO: 66997 - protein, 639 aa, Pasteurella multocida
MVKNLVLWIVVAVVMMTAYQGFNSSSSGNTTDYTTFITDLGNDQIRQARFDYNEIFVTKTDGSKYTTVMPLNDDKLLNDLLNKKVKVEGTLPEKRGLFSQILISWFPMLLLIGVWFFFMRQMQGGGSKAMSFGKSRARMMTQEQIKTTFADVAGCDEAKEEVGEIVDFLRDPGKFQKLGGKIPKGILMVGPPGTGKTLLAKAIAGEAKVPFFTISGSDFVEMFVGVGASRVRDMFEQAKKNAPCLIFIDEIDAVGRQRGAGLGGGHDEREQTLNQMLVEMDGFEGNEGVIVIAATNRPDVLDPALTRPGRFDRQVVVGLPDVRGREQILKVHMRRVPIAPDVDAMTLARGTPGYSGADLANLVNEAALFAARTNKRLVTMLEFEKAKDKINMGPERRTMIMTEKQKESTAYHEAGHAIVGYLVPEHDPVHKVTIIPRGRALGVTFFLPEGDQVSISQKQLESKLSTLYAGRLAEDLIYGEENISTGASNDIKVATNIARNMVTQWGFSEKLGPILYSEDDGEVFLGRSMAKAKHMSDETAHLIDEEVRTIVTRNYERARQILIDNMDILHAMKDALVKYETIEEEQIEQLMKRQPVTPPSGWDENEPTTQNNAGTKASPEPKSAVETEQDSDHQSPSDK

SEQ ID NO: 66998 - protein, 275 aa, Pasteurella multocida
MKLYANNKVLDLSTPQIMGILNFTPDSFSDSGQFFALDKALFHVEKMLNAGATIIDIGGESTRPMAEEVTLEQELDRVIPVVEAVRQNFDCWISVDTSKAEVMKEAARVGMDLINDIRALREPNALLTAAQLDLPVCIMHMQGEPRTMQQNPYYEDVVAEVFAFLQTRSAECISAGIRQENIIWDMGFGFGKTVVHNYKLLQNLAHFCAAGFPVLAGLSRKSMIGNVLDKAVEDRVVGSVAGALIAMVHGAAIVRVHDVEHTADALKIWQATKNA

SEQ ID NO: 66999 - protein, 444 aa, Pasteurella multocida
MAERKYFGTDGVRGKVGTFPITPDFALKLGWAAGKVLATQGSRTVLIGKDTRISGYMLESALEAGLAAAGLSAAFTGPMPTPAIAYLTRTFRAEAGIVISASHNPYYDNGIKFFSAQGTKLPDDVEEAIEAMLDEPMDCVESAELGRASRINDAVGRYIEFCKGTFPAHLSLENYKIVVDCAHGATYHIAPNVMRELGAEVIEIGAKPNGLNINEKCGATDIKALQEKVLEVKADVGLAYDGDGDRLIMVDHLGNKVDGDQVLFIIAREALRAGHLKGGVVGTLMSNMSLELALKQLGIPFVRANVGDRYVLEKMQEKGWLLGGENSGHIIILDKNTTGDGIIASLAVLSAMVQHNLSLNELASAVPLFPQVLINVRFAGGDNPLESAAVKAVAAEVEKRLAGKGRILLRKSGTEPLIRVMVECEDGALAQQCAEQIADVVRAN

SEQ ID NO: 67000 - protein, 83 aa, Pasteurella multocida
MLCAIYKSTRKMGTYLYVAKRDQFDVVPEVLRNAFGPPVFVMMFNLAGEKALVNAEKAEVRKQIETQGFYLQMPKEDDWLFKL

SEQ ID NO: 67001 - protein, 227 aa, Pasteurella multocida
MIETQHLYKRFGQVTALEDINIQIKEGEFVAIMGASGSGKTTLMNILTGLDTASEGKVILDGVDAAQLDEIGRQRFRAEKIGLVFQQFHLIPYLTALENVMLAQHYHSVIDEDAAKAVLQQVGLAHRFDHRPSQLSGGEQQRVCIARALVNQPPVIFADEPTGNLDEKNEQLVLDLLVTLNQQGRTVVMVTHNPELSKLADRTIFLQHGKFLREASNENKRIVNRTF

SEQ ID NO: 67002 - protein, 634 aa, Pasteurella multocida
MFYVNQLRYLVLIFSVFFCTFTQAKDNYAEWIQDIEHRLDKTVHLYQQGQADEARTEVQMAYFEVFENLEGPIRINFSAQKSYQMEATFAEIRKMIGEGVSLEAIQTKINGLKSELQEVLPVLADGHQLNASAQHDVYSNQTIAQHWQQSFKIIDDLLAQAISAYEQGEFAQAKKWVQQAQYDGFKNAEMEMAIRQNRSASISASINQQFYDLIRLSEKPDQLNNLGYQITLLLQEIEEQLPNLPTTRETQVVQAQVNSTDNTPDQDWQKVTNEINQRIQQAMNLYQQGEQKKAMLAVQDTYFDVFESSGMENKIGARDSNMKAELEGYFTRLVSLIKANASSDQLQQQANQLAQGLSKSVEMLQGGKQSHWSMFLYSLLIILREGLEALLIVAAIVTYLIKNQHQDKLPVIRQSVYVALIASLITAVIFQFVFANAGASRELLEGFTMMIAVVMLFMMSYWLLSKVEAQNWQRYLEGKLSSALTTGSLIGLWLTSFLAVYREGAETVLFYYALVADATSAVSYLYLFAGLVVGIVILTVCYLIMRYTVVKLPLKPFFMFTGTFMYLMAFVFAGKSVLELIEGKLFEPTLIVGAPEISWLGIYPYLETLIPQVILLIAALFALFYMKYQNRKAV

SEQ ID NO: 67003 - protein, 296 aa, Pasteurella multocida
MTAQSGVLLEHCKAAIYLEANITDLTVIPEASRQFCDKLAQLQQTYPDARLGAVVAFGDRVWKQLAGENSAKELKPFVTLGKGDASAPATQWDLLIHIQSLRPDVNFSVALAAMNCFGKAIQVEQEIHGFRWVEERDFTGFIDGTENPQAAKRAEVALIAQGDDTDGSYVFTQRYEHNLTKWEKLTTAKQEMVIGRTKPDSIELENKVDTSHVGRTDLKENGVGLKILRHSLPYGKASEKHGLFFVAYCATLYNIEQQLLNMFGEKDGKTDRLLGFTKAVTGSYYFAPSLEKLKTL

SEQ ID NO: 67004 - protein, 775 aa, Pasteurella multocida
MPKSNKTNVSRKKSSWPLLCAKVSFTLICMLAFYGLYLDWQIRSKMDGQIWRLPAEVYSRIERISLEEQLSFEQVKQRLLDNDYRQTTLVAAPGDFKVEGDTLVLLRRAFPFPVQPEAQRVFRLRFKHNQLAVIEDLINQRTIPEFRLAPKLIAMLQSEKEERLAIPLHNYPRLLIDALLLTEDRRFYQHEGISLLGIARAMITNIQAGHTVQGGSTLTQQLVKNLFLSNKRTLSRKVNEALMAVILDWRYDKNRILETYLNEIYLGQNGDTQIHGFELASHFYFGRSTNEISLDQIALLVGMVKGPSLYNPWRNPNTALERRNVVLRLLLDHQVIGHELYQMLVQRPLGVQERGQITRKYPAFIQTLQAELREQLGENKATNLLGARIFSTLDPKQQTHAENAVVSATSTLQAKHKNPHLQSAMVIADYRLGEVRAIVGGLQTQYAGFNRALSAKRQIGSLVKPAIYLTALSVPDKFRLNTAIQNQPITIQIKGSPPWQPRNYDRKYSGSVMLMDALARSLNIPTVNIGMQVGLEKVIETQKKMGWDKVQIPKVPATLLGAYAISPYEVTHLYQVIANQGQKIPLATIDSITDQQGNLLYQRRLEPEQVVPAEASYQTLYAMQQTVTRGTARSLQNQFSHLHLAGKTGTTNDARDTWFVGIDGENIVTVWLGRDDNGETKLTGASGALQIYQNYLQRHPATVLHLPSLNSIQWVGINDYGSWDCSSARQIPVWINHAQSFCQAPEISKQESVWDVLSPGAPSNQPAPVEDAIAN

SEQ ID NO: 67005 - protein, 864 aa, Pasteurella multocida
MLFPYFPLSELDVSAVRTQKENLKQFELTQFAHYEIYDLITNRTQFCDHLLRDLWLRFGLVKDNTLTLIAVGGYGREEMFPLSDLDFLILTSEQVEAQTEQKIRQFVQFLWDCGFDVGHAVRTLSECEQAGRDNITVATNLLEARYLEGNFSQFQQLDNVLQKADFWPREAFFQAKYQERVERYQRYHNTSYNLEPDIKHSPGGLRDLHLLYWIALRHTGAKNLTDILNSGFIYPQEYAQLLESQQFLFKVRFALHLILKRYDNRLLFERQIRVAELLEFVGPGNQGVEKMMKSFFQALQTISLLSDLLVKHYREHFLQTNEPVQVRLLDKEFQCVNNAICLRQANLFVEQPEQILSLFFHLTQDHQLDIHSSTLRQLHLALEQRSGYLSELPVARERFLRLFNQPGAIARALVPMHKYGVLKAYLPQWHHIEGLMQFDLFHCYTVDEHIVRTLLKLEYFLEAESVVPHPICSQIFSRLTDRTLLYIAALFHDIAKGRGGDHAELGAVDVAQFAQQHGFDQREIHTLTWLVEQHLLMSVTAQRRDIHDPEVVLHFAEAVQNNVRLDYLTCLTVADICATNETLWNSWKRTLIATLYQFTTQQFAQGMDCLLDHAEKIENHRQQALTLLTQNSLLSAVQIEEIWQHCPEEYFLRNTPKQIAWHTELLADNQTELLVKISNRFSEGGTEIFVYCQDQPNLFHKVVTTIGAKKFSIHDAQIITSHDGYVFDSFIITELDGKLVKFDRRRSLEKALMQALNTSKLPTFRATDNPKLQHFHVKTEVRFLKEQRTDQTEMELFALDQTGLLAKVSQVFSELKLNLLNAKITTIGEKAEDFFILTNSEDRALTAEQRQCLTQRLHEVLEPK

SEQ ID NO: 67006 - protein, 357 aa, Pasteurella multocida
MLLSLIVTFLGAFLTLLFMRPIAQKIGLVDKPNFRKRHQGAIPLIGGVSLFVGNLCFYLLEWEQMRLPTLYLFSIFVLLVIGMIDDRFDISPFLRAGIQAILAILMIDLGNLYLDHLGQILGPFQLTLGSIGLIITVLATIAAINAFNMIDGIDGLLGGLSSVAFVSIGILLIKDNQLDLAYWSFALIIAILPYFMMNLGIPFGQKFKVFMGDAGSTLIGFTIIWILLLSTQGKGHPMNPVTALWIIAIPLIDMIAIMYRRLRKGKSPFRPDRLHVHHLMMRAGLTSRQAFLLITFAAAICATIGILGEIFYINEWLMFAGFILLFFMYSYSITRAWRITRWIRRMRRRAKRIHNKG

SEQ ID NO: 67007 - protein, 302 aa, Pasteurella multocida
MYEGLLIVLCPLFVGYLIKTQNKILLTSINHILMILLYIILFIMGFSLGQLDDLAKKLPVIAISAATFAILIQSFNLVGLIAYDRFSPKPLKKVTGEMPSRWKLLFDSGKLCAMVLLGAFIGYVIKGKFSLPEHASTYVLVCLIFSVGIQLRNNGIALRDVLFNKRGLITGVIFIITSLLGGLLAAILLKLPLTQGLAIASGFGWYSLSSVLINDAWGPMFGSIAFFNDLSREIVSLFLIPFLMQNHRSSAVGISGATALDCTLPIIQKAGGIEVVPLAISFGFITNILPPILLVFFSSFPI

SEQ ID NO: 67008 - protein, 520 aa, Pasteurella multocida
MHLRQLDVLGFRGIHRLSIHFSADMVLIGENMWGKSSLLSALSLIFNPEKALYQFTLRDFHIPAEQTEPVRHLILLFTFAESEKNEDSMEYHLPYLQHHLLVDHLDGYQRLYLRVEGQINANNEVNTTYAFLNEKGEPIVVDDINNLVFSLIARHPVYRFRDARLNRAHHSFRFIRTEVQDETQDEIRAVSDLLCYYFLNHKNMTEIKQDTTLLWHKAKSLCTKLKQDETHRLRKKLFFSLASLFVRNQRIHFGRFTRPIILFEDPDARLHPRMVAIMWELVSYLPVQRITTTNSVELLSQVNLNAICRLVRTPEKINCFQLRRKDLGKEDFRRLTFHIHHNRSLALFSRMWILVEGESEVWILSELAKLLEINLEMEGIRIVEFAQSGLKPLLKYVQAMGIQWYVLTDGDEAGKKYGEIVEDMLDEEMVRADRITILPKRDIEHFFYANGFADVFIRLAQWQIKSHSYPMSKIIQRAIQRTSKPDLAIALSNEIKKRGSQAIPLLFKRLFSKVLSLART

SEQ ID NO: 67009 - protein, 596 aa, Pasteurella multocida
MNPSFLAEKALSWQELRPELQLTELPHSSLDFFALQQRASAAVNQFLHNPHRHLCVLKADEQGEYAHLLEQFVASQQQHDDRVHGVQYLVEQGDSFSFPRIFMEVAQNQNDNFAAKRKVASALYVDQFQLLGSIRIHPSSQEIQLNPGLVHQLNGGVLILGVGSLINQFDLWIRLKQLLLTQRFDWYSAHPFKALPCDIPSYPLSLKVILLGNREELATLAELDADLYDLADYSEIESYYAIESAEQRMKWAEYVQSMASYHQLPQLTLDGLNKLYQLLVRESEDRAFVSISPLKLKAILSGSAILKQKDTNALLSAVDFEQFFQQKEMQQSFLKEHTYSDILHEQVYVATEGDIVGQINGLSVIEYPGTPMAFGEPSRISCIVQFGDGEVVDVERKSELAGNIHGKSIMIAQACLAHTLGFPSQLPFSASLVFEQSYGEIDGDSASLASFCVLASALADYPLPQSIAITGAIDQFGLVHSVGGVNAKIEGFFSICARRGLTGQQGVMVPSTVIHQLSLSEDVVNAVKAGQFFIYPVEDVYQACHILFQRDLVEETGKVYSEVDLPLSRLIAIRIEQRAEQQLYKTSVWDWLLRKR

SEQ ID NO: 67010 - protein, 324 aa, Pasteurella multocida
MNATLNVAIAAEFELSEKIAETLEESQLNISQLSIVEIYPFNEEQGIRFHNKSVVQLKPEEVEWSSIHYLFFAGDIQQVAHLAKAAEMGCVVIDMKGICASLQDVPVVIPGVNQEKLVDLRQRNIVSLADPQVTQLALAIAPLMSNHEIKDIAVTSLLPASYTNGETVSKLAGQTARLLNGIPLDEGEQRLAFDVFPTPASHLNTQIHKIFPQLDNVVFHSIQVPVFYGMGQMVSVLSDYALAPQSCLASWADNPLMTYHAEKYCTPVTNGEQEMAEEQAAKLHISGLSAVENGLQFWSVADEQRFNLALLSVTLAELIYSQGY

SEQ ID NO: 67011 - protein, 364 aa, Pasteurella multocida
MSIKLWFRVSGLLLSLILVGCANKPPITPLATGSQFSKARQVENFSDYVIFLKRKARAEGVSEQTLNDHNDIQYISRAIELDRQQAGRVQKRDPNAPVRSNPHGTTHYLNRVLTQRKVDVATSRYWEQQAQLEKASQRFGVQKEYLMSLWGMESSFGHYQGQYDVLSVLATLAFEGRRESLFSREFVSAMKMLERRDIPRQKMLGSWAGAMGQTQFMPSSYLRYAADGNHDGEKDIWKNHDDVFASIASYLSTVGWDKQLPWGVEVQLTKPLDIALSGIEHQKKRPLTAWQHLGVALKSNNQQNQEKLTALAGADLWLVQPDREVGRAFLVSNNYRILLDWNRSNYFALSIGMFADRIKHQLGL

SEQ ID NO: 67012 - protein, 657 aa, Pasteurella multocida
MLATLKELKQHKVISEGDYYFAQLIADKQPDELPREQKNLAILLAALCSYSYQQGNTCLFLEKGLESNYFNLAYRTAEQHYLHIIQEKIAFLPIECWQSSLADHIAFTATPLEKVAPLVFQFNALYFYRIWQDEYRVAHYLQRAVQRGAETAPIAYEQIQAILMHYFPAVQQIEGVNWQKVAVATALKQPFCLITGGPGTGKTTTVARLLLALQTLSACQLKIKLVAPTGKAAARLTESINGALTRLAQENMAISADLIASIPTTAQTLHRLLGIRFFEETPTFHPNNPLPLDVLVVDEASMIDLPLMAKLLQALKPNTKLILLGDENQLSPVEAGEMLGALSEFSQHAYSPALTQYLKAVADIELISSDQGSPLRDHLCRLHHSHRFSGDSGIGQLAQAINQGNVEVSWNAFTHFNDIEMVDFDQVALLKGDNPSLYSQACAALVVKSAVEKYTDYLVKLKALQQQSPILNEQQVGEIFVLFNAVRFLTALRVGELGVEQLNQKIAQRLQQKGLLDFKHERDWYLGKPIMIQQNDRHIGLYNGDIGLFLGQGKVWFEQGQGHYKTVLASRVPNYETAFVMTVHKSQGSEFAHTCLVLPTEPNPILSRELIYTGVTRAKQQLTVFSSAEIWKSAVKNPVKRQSGLNQLLVELFNKSD

SEQ ID NO: 67013 - protein, 142 aa, Pasteurella multocida
MKTFVAKPETVKRDWYVVDATGKTLGRLATELARRLRGKHKAEYTPHVDTGDYIIVINAEKVAVTGNKESDKLYHWHTGYVGGIKQATFKEMIARRPEAVIEIAVKGMLPKGPLGRAMYRKLKVYAGSEHNHAAQQPQVLDI

SEQ ID NO: 67014 - protein, 130 aa, Pasteurella multocida
MAENQNYGTGRRKSSSARVFIKPGSGKITINQRDLDVYFGRETARMIVRQPLELVEMTEKLDLYVTVKGGGISGQAGAIRHGITRALIEYDESLRSVLRAAGFVTRDARQVERKKVGLRKARRRPQFSKR

SEQ ID NO: 67015 - protein, 212 aa, Pasteurella multocida
MTSAANKRSIMTLFSDKTDIYCHQVRIVLAEKGVAYETEVVDPQVVSEDLMELNPYGTLPTLVDRDLVLFNSRIIMEYLDERFPHPPLMPVYPVARGKSRLLMLRIEQDWYPVLAKAEKGTDAERAVALKQLREEILAIAPIFTQMPYFMSEEFSLVDCYIAPLLWRMQELGVDFSGAGSKAIKAYMARVFERDSFMQSLGVSAPKNLMDEK

SEQ ID NO: 67016 - protein, 559 aa, Pasteurella multocida
MSHPVENVVAAENTEKRPTNFIRQIIDEDLASGKHTGVQTRFPPEPNGYLHIGHAKSICLNFGIAEDYQGLCNLRFDDTNPVKEDVEYVDSIKQDVEWLGFKWEGEPRYASDYFDQLYGYAIELIEKGLAYVDELSPEEMREYRGTLTEPGKNSPYRDRSIEENLALFEKMKNGEIAEGKACLRAKIDMASPFIVMRDPVIYRIKFATHHQTGDKWCIYPMYDFTHCISDAIERITHSLCTLEFQDNRRLYDWVLENISIARPLPHQYEFSRLNLESTLTSKRKLLQLVNEGIVDGWNDPRMPTISGLRRRGYTPASLREFCRRIGVTKQDNMVEFSALEACIREDLNENAPRAMAVINPLKIVIENFSGKEMLTAPNHPNRDELGVRELPFTRELYIDQADFREEANKQYKRLVLGKEVRLRNAYVIKAERVEKDAEENITTVYCTYDPDTLGKNPADGRKVKGVIQWVSAEDYLPAEFRQYGRLFTVANPGAAEDIHQVLNPDSLVIKQGVVEKSLANAQPEKAYQFEREGYYCADSKDSRPDHLVFNLTVSLKEGF

SEQ ID NO: 67017 - protein, 614 aa, Pasteurella multocida
MQNYPLLSLINSPEDLRLLSKEQLPQICQELRAYLLESVSQSSGHLASGLGTVELTVALHYVYKTPFDQLIWDVGHQAYPHKILTGRRDQMSTIRQKNGIHPFPWREESEFDVLSVGHSSTSISAGLGIAVAAQRENAGRKTVCVIGDGAITAGMAFEAMNHAGALHTDMLVILNDNEMSISENVGALNNHLARLLTGSFYSSIREGGKKILSGMPPIKEFVKKTEEHVKGFVSPVGTMFEQLGFNYIGPIDGHNIEELISTLKNMRALKGPQFLHIMTKKGKGYAPAEKDPIGFHGVPKFDHLSGQLPKSNTTPTYSKIFGDWLCEMAENDPKLIGITPAMREGSGMVEFSNRFPQQYFDVAIAEQHAVTFAAGLAIGGYKPVVAIYSTFLQRAYDQVIHDVAIQNLPVLFAIDRAGVVGADGQTHQGAFDISFLRCIPNMVIMTPSDENECRQMLYTGYKLNQPAAVRYPRGNAIGVELTPLTMLALGKSNLIREGEKIAILNFGTLLPTAINVAEKLNATVIDMRFVKPIDVERIHQIAQTHDLIVTLEENVIQGGAGSAVAEVLHSQQHQTKLLQLGLPDFFIPQGTQQEILADLHLDEAGIETQIKNFL

SEQ ID NO: 67018 - protein, 295 aa, Pasteurella multocida
MYQLSQDLPQLQQRINTFLAQQLNVDSSPSPLAEAMRYGVLLGGKRIRPFLVYATGRMLGADLNQLDYAAASVEAVHAYSLIHDDLPAMDDDHLRRGQPTCHIAFDHATAILAGDALQAFAFEILTQAPALQAEQKLALVQTLSQAAGVKGMCLGQSLDLISEQKHISLIELEQIHRNKTGAMLSAAIQLGRICSPHFKNDTLAQQLQRYSEAIGLAFQVQDDILDIEGESDIIGKTVGSDLLADKSTYPKLLGLAGAKQKAQELYQNAIAELESIPFDTSALRAIAEFVVNRKS

SEQ ID NO: 67019 - protein, 206 aa, Pasteurella multocida
MLSLFRIIIHVCCLGPVAWLAWVLLSGDESQLGADPIKEIQHFLGFSALTILLIMFILGKVFYLLKQPQLQVLRRALGLWAWFYVVLHVYAYLALELGYDFSLFVQELVNRGYLIIGAIAFLILTLMALSSWSYLKLKMGKWWFYLHQLGYYALLLGAIHYVWSVKNVTFSSMLYLILSIMILCDALYGLFIKRKGRSTSAHTGKD

SEQ ID NO: 67020 - protein, 662 aa, Pasteurella multocida
MNTIKSGKPSPLGCSKQTEEGQDGYNFALFSQAARRVELCLFSEGQERRVDLQPSDDGIWHIWLSDVSVGTEYAYRISGKTDRTLANSNKLMLDPYAKAVVGKPDLSTPEKRAWFDLNDPRDNAHLAPKAVIIDEAFDWQGDKPLRTPWAQTVIYEMHVKGFSQLREDLPEALRGTYAGLAHPNMIAYLQDLGVTAVELLPVQYQADEVHLQEKGLANYWGYNPLAMFALEPRYSSQHSSMGALHEFKTMVKALHQAGIEVILDVVFNHTAESEKYFPTFSQRGIDDETYYWQDAQGYYHNWTGCGNTLNLSQPITRRWVLDCLCYWVEACHVDGFRFDLGSVLGREGEGGFNPQAQLFADIQAEPRLQGCKLIAEPWDIGDFGYQMGNFPAYFAEWNDRFRDDVTRFWLWKSGESGAFAQRLAGSSDLFQQTRQVHNSINFITAHDGFTLRDLVSYNEKHNWANGENNRDGRNHNYSYNHGVEGIDNVPSAVENGRILSSIALLMNLLLANGTPMLLAGDEFGNSQFGNNNAYCQDNEIAWLKWQDFNPVLFNATKQTIALRKQIASLQQDCWWSEVNVQWLNTKGEPMTIADWHNQESKALQVLLDNKWLFLINAKQKLQTFSLPEGDWEVMYCATNLTTQGGFIELDDVTFGVLQQLNK

SEQ ID NO: 67021 - protein, 334 aa, Pasteurella multocida
MATIKDVAKMAGVSTTTVSHVINKTRFVAAETEKLVLQAIQELNYSPSAVARSLKVNTTKSIGMIVTSSEAPYFAEIIHAVEEHCYRQGYSLFLCNTQNNVEKIKNHLEMLIKKRVDGILVMCAEYTQDSLDLLANFTSLPLVVMDWGPDNKHTDIIQDHSFEGGYLATKYLIDHGHKDIGIIAGELTKTTAKTRYEGFIKAMNEAGLKINPDWVMEGFFEPEDGYECMNKILAQDTLPTAVFCCNDVMALGAISAIGEKGLRVPEDISIIGYDNIHASRFYSPPLTTIHQSKSRLGARAVTLLFERINEKSEERAVIEMHPELVIRKSVKSRL

SEQ ID NO: 67022 - protein, 295 aa, Pasteurella multocida
MNILITGATGLIGSHLTSQLIKHAHGVTALVRDPKAAKQKLPASVTLISSLAQYTTLDTFDAVINLAGEPIFEKRWTAQQKQRLVESRVNLTAQLVQRINASRTPPHTFISGSATGYYGHNAEEIITENAPATDTFPSQLCQRWESEALCAKTRVCLLRTGIVLSKTGGALAKMLPLYRLGLGGKLGSGKQYWAWIALDDMVKGILFLLENHQCQGAFNLVSPNPVRHVEFNNTLANILKRPAFATVPELLLRFFLGERTQLLLDSQKIVPEKLLAQGFVFDYPELKSALQAILK

SEQ ID NO: 67023 - protein, 563 aa, Pasteurella multocida
MIASGADTQSDALVRQSAKVQFGDYQANGIMAAAKKLGRNPREFAQQVIEQLDLSEIAEKIEIAGPGFINLFLDKNWLAEQISLAVNDDKLGIQATETQTVVADYSSPNVAKEMHVGHLRSTIIGDAVVRTLEFLGNKVIRANHVGDWGTQFGMLIAYLEKVENESASEMELSDLEAFYRAAKEHYDSDPVFAEKARNYVVKLQSGDEYCRTMWKKLVDITMQQNQHNYDRLNVTLTEKDVMGESLYNPMLSDIVADLKQQGLAVEDEGAFVVYLDEFKNKEGEPMGVIVQKKDGGFLYTTTDIAAAKYRYETLKADRALVFSDTRQSQHMQQAWLITRKAGYVPDSFQLEHKNFGMMLGKDGKPFKTRTGGTVKLADLLDEAVERATQLIQEKSTALSAQEKAAVIEAVAIGSVKYADLSKNRTTDYVFDWDNMLSFEGNTAPYMQYAYTRIRSIFNRSELNEQDLSESPVVLSNEKERLLAIKLLQFEEAIQIVAKEGTPHVLCTYLYELAGVFSSFYEHCPILNNEDEQIKRSRLKLALLTEKTLKQGLDLLGIKTVDKM

SEQ ID NO: 67024 - protein, 360 aa, Pasteurella multocida
MKPTIISKLESLKERHEELEALLGEASVISDQDKFRAYSKEYAQLEDVVKCFARWNQLNSNMEEAQLLLDDPSMKEMAQEEIEACKTEIEQVEQQLQILLLPKDPNDEYNCYLEIRAGTGGDEAGIFAGDLFRMYSRYAESKRWKVEVLSANESEQGGYKEIIVKVNGEGVYGQLKFESGGHRVQRVPKTESQGRIHTSACTVAVMPELPESELPEINPSDLRIDTYRSSGAGGQHVNTTDSAVRITHIPTGIVVECQDERSQHKNKAKAMSVLASRIVQAEKERQEQAQADTRRNLLGSGDRSDKIRTYNYPQGRVTDHRINLTVYRLDEVMNGKIDELIQPIITEYQADQLAALSEQA

SEQ ID NO: 67025 - protein, 298 aa, Pasteurella multocida
MTYQEWRQFAEHVLMKNKENDPFLDVKSESVLLLQTVTKRSKASILAFSETVLTEVELQQLAQLLMRRAKGEPIAYILGEKAFWSLSLKVSEHTLIPRPDTEVLVEHALDFAKQRVTSAHVSGELSILDLGTGTGAIALALAAELTPLTQKCGINLNILGVDRIAEAVALAKDNAKQNELKVNFLQSVWFDALNPEIRFDLIVSNPPYIDKNDPHLTQGDVRFEPLSALVAAEEGYADIRHIIEQAPLFLKPQGALLLEHGWQQAEKVRSIFQKNLWHNVATLKDYSGNERVTLGCWR

SEQ ID NO: 67026 - protein, 284 aa, Pasteurella multocida
MQNKVIRLGEIEISNDKPFVLFGGMNVLESRDMAMQVCEAYVKVTEKLGVPYVFKASFDKANRSSIHSYRGPGMEQGLKIFQELKDTFGVKLITDVHEIYQCQPVAEVVDIIQLPAFLARQTDLVAAMAKTGAIINVKKPQFLSPGQMGNIVEKIEECGNDNVILCDRGTNFGYDNLVVDMLGFSVMKKVSKGCPVIFDVTHALQCRDPFGAASGGRRGQVTELARAGMAVGLAGLFLEAHPNPSQAKCDGPSALPLSALEGFVHQMKAIDDLVKHFPELDTAN

SEQ ID NO: 67027 - protein, 396 aa, Pasteurella multocida
MKFSVPLFIALRYWRAKSADRFGRLVTNLASIGIVLGVMALIIVLSVMNGLEQHQKKHVLANIPHAIVMPVTQRITLTDEMIALPPFVQKAVPINQTQVILQTATGVSAGQVIGVQQSADDPLLMDMLSPDFEQILPPGAFNLVIGAQLAQKLQLHIGDKVRLMMTENSQYTPFGRVPVQRLFTVSDIYYSGDEASSYEVFAHLSDIGRLMRIQPELAQGYRLFLQDPFQITELPQYFAEQSWQLYDWRQQKGEFFQAVRMEKNMMGLLISLIIVVAVSNIVTSLSLMVVDKQGEIAILQTQGLNKRQVRSIFIYQGCLVGFVGTVIGAILGVLVTLNLDRLVGWFNSADIYLPTAFDPLQFMIILFFSLLLSLISTIYPAYRAAQIDPAEALRYE

SEQ ID NO: 67028 - protein, 340 aa, Pasteurella multocida
MIKDLDWKNLGFGYIKTDYRYIAYWKDGKWSKGELTQDNVLHISEGSTALHYGQQCFEGLKAYRCKDGSINLFRPDQNAERMQRSCRRLLMPEVPTDMFIDACKQVVKANQAWLAPYGTGATLYLRPFLIGVGDNVGVNPAPEYIFSIFCCPVGAYFKGGLKPTNFLVSNYDRAAPQGTGAAKVGGNYAASLYPGKEAKQNGFGDCIYLDPTTHTKIEEVGSANFFGITKDNKFITPLSPSILPSITKYSLLYLAKARLGLETEEGDVYIDQLDQFKEAGACGTAAVITPIGGIQYGDNFHVFYSETEVGEITTKLYNELVGIQFGDVEAPEGWIVKVDN

SEQ ID NO: 67029 - protein, 402 aa, Pasteurella multocida
MSETLLNPYFGEFGGMYVPEILMPVLKNLEKAFVEAQQDPTFKETFLDLLKNYAGRPTALTRCRNLTQGSKTKLYLKREDLLHGGAHKTNQVLGQILLAKRMGKTRIIAETGAGQHGVATALACAMLGMPCQIYMGAKDVERQSPNVFRMRLMGANVTAVTKGSASLKDACCEAMRDWAENYEHTHYLLGTAAGPHPFPTIVREFQKIIGEETKQQILAREGRLPDAVIAAVGGGSNAIGMFNDFIEETSVRLIGVEPAGKGIATGQHGAPLGHGTTGIYFGMKAPLMQTPDGQIEESYSISAGLDFPSVGPQHAHLQAIGRAQYESITDDEALSAFQALARHEGIIPALESAHALAYALKLIQRQPEKEQLLVVNLSGRGDKDIFTVDRILSQKGVSYAPF

SEQ ID NO: 67030 - protein, 469 aa, Pasteurella multocida
MTQAFPSILQKIIQDKTTWIAEKQAQLPLASFQDQLERSDRDFYQAMQQGSKQRPSYILECKKASPSKGLIRAAFDLTEIAEVYQHYATVISVLTDEKYFQGHFADIAQVRQRVTQPILCKDFILSEYQVYLARYAQADAILLMLSVLNDERYTQLATLAHQLGMGVLTETSNEAEFARALALKAKVIGVNNRNLHDLSVDIQRVAQITQHYADQIPPETKIISESGIYQHQQIRDLRHVADGFLIGSSLMQHTDLNHAVRSLLFGEHKVCGLTRPQDVRAVYQQGALYGGLIFVTHSKRCISLRQAQELVTQAPLRFVGVFQDQSIAFICHLATQLRLHAVQLHGNESHEFIRQLRDELPVNCEIWRAICIESSGTSPCQIVENKNIDRYIFDSKTHQQRGGTGKTFDWQLIPHHLKPKSMLAGGITPENIPLALAQGCLGLDLNSGLETYPGVKSHQKVVAAFAQLR

SEQ ID NO: 67031 - protein, 333 aa, Pasteurella multocida
MQTEQLLHQLFEKKALNQQQTEFLFTAIVRGQLDNSQLSAALIALKLRGETPEEISGAVTALQADAESFPIPDYPFADIVGTGGDGANTINISTASAIVAASYGLKVAKHGNRSVSSQTGASDLLTALGVNVHISAHKARQALDEIGLCFLFAPQYHLGFQHAIPVRQALKTRTIFNILGPLINPAKPKRQLLGVYSSDLIQPYAETVARLGHEHSVVVHGSGLDEIALHGVTEVAEIKAGQIERYTLTPQDFGFQPQPLETLRGGKPSENAQILTALLQGKGKLAHQQAVAMNSAMLMSLFGYPNLKQNAQAIMDIIATGKPFETLQQLTQY

SEQ ID NO: 67032 - protein, 524 aa, Pasteurella multocida
MKKQSSEKLNIARISLVLFFAVLSYCILYYLAYSDEPIIEVLKNKIGDSRGLWTLITAIITAPIAFIIWVFRDINAKQQIENQRKDINLKEFQKIAEWVSGLHLIEDEVTEKIVNQTEQEKTRKYTQQSEHLSISTFSKKDGAVGLQIAAIYNLLPFYRGEHGESFKKPALNLLLSAWLALQQKEVKNLENFDVLTNRLDFDNTVKKIQENGRSPIGIAITHVLLADGGEHLVQYPEVFPNLCLAGMDFHLPGLDKNVLSLFINIKSKDCSGINLMAANLNNVRLEGASLENASLGGASLYKASLNGASLYKASLNGASLYKASLEGARLNWASLEGARLERASLEGASLNWASLEGARLNWASLEGASLEGARLNWASLEGASLEGARLNWASLEGARLERASLEGASLNLASLEGASLERASLEGASLEGASLERVSLERASLEGASLEGAIFTYNTDSNINCADLKSKGGVILYFTASEKKRDICIQLVKAEATFEHDVPDNIDIEKTQQENPDWKIFIIK

SEQ ID NO: 67033 - protein, 643 aa, Pasteurella multocida
MPIITLPDGSQRQFEQPISVMDVAASIGAGLAKACIAGRVNGERKDACDLITEDSKLEIITAKEEDGLEIIRHSCAHLLGHAIKQLFPNVKMAIGPTIDKGFYYDVDLDRSLTQEDLDALEKRMLELAKTNYDVVKKVVSWQEARDTFEARGEPYKMAILDENIDRCDTPALYHHEEYVDMCRGPHVPNMRFCHHFKLMKVAGAYWRGDSKNKMLQRIYGTAWADKKQLSEYLTRLEEAAKRDHRKIGKALDLYHMQEEAPGMVFWHNDGWTIFRELETFVRTKLKEYDYQEVKGPFMMDRVLWEKTGHWQNYGDLMFTTQSENREYAIKPMNCPGHVQIFNQGLKSYRDLPIRMAEFGSCHRNEPSGSLHGLMRVRGFTQDDAHIFCTEDQIESEVTACIKMVYDIYSTFGFENIQVKLSTRPEKRIGADEMWDRAEAGLAAALSHNGLEYEIQEGEGAFYGPKIEFALRDCLDREWQCGTIQLDFALPGRLNASYVAEDNDRRTPVMIHRAILGSIERFIGIITEEYAGFFPAWLAPTQAIVMNITDSQSDYVQKVVKTLSDAGLRVKSDLRNEKIGFKIREHTLRRVPYMLVCGDKEIEAGKVAVRTRKGADLGTFTIEEFLDILKKQVRSRELKLLGEE

SEQ ID NO: 67034 - protein, 377 aa, Pasteurella multocida
MAFFSPKTNFHLMAKPSSFHCNIQCEYCFYLEKEHTFGSKAPFMSEQTLRNYVKNYIESHAGQRVEFAWQGGEPTLLGLDFFKRAVSFQQEFANGKTITNAFQTNGIALNRQWAAFFKQHQFLIGLSVDGLSAVHNRYRITSNGQPTFDRVVKALALLKEYQVDFNTLTVVNDQNWHKGKETYLALKALGSTFMQFIPIVEQHADHLQTFSVPSEGYGHFLVDVFNEWKKQDVGRIFVLEFDNLLGQWLGYPSSSCIHQPTCGKSLVVEANGDVYSCDHFVYPEYKIGNLNHTSLAELVQSPKQSHFGFAKQGQLTQICRQCEFKSLCHGGCPKHRISSVEGEHFKHNYLCASYQYFFRQTAEDMQQMSNQIRFAKT

SEQ ID NO: 67035 - protein, 154 aa, Pasteurella multocida
MIDQDGEQAGIVSIQQALEMAEQAELDLVEISPNAEPPVCRIMNYGKFLYEKGKAAKEQKKKQKVVQVKEIKFRPGTDEGDYQVKLRSLIRFLEEGDKAKITVRFRGREMAHQDIGLEVLERVKNDLAEISVVESAPGRLEGRQAVMVLAPKKK

SEQ ID NO: 67036 - protein, 65 aa, Pasteurella multocida
MPKIKTVRGAAKRFKKTASGGFKRKQSHLRHILTKKTTKRKRHLRHKSMVAKADQVLVVACLPYA

SEQ ID NO: 67037 - protein, 117 aa, Pasteurella multocida
MARVKRGVIARARHKKVLKAAKGYYGARSRVYRVAFQAVIKAGQYAYRDRRQRKRQFRQLWIARINAAARQNGLSYSKFINGLKKASVEIDRKILADIAVFDKVAFTALVEKAKSAL

SEQ ID NO: 67038 - protein, 1495 aa, Pasteurella multocida
MSEELALENLEHVETSVPHTVFSHANSAPRGKFRSLTLINWNGFFARTFDLDELVTTLSGGNGAGKSTTMAGFVTALIPDLTLLHFRNTTEAGATSGSRDKGLHGKLRPGVCYAALDTINSRNQRVIVGARLQQVAGRDKKVDIKTFSIQGLNLAENPTTIFTDVVNERQARVLTLNELKEKIEQAGAQFKQYHSITDYHAMMFDLGIIPKRLRSSSDRSKFYKLIEASLYGGISSAITRSLRDYLLPENLGVRKAFQDMESALRENRMTLEAIKVTQADRDLFKHLITETSNYVASDYMRHANERRGNIESAVRFRQDWYRARTEQHLSQQRLVELSREAAELAENEKTLEVDHQSAVDYLNLVLNALRHQEKIARYQDDVAEITARLEEQKMVVETATEQLEESQVQVEQVEQEVDQIRAQLADYQQALDAQQTRALQYQQAIAALEKAKTLCGLADLGVKNVEAYHDEFAAHAESLTEQVLELEQRMSISDAAKSQFDKAYQLVCKVAGEIPRSTAFEQAKVLLRDYPTQKVQAQQTSQLRAKLHELEQRYAQQQSAVRLLKEFNQRANVSLEDAEALEAYHAEQEALLEDVSAELSEQVEQRSTLRQKREQLSALYQDNAKKAPAWLTAQAALERLQDQSGETFADSQDVMQFMQAQLVKERELTIERDQLEQQRQQLEAQISRLSQPDGSEDARLNVLAERFGGVLLSELYDDVPIEDAPYFSALYGPARHAIVVRDLDAVKGQLAQLEECPDDLYLIEGDPTAFDDSVLSAQELAHGVVVQVSDRELRYSKFPEIPLFGRAAREQYLEALQQQRDDVTEQHAQRAFDVQKCQRLHEHFSQFVGLHLALAFQPNPEDVMAEIQQQRNEIERELNQFVTTEQQLRIQLDYAKEKMQLLNKLIPQLNLIADESLIDRVEECREQLDIAEQDELFIRQYGATLSQLEPIANTLQSDPEHYERLKADYEQAISQQKQVQQRLFALADVLQRKAHFAYEERVQTENTDLNEQLRAKLDSLQQQREVQKAQLQQKQQQFTNYNRVYIELQTSFNNKMQMLQELLQEVGELGVRADQGAEERAKQRRDELHQVLSDTRQRRHYVEKQLTLIESEAQSLNARIRKAERDYKTQRELVVAAKVSWCVVMRLSRGSDVEKRLNRREFAYLSADELRSMSDKALGALRTAVADNEYLRDSLRLSEDNRKPENKVRFFIAVYQHLRERIRQDIIKTDDPIDAIEQMEIELSRLTDELTRREQKLAISSESVANIMRKTIQREQNRIRMLNQGLQNIAFGQVKSVRLVVNIRDTHAMLLDALSGTQEEYQDLFTDQRMTFSEAIAKLYQRLNPHIDMGQRTAQTIGEELLDYRNYLDLEVEVYRGADGWLRAESGALSTGEAIGTGMSILLMVVQSWEEESRRIRGKDIVPCRLLFLDEAARLDAKSISTLFELCERLDMQLLIAAPENISPEKGTTYKLVRKIAGNQEHVHVVGLRGFGATA

SEQ ID NO: 67039 - protein, 475 aa, Pasteurella multocida
MSTSPDFSFFIYDYESFGVDPASDRPAQFAGIRTDINFNIISDPVMFYCKQTNDYLPAPEAVLVTGITPQECNEKGIPEPEFAERILQEFSRPNTCVMGFNNIRYDDEMTRYTFYRNFIDPYEYSWKNGNSRWDLLDLVRACYALRPEGINWAYDEEGMPSFRLEKLTKANGIEHSNAHDAMADVYATIAMAKLIKEKQPKLFQYFFENRGKKEVEKLIDTANLTPLVHVSGMLGNHRGNTTWIVPLAWHPTNQNAVICCDLAANITDLLNKDANELRQNLYTPKAELIEKGILPVPLKLVHINKCPILAPAKTLLPENAARLGIDRTFCLENLQRLKLSPPIRDKVTEIFNEERHFAPSINVETELYNGFFDYNDKNNMAILRHLPEEKLAEHGLAFKDTRIPKLLFHYRARHYFNSLTRAEQIQWQKYRHKKLDQVALQFEQSLQRLIAENSENPTNLALLQKVYEYGAKILA

SEQ ID NO: 67040 - protein, 103 aa, Pasteurella multocida
MSKEFDKKRDELLSEIREILDNAEELFDEKSKASVDELKKLKSNLDSRVSKLQKQFGVLKDDAVAGTKEVIKQTDELVQDNPYKAIGVAGVIGLLLGVLISKK

SEQ ID NO: 67041 - protein, 868 aa, Pasteurella multocida
MSKSLVIVESPAKAKTINKYLGSNYVVKSSVGHIRDLPTVGSSNGEKAKAISTKGLSAEEKSAIKQEKDRNALVKRMGIDPYHQWKANYQILPGKEKVVAELKSLAKKADHIYLATDLDREGEAIAWHLREVIGGDDARFSRVVFNEITKNAIQQAFEKPEQLNLDRVNAQQTRRFLDRVVGFMVSPLLWKKVARGLSAGRVQSVAVKLVVEREREIKAFQPEEYWEIDVLTQTQAKQALRLAVTQFKGKKFEPKNATQAQSAVDFLQHADYVVSDLETKPTHSRAKAPFITSTLQQTASTRLGFGVKKTMMLAQRLYEAGYITYMRTDSTNLSQDALKMVRGYIQSHYGESYLPSKPVFYSSKENAQEAHEAIRPSDVNTLAEQLTGMDKDAVRLYDLIWRQFVACQMPAAQYDSTTVTVRAGEYELKAKGRILRFDGWTKVLPTMSKNAEDQVLPDVQLNEKLHLEHVLPEQLFTKPPARFSEAALVKELEKRGIGRPSTYAAIISTIQERGYVRVENRRFYAEKMGEIVTDRLNQSFTALMNYDFTANMENILDQIANGEKNWKTELNQFFKDFSQQLSQAELDELEGGMKPNSLVPTDINCPTCGRKMAIRTASTGVFLGCSGYALPPKERCKTTMNLIPEAELLNVLDEASETKALMERKRCPKCGTAMDSYLIDPERKIHICGHNPNCDGYVLEQGSFKIKGYDGPIVECDKCGADMHLKLGRFGKYMGCTSCDNTRKILKSGEVAPPKEEPTHFPELKCEKSDAYFVLRDGASGVFMSAHNFPKSRETRAPKVAELALYRDRLPEKLRYLADAPQHDPEGNDAIVRFSRKEKRQYVTSEKNGKATKWIVDYLGNQWVERKK

SEQ ID NO: 67042 - protein, 277 aa, Pasteurella multocida
MTTIYDLHCHSTASDGVLSPTEVVARAVEKGVNVLALTDHDTTAGLAEARLAAQQTDLTLISGVEISTTWENRAIHIVGLGFDETSAKMTALLRQQAALRYQRALEISDKLAKVGIVDAFEQAKMLATGEVTRAHYARLLVQMGKVSNEGQAFKKYLSQGKSCYVKAQWCDIPTAIEVIHQTGGLAVLAHPLRYTLTNKWVKKLIADFAQWGGDAIEVAGCGQAPEQRLLLAQWATEFGLLSSVGSDFHFPCGWVELGKSLLLPANCVPIWTKLSPN

SEQ ID NO: 67043 - protein, 869 aa, Pasteurella multocida
MQAKAKYRKDYRTPDFTVTEIALDFQLDPKKTVVTATSQFRRLNPQAQKLRLDGHSFQFSSLKLNGRDFKHFEQDGESLSLNLSTVDADQFSLEVVSILSPEKNTSLQGLYQSGEGICTQCEAEGFRQITYMLDRPDVLARYTTKITADKSKYPYLLSNGNRVDSGELPDGRHWVEWHDPFPKPSYLFALVAGDFDVLSDTFTTKSGREVALELFVDRGNLDRAEWAMQSLKRSMKWDEDRFGLEYDLDIYMIVAVDFFNMGAMENKGLNVFNSKFVLANPQTATDEDYIAVESVIAHEYFHNWTGNRITCRDWFQLSLKEGLTVFRDQEFTSDLWSRSGKRIEDVRLLRTAQFAEDASPMSHPIRPDKVIEMNNFYTMTVYEKGAEVIRMMHTLLGETLFQKGMQLYVSEQDGKAATCEDFVSAMERASGIDLTQFRHWYSQSGTPELTITDSYDPETAVYTLHVAQHTPPTADQMEKVNLHIPLKIALYDKNGQAQVLENDGQIINPVLDVKQAEQSFQFTGVKSKPVPALLCDFSAPVKLHYEYSTAQLITLLRHAENQFVRWDVAQMLYAAELRRNLTRYQQGKSLEFSAEVLAELYQILDGYQQDPELATLILTLPKVTEFAELFKTIDPEGISVVRDFMVRTIAESLKQTLLKVYNDIRLEVYRVNAEDIALRALRNLCVSYLAYTTVGNNLVNKHYSYANNMTDTLAALSAATQAQLPCRDTLLADFESKWQHDGLVMDKWFALQATRPDDDVLLNVMKLMDHPSFNFNNPNRLRALVGSFANHNLKAFHAIDGSGYRFLTDILIRLNESNPQVASRLIEPLIRFSRYDGQRQTLMKRGLERLSEVENISRDLYEKIEKALQ

SEQ ID NO: 67044 - protein, 337 aa, Pasteurella multocida
MQTIPIKHVGNDPLVDAFQRRYYYLRLSITDVCNFRCNYCLPNGYQPESNKPSFLTLNEIRLVVKSFANMGTEKVRITGGEPTLRKDFLPIVETIAQNPTIKQIALTTNGYRMAKDVAAWKEAGITSINVSIDSLDARMFHRITGIDKFEDVMRGLERAFEVGYQKIKVNSVLMRDLNDADFNQFLTWIKDKPIQMRFIELMQTGEMDHFFQQHHVSGQLLADKLINAGWTLQSKGLLDGPAKVFKHPDYVGEVGLIMPYEKNFCASCNRLRVSAKGKLHLCLFGEEGITLRDLLQSDDQQLQLQARISSALQGKREHHFLHQGDSGVRANLASIGG

SEQ ID NO: 67045 - protein, 308 aa, Pasteurella multocida
MSDLTRFTQYEHLDKVKKVVAIGGGHGLGRLMSALSFMKSRLTGIVTTTDNGGSTGRIRLNHGGIAWGDLRNCLNQIITEPSTASSLFEYRFTGQGELSGHNLGNLMLKALENMHIRPVEAIHLVRELLHVKSHIFPMSESPVHLAAVLQSGASIVGEVGIDNLTELPKSIFLVPLVKATPEAIEALQEADVILFGPGSFLTSILPPILLPEVIEALQKSHAKKIFIDNLALEQSPAASLSLSDRIQWIHHTVGKEIIDATIVPTNANDLCENLSLKVMVRPLQADDISYRHDRSLLSQAIDDLLGEL

SEQ ID NO: 67046 - protein, 795 aa, Pasteurella multocida
MKFSESWVREWVNPAISTAQLCDQITMLGLEVDGVEKVAGDFSGVVVGEVVECAQHPDADKLRVTKVNVGGDRLLDIVCGAPNCRQGLKVACATEGAVLPGDFKIKKTKLRGQPSEGMLCSFSELGIDVESSGIIELPQNAPVGTNLRDYLTLDDNTVEISLTPNRADCLSIAGIAREIGVVNKLAVNTPHFESVKATITDKVDIQLHAPEACPRYLLRVVKNVNVQAPSPMWLQEKLRRCGIRSIDPVVDVTNYILLELGQPMHAFDAAKVAQPVQVRMAKSGEALVLLDGSTAKLKDNTLLIADQNGPLAMAGIFGGQASGVNAETKDIILEAAFFAPLAIAGRARQYGLHTDSSHRFERGVDFELQRQAMERATALLVEICGGEVGDICEVASDAFLPKLNQVSLRREKLDALLGHHIETETVTDILTRLGLQVSYANDVWQVTSASWRFDIEIEEDLVEEIARIYGYNSIPNKAPLAHLRMREHKEADLDLARIKTALVDADYQEAITYSFVDPKIQSVLHPQQDALVLPNPISVEMSAMRLSLLSGLLGAVQYNQNRQQTRVRLFETGLRFIPDTQAEFGVRQEFVLAAVMTGNKKAEHWAGKAESVDFFDLKGDLESILSLTGTRNLVKFVAKSYPALHPGQSAAIMLNGEEIGFIGTLHPNAAKQLGLNGKTVVFEILWQAIATRQVVQAKEISRFPANRRDLAIVVAESVAASDVLDACREVAGETLTQVNLFDVYQGNGVAEGHKSLAISLIIQDNEKTLEEDDINAVVSVVLSELKQRFNAYLRD

SEQ ID NO: 67047 - protein, 327 aa, Pasteurella multocida
MQNLEQITEQALDAIARAEDGKALDAIRVEYFGKKGPFTALMQGLRDVSPEARPAVGQKINDAKQLAQNALNEKKVQLETAELNAQLAKEKIDVSLPGRKVETGGLHPVTMTIDRVTKFFSELGFSVESGPEIESDYYNFDALNIPKHHPARADHDTFWFNPELLLRTQTSGVQIRTMEKMQPPIRIMAPGRVYRNDYDQTHTPMFHQIELLYVDKKANFTELKGLLHDFLRAFFEEDLQVRFRPSYFPFTEPSAEVDVMGKNGKWLEVLGCGMVHPNVLRNVGIDPNEYAGFAVGMGVERLTMLRYNVTDLRAFFENDLRFLKQFK

SEQ ID NO: 67048 - protein, 216 aa, Pasteurella multocida
MKTLTFYLIRHGKTEWNEKRLLQGNGDSPLTQEGIEGAKRTAKALSNIDFTAAYSSVLPRAISTANMILAHKTTPLICHAGLNELCFGSWEGQAIEELSCLPEYRQMRDQPAQYLGLTNGGETYQQLATRAIGVIEQIIQRYDTGNILIVSHGHTLRMLLALFHGATWQTHREKSTSLANTSISVVHYLQTENETGRFVLEKVNDIQHLTDSFDEE

SEQ ID NO: 67049 - protein, 304 aa, Pasteurella multocida
MSWIDRIFNKDTSSTSSRKANVPEGVWTKCTSCEQVLYRDELRRHLEVCPKCGHHMRIDARERLLALLDKDSSQELSAELEPKDILKFKDLKKYKDRISAAQKETGEKDALISMFGTLYGMPIVAAASNFSFMGGSMGSVVGAKFVQAAEKAIAENCPFVCFSASGGARMQEALFSLMQMAKTSAVLAKMREQGVPFISVLTDPTLGGVSASFAMLGDINIAEPKALIGFAGPRVIEQTVREKLPEGFQRSEFLLEKGAIDMIVKRADMRHTLASVLSKLSNKPSPFVEPELVENEEQSKSDNE

SEQ ID NO: 67050 - protein, 264 aa, Pasteurella multocida
MKIALGIQYNGKNYCGWQRQENVASVQEQLEKAISFVANQPCQIFCAGRTDSGVHATGQVVHFETDAIRAEKAWSFGVNANLPDDISVSWAKCVTDDFHARFSATARRYRYILYCNKLRSAILPEGVTHCHLDLDHHLMHQAGQALLGEQDFSSFRAAQCQSHTPFRNVHHLKVVRRGQYIIVDIQANAFVHHMVRNIVGSLIEVGAGHQPVEWIGWLLAQKDRRLAAPTAKPEGLYLVNVSYPTQFQLPQNALGPLFLENELG

SEQ ID NO: 67051 - protein, 94 aa, Pasteurella multocida
MFKFNAEVRQSQGKGASRRLRHNGQIPAIVYGGSEAPVSIVLNHDDLNNAQVHDAFYTDVITLVIEGKEVAVKAQAMQRHPFKPKLVHIDFKRV

SEQ ID NO: 67052 - protein, 471 aa, Pasteurella multocida
MRFYMTKVASIVDVLQGKIAIGETVTVRGWIRTRRDSKAGLSFLAIYDGSCFDPIQAIVNNDIENYETEVLRLTTGCSVIVTGTVVESPAEGQAVELQAEKVEVAGWVEDPETYPMAAKRHSIEYLREVAHLRPRTNIIGAVARVRHCLAQAIHRFFHEQGFYWVATPLITASDTEGAGEMFRVSTLDLENLPRDDKGAVDFSQDFFGKESFLTVSGQLNGETYACALSKIYTFGPTFRAENSNTTRHLAEFWMVEPEIAFATLADNAKLAEDMLKYVFRAVLEERKDDLKFFEKHVDNDVISRLENFINSDFAQIDYTDAIEVLLQSGKKFEFPVSWGIDLSSEHERYLAEEHFKSPVVVKNYPKDIKAFYMRLNDDGKTVAAMDVLAPGIGEIIGGSQREERLDVLDKRMIEMGLNPEDYWWYRDLRRYGTVPHAGFGLGFERLIVYVTGVQNIRDVIPFPRSPRNANF

SEQ ID NO: 67053 - protein, 785 aa, Pasteurella multocida
MARLRKNCILSLLYTALLLACVVTIVRLLPYSPLKDHFPYSSAVYDEQQNLLRLTTAKDEKYRLWTPLHDISPKLVDAVLFQEDEWFYWHFGVNPYGLLRGAWQTYILGNSPQGGSTITMQLARVLWAIDSRSLLGKTEQILRAIQLEIRYSKKEILEAYLNFAPYGRNIEGAGTASLIYFNKANHKMNLAEALTLAILPKNPNSYIRQNNQQLNSALFKARNQLYQRWIAQYPADQQWQTDFQLNYPLRPLEKLPFFAPHFVDQLLQQYPEQTHIVSTLNSSQQRLIERITRRYLSQQYTKGIENVAVLLVDNRDMAVKALIGSGNYFNPAISGQINGTLANRSYGSTLKPFIYALAFDQGLAHGKTVLKDLPTTFGDYQPENYEGNFLGPVSVTQALLQSRNIPAIDLAKQLNPDLYDFLQQADIKLPKSKSYYGLSLVLGGAELNLQQLASLYAMLANQGRWQPLKFNQRDSLPAPKTVLSQESAVMIHDILRQNFRTDMQNKSIKTALPLYWKTGTSNGLRDAWTAGYFGHYTLVVWFGNFNNKNNPHFIGRALAAPLFLQLADSLIASEPQMRDIVTENINQLNLKNVLVCQADGNLPNAYCQQQVNTLFIPGKSPITISQLYQPFMVLKNSDMLACSTHDKAETEQKIYEMWSSDFQQIFAQAGVMKRMPIINTACPYEQQHQALQNLHHNNPQIVSPLAQRHYYIEHDNPKSPLLLSAIAAGEVKKLYWFVNNSFIGEALPQQPLFWQPRSAGYYTISVTDDYGRSTSLSINVLLKGF

SEQ ID NO: 67054 - protein, 281 aa, Pasteurella multocida
MNNLTGILYIVATPIGNLQDITQRALAIFEQVDLIAAEDTRHSGLLLSHYGIKKPFFALHDHNEQQKAHLLVEKLQQGQHIALISDAGTPLISDPGFHLVRQCRQAGIKVVPIPGACAAVTALCASGIASDRFCFEGFLPAKSKARCDKLQNLAEEERTLIFYESTHRILDTLADIEKTLGAERYVVLAREITKTWETIVGDNVANLRQWLGEDPNRTKGEMVLIIEGKVKQETDEINPQALKALELISQSLPLKKAAAIVAEIYGYKKNALYQYGLEHFN

SEQ ID NO: 67055 - protein, 204 aa, Pasteurella multocida
MFTGIVQGTAKIVSIQDKANFRTQIVKMPQEMLKGLEIGASVANNGVCLTVTEINQDCVSFDLMAETLRITNLGELQPGDLVNIERAMQMGSEIGGHILSGHVYCTASVKQIFSSENNRQIWFELPDMATMKYILPKGFIAIDGISLTIGEVKGQTFCVNLIPETLNRTLIGTREVGDKVNIEIDPQTQAIVDTVERYLGTKQQ

SEQ ID NO: 67056 - protein, 479 aa, Pasteurella multocida
MSRRLRRTKIVCTMGPSTERGNNLEKIIMAGANVVRMNFSHGTPEDHIGRAEKVREVAKKLGKTVAILGDLQGPKIRVSTFKDGKIFLNIGDKFVLDADLPKGEGTQEGVGLDYKTLPQDVVPGDILLLDDGRVQLKVLSTEGNKVFTEVTVGGPLSNNKGINKLGGGLSADALTEKDKNDILLAAKIGVDYLAVSFPRSSADLNYARELAEAAGLKAKIVAKVERAETVATTEAMDDIILASDVIMVARGDLGVEIGDPELVGVQKKLIRRARQLNRVVITATQMMESMISNPMPTRAEVMDVANAVLDGTDAVMLSAETAAGQYPAETVATMAKVCLGAEKMPSINVSRHRMDITFDSIEESVAMSAMYAANHMKGVAAIIAMTHTGRTALLMSRISSGLPIFALSRNQDALNLCALYRGVTPVHFDEVSRNSKGAAAAIRLLKEKGFLVSGDLVLLTQGDELLASGTNTCRTLVVE

SEQ ID NO: 67057 - protein, 274 aa, Pasteurella multocida
MSLQHIIEAAFEKRAEITPKTVDAQTRAAIEEAIEGLDSGKYRVAEKIDGEWVTHQWLKKAVLLSFRINDNELVAGSETNYYDKVPMKFAEYDAARFQQEGFRVVPPAAVRKGAYIAKNTVLMPSYVNIGARVDEGTMVDTWATVGSCAQIGKNVHLSGGVGIGGVLEPLQANPTIIEDNCFIGARSEIVEGVIVEEGSVISMGVFIGQSTKIYDRETGEVTYGRVPAGSVVVSGSLPSKCGKYSLYCAVIVKKVDAKTLGKVGINELLRTIDE

SEQ ID NO: 67058 - protein, 345 aa, Pasteurella multocida
MKFTKPNSRQNKPHVEQKTSRRSTNANAVASKNVKKVTEAQPKSVKASTHSVKPTVKNPLVEGEKLQKVLARAGQGSRREIEAMIAENRVSVDGKIATLGDRIDVHAGVKIRIDGHLINLLHAQKEVCRVLMYYKPEGELCTRHDPEGRPTVFDRLPRLTGSRWIAVGRLDINTSGLLLFTTDGELANRLMHPSREVEREYSVRVFGQVDEAMLHRLKKGVQLEDGPANFKEIKFAGGVGMNQWFDVTLMEGRNREVRRLWESQGVQVSRLIRTRYGNISLMKSLPRGGWEEMDLTNVNYLRELVGLPAEVETKLDVTKPRRRAKTGQIRKAVKRYAELNKRYKK

SEQ ID NO: 67059 - protein, 184 aa, Pasteurella multocida
MDALQLLTTRRSEKKLTAPAPDKAQLDVIFQAALNVPDHGRLSPYRFIVMEGEGLNKLEILLKETVQEFELGEEFLKKAENLASRAPMVIAVIAKINKALPKVPAWEQMLSAGCATYAIQLAANAQGFANVWITGKWVNGSKLRHAFDCAEHDKVIALLMLGSAEEKMDREKKSQDLSEFVSYL

SEQ ID NO: 67060 - protein, 241 aa, Pasteurella multocida
MLKRLSLYTLLLCVVPLFAWIFTWQWRSDDVMTNYDYPLYFLTESGSVPYAIITCGIFALLFIPLFQTRKQWVLGVLVMAFAVILTQGIKSGLKTLFSEPRPYIVYVAEASGISVEQFYAQERKQRSHFIDQFYQTKSDTPNWLKNHYEKEVGYAFPSGHTIFAATWLMLVVGFVHLLSVRSLTAKVLVSFTSLWAVFMLISRLRFGMHYPIDLFISTLIAFFVHWGIFTFLQKKSIFIKK

SEQ ID NO: 67061 - protein, 433 aa, Pasteurella multocida
MTIKNSFLEYRMTELTQQIEKSTWHSKFAALGPGILMASAAVGGSHIIASTQSGAIYGWQLAIIIILANLFKYPFFRFGVQYTLDSGETLLQGYLRKGKLYIWIFFLLNVFATVINTAAVGLLCAAILTFVLPVQVPVPTLSFIVIGVSTSILLLGKYRLLDGLSKLIMIALTITTVSAVIIALARNGIQGVAPADYVSASPWNLAALGFIVALMGWMPAPIEISAINSMWVIAKRRVSKVSYQDGIWDFNVGYIGTAILALVFLALGALVQHGSSETVQLVGGKYIAQLINMYASTIGEWARGLIAFIAFMCMFGTTITVIDGYSRTNVESLRLILGKKESRPSYLNVAITFAALAGLAIIFYFNNAVGPMLKFAMIASFVSTPVFAYLNLSLVLKGEHRVKGKLLWLSLIGLMYLTSFTLLFIAQQAGWLN

SEQ ID NO: 67062 - protein, 407 aa, Pasteurella multocida
MRENHQIANVDLVKQMNSAVVYKLIDQQGPISRIQISELSQLAPASVTKITRHLLARGLIKEVEQQESTGGRRATSIVAEHKAFRTILIRLGRQHATFAIMDLSTKLLKKAVVDLPEQQSVTSIEAFLLQHLTAFMAQHQKRGSEFIAVGITVPGFVDVKTDMIQYMPHLDLDAPWDLANKISQHTQLATFIGHDVRSLALAEHYFGVTQDCYDSLLLRVHRGVGAGIVINHEVFLGYKNNVAEIGHIQVDPLGKRCLCGNVGCLETVVSNTAIERKMHELLEDGYESKWLSLESHDIEAICKASNKQDTAAIELIEHVGVQIGRVLAMSVNMFNPEKIVISGEITQAKNILFSAIQRSLDSHALPAFVKNTPLVASELKNEDVIGAFALIKRALLDGSLLRRLLAD

SEQ ID NO: 67063 - protein, 434 aa, Pasteurella multocida
MTILVIGINHKTASVAIREKVAFSAEKRVEALAQIQQQALAESAVILSTCNRTEVYFHHKAIPPQEAESWTARCMQWFAEIHQLSLDALAGCLYSQQNQQAVLHLMRVACGLDSLVLGEPQILGQVKDAYQLSKMYYQGQNQPLSSEFSRLFQKTFSVAKRVRTETNIGGNAVSVAYGACSLARQIFDSLKTLNVLLVGAGETIELTCRHLLRHGVQRIMIANRTFERAQHLVTKLDGAENVQVLALTQLQEGLNQADIVISSTGSPTILITQDMVKIAQKARCDLPMLLVDIAVPRDIEESVGELDSIYHYTVDDLQTIIQRNLVEREKASAQAWVIIQQECADFFEWLKVHQFSNLIRSYRENAEDIRQILLEKALLALRQGEDSEAVLQALSYKLTNKLLHSPTQVMNAMVKTGNSTGLALFSSTLKSDVE

SEQ ID NO: 67064 - protein, 137 aa, Pasteurella multocida
MQNWTTEMWQAAGIGLVIGLILGYLFLRLTKGSVKKQLQTETELQKVKNQLDNQKQQLEKHFSESAELLKNIAQDYQKLYKHLATSSTTLLPELTNKPLFSSHLITTEHVDRHDQRNKDDHRRDYCEGSSGLLRNDK

SEQ ID NO: 67065 - protein, 653 aa, Pasteurella multocida [sequence omitted]

SEQ ID NO: 67066 - protein, 406 aa, Pasteurella multocida
MLPLEQALTQMLAMLPTPDCAQAEQLPLQHAVNRICAEDIISPLNVPSFDNSAMDGYAVRLADLAQNLTLTVAGKSFAGAPFDGEWQTQSTVRIMTGAMLPVGADAVVMQEDVIVNEDGTVTFPEKIKAGQNIRYIGEDVKQGEVVLNKGSLLNAVSLPLLASLGIDNVKVFPRLKVAVLSTGDELVPVGQPLKEGQIYDTNRFTIQLLLEKLNCEILDFGLLPDNEQEFEKAFIEAQQQADLVITSGGVSVGEADFTKKVLEKVGQVNFWKIAMKPGKPFAFGRLKNAWFCGLPGNPVSALATFYQLVQPVIAKLSGYSQWKAPQRLTAIAATKMKKAPGRLDFQRGFYQVNAQGQIEVQPVGFQGSHLFSSFVKSNCFIVLERERGNVEAGETVTIEPFNHLMS

SEQ ID NO: 67067 - protein, 238 aa, Pasteurella multocida
MTELSYQEELRYNRQIMLKAVDFEGQETLKQSKMLIVGLGGLGCAASQYLTTAGVGHLTLLDFDTVSLSNLQRQVLHDDSRLAMPKVDSAKLSLQRLNPHIQIDTINAKLSTEKLAEIIPHFDVILDCTDNIEIRNQLDQVCQQAKVPLVSGAAIRLEGQVTVFTYQENTPTYRTLSQLFGENTLSCVEAGVLAPIVGIVGSIQALEAIKVRLNIGKNLCGRLLMIDGMTMNVREIKF

SEQ ID NO: 67068 - protein, 147 aa, Pasteurella multocida
MYFFIFLKKGQHYLKSWPLESKLGMIFPENRVIKATLFAQKFMPFLAVFAITWQQVYAKSDISALAIAVFSAIVALLIPLQGLYWLGKRSITPLSPQSAVWFYEICERLKQVNETLPILTEQPNYQNLADVLKKAQRKLDKAFWQEL

SEQ ID NO: 67069 - protein, 712 aa, Pasteurella multocida
MSRTIILIPISAGVGLTSVSLGLTHALEQKGAKVGFMKPISQPNSGEDMIDRTTSIIRTSTTIETSEPFMLSVAESLIGQNQSDVVLEKIVENHQQLAKNNEIVVVEGLIPTRKHSYANSINYEIAQALDAEIILVAAPATETPAELKERIKAAASLFGSKNNPNLLGVVINKFNAPIDESGRTRPDLAEIFDSFQHTQNQVSEIYHLFEKSPIKILACIPWSAELIATRAIDLAKHLGAAIIHEGAINERRIRGITFCARNLTNMVEHFRVGSLLVTSADRPDVIVAAALSAMNGVEIAGVLLTGGYKIDAQIKKLCQHAIESTGLPVFRVEGNTWQTALALQSFNLEVPVDDKERIEKIKHYISDLLDSNFIDSLAAASSRLRRLSPPAFRFQLTELARQAQKRIVLPEGDEPRTVKAAALCAERGIAECVLLATPESVMRVAEAQGIQLGKGITIIDPATVRENYVARLVELRKNKGMTEDSAREQLEDNVVLGTMMLEANEVDGLVSGAVHTTANTIRPPMQIIKTAPGNSIVSSIFFMLLPDQVLVYGDCAVNPDPTAEQLAEIAIQSADSAKAFGIDPKVAMISYSTGTSGSGADVEKVKEATRLAQEKRPDLIIDGPLQYDAAVMEDVARSKAPNSPVAGKATVFIFPDLNTGNTTYKAVQRSADLVSIGPMLQGMRKPVNDLSRGALVDDIVYTIALTAIQATQ

SEQ ID NO: 67070 - protein, 2712 aa, Pasteurella multocida
MNKVYRVIWSHVTNTFIAVSELATSKGKVKSFSAISSNPQPELNSSIPATFKLSAIALVSILAFAPSQVLAQDVNATNLTVSGTSTFTGAATFNNTATFNNMVTAGNVTATTLTVGGKNVATKDDVTTLTTTVNQKAAQSEVDNLKNTKADKSDVDNLKNTKAAQSEVDNLKNTKADKSDVDNLKNIKADKSEVNELKNSKADKSELTKLSNLVTSLGVPEGTTTYTGIKYFRVKSTLDDAVADGQDSVAIGPKAKTEGVDAVALGHDSTANATESIAIGKKAYAVKTANKGIAIGEHARVGSKQDGDVVYDGASSYVLGPKDGESSVAIGDKAVSRGEASIAIGKNAITSNKDAKSQIAKNNIALGTNAQAIASDNSIALGNAARTNKDSDSSIAIGDSAETKAAHSLAVGTTSKALAEAALALGKLAEAKGTSSVAMGNTSKADGSNSVAVGNTSQTLQSNTIAIGSSAIANPERTISIGLNAGKGQEADATGTKHSQINIGENSGEGVIGQLNIGIGAHAGTNVVGKHNIALGTYAGTNLKNSEETSGANVSIGHEANKYDQLTAVQKSTVVGAQTKAASRSTALGAEATALGLDAVAVGITSKAEGDKSVAIGANSTADSNNVALGATSRAVAKEGSGYLTGKQSSLVVSVGHQDGAADQHILRRLVNVADGVDEQDAATVAQLKKVTEKVTSDLQAQFNALSHAPTASEIKYDTVPPSPTTGAENKITLKAKTRISNVAPAELDTDAVNLGQVNHIVTKNKAHYFSVNDTGINPVPGNHDNDGATAKLAMAIGQNAAAKAERSVAIGNNTTVNGEGSIGLGTYYKGSAELDDGVPRESETTVTKPSKNVKYGIAIGAGTTTDGNNSIAIGSLAATSDKNPGANVDRAIAIGYNAVSSAEKANAIGDRAVANSVKGNAFGSQALSGAESSTAIGTESKSEGQNAYALGTKSHAKGLNSIAFGTNQVVSGQNSGSIGYAGELGNAKATVINGEGTYSLGNTNSTLTANESGIFGNSNEIKAKENARIVGNKNTIGAIEEKPHVPGTPPAAPVNDLKDIYVTGYDNKISSDKKLAKDLSGLFVYGHGNNIAQLPDPDSTEEFTLTDSSVIGANNTLNTKGKNYFVLGNNVTATLENSVYLGADSAYTTGNSTSSMNSYADMANGLNKSGYTFAGSQPVGVVTVGAVGKERRVQNVASGLVTEASTDAINGSQLFALTRPLRFAGDNSTLSNPNGKPGTDVTVISRSSNQGMKVVGGENDGNKLTTIADKNIGVIANGDHTLEVRLAKTLSNLKDATFGTGTDKTTINKDGMTITNGANTVSLTEGGLNNGGNKITNVAAGQNETDAVNVKQLNDLKAEGFGLTGEDGQTVKQALGTAIKVTGDDNVKTKIVTDADGSKKLEIGLENQVTLGGEAKNGNPAADGKLTLKNQAGTDKVVLDGANGTVGLTGADGAQAVITVKKGRPTLDNAAETPRIAYGNEEVATLNDGLKFGANAGDVHNAKLNTQVDVKGATANTVWDNFDKGQNIMTRVEGNTITVALAKALSGLTSATFGDPASNPKDSTVINKDGLTITQGDNTVSLTDDGLDNGNKQIKNVASGLTTTNGTATTSLDDAVQTNGVNVGDLKTAINNITNGTNPLGGFGLKDKAGNTFKQNLGETAQITGDSNVNTKVVDGQNGGKALEVSLANQLTLGKGPEANVPNATGEAGKITLKDDKGTDRVVVDGSEGAISLTGQPATQGAAAPTAKIKVAEGNPDLENTSDDPANPNQNKKTRITYDIAGPNGTTVTEQLATLNDGLKFGANTGDVHDAKLNTRVDVKGKAENTNWANFDAGQNIMTQISGNTITVALAKALAGLDSATFGNPADGSKDGAVINKDGLTITEGDKTVKLTEKGLDNGGNQIINVDSGLKKTDGSVVALKDAEGSVLTNGVNVGDLKNAIKDVTSATNGGFGLKDKAGAEFKQDLGTTAQITGDKNINTKVIDVPNSNDKALEISLANDITLGKNGADGVDGSLGVNGKDGASVVLNGKDGSIGLTGPRGQDGSDGKSATISVKDGKAGVDGKDGDTKTRIVYETKDATGKPVVEEVATLNDGMKFVGNDGKEVTRKLNETLDIKGGLDAATVADNAKVSSSNLGVKTNAEGTGLEIVMKERPTFSGLVVNGKDGEDAAVKFAKDGKDGMSIAAVTDNDGNATGLTIKDKDGNPGVTFNNDGRITNVTAGVDDKDAVNVSQLKDGLAKATTKVEAGKNMTVTPTVNQDGSTTYTVATEDNVNFTTVTTGNTVMNNDGVKVGDNVALTNEGLKAGDVTVTTAGINAGNKKVTGVADGDISPNSTDAVNGSQLNAVKETAEAGWHLTANGADSSNVKPRNTVDLNNTDGNIVISKTNTADKHNVTFGLADNINVKDSVVVGPKGANGKPGEGAVVINAEDGANGKDGISIVGKDGKDAVAISGKDGVGTIGLTGPAGADGKNANAIIGVNDSVKGLDGNDGKDGNSKTRIVYTKPNGEEEQVATMNDGLVFGADKGTEHKAKLGTTVKVKGDDKNIETEVAGDTIRVRLKDNIDVKGINVTENLTVKEGAKINMGNNVIDGVADGEVNATSKQAVNGSQLHKVQQQVNNQATAINKLGDHINKVDKDLRAGIAGATAVAFLQRPNEAGKSIVSLGVGSYRSESAIAVGYARNSDNNKISIKLGGGMNSRGDVNFGGSIGYQW

SEQ ID NO: 67071 - protein, 487 aa, Pasteurella multocida
MYKISSFFTATLLRLFKRTILICSLLVSHFSYAEIDLAEINAHLPEGTSLGFVAKNLNRNEKIVEHQASTFMLPASTQKVLTALTAKLVLSDQFQFETSLLTNGKIKNNEMHGDLIVRFTGDPDLTSGQLYQLFAQLKKQRIQKISGDIILDTSVFSSHDRGLGWIWNDLTMCFNAPPAAVNIDNNCFYVELDANYAPGEQAKIHVPAQYPVQVFGQVYISTPKEAGYCQLDATVLDNNRYQLKGCLARQNKPFGLSFAIQDPNAYAATIIQRHLKKLGIAFNGKIKQPYQAQKGQLLAQHLSKPLPDLIKKMMKKSDNQIADALFRTIAYQYYQRPASFPLASQAMRQILQTKAGIKFGHAIIADGSGLSRHNLLSADILLQALEYIAKHEAQLQLMDTFPIAAVDGTLTGRGSLIHEPLAKNLIAKTGALKGVYNLAGFMTNKKGEKVAFVQFINGYSTGDFERKTKRAPLVQFESQIYNRLYEH

SEQ ID NO: 67072 - protein, 756 aa, Pasteurella multocida
MNKALMVTKRDGHLEPIDLDKIHRVITWAAEGLDNVSVSQVELRSHIQFYEGIRTSDIHETIIKAAADLISKDSPDYQYLAARLAVFHLRKKAYGHFDPPRLYDHVKKLVRMGKYDPALLVDYTREEWDEMDSYLDHWRDMTFSYAAVKQLEGKYLVQNRVTGEIYESAQFLYLLVAASLFSKYPTETRLSYIRRFYDATSTFKISLPTPIMAGVRTPTRQFSSCVLIECGDSLDSINATASAIVKYVSQRAGIGVNAGAIRALGSPIRGGEAFHTGCIPFYKYFQTAVKSCSQGGVRGGAATVYYPIWHLEVESLLVLKNNRGVEDNRVRHMDYGVQLNKLMYQRLIKGGDITLFSPSDVPGLYEAFFADQDKFEQLYLQYEQDPTIRQRSVKAVELFSLLMQERASTGRIYIQNVDHCNTHSPFDPKVAPVRQSNLCLEIALPTKPLQHFHDEKGEIALCTLSAFNLGTLENLDELEGLADLAVRALDALLDYQDYPVIAAKKSSLARRSLGIGVINYAYYLAKNGVRYSDSSANDLTHRTFEAIQYYLLKASMNLAKEIGPCEYFNETTYSQGILPIDTYKKDIDNLTKEPLHYDWETLRKEIQEFGLRNSTLTALMPSETSSQISNATNGIEPPRGHVSVKASKDGILKQVVPEYETLGENYELLWDLPNNDGYLHLVGIMQKFVDQAISANTNYDPQRFEDGKVPMKRLLGDLLTAYKYGLKTLYYQNTRDGAEDVQEDIDDGCSGGACKI

SEQ ID NO: 67073 - protein, 376 aa, Pasteurella multocida
MAYTTFSQNKNDQLKEPMFFGQNVNVARYDQQKYETFEKLIEKQLSFFWRPEEVDVSQDRIDYQALPEHEKHIFISNLKYQTLLDSIQGRSPNVALLPLVSIPELETWIETWTFSETIHSRSYTHIIRNIVNDPSVIFDDIVTNEEIIKRAKDISAYYDDLIRDSQLYTLYGEGTYNVDGQDCVVTLRNLKRQLYLCLMSVNALEAIRFYVSFACSFAFAERKLMEGNAKIIKFIARDEALHLTGTQHILNIMASGQDDPEMAEIVEECKQEAYDLFVAAAEQEKEWADYLFKDGSMIGLNRDILVQYVEYITNIRMQAVGLPLPFQARSNPIPWINAWLVSDNVQVAPQEVEVSSYLVGQIDSKVDTKDFGDFDL

SEQ ID NO: 67074 - protein, 82 aa, Pasteurella multocida
MKIHLIHSQMTLDYDNQTSLLSHLENHGIHHEYQCRSGYCGSCRVKISKGKVSYKEPPLAFVQPNEILLCCCQVDEDLDIEM

SEQ ID NO: 67075 - protein, 349 aa, Pasteurella multocida
MIIREIVVEPQAIAWLPWAVSYFFFIGLAFSSVFVGLLIHKMEKNVQHEFIAIIVALSCAIVAPIALTADLHQPSRIVNFYLHLTPWSWMAWGAIFLPLFTLAVVGYFLCLLRQAIPQQHLPRFLHFLYWGQLNLPRWTTFFRVFAFLSALSILIYTTMEVFVVEARPLWHQSWLMPLILFSVFPSTLLLCRFLIAVFSQRKIAGYLSTLTFISLMLFIGTLLGVYFSSEQTALQLTQLWQVSDLPMLVLVVLGGLLLGTYLTASLWLQGMMVLLALLLTWVVRWILLIEVQRLAKYNALINPYELTWHIDGAIGILSVFSLWLCISIVLWWVFSAALAPLHLTGGNHE

SEQ ID NO: 67076 - protein, 270 aa, Pasteurella multocida
MTLRVAIVGAGGRMGRQLIQAVSETEGVVLGAAFERQGSSLLGADAGELANVGHLGVQITDDLASQQDQFDLLIDFTRPEGTLAHLAFCVAQHKNMVIGTTGFDDDGKAKIQQAADSIGIVFASNFSVGVNLVFKLLEKAAKVMGDYCDIEIIEAHHRHKVDAPSGTALSMGEHIAKTLGRDLKTHGVFTRDGITGERKRDEIGFATIRASDVVGEHSVWFADIGERVEIAHKATSRMTFAKGAVRAAKWLAQKEKGLFDMTDVLDLNQL

SEQ ID NO: 67077 - protein, 330 aa, Pasteurella multocida
MSHGEFDIIQRYFTASKRTARKDVILSIGDDCAITELRQNQRLVITTDTMVENTHFLPSMHAADLAYKAAVTNLSDLAAMGAEPAWVSLALTLPDVDAQWLSDFSQSFFDVLDHYNVDLIGGDTTKGPLSVTITAHGIIPKGKGLCRHSASVGDWIYVSGTLGDSAAGLSLLLSQQTPLNSDHEFLIQRHLRPTPRVLLGLELAVSSLANAAIDISDGFLADLDHILTRSQCGAVIELDKLPLSSSLVNVFGVEQAETFALSGGEDYELCFTVPDSNKAKLERALAYIGVDYTCVGQVRAISPQNKKRIKFQRDGNPIDITIQSGFDHFK

SEQ ID NO: 67078 - protein, 144 aa, Pasteurella multocida
MTEQKHEKKISPRRRARECAVQALYSWYVSQNSPAEIELNFMAEQDLKGVDTAYFRRLFRQTAENVDAVDNIMIPYLDREVSELDPIEKAILRLAVYELKFELDVPYKVVINEAIEVAKVFGAEDSHKYVNGVLDKVAPVLSRK

SEQ ID NO: 67079 - protein, 157 aa, Pasteurella multocida
MKVLEGAVAAPNAKIAVVIARFNSFINESLLEGALDALKRLGQVKEENITLVRVPGAYELPLVARRLAESKKYDGIVALGTVIRGGTAHFEYVAGEASSGLGQVAMNADIPVAFGVLTTENIEQAIERAGTKAGNKGAEAALVALEMVNLLAQIDAA

SEQ ID NO: 67080 - protein, 459 aa, Pasteurella multocida
MRKRRFLLTSIALGLSILSTPMISQASLPTQVDGQQVPSLAPMLEKVLPAVVSISVEGKAKNHGSTPFQGIPEEFRFFFGPDLFNDRAPRNFRGIGSGVIINAEKGYVLTNNHVIDSADKITVQLQDGRELSAKVIGTDELSDVALIQIEKPKNLTALTIADSDKLRVGDFTVAIGNPFGLGQTVTSGIVSALGRSTGSDNGTYENYIQTDAAVNRGNSGGPLINLQGELIGINTAIISPSGGNAGIAFAIPSNMANNLVQQILEFGEVRRGMLGIKGGELNADLAKAFDIEAQQGAFVSEVLPNSAAEKAGLKAGDVIVAMNGQKISSFAEMRAKIATSGAGKEIALTYLRDGKTHQTKVTLQSDDQTQADASHLLPALAGAEMSNHDDKGVKGVLITSVTPKSLAEQRGLKKGDVIIGVNRQKVENLGQLRKILDAKPSAIALNIVRGNTNFYLLIQ

SEQ ID NO: 67081 - protein, 634 aa, Pasteurella multocida
MGKIIGIDLGTTNSCVAVMDGDKPRVIENAEGDRTTPSIIAYTQDNETLVGQPAKRQAVTNPKNTLFAIKRLIGRRFQDEEVQRDVSIMPFEIVAADNGDAWVGVKGEKMAPPQISAEVLKKMKKTAEDFLGEPVTEAVITVPAYFNDAQRQATKDAGRIAGLEVKRIINEPTAAALAYGLDKGQGNKTIAVYDLGGGTFDLSIIEIDEVGGEKTFEVLSTNGDTHLGGEDFDNRVINYLVDEFKKEQGVDLRNDPLAMQRLKEAGEKAKIELSSAQQTDVNLPYITADATGPKHLNIKLTRAKLESLVEDLVSRSLEPVKIALADAGLSVSQIDDVILVGGQTRMPLVQQKVEAFFGKAPRKDVNPDEAVAIGAAVQGGVLAGDVKDVLLLDVTPLSLGIETMGGVMTTLIEKNTTIPTKKSQVFSTAEDNQSAVTIHVLQGERKRAADNKSLGQFNLEGINPAPRGMPQIEVTFDIDADGIIHVSAKDKGTNKEQKITIKASSGLTDEEIQQMVRDAEANAEADRKFEELVQARNQADHLVHGTRKQLSEVGDKLSAEDKAPIEKAVADLEAAAKGEDKAEIETKVQALIQVSEKLMQAAQPQPEAQAQQAQSGKSNDDVVDAEFEEVKDNK

SEQ ID NO: 67082 - protein, 351 aa, Pasteurella multocida
MLKINVKKQLGQLALEANLQIPARGVTALFGLSGSGKTSLINLVSGLVHPDEGYISLNERVLVDQSKAVCIPAYQRHIGYVFQDARLFPHYTVKGNLCYGIKKIDLAKFDDIVSLLGIGHLLKRYPITLSGGEKQRVAIGRALLTQPEILLMDEPLSALDLPRKRELMSYLETLSKKIDIPILYVTHSIEELLRLAEYVVLLDEGKVRAFDRLESIWENPLFLPWKLEDEQSAVLSLPILHNNTGYQVTALGLQQQQIWIKAQQAEVGENIRICIKGSDVSLSLTQPEKTSIRNILHGKVKRIVERENRVDVQIEIDEKPIWATISKWALEDLALQLGQPVFAQIKAVSVL

SEQ ID NO: 67083 - protein, 254 aa, Pasteurella multocida
MLKLKMITVSLATACLAFSLSAQAKVTVFAAASMTNALNQIAEDYKKVKPDQELVFSFASSSTLAKQIEEGAPVDIFVSANTKWMKHLSDKGLTIKDTEKVLVGNELVLIAPEASQLKEVDVAKGEWVAELKDSFLSVGDPDHVPAGQYAKEALTNLKLWDKVEAKLARGKDVRAALALVERAEAPLGIVYSTDGKVSKGVKIVGVFPADTYKAVEYPVALLKDRDNAETREFLNYLESAEAKKVLVSYGFSVK

SEQ ID NO: 67084 - protein, 376 aa, Pasteurella multocida
MMTFTAQDVVYMQMALELAEKGQFTTTPNPSVGCVLVKDGIIVGRGFHVKAGEAHAEVMALREAGENARGATAYVTLEPCSHFGRTPPCAQGLIDAGVVKVVSAMCDPNPQVAGRGLSMLSDAGIESAVGLLAEKAEWLNRGFLKRMRTGRPYVQLKMAMSLDGRTAMANGESKWITGELARADVQAERAKASAILSTSATVLADDPLLNVRWQQLPDKVKADYTQAQLRQPVRVILDSQHRVQPSHRLFSLSSPVWLVSQTARSLLEFPAHCEQIQLSASTNALADLMAELGQRQINTLWIEAGATLAGALIEAKLVDELIIYIAPKLLGDAARGLCKLPHLSTLAEASLWQLHSIEKLGDDLKTIYHPRITEPT

SEQ ID NO: 67085 - protein, 509 aa, Pasteurella multocida
MLIGVPRELLDNESRVAATPKTVQQILKLGFEVIVEHHAGFKASFEDQAFAETGAKIGSAQEVWQSDIIFKVNAPTDSEIALIKEGATLVSFIWPAQNPDLMEKLSAKKINVLAMDAVPRISRAQSLDALSSMANIAGYRAVVEAAHEFGSFFTGQITAAGKVPPAKVLVIGAGVAGLAAIGAANSLGAIVRAFDSRPEVKEQVESMGASFLEIDFQEEGGSGDGYAKVMSEEFNRRALALYAEQAKEVDIIITTALIPGKPAPRLISKEMVASMKPGSVIVDLAAATGGNCELSKAGEVVVTDNQVKIIGYTDLPSRLPTQSSQLYGTNLVNLLKLLCKEKDGKISIDFDDVVLRGVTVIRDGEVTWPAPPIQVSAQPQKVKATLVEKKEVKAVDPRKKYGAMAVAALLFMALASVAPAAFLSHFTVFVLACVVGYYVVWNVSHALHTPLMSVTNAISGIIIVGALLQIAQGNFFISILAFIAILVASINIFGGFKVTQRMLAMFRKD

SEQ ID NO: 67086 - protein, 395 aa, Pasteurella multocida
MTEINTVLAELKRGVDEILSEADLIEKLKENRPLRVKLGADPTAPDIHLGHTVVLNKLRQFQQFGHEVIFLIGDFTGMVGDPSGKNTTRPPLSRDDVLRNAETYKQQIYKILDPQKTRIVFNSSWLGELGTEGMIRLTSNYTVARMLERDDFKKRFSNNQPIAIHEFIYPLLQGYDSVALDADIELGGTDQKFNLLVGRELQKSAGQKPQVAITLPLLVGLDGEKKMSKSLGNYIGVAESPTEMFGKVMSISDELMWDWYDLLSFRPLTEIAQLKQEVENGRNPRDIKVLLAKELIARFHSEADAEAAEQEFINRFQKGAMPEDMPELTFEGEMGLANLLKEAGLVASTSEANRMVQQGGVKIDGEKVEDAKLVIKASTAVYQVGKRKFARVTVK

SEQ ID NO: 67087 - protein, 307 aa, Pasteurella multocida
MAKPRKRGRDIDGVFLLDKPQGMSSNDIMQKVKRVFQANKAGHTGALDPLATGMLPICLGEATKFSQFLLDADKRYQVTAKLGERTDTSDAEGQVVETRDVQVDVQDILAALPHFRGNLMQVPTMFSALKHQGKPLYEYARAGITVEREARPITIFDLQFIAYDAPYLTLEVHCSKGTYIRTLVDDLGEYLGCGAHVTVLRRTAVANYPVEAMMNWDTLQVLAAQQDLALLDQHLLPTDSAVSALPALHLNQEQSKAISFGQRVKFDNPTQLTGQVRLFSDTQQFLGVALVDEHNVIRPQRLMTQNT

SEQ ID NO: 67088 - protein, 833 aa, Pasteurella multocida
MTEDVKKADGAAPKKLSLQRRTKTTVSTTAGGKAKEVQVEVRKKRTVPTDAAQKAEEARLKAKQEADRLAAEKAKKDAEEKARLEAEKAKQAKAEEAKKAQAVSAPTKAVDVEKEKRRAEEAELRRKADELARQKAEELARKAAEEAKRYAELSEEDAENENSEDYADYHLTSTYAREAEDEEARRKENRNRGGKNKVAKAKKGGREDESSKTERESNRRNQKDGKMGKGKHAKKGSALQQAFTKPAQAVNRDVVIGETITVAELANKMAVKATEVIKTMMKMGAMATINQVIDQETAQLVAEEMGHKVIIRKENELEESVMSDRDVDAELVTRAPVVTIMGHVDHGKTSLLDYIRKAKVASGEAGGITQHIGAYHVETDGKMITFLDTPGHAAFTSMRARGAKATDIVVLVVAADDGVMPQTIEAIQHAKAAGVPIVVAVNKIDKPEANPERVETELLQHEVVAEKFGGDTQFVYVSAKKGTGVDELLEAILLQSEVLELTAVKDGMATGVVIESYLDKGRGPVATILVQTGTLHRGDIVLCGFEYGRVRAMRNENGKDVASAGPSIPVEVLGLSGVPAAGDEATVVRDEKKAREVALYRQGKFREVKLARQQKAKLENMFTNMAEGDVAELNVIVKADVQGSVEAICQSLNELSTAEVKVKVVGSGVGGITETDATLAAASNAIVLGFNVRADASARRIIESESIDLRYYSIIYELLNEIKAAMSGMLQPEFKQEIIGLAEVRDVFRHPKFGAIAGCMVTEGIVKRNNPIRVLRDNVVIFEGELESLRRFKDDVAEVRNGMECGIGVKNYNDVKVGDQIEVFEVVEIKRTI

SEQ ID NO: 67089 - protein, 494 aa, Pasteurella multocida
MSKELLLAAEAVSNEKLLPREKIFEALESALALSTKKKYEQEIDVRVVINTKTGEFDTFRRWLVVDEVTNPTKEITLEAAQFDDPNVQLGDYVEDQIESVAFDRITMQTARQVISTKIREAERNKIVEQFRSQEGEIVTGTVKKVNRDNIVLDLGQQAEAVILREDMLPRENFRPGDRVRGVLYKVSPESKGAQLFVTRAKPEMLIELFRIEVPEIGEELIEIKNAARDPGSRAKIAVKSNDKRIDPVGACVGMRGARVQAITNELGGERVDIVLWDDNPAQFVINAMAPADVTSIVVDEDSHAMDIAVEPANLAQAIGRNGQNVRLATQLTSWTLNVMTTDELNQKHQAEDNKVLKLFMNALEIDEDFAHILIEEGFSTLEELAYVSVSELTAIDGLEDEDLVEELQARAKNAITAAALAEEEALKQAHIEDRLLALEGMNRHIALKLAEKQITTLEELAEQGVDDLADIEDLTAEQAADFIMAARNICWFSE

SEQ ID NO: 67090 - protein, 248 aa, Pasteurella multocida
MNENYRHRQLLNLLEERKALSTQDIIRLLDVSPATARRDITKLNEQGRLKKVRNGAEVIEKKAYRSQPLAINNSGEKKRIAELAAKLCQDGDSVILTCGSTMLMLGSRLCGKNVQIMTNFLPLANYLIEHDHNDVVIMGGQYNKNQAIMLSLNTNAEAIYAANIMFTSGKGLTVDGLYKTDMLIANSEQRMLPRVGKLVVLLDSSKLGKQAGMLFAELHNIHLLITGKEADAEIIAALKRQGLNVLLA

SEQ ID NO: 67091 - protein, 625 aa, Pasteurella multocida
MLIPRFLGSGLIQKSFMQIYTMKKSRGVTMETLYNLFLSFNNQVLSKAPFLLGIVACIGYILLKKDTTTVIKGTIKTIVGFMIVQAGSGFLVANFKPIIEGLSKYHNLTGAVIDPYTSMQATIQTMADNYAWVGYAVILALFLNILLVVCRRITGIRTIMLTGHIMFQQAGLVAVFYMIIGASMWETVIYTAVLMALYWGISSNIMYKPTQAVTGGAGFSIGHQQQIASWIAVKLAPKLGDKNDTVDKMKLPKWLHIFHDSISATALVMTVFFGIILLSFGLDNLQQMAGKTHWFMYIFEMGLKFAVAIQIIVTGVRMFVAELSEAFKGISERVIPNSVLAIDCAAIYAFSPNAMVFGFMWGAIGQFVAVGLLLGFSSPILIIPGFIPMFFSNATIGVFANQFGGWKSVMKICFIMGIIEVLGSAWVIHLLATQGTTFNGWMGMADWALFFPPILQGIVSIPGFFFVLLTLAIVYMVFASKQLRSEEAAAAALGKTLEQMDGYDKTEHSPITPDDSVQHDVLKTAVNPIRILAVCGSGQGSSMMMKMKIKSYLDKHNIPNTLDSCAVTDYKGKLNEIDIIVASRHLADEIEVGEDKFVLGVQNMLNPNSFGPELIALIKKYQQTT

SEQ ID NO: 67092 - protein, 155 aa, Pasteurella multocida
MNLKQSLIENNSIKLHQTAKNWEEAIKLGTDMLIASGAVEPRYHDTIIKCVKELGPYIIIAPHLAMPHARPEDGVNRTAFALVTLDTPIYFDGEDEPVDVLLTLAGSDANQHMQGLMEITQVLDDPDSDTGINLDKIRRCQTAEDVYAVIDAVLN

SEQ ID NO: 67093 - protein, 622 aa, Pasteurella multocida
MKKVIIIGHKQSNYQDVEKVFQCYGMNPPLPSKREKMSPIEIGHVLNKVLPSLEHTPKNVSLLSNKKSKIKKGNSAKNKSHKHAKTNTIQTTSSIWDNLSLDLMLANIEQNFWGWSDPNAIQILDYWANLDPNIHFVFVYDKPENLFQYHSLEEALKLDKHTVQEKFEEWQTYNEKILTYFNKYKDRSVLLNTQQLQNTKKTSLSEIYKHISAPDALVKKLNEPSLNKEMEIIEVNQDLSHQEECPLSNFIVSQIIKNSPTVTQVYEELQSHADLPYISEQKLVNDADFALLAWKDMIQKKVDVNQYQHEKELELSTIKERQLEVTERYQLTEQKLSETQKEIEQIKDENRKVKSEKAKLTASVQSTSKILSEKEKEISCIKSENTKIKEEKIKIDEAYHLTKKTLSDKEKALKTHQDEIEALKIIFNENISVQEDMQEKFQEANKRKQELEQELKAISDKKALLETENSQKTQVSESLENENKVLLAQLQLIQEELEKLYIDNQVLKAKPRLYGAADRIKNQLTYRLGYKIQRHGRSLFGLIFLPFILFFTYLGFKREMKKYEWNTLPPIHEYEDAHEANRIKSHLSYKLGVLFLQEINNPFKWLTLPYKLIKEGKRFKQG

SEQ ID NO: 67094 - protein, 390 aa, Pasteurella multocida
MKKITIAGAGYVGLSNAVLLAQHHNVILLDIDQNKVDLINNKKSPITDKEIEDFLQNKSLTMMATTDKEVALKNADFVIIATPTDYNTETGYFNTSTVEAVIEQTLSINPQATIIIKSTIPVGFTENMREKFNTPNLIFSPEFLREGKALYDNLYPSRIIVGSTSYQAKVFADMLTQCARKKDVTVLFTHNTEAEAVKLFANTYLAMRVAFFNELDTYASLHHLNTKDIINGISTDPRIGTHYNNPSFGYGGYCLPKDTKQLLANYADVPQNLIEAIVKSNETRKRFITHDVLNKKPKTVGIYRLIMKSGSDNFRASAILDIMPHLKENGVEIVIYEPTLNQQAFEDYPVINQLSEFINRSDVILANRSEPDLNQCSHKIYTRDIFGGDA

SEQ ID NO: 67095 - protein, 477 aa, Pasteurella multocida
MLNLFKIIKKYVHIQSLLHKKEYALLYAKYINQLSINQQAYVICQLKLYDLFLIDPKWSHSVFFQLGLIARGHDHDSDEMVRRLITCTDFSKNKQLILSQLLAYSPQIATTLCPQTYRYRALYLSLLANLKDFVRLKEELNKLPSCVLKNTPHYCLLQNFVEKENSKKLENINQFLYFYKLGEITTIKTEDPPNTNNIVSHSIVNDTNTYLNAPLITILVTTFNSQKSIKNTLNSLFNQSYPNIEIIVIDDHSQDNTMSILQAYTKQYKNIKIISLKENVGTYVAKNIGLKYASGEFITCQDSDDWAHPQKLALQVAPLLQHKELIVTFSKWVRLDPIGNPYARTIYPLMRLNPSSALFRKKEVCEKTALWDWVRIGADSEFNARLKLIFGHKGYYTVNKPLTFGAHRENSLMTAQSTGYVNGVSLPREAYWKAWNIWHISQLQRGHAPLLSSSPKREFFQYDQHPIMDVISYAIIN

SEQ ID NO: 67096 - protein, 219 aa, Pasteurella multocida
MIYVENVCKKYLNRTGWHTVLDDVSFSLRKGQKVGILGKNGAGKSTLIRLLSGVEPPTSGKITRKMSISWPLGFSGAFQGSLTGMDNLRFIARIYNADIDYVKRFTEEFSELGKYLYEPVRTYSSGMKARLAFALSLSIEFDCYLIDEIIAVGDARFADKCKYELFEKRKDRSLILVSHSPNAIREYCDNAMVLHNGIMHHFNSIDIAYQFHNNALQTK

SEQ ID NO: 67097 - protein, 254 aa, Pasteurella multocida
MGKWLKSAVFFVTILCAMPVFSAHFPPAPNPFQYVNDYTNSLSDNDKAVLERKLRHYGQETSSQIAVVIIPSTQEYDISQYAFELGDKWGIGRKQLDNGVLMLVAKQDRKLFIAVGQGLEGVLPDAFLSQLIRNQITPHFKEEQYAMGIHQGLDYLIAASKGEFDASQVVEETWEEYIPFLMIAIFVAFILFNEFLPGDYVSPSRHQSTSRTSSLPRYRRRSGGNGGFGGFGGGGSGGGFGGGSFGGGGAGGSW

SEQ ID NO: 67098 - protein, 200 aa, Pasteurella multocida
MVLVTRQAPDFTAAAVLGNGEIVDNFNFKQHIAGKAAVVFFYPLDFTFVCPSELIAFDHRYEEFQKRGVEVVGISIDSEFSHNAWRKTPVENGGIGEVKYALVADIKHEIAQAFGIEHPEAGVALRASFLIDKDGVVRHQVVNDLPLGRNIDEMLRMVDALQFHEEHGDVCPAQWEKGKEGMTGSPEGVAKYLKQHADQL

SEQ ID NO: 67099 - protein, 549 aa, Pasteurella multocida
MTESFAQLFEESLKELETRQGSIVSGTVVAIQKGFVLVDAGLKSESAIPVEEFLNAQGELDVQVGDVVNVALDAVEDGFGETKLSREKAVRHESWIELEKAYEEQATVIGLINGKVKGGFTVELNGVRAFLPGSLVDTRPVRETLHLEGKELEFKVIKLDQKRNNVVVSRRAVIESENSQEREQILENLQEGSEVKGIVKNLTDYGAFVDLGGVDGLLHITDMAWKRVKHPSEIVNVGDEITVKVLKFDKDRTRVSLGLKQLGQDPWVAIAENHPVNSKLSGKVTNLTDYGCFVEILDGVEGLVHVSEMDWTNKNIHPSKVVSLGDVVEVMVLEIDEERRRISLGLKQCKPNPWLQFAETHNKGDKVEGKIKSITDFGIFIGLDGGIDGLVHLSDISWNVSGEEAVRQYKKGDEVAAVVLQVDAVKERISLGIKQLEEDPFNNFVAVNKKGAVLSAKVVEADAKGAKVELDGGVEGYIRAADLTNEVNAGDVVEAKYTGVDRKARIVHLSVRAKDQAEEAAAVANVNNKQEDVAIPNAMAEAFKAAKGE

SEQ ID NO: 67100 - protein, 227 aa, Pasteurella multocida
MSNKIVITVDGPSGAGKGTLCYALAEKLGFTLLDSGAIYRVTALAALKSAVELDDEIALAALASALDVQFLPADGEVKILLNGENVSGQIRTQEVAEAASKVAVFPEVRKALLQRQQDFSTENGLIADGRDMGTVVFPNAQVKLFLDASAEERAKRRYKQLQNKGISGNFDQILAEIKARDFRDRNRAVAPLKPAEDALILDSTSLSIEEVIAQALSYIQQHLDIKA

SEQ ID NO: 67101 - protein, 923 aa, Pasteurella multocida
MKKLTALFLIICTLIACQSMPSSPQASLPFDPAIQHGKLANGLTYYVVRNPEPAHRVYIRLVVNAGSLHEDEDQKGVAHLVEHMAFNGSHRFPENQIINALEKLGMKFARDINAFTDFENTVYTLNLDKNDPQSLTLAFEVLNEWMHHLTILEKDLDNERGIVQEEWRRRLSPMLRLGDKKSAVEMAGSRYAVRDPIGDMNIIRTISRQRVADFYHKWYRADNMAVIIVGDIDAQQVTSQLKAQIGSINSHSTSPLPPIDFSIPFVNQWRVAGISEKGTYIPTLELSFFEKFTEQNTLAAYKQDLTQQILIRLINLRLQDWEQVKQQKVESANFYRTHLGKETLQNIFLLQLFDTDYQKATQSLFQFIAEIQQHGFSAQEFQQEKARLVQLNEKQRSLKAGSLKIADDLVISAANQQVVISQQDRYRLNQRFLQEIRLEELNQAFQHLITIQAKLLLVTQPYPATPLTLTVNKVAQLWQETQHTAQHTWHTPRTAGKMPALSFPKGQIKQSKHWKKGDITEYQLSNGSKLIYHYSDKTPNQVYFKAVTAGGLRSVAPSDYHRFKSAVTLTDDSGIGPLSLSEINDLFRQHPIALATVVDDYKQGFTAVGKPEQIADLLKLFRLKLQGTAISEPVFERYQKETQDYFRQVDKETEFMQKLSRLRYPNMATVYSQNKKEALSFSRQELTQFYDSVMLDKTDFTYFLIGDLPQQEAEKLAQTYLASVEVKHSPRHYYDSSPITPANHFVMHGLDEPRADVEIYFSTPNQWTPELQYQLDLLADVLQEVLRLTLREQSSGIYAVNSWFNQEKSHARLEGKIEFSCAPDRVAELTAQTYHILDEIMQKGVSASLLEKKRSEKQTQIKFQFDSLVSIAMLIEQSFWHTQSPDEIYLYQRLEDIGQKKYIDNLARKIFQPNARFQAILQP

SEQ ID NO: 67102 - protein, 334 aa, Pasteurella multocida
MPLNLRHRHFLRLMDFTPTEIQFLLDLSANLKKAKYTGTEQPRLKGKNIALIFEKTSTRTRCSFEVAAYDQGANVTYIGPSGSQIGHKESMKDTARVLGRMYDGIQYRGYGQELVEILAQYSGVPVWNGLTDDFHPTQILADFLTMLEHGEGKRLNQMKMAYLGDARNNMGNSFVEGAALMGMDLRLVAPKAYWPEQKLLDEVAEMAKKTGAKITCTENVEEGVKGVDFLYTDIWVSMGEPEEAWEQRINLMKPYQVNKALLEKTGNPKVKFMHCLPAFHDENTTVGKEMAQKYGMNGLEVTDEVFESDASIVFDEAENRMHTIKAVMVATLGQ

SEQ ID NO: 67103 - protein, 529 aa, Pasteurella multocida
MSLNDYPQQVNKRRTFAIISHPDAGKTTITEKVLLYGQAIQTAGSVKGKGSSTHAKSDWMEMEKQRGISITTSVMQFPYNDCLVNLLDTPGHEDFSEDTYRTLTAVDSCLMVIDSAKGVEERTIKLMEVTRLRDTPILTFMNKLDRDIRDPMELLDEVENVLNIHCAPITWPIGCGKLFKGVYHLYKDETYLYQTGQGHTIQEKRVIKGLDNPELDAAVGDDLAQQLRDELELVQGASNEFDLDAFLQGELTPVFFGTALGNFGVDHFLDGLTQWAPAPQSRQADSRAVASSEQKLTGFVFKIQANMDPKHRDRVAFMRVVSGKYEKGMKLRHVRLGKDVVISDALTFMAGDRSHAEEAYAGDIIGLHNHGTIQIGDTFTQGEELKFTGIPNFAPELFRRIRLKDPLKQKQLLKGLVQLSEEGAVQVFRPLMNNDLIVGAVGVLQFDVVVSRLKSEYNVEAIYENINVATARWVECSDAKKFDEFKRKNEQNLALDGGDNLTYIAPTMVNLNLAQERYPDVKFFKTREH

SEQ ID NO: 67104 - protein, 159 aa, Pasteurella multocida
MATAIGLCAASSEKLAKELNNLLANYQVFYTNVRGYHWNIKGVNFFELHAKFEEIYDDLVVKVDEIAERILTLGHTPNNAYSQYLSVSTIKEDIGVSTAKECLKGTLEGFKVLLKQQREILSLAGDADDEGTASQMSDYIKEQEKLIWMFTAACESCNA

SEQ ID NO: 67105 - protein, 954 aa, Pasteurella multocida
MTQNFEMADRFTPSAVEQALYKHWEESGYFKPSEDTSKPSYSIAIPPPNVTGSLHMGHAFQQTLMDILIRFNRMEGHNTLWQTGTDHAGIATQMVVERKIAAEEGKTRHDYGREAFIDKIWDWKAYSGGTISQQMRRLGNSIDWERERFTMDEGLSDAVKEVFVRLHEEGLIYRGKRLVNWDPKLHTAISDLEVENKESKGSLWHFRYPLANGAKTADGKDYLVVATTRPETMLGDTAVAVHPEDERYQSLIGKTVVLPLANREIPIIADDYVDREFGTGVVKITPAHDFNDYEVGKRHQLPMVNVMTLNADIRAEAEIIGSDGKILESYTALIPTKYQGMERFAARKQIVADFEELGLLDEIKPHDLKVPYGDRGGVPIEPMLTDQWYVSVKPLAEVAVKAVEDGEIQFVPKQYENLYFSWMRDIQDWCISRQLWWGHRIPAWYDEQGNVYVARDEAEVRAKHNLPADLALKQDEDVLDTWFSSGLWTFSTLGWPKQTPDLKMFHSTDVLITGFDIIFFWVARMIMFTMHFVKDENGKPQVPFKTVYVTGLIRDEQGQKMSKSKGNVIDPLDMIDGIDLESLLEKRTGNMMQPQLAEKIAKATIKAFPEGIAEHGTDALRFTLTALATNGRDINWDMKRLEGYRNFCNKLWNASRFVLTNDKLDLSEGSVEYSVADRWIQSEFNRTVEAFRNALAQFRFDLCATALYEFTWNQFCDWYLELTKPVLVNGSVAQKRGASQTLINVLEKLLRLTHPVMPFITEEIWHKVKAFAGVSGDTIMLQAFPQFEQSALDYQAEAEINWMKEVIVAVRNIRAESNIPPSKGLDLLLRNLSEADQNALENNRTLIQAMAKLDAIRVLEAGEDAPLSVAKLVNNAELLVPMAGFINKEAELARLNKEIEKYQGEIQRIENKLANEAFVAKAPPAVIEKERAKMAEYAEGLNKLKQQYLAIEAL

SEQ ID NO: 67106 - protein, 142 aa, Pasteurella multocida
MSKHAQFYLLSEQAQMEKMACDFAASAWRLGKRVLIACETEQQALDIDEALWAREADEFVPHNLSGEVTTYATPIEVSWKGKRNAQRRDLLINLQVEVPDYVSSFTQVIDFVPVEEHLKVLARERYKQLRQLGWQLSTEQIK

SEQ ID NO: 67107 - protein, 400 aa, Pasteurella multocida
MGIYQLTGRLQHYVWGGKDYLPALLGMKKETEQYYAEWWLGAHVSAPSMLDVEGKETSLATFLAQKPTALGDKSLSQFGSELPYLLKILDVAKPLSIQLHPTKKQAEIGFAQENAQGIALTSPIRTYKDNNHKPEMMIALSDFWLLHGFKTKQTMLATLNARPSLQGLATKLVQQDMHAFYADIMQADQEQLSQWLLPIIEENKAKYAANQLELSNPDYWVLYTMEAMGIAPSKLDAGLVCFYLFNIVHLREGEGIFQDAGIPHAYLRGQNIELMACSDNVIRGGLTPKHVDIQALLAIIDCREVVPEIIPVAPAQQAYFTYHTPAKDFALTRFNYCQGQTQSCQAQSAQILLVMKGKLTLSQGTQVLELKQGESAFIESETSYQITGLEEGYCVISALP

SEQ ID NO: 67108 - protein, 324 aa, Pasteurella multocida
MTIAIMIATHGVAAEQLLKTTEMLIGEQDNVATIDFVPGENAETIMTKYQEKLSTTLSHCDEVLFLVDTWGGSPFNAANRVADGKPNMDIVTGVNVPMLVETFMARDDGPTLPELVAIALETGRTGVRALRYEEEEVATPVQNVEEKPVEPTVVTANGVGHLEIGLARIDDRLIHGQVATRWTKESKVSRIVVVNDDVAKDSVRSTMLKSVAPPGVTAHVVDVEKMIRVYNNPEYAGERMMLLFTNPTDVVRLMEAGVAFKSINVGGMAYKDGKKMITSAVAVDDKDIEAFKKLDAQNIELDVRKVSNDSRQYMMDLLKKNNLI

SEQ ID NO: 67109 - protein, 405 aa, Pasteurella multocida
MNDNVNKDGWKALLGSAVGYAMDGFDLLILGFMLSAISADLALTPAQSGSLVTWTLIGAVAGGIIFGALSDKYGRVRVLTWTIVLFAVFTGLCAFAQGYWDLLIYRTIAGIGLGGEFGIGMALAAEAWPARHRAKASSYVALGWQVGVLGAALLTPLLLPHIGWRGMFLVGIFPAFVAWYLRAKLHEPEIFVKKQTALERQKTSRLEPFRLLIKDKATAKISAGIVVLTSVQNFGYYGIMIWMPNFLSKQLGFSLTKSGVWTAVTICGMMFGIWLFGQLADRIGRKPSFLLFQFGAVISIFTYSQMSDPTYMLFAGAVLGMFVNGMMGGYGALMSEAYPTQARATAQNVLFNLGRAVGGFGPIVVGALVSTYSFQLAIAFLASIYIIDMIATIFLIPELKGKQLD

SEQ ID NO: 67110 - protein, 899 aa, Pasteurella multocida
MIRKFSMTDLVQDTMHQDISPISIEEELKSSYLDYAMSVIVGRALPDVRDGLKPVHRRVLFAMHEGGNAYNKPYRKSARIVGDVIGKYHPHGDSAVYDTLVRMAQPFSLRYMLVDGQGNFGSIDGDAAAAMRYTEARMTKIAHELLADLDKETVNFVPNYDGSEQIPEVLPTKVPALLVNGSSGIAVGMATNIPPHNLGEVLDGCLAYIENNEISIDELMTYIPGPDFPTAALINGRKGIEEAYKTGRGKIYVRAKAEVETDEKGGETIVVHEIPYQVNKAKLIEKIADLVKEKKVEGISAITDLSDKDGMRIEIKIKRDAVGEVVLNNLYALTQLQVTFGINIVALDKGQPKLLNLKQLIEAFVLHRREVVTRRTVYELRKARERAHILEGLAIALANVDPIIELIRNAPNPESAKRALLAQAWELGHVSQMLAATGVDAARPEDLEEQYGIRDGMYYLTEVQAQAILDLRLQKLTNLGHDEILDEYKKLLDVIGELLHILRSPERLMEVIREELEQIREQFNDPRRTEITASSADINLEDLIAQEDVVVTLSHEGYVKYQPLTDYEAQRRGGKGKSAAKTKEEDFIERLLVANTHDTILCFSSRGRLYWLKVYQLPQASRGARGRPIVNILPLDENERITAILPVTAYEEDKFVVMATAGGIVKKIALTEFSRPRSTGIIALNLRDEDELIGVDITDGQNEIMLFSAQGRVVRFSENAVRAMGRAATGVRGIKLALTNDLSDDESAVDMEEISDENTNDALDLNIDKVVSLVIPKNEGAILTATQNGYGKRTELAEYPTKSRNTKGVISIKVSERNGKVVAATQVEESDQIMLITDAGTLVRTRVNEINIIGRNTQGVRLIRTSESETLVGLQRVCDVDEEDIESDASESAVESAES

SEQ ID NO: 67111 - protein, 122 aa, Pasteurella multocida
MAYYLIYLHIACAFLSLSLFIIRGMMQLTGKNWRDRKVLKILPHLSDTLLFCSGIGLFLLFQQSVTTWFIYKMLFIALYIVVATIFFSRKRLTSPFSQKKNRFYFITALIFFLSTMVIAYLK

SEQ ID NO: 67112 - protein, 185 aa, Pasteurella multocida
MKPNIPIFLTLFRVILIPFFVIAFYLPFSWSPFLTVLIFFIAGVTDWFDGYLARKWKQTTRFGAFLDPVADKVMVTVALALVVEYHHSFWITLPAVIMISREIIISALREWMAEIGDRNKVAVSWLGKVKTTAQMLALGGLLWRYNVVMEIAAIVLLYVAAILTVWSMLQYLKAAKGSLLSDITL

SEQ ID NO: 67113 - protein, 582 aa, Pasteurella multocida
MQDKDLSTVQTFKRLWPIISPFKLGLVVSGIALVINALADAGLISLLKPLLDEGFGKADVSFLRTMSYVVVLVIFLRGISNFISSYCLSWVSGKVVMIMRRRIFKHLMFMPVPFFDQNSSGRLLSRITYDSELVANSSSGALITIVREGAYIISLLAVMLYTSWQLSIVLFLIGPIIAVLIRFVSKRFRELSKNMQNSMGELTSTAEQMLKGHKVVLSFGGQIVEEERFNHVSNDMRRKGMKMAVADAISNPVVQIIASFALAAVLYLATVPTIMDQNLTAGSFTVVFSSMLAMMRPLKSLTNVNAQFQKGMAACQTLFALLDLETEKDLGTHKGENVQGYLSFKNVTFTYQSRDEPALRNLSFDVEKGKTVALVGRSGSGKSTIANLVTRFYDVDQGEITLDGINIQDYRLSSLRKNCAVVSQQVHLFNDTIANNIAYAAKDKYSREEIIKAAKDAYAMEFIEKLEHGLDTVIGENGVNLSGGQRQRLAIARALLRNSPVLILDEATSALDTESERSIQLALEKLQKERTVIVIAHRLSTIENADEILVIEHGEIKERGSHSELLALNGAYKQLHHIQVNH

SEQ ID NO: 67114 - protein, 145 aa, Pasteurella multocida
MSKSSLSILALAGVEPYKEKVGEEYMNEVQLLHFKKILQAWRDQIVEEATRTVAHMQDEASNFPDPADRATQEEEFSLELRTRDRERKLLKKIENTLKKLETGDFGYCDSCGIEIGIRRLEARPTADLCIDCKTLAEIREKQMVG

SEQ ID NO: 67115 - protein, 501 aa, Pasteurella multocida
MRSIILKYIKNLFNKKTKSYLVEREKTDSTPLLSKNAHSEPITTSEIRNVSNSKQAKLSHHYNKSIFKASQYGITPRMINRNALGIVEKLHRHGFEAYIVGGCLRDLLLGKHPKDFDVATNALPEQIQTIFQRQCRLVGRRFRLAHIMFGRDVIEVATFRASHNENNHESLAKQSKEGMLLRDNVYGTLEQDAERRDFTVNALYYNPQDNTLRDYFHGIEDLKAGKLRLIGDPVKRYQEDPVRMLRSVRFMAKLDMFLEKPSEQPIRELAPLLKNIPPARLFDECLKLLQAGYGVKTYKLLRQYGLFEQLFPSLMPYFTEKGDSLAERMILKALTSTDERVADKLRINPAFLFAAFFWYPLREKVEMLKNEGGLNNHDAYALASSEILDLFCAALAAPRRHTAVIRDIWFLQLQLLKRSGQQPIRTMEHPKFRAAFDLLAMRSEVEGGETIELATWWHEYQFSNSEQRDHLVKEQQRLHPKPKKKYYRARKRRKPKAISSS

SEQ ID NO: 67116 - protein, 165 aa, Pasteurella multocida
MKSVYIALGSNLQTPIAQLEAALAALANLPTTQLIHVSSFYQSKPLGPQDQPDYVNAVAHLRTTLPPLTLLDHLQQIENTQGRVRLRRWGERTLDLDILLYDNVVCQTERLTLPHYDMTNREFVIIPLFEIAPDLCLPSGQPLLELRKKFEDHQMQKIRTEPSLD

SEQ ID NO: 67117 - protein, 163 aa, Pasteurella multocida
MRRILSVLLENESGALSRVVGLFSQRAFNIESLTVAPTDDPTLSRMTIEAYGDEQVLEQIEKQLHKLVDIFKVISLSDCDHVEREVLLIKVRAQGASRDELKRLTDIYRGQIVDVTTKSYTIQLTGTKDKLDAFISAVKEETTIIEIVRSGLISLSRGEKNCL

SEQ ID NO: 67118 - protein, 574 aa, Pasteurella multocida
MKKLSGAEMVVQSLRDEGVEFLFGYPGGSVLDIYDAIHTLGGIEHILVRHEQAAVHMADGYARATGKVGCVLVTSGPGATNTITGIATAYMDSVPLIILSGQVMSGLIGSDAFQECDMVGISRPVVKHSFLVKSAAEIPETIKKAFYIASTGRPGPVVIDLPKDVVNPAHKFTYHYPERVELRSYNPTIQGHKGQIKKALKALLVAKKPVLFVGGGVITANCSDKLTQFAQTLNLPVTSSLMGLGAYPSSDKQFLGMLGMHGTYEANNAMHHSDLILGIGVRFDDRTTNNLAKYCPHAKVIHIDIDPTSISKNVLASIPIVGSAEKVINEFLALLEDDNLLKSQTALDEWWQQIDEWKAVKCLSFTRDDSVIKPQQVMEVVYRLTQGEAYVASDVGQHQMFAALHYPFNQPRRWINSGGLGTMGFGLPAALGVKLAYPDSTVVCVTGDGSIQMNIQELSTAQQYDIPIVIISLNNRFLGMVKQWQDLIYSGRHSQSYMNSLPDFVKLAEAYGHVGIQINTPDELEEKLTQAFSMKDKLVFVDINVDATEHVYPMQVRGGAMNEMILTKPEKANA

SEQ ID NO: 67119 - protein, 278 aa, Pasteurella multocida
MIENKILLTDCPDDKGLIAKITNICYKHQLNIIHNNEFVDFDTKHFFMRTELQGIFNEDTLLADLKFSLPEGTNCRLISAKRKRIVILVTKEAHCLGDILMKNYYGGLDVEIAAVIGNHDTLRTLVERFDIPFHYISHHDLTRVEHDKLLADKIDEYTPDYIVLAKYMRVLNPQFVEKYPNRVINIHHSFLPAFIGAKPYHQAYERGVKIIGATAHFINNELDQGPIIMQNVINVDHTYNAEAMMRAGRDVEKTVLSRALDLALHDRIFVYKNKTVVL

SEQ ID NO: 67120 - protein, 378 aa, Pasteurella multocida
MYAFVNAVIYTAKDVLYGKALVVDGDKISAILPVEDVPENLQKIDLQGNNLTAGFIDLQLNGCGGVMFNEDISVKTLEIMQETNLKSGTTSYLPTFITSPDEGMKDAVKVMREYLTQYKNQALGLHFEGPYLSVEKKGVHREEYIRAISPEMKTFLCDNADVITKITLAAENPTAQYIPDFVEKGIIVSLGHSNATYDVAQQAIEKGASFATHLHNAMSPISSGRAMGVVGAVLDSDIYTGIIVDGLHVDYGNIRLDKKVKGDKLCIVTDATAAAGADIDSFVFVGKTVYVRDGKCYDSNGTLGGAAITMIESVKNAVQEVGIPLDETLRMCNYYPAKAIGVDHKLGSIEVGKIANLTAFTNDFNVLGTAVNGEWKAK

SEQ ID NO: 67121 - protein, 267 aa, Pasteurella multocida
MRLIPLHNVDQVAKWSARYIVDRINQFQPTEARPFVLGLPTGGTPLKTYEALIELYKAGEVSFKHVVTFNMDEYVGLPKEHPESYHSFMYKNFFDHVDIQEKNINILNGNTEDHDAECQRYEEKIKSYGKIHLFMGGVGVDGHIAFNEPASSLSSRTRIKTLTEDTLIANSRFFDNDVNKVPKYALTIGVGTLLDAEEVMILVTGYNKAQALQAAVEGSINHLWTVTALQMHRRAIIVCDEPATQELKVKTVKYFTELEASAIRSVK

SEQ ID NO: 67122 - protein, 485 aa, Pasteurella multocida
MSILSYLQRIGQALMVPVAALPAAAILMGIGYWIDPNGWGGESQLAAFLIKSGAAIIDNMAILFAVGVAFGMSKDKHGSAALSGLVGFLVVTTLLSPGAVAQLQGIAADQVPAAFGKINNQFIGILVGVISAELYNRFHQVELPPALAFFSGKRLVPIVTSVVMIVVSFILMYLWPVIFNGLVGFGKSITDIGATGAGIYGFLNRLLIPVGLHHALNSVFWFNVAGINDIPNFLGGAQSLANGTAVLGVTGMYQAGFFPVMMFGLPAAALAIYHSAKPGKKAQVASLMIAASLASFFTGVTEPLEFAFMFVAPVLYVIHALLTGLSVFIAASMQWMAGFGFSAGFVDMVLSSQNPLAKDWYMLLVQGLVFGVIYYVIFRAAIKAFNLKTPGREEEEVEINVKKDASREERAANFIVALGGKDNFQAIDACITRLRLTLVDRSKVNEEQLKALGSKGNVKLGDNGLQVILGPEAELVADAIKQQVK

SEQ ID NO: 67123 - protein, 649 aa, Pasteurella multocida
MALISLTNGYLSFSDHPLLDHTDLHIEAGERVCLVGRNGAGKSTLMKILAGDVIMDDGRLQFEKEIVVSRLEQDPPRHASGNVFDYVAEGIEHLADLLKDYHRISLLLEQDCSDAVLNQLAQVQAKLDHADAWRFESKIKDVLATLSLHPDTLLSELSGGWLRKAALARALVCDPDVLLLDEPTNHLDVDAIEWLENFLLGFSGSIIFISHDRAFIRKMATRIVDLDRGKLVSYPGDYDLYLSTKEENLRVEALQNELFDKKLAQEEVWIRQGIKARRTRNEGRVRALKALREERRQRREVLGTAKLQLDNSSRSGKMVFEMDNVTYQVAGKTLLKDFSTTILRGDKIALVGPNGCGKTTFIKLLLGEIQPTSGTVRCGTKLDIAYFDQYRAELDPEKTVMDNVADGKQDIEVNGIKRHVLGYLQDFLFPPKRAMTPVKALSGGERNRLLLAKLLLKPNNLLILDEPTNDLDVETLELLEEILTDYQGTLLIVSHDRQFIDNTAAECFIFEGEGIVNEYVGGFHEAKQQQANSFAHKAEQAALKQKKPASLESAVDITKNSVSNKSQTKAIKLTYKEQRELEQLPQRLETLEAEINSLQAEIAGSEFFQQSHEYTSAKLQALAEAEQALEEAFMRWETLEEKQNLSKSG

SEQ ID NO: 67124 - protein, 476 aa, Pasteurella multocida
MFQYSAEFKQAKVLVLGDVMLDRYWFGATNRISPEAPVPVVRVQDNEERAGGAANVAMNIAALNVPVKLLGLTGRDETGLALESLLAKSRIECDFVQLHTHPTITKLRILSRHQQLLRLDFEEDFQNVTSDALLQKLDSALQNYGALVLSDYGKGTLNQVQKMIQLARQANIPVLIDPKGTDFERYRGATLLTPNMSEFEAVVGKCDSEEEIIEKGLKLIEQIDLSALLVTRSEKGMTLLRPNQPAFHLATEAKEVFDVTGAGDTVISVLATGLADGRSFEEACYLANVAAGIVVGKLGTSTVSTVELENAIHGRSNTGFGIMSEAELKRVVAQAKARGEKIVMTNGCFDILHPGHVSYLENARKLGDRLIVAVNSDDSVKRLKGETRPINDLQSRMAVLAGLSSVDWLVAFHEDTPQRLIAEVLPDLLVKGGDYKPEDIAGSQEVWASGGDVKVLNFENGCSTSNVISKIQQLKD

SEQ ID NO: 67125 - protein, 204 aa, Pasteurella multocida
MHHLIIFAHPNSQTSFNRAILEATLQASQQLDVHTVVRDLYTLNFNPILSWEEMQAVYQEIIPAEVKFEHQLIEQANLITLVYPLWWMGFPAILKGYLDRVLSYGFAYKTENEQSVGLLGGKKMQHFITIGNNVEIYQNMGFAQSLKDCLVDGLFNYCGITDIQHELFGDIHLIDDHARHAMLQRVSEKTQENLTALLERKYDN

SEQ ID NO: 67126 - protein, 472 aa, Pasteurella multocida
MNKEIKTQVVVLGAGPAGYSAAFRCADLGLETVIVERYSTLGGVCLNVGCIPSKALLHVAKVIEEAKALAEHGIVFGEPSTDVNKIRGWKEKVINQLTGGLAGMAKQRKVQVVNGYGKFSGPNTIIVAGEEGETTIKFDHAIIAAGSRPIQLPFIPHEDPRIWDSTDALKLKEVPENLLIMGGGIIGLEMGTVYHALGSKIDVVEMFDQVIPAADKDMVQIYTKRVAKKFNLLLETKVTAVEAKEDGIYVSMEGKASETRRYDAVLVAIGRVPNGKLIDAGVAGVEVDDRGFIRTDKQMRTNVPHIFAIGDIVGQPMLAHKGVHEGHVAAEVIAGMKHYFDPKVIPSIAYTEPEVAWVGKTEKECKAEGIAYEVAKFPWAASGRAIASDCADGMTKLIFDKNTHRVIGGAIVGTNGGELLGEIGLAIEMGCDAEDLALTIHAHPTLHESVGLAAEVFEGSITDLPNPKAKKK

SEQ ID NO: 67127 - protein, 632 aa, Pasteurella multocida
MSKQIQVPDIGGDEVTVTEVMVKAGDTVAVDQSVINVEGDKASMEVPSPEAGVIKEVLVKVGDKVSTGSPMFVLETGDAKPAETPKAETAPVSAPAPAASAVVEVHVPDIGGDEVNVTEIMVKVGDKVEVEQSIINVEGDKASMEVPAPIAGVVKEILINVGDKVSTGSLIMKFETGDAPAVATPAQAPTAAPSAPAQSAVKDVNVPDIGGDEVNVTEIMVNVGDTITEEQSLITVEGDKASMEVPAPFAGVVKEILVKSGDKVSTGSLIMRFEVAGAAPSAAPAQPAPAAQAAAPQAATPAPVASAPAGDAEVTGSSVFAYATPVVRRLAREFGVNLDKVKGTGRKGRILKEDVQAYVKAAIKAVESGSVSAAPAGSGVANGAGLGLLPWPKVDFSKFGEVEEVELTRINKISGANLHRNWVMIPHVTHFDRADITDLEAFRKEQNVLAEKQKWGVKITPVVFIMKAAAKALEAYPRFNSSISEDGQRLTLKKYVNIGVAVDTPNGLVVPVFKDVNKKGIIELSRELMEVSKKARDGKLTASDMQGGCFTISSLGGLGTTHFAPIVNAPEVAILGVSKSEMAPVWNGKEFTPRLMLPLSLSFDHRVIDGADGARFISYINGVLSDLRRLVM

SEQ ID NO: 67128 - protein, 575 aa, Pasteurella multocida
MISGIPASPGIVFGKALVLKEEKIVLDMQKISESQIDSEIARFYQGRNAAVEQLSAIRDRAAKTLGEEKAAIFEGHLMILEDEELEEEIIDYLRTNKVNAGVAASKIIDQQVTMLSEIDDEYLRERAGDIRDIGNRLIKNILGMHIVDLGDINEEAILVAYDLTPSETAQLNLDKVLGFITDIGGRTSHTSIMARSLELPAIVGTNHVTSQVNTGDYLILDAVNNVVYVNPSQDEITRLKGLQQKLLEEKAELAKLKDLPALTLDGHRVDVVANIGTIRDVDGADRNGAEGVGLYRTEFLFMDREQLPTEEEQFVAYKDVVEAMNGRLVILRTMDIGGDKELPYLNLPKEMNPFLGWRAIRIALDRREILHAQLRAVLRASAFGKLAVMFPMIISVEEIRELKSVIETLKQELRNEGKAFDESIQIGVMVETPSAAVNAKFLAKEVDFFSIGTNDLTQYTLAVDRGNELISHLYNPMSPSVLSLIKQVIDASHAEGKWTGMCGELAGDEKAAVLLLGMGLDEFSMSAISVPRIKKLIRNVNYEDTKALAMKALQQPTAVEIEQLVEDFLAEKALN

SEQ ID NO: 67129 - protein, 85 aa, Pasteurella multocida
MYSKDVEIIAPNGLHTRPAAQFVKEAKAFASDITVTSAGKSASAKSLFKLQTLALSQGTVITISAEGEDEQKAVEHLVALIPTLE

SEQ ID NO: 67130 - protein, 409 aa, Pasteurella multocida
MKKYRFISLFFATILFISTPLFANNVWTIAIDPGHGGTDPGAISRQLKMYEKNVTLSIARELKMLLDKDPHFKGVLTRTGDYFISVPKRSEIARKHKANLLISIHADSNLSPLLRGASVWVLSNRRANSEMGQWLEDHEKRSELLGGAGTVLASHNEKYLDQTVLDLQFGHSQRVGYELGSIVLKRFAKITTLNRSTPQHASLGVLRSPDIPSILVETGFLSNVDEEKKLSTLAYRKKVAYMIYESLVEYRKKSVANEPKTKSPTTVESSATQTTLTDSGLRHKVKAGENLTGVARKYGVKVNDILALNKLKRRELWIGETLKIPASGKASEKTTPATTSKVAETKTKVVSNTTSESKEKLPKYHTVKKGQTLYAIAREYHIPPNQLLKLNPHLKDGKVLTGQKIKLRD

SEQ ID NO: 67131 - protein, 617 aa, Pasteurella multocida
MAIKVLSPQLANQIAAGEVVERPASVVKELVENSLDAGATRIQIDIENGGSTLIRIRDNGIGIAKDELSLALARHATSKIASLDDLDNILSLGFRGEALASISSVSRLTLTSRPATQNEAWQVYAQGREMETTLQPASHPVGTTVEVANLFFNTPARRKFLRTDKTEFAHIDEVIRRIALAKMAISFTLTHNGKIVRQYRSAHDRTQKLKRVAAICGDEFVQNALEIDWKHDDLHLSGWVAQPTFSRTQNDLSYCYINGRMVRDKIITHAIRQAYADFLSPEQYPAFVLFIDLNPNDVDVNVHPTKHEVRFHQQRLVHDFICQGISNALHSEQASLYQTNEACVSANYQVEESAQHEYRPSYSKPNRAAAGQNIFDSSTTTPSTALFQTNKKNTQNRPHFSTNIPATRISKTEQAAYSALLSNSEMATVLPQEDGALLERKTPSILKALALVENKALLLQQQQQFYLLSLQQLQRLKIELSLQRDPVLQQPLLIPIVFRLNPQQLTYWQQQKTFFTQIGFEFHENLGQQRITLNRVPSCLRQQNLQKCIIVLLSQPLDTFSHFLTTLCDVIELEQITVYADAVTLLTETEQLLNQKQAIRLSELFIELNWQAYLEKM

SEQ ID NO: 67132 - protein, 265 aa, Pasteurella multocida
MALLQVEDLSKSFTDTMSLFGASQFNAVERISFRLDKKQTLAIIGKNGSGKSTLAKMIVGIIPPTSGRILFNGQPLLFGDYQYRAKHIRMIFQDPNTAFNPRLNVGQILDAPLRLVTHLDNQDRNQKIFNTLKLVGLYPDHANVKINTMSASQKQRVALARALILDPQIIIADDALGSLDATVKTQLTNLMLHLQDKLGISYIYVGQHLGIIKHMADNVLVMDEGKMIEYGQTKSLFTHPKTEVTKRLVESHFGRLLDEGSWATK

SEQ ID NO: 67133 - protein, 269 aa, Pasteurella multocida
MNSPYQPTILFFDSGMGGFSVYKETKQLLPDCHYLYCFDNAFFPYSEKSEEEIIQRTLKICQKIDRTFPLDLIVIACNTASTVVLPALRAHFAIPVVGTVPAIKPAAECSETKHIGLLATKGTVKRAYVADLIAQYARDCTVEKLGSTKLVEIAEQKLHGKAVDLHALKQELAPWQSIQNLDTVVLGCTHFPLIKEEIKWCLPQVRFFVDSGKAIALRVKTLLSKIDIQSKTNEKNLIFCTQFFEDETQFQKVIHFWGFEQLINLNMKA

SEQ ID NO: 67134 - protein, 707 aa, Pasteurella multocida
MYLFESLNRIIEAYLPPEQIELVKRAYIIARDAHEGQSRSSGEPYITHPVAVASIIAEMRLDHEAVMAALLHDVIEDTPYTEEQLKTEFGASVAEIVEGVSKLDKLKFRTRKEAAAENFRKMILAMTRDIRVVLIKLADRTHNMRTLGSLRPDKRRRIAKETLEIYSPLAHRLGIEHIKNELEDLGFEAMHPQRYAVLQKVIQVARGNRKDMIQRITNEIKGRLEDVGIKARVFGREKHLYAIYQKMKLKDQQFHSIMDIYAFRAVVKDIDTCYRVLGQMHGLYKPRPGRVKDYIAVPKANGYQSLHTSMIGPHGVPVEVQIRTEEMDQMAEMGVAAHWAYKEGGKNDSTTVQIRAQRWLQSLIELQQSVGNSFEFIESVKSEFFPKEIYVFTPKGRIVELPVGATPVDFAYAVHTDIGHSCIAANVDRKSYPLSQALTSGQTVDIITLPNSQPSAGWLNFVVTAKARTNIRNFLKNLRGGEAITLGKRQLTRALAPTKLEDLDKNRVQNLLTELKLATFDDLLMEIGLGNQMSAVIAYRLLGEAIEIDTDGDLTNNKANFEIKSAGGLLTTFAQCCHPIPGDPIVAYTSSGKGLVIHHEACANLKHRKDNPEHYMPVEWEQSDNMIDFEAELRIELINQQGALPNLTTLISSLGSNIQSIWTEEQEGRLYQIVVLLTVKDTKHLANIIRKIKAIPGFVNIERNINQ

SEQ ID NO: 67135 - protein, 334 aa, Pasteurella multocida
MAIKIGINGFGRIGRIVFRAAQHRDDIEVVGINDLIDVEYMAYMLKYDSTHGRFDGTVEVKDGNLVVNGKTIRVTAERDPANLKWNEIGVEIAVEATGLFLDDATARKHITAGAKKVVLTGPSKDATPMFVSGVNFDTYAGQDIVSNASCTTNCLAPLAKVINDKFGIKDGLMTTVHATTATQKTVDGPSAKDWRGGRGAAQNIIPSSTGAAKAVGKVIPALNGKLTGMAFRVPTPNVSVVDLTVNLEKPATYAEICAEIKRASENEMKGVLGYTEDAVVSTDFNGCALTSVFDAAAGIALTDTFVKLVSWYDNETGYSNKVLDLVAHVYNYKG

SEQ ID NO: 67136 - protein, 420 aa, Pasteurella multocida [sequence omitted]

SEQ ID NO: 67137 - protein, 432 aa, Pasteurella multocida
MGKSVVILGAQWGDEGKGKIVDLLTDRVKYVVRYQGGHNAGHTLIINGEKTVLRLIPSGILRENVTCLIGNGVVLSPAALMQEMGELESRGINVRERLLISEACPLILPYHVAMDHAREAALGKNKIGTTGRGIGPAYEDKVARRGLRVGDLFNREAFAEKLKTILDYYNFQLVNYYKAEAVDFQKTLDDVMAVADIITGMVADVTTMLDKARKNGDNILFEGAQGTMLDIDHGTYPFVTSSNTTAGGVATGAGFGPRNLDYVLGIIKAYCTRVGGGPFTTELFDEVGSEIARKGNEFGAVTGRPRRCGWFDAVAIRRAIQLNSISGFCMTKLDVLDGFDEVKICVAYKMPNGDILDYAPLAAKDWEGVEPIYETMPGWKENTFGVTDVNQLPEACRNYVKRIEEVTGVPVDILSTGPDRVETMILRDPFAA

SEQ ID NO: 67138 - protein, 158 aa, Pasteurella multocida
MNYVQYYPTDIVNGEGTRCTLFVSGCTHACRGCYNKKSWSFCAGLPFDEKMEAQILQDLKDTRIKRQGLTLTGGDPLHPRNLAVLLPFVKRVKHECPDKDLWVWTGYTLAELKADTLQRQILPYIDVLIDGKFEQDKADPSLVWRGSANQIIYRFTQY

SEQ ID NO: 67139 - protein, 459 aa, Pasteurella multocida
MLKIFNTLTREKEIFKPIHANKVGMYVCGITVYDLCHVGHGRTFVCFDVIARYLRYLGYDLTYVRNITDVDDKIIKRALENNETCNQLVEKMIAEMHKDFDALNVLRPDVEPRATHHIPEIIAMIEKLIARQHAYVSANGDVMFDVESFKEYGKLSRQNLEQLQAGARVEIVNVKKNPMDFVLWKMSKPGEPSWPSPWGEGRPGWHIECSAMNHKELGEHFDIHGGGSDLTFPHHENEIAQSCCAHSGRYVNYWIHSGMIMVDREKMSKSLGNFFTLREVLSLYDAESVRYFLLTAHYRSQLNYSEENLNLAHSALERLYTALRGTDPTAVATEGQNYLAAFREAMDDDFNTPKAISVLFEIAREINKLKNEDILKANALAARLRELAGILGLLYQDPEQFLQSGSDNDEVALIEALIKQRNDARAAKDWASADAARNKLAEMGVVLEDNVNGTTWRKQ

SEQ ID NO: 67140 - protein, 569 aa, Pasteurella multocida
MFLAVKPFSALKESFRAGYTSQSLIRDIIAGLTIGVIAIPLSMALAIASGVAPQHGLYTAIVAGMIIAVTGGSRFNVSGPTAAFVVILYPITQQFGLGGLLMATLLSGLILVLMALFRLGRLIEYIPLPVTLGFTCGIGIVIATLQIKDFLGLSIVEMPAHYLEKVQTIATALPTINWADALVGIVTLLMLTQWHKLRLPIPGHLPAVIIATLLSLGLISVGQDVATIGSAFQYTLSDGTQGFGIPNALPEFILPWHIPNAQGEVITWNLETIQALLPAAFSMAVLGAIESLLCAVILDNMTDTKHHSNNELLAQGLGNIAAPFLGGITATAAIARSVANVKAGGVSPISSVVHALLVLFALLFFANALSYLPLSSMAALLLVVAWNMANVPQIIQLIRRSGRNEIAVLLTCLILTVIFDMVIAITVGVLLASLLFIRTIAEMTKSIEIAHPEDLNDVLVYRISGPLFFAAADNLFADLHDKTVNTEHEIKHIVLQCDAVTVLDTGGIHALTRFVQHMLPHQQLYMCNMQFQPLRMIVKSNTVNEIQKINFASDLSDAFNKIRVFEQQA

SEQ ID NO: 67141 - protein, 404 aa, Pasteurella multocida
MLPFQAARQRQFARVITFALAGFVFNTTEFIPVALLSDIAQSFAMPVSQTGLIITVYAWVVSLMSLPFMLLTAKAERRGLLIKLLVLFILSHLLSVIAWDFWVLVLARIGVALTHSIFWAITASLVIRVAPKDKKSQAIGLLAIGCSLAMILGLPLGRLIGQFFGWRATFAIIALIAIGILCLFYQLLPHLPSKNAGSLNSLPTLFKRPLLLGLYALTMIIISAHFTAYSYIEPFMLNISTMSHSMATFVLFVFGLSGITASLLFNRYYNAGPIRFILFSMGLLTATLLLLFIASQQTWTMFLLTFFWGIGIAGIGLGLQIRVLHLAPDATDVAMAIYSGIYNIGIGAGALLGNQVMQHYGLAYIGVAGALFAVFGLVLFILVQWKYGHLAPNKLSTEEKKKCG

SEQ ID NO: 67142 - protein, 404 aa, Pasteurella multocida
MLKKIAISFCAVIVAIFALAYWQIDRVNAVLTNVLNEKHITFSQLDFTFFPQVEIRLSDVKWQDQQVRSVFAPKVYLQSEFWSLLALEKRVKTVRFEQMDVWYSGQHEPDLVGITGEITGDFLIEPNQIQLANILLKMIFVKPILFNTQQLEIALQKGSIKQHSASDWQVIFDDVKINGENFVLFTLKATQQPTMLSTVSELHYAHSQSQSQFDLQLFNKVNSTQRVRFVGKNIALAPWQKMLNLPYLLTGEADISGDLVLTDTKTEKGKVAIRMAEGHFNGLNLLDLVTKYLPIHYDEARFNRNDLNTSFQHLQSSLSWDTTKLNLDTLTFHIDKVRVSGQGAVNLKTMTCDVTLNLGLTSPQYQHFSLPIRFFDSCSSPQYKVEFNQNLRHQLKDLIKEKLR

SEQ ID NO: 67143 - protein, 685 aa, Pasteurella multocida
MEQKNTFTFSTPLIWVLFALLGFALLPSKALDYGLWDSTSDEMLEAMGWYNLNLSWSWFLAVLIFPVLSLIFPKESTKRAKIELALIAAIFLFVFISATVAKFSLGYSVIILMVALLALATNALAQLKVMQGDKFVIASLIAIVMTIFFFIVYPTFAILLSMFFDNGEFKPQQVAEIIQQPYVIRVVGNSLAVSSVVGVLSTIFGLAFALYTTRIAKRTAFIGKIFSILPIVTPPFVVGLGVTLMLGRSGYVTAFLVEYLGFSSNWLYGFTGIVIAHTLALTPMSFMILEGALKSIHPSIEEAAYTLRSNRYQAFFHIIFPLLKPALANSFLVVVIQSLADFSTPLVLGGSFDVIATQIYFYIAGSQLDYASASTLGTILLMFSLAIFVIQYLWIGKRSYVTVSGKSYRGDVQELPNGLKGIIVFFLGFWTLFNLVLYGSIFYGSFTVNWGVDYTLTLKNYQILFGQGFSDGAWPSLIQTVIFAASAAPVTALFGLLIAYITVRREFKGKKTLEFLTLLCFAVPGTVAGVSYIIAFNSSPIYLTGTAMIIILSMVMRNMPVGMRAAIAGLGQLDKSLDEASLSLKGSSFKTIWYIVFPLLKPALLSALVTSFVRSMTTVSAIIFLVTADTRVATSYILNRVEDGEYGIAIAYGSILIVVMMAIILFFDWIVGDTRISRSKAKKMN

SEQ ID NO: 67144 - protein, 328 aa, Pasteurella multocida
MISLESQVLQRHLSFFEHKSVLFAGGINDQFPQQVPARSVKVWSWYFDYAKSKSAVDFSLTCEEKADLMVFYWTKNKQEVQFQLMQLLAQAPIGQEMLIVGENRCGVRSVEKMLDAYGDIAKIDSARRCGLYHFCLKNTPHFALADYWKTYQHPRLGDLRIYSLPGVFSANELDVGTDLLLSTLDQPVRGKVLDLGCGAGVIGAYIKQQYPQVELTMADIHALALASSQRTLAENQLEAEVIASDVFSNVAGKFDLIISNPPFHDGIDTAYRAVSELIMQAKWHLVPGGELRIVANAFLPYPDLLDQHFGSHCVLAKTTKFKVYSVRG

SEQ ID NO: 67145 - protein, 389 aa, Pasteurella multocida
MQSKQNNKDISAVILSVILHAILFGLLILGSLYHRVEIMGGGEGDSEVMGAVMVDTGAAAQEWGRLQQQKKGQTDKAKKTEPVIEEKPVQPDEQEIIRQQEIEKQKALEKQKEIEQQKEIERQKQLAEQKKQEEQARLAALEKQKQAEEAKAKQLAEAAKLKAEAEAKRLAALAKQAEEEAKAKAAEEAKRKAEKAKAEAEAKAKVEKAKAEAEAKVKAEKAKAEAEAKAKAEKAKAEAKAKAEKAKADAEAAQRKANQAALDDFFSGGDVGGGSATRGSNTDRQGSQGSGAALGAGDGGKTGDQYAGVIKREIQRRFLKEPSFANKVCVVEVEFLRDGTIANYRRVSGPDDICQAAVSAVARTKKVPPAPTDDIYQRYKKSPIEFKLR

SEQ ID NO: 67146 - protein, 520 aa, Pasteurella multocida
MLDVVELSRLQFALTALYHFLFVPLTLGLSFILVIMETLYVATGKEVYKDMTKFWGKLFGINFALGVTTGITMEFQFGTNWSYYSHYVGDIFGAPLAIEALLAFFLESTFVGLFFFGWDRLSKGKHLIATYCVAFGSNLSAMWILVANGWMQYPVASEFNFETMRMEMTSFMDLWLNPVAQSKFLHTLSAGYVSGAMFVLGISAYYILKGRDLGFAKRSFSIASTFGVISIFSVIIMGDESGYEIGQTQPVKLAAMEGEWHTQPAPADWNLLVVPNQAEKRNDFAIQIPYAAGIIVTRSLDKQFAGLADLEALNVERVRNGVQAYDLLLQLQAQKKAGQISEETKAQFNAVSKDLGFGLLLKRYTDKVVDATEEQIKQAAADTIPNVGPTFWSFRIMMAAGGLLLLLLVGAFVQNVRKTVGTKPWFLKALLWSIPLPWIAIESGWFLAEYGRQPWAIYEVLPVGVANSALTTGDLWFSIGLICALYTLFLVVEMYLMFKYGRLGPSSLKTGRYYFEQSSK

SEQ ID NO: 67147 - protein, 588 aa, Pasteurella multocida
MMRTHYCGALNRDNIGQEVTLSGWVHRRRDLGGLIFIDMRDREGIVQVCFDPVYQEALTTAASLRNEFCIQIKGEVIARPDNQINKNMATGEVEVLAKSLSIYNSAEPLPLDFNQNNTEEQRLKYRYLDLRRPEMAQRLKTRAKITSFVRRFMDEHGFLDIETPMLTKATPEGARDYLVPSRVHKGKFYALPQSPQLFKQLLMMSGFDRYYQIVKCFRDEDLRADRQPEFTQIDVETSFLTAPEVREIMEKMVHGLWRETLGVDLGKFPVMTFAEAMRRFGSDKPDLRNPLEMVDVADLLKEVEFKVFNGPANDPNGRIAVIRVPNGTDITRKQIDEYTQFVGIYGAKGLAWLKVNDLAAGMDGVQSPIAKFLSEAVLKALLERVQAQNGDILFFGADNYKVTTDAMGALRLKLGRDLGLTKLEEWQPLWVIDFPMFERDDEGDLAAMHHPFTSPKDFSPEQLEADPTSAVANAYDMVINGYEVGGGSVRIFDPKMQQTVFRILGINEAEQREKFGFLLDALKFGTPPHAGLAFGLDRLTMLLTGTDNIRDVIAFPKTTAAACLMTEAPSFANPQALNELSVQVIKSE

SEQ ID NO: 67148 - protein, 241 aa, Pasteurella multocida
MTKDTLFSTPIAKLGDFTFDESVAEVFPDMIQRSIPGYANIITAIGMLASRFVTANSNVYDLGCSRGAATLSARRHINQPGVKIIGVDNSQPMVDRCRQHVSAYQSTIPVDIICDDIRHIEIENASMVILNFTLQFLPPEDRRSLLSKIYQGLQPNGILVLSEKFHFEDQNMNALLIDLHHQFKRANGYSELEVSQKRTALENVMRTDSIQAHKMRLAEVGFQQVELWFQCFNFGSMIAVK

SEQ ID NO: 67149 - protein, 184 aa, Pasteurella multocida
MKKTELIRILTNKITQLDHKQRTATEQPLKTRFAPHLFSENNQVFSFYFQELKQTLTQLENAPETDIALCAFFAEKLLSQYVALSEALTHTQIKTETFTPTNKATHHVHQLPPRERLEKYYEALQALNEKLMSLQDSQQKTQAEQEKKLLGQKIQLTQQRKAKCLVAIETLEEYLVFKNTQDKK

SEQ ID NO: 67150 - protein, 369 aa, Pasteurella multocida
MTQHYSIETLLAQAGNRTDERTGAVSTPIFLSTAYAHHGIGESTGYDYTRTKNPTRSVLEETIAKLEGGERGFACASGMAAIQLIMSLFTSPDEWIVSRDVYGGTYRLLDFAYKNTQGVKPVYVNTSEVSCIEAAITSNTKAIFVETPSNPLMEECDVAAIAKIAKKHNLLLIVDNTFLTPVLFRPIEAGADIVIHSGTKYLAGHNDALVGLVVAKGEELCQRLFYIQNGAGAVLSPFDSWLTIRGMKTLALRMERHEQNAKQLAAFLASQPQVKNVLYPNKGGMLSFRLHEAHWVNPFLKALKLITFAESLGGTESFITYPATQTHMDIPEEERIARGVCNCLLRFSVGLENVEDIKADLLQAFAQLN

SEQ ID NO: 67151 - protein, 274 aa, Pasteurella multocida
MYLISEFIFQFILYEVCMKNKSKLLACCLMALPISSFSIGNNNLIGVGVSAGNSIYQVKKKTAVEPFLMLDLSFGNFYMRGAAGLSELGYQHVFTPSFSTSLFLSPFDGAPIKRKDLKPGYDSIQDRKTQVAVGLGLDYDLSDLFNLPNTNISLEMKKGRRGFNSDITLTRTFMLTDKLSISPSFGLSYYSAKYTNYYFGIKKAELNKTKLKSVYHPKKAYSGHIALNSHYAITDHIGMGLSFSWETYSKAIKKSPIVKRSGEISSALNFYYMF

SEQ ID NO: 67152 - protein, 391 aa, Pasteurella multocida
MDVIQKDMIVVGGGMVGAACALGLGKQGHQVQLIEHAPLPQFQPNSPYDLRISAISVASVNLLKQLGAWQYIENTRICPYRALETWEIEGFGTTFHSQELNLPELGFMIENNVVQLGLWQAISSIENIQTCVGCTIQKVEKCGENWQILLANGTTYQAPLIIAADGANSQLRQIANIGTSGWQYRQSCLLITVDTELEQQDVTWQQFFPSGPRAFLPLLGKQACLVWYDSPQRIQTLKQLSREKLAAQIEQAFPARLGKIKVQAANSFELTRTHAQDYFKQGIVLVGDAAHTINPLAGQGVNLGFKDVNILLEVLQQASQKKEPLASDDVLIRYQRKRKPDNLLMQTGMDVFYKTFKEDILPLKIVRNASLFLANKATPLKKQALKYALGL

SEQ ID NO: 67153 - protein, 344 aa, Pasteurella multocida
MFKNKTLLITGGTGSFGNAVLKRFLETDIREIRVFSRDEKKQDDMRKKYNDAKLKFYIGDVRDYDSILNASRGVDYIYHAAALKQVPSCEFYPLEAVKTNILGTANVLEAAIQNQIKRVVCLSTDKAVYPINAMGISKAMMEKVIIAKSRNLEGTPTTICCTRYGNVMASRGSVIPLFVDQIRQGKPFTITDPEMTRFMMTLEDAVDLVLYAFKNGQNGDVFVQKAPAATIGTLAKAITELLSVPNHPISIIGTRHGEKAFEALLSREEMVHAINEGNYYRIPADQRSLNYSKYVEKGEPKITEVTDYNSHNTERLTVKEMKQLLLKLEFIQKMIEGEYISPEV

SEQ ID NO: 67154 - protein, 376 aa, Pasteurella multocida
MKKLKVMTVVGTRPEIIRLSRVIVACDKHFQHILVHTGQNYDYELNEVFFHDLGIRKPDYFLNAAGKTSSATIGNVIIAVDQLLEETQPEALLVLGDTNSCLAVLPAKRRKIPTFHMEAGNRCFDMRVPEEINRRIVDHTADINLTYSTIARDYLLAEGLSPDLIIKTGSPMFEVLHFYHEQIKHSKILDKLGLTPFQYFVVSAHREENINSEPHFLDLIHTLNAVAKKYQYPVIVSTHPRTRKRIEELNITFHPLIQLLKPLGFLDYNKLQLMAKATLSDSGTINEESSILNFPALNLRQAHERPEGMEEAAVMLVGLQAERVLQGLAILDEQRRGQERDLRLVADYSMPNVSAKVIRILLSYTDYVNRVIWKKY

SEQ ID NO: 67155 - protein, 406 aa, Pasteurella multocida
MKILLLTQWFEPEPAIKGLAFAKELKAQGHDVQVLTGFPNYPGGKIYEGYKLRFFQKECIEGIPVLRVALYPSHDSSAIKRILNYVSFAFMAMLFGIFATKKCDVIYAYHPPLTTGIAAIMIKLFRRTPVIYDIQDLWPDTLKATGMLTHDRLLKIVDYVCQCVYKCVDHIVVLSPGFKEKLIQKSVPANKISVIYNWCNETALINTETSQTVHLCHQKFNVLFAGNMGKAQALDTILDVAANMHPYPDIHFTFIGSGTETTRLNTRKDDENLTNVTFIPRVPMSQIGHVLQQADLLLVHLKQDALFEITVPSKIQAYMAIGKPILVAVPGDASNLVRLAQCGETALSENIESIQRAILKMYHLPAQTRHLLGKNGNTFYFNELSLQKGTEKFIELFKKIKPEKSV

SEQ ID NO: 67156 - protein, 200 aa, Pasteurella multocida
MLKRFLDIVISATALILLSPLFLIIAYQVKKNLGTPILFHQMRPGRYGKAFNMIKFRTMKDSRNEKGELLPDSERLTPFGHFLRSSSLDELPELWNVLKGDMSLVGPRPLLMEYLPLYNAEQAKRHNVRPGITGYAQVNGRNAISWEQKFKLDVWYVENQSLWLDIKILLKTLNVVIFRKNVNDQSGHSMPRFLGDTEKK

SEQ ID NO: 67157 - protein, 648 aa, Pasteurella multocida
MNMHYLITSLTLLSKTNKKIFLLVLDFIACPILLWQCYMLRYWSIEISVNLPFLLGISLLTVGSLLLFGVYDFIIRSFSETLILRLGLATIITVLNLYLVTFIAEEMLPRSIPLMYGFLMFTWIWLSRGIIRFIVKAHLTTKAPKIRIVVYGAGASGQQIISALQRSCEYLPLFFIDDNKQLWGRTLGGFKVYSFETAMTLLKDYRVDEILIALPSVSRERRRELIKKLNKTPCKIKELPSLQQLVDGEVGLSDIQEIAIEDLLGRDPVPPITALLNKNIQHKSVMVTGAGGSIGSELCRQILLNHPTKLVLFDVSEYALYSIHLELLHIQQEKGTHVEIIPLLGSVQNLKLLIKVMQTFEVNTVYHAAAYKHVPLVEYNVIQAVYNNIFGTYNAAKAAMRCQVDAFVLISTDKAVRPTNVMGTTKRVAELCLQACADTYGKTLDGVVHKTLFCMVRFGNVLGSSGSVIPLFKQQIKEGGPITVTDERIIRYFMTIPEAAQLVIQAGAMAKGGDVFILDMGEPVKILELAKKLILLSGLSIKNENNPNGDIEIKFTGLRPGEKLYEELLIGGENVRKTLHPRILTAQETCLPFSELSLLLDELERACKKSDYQKIHDILRNAPTGYQPVTELADLIYTQQNNHIHLWG

SEQ ID NO: 67158 - protein, 276 aa, Pasteurella multocida
MFSTYRYDTSAEVFKIIQITDPHLFKDEHGELLGINTFQSFSQVLHEIKASRFDYDLVLATGDLVQDSSREGYLHFCEQVKSLEKTVFWIPGNHDFQPKMFEILNQDQGNLNPKKHILLGKSWQILMLDSQVFGVPHGELSQYQIDWLVAKLKDHPERYTLIVLHHHILPTHSTWLDQHNLRNAHELAYALAPFDKVKGILHGHIHQEMDANWQGYRVMATPATCIQFKPDHNTFTLDSVQPGWRELELYSDGRIETRVKRIQDKTFFPNMHEDGY

SEQ ID NO: 67159 - protein, 631 aa, Pasteurella multocida
MSTNQETRGFQSEVKQLLQLMIHSLYSNKEIFLRELISNASDAADKLRFKALSVPELYEGDGDLKVRIRFDEEKGTLTISDNGIGMTRDEVIDHLGTIAKSGTKEFLSALGQDQAKDSQLIGQFGVGFYSAFIVADKVTVKTRAAGVSADKAVLWESAGEGEYSVADIDKKERGTEITLHLREDEKAFLNDWRLREIIGKYSDHIGLPVEILAKEYDDEGKETGIKWEKINKAQALWTRAKNEISEEEYQEFYKHLSHDFTDPLLWAHNKVEGNQEYTSLLYVPAKAPWDLFNREHKHGLKLYVQRVFIMDDAQVFMPNYLRFMRGLLDSNDLPLNVSREILQDNKVTSALRKALTKRALQMLEKLAKDDAEKYQRFWQEFGLVLKEGPAEDFANKETIAKLLRFASTHNDSSQQSVSLEDYVARMKEGQKAIYYITADTYVAAKNSPHLELFNKKGIEVLLLSDRIDEWMLSYLTEFDGKPLQTISKADLDLGDLADKEEDSQKAQDEQYASFVERVKTLLGERVKEVRLTHRLTDTPAVVSTGDDQMTTQMAKLFAAAGQAMPEVKYTFELNPEHGLVQKVAEIADEQQFADWIELLLEQAMLAERGSLENPVAFIKRMNTLLSKLTSH

SEQ ID NO: 67160 - protein, 384 aa, Pasteurella multocida
MSRYLFTSESVSEGHPDKIADQISDAVLDEILKQDPKARVACETYVKTGMALVGGEITTSAWVDIENLTRQVICDIGYKHSDMGFDGHSCAVLNAIGKQSSDINQGVDRENPLDQGAGDQGIMFGYATNETEVLMPAAITYAHRLMERQAKVRKEGTLPWLRPDAKSQVTLKYEDHKIVGVDAVVLSTQHCDSISQHDLHEAVMEEIIKPVLPAEWLSKETKYFINPTGRFVIGGPMGDCGLTGRKIIVDTYGGAARHGGGAFSGKDPSKVDRSAAYAARYVAKNIVAAGLADRCEIQLSYAIGVADPTSIMVETFGTGKVANELLVALVREFFDLRPYGLIKMLDLIQPIYRETAAYGHFGREQFPWEKVDRAEELRAAAGLK

SEQ ID NO: 67161 - protein, 72 aa, Pasteurella multocida
MAKEDCIEMQGTILETLPNTMFRVELENGHVVTAHISGKMRKNYIRILTGDKVTIEMTPYDLNKGRIIFRSR

SEQ ID NO: 67162 - protein, 520 aa, Pasteurella multocida
MLHYLKKMKKKIFTYFIAIFSGIIGVLAFSPFDYWGCAYLSLLGLIFVAKTAEKKTALWSAFLWGLAFFTFGINWVHVSIHQFGGASVVVSYVLVLVLAAYLALYPMLFAYLIQRFQISSLAMFPVIWTFTEFLRGWLFTGFPWLQFGYSQIDSPFAHLAPMFGVTGVTFFVMWVSAVIFNLLSVLLIKPRKWNVVIANLLLLTLVGGLSAYSSKAEYVRKIEDRDLLVTLAQGNIEQNLKWEPEYLYQTLDIYHKLISQHLGKTDVIILPESALPVLENHIQPFFQGLQAHAQQAGTEIVMGTIYQDKTANKLLNSIITLGNTDFPYSLETTNRYSKHHLVPFGEYVPLETLLRPLGSVFNLPMSAFQSGDEIQSPLVVKNRQLSAAICYEIILGEQLRKNVKQDTDFILTVSNDAWFGDSIGPWQHLQMARMRALEFGKPVIRATNTGISVFIDEQGKIVAQAPQFIETTLTHKVAATEGQTPYAVFGNTAIYGLSLLLLLMRGFGALIRRRLFMPRL

SEQ ID NO: 67163 - protein, 300 aa, Pasteurella multocida
MANEEQSNTYSTESHQKKSFFQSLFGRFFQGELKNREELVEVIRDSEQNELIDQNTREMIEGVMEIAELRVRDIMIPRSQIVFIHTDQNLDSCLDTIIVSAHSRFPVITDERDNIAGILHAKDLLRFLRSNAEEFDLMPLLRPAVIVPESKRVDRMLKDFRSERFHMAIVVDEFGAVSGLVTIEDILEQIVGDIEDEFDEEEIVNIRQLSRHTYAVRALTDIEDFNQQFNTHFADEEVDTIGGVVMQAFGYLPKRGEEITIENIGFKVTSADSRRLIQLRITVTDEQLAEIEKAEELKED

SEQ ID NO: 67164 - protein, 506 aa, Pasteurella multocida
MTTQIPNQDSEILLTMTNVCKSFPGVKALDNANLTVRSHSVHALMGENGAGKSTLLKCLFGIYSKDEGDILFLGKPVNFKTSKEALENGISMVHQELNLVKQCTVMDNLWLGRYPLKAGFVDHGKMYRDTKAIFEELDIDIDPKEKVAKLSVSQMQMIEIAKAFSYNAKIVIMDEPTSSLSEKEVEHLFKIIAKLKQRGCGIIYISHKMDEIFKICDEITILRDGKWINTVAVKGTTMDQIVSMMVGRELTQRFPPKTNTPKETILTVENLTALNQPSIQDVSFELRKGEVLGIAGLVGAKRTDIVETIFGVRERKSGVIKLHDKEMKNRNAFEAINNGFALVTEERRSTGIYANLSIEFNSLISNMKSYISKLGLLSNTKMKSDTQWVIDSMNVKTPSHKTNIGSLSGGNQQKVVIGRWLLTQPEILMLDEPTRGIDIGAKYEIYQLIMELAKKDKGIIMISSEMPELLGVTDRILVMSNGKVAGIVNTAETSQEEILQLAAKYL

SEQ ID NO: 67165 - protein, 1145 aa, Pasteurella multocida
MTTTYFDFTIPTQANDHKILGNVLMGADCLAISQIAQQYSGLTVVVTADTRSAVRLEKVLAQFSSLPVTFFPDWETLPYDAFSPHQDIISSRLSALSQLQHCQKGIVILPISTLMQRLCPPTFLHHNLLLVKKSDRLQINKLRLQLESAGYRAVEQVLEHGEYAVRGALLDLFPMGSAVPFRLDFFDDEIDSIRTFDVDTQRTLEEIQAINLLPAHEFPTDEKSIEFFRTQFRETFGEIRRDPEHIYQQVSKGTLISGIEYWQPLFFEQMASLFDYLPKNTLWLDVGDIQEQGTRFYQDAEQRYESRKVDPMRPLLPPDRLWLRLEEINRILKQYPRISFKLDKVRSSARQKNLAVQPLPTLAIQSQHKEPLQQLRQFSDQFKGKIVFSVESEGRRETLLDLLSPLKIKPQKLTALSNISEKCNVLISGLENGFIIDNDQPIAVMTETELLGERVQQRSRDKRKSVNPDTLIRNLAELKIGQPVVHLDHGVGRYAGLVTLENGGITAEYLLLNYANESKLYVPVSSLHLISRYVGGADETAPLHKLGSDAWVRARQKAAEKIRDVAAELLDVYAQREAQKGFAFHYDREAFQQFAATFPFEETVDQEMAINAVIADMCQAKAMDRLVCGDVGFGKTEVAMRAAFLAVMNHKQVAVLVPTTLLAQQHFENFKDRFANLPINVEVLSRFKTAKEQKVVLQNLAEGKVDILIGTHKLIQSDVQFKDLGLLVIDEEHRFGVRQKERIKQLRANIDILTLTATPIPRTLNMAMHGIRDLSIISTPPARRLTIKTFVKQSDESVIREAILREILRGGQVYYLHNDVASIENCAEKLRTLVPEARVTIGHGQMRERELERVMSDFYHQRFNVLVCSTIIETGIDVPTANTIIIERADNFGLAQLHQLRGRVGRSHHQAYAYLLTPPIKAMTKDAQKRLEALESLDNLGAGFILATHDLEIRGAGELLGSEQSGQIESIGFSLYMDLLESAVNALKAGREPSLEELTQQQVEIDLRLPALLPEDYLGDVNIRLSFYKRIAGAENKPELDELKVELIDRFGRLPEATTSLFRIAELRQLAKKIQIQKIDANAQGGFIEFASNADLDPMKFLQLIQTEPSVYRFDGPTKFRFSKTFEGHKVRLDFVENLVKGLSQ

SEQ ID NO: 67166 - protein, 651 aa, Pasteurella multocida
MNRVNKQRKVQCWVGENATLFPPLARLSGIKSAVWIGDDLPPFLSFAHFDFKQAKNMLGQEFALIVYDARGGLNLDALAIASGTLQQDGVLLILLPQWAMLSTWQDPDSVRWSGENDPILTPHFLHYFQQKVRDYGFPVYHTFFPSLSLPDKSTSAVDFQSEPTVEQAQLLHRINKATEAVLIVTAKRGRGKSALAGFWARQLKQQNQTLILTAPNKAAVRILQAFANTALDFKSPDLLCEQIAQDPHAFADKWLLIDEAAMLPLSLLELLTSTFKGILCTTTIQSYEGTGRGFLLKFLANLDRTFAHFELHQPLRWQVDDKLEAFMDDLLLLHAEDLPFAPLASAEGVQFQRYSQHTLYQQQKIAPLYGLLTRAHYRTSPLDLRRLFDAPNQHFYLAQKDEHLLGAAWLVQEGSLQSEQLIGEIERGLRRPRGNLVPQLLCFQAHLPQACRLSSLRISRIAVQPNWQQQGIGQQLVKNICQDAQVDFLSVSFGYTTKLAAFWQKCGFLLVHLGEQKEASSGCYSVIGLKPLSSAGISFCQQAYQQFQRNLSLSRHSLATAFPSLPSTWQLDPQDWRALVHFAYFQGSFTAALPAIQRLLAQTNRCICPLLSALLQPSSNEMKFVGGKKNGIKICREEVKKLLQNHTAVLS

SEQ ID NO: 67167 - protein, 203 aa, Pasteurella multocida
MLTDKEKRHLGLAHQPYDPELAEMRLRNKELLHEYNVLTRPSDKQTKARLILSILGKAANTPHINTPFYCDYGQFIEVGKNFFANYHCTILDTGGVKIGDDVLFAPNVSLYTVGHPIDPELRKAEWEQALPIVIGNNVWIGGNVVILGGVTIGDNTVIGAGSVVTKDIPANCVAVGNPCKVQRMISPQDREDYLQRFKPDWND

SEQ ID NO: 67168 - protein, 671 aa, Pasteurella multocida
MKLNKQQQQAVEYVTGPCLVLAGAGSGKTRVIINKIAYLVAKCGYVPRQIAAVTFTNKAAREMKERVAHSIGKEASRGLIVSTFHTLGFDMIKREYKQLGFKANMTLFDEHDQYALLKELTADLLCEDKDLLRELISVISRWKNDLVLPPQAKQLARDHKQQMFAECYDRYNQQIRAYNALDFDDLIMLPTLLLQQNDAVRTKWQQKIRYLLVDEYQDTNTSQYELIKLLVGERACFTVVGDDDQSIYSWRGAQPQNMMRLKTDFPHLNVVKLEQNYRSTQRILHCANILIDNNDHVFAKKLFSTLDQGEKLQVIEAKNEEEEAERVVGELIAHRFMRKTKYKDYAILYRGNHQSRLLEKVLMQNRIPYKISGGTSFFSRAEIKDMMAYLRLVVNQDDDAAFLRIVNTPKREIGTVTLQKLGELAHEKHCSLFEAIFDFELIQRITPKAYNALQHFGQWIVQLSDEVIRSEPERAIRSMLAQLHYEEYLYEYATSPKAAEMQSKNVATLFDWVAEMLKGNDMDEPITLNQVVTRLTLRDMLERGEEDDESDQVQLMTLHASKGLEFPHVFLIGMEEGILPHQTSIDEDNVEEERRLAYVGITRAQQTLTFSLCKERRQFGELLKPEPSRFLAELPTDDVQWERDKPPLTQEQVRENTATQLANLRAILRGK

SEQ ID NO: 67169 - protein, 385 aa, Pasteurella multocida
MKALHFGAGNIGRGFIGKLLADSGIQVIFADVNDHVIEQLKTQRAYPVKIVGDRLNVIETVSNVTGVNSKNEADIIACFTEVDLVTTAVGPNVLKIISSTIAKGLSARFRAGNTRPLNIIACENMVRGTSFLKDNVFSYLTPEEQQQAEAQIGFVDSAVDRIVPPVQFDPANPLLVTVEEFSEWIVDKTQFKGTIPAITGMEQTDNLMAFVERKLFTLNTGHATTAYLGKLKGHQFVKDSIDDPDIREAVKATMQESGAVLIKRYGFDPHAHAAYIEKILKRFANPYLQDDVDRVGREPLRKLSYNDRLIKPLRGTLEYGLPNQHLIQTIASALAYRNESDPQAVELAQLLQQDTLESAVKKITELTESNIVQQIVTAYNALQKN

SEQ ID NO: 67170 - protein, 172 aa, Pasteurella multocida
MQSVDPIYEKLNEATSIRGFITASVAIFDEAVDKLINRVFRKTDFAVKSVVDSLLSNSGPLCDLSIRLKVLLGLGIIEHHVFSDISHFIEIKEKLNNDEKEYDFADLIIIDFIQQLSCQNDKSLLNFPMEKDENPDSLLYQVKALRREKLIRSYLTLAITEIYEQLQIESPL

SEQ ID NO: 67171 - protein, 930 aa, Pasteurella multocida
MAKIAENPLVLVDGSSYLYRAFHAFPPLTNSLNEPTGAMYGVLNMLKSLISQVQPSHIAVVFDAKGKTFRDEIFEQYKSHRPPMPEELRSQILPLHNIIRALGIPLLVVEGVEADDVIGTLAVQASRAGKKVLISTGDKDMAQLVDENIMLINTMTNTLLDREGVLEKYGLPPELIIDYLALMGDSSDNIPGIPGVGEKTALGLLQGIGSMAEIYANLDKVASLSLRGAKTLGAKLAEAKDLADLSYLLATIKTDVALDVSPEQLTFGVANKDALIEYFARYEFKRWLNEVMNGGESSVTNGSEQAVKINPYQATPSTNERENTVSVQIDRSQYQCLLELSELKRWIDKLNQAKCIAIDTETDSLDYMVAHLVGVSFALENGEAAYLPLRHDYLGAPQQVDFQTALSLLKPVLENPEIHKVGQNIKYDLSIFARHGIEVQGVSYDTMLLSYVLDSTGRHNMDELAKRYLGHQTIHFEDIAGKGKAQLTFNQIPLEQAAEYAAEDADITMKLQQVLWEKVAAQPELVKLYQTMELPLASVLSRIERHGVLIDSDALFSQSQQIGVRLTALEQQAYELAGQQFNLASTKQLQEILFDKLSLPVLKKTPKGAPSTNEEVLEELAYEHALPKILVEHRGLSKLKSTYTDKLPLMVNKDTGRVHTSYHQAVTATGRLSSSDPNLQNIPIRNEEGRRIRQAFIAPEGYQIMAADYSQIELRIMAHLSQDKGLINAFNEGKDIHRSTAAEIFGIPLAQVSSEQRRSAKAINFGLIYGMSSFGLSRQLGIPRHEAQKYMDLYFQRYPGVQAFMHDIRETAKAQGYVTTLFDRRLYLPDIQSSNAIRRKAAERVAINAPMQGTAADIIKRAMITLDREIAGQPDIKMIMQVHDELVFEVRTDKIEHFRTIIKTTMEQAAQLVVPLIVDVGVGKNWDEAH

SEQ ID NO: 67172 - protein, 222 aa, Pasteurella multocida
MTPQTEQELLQRAQAIAGLRFAELAQSLHMPVPPDLKRDKGWVGMLIETALGATAGSKAEQDFAHLGIELKTLPINAQGMPLETTFVSLAPLTQNVGVSWENSHVRHKLSKVLWILVEGERQIPLSERRVGQPILWQPSAQQELRLKRDWEELMEYISLGKLEQINATLGEVLQLRPKGANSKALTRGIGKHGEMIDTLPLGFYLRKTFTAEILQQFLLGTG

SEQ ID NO: 67173 - protein, 180 aa, Pasteurella multocida
MSPVYYCYEDSPVGRLLMLCEAEKLTHLDFVVTQVAPRPDWILDENRPLFLQVKQALRDYFAGKRVCFDAIPFAPKGTAFQQRVWSALQQLAYGESTTYGELAQQIGQPKAVRAVGGAVGRNPISILIPCHRVLGKQRELTGFGGGLPIKRHLLQLEQIDYVDHGVEFVKPKHLKKYQQK

SEQ ID NO: 67174 - protein, 443 aa, Pasteurella multocida
MFYYTNNLNNKGLIIMAKTSKFTQTLLASALAVVAGSASAAAFQLAEVSTSGLGRAYAGEAAIADNAAVVATNPALMSLLKQPEISVGAIYVDPNINLTSPMPGFAYKNIAPNALVPTVYGVYPINEKFAVGGGLNVNYGLATEFDDKYAGGFLGGKTDLTAINFNLSGAYRVTEKFSVGLGLNAVHAKAKLERYAGVALKLKVPNVAQLAALPANTVISKLQGDKWGFGWNAGLVYEFNERNRIGIAYHSQVDINFKGQYSNHFPLAAAALLQTKGITATGGKEIPGTLHLPLPAYWEISGYHKMTDRFAMHYSYKYTQWSKFKELRAKGTDGKTLFSKTEEFRDSSRIALGASYDVTDALTVRTGIAYDESAADEHNTISIPDTDRTWFSVGATYRFTPNVSIDAGFAHLKGKKNTFKEEGVPFTSKASANLYGLNVNYRF

SEQ ID NO: 67175 - protein, 108 aa, Pasteurella multocida
MLNISSKLEGKGMSKLKCNPEEAKACCCVDVGTIIDGSDCTVEFEQVYASQAQAEEALAYLTEKAKAAESDPCEITSDISAVEQGALLKAQFVFSCQAEAMIFQLSTR

SEQ ID NO: 67176 - protein, 551 aa, Pasteurella multocida
MSIFTLAQHWLAQDPDPETHAELTALLDAAKTGDAKASTELNARFDGRLQFGTAGLRGRLQAGPMGMNRVLVAQAAGGLADYLKDYDKTPSIVIGYDGRKNSDVFARDTAEIMAGAGIKAYLLPRKLPTPVLAYAIKYFDTTAGVMVTASHNPPEDNGYKVYLGKANGGGQIVSPADQDIAKLIDKVAAGSIKDLPRSQDFIVLDDEVVDAYIAKTASLAKEPQTDINYVYTAMHGVGYEVLSKTLAKAGLPQPHLVAEQVWPDGTFPTVNFPNPEEKGALDLAIKVAKEKNAEFIIANDPDADRLAVAVPDAEGNWKPLHGNVVGCFLGWYLAKQYHAQGQKGILACSLVSSPALAEIAKKYGFQSEETLTGFKYIGKVDGLLFGFEEALGYLVDPDKVRDKDGISAAISFLDLVRYLKKQGKTLADYADEFTQEFGAYVSGQISIRVDDLSEIGKLMSALRQNPPSDIGGFKVAQFLDHTKTDRQSDILVFVLENGSRLIVRPSGTEPKIKFYLDAKGKDPKDAEQVLAQFDESVRHILRQDEFGKQDC

SEQ ID NO: 67177 - protein, 1297 aa, Pasteurella multocida
MLQIFRGSPALSEFRLNQLAVRFQKANLPVSACYAEYIHFADLSDRLTEEETAKLDQLLHYGPTLAGHDPVGHCFIVIPRIGTISSWSSKATDIAHNCGLNKVNRLERGLAFYFEFDRTLSSEEQQRLVSHIHDRMLEGIIHTPEEAKVLFDQQAPKPFTTVDILSGGRQALENANVELGLALAEDEIDYLVENFTALGRNPNDIELYMFAQANSEHCRHKIFNADWIIDGEKQEKSLFKMIKNTFEKTPDHVLSAYKDNAAVMEGSKVGRFFPDQDGQYRYHNEDAHILMKVETHNHPTAISPFPGAATGSGGEIRDEGATGRGAKPKAGLVGFSVSNLVIPGFEQPWENPVSKPNRIASALDIMIEGPLGGAAFNNEFGRPALLGYFRTYEEKVNSFAGEEVRGYHKPIMLAGGIGNIRAEHVQKGEIPVGAKLIVLGGPAMNIGLGGGAASSMASGKSKEDLDFASVQRDNPEMERRCQEVIDRCWQLGEDNPILFIHDVGAGGLSNAMPELVHDGGRGGKFELRKILSDERGMSPLEIWCNESQERYVLAVAPEKLELFTALCERERAPFAVIGEATEQEHLTLHDDHFDNNPIDLPMNVLLGKTPKMTRDVKSKTVEGSALDHSQIDLKEAFHRVLRLPVVAEKTFLITIGDRSVTGMVARDQMVGPWQIPVADCAVTTASLDSYHGEAMSMGERAPVALLDFAASARLAVAESITNIAATNIGDIKRIKLSANWMSAAGHEGEDAGLYQAVKAVGEELCPQLGLTIPVGKDSMSMKTTWHENGEQKTVTAPLSLVISAFARVEDVRKTVTPQLRTDKGHSRLLLIDLGEGKNRLGATALAQVYKQLGDKPADVVNVESLKNFFNAMQALVAEQKLLAYHDRSDGGLIATLAEMAFAGNCGLSIHISALGDNDLAVLFNEELGAVIQVRESDLSYVRDVLSQHGLIHLTKELGEVTTEDRIEISRGTKLLFSQKRSELRGIWAELTHQMQRLRDNPECADQEFAAKKDPENKGFSAHLTYDINEDIAAPYIATGKKPRIAILREQGVNSHYEMAAAFDRAGFEAIDVHMSDLHNARYRLKDFNALVACGGFSYGDVLGAGGGWAKSILFNPMLRDQFSEFFANPNTLTLGVCNGCQMVSNLAEIIPGTDAWPRFVRNKSERFEARAALVRINETNSLWFQGMAGSHMPIAVSHGEGRVEFKHDQQLQMLKDQNLIVAQYIDNNLNPTEIYPANPNGSVEGITALSNQDGRVAIMMPHPERVFRTVSNSWHPEDWSEDGAWMRLFRNARVVLE

SEQ ID NO: 67178 - protein, 334 aa, Pasteurella multocida
MTVRIGSYQLKNRIFLAPMAGITDQPFRRICTHYGAGLTFSEMMSTNPQVWHTEKSKLRLAHHQEAGINAVQIAGCDPDEMAKAAQINVEYGAEIIDINMGCPAKKVNRKMAGSALLQYPDLVKQILNKVVKSVTVPVTLKIRTGWDKDNRNCLEIAKIAEQCGIQALTIHGRTRSCMFEGEAEYDNIKAVKEQLSIPIIANGDITSAEKAKYVLDYTNADAIMIGRGSLGNPWLFRVMESLIEKDSIVLEPSLNEKCNVILQHIQELHQFYGVEKGCRIARKHVAWYLQGIQPNPVFRQAFNAITDPKEQLIALEGFFNLILMDKEKNVRTTT

SEQ ID NO: 67179 - protein, 477 aa, Pasteurella multocida
MNYSILIPLFLYLCFVFAVAYYAYAKRQKGSFLSEYYVGNRSMSGFVLAMTTAATYVGASSFIGGPGAAYKFGLGWVLLAMIQVPVVLFTLGVLGKKFAMWAREHKSLTINDILFSRYKSPTIVLLASLSLLFSFFIMMAVQFIGVGRLLETTLNIDYRLSVLIFATTVGIYTFIGGFRAVVLTDTIQGLIMMIGTFLLLFGVIYAGGGVSQIIDTLETIDPRLITPYGIEARPLDFTFMASFWVLVCFGLLGLPHTVIRAMSYKNSKALHSGIVIGTVVIALLMLGMHLAGALGRAVVPELSVTDKIIPTLMIQVLPPVVAGIFLAAPMAAIMSSIDSMLIQASSTLIKDLYLRFKPEQIRNERRVKILSTVATLFMTILVTVATLNPPDMLIWLNLFALGGLETTFLWVMLLGLYWQKANAYGAVCSMIVGLGSYVTLTAASIKLLDFHAIVPALLFGLIAFLIGNQYGERKIQH

SEQ ID NO: 67180 - protein, 448 aa, Pasteurella multocida
MLEKVVIANRGEIALRILRACKELGIKTVAVHSTADRELKHVLLADETVCIGPAPSTKSYLNIPAIIAAAEVTGADAIHPGYGFLSENADFAEQVERSGFIFIGPTADVIRLMGDKVSAIEAMKKSGVPCVPGSDGPVGSDMVKNKEIAKRIGYPVIIKASGGGGGRGMRVVRDEASLEESIAMTKAEAKAAFNNDMVYMEKYLENPRHIEIQVLADTHGNAIYLAERDCSMQRRHQKVVEEAPAPGISDEVRRDIGERCAKACVEIGYRGAGTFEFLYENGEFYFIEMNTRIQVEHPVTEMITGVDLVKEQLRIAAGLPISIKQEDVKVRGHAIECRINAEDPKSFLPSPGKVDHLHSPGGLGVRWDSHVYAGYTVPPHYDSMIAKLITYGDTREVAIRRMQNALGETILTGIKTNIPLHELILADENFQQGGTNIHYLEKKLGMRD

SEQ ID NO: 67181 - protein, 153 aa, Pasteurella multocida
MDIRKIKKLIELVEESGIMELEISEGEESVRINRGSAAPSAVQYSLPVQAAPAPVAAPTAPAVSAPAAPVNAEEVSGHFIRSPMVGTFYRSPSPEAKPFVEIGQAVKVGDALCIVEAMKMMNRIEADKAGVVKAILVNDGEAVEFDQKLIIIE

SEQ ID NO: 67182 - protein, 300 aa, Pasteurella multocida
MTKFNVKTFQGMILALQDYWANQGCVIVQPFDMEVGAGTSHPMTCLKALGPEPMAAAYVQPSRRPTDGRYGENPNRLQHYYQFQVVIKPSPDNIQELYLDSLKMLGFDPTQNDIRFVEDNWENPTLGAWGLGWEVWLNGMEVTQFTYFQQVGGLECKPVTGEITYGLERLAMYIQGVDSVYDLVWSDGPLGKTTYGDVFHQNEVEQSTYNFEYANTDFLFYCFDQYEKEASELLALEKPLPLPAYERILKAAHSFNLLDARKAISVTERQRYILRIRALTKGVAEAYYASREALGFPGCK

SEQ ID NO: 67183 - protein, 207 aa, Pasteurella multocida
MKLWHSNTSPYVRKVMAVIKHHQLEDQIELHTIQSSFDPNSPHNQDNPLGRVPALQLDNGEWLYNSHVICEYLDHLGAQTQSESHLLPRNSQRWKVLQLHALTDGIMENTLPIISERLLRPENEWWTARHQQLSERNIRSFKELERYLVQFGDELNLGTISAVCLIDWYALRGEKLGVNLKEIAPHLVQWAMEMNDKYPELKETQPK

SEQ ID NO: 67184 - protein, 689 aa, Pasteurella multocida
MTTQNFLAEIGTEELPPKALKKLATAFAENMELELNQAGLAFESVQWFAAPRRLAVKVLALATSQPSKEIEKRGPAVSAAFDAEGKPTKAAEGWARGCGISVEQAERVATDKGEWLVHRATIEGQPTKNLLKDMVANALAKLPIPKPMRWADKTVQFIRPVHTVTMLLGDELIEGEILGVESARTLRGHRFLGEREFQISHADQYPALLKEKGSVVADFNDRKALILAKSQEKATALGGVADIEDDLLDEVTSLVEYPNVLAAKFEERFLAVPAEALVYTMKGDQKYFPIYDKDGKLLPHFIFVSNINPDDPSKIIEGNEKVVRPRLTDAEFFFKTDLKQRLEDQLPRLETVLFQQQLGTLRDKTARIEQLAGEIAKQIGADEVKAKRAGLLSKCDLMTNMVFEFTDTQGVMGMHYARHDGEDEEVAVALNEQYMPRFAGDELPKSLVASAVALADKFDTLTGIFGIGQQPKGSADPFALRRAALGALRIIVEKNLPLDLAEIVKKSSALFGDKLTNANVVEDVVEFMLGRFRAWYQDEGIAVDVIQAVLARRPTKPSDFDARVRAVSHFRALEAAEALAAANKRVSNILAKVEGELPANIDTTLCAEAAEKVLAEQVIALQAELAPLFAKGEYQVALDRLAALREPVDTFFDNVMVNAENPQLRQNRLAILNNLRNLFLQVADISLLQ

SEQ ID NO: 67185 - protein, 523 aa, Pasteurella multocida
MTTTQQQKKGSKFLHTVEWLGNMLPHPVTLFMIFIVLLLITSALGEYFGLAVADPRPEGVKGRAADGMIYVVSLLNAEGLSRILTNLVKNFTNFAPLGTVLVALLGVGIAEKAGLLSAVMRLLVTKSPRKLTTFTIVFAGILSNTASELGYVVLIPLAAIIFHSLGRHPLAGLAAAFAGVSGGYSANLLLGTIDPLLAGITQQAAQIIDPTYTVGPEANWFFMAASTFVIAFIGYFITEKIVEPQLGPYNSHLSQEELDLQHSNEVSPLERKGLRYAGLVFLILCALLAWTVVPENGILRDPKTGLVTGSPFLKSIVAFIFILFAIPGTVYGIVTKSIRSEKDVVNAMAEAMSTLGLYLVIIFFASQFVAFFNWTNIGQYIAVKGANFLNEVGLHGGILFMGFILICAFINLMIGSASAQWAVTAPIFVPMLMLTGYSPEIIQAAYRIGDSVTNIITPMMSYFGLIMATVLKYKKDAGVGTLVSMMLPYSVAFLVAWSAMFFIWVFVLGLPVGPNSPMFYPAQ

SEQ ID NO: 67186 - protein, 547 aa, Pasteurella multocida
MAAKDVKFGNDARVKMLAGVNILADAVKVTLGPKGRNVVLDKSFGAPTITKDGVSVAREIELEDKFENMGAQMVKEVASKANDAAGDGTTTATVLAQAIVNEGLKAVAAGMNPMDLKRGIDKAVTAVVTELKALSKPCETSKEIEQVGTISANSDSIVGQIIAQAMDKVGKEGVITVEDGTGLEDELAVVEGMQFDRGYLSPYFINKPETATVELDNPFILLVDKKVSNIRELLPVLEGVAKAGKPLLIIAEDVEGEALATLVVNTMRGIVKVAAVKAPGFGDRRKAMLQDIAILTAGTVISEEIGMELEKATLEDLGQAKRVVINKDNTTIIDGIGDEAQIQGRVAQIRQQIEESTSDYDKEKLQERVAKLAGGVAVIKVGAATEVEMKEKKARVEDALHATRAAVEEGIVAGGGVALIRAASKVAGLQGDNEEQNVGIKLALRAMEAPLRQIVANAGEEASIVASAVKNGEGNFGYNAGTEQYGDMIEMGILDPTKVTRSALQFAASVAGLMITTECMVTDLPKEDKADLGAAGMGGMGGMGGMM

SEQ ID NO: 67187 - protein, 610 aa, Pasteurella multocida
MTETTMTFNDLGLPEFLLNAVSDLGFETPSPIQQSCIPNLLNGHDVLGMAQTGSGKTAAFSLPLLAQIDLDKKYPQMLVMAPTRELAIQVADACEHFCKYAKNTNIVTLYGGQRYDIQLRALRQGAQVVVGTPGRILDHIRRGTLDLSNLRFMVLDEADEMLRMGFIDDVETVMAELPEQHQTALFSATMPDPIRRITKRFMKDPKEIKIKSTQTTNPDITQSCWYVHGFRKNDALLRFLEVEKFDAAIIFTRTKTGTLDVTELLEKHGFRAAALNGDMTQQLREQTLDRLRNGSLDILVATDVAARGLDVERISLVVNYDIPLDAESYVHRIGRTGRAGRTGRALLFVEPRERRLLRNIEQLTKKPITEVEVPNHEVLQACRREKFKAKITVQLEHHDLGLYRSLLEDMFTADQDQEDIAAAMLMLLQGKQKLILPADPIIDRKTSRGDRGERRERGGRENPRSAERRGYGTPQAMDLYRIEVGRLDGAEVRHIVGAIANEGDINSRYIGHIKLYDDYTTIELPQGMPKELLGVFAKTRVMNKQMQMSFVGASNAGSSRDRDDFADRRGGKRKGRGDEPRFGREDRKFKEKSQRTFNDRPRRERRERQK

SEQ ID NO: 67188 - protein, 714 aa, Pasteurella multocida
MNPIVKQFKYGQHTVTLETGAIARQATAAVMASMDDTTVFVTVVAKKDVKEGQDFFPLTVNYQERTYAAGRIPGGFFKREGRPSEGETLIARLIDRPIRPLFPEGFYNEIQIVATVVSVNPQICPDLVAMIGASAALSLSGVPFNGPIGAARVGFIDDQFVLNPTMNEQKQSRLDLVVAGTDKAVLMVESEADVLTEEQMLAAVVFGHQQQQVVIDAIKEFTAEAGKPRWDWVAPEPNTALIEKVKAIAEARLGEAYRITEKQARYEQIDAIKADVIAQITAEVAEGEDISEGKIVDIFTALESQIVRSRIIAGEPRIDGRTVDTVRALDICTGVLPRTHGSAIFTRGETQALAVATLGTERDAQIIDELTGERSDHFLFHYNFPPYSVGETGMIGSPKRREIGHGRLAKRGVAAVMPTLAEFPYVVRVVSEITESNGSSSMASVCGASLALMDAGVPIKAAVAGIAMGLVKEDEKFVVLSDILGDEDHLGDMDFKVAGTRTGVTALQMDIKIEGITAEIMQIALNQAKSARLHILGVMEQAIPAPRADISDFAPRIYTMKIDPKKIKDVIGKGGATIRALTEETGTSIDIDDDGTVKIAAVDGNSAKEVMARIEDITAEVEAGAVYKGKVTRLADFGAFVSIVGNKEGLVHISQIAEERVEKVSDYLAVGQEVTVKVVEIDRQGRIRLTMKEVAPKQEHVDSVVADVAAEENA

SEQ ID NO: 67189 - protein, 480 aa, Pasteurella multocida
MKAEALFDLDPGVKVRTRFAPSPTGYLHVGGARTALYSWLYAKHHQGEFVLRIEDTDLERSTPEATAAILEGMAWLNLAWEHGPYFQTKRFDRYNQVIDQMIEQGLAYRCYCSKERLEDLRNTQEQNKQKPRYDRHCLGDHKHSPEQPHVVRFKNPTEGSVVFEDAVRGRIEISNAELDDLIIRRTDGSPTYNFCVVVDDWDMGITHVVRGEDHINNTPRQINILKALGAPIPTYAHVSMILGDDGQKLSKRHGAVSVMQYRDDGYLPEALLNYLVRLGWGHGDQEIFSVEEMIKLFELESVSKSASAFNTEKLLWLNHHYIRELPAEYVAKHLAWHYQDQGIDTSNGPALEDIVKMLAERCKTLKEMAAASRYFFEDFDSFDEAAVKKHFKVAAIEPLEKVKEKLTALDSWDLHSTHQAIEQTAAELELGMGKVGMPLRVAVTGSGQSPSMDVTLVGIGKARTLVRIQKAIDFIKSQNV

SEQ ID NO: 67190 - protein, 457 aa, Pasteurella multocida
MALWGGRFTQAADKRFKDFNDSLRFDYRLAEQDIEGSIGWSKALVSVGVLTVQEQQQLESALNTLLIEVRSNPQAILQDDAEDIHSWVESKLIDKVGNLGKKLHTGRSRNDQVALDIKMWCKQRVIELQSSLHALQCKLVETAENNQHAVMPGYTHLQRAQPITFAHWCMAYVEMLDRDYSRLTDAYQRMNSCPLGSGALAGTAYAIDREQLALDLGFDVATRNSLDSVSDRDHIVELLSTASLSMAHLSRFAEDMIIFNSGESNFVELSDRVTSGSSLMPQKKNPDACELIRGKAGRVMGALTGMLMTLKGLPLAYNKDMQEDKEGIFDALDTWQDCIDMAALVLDGIQVNVERTKEAALKGYSNATELADYLVAKGVPFRDSHHIVGETVVYAIQQHKALEALSVAEFKQFSDVVEEDVYQILSLQSCLDKRCAKGGVSPLRVAEAIAEAKARLS

SEQ ID NO: 67191 - protein, 1032 aa, Pasteurella multocida
MRFTDIFIRRPVLAVSISLLIIILGLQAIAKLAVREYPKMTTTVINVSTVYPGADASLIQAFITSKLEEAVAQADNIDYLSSKSSPNNSLITIKMKLNTEPNGALADVLAKVNSVRSQLPRGIDDPVITSSTGGTGMMYIQFSSTKLDASQVTDYIERVIKPQFFTVEGVAEVQIFGASDYALRIWLDPAKMAAQNLSAMAVRNALSSNNVQTAAGNDNGFYVTYKNKVETTTKSVEELGNLIISSQGDKLVRLRDIADVELNKSSDSSRAVANGFESVVLAINPTSSANPLVVAENVRPLYEQIKQNLPDSMQAEILYDTTIAINSSIDEVIKTILEATIIVLVVITLFIGSLRAILIPVITIPISLIGVIMLLQAFDFSINLMTLLALILAIGLVVDDAIVVLENVDRHIKLGETPFRAAIIGTREIAVPVISMTIALMAVYSPMALMDGITGSLFKEFALTLAGAVFISGIVALTLSPMMSSKLLKPHTDPSKLEQCIEKMLTTINHGYNYALNLVMASRRCMLAFAAVIFATLPFLFNGLASELTPAEDKGAFMVIGRAPSNVNVDYVQEAMHEYEQILKDTPEVDFSMVISGAMGSNQSFSVVTLKDWKERTRSQAEILAELNKKSAHIPEVALTGFNFPEINTGEQGPPIGFVISTASGYEDLANVAENFLQEMKKSGHFVYTALDLKFDTAQMRIKVDKEKAGTYGVTMQQISATLGSFLSAATIERVDIDGRAYRIIMQVKRGERLSPESLNNYYVTASNGKSVPLSSFLTMTLESQPTSLPRFSQLNSAVISAVPLPTKSTGEAIAWLKMAAKEYLPQGYNYDFTGEARQLVQEGNALAVTFVLAVVIIFLVLAIQFESIRDPLVIMISVPLAVSGALLMLNFLGFFRIPGTSLNIYSQVGLITLVGLITKHGILMCEVAKEEQLQHGKNRIEAITEAAKVRLRPILMTTAAMIAGLIPLLYASGAGAVSRFSIGIVIVSGLAIGTLFTLFVLPVIYSYIATEHKPLPEFDESIKPLTDNSAH

SEQ ID NO: 67192 - protein, 387 aa, Pasteurella multocida
MKIILGVIVLLFAGVIIFNVIKGKMIEKFIAGAGEKIYPVTAMTIQPQQWTPVIETTGIVRPNQGAMLSAQTSGTVQQVLVQSGQHVKKGEVLVVLDSSVELANLKASQAQLLSVKATYQRYLSLYKTKSVSQQELDNAKSAYEALESNIAALKAGIARRQILAPFDGQTGIVKVNVGQYVNPGMEIVRVEDTSSMKIDFALSQTELEHLHVGQKVTATADARSGETFAAKITAIEPAISATTGLIDVQATFEPEDGRKLLSGMFTRLRVALPTKYDQVVVPQVAINYNMYGEIAYILSELSAEERETLVARQDFDREKIDNAYRVKQVTVFTQDRQGIYAQLKGEEIKPGDKIVTGGQQNLSNGSLVLVADKAGVGTMQPAVKNNL

SEQ ID NO: 67193 - protein, 337 aa, Pasteurella multocida
MSYLDQPLVSVLICAYNADKYIEECIDAILNQTYKNLEIVVVNDGSTDTTLSKLHYFAGKDPRIKIINNEENKGFIASLNIGIASINGDYLARTDADDITKPEWIEKILGYMLSHPQIIAMGSYLTILSEDGNGSNLANYYEHGDEWRNPLSHREIVEAMLFRNPIHNNSMIVKSTVFREHGLRFDPAYQHTEDYQFWLEVSRLGELANYPESLVYYRLHNTQTSSLHNKYQNLMAKKIRKRAINYYLQDLGVIHRLGEDIFFHDIETIQAELASLSLLDNCIIKRILYDCYLSLVDNKLINILYFLRDKNNSYFNKKQKIKIIKRIIRPYKYESVL

SEQ ID NO: 67194 - protein, 270 aa, Pasteurella multocida
MPELPEVETTKNGISPYLEGAIIEKIVVRQPKLRWMVSEELAQITQQKVIALSRRAKYLIIQLETGYMIGHLGMSGSLRVVEKGDLIDKHDHLDIVVNNGKVVRYNDPRRFGAWLWTEKLDEFPLFLKLGPEPLSEEFDSDYLWQKSRKKQTALKTFLMDNAVVVGVGNIYANETLFLCNLHPQKTAGSLTKAQCGQLVEQIKQVLSNAIQQGGTTLKDFLQPDGRPGYFVQELRVYGNKDKPCPTCGTKIESLVIGQRNSFYCPKCQKR

SEQ ID NO: 67195 - protein, 340 aa, Pasteurella multocida
MKSMLANQRGFITSLIFILFIIVLFTLNIGTFSLSTGKVLSILSKPFLSQHASFTPMEYHIVWHVRLPRIIMAFFSGGILAMSGATLQGVFHNPLVDPHIIGVTSGAAFGGSLAILLGFPSYLLILSTFSFGLLTLFLIYVTTMFIGKGNRIVLVLAGVILSGFFSALVSLIQYLADAEEVLPSIVFWLLGSFATASWAKLAILLPCVFIAAYLLFRLRWHINVLSLGDMQAKMLGVSIKKTRWFVLLLCALLVATQVAVSGSIGWIGLVIPHLTRFFVGSDHRYLLPASFLIGGIFMIVIDTLARTLTSAEIPVGIITALLGAPIFTLLLLKTYRKKSL

SEQ ID NO: 67196 - protein, 56 aa, Pasteurella multocida
MAAKGPREKIKLVSTAETGHFYTTTKNKRNMPEKMEIKKYDPVVRKHVVYKEAKIK

SEQ ID NO: 67197 - protein, 78 aa, Pasteurella multocida
MSRVCQVTGKRPAVGNNRSHAMNATKRRFLPNLHTHRFWVESEKRFVTLRLTAKGMRIIDKKGIDAVLADIRARGEKI

SEQ ID NO: 67198 - protein, 224 aa, Pasteurella multocida
MQNQVESLSLMPREKLLRFGAPALTDEELLAIFLRTGIKGCSVMQLSRHVLQHFHSLRGLMSATQTEFCQLKGLGITQFIQLQACTEMSKRYLQEELKLTQAFKNSENVRFYLQATLENKEREIFQVLFLDNQHRLIKQEEMFLGTINCTTIHPREIIKSALFCNAAALILAHNHPSGNPEPSASDKMVTTKIQAAAELVEIRILDHFVIGKGCYYSFAENRLL

SEQ ID NO: 67199 - protein, 366 aa, Pasteurella multocida
MQFIVSRENLLKPLQQVCGVLSSRPNIPVLNNVLLQIRGERLVITGTDLEVELSTETALLRTDVQGSFTIPAKKFLDICRSLPEEAEISVSFEEDRAIVKSGRSKFNLSTLPAEEYPNLTDWQSEVDFTLEQSTLRRLIEATQFSMANQDARYFLNGMKFETEGNLLRTVATDGHRLAVCTIALEQDLQTHSVILPRKGVLELVRLLENTDLPARLQIGTNNLRIDLGNIIFTSKLIDGRFPDYRRVLPRNATRILEAEWDVLKQAFVRAAILSNERFRSVRLQLSENQLKITATNPEQEVAEEIIDVSYVGEEMEVGFNVSYILDVLNALKCQRVRMRLTDASSSCLIEDCDDASAEYVIMPMRL

SEQ ID NO: 67200 - protein, 451 aa, Pasteurella multocida
MKPDLSSLWQECLLQLQDQISLTDFSTWLRPLQADFSVQNTIVLYASNVFIKQKVDESYLAQLTKVAQELSGNAELVVQVKVGVKPEPKPAQPSALPTHHNKEENKPQTVIRSYLNPKHVFENFVEGKSNQLARAVAQKVADNPGEPSSNPLFLYGGTGLGKTHLLHAIGNGILSRNTNARVLYIHANNFMQQMVNAVRDNKMDEFKKFYRSLDALLVDDIQFFAEKEKTQEEFFHIFNNLFDTGRQIILTSDRYPKEIEKLEERLKSRFGWGLTTAIEPPELETRVAILLKKAEEKNIYLPEEVAFFIGQKLRTNVRDLEGALNRVSANAEFMGAAITIDFVRETLKDMLALQDKLVTVENIQKVVAEYYRIKVSDLKGKSRSRSIARPRQLAMALSKELTNRSLPEIGKNFGDKDHTTVLHACRKIAELREQEHSLEEDWSNLIRTLSV

SEQ ID NO: 67201 - protein, 44 aa, Pasteurella multocida; identical to SEQ ID NO: 58380

SEQ ID NO: 67202 - protein, 130 aa, Pasteurella multocida
MVISIILIPIGVIKLNFSRELRLLTPLHFKYVFEQPFRASTPELTILARPNNLAHPRLGLTVAKKHLKKAHDRNRIKRLCRESFRLAQYKLPNCDFVIVAKQGIGKLDNRTLTQTLDKLWQRHIRLAQKS

SEQ ID NO: 67203 - protein, 541 aa, Pasteurella multocida
MDSRRSLLVIALLFISFLVYQQWQLDYHTPKPVATEQVKVSSDVPASSASSSSDIATTAQAQGRIITLENDVFRLEVDTLGGDVVHSELLKYDAELNSNTPFTLLTNKANHVYIAQSGLVGKDGIDTKAGRANYQVDGDTFKLADGQNELAVPFVFEKDGVTFRKIFVLKRGAYDIAVNFEIDNQSDKTIEVEPYGQLRHTLVEDTGNVAMPTYTGGAYSSSETNYKKYSFADMEKANLSISTKAGWVAVLQHYFVSAWIPNQDADNQLYSLTDKANNLASIGYRGPVTAIPAGAKETIRSSLWTGPKLQDQMATVANHLDLSVDYGWAWFIAKPLFWLLTFIQSIVQNWGLAIIGVTLVVKAILYPLTKAQYTSMAKMRMLQPKLQEMRERFGEDRQRMSQEMMKLYKEEKVNPLGGCLPILLQMPIFIALYWTFLEAVELRHAPFFGWIQDLSAQDPYYILPILMGASMFLLQKMSPTPVADPTQQKIMNFMPLIFMVFFLWFPSGLVLYWLVSNLITIAQQQLIYRGLEKKGLHSRHK

SEQ ID NO: 67204 - protein, 465 aa, Pasteurella multocida
MFYQSAVIFKRVFMKETIVAQATAPGRGGIGILRVSGPKAVEVAHTVLGKCPKPRMADYLPFKDSDGNVLDQGIALYFKAPHSFTGEDVLELQGHGGQVVLDLLLKRILQLEGLRLARPGEFSEQAFLNDKLDLAQAEAIADLIDASSEQAARSALKSLQGEFSNKVNQLVDSVIYLRTYVEAAIDFPDEEIDFLADGKIEAHLNDIITQLDHVRSEAKQGSILREGMKVVIAGRPNAGKSSLLNALAGREAAIVTDIAGTTRDVLREHIHIDGMPLHIIDTAGLREATDEVERIGIVRAWSEIEQADRILLMLDSTEADNQDLEKVRSEFLTKLPSNIPVTIVRNKADLSGENEGIVEQNGYTVITLSAKTQQGIALLREHLKQSMGYQTNMEGGFLARRRHLEALEQAATHLQQGHVQLTQFYAGELLAEELRRVQNHLSEITGQFTSDDLLGNIFSSFCIGK

SEQ ID NO: 67205 - protein, 246 aa, Pasteurella multocida
MSDLSLQLHAIGIIHTPYKEKFSVPRQPNLVQDGTGILELLPPYNQAETVRGLAQFSHLWLIFQFDRVATGKWRPTVRPPRLGGNQRVGVFASRSTHRPNPLGLSKVELRRVECQNGKVLLHLGAVDLVDGTPIFDIKPYLAYADSEPEAKSGFAQEKPECTLQVIFSEQAQNALQKIEKKRPHFKRFITEVIAQDPRPAYQKMQSLERVYGIRLHEFNIRWKMEATEEQQARILDIEEVEKKKCD

SEQ ID NO: 67206 - protein, 281 aa, Pasteurella multocida
MLNKIDSWLIQHPQTQHLTGIKRFSIEFLFFGLKEIRACLFAGLFFIAMFITPKAGFLGLPRYDVLLIFAILLQVIMFYTKFETLDEIKSITLFHLIGFALELFKTSSSIQSWSYPDFAYSKIYGVPLFTGFMYAAVGSYIIQAWRLFDLKIKSHPPYFLSTLTAILIYLNFFTHHYIGDYRWYLAVFALGLYARTIVYFTPYDKPRKMPLLFAFMLIGFFIWLAENMGTFIGIWRYPNQIGAWSMVHVSKWSAWALLVIMTFTIVANLKHIKKSIRVSRD

SEQ ID NO: 67207 - protein, 616 aa, Pasteurella multocida
MTDKIDINKLRNIAIIAHVDHGKTTLVDKLLQQSGTLEASRNESDERVMDSNDIEKERGITILAKNTAINWNDYRINIVDTPGHADFGGEVERVMSMVDCVLLIVDAFDGPMPQTRFVTQKAFAHGLKPIVVINKVDRPGARPDWVVDQVFDLFVNLGATDEQLDFPIIYASALNGVAGLEHDDLAEDMTPLFEAIVKHVEPPKVELEQPFQMQISQLDYNSYVGVIGIGRIKRGSVKPNQTVSIIDSEGKTRTGKIGQVLGHLGLQRYETERAYAGDIIAITGLGELNISDTICDINHVEALPALSVDEPTVTMFFCVNTSPFCGKEGKYVTSRQILERLNKELVHNVALRVEETEDPDAFRVSGRGELHLSVLIENMRREGYELAVSRPRVIYKEVDGRKQEPFEQVTIDIEEQHQGSVMEALGIRKGEVRDMVPDGKGRTRLEYNIPSRGLIGFRGEFMTMTSGTGLLYSSFSHYDDIKPGEIGQRKNGVLISNATGKALAYALFSLQERGKLMIEHGTEVYEGQIIGIHSRSNDLTVNCLQGKKLTNMRASGKDEAVVLVPPVRFSLEQAIEFIDDDELVEVTPSSIRIRKKLLTETDRKRASRTTTSTSTH

SEQ ID NO: 67208 - protein, 472 aa, Pasteurella multocida
MSDTTAIANVFKLIEEYDIKFVLLRFTDIKGKEHGVSLPVNLVDEDLFEDGKMFDGSSVEGWKAINKADMLLMPMPETAVVDPFAQIPTLSLRCSIYEPSTMQSYDRDPRSIAIRAENYMRSTGIADEALFGPEPEFFLFDDVRFDVSMNRSSYSVDDIEAAWNTNKKYEDGNNAYRPLKKGGYCAVAPIDSAHDIRSEMCLILEEMGLVIEAHHHEVATAGQNEIATRFNTLTTKADETQIYKYVVQNVAYEHGKTACFMPKPITGDNGSGMHCNMSLSKDGKNVFQGDKYAGLSETALYYIGGIIKHAKALNAFTNPSTNSYKRLVPGFEAPVLLAYSASNRSASIRIPAVTNPKAIRIEARFPDPLANPYLAFAALLMAGLDGIINKIHPGDAMDKNLYDLPPEELQNIPAVASSLEEALNALEQDYEFLTKGNVFTQAFIDAFITIKRKEVERLNMTPHPVEFEMYYA

SEQ ID NO: 67209 - protein, 149 aa, Pasteurella multocida
MQVILLDKVVHLGNIGDQVNVKSGFARNFLIPQGKAVMATKANIEYFEARRAELEAKAAEVLAAAQARAAKLAELGSVTIASKAGDEGRLFGSITTRDVADAVTAAGVEVAKSEVRLSTGPIRTLGDHEVKFQLHGEVFATINVIVVAE

SEQ ID NO: 67210 - protein, 75 aa, Pasteurella multocida
MARYFRRRKFCRFTAENVVEIDYKDVATLKNYITESGKIVPSRITGTRAKYQRQLARAIKRARYLALLPYTDNHQ

SEQ ID NO: 67211 - protein, 108 aa, Pasteurella multocida
MLKSNLNIDNRFSLIGIVASQPKRHQSPNGIYHCQFVLEHRSIQEEAGLSRQAWCKMPVQMSGNQFREKTQSITVGSQLLVVGFISSHKTANGLSQLVLHAEQIEFID

SEQ ID NO: 67212 - protein, 125 aa, Pasteurella multocida
MRHYEIVFMVHPDQSEQVPGMIERYTGSVKEAGGQVHRLEDWGRRQLAYPINKLHKAHYVLMNVEAPQEVIDELETTFRYNDAVLRNVIIRTKHAVTEASPMVKAKDDRKALAEVENNDFEDAEE

SEQ ID NO: 67213 - protein, 458 aa, Pasteurella multocida
MFENLSDRLSKTLRNISGRGRLTEDNIKETLREVRMALLEADVALPVVRDFINKVKERAIGVEVNKSLTPGQEFVKIVQAELEAAMGEANESLHLSTQPPAVILMAGLQGAGKTTSVGKLAKFLKERHKKKVLVVSADVYRPAAIKQLETLAQAVGADFFPSDVSQNPVQIAQAALSEAKLKFYDVLIVDTAGRLHVDGEMMDEIKQIHAALNPIETLFTVDAMTGQDAANTAKSFNEALPLTGVVLTKVDGDARGGAALSIRQITGKPIKFLGVGEKTDALEPFHPERVASRILGMGDVLSLIEDLERSVDREKAEKMAQKFKKGDNFTLEDFREQLIQMKNMGGMMSMLDKLPGAKNLPDHIKNKVDDKMFSKMEAMINSMTLKERANPEIIKGSRRRRIAMGSGTQVQDVNKLLKQFDEMQRMMKKMRKGGMAKMMRGMQGMMGGLGGLGGMFRR

SEQ ID NO: 67214 - protein, 267 aa, Pasteurella multocida
MWLSIFSVFFYLLSVLLITPMLLKIQAGEPASVPNRMPFLTAALLAILLHFINLIPLFTDLTSGQNFSVIEISSLISVMTATIATLAFLFRIHTLWFLLPIIYSFAIINLVLSTLMPAHFLYHLNQDMGLFIHVGLSLLTYSVCSIVALYSIQLVWIDRALKNKKLPFSPMIPPLMTVERHFFRLMLIGEILLTIVLISGSYHLSKTFAPQDIQKAVFSFLAWIVFGSALVGHWKLHWRGKKVVYYALLGIILLTIAYFGSRVMLEI

SEQ ID NO: 67215 - protein, 549 aa, Pasteurella multocida
MKKLTKLSAIALSLGLISQAYAYTQDKTYNITVLHANDTHGHFWKNSHGEYGFAAHKTLIDNIRKEVEGKGGSVILLHAGDFNTGVPESDMQNAKPDIEGMNMIGYDVAVLGNHEFDFPMQLLEMQEKWAKFPLISANVINKKTNKPLVKPYVILNKEDVKIAVVGLTTEDTAKLGNPDVVDHVIFNNPIETAKNTLAEINQTEKPDIRIALTHMGYYFDGKHGHNAPGDVTMARTLDKGAFDLIIGGHTHDTVCIDEQGQFKLKYTPGEACKPDFQNGTWIVQAGEWGKYIGRADFEFKNGETKLVKYELIPINLKQKIKLEDGKSEYKLYQSEIAEDPAVFAHLKKYQDEGDRLLGVKVGEVKGKFIGDRKIIRFHQTNLGRLIAQSQMERVKADVGIMNSGGIRTDINEGETTYKDLLTVQPFGNMIATVDFTGQELLDYLNVVALKQVDSGAYPQFAGLSMVVDRTAQKVSDVKVGGKALDLNKTYKVSVPDYCAGGGDGYPVLKKHPSYVNTGFIDAEMLKKYFEENKVLDASKYDPKDDIIFK

SEQ ID NO: 67216 - protein, 299 aa, Pasteurella multocida
MIESKRLRIAMQKSGRLSQESQALLKQCGVKINLQEQRLIAYAENMPIDILRVRDDDIPGLVFDGVVDLGIIGENVLEEEELTRQAAGETVNYKKLRRLDFGGCRLSIAIPQDEAYNGISDLKNARIATSYPNLLKRYMQQQGVDFKTCSLTGSVEVAPRAGLADAICDLVSSGATLEANGLKEVEIIYRSKSCLIQRAAELSPEKQALVDKLLTRIQGVQQAAESKYIMLHAPKEKLEEITALLPGVENPTILPLAHDNSKVAMHVVSQENLFWETMEQLKDAGASSILVLPIEKMMG

SEQ ID NO: 67217 - protein, 207 aa, Pasteurella multocida
MRFPDKDQIFPIKHYHRLCFLKNLVRHPNIIVGDFTYYDDAENVENFEKNVKYHFDFLGDKLIIGKFCMIGSDVKFIMNGANHQMNAISTYPFGIFGYEWAKALPEKAELSSKGDTVIGNEVWIGYNATIMPGVKIGDGAIIGTNSVVTKNVPPYAIVAGNPARVIRKRFSPEKIEQLLALKWWDWEIEKITRNLDFLTGKISDPIE

SEQ ID NO: 67218 - protein, 288 aa, Pasteurella multocida
MNSKKHLGHTARKRFGQNFLHDNNVIHGIVSAIYPQKDQFLVEIGPGLGALTEPVGELVDHLTVVELDRDLAERLRHHPFLHHKITVIETDAMQFDFGQLYRDANLAEKKQKMRVFGNLPYNISTPLMFHLFKYHDCIQDMHFMLQKEVVKRLCAGPNSKAYGRLTIMAQYFCQVMPVLEVPPTAFKPAPKVDSAVVRLVPHKVLPHPVKDLYWLNRVCSQAFNQRRKTLRNALSTLFSADQLTELGIDLTARAENLSIADYARLANWLTDNPPADVNKDEMIEHLDD

SEQ ID NO: 67219 - protein, 860 aa, Pasteurella multocida
MQEQYRPDLIEAEVQQYWAENKTFKAIKDTNKPKYYCLSMFPYPSGRLHMGHVRNYTIGDVVSRYQRMNGKNVLQPMGWDAFGLPAEGAAIKNKTAPAKWTYENIDYMKNQLKILGFGFDWDREVTTCKPDYYKWEQWFFTELYKKGLVYKKTSTVNWCPNDETVLANEQVHEGCCWRCDTPVEQKEIPQWFIKITDYAEQLLGGLDHLPLWPDQVKTMQRNWIGRSEGVEITFQLANSEDNLTVYTTRPDTFFGVSYVAVAAAHPLAEKAAENNPELAQFIQECKNTKVAEAELATMEKKGMATGVYAIHPLTGEKVPVWVANFVLMHYGTGAVMAVPGHDERDAEFARKYGLPLLNVIKPINGEPLLEHELPYCEHGILFNSGEFNGLDFDAAFNAIADKLEALGKGKRQVNYRLRDWGVSRQRYWGAPIPMLTLENGEVVPAPLQDLPIELPEDVVMDGVKSPIKADPEWAKTTYNGQPALKETDTFDTFMESSWYYARYTSPKFAEAMLDADEANYWLPVDQYIGGIEHATMHLLYFRFFHKLLRDAGFVTSDEPADKLLCQGMVLADAFYYTSPTNERIWVSPTEVTLERDEKGRILKAFDKEGRELVHSGMTKMSKSKNNGIDPQEMVEKYGADTVRLFMMFASPAEMTLEWQESGVEGAKRFLGRLWNLVFEYNKHPAETTVEPTALSSAQKALRRDVHKTIAKVSDDIGRRQTFNTAIAAIMELMNKLTKAPLVEVQDRAIMAEALSAVVRMLYPITPHICFQLWKDLGNTEAIDFAPWVEADAAAMVDDEKLVVVQVNGKVRAKVTVPAEMSEDDIKQVALADSNVAKHLEGLNIVKTIYVPGKLFSFVAK

SEQ ID NO: 67220 - protein, 895 aa, Pasteurella multocida
MFRSILTKIFGSRNDRILRRLNKIVIKINQLEPEFEALSDDDLKAKTDAFKARLAQGETLEQLLPEAFATVREASKRVLGMRHFDVQLLGGMVLTNRCIAEMRTGEGKTLTATLPCYLNALTGKGVHVVTVNDYLARRDAETNRPLFEFLGMTVGVNVPGLSPEQKREAYAADVTYATNSELGFDYLRDNLAHTAQERFQRYLHYALVDEVDSILIDEARTPLIISGQAEDSSELYMTVDKLIPDLIKQDKEDSEEYQGEGDFTLDLKTKQAHLTERGQEKVEQWLTEQGLMSAEESLYSPSKISLLHHVYAALRAHTLFERDVDYIVKDGEIVIVDEHTGRTMAGRRWSDGLHQAIEAKEGVRIQSENQTVASITYQNYFRLYEKLAGMTGTADTEAFEFQQIYGLETIVVPTNRPMIRDDRTDVMFENEEYKFNAIIEDIKDCVARNQPVLVGTISIEKSELLSHALKKAGIKHNVLNAKFHAQEAEIVANAGYPGTVTIATNMAGRGTDIVLGGNWKAEIAKLDNPTEAQIEAIHTAWKARHEIVKAAGGLHIIGTERHESRRIDNQLRGRSGRQGDPGSSRFYLSLDDALMRIYLNEGKLNLMRKAFSTAGEAMESKMLTKVIASAQAKVEAHNFDGRKNLLEFDDVANDQRHAIYAQRNTLLDNEDISDTIDVIRADVFNQVIDQYIPPQSLEEMWDVPALEQRLKHDFALDLPLEKWLEEDNHFDEDALRQRVLDAAIEEYKQKESIVGEQTMRSFEKGVMLQTLDELWKEHLSAMDHLRRGIHLRGYAQKDPKQEYKKECFQMFTDMLDALKLSVVTTLSRVQVRTQEEVEQAERQRQEMAKRETASMQYNADEDSGEENTRRVGRNEPCPCGSGKKYKHCHGSKAKY

SEQ ID NO: 67221 - protein, 853 aa, Pasteurella multocida
MRIAKLILSTLLTLIVLGCLALGAIYVYLKADLPDVESLKTVELQQPMQIYTADGKLIGEVGEQRRIPVPLDKIPKQLIHAVLATEDNRFYEHHGLDPIGIARAIMVAVTKKGVSQGASTITQQLARNFFLTPEKSLERKAKEAVLAIDIENTLSKNEILELYLNKIYLGYRSYGVAAAAKTYFGKELDQLSLSEIAIIAGLPKAPSTMNPIYSLKRAQERRNIVLGRMLTTKYITQEEYDAAIKEPIVARYHGAQIDFRADYVTEMARQEMVRRFGEEKAYTSGFKVYTTVLSKDQAEAQKALRNNLIDYDMRHGYRGGAPLWQKDETVWDNDRIIGFLKKLPHSEPLLPAAVMNISKTGAELLLASGERMTLSHNAMRWAGKKTPKVGEQIWIRQKEKGEWILAQVPEVNSALVSLNSDNGAIEALVGGFSFEQSKFNRATQSLVQVGSSIKPFIYAAALEKGLTLSSVLQDSPLVIQKAGQKPWQPKNSPNRFDGPMRLRVGLGLSKNMIAIRAMQMAGIDFTAEFLQRFGFKRDQYLASEALALGAASFTPLEMARGYAVFDNGGFLVDPFIINRILDNTGKEIFLANPKIACISCHNIPVLYGETEKLDAFKNYDLSLTENFDTNINGEEENDVGDLIPDLPELQPTAQTQLDENNLSFMAAAKTDNAETQYAPRVISGELAFLVRSALTSAIYGEPGKSWVGTSWRLSKAFKRQDIGGKTGTTNNSKVAWYAGFGAHLTTAVYVGFDDNKRNLGRGEAGAKTALPAWQAYMQVSLENIPERKLSPPPNIIEKRIDTGSGLLTESGGRMEYFINGTEPKRSYVEEQGYYIPSDEINENSPIQEREELF

SEQ ID NO: 67222 - protein, 295 aa, Pasteurella multocida
MNTILGSDTVKRGMAQMQKGGVIMDVVNAEQARIAEAAGAVAVMALERVPSDIRAAGGVARMANPKIVKEVMNAVSIPVMAKARIGHITEARVLEAMGVDYIDESEVLTPADDEFHLLKCEFTVPFVCGCRDLGEALRRIGEGASMLRTKGEPGTGNIVEAVRHIRKVNAQIRKVVAMNHDELMTEAKNLSAPFELLLQIKALGKLPVVNFAAGGVATPADAALMMELGADGVFVGSGIFKSEHPEKFAKAIVQATTHYQDYDLIARLSEELGEPMKGIEISRLQQHERMQERGW

SEQ ID NO: 67223 - protein, 193 aa, Pasteurella multocida
MKDYSHLHIGVLALQGAVSEHLRQIEQLGANASAIKTVSELTALDGLVLPGGESTTIGRLMRQYGFIEAIQDVAKQGKGIFGTCAGMILLAKQLENDPTVHLGLMDICVQRNAFGRQVDSFQTALEIEGFATTFPAVFIRAPHIAQVNHEKVQCLATFQGHVVLAKQQNLLACAFHPELTTDLRVMQHFLEMC

SEQ ID NO: 67224 - protein, 281 aa, Pasteurella multocida
MLSYRHSFHAGNHADVLKHLVLMLIIENLQQKEKGFYYLDTHAGVGRYRLFSEEAEKTAEFEQGIARLWQRDDLPEEVARYIKLIKQVNYGGKALRYYAGSPLIAAKMLRPQDRALLTELHPSDYPLLRNNFKEFDNVTTKRDNGFQQLKATLPPKERRGLVLIDPPYELKEDYDLVVNAIEEGYKRFATGIYAIWYPVVLRQQTKRILKGLEKTGIRKILQIELAVRPDSDQRGMTASGMIVINPPWTLTQQMQNILPYLTNVLVPEGTGSWTVKWITPE

SEQ ID NO: 67225 - protein, 451 aa, Pasteurella multocida
MTKHYDYLAIGGGSGGIASINRAASYGKKCAIIEAKALGGTCVNVGCVPKKVMWYGAQIAEAIHQYAPDYGFDLQVNKFDFAKLVESRQAYISRIHTSYHNVLAKNNVDVIQGFAKFVNANTVEVNGEHITADHILIATGGRPSHPAIPGAEYGIDSDGVFALSELPKRVAVVGAGYIAVELAGVMNSFGVKTHLFVRQHAPLRHFDPLIVDTLLEVIQQDGIQLHTQAIPQEVVKNADGSLTIKLEDGRSQEVDCLIWAIGRHPATDTINLEASGVETNARGFVKVDKYQNTNVEGIYAVGDIIEGGIELTPVAVAAGRRLSERLFNNKPNEHLDYNLVPTVVFSHPPIGTIGLTEPKAIEQYGEENVKVYKSSFTPMYSAVTQHRQPCRMKLVCVGKEEKIVGLHGIGFGVDEMIQGFAVAIKMGATKADFDNTVAIHPTGSEEFVTMR

SEQ ID NO: 67226 - protein, 192 aa, Pasteurella multocida
MAKLYFYYSTMNAGKSTTLLQSSYNYQERDMNTLVYTAAIDDRFGVGKVTSRIGISQEAQLFHKESDLFVEIAQHLQQQPLHCILVDEAQFLTKTQVYQLSEVVDKLKIPVLCYGLRTDFQAELFEGSKYLLAWADQLEELKTICYCGRKANFVLRLNDKGEVVRDGAQIQIGGNDSYLSVCRLHYKEKIAL

SEQ ID NO: 67227 - protein, 343 aa, Pasteurella multocida
MRVLGIETSCDETGVAIYDEEKGLVANQLYTQIALHADYGGVVPELASRDHIRKTAPLIQAALAQANLTPDEIDGIAYTSGPGLVGALLVGSTIARSLAYAWNVPAIGVHHMEGHLLAPMLEDNPPTFPFVALLVSGGHTQLVRVDGVGRYQLLGESIDDAAGEAFDKTAKLLGLDYPGGAALARLAEKGDPKRFKFPRPMTDRPGLDFSFSGLKTFAANTLQQAIKEEGELTEQTKADIAYAFQQAVVETLVIKCRRALKETGFNRLVIAGGVSANKQLRQDLAQLMQQLKGEVFYPQPQFCTDNGAMIAYTGFLRLKQGESQPLAIQVKPRWAMTELSAID

SEQ ID NO: 67228 - protein, 71 aa, Pasteurella multocida
MPVIKVRENESFDVALRRFKRSCEKAGILAEVRSREFYEKPTTIRKRENATRAKRHAKRVARENARNTRLY

SEQ ID NO: 67229 - protein, 582 aa, Pasteurella multocida
MKGSIPRTFIDDLLAKTDIVELVNSRVKLKKAGRDYQACCPFHHEKTPSFTVSQKKQFYHCFGCGAHGNAISFLMEYDKLEFVEAIEELAGMLGLEIPRENKPHFHGKQINLQTKRNLYELMQEIAQFYQQQLAQHIPAQSYLQQRGLSPEVISRFQIGFVPNSFDAVLQRFGQQKEDQQKLFDLGMLSRSEQGKIYDRFRHRIMFPIRDRRGKTIAFGGRVLGDEKPKYLNSPESATYHKGNELYGLYEALQANESPEMLLVVEGYMDVVALAQFGVDYAVASLGTATTAEQIQLLFRSTEQAICCYDGDRAGREAAWRAFENALPYLEDGRQLKFVFLPDGEDPDSFIRQHGKASFEQYMQKALSLSEFLFTSLAPQVDFSSKEGKTKLAALAVPLIKKIPGDMLRLSLRNTLAQKLGILDQAQLESLIPSYSEMKITASPQPVKRTPMRVLIGLLLQNPELAQLVPDLSPLRTLNEPGLDLLEKLTALCQEKVGITTGQILEYWRDTEHSKALEILASWNHLVEDTQIEETFKSTLRYLYFQLIEHEIDLLIAKDRSEGLNMNERKKLTQLLVKKQQKA

SEQ ID NO: 67230 - protein, 622 aa, Pasteurella multocida
MDQNPQSQLKLLIAQGKEQGYLTYAEVNDHLPEELVDAEQIEDIIQMINDMGIQVLESAPDADDLMLNETIADEDAVEEATQVLSSVEAEIGRTTDPVRMYMREMGSVELLTREGEIDIAKRIEEGINEVQSAIAFYPEAISYLLDQYALVEEGGVRLADLITGFVDPNAMTESDVAEIEDTFDEDEDSDSVSATLNEEEEEEEESEEESTTDDSDSDNSIDPEVAREKFLELKTQHAKAVAMIEKHGRTSKKSKDQIQALADVFTQFRLVPKQFDTLVNLMSNMMKSVRLQERSIQKIVVDKAKMPKEQFQKVFIGHENKDTWLVKALSSGKTWSEKLAKHEEEIRYYIDNILEIERQTNLTVSQIREVCERISAGELKARRAKKEMVEANLRLVISIAKKYTNRGLQFLDLIQEGNIGLMKAVDKFEYRRGYKFSTYATWWIRQAITRSIADQARTIRIPVHMIETINKLNRISRQMLQEMGREASPEELAERMGMPEDKIRKVLKIAKEPISMETPIGDDDDSHLGDFIEDSTLELPLDSATAQSLKVATHEVLEGLTPREAKVLRMRFGIDMNTDHTLEEVGKQFDVTRERIRQIEAKALRKLRHPSRSETLRSFLDE

SEQ ID NO: 67231 - protein, 668 aa, Pasteurella multocida
MATRRELANAIRFLSMDAVQKAKSGHPGAPMGMADIAEVLWRDFLKHNPSNPHWADRDRFILSNGHGSMLIYSLLHLSGYDLSIEDLKQFRQLHSKTPGHPEYGYAPGVETTTGPLGQGITNAVGFAIAEKTLAHQFNRPGHEIVDHHTYVFLGDGCLMEGISHEACSLAGTLGLGKLIAFYDDNNISIDGHVDGWFTDDTQKRFEAYGWHVIPAVDGHNPEQILEAVKQAQAETTKPTLIICKTIIGYGSPNKANSHDCHGAPLGDDEIAAAREFLKWEHAPFEIPAEIYAQWDAKEKGQVAEKAWEEKLAAYAKAYPELAAEFTRRVNAELPANWAAESQAFIEHLQANPANIASRKASQNAIEAYAKLLPEFLGGSADLASSNLTLWSGSKPIRAVENADGNYINYGVREFGMSAIMNGIALHGGFIPYGATFLMFMEYAHNAVRMAALMKQRSLFVYTHDSIGLGEDGPTHQPVEQTSALRLIPNLETWRPCDQVESAVAWKAAVERKEGPSALIFTRQNLAQMDRTAEQLANVARGGYVLRHCCENQNCPDLILIATGSEVELAMKAADVLDAEGVKVRVVSMPSTNVFDKQDAAYRESVLPSHITKRVAIEAGIADFWYKYVGFEGRVVGMNSFGESAPADQLFKLFGFTVENIVEKAKAIL

SEQ ID NO: 67232 - protein, 221 aa, Pasteurella multocida
MKPVHAFMRLYFIAGTQDCLHLDGDPAQNLLNILQQALQSGITCYQFREKGKKALQDPDKIKALAIQCRDLCRQYQVPFVVNDDVQLAIDIGADGIHVGQTDMAVADVAALCHSHCFIGTSVNTLEQGIAAQANPLIDYFGTGPIFPTQSKEDPKPVVGVDFVSTIRAHGIDKPIVAIGGVTTQTAEELRRRGANGVAVISAITQSADIAKTVKELLGNAQ

SEQ ID NO: 67233 - protein, 267 aa, Pasteurella multocida
MLNPTYLQQIRSQNPLIHNITNVVAANFSANGLLAIGASPLMSAAMEEMHEVPRLSQALVINIGTLMGKEVDAMVLAGKTANEVGIPVVLDPVGVGATTFRKQTVARLLKEVKFAAIRGNAGELATIAEVNWQAKGVDAGSGEADLAQIAHIVAKTYQCIAMISGATDYLSDGEHHAQIHNGTPLFPKITASGCLLSAVCGAFLAVAKPEQYFDAMLEACTAYAIAGELAAQGLKTTQHGQFYVGLLDQLAHLSPETINQYARISYE

SEQ ID NO: 67234 - protein, 217 aa, Pasteurella multocida
MSTTQQLINNSGRYWLDYIHHPFVQQLADGTLPKACFQHYLKQDYLFLFQYNRALSLGIYKADNFAQMKAAQDAIGALLHEIQLHIQYCESWGIDENTLFRTEESAACVAYTRYVLDAGMTGGLAELYTALAPCAIGYAVIAKHIVESGKSPANNPYQAWIDTYSGEEFQNAAQNAIATLDALCADRSEAQLAKLQQIFNTATRMESAFWQMGLDLS

SEQ ID NO: 67235 - protein, 269 aa, Pasteurella multocida
MDKYAVWGNPIAQSKSPQIHQIFANQTQQQMEYVAMLGDEQDFEQQLRVFFEKGAKGCNITAPFKERAFQLADLHSERCLTAEACNTLKKLDDGRLYGDNTDGAGLVSDLQRLGWLKPEQTILILGAGGATKGVLLPLLQAKQHIVLANRTLSKAEDLAQKFAQYGQIQAVELDNIPVQSFDLIINATSSGLHGQTVQMNPEILQNATALYDMQYAKQADTPFVALCKQLGKQNVSDGFGMLVAQAAHAFHLWRGVMPEFEALLEQEWL

SEQ ID NO: 67236 - protein, 522 aa, Pasteurella multocida
MSNQYLMALDAGTGSVRAVIFDLDGNQIVAAQREWTHLADPNIPGSMEFDLSTNWQLACDCIQQALQKSQIPAQQIAAISTCSMREGIVLYDENKQPIWACGNVDARATEEVNELKARCDHRFEEKLYAISGQTLALSAVPRLLWLAHHRPDIYQQTKAMTMISDWLGFMLSGELAVEPSNAGTTGILNLKTRQWAPELLAMAGLNSDILTPVKETGEILGNVSTLVAQQTGLHAGTPVVVGGGDVQLGCIGLGITEPSQAAVIGGTFWQQVVNLPEPVTDPEMNVRINPHVVAPLVQAESISFFTGLTMRWFRDAFCQEEKILAERLGIDTYTLLEQMAERVPVGANDVIPIFSDAMHFKSWYHAAPSFVNLSIDPEKCNKPVLFRALEENAAIVSSYNLDQVEKFSGVNLTSIVFAGGGSKGKLWSQILADVTGLVVNIPVVKEATALGCAIAAGVGVGLYPSLSEAGKKLVKFERQHQPNPENYQLYQKHKAKWADVYAKQLQLVDSGLTTSLWKAPGL

SEQ ID NO: 67237 - protein, 330 aa, Pasteurella multocida
MWKFIQDNRELTIVFAIGLLFTLLSLGGSGFHLQTLAMIFNSAQIVILLAIGATFVILTRNIDVSVGSTMGLCAVIAGSLLNAGFGASAFVITLCCGLLAGLFNGILVTLLRIPAIVATLGTLGLYKGIMLLITGGKWIEGLPQDLKTLSAPAFLHISPIGWLLLGLIGLTYFFLTKMKAGRDFYAVGDNLQGALQLGVRVNQVRIAAFAINGTMAALAGIVFASQIGFVPNSTGNGLEMKAIAACVLGGISLLGGAGNIIGAVLGAYFLIQIDSILVLLKVPAYWNNFVAGLVLLAVLVFDGRIRVMINNNIKLQRYARFLKDDQDAVK

SEQ ID NO: 67238 - protein, 491 aa, Pasteurella multocida
MANYFNTLNLRQQLDQLGRCRFMDRNEFANEADYLKGKKIVIVGCGAQGLNQGLNMRDSGLDISYALRAEAIAEKRASFQRATENGFKVGTYDELIPSADLVVNLTPDKQHSKVVADVMPLMKQGAALGYSHGLNIVEVGEQIRKDITVVMVAPKCPGTEVREEYKRGFGVPTLIAVHPENDPNGDGLEIAKAWAAATGGHRAGVLESSFVAEVKSDLMGEQTILCGMLQAGSIVCYDKLVADGKDPAYAGKLIQYGWETITEALKQGGITLMMDRLSNSAKLRAFELSEQIKAKLTFLFEKHMDDIISGEFSATMMADWANGDANLLKWREETGKTAFENAPKYEGKISEQEYFDHGVLMVAMVKAGVELAFDTMVASGIYEESAYYESLHELPLIANTIARKRLYEMNVVISDTAEYGNYLFANVATPILAKEIMPTLQKGDLGEPTPTVEIDNITLRDVNDAIRNHPIELIGQELRGYMTDMKRISSH

SEQ ID NO: 67239 - protein, 266 aa, Pasteurella multocida
MAYSIDDFIHLIAQLRNPNGGCPWDLKQTYHSMIPCLTEETYEVIEAIQQQNMHDLKEELGDLLLQVIFFSQLATEDQHFTFNDVVATVAEKIIRRHPHVFGEKIANNEQEALQNWNAIKAQEHKEKGQHSILDNVPHAFPALMRAEKLQKRCAKVGFDWDDSQQVIDKIKEELTEVQQEMAKADKQQAKIEEEVGDLLFAVVNLCRHLNCQPEESLRKANHKFEQRFRAVENKLKAHHKTLEQSSLMEMDLLWDEVKREEKNKVL

SEQ ID NO: 67240 - protein, 874 aa, Pasteurella multocida
MKTTAEIRQSFLDFFHTKGHQIVASSALVPENDPTLLFTNAGMNQFKDVFLGMDKRPYSRATTAQRCVRAGGKHNDLENVGYTARHHTFFEMLGNFSFGDYFKKDAIHFGWEYLTSPRWLGLPAEKLWVTVYETDDEAYDIWNKEVGVPAERIIRIGDNKGAPYASDNFWAMGDTGPCGPCTEIFYDHGEHIWGGPPGSPEEDGDRYIEIWNIVFMQFNRHADGTMEPLPKPSVDTGMGLERISAVLQHVNSNYEIDIFQKLIAKVAELTGEKDLSNKSLRVIADHIRSCAYLIADGVIPSNEGRGYVLRRIIRRAVRHGNLLGAKEAFFYKLVPTLIDVMAEAGIGVKEKQATVEKLLRLEEEQFARTLERGLALLDEALANVKKGELSGEVAFKLYDTYGFPLDLTADVCRERNITIDEVGFDREMEAQRLRAQSASQFGMDYNNVIRVEGCTTFEGYTASESLAKVTALFADGKPVERIEAGQSAVVILENTPFYAESGGQIGDSGYLNGQGFSFEVKDTQKYGQVFGHIGELVSGSLTVGKSVNAVVDVKRRHNTSLNHSATHLLHAALRQVLGEHVVQKGSLVSDVALRFDFAHHEAITKAQLVEIECLVNQQIRANHLIQTELMELEAAKAKGAMALFGEKYADQVRVLTMGDFSIELCGGIHAKRTGDIGLCKITTETAIAAGIRRIEAITGENAMSWLHQQQALLAQSADLLKSDVNSIVEKIQQLQDKAKKAEKELQVLKEKSAMQAGSDLARSAVKINDVSVIVQKLDGVDTKSLRVVVDDLKNQLSSAVIVFASVVEEKVNLIVGVTSDLTSKVKAGELVNLLAQQVGGKGGGRPDMAMAGGTQIENVDHALSFATTWLKENL

SEQ ID NO: 67241 - protein, 62 aa, Pasteurella multocida
MLILTRKVGESLLIGDDISITILNIRGNQVKIGIKAPKDVSVHREEIYQRIKQALEAPHVGE

SEQ ID NO: 67242 - protein, 295 aa, Pasteurella multocida
MKAIIPVAGLGTRMLPATKAIPKEMLTLVDKPLIQYVVNECVAAGMKEIVLVTHSSKNAIENHFDTSFELETMLEKRVKRQLLDEVRSICPKNVTIMHVRQGNAKGLGHAVLCGRPLVGNEPFAVILPDVLLADFSADQKRENLAAMVKRFEETQTSQIMVAPVAEKEVSSYGIVDCGGADLKGGESTKIHSIVEKPSLDKAPSNLAVVGRYVFSAAIWDLLEKTPIGVGDEIQLTDAIDMLIEKEVVEAFHMTGKSFDCGDKIGYMQAFVEYGLQHDKLGQQFKTYLQQLVKSF

SEQ ID NO: 67243 - protein, 105 aa, Pasteurella multocida
MANWDGKYISPYAEHGKKSEQVKKITVSIPIKVLEILTNERTRRQIRNLRHATNSELLCEAFLHAFTGQPLPTDEDLLKERHDEIPEQAKQVMRELGIDPEKWEY

SEQ ID NO: 67244 - protein, 178 aa, Pasteurella multocida
MVNMEQQRIEVVGKLGSTYGIRGWLRIYSSTEYAESIFDYQPWFLKIKGQWQPTELESWRYHNNDLIVKLKHVDDRETAQTLANIEIGVDLAVFPELEEGDYYWHDLIGCNVVNLENYAMGTVTEMMETGSNDVLVVRAKSKDAFGKQERLIPFLYEQVVKRVDLNTKTIVVDWDAGF

SEQ ID NO: 67245 - protein, 245 aa, Pasteurella multocida
MLVGIISLFPEMFKAITEFGVTGRAVKQNLLQVRCWNPRDFTHDKHKTVDDRPYGGGPGMLMMVQPLRDAIQAAKAEVGEGAKVIYLSPQGRKLDQAGVKELAQHQKLILLCGRYEGIDERLIETEVDEEWSVGDYVLTGGELPAMTLIDAVARFIPGVLGKQASADEDSFAEGLLDCPHYTRPEVLDGLAVPPVLMSGNHEEIRKWRLRQSLERTWLRRPELLESLALTDEQRKLLKQIKAEHS

SEQ ID NO: 67246 - protein, 116 aa, Pasteurella multocida
MSNIIKQLEQEQLKQNLPSFRPGDTLEVKVWVVEGSKRRLQAFEGVVIAIRNRGLHSAFTLRKVSNGVGVERVFQTHSPIVDSITVKRKGAVRQAKLYYLRERSGKSARIKERLGD

SEQ ID NO: 67247 - protein, 383 aa, Pasteurella multocida
MKSKTYETHFPPLSAEQLAENRKKKVICGMSGGVDSSVSAFILQQQGYQVEGLFMKNWEEDDDTDYCTAAADLADAQAVCDKLGIKLHKINFAAEYWDNVFEHFLQEYKAGRTPNPDILCNKEIKFKAFLDYAAEDLGADYIATGHYVRRGEKDGQCQLLRGLDNNKDQSYFLYTLSKDQVAQSLFPVGEIEKPIVRAIAEDLGLATAKKKDSTGICFIGERKFKDFLARYLPAQPGEIRTVEGKVVGRHDGLMYHTLGQRKGLGIGGVKGMGEDPFYVVEKDLVNNVLVVAQGHDNSALLSSGLIASQLHWVDRQPIRQPVRCTVKTRYRQEDIPCEIQPINDETIRVVFDEPQIAVTPGQSAVFYQGEICLGGGVIETQIK

SEQ ID NO: 67248 - protein, 521 aa, Pasteurella multocida
MWNSRISFIKHINLNKLFTFIYSWFLLTCSYFCLWGVADYLLHDSRLAFLFLPFALRLGLCLHLRPTLWLAPLLAEISVLLLVSWAEHSAAYLPLLLLSAVSFPIVLFSQSYYQGKQRSKLRLQGILALSISVLNGLVLVCLDASFAYTMLVSFTGALLLLPMCYLLQDFLFTRQWIPLTASFIHHPIALRSKHIVVYTLLLILNILIQTYLPDEFNRFSLFFLAIPIILLAYYYGWQGALLGSLINSVALIASTQHFSHLDLSDLLLSLCAQTITGIFLGLAIQHQRELNQHLGMELMRNRALTQQLISSEESIRQEIARELHDQIGQNITAIRTQASILKRLNPHPQEQNNANMIEHLSLNIYDTVKGLLNRLRPRVLDDLPLPQVLQNVLDELGLTQQHIHCQFDWHNPQQLHLDPRLEITLYRLYQEALNNIIKHAQASQIHIAIHIDQQVILSIQDNGKGFDIHQPVTGLGLRGMQERVALLGGEFQLSSSTANMRSSSIQPLTQGTSLVITLPRF

SEQ ID NO: 67249 - protein, 223 aa, Pasteurella multocida
MDAKQIAQFIDHTALTAEKTEQDIIQLCDEAITHQFWSVCINSAYIPLAKQKLAGTPVKICTVVGFPLGANLSTVKAFETTEAIKAGADEIDMVINVGWIKSNKWDAVEKDIATVLAACAGKPLKVILETCLLSKDEIVKACEICKTLNVAFVKTSTGFNRGGATKEDVALMKRTVGDIGVKASGGVRDTETAIAMINAGASRIGASAGIAIIHGLQDVSSTY

SEQ ID NO: 67250 - protein, 241 aa, Pasteurella multocida
MTLMEGKKVPQVTFHTRQGDQWVDVTSAELFDNKTVVLFSLPGAFTPTCSSTHLPRYNELACEFKALGVDSIICMSVNDTFVMNAWKADQECENVIVIPDGNGEFTEGMGMLVGKEDLGFGKRSWRYSMLVRNGIVEKMFVEPQEPGDPFKVSDADTMIKYLKPEWQAKPSVSVITKPGCPYCAKAKALLKAKDYTFEEIVLGRDASTISVRAITGKTSVPQVFIGGKYIGGSEELEKYFA

SEQ ID NO: 67251 - protein, 124 aa, Pasteurella multocida
MATINQLVRKPRVKKVVKSNVPALEACPQKRGVCTRVYTTTPKKPNSALRKVCRIRLTNGYEVTSYIGGEGHNLQEHSVVLIRGGRVKDLPGVRYHTVRGALDCAGVKDRKQGRSKYGVKRPKS

SEQ ID NO: 67252 - protein, 156 aa, Pasteurella multocida
MPRRRSIEPRKILPDPKFGSELLAKFINVLMVDGKKSIAEKIVYSALDTLAQRTGKEALEAFEAALDNVRPTVEVKSRRVGGSTYQVPVEVRPVRRNALGMRWIVDAARKRGDKSMALRLANELSDASENKGAAVKKREDVHRMAEANKAFAHYRW

SEQ ID NO: 67253 - protein, 700 aa, Pasteurella multocida
MARTTPIERYRNIGISAHIDAGKTTTSERILFYTGVSHKLGEVHDGAATMDWMEQEQERGITITSAATTAFWSGMSKQYPQHRINVIDTPGHVDFTIEVERSMRVLDGAVMVYCAVGGVQPQSETVWRQANKYQVPRVAFVNKMDRTGANFLRVVEQIKTRLGGNSVPLQLPIGSEDNFKGVVDLVKMKAINWNEADQGMTFTYEEIPADMVDACEEWRQNLVESAAEASEELMEKYLGGEELTEEEIKAGLRQRVLAGEIIPVCCGSAFKNKGVQAMLDAVIDYLPAPTDIPAIKGINPDETEGERHASDDEPFSALAFKIATDPFVGNLTFFRVYSGVINSGDTVLNSVKDKRERFGRIVQMHANKREEIKEVRAGDIAAAIGLKDVGTGDTLCAQDAPIILERMEFPEPVISVAVEPKTKADQEKMGLALGRLAQEDPSFRVHTDEESGETIISGMGELHLDIIVDRMRREFKVEANIGKPQVSYRETIRTRVNDVEGKHAKQSGGRGQYGHVVIDLYPLDPEGPGYEFVNEIKGGVIPGEYIPAVDKGVQEQLKSGPLAGYPVVDLGVRLHFGSYHDVDSSELAFKLAASLAFKAAFNKANPVLLEPIMKVEVETPPDYVGDVIGDLSRRRAMVNGQEANEFVVKINAEVPLSEMFGYATDLRSQTQGRASYSMEPLKYAEAPKNVADAIIEARKK

SEQ ID NO: 67254 - protein, 394 aa, Pasteurella multocida [sequence omitted]

SEQ ID NO: 67255 - protein, 599 aa, Pasteurella multocida
MHSSKPYFWGSVFLLFTFLGAYLASAIDRDFGRIEVSHVSFMTEEMQPMVAKLYRPVSATADTPKPGLLALHGYQSDKEATSTFGALELAKRGFVVLAIDHFGHGYSTKLPASNKNMSGANNGYQYLKTLPFVDNTRLGLFGHSTGALNAIRVAKLNPDHKAVNGLSSNGGEMTLNNYLLTQGLYEEIGGYRERTFPVKSLIHHPNRLKAFGLGENETLQWDHTYGDFNTGSARRAAMVDGTHLGVMIASQSNKEAILWFNQALQHGEKGADWIDPDQQTYWYKELTGLFALACALLATLCFASGLLKTTYFGVMNQAVTEKTAISSKQWWGFTLINIVLTLLLYPLFTQWGGANEPIAAKLSFMPLEMGNGIILWLVVSGLVGSLLFGLWQRKAQFCWAEFGVLSQSASLTTAQLIGRYLLLSLLLFAGLYFLVNLIYQYFHVELRFLWPLLKPLTTERFNLFIVYWLPILVFFFVFNGLIVSVQMKQKVASSFTATLLIWSFKTALFATGGLIILWLFHFVPGFMQIGPGFDVVGLPQFGGRWMMMLAVIIPQFIVFTVINHWCYLKTGYIYLGVFFTSLLMTWVLVGGQVIGRFLA

SEQ ID NO: 67256 - protein, 210 aa, Pasteurella multocida
MTELEQKKEMVNLARSLFERGYSVGGAGNLSVRLDEKRILVTPTGSSLGRLEADSLSVLDMEGNLLSGKKPSKESVFHLAMYHQNPACHAIVHLHSTYLTALSCLEGLNPDNAMKAFTPYYVMRVGKLPVIPYYRPGDTNIARELSERALLSKAFLLANHGVVVTGTDLVDAVDNTEELEETAKLYFLLKGQQVRYLTDDEVKDLEKRGK

SEQ ID NO: 67257 - protein, 571 aa, Pasteurella multocida
MRTSQYLFSTLKETPAEASIVSHQLMLRAGMIRPLASGLYTWLPTGLRVLNKVEKIIREEMDKSGALEVKMAVTQPAELWQESGRWEEYGPELLRFKDRGERDFVIGPTNEEVITDLVRRELSSYKQLPLNLYHIQTKFRDEVRPRFGVMRSREFVMKDAYSFHTTHECLQKTYDVMYETYSNIFNRLGLDFRAVQADTGSIGGSASHEFQVLAQSGEDDVVFSTESDFAANIELAEAVALGERGAATEELRVVDTPNAKTIAELVEQFNQPIEKTVKTLVVHATEESGHKLVALLVRGDHELNEIKAEKVDIVASPLQFATDEEIRAVVGAGTGSLGPINLPMPIVIDRTVANMDNFSAGANQDGKHYFGINWERDLPVPHIADLRNVVEGDPSPDGKGVLQIKRGIEVGHIFQLGTKYSAAMNATVQGEDGRPQTMIMGCYGIGVTRVIAAAIEQHHDERGIIWPDNIAPFKVAIVPMNMHKSESVQQFAEELYRTLTAQGVEVIFDDRKERPGVMFADMELIGVPHMIVIGEKNLEKGEIEYKYRRSGEKEMIAKDQLLDVLKAKFAS

SEQ ID NO: 67258 - protein, 489 aa, Pasteurella multocida
MYIGIDCGTQGTKVIVVDSQQRQVIGVGYAPHAIIENSEGRREQQPQWWTDALVSAYQQAIKLAQIEPHLIKGIGVSGQQHGLVLLDDNDQPLYNAKLWCDTETAAENAEFIRLLGGQEKAFSQLGIMPQTGYTASKILWFRKQYPEQYRRIAKIMLPHDYLNYWLTGHFCMEYGDASGTGYFDVVQRQWHLEAFKLLAPELDPHQVLPLLRSAQQKIGKVRAEIAALLGLSENVIVSTGGGDNMMGAIGTGNIQQGIVTMSLGTSGTLYAYTDKPLTDLPMEIANFCSSTDGWLPLVCVMNMTSANKNLMDLLQIDVAKFNELIQQSSIGAEGITILPFFNGERVPPLPQAKASILGLDAANFTQPNLCRAMMEAASFTLRYGLDLFRQAGLSTSQIRLIGGGAKSAVWRQMIADIMNTEVVCLKEDEAAALGGAIQAMWANGEGDLADLCHAFVHLDTTSLVQPNPKSAVEYERVYQRYLVLLQQHY

SEQ ID NO: 67259 - protein, 294 aa, Pasteurella multocida
MGLLNLKSMLSIANQHQFAVGAFNAIDSNFIDAVFTAAQQNQSPVIINVAEVHLTYIDLESTAEYIKKKAMLAGVPVCLNLDHGLTFSTVERAIKCGFSSIMFDGSSLTYAENIAQTRKVVELCQNYGISVEGELGAVGGDEHGALESCADVALYTNVEQAVEFVRETGIDALAVAIGNTHGKYKGVPKLDFERLAQIHQAVSVPLVLHGGSGLSADDFRKTIQRGICKINFFTGMSQAALQSLEKDMQHADLETKYHYYLIMMNRMQQAISDTVAEQMNIFNSINKAHLYATT

SEQ ID NO: 67260 - protein, 862 aa, Pasteurella multocida
MKRFFTSAFLPKPYSVRFRLVIFLITAIFLIIFISGTAIIGLNSTYNALSNLRDSSLNQMFSSMTLGVKTAQISTYAKRLTQTTRALEYQEESKTLAHHAEQLQMLLTQAKQSTPEDQRFANIIYHIDLLGKSVQDLLLQTHQRHILNTTIISELNQGLLHIQHIKRLEKNTALPEQIPATFLSQLNRMEKLIEDATKSNFSTGIFISIESNFLLFPAVDYLTDINQELDKLKALFPQLIDNAKALEKINLRVQFLTFQIDALVQQISQQYTQLAKEKVDSVDIDSEQIQQRLSTLTLSILLFSLFTILLIIILGQYIYSLIGKRLYSITDALKRLSQGDKNVTVPQQQTQDEIGDLARTFDIFHQNVLTLEQTDSLLKEKSELLEHTFLAMRDGLAIFDQQLNLVSYNAQFNTLLGDFFTHTSPLSLHTLVDYFNHKHAKVSGWEQPIDLALLKQIRQAEDFLEIEYSQQVLEWRVSPLKDGLVIFLIDRTQRKKLENEIAHSQKMRAIGHLTGGIAHDFNNFLAVIIGNLDLIDPHGLDERQVKRLQRALKAAENSATLTQRLLAYARKQPLHPTALDINQLVIEFNDLIKHTIPPTINVQLELGEHLPLVYIDKNQLETALVNLIVNAKDALNHEGNIIIRSTQLTVQRAHCQEEMVQLSIIDDGCGMDEQTQKRVFEPFFTTKQNGRGSGLGLSMVYGFIRQSKGRVLIESQPDQGTAIHLQLPIAQQIQDVSALTSQPRLSCDTAYQILVVEDKASVRETLSEQLHEMGYQPVLCESGEQALALLEQGLTIDYLLSDIMLSGKLTGVDVAKWVKTHLPQVKILLMTGHTEQREKAEQFPVLVKPFKQIELQQKLTAL

SEQ ID NO: 67261 - protein, 306 aa, Pasteurella multocida
MYNTLNNKEDISLVSNNFGFLRLPVHFNPVETDAEWVITGVPFDASVSGRAGTRFGAEAIRRASVNLAWEHCRFPWDFDVRERLKIVDCGDLVYSFGDNQNFVEELEAHATALLKAGKRCLTFGGDHFITLPLLRAHAKHFGKLAMIHFDAHTDTYENGSRYDHGTMFYHAPNEGLIDAAHSVQIGIRTEFDRNLPFTVLSAPQVNEESVAQTVAKIKEVIGDLPVYLTFDIDCLDPAYAPGTGTPVCGGLSTDRALKILRALKDVNIVGMDLVEVSPAYDQSDITALAGATLALEMLYMQGAKKG

SEQ ID NO: 67262 - protein, 214 aa, Pasteurella multocida
MNQSILSPFGQSEERAIAAINAFKQGNGVLVLDDEDRENEGDLIFPAETITVEQMTMLIRYGSGIVCLCLSDEICQQLDLPPMVTENTSVNKTAFTVTIEAAKGVSTGVSATDRVTTIRAAVADNAKPSDLSRPGHIFPLRAMTGGVLKRRGHTEASVDLARLAGYKAAGVICEITNDDGSMARAPEIVTFAQKFGFPVVTIEDLVAYRQKYDV

SEQ ID NO: 67263 - protein, 129 aa, Pasteurella multocida
MRHRKSGRQLNRNSSHRQAMFRNMASSLVSHEIIKTTLPKAKELRRVVEPLITLAKVDSVANRRLAFARTRNIETVAKLFNELGPRFAQRAGGYTRILKCGFRTGDNAPMAYIELVDRPEVAAEEATAE

SEQ ID NO: 67264 - protein, 329 aa, Pasteurella multocida
MQGSVTEFLKPRLVDIEQISSTHAKVILEPLERGFGHTLGNALRRILLSSMPGCAVTEVEIDGVLHEYSSKEGVQEDILEVLLNLKGLAVKVQNKDDVFLTLNKSGIGPVVAADITHDGDVEIVNPEHVICHLTDESASINMRIRVQRGRGYVPASARVHAQDEERPIGRLLVDACYSPVDRIAYNVEAARVEQRTDLDKLVIELETNGTIDPEEAIRRAATILAEQLDAFVDLRDVRQPEVKEEKPEFDPILLRPVDDLELTVRSANCLKAETIHYIGDLVQRTEVELLKTPNLGKKSLTEIKDVLASRGLSLGMRLENWPPASIAED

SEQ ID NO: 67265 - protein, 206 aa, Pasteurella multocida
MARYLGPKLKLSRREGTDLFLKSGVRAIESKCKIDTAPGQHGARKPRLSDYGSQLREKQKVRRIYGILERQFRNYYKEANRLKGNTGENLLVLLEGRLDNVVYRMGFAATRAEARQLVSHKAIVVNGRVVNIPSFQVSVNDVVAVREKSKKQARIKASLELAEQREKPTWLEVDAAKMEGVFKRVPERSDLSADINEHLIVELYSK

SEQ ID NO: 67266 - protein, 129 aa, Pasteurella multocida
MAKTPVRARKRVKKQVVDGVAHIHASFNNTIVTITDRQGNALAWATAGGSGFRGSRKSTPFAAQVAAERCAEVVKEFGLKNLEVMVKGPGPGRESTIRALNAAGFRITNITDVTPIPHNGCRPPKKRRV

SEQ ID NO: 67267 - protein, 118 aa, Pasteurella multocida
MARIAGINIPDHKHTVIALTAIYGIGKTRAQAICAATGIAEDVKISELSEEQIDKLRDEVGKFTVEGDLRREVTLNIKRLLDLGCYRGLRHRRGLPVRGQRTKTNARTRKGPRKPIKK

SEQ ID NO: 67268 - protein, 37 aa, Pasteurella multocida
MKVRASVKKLCRNCKIVKREGVVRVLCSDPKHKQRQG

SEQ ID NO: 67269 - protein, 441 aa, Pasteurella multocida
MAKQPGYQSRSTQSGTGELKSRLLFVLGALIVFRIGSFIPVPGIDAAVLAQLVEQQKGTIIDMFNMFSGGALSRASIFALGIMPYISASIIIQLLTTVHPALAELKKEGEAGRRKISKYTRYSTLVLATLQAVGISTGLPNMLPGLVPNVGFSFYLAAVISLVTGTMFLMWLGEQITERGIGNGISLIIFAGIVAGLPSAIGQTIEQTRQGQMHLLVLLLIAVIVFAVTYFVVFVERGQRRIKVEYAKRQQGRQILGGHSTHLPLKVNMAGVIPAIFASSIILFPATLAQWLGEGSSLEWLTDLSMLLHPGQPLYLLVYAVAIIFFSFFYTAMQYNPRDTADNLKKSGAFIPGIRPGEQTSRYIDKIMTRLTLIGGLYITFVCLVPYVMTSAWNVQFYFGGTSLLIVVVVIMDFIAQVQSHLMSTKYESALKKANLKGFGQ

SEQ ID NO: 67270 - protein, 144 aa, Pasteurella multocida
MRLNTLSPAEGAKHSAKRLGRGIGSGLGKTGGRGHKGQKSRTGGGVRRGFEGGQMPLYRRLPKFGFTSMKAAVTAEVRLNDLAKVEGGVVTLESLKAANVITKDIQFVKIILAGEVKGAVVVRGLRVTKGAKAAIEAAGGSVEE

SEQ ID NO: 67271 - protein, 59 aa, Pasteurella multocida
MAKTIKVTQVRSSIARLPKHKATLRGLGLRHMHHTVELIDTPAVRGMINQVSYMVKVEE

SEQ ID NO: 67272 - protein, 166 aa, Pasteurella multocida
MANIEKQAGELQEKLIAVNRVSKTVKGGRIMSFTALTVVGDGNGRVGFGYGKAREVPAAIQKAMEKARRNMINVALNEGTLQHPIKGAHTGSRVFMQPASEGTGIIAGGAMRAVLEVAGVRNVLSKAYGSTNPINVVRATIDALANMKSPEMVAAKRGKTVDEILG

SEQ ID NO: 67273 - protein, 117 aa, Pasteurella multocida
MDKKSARIRRAARARHMMREQGVTRLVIHRTPRHIYAQVIAPNGSEVLAAASTVEKVISEQVKYTGNKDAAAVVGKVVAERALAKGVKDVAFDRSGFKYHGRVQTLADAAREAGLQF

SEQ ID NO: 67274 - protein, 177 aa, Pasteurella multocida
MSRVAKAPVSIPAGVEVKLDGQLLTVKGKNGELSRTIHNAVEVKQDNNELTFSPREGIVGADAQAGTARALVNAMVIGVTEGFTKKLQLVGVGYRAQIKGNAVALSLGFSHPVEHALPAGITAECPSQTEIVLKGADKQLIGQVAADIRAYRRPEPYKGKGVRYADEVVRIKEAKKK

SEQ ID NO: 67275 - protein, 130 aa, Pasteurella multocida
MSMQDPIADMLTRIRNGQAANKVAISMPSSKLKVAIANVLAEEGYIESVKVLDGVKPELEITLKYFQGKPVVESIQRVSRPGLRIYKRKDELPKVMGGLGVAVVSTSKGVMTDRAARQAGLGGEIICYVA

SEQ ID NO: 67276 - protein, 101 aa, Pasteurella multocida
MAKQSMKARDVKRVKLAEKFYAKRAELKQIISDVNASDEDRWNAVLKLQTLPRDSSPSRQRNRCRQTGRPHGVLRKFGLSRIKVREAAMRGEIPGLKKASW

SEQ ID NO: 67277 - protein, 179 aa, Pasteurella multocida
MAKLHDYYRDQVVNELKDKFNYKSVMQVPRIEKITLNMGVGEALTDKKLLDNAVADLAAISGQKPLITKARKSVAGFKIRQGYPIGCKVTLRGERMWEFFERLITIAVPRIRDFRGLSAKSFDGRGNYSMGVREQIIFPEIDYDKVDRVRGLDITITTTAKSDEEGQALLAAFNFPFRK

SEQ ID NO: 67278 - protein, 103 aa, Pasteurella multocida
MAAKIRQNDEVIVLAGKSKGKRGKVTQVLPNGKVIVEGVNIITKHEKPVPALGKEGGLVKKEAAIDVSNVAIFNPKTNKADRVGFRFEDGKKVRFFKSNNEII

SEQ ID NO: 67279 - protein, 123 aa, Pasteurella multocida; identical to SEQ ID NO: 58296

SEQ ID NO: 67280 - protein, 85 aa, Pasteurella multocida
MTDKIRSVQGKVVSDKMDKSFVVAIERKVKHPLYGKFIRRTTKLHVHDENNEAKLGDIVEIKECRPLSKTKSWTLVRVVEKAVVA

SEQ ID NO: 67281 - protein, 63 aa, Pasteurella multocida
MKAQELRTKSVEELNAELVNLLGEQFKLRMQAATGQLQQTHQLKQVRRSIAQVKTVLTEKAGE

SEQ ID NO: 67282 - protein, 136 aa, Pasteurella multocida
MLQPKRTKFRKVHKGRNRGIAAGTEVSFGTFGLKAVGRGRLTARQIEAARRAMTRAVKRQGKIWIRVFPDKPITEKPLEVRMGKGKGNVEYWVALIQPGKVLYEMDGVSEEIARNAFALAAAKLPIKTTFVTKTVM

SEQ ID NO: 67283 - protein, 235 aa, Pasteurella multocida
MGQKVHPHGIRLGIVKPWSSTWFANTQDFADNLDGDFKVRKFLNKELANASVSRITIERPAKSIRVTIHTARPGIVIGKKGEDVEKLRNAVAAIAGVPAQINIAEVKKPELDAKLVADSIASQLERRVMFRRAMKRAVQNAMRLGAKGIKVEVSGRLGGAEIARSEWYREGRVPLHTLRADIDYNTAEAHTTYGVIGIKVWIFKGEILGGMAAIAQPEQQPADKPKKAPRGKGRK

SEQ ID NO: 67284 - protein, 110 aa, Pasteurella multocida
METIAKHRYARTSAQKARLVADLIRGKKVAAALEILTFTNKKAAALVKKVLESAIANAEHNDGADIDDLKVAKIFVDEGPSMKRVMPRAKGRADRILKRTSHITVVVSDR

SEQ ID NO: 67285 - protein, 91 aa, Pasteurella multocida; identical to SEQ ID NO: 58290

SEQ ID NO: 67286 - protein, 273 aa, Pasteurella multocida
MAIVKCKPTSAGRRHVVKIVNPELHKGKPYAPLLDTKSKTGGRNNFGRITTRHIGGGHKQHYRLIDFKRNKLDIPAVVERLEYDPNRSANIALVLYKDGERRYILAPKGLSAGDTIQSGANAPIKVGNALPMRNIPVGSTVHNVELKPGKGGQIARSAGAYVQIIAREGNYVTLRLRSGEMRKVLAECTATIGEVGNSEHMLRVLGKAGANRWRGIRPTVRGTAMNPVDHPHGGGEGRNFGKHPVTPWGVQTKGKKTRHNKRTDKFIVRRRGK

SEQ ID NO: 67287 - protein, 100 aa, Pasteurella multocida
MIQQERLLKVLKAPHVSEKATNNAEKSNTIVFKVALDANKVEIANAVEQLFEVKVDSVRTVVVKGKTKRHGARMGRRSDWKKAYVTLQEGQSLDFVEGAE

SEQ ID NO: 67288 - protein, 200 aa, Pasteurella multocida
MELQVVGANALTVSETTFGREFNEALIHQVVVAYAAGARQGSRAQKTRAEVSGSGKKPWRQKGTGRARSGDIKSPIWRSGGVTFAAKPQDHSQKVNKKMYRGAIKSILSELVRQDRLIVVEKFEVEAPKTKVLVQKLKELALEDVLIITASLDENLFLAARNLYKVDVRDVQGIDPVSLIAFDKVVVTVDAVKQIEEMLA

SEQ ID NO: 67289 - protein, 209 aa, Pasteurella multocida
MIGLVGRKVGMTRIFNEDGVSIPVTVIEIEANRVTQVKTVETDGYSAIQVTTGSKKASRVTKPEAGHFVKAGVEAGRGLWEFRTTEGEEFTLGQEINVDIFADVKKVDVTGTSKGKGFAGGVKRWNFRTQDATHGNSLSHRVLGSIGQNQTPGRVFKGKKMAGHLGNERVTVQSLEVVRVDAERKLLLVKGAVPGATNGDVIVKPAVKA

SEQ ID NO: 67290 - protein, 103 aa, Pasteurella multocida; identical to SEQ ID NO: 55649

SEQ ID NO: 67291 - protein, 327 aa, Pasteurella multocida
MIQNQPHFYRGRFSVAPMLDWTTRHCRYFHRQFSQHALLYTEMVTTGAIIHAKYDHLEFSPAENPVALQLGGSDPTQLAQCAKIAQQRGYTEINLNVGCPSDRVQNGMFGACLMAKADLVADCVSAMQTEVSIPVTVKTRIGIDDLDSYEFLCEFVQKVHEAGCQEFIIHARKAWLSGLSPKENREIPPLDYERVYQLKRDFPHLLMSINGGIKTLEEMQQHLQYMDGVMVGREAYQNPSLLGYIDQALFDPTCPVVTPREAVEKMFPYIEQQLSQGVYLNHVVRHMLGAFQSCKGARQWRRYLSENAHKAGAGLEVVEKALSFVAS

SEQ ID NO: 67292 - protein, 602 aa, Pasteurella multocida
MTTQNKKIAITDVVLRDAHQSLFATRMRLDDMLPIAHELDQIGYWSLEAWGGATFDACIRFLGEDPWVRLRELKQAMPNTPLQMLLRGQNLLGYRHYADDVVDRFVERSVKNGMSVFRVFDAMNDPRNMKQALQAVKRNGGHAQGTLSYTTSPVHNLETWLEITEQLLEIGVDSVVIKDMSGILTPVEAYKLVSEIKKRYDVQLHLHCHATTGMAEMALLKAVEAGIDGIDTSISSMSGTYGHPSTEALVATLQGTQYDTGLDIHKLEHIAAYFREVRKKYAKFEGQLRGSDSRILVAQVPGGMLTNLESQLKQQNASDKLDEVLKEIPRVREDLGFIPLVTPTSQIVGTQAVINVLMGERYKTIAKETAGILKGEYGRTPAPVNAELQAKVLDGGQPITDRPADHIAPEMEKLATEIKQQAKEKGIKLAENEIDDVLIVALFPQIGWKFLENRGNPDAFEPAPTLETAKPAEKPAAPVAKTPVSGPAVYTVELEGKSFVVKVTDGGEVGEIAPAAQPTAQTAPQPAPASTSGTPVSAPMSGNIWKVVAKEGQKVAEGDVLLILEAMKMETEIRASQAGTVQSIHVKAGDTVAVGDTLMTLS

SEQ ID NO: 67293 - protein, 632 aa, Pasteurella multocida
MFSSSLLSKDNKSAVDFHEIPLKQTALDVLHAVFGYQSFRKGQEEVIDATLMGKDSLVIMATGNGKSLCYQIPALCFEGLTLVISPLISLMKDQVDQLLANGIEADYLNSSQTFTEQQQVQNKLMSGTLKLLYVSPEKVMTTSFFHLISHCKVSFVAIDEAHCISQWGHDFRPEYTQLGGLKSCFPHAPIMALTATADHATRQDILRHLNLQSPHVYIGSFDRPNIRYTLVEKFKPMEQLCRFVLGQKGKSGIIYCNSRSKVERIAESLRNKGVSAQAYHAGLETSQREQVQRAFQRDNVQVVVATIAFGMGINKSNVRFVVHFDLPRSIESYYQETGRAGRDDLPAEAVLFYEPADYAWLHKILLEKPESPQRQIEALKLQAIGEFAESQTCRRLVLLNYFGEHQQKPCQNCDICLDPPKQYDGLIDAQKVMSTIYRIGQRFGVHYVIAVLRGLSNQKIKDNQHEQLSVYGIGKDKSKEHWQSVIRQLIHLGFIKQVFDHFNATLQLTENAKPILRGEQPLSLAMPRISSLTSVVAPQRYAIAQYDKDLFARLRFLRKQIADKENIPAYIVFNDATLQEMAQYQPTTKAEMLAINGVGATKFERFAQPFMQIIQQHKKVLTQHEPPLSLES

SEQ ID NO: 67294 - protein, 264 aa, Pasteurella multocida
MPLAVWTDIRQEAKTLAENEPILASFFHATILKHHNLGNALSYILANKLANTIMPAIALREIIEEAYQADPDIIASAACDIRAVRQRDPAVELYSTPLLYLKGFHALQSYRITHYLWQQERKALAVYLQNQISVAFDVDIHPAAKIGCGIMFDHATGIVVGETSVIENDVSILQGVTLGGTGKECGDRHPKVREGVMIGAGAKILGNIEVGRYAKIGANSVVLQPVPEYTTAAGVPARVIARDQAAKPAFDMNQYFNDDHASKV

SEQ ID NO: 67295 - protein, 337 aa, Pasteurella multocida
MNTTVATSPITVLGAGSYGTALAIAFSRNGFPTYLWGHDPVHMQRLSEERQNNAFLPNIAFPDALHIEFDLASALSQSRDLLIVVPSHVFGEVIDKIKPYLRPDHRIAWATKGLERNTGRLLQEVIEEKLGTQHPLAVLSGPTFAKELAAGLPTAIALASNNEQFALEFQARIHCSKHFRVYINQDMIGVQLGGAIKNVIAISAGMSDGMGFGANARTALITRGIAEISRLGASLGANPNTFMGMSGLGDLVLTCTDDQSRNRRFGIMLGQGFSAQTAMDNIGQVVEGFYNAKEAYLLAQRQGIEMPITEQVYQVLFCGKNAQDVAASLLGRERKGE

SEQ ID NO: 67296 - protein, 146 aa, Pasteurella multocida
MQEFIPMAKAFAQNHTLMVLAWVMVFFMVIYTFVKDFTSKVKVVTNAEAVSLMNNEDAVVVDLRSIDEFERGHIINSLNILPAEIKKNNVGKIHHHKDTPVILACATGMSAGASAELLSKQGFNRVYTLKEGITGWRSANLPLIKK

SEQ ID NO: 67297 - protein, 426 aa, Pasteurella multocida
MNLQRLIDNARQDMSAPLVHHHIDESFESCIKCTACTAVCPVSRQNPVYPGPKQSGPDGERLRLKSAELYDEALKYCTNCKRCEVACPSDVKIGDLIVRARNNNLERQNKPLMHKLRDAVLSHTDIMGKMNTPFAPIVNTITGLKATRFLLEKTLNVSKHRTLPKYSFGSFRGWYLKKAAEQQQLYKDKIAYYHGCYVNYNNPQLGKELIQVFNALDIGVMLLEKEKCCGLPLSVNGFPQRAKKQAEFNLKYLGKTIDERGLEVVGTSSSCTMNLRDEYHHILGMDNQKVRPHVHIVTRYLYQLIQQGRQFPFKTLPLRIAYHTACHVEKAGWAPYTLAVLKQIPGIEIVMLPSQCCGIAGTYGFKSEHYDVAQAIGNPLFDLINQGGFDYIVSECETCKWQIDMSTNVTCLHPISLLAMALDANK

SEQ ID NO: 67298 - protein, 262 aa, Pasteurella multocida
MDKSLKAACIGEFLGTALLIFFGVGCVAALKVAGANFGQWEISIMWGLGVAIAVYASAGLSGAHLNPAVTIALWQFACFDGKKVVPYILAQLAGAFCSAALVYFLYHNLFIDVEIAQQMVRGTPESLSLASTFSTYPHPSISVLHAFIVEFVITAVLMALILALTDDGNGLPRGPLAPLLIGFLIAIIGGAMGPLTGFAMNPARDLGPKVFASLAGWGEIALTGGREIPYIFIPVIAPILGGLFGGWIYTKFVGKNLPCHCE

SEQ ID NO: 67299 - protein, 502 aa, Pasteurella multocida
MTDKKYIIALDQGTTSSRAVLLDHDANIVEIAQREFTQIYPQAGWVEHNPMEIWATQSSTLNEVVAKAGITADQIAAIGITNQRETTIVWEKETGKPIYNAIVWQCRRTTEITDKLKADGHEDYIRQTTGLVVDPYFSGTKIKWILDNVEGAREQAERGELLFGTVDTWLVWKLTQGRAHVTDYTNASRTMLFNIHTLQWDDNMLAILGIPRAMLPEVRNSSEIYGQTNIGGKGGVRIPVAGMAGDQQAALYGHLCVNAGQAKNTYGTGCFMLMHTGDNAVQSQNGLLTTIACNAKGEPAYALEGSIFMGGASIQWLRDELKIVHDSYDSEYFATRVPDCNGVYVVPAFTGLGAPYWDPYARGAIFGLSRGANRNHIVRATLESIAYQTRDVLEAMQSDSGQTLQALRVDGGATENNFLMQFQADILATKVERPKVKEVTALGAAYLAGLATGFWKDLSELRDKASIEKTFVPDGDEAKRTRRYKGWKKAVKRALEWEKEEE

SEQ ID NO: 67300 - protein, 791 aa, Pasteurella multocida
MLKAGSSSLFLLLFSECYSMLNQQISQIIATELTVQPQQILAAIQLVDDGNTIPFIARYRKEVTGGLDDTQLRHFETRLIYLRELEDRRQTILKSIEEQGKLTDDLRNQIQQVQSKTELEDLYLPYKPKRRTKGQIAIEAGLEPLADLLWSQPENDPETTALSFVDAEKGVVDSKAALDGAKYILMERFAEDAALLAKVRAYLQQSAVIFSKVLEGKEAEGAKFQDYFDHQELLKNVPSHRALAMFRGRNEGVLQLGLNADPEQEEGVRQSYCEEIIRDHLGVRFSGQPADKWREQVIAWTWKIKVALHLETELMASLREKAEDEAIDVFARNLTALLMAAPAGAKNTMGLDPGLRTGVKVAVVDNTGKLLATDTIYPHTGQMDNAMTTLYRLIKAHQVELIAIGNGTASRETERFAKEVIKAIEGNKPQTVVVSEAGASVYSASELAAAEFPELDVSLRGAVSIARRLQDPLAELVKIEPKAIGVGQYQHDVNQSQLARKLDAVVEDCVNAVGVDLNTASAPLLARVAGMTKTLAQNIVAYRDENGRFDSRDQLKKVPRLGPKAFEQCAGFMRIAAGKNPLDASGVHPEAYPVVEKILQATEQSIHDLMGNTSAVRQLDAKKFIDDQFGLPTVQDIFKELEKPGRDPRGEFKTATFMDGVEDINDLKVGMILEGTVTNVTNFGAFVDIGVHQDGLVHISSLSDKFVEDPHQVVKTGDIVKVKVLEVDVPRKRIALTMRLEEKPVDKNVAKTDRTLSARPRNNPATKGRDRNTANSAMGNAFADALKNWKK

SEQ ID NO: 67301 - protein, 875 aa, Pasteurella multocida
MMSHTAEIEISPAQAEVNVLVEKGLLALEAFRQLNQQQVDYIVAKASVAALDQHGVLAMHAYEETGRGVFEDKATKNLFACEYVVNNMRNLKTVGVISEDDVTGITEIADPVGVVCGITPTTNPTSTTIFKALISLKTRNPIVFAFHPSAQQCSAHAARVVYEAAVAAGAPEHCIQWIETPSMEGTAALMKHPGIATILATGGNAMVEAAYSCGKPALGVGAGNVPAYVEKSANIKQATHDIVMSKAFDNGMICASEQAAIVDQEVYDEFVAEMQSYGAYFVNKKEKALLETFLFGVKANSTNCANAKLNAAVVGKPATWIAEQAGFKVPEKTNILVAACQEVGENEPLTREKLSPVLAILKSTSTEHGFALSEAMVNFHGLGHSAAIHTKEASIAKAFGERVKAIRVIWNSPATFGGIGDVYNAFLPSLTLGCGSYGKNSVGNNVSAANLLNIKRVGRRRNNMQWFKVPSKIYFERDSIQYLQSMKGMERVVIVTDRTMVDLGFVEKIAKQITARGNHVTYQLFADVEPDPSIETVRRGAALIRNYQPDTIIALGGGSAMDAAKVMWLFYEQPEVDFRDLVQKFMDIRKRAFKFPQLGRKARFIGIPTTSGTGSEVTPFAVITEGDKKYPIADYSLTPTVAIVDPAFVMSVPAHVAADTGLDVLTHATEAYVSVLANDFTDGLALQAIKLVFEHLERSVKDKDPEAREKMHNASTMAGMAFANAFLGMNHSLAHKIGGRFHTPHGRTNAVLMPHVIRYNGTRPQKTATWPKYNYYKADVKYQDIARMLGLPCATPEEGVKSFAQACYDLAIRVGIKMSFKEQGIDEKEWMDARRQVALLAFEDQCSPANPRLPVVSDMEVILTNAYYGYDANQY

SEQ ID NO: 67302 - protein, 193 aa, Pasteurella multocida
MTFPLFETIAIVNGEIQHLALHQQRYAASLATFYGEKRSKVQDLAKIIQIPTALEHTQHAPIIRCRIDYNQQDCDVHYFPYQRKIYRTFQPVICDEINYDLKYADRALLNQLFAQRRDCDEIIIIKHGKVTDCSIGNLVFRQGEQWFTPDSPLFYGTQRAWLLQQGKIQARPILLQEIAQFEEIRLINALNPL

SEQ ID NO: 67303 - protein, 286 aa, Pasteurella multocida
MIYQIIALFIWASSFVAGKYAFTMLDPVLTVQTRLMIIALLVFPLFLRHWKKVDKRLRPQLWWLGFFNYPAVFLLQFVGLHYTSAASAATIIGLEPLLIVFVGHFFFKDKASWYHWLFGTLAFIGVAILIAGGSHEGEITVLGCLLVLFAGILFSVCLRWTKTMINQITASAYTAISVVLGAITCLPFTALLTQNWTVNWNWQGVAGLLYLAIFCSWIAYWLWNKGLNATHTNFTGLLTALEPIFGVGLAILLLGEMISLVSWLGIFIIVSSTVMASMMPKFTAKE

SEQ ID NO: 67304 - protein, 806 aa, Pasteurella multocida
MSNNTPENYGANSIKVLKGLDAVRKRPGMYIGDTDDGTGLHHMVFEVVDNSIDEALAGYAKDITVTIHTDNSVSVQDDGRGIPVDIHPEEGVSAAEVIMTVLHAGGKFDDNSYKVSGGLHGVGVSVVNALSDKLQLTIRRQGKVHEQIYHLGEPQAPLAAIGETDQTGTTVRFWPSPTIFNNIEFEYDILAKRLRELSFLNSGVSIKLFDKRNDRQDHFHYEGGIQAFVEYLNRNKNPIHQKPFYFSTEKDGIGVEVSMQWNDSFNENVYCFTNNIPQRDGGTHLAGFRGALTRSLNNYMDNEGHNKKSKVATSGDDAREGLVAIISVKVPDPKFSSQTKDKLVSSEVKSAVESVMNEYLQQYLLENPSDAKIIVGKIIDAARAREAARKAREMTRRKGALDLGGLPGKLADCQERDPALSELYLVEGDSAGGSAKQGRNRKNQAILPLKGKILNVEKARFDKMLSSAEVGTLITALGCGIGRDEYNPEKLRYHSIIIMTDADVDGAHIRTLLLTFFYRQMPELIERGHVYIAQPPLYKVKKGKQEQYIKDDEAMVQYEVALALENAALYVNENAPAMSGLALESLVSEYNAVQKMIGRLTRYYPEVVLKELIYHPELTSELMADQKEVENWIATLVDKLVAKESNGNHYSYRTVFNSERHLHEAVLTVRTHGIDTDYFLNFQFATGSEYARIVKLGKQLTGLIEEGAYIMRGERKLEVSSFEQAIEWLVKESRRGLMVQRYKGLGEMNPEQLWETTMDPNARRMLKVSIKDAVAADLLFTTLMGDEVEPRREFIESNALHANLDI

SEQ ID NO: 67305 - protein, 449 aa, Pasteurella multocida
MRKSNYINQSKRQFLRTGAASIAAGAIGTSSFFLPKTATASLPKIRSSAKIVIAGAGAAGLTIASQLAARLEPSAQIILIDSRIAHYYQPGFTLVAAGIKPKHYVVSQTEEYLPDNVKWIKAAVNEFDPDSNRLTTSTGEHITYDYLFVATGLKLDYDAIEGMDVNLIGQNGLGSIYHSPDSAYKTWQLLDQFANKGGDAVFLRPATEMKCAGAPLKYTFIVRDYLLRRHTLDKSRLFYNAHNKTLFSVPIVDAKVKMLFAEKNIQVNYDRSLTAIDLSKRIATFNSPEGVVEVPYDFINVVPPMRAPDAVRQSALAWQEGKWANDGWVEVEKHTLRHRRYANVFAVGDVAGVPKGKTAASVKWQVPVAVAHLLAELEGKPCDEIYNGYTSCPLITQLGKGMLVEFDYNNHLTPSFPGVIAPLEELWATWAIKTLGLKPTYLGMLRGLA

SEQ ID NO: 67306 - protein, 95 aa, Pasteurella multocida
MDEIFSKCDEATKFLKSFSNQNRLIILCCILDQKRNVTEITQLTGLPQASVSNQLALLRENKLIDCEKRHRERLYYIADPRVLEIMQLLHKFFCQ

SEQ ID NO: 67307 - protein, 337 aa, Pasteurella multocida
MNRALAIEFSRVTEAAALAGFAWLGRGDKEAADNAAVQAMRLMLNQVEMDAEVVIGEGEIDEAPMLYIGEKVGNGKGEQISIAVDPIEGTRMTAMGQANALSVLAAGGKETFLKAPDMYMEKLVVGPEVKGMVDLNLPLEQNLRRVASKMGKLLSQLTVITLDKPRHHEMIKRMQQLGVKVLAIPDGDVAASILCCLPDGGVDMLYGIGGAPEGVIAAAAVRALGGDMQARLLPRDHVKGDTPENQALAAEEIRRCQEMGIEVNQVLKLEDLVRDDNLVFSATGITNGDLLKGIHRKGNLATTETLLIRGRSRTIRRIQSVHYLDRKDTALYRIIGA

SEQ ID NO: 67308 - protein, 629 aa, Pasteurella multocida
MFYTENYDVIVIGGGHAGTEAALAPARMGLKTLLLTHNVDTLGQMSCNPAIGGIGKGHLVREIDAMGGLMATAADQAGIQFRTLNSSKGPAVRATRAQADRVLYRQAVRIALENQENLDIFQQEVTDIILDQDRVCGVVTKMGLKFHAKAVILTAGTFLSGKIHIGLENYTGGRAGDPASVMLADRLRELNLRVDRLKTGTPPRIDARTIDFSVLAKQHGDEKLPVFSFMGSVDQHPRQIPCFITHTNEQTHEVIRNNLDRSPMYAGIIEGIGPRYCPSIEDKVMRFSERNSHQIYLEPEGLTSNEIYPNGISTSLPFDVQMKIVNSMKGMEKARIIKPGYAIEYDYFDPRDLKPTLETKSIRGLFFAGQINGTTGYEEAAGQGLLAGINAGLFVQEKEAWFPRRDQAYIGVLVDDLCTLGTKEPYRVFTSRAEYRLLLREDNADSRLTPIAHQLGLIDEKRWARFNQKMENIELERQRLRQIWLHPRSEYLDEANKVLGSPLVREASGEDLLRRPEMNYQILTSLTPFQPAMDDQEAVEQVEIAIKYQGYIEHQQEEIARQKRHESTAIPAHFDYTVVSGLSNEVRAKLEQHRPVSIGQASRISGVTPAAISILLVSLKKQGMLKRGE

SEQ ID NO: 67309 - protein, 210 aa, Pasteurella multocida
MTNLEQQLSQKLEILLKQTALSITDQQKEQLIKLVLLLNKWNKAYNLTSVRDPMEMLVKHILDSVVVSPHLQGKHFIDVGTGPGLPGLPLAIVNPNKHFVLLDSLGKRISFIRNAIRELGLDNVEAVLSRVEEYHPEQPFDGVLSRAFASLKDMTDWCQHLPKQDGYFYALKGLYHQEEVEELSEKFTIQQVIRLQVPELIGERHLVIVK

SEQ ID NO: 67310 - protein, 264 aa, Pasteurella multocida
MAAELTTAGYIGHHLAFLKTGDSFWHVHLDTLLFSIISGAIFLFVFSKVAKKATPGVPSKMQCFVEIMVDWIDGIVKENFHGPRHAVGPLALTIFCWVFIMNAIDLIPVDFLPQLAHLFGIEYLRAVPTADISGTLGLSIGVFFLIIFYTIKSKGMSGFVKEYTLHPFNHPLLIPVNLALESVTLLAKPVSLAFRLFGNMYAGELIFILIAVMYMANNFALNSMGIFMHLAWAIFHILVITLQAFIFMMLTVVYLSMGYNKAEH

SEQ ID NO: 67311 - protein, 84 aa, Pasteurella multocida
METVITTTIIASAILLAVAALGTALGFAILGGKFLESSARQPELASSLQIKMFIVAGLLDAISMIAVGIALLFIFANPFIDLLK

SEQ ID NO: 67312 - protein, 156 aa, Pasteurella multocida
MNLNATLIGQLIAFAIFVAFCMKFVWPPIIKAIEERQRSIANALASAEAARKEQADTKALVEQEITEAKMQAQQIIDLANKRRNEILEEVKVEAEATKAKIIEQGYAEVEAERKRVQEELRVKVASLAIAGAEKIVGRTVDEAANSDIIDKLVAEL

SEQ ID NO: 67313 - protein, 177 aa, Pasteurella multocida
MSELTTIARPYAKAAFDFAIEQNAVEKWANMLHFSSELIKDETMQTFLKSSLSASKLADTVISICGEQLDQYGQNLIRLMAENKRLEVLPAIYQAFQHYVEEHQKVAEVQVISAQPLNATQEQKIASAMEKRLARKVKLNCSLDSSLIAGVIIRTDDFVIDGSSRGQLSRLANELQL

SEQ ID NO: 67314 - protein, 513 aa, Pasteurella multocida
MQLNSTEISELIKKRIAQFDVVSEARNTGTIVSVSDGIIRIHGLSEVMQGEMIALPGNRYAMALNLERDSVGAVVMGPYADLAEGMEVQCTGRILEVPVGRGLLGRVVNTLGEPIDGKGEIENDGFSPVEVIAPGVIDRKSVDQPVQTGYKAVDSMVPIGRGQRELIIGDRQTGKTALAIDAIINQRDSGIKCIYVAIGQKASTIANVVRKLEEHSALQNTIVVVASASESAALQYLAPYSGCAMGEYFRDRGEDALIIYDDLSKQAVAYRQISLLLRRPPGREAFPGDVFYLHSRLLERASRVNEEYVERFTNGEVKGKTGSLTALPIIETQAGDVSAFVPTNVISITDGQIFLESNLFNSGIRPAVNPGISVSRVGGSAQTKVIKKLAGGIRTALAQYRELAAFAQFASDLDDATRKQLSHGQKVTELLKQKQYSPLSVAQQALVLFAVEFGYLEEVDLDRIGSFESALLEYANHNYADFMRELTQSGNYNDEIKESLKGILDSFKANSAW

SEQ ID NO: 67315 - protein, 246 aa, Pasteurella multocida
MKKTKRLVTLFLAATVLSGCATIDSKTGERKDPLEGFNRTMWDFNYKVVDPYLLKPVATGWKEYVPTPVKSGLTNVANNLDEPASFVNRLLSGEFKKAMTHFNRFWINTVFGIGGLIDVASYSPPLRVENQSRFGDTLGRYGVETGSYVMLPLYGPATPRQDIGNLADTTYPMLSLLGPWSLLKSGVQIIDGRAKALDKDALLEQSQDPYITFREAYFQNLEYRVKDGKVSTPKQDLAQDILNEID

SEQ ID NO: 67316 - protein, 385 aa, Pasteurella multocida
MSEPAILVLADGSVFHGTSIGAKGHTVGEVVFNTAMTGYQEILTDPSYFRQIVTLTYPHIGNTGTNLEDCEANHVYASGLIIRDLPLLHSNFRSSMSLRDYLQTHNVVAIADIDTRRLTRILRDKGAQAGCIMTGEIDEAKALELAKSFGSMAGKDLAQEVSTGEIFTWTSGQWQLGKGFIEQTQAEFNVVAYDFGVKHNILRMLAERGCKITVVPAKTSAEQVLALNPDGIFLSNGPGDPEPCDYAISAIQTLLASKKPIFGICLGHQLLGLAAGGKTKKMAFGHHGANHPVQDLNTQKVFITSQNHGFEVDEASLPSHVRVTHRSLFDNSVQGIELSDQSAFSFQGHPEASPGPNDVAYLFDKFINEMRKANLSQLSTYVAHH

SEQ ID NO: 67317 - protein, 1068 aa, Pasteurella multocida
MPKRTDINTILIIGAGPIVIGQACEFDYSGAQACKALREEGYKVVLVNSNPATIMTDPDMADVTYIEPIEWRTVEKIIEKERPDAILPTMGGQTALNCALDLSKNGVLKKYNVELIGAKEDAIDKAEDRGRFKEAMEKIGLSTPKSFVCHTLEEAWAAQSEVGFPTLIRPSFTMGGSGGGIAYNKDEFYAICERGFDASPTHELLIEQSVLGWKEYEMEVVRDKADNCIIVCSIENFDPMGVHTGDSITVAPAQTLTDKEYQIMRNASIAVLREIGVDTGGSNVQFAINPENGEMIVIEMNPRVSRSSALASKATGFPIAKVAAKLAVGYTLNELRNDITGGLIPASFEPSIDYVVTKVPRFAFEKFPQADDRLTTQMKSVGEVMAMGRTFQESLQKALRGLETGICGFNLMSEEPEKIRQELGNPGPIRILYVADAFGAGFTLDEVHHYSKIDPWFLIQIQDLVLEELALEKRTLDDLDYAELRRLKRKGFSDKRIAQLTKSAESAVRNKRVSLNLHPVYKRVDTCAGEFTSDTAYLYSTYEEECESRPSDKKKIMILGGGPNRIGQGIEFDYCCVHASLALREAGFETIMVNCNPETVSTDFDTSDRLYFEPLTLEDVLEIIHVEKPHGVIVHYGGQTPLKLANDLHANGVNIIGTSADSIDAAEDRERFQQILHKLHLKQPTNRTARNAEEAVKLAEEVGYPLVVRPSYVLGGRAMQIVYNVDELQRYMREAVSVSNDSPILLDHFLNNAIEVDVDCICDGAEVVIGGIMQHIEQAGIHSGDSACSLPPYSLSQEVQDEIRRQTAEMAFALGVKGLMNVQFAVQDGVIYVLEVNPRASRTVPFVSKATGRPLAKIAARVMAGESLKAQGIQGEVIPPFYSVKEAVFPFIKFPGVDTVLGPEMRSTGEVMGVGTTFAEAFLKAQLGANERIPKTGKVFLSVNDADKPRLLPIARQLQESGYGLCATLGTAKFLREHGVAVQIINKVREGRPNIVDAIKNGEIAMVINTVSGLAETVTDGHAIRRSALQQKVFLQTTLAGAEALAGSVEYLADSEVYSLQDLHQRLL

SEQ ID NO: 67318 - protein, 409 aa, Pasteurella multocida
MWLRLNNVKTRRKLTALCCGLLCMSVNVFANDLSKIQQQIKQQEQKIAEQKKAQQKLQSHLKNQETQINQVITQLRQTETDLKESRKMISDTEKQIQRLEKQEREQKQKLAEQLDSAYRSAANPSALERMLSEEAKNADRLKQYYAHMNQARLALIDDLKATQTQLAQEKATMIAQQKAQQSQLSQQKKQQQDLQKVQQERQSTLKQLNRNLSRDETRLETLRANENALRQEIQRAEQAARQQEQREREAYAQKKQAEEKKTQKPYQPTAQEKQLMASSSGLGKPNKQYAYPVSGKLLNSFGATQMGELRWKGMVIGANAGTAVKSIADGRVILANWLQGYGLMVIIKHGENDLSLYGYNQSVVVKEGQFVKAGQKIAEVGSSGGQSQSSLYFEIRRKGVAVNPIGWLK

SEQ ID NO: 67319 - protein, 280 aa, Pasteurella multocida
MKTIGVKRVKSALLFGGFWISMALAQPAKLAIVIDDIGYHQKEDAQIYALPKEISVAIIPSAPHARQRNEQAYQQGRDILIHMPMQPLSHQRIEAGGLHVGMRQEDVQQRVQTAKAIVSHAIGMNNHMGSAATADAELMHKLMQELKVQDLFFLDSRTIGRSVAGKIAKEYGVQSLDRHIFLDDKDTYADVERQFQRAVHYAQKHGTAIAIGHPRKNTVAVLQAGLKHLPDNVQLVGMGRLWRSETETAPKPLISLFNTMPAPTSNMPYQAVPMLRGIPQ

SEQ ID NO: 67320 - protein, 158 aa, Pasteurella multocida
MLDIVLYEPEIPQNTGNIIRLCANTGFRLHLIEPLGFTWDDKKLRRSGLDYHEFAEIKRHKTFETFLATEQPKRLFALTTKGSPAHSQVQFELGDYLMFGPESRGIPMSILDSLPMAQKIRIPMTENSRSMNLSNSVAVAVYEAWRQLGYGGAVNLPR

SEQ ID NO: 67321 - protein, 459 aa, Pasteurella multocida
MSTENKKGGFWSWLGLGKKQETPEATQTLPSTETSDNIEQVEEIKPEVEPQIEQTESAVISDEISSSTTSDTPATFSPTLDETDAQHVKTDEGDDVQSAFQQAEKETKTEDCLEETDSVASALTSDEDVKLAVLTPSQPQEQEKKSEGGFFSRLVKGLLKTKQNLGAGFRSFFFGKKIDDALFEELEEQLLIADLGVPTATKIINNLTQHASHQQLKEADLLYQQLKVEMAEILKPVAQPLVIDQSKKPYVILMVGVNGVGKTTTIGKLARQFQNEGKSVMLAAGDTFRAAAVEQLQVWGERNSIPVVAQSTGSDSASVIFDAMQSAAARHVDVLIADTAGRLQNKNNLMDELKKIVRVMKKYDETAPHEIMLTLDAGTGQNAISQAKLFHEAVGLTGITLTKLDGTAKGGVIFAIADQFNLPIRYIGVGEKIEDLRPFNADEFIDALFVHEDESSVAN

SEQ ID NO: 67322 - protein, 334 aa, Pasteurella multocida
MISIAVLRIKTIQAKKHSLHSSKKDKAEVNWREVMREQSFETQNINIEKTYGGQESSSIIHYETFDNLALFYGRKSLVHFHDRFYQVHYLTEGSIALQLDAHEYRLYAPCFFITPPSIPHGFYTDLDTHGHVLTIPQEFVWQLLESLKRDINYFYPMCIELSPQEEAQQIFKFEYLFNLLAGEYRQHTDEKQTALRLSAKLILLEIYRLSKSNEKKYSPRNNELYLFNQFNFLIEDNFKNNWRINDYLDRLCISESKLNAICQHFSATSPKRLIIERQIQEAKRKLLFTQHSIYQIAYDLGFKDPAYFSRFFQKETQLSPKAFRDQDHISSNPS

SEQ ID NO: 67323 - protein, 254 aa, Pasteurella multocida
MSKYAKVMYQNQIHSVEVRPNGLLTDQQQLLPSEAVTWLPPASGMMYALGLNYADHASELDFKPPEKPLVFVKTHHTYTGHNSTTWRPDNVDYMHYECELVVVIGKTAKNVKRDEAMDYVAGYTLCNDYAIRDYLENYYRPNLRVKNRVGTTPVGPWIVDKADVKDPMNLTLRTWVNGELCQEGNTKDMIFDIAYLIEHLSHITTLQPGDMIATGTPKGLADVKPGDCVEIEIEQIGKLTNYIVSETAFFAQNE

SEQ ID NO: 67324 - protein, 486 aa, Pasteurella multocida
MIKHWINGKEVASEETFDNFNPATGEVICQVASGGEKEINAAVQAAKDAFPKWSKTPAKERARLMRKLGELIDQNVAKLAELETLDTGLPIHQTKNVLIPRASHNFDFFAEVCTRMNGHSYPVDDKMLNYTLYQPVGVCGLVSPWNVPFMTATWKTAPCLALGNTAVLKMSELSPLTANELGRLALEAGIPEGVFNVVQGLGSTAGHALVTHDDVRAISFTGGTATGKHILKHAGLKKYSMELGGKSPVLIFDDADLDRALDAALFTIFSLNGERCTAGSRIFIQETVYDEFVKQFAARAKRLIVGDPQDFNTQVGSMITRQHYDKVTGYIRIGLEEGATLLAGGLERPQNLPAHLQKGHFIQPTVFADVDNRMRIAQEEIFGPVVCLMKFKDEAEALRLANDVEYGLASYIWTKDIAKALRLSNGIEAGMVFVNSQNVRDLRQPFGGIKASGIGREGGEYSFEVFAELKNVCISMHDHPIPRWGL

SEQ ID NO: 67325 - protein, 281 aa, Pasteurella multocida
MGKLALAAKITHVPSMYLSEQPGKHYGCRASAIEGHKEISRRCRDLGVDTIIVFDTHWLVNSAYHVNCCSHFEGVYTSNELPHFIRDITFNYEGNPELGHMIVKHAVAKGVRAQAHEIDSLKLEYGTLVPMRYMNEDKAFKVISIAAFCTSHSFEDSRKLGEAVLDAIKEYDGIVAVLASGSLSHYFIPDHLAKDGMNSYTREFERQIDLHVVDMWRKGNFKDFCKMLPEYAEFCRGEGNMHDTVMLLGMLGWDKYDKPVEILTDLFPSSGTGQINAVFPV

SEQ ID NO: 67326 - protein, 127 aa, Pasteurella multocida
MPHFIVEATENLRDDVDWQPLFKQVHDYLASTGIFPLGGIRSRVHWVDVYRMADGIEDDAFVHITLKIGAGRDEASLKPVGEQVFTLLTNYFQPLFEKRYFALSFEMAELHPTLNFKKNNVHLRFKK

SEQ ID NO: 67327 - protein, 266 aa, Pasteurella multocida
MKNHFKQALKEKKPQIGLWVGLADGYACELAATAGFDWLLLDGEHAPNDLRTLLHQLQTLAAYPTTPIIRPVIGQTHTIKQLLDIGAQTLLVPMVETAEQARELVKAIHYPPKGVRGVGSALARASRWNSIPHYLQQADEEICLLVQVENKTGLQNLKEIAEVDGVDGVFIGPADLSASLGHLGNPSHPEVQQAIEQAIATICAADKAAGILYADEKMAKHYLALGCTFVAVGVDTSLLMRALNDLSQKFKSSNALENTASANQIY

SEQ ID NO: 67328 - protein, 486 aa, Pasteurella multocida
MGGISMQQFSLLKTKAYINGEYVQAKEHKTFAVTNPANQQIICELPDLSAEETEYAIACAAQAQKKWQKVTPKERANLLRRWYNLVIENQEELAQLLSLEQGKPINESRGEILYGASFIEWFAEEAKRIYGDVLPQDKENHRLLVIKQGIGVVAAITPWNFPNAMITRKAAPAFAAGCAMVLKPAQETPLSALALAELAHQAGLPAGLFNVITSTRSVEIGKVLTEHPTVRKVTFTGSTRVGKILMAQSASTVKKLSLELGGNAPSIVFDDADLENAIEGIIASKFRNSGQTCVCTNRIYVQAGIYDRFVELFSAKVAAFKVGSANEAGVNIGPLISQSAVNKIQEHIDDATAKGANLVIGGKLHTRGGTFFEPTVLRDVTQAMLVAKDETFAPLAPVFKFDTEAQVIEMANDTEFGLASYVYTQDISRIWRVSEALEYGIVGINEGLISNEMAPFGGVKESGLGREGSRYGIDEFLEIKYLCLKV

SEQ ID NO: 67329 - protein, 568 aa, Pasteurella multocida
MNNSEQQYLNELDAKLWKSADKLRSNIEAANYKHVILSLIFLKYVSDAFLARQHSIQQQLTDPEHLYYLDPSFYDSEEEYQQALANELEQLDYYTEENVFWVPKTARWDVLKTKATTPVGAVLWQDEQGEDVKMRNVSWLVDLALDTIEKSNDKLKNILARISQYQVEDNRLIELISLFSDTYFANPEYQGEKLNLKSKDILGHVYEYFLGKFALAEGKNGGEYYTPKSIVNLIVEMLQPYQGRVFDPAMGSGGFFVSNDKFIETHAKEKHYASDEQRRRISIYGQESTSTTWKLAVMNMVIRGIDFNFGKKHADSFTEDQHPDLRADFVMANPPFNKDDWWHESLEHDARWQYGTPPVGNANFAWVQHMLYHLAPTGSMALLLANGSMSSNTGGEGEIRKRLIDEDVVECMVSLPDKLFTNTRIPACIWFLTKDKKNGVSFDKKKRNRSGEVLFIDARQLGYMKDRVLRDFTDADTQKIVQTFHNWQYGESYQDEAGFCYSAKLADIQKHDYILTPGRYVGAVAQEEDCEPFAEKMQKLTALLNQQMTEGERLNAEIKKNLAGLGYE

SEQ ID NO: 67330 - protein, 1057 aa, Pasteurella multocida
MIDESTLEQAALDWFRETGWQTFNGKELFTEGRNPQRHQLSAVILEPIFRTQFALLNPHLPVDCVEQVLAKLKQAESRDLVEANQAFHRLLTQGVPVTYKKGDDICFETAFLLDYAEPERNAFWAVNQFEVRGLHLRRPDIVCFINGLPIAILELKNPADEKNDVWNAFHQLQTYKNDLFDLLMFNGALAISDGVIAKVGSLTADEERFMPWRTVKNENDKPMVEWQLEILIRGFFRPDLFTDYLHFFILFERNEKNRLIKKQASYHQFHAVREAVRATVIASRPLSDKVVREPRANYGREVQVGSKKAGVVWHTQGSGKSISMCCYAGKLLQQPEMGNPTLLVVTDRNDLDGQLFQQFSLAKDLLKQDPVRAESREQLRELLASRDVGGVIFTTVQKFALQEDEQAHPLLNGRHNIVVISDEAHRSQYGLKAKLNAKGSFQFGYAKHMRDALKNATFIGFTGTPIETEDKDTRAVFGDYVSIYDIQDAVDDGATVPIYYESRLARLDINRAEIEELAQQFDEIVEEEEQTEAERIKGEFTRLEKLVGAQPRLQQIAKDLIQHFEKRQESQDGKAMIVAMSRDTCVHLYNEIIALKPEWHNDDPSKGAIKIVMTGSAADKALLQPHIYSKQVKQDLEKRFKNPDDPLKLVIVRDMWLTGFDAPCCHTMYVDKPMRGHNLMQAIARVNRVFKDKPGGLVVDYIGIANELKQALHTYTNAKGRGKPTIDTQEALKVLLEKMDAIAGMFATPLEGKVLDIGQFETQAVSLLPKAANHILGLEDGKKRFADLVLAATKAYALCGTLEQSKTYQRKLAFYAAVKAMMFKEQIGDGKLRKQRQDHVLKQILDNSLIADGVDDIFTLCGLEKPNIGLLSDEFLEDVRQIEHKNLAVELLEKLLQDNIKSRSARNLVQERKYRERLEATLTKYHNRGIETAQVIEELIQMAKDFQEAFKRAEDLGLNSDEIAFYDALANNESAVRELGDQILKAIALELVKQLRHSVTVDWQVRESVRARLRILVRRILQKYKYPPDKADEAIDLVLEQAETLSYEWSEKHERVA

SEQ ID NO: 67331 - protein, 538 aa, Pasteurella multocida
MTDLNKVINELGALGIHDVKEIVYNPSYEQLFEEETKPGLEGYEKGIVTQSGAVAVDTGIFTGRSPKDKYIVLDDKTKDTVWWTSDAAKNDNKPMTQDTWKSLKGLVTEQLSGKRLFVIDAFCGANADTRLSVRIVTEVAWQAHFVKNMFIRPTEAELVGFKPDFVVMNGSKVTNPNWKEQGLNSENFVAFNLTEGVQLIGGTWYGGEMKKGMFSMMNYFLPLKGIASMHCSANVGEKGDVAVFFGLSGTGKTTLSTDPKRQLIGDDEHGWDDDGVFNYEGGCYAKTIKLSPENEPDIYKAIKRDALLENVVVRADGSVDYDDGSKTENTRVSYPIYHIDNIVTPVSKAGHAKKVIFLTADAFGVLPPVSKLTPEQTKYYFLSGFTAKLAGTERGITEPTPTFSACFGAAFLSLHPTQYAEVLVKRMEAAGAEAYLVNTGWNGTGKRISIKDTRGIIDAILDGSIEKAEMGKLPIFDLAIPTALPGVDPAILDPRDTYADKAQWQAKAEDLAGRFVKNFEKYTTNDEGKALVAAGPKA

SEQ ID NO: 67332 - protein, 236 aa, Pasteurella multocida
MEFKMQKIILGMLVVTASNAMALNNNFNVYGKVGVDLVSRFDTIAITRHDTQAPKNTARFSPSLFAEITYNATPKTEVGLGLGYIHRKSSHHIIKQKTDNGNRALIDVIEEYPVNRYNSIPLYFLVKHNFYSQSDLRSYLKVDFGYAFNKTKSTLNLTESTDAAGNNQYYIEKHNISLNVENGNYYGIGFGVEYKNILAEIAYTHTDSRLTYSSKLIRGESEYKNDALRFSVGYRF

SEQ ID NO: 67333 - protein, 140 aa, Pasteurella multocida
MAKKNNWHEKEDDVRLDKWLWAARFYKTRTLAKDMIDGGKVHYNGQRTKPNKTVEIGCVIKLRQGNDEKEVEVLALSTQRRGAPEAQLLYQETEKSIEQRAKMAIARKINALTMPHPDRRPNKKERRDLLKFKHQDSFSS

SEQ ID NO: 67334 - protein, 288 aa, Pasteurella multocida
MTDNTDNDKLYRYLFQDRAVRGEWVRLNQTFTDTLNTHQYPKVIQNLLGEMMVATSLLTATLKFEGDITVQVQGDGPLKLALVNGNHQQQIRALARLQADVSDDMSLAQLVGKGVLVITIAPTEGERYQGVIALDKPTITACLEDYFVRSEQLQTQLIIRAGEFEGQPVAAGMLLQIMPDGSGSPEDFEHLATLAATVKEEELFGLTAEELLYRLYHEERVEIFPSQPISFFCGCSQERSGAALLLISDEELDEVLAEHNGTIDMQCECCGTHYFFNKAAIMQLKVEK

SEQ ID NO: 67335 - protein, 496 aa, Pasteurella multocida
MKIEADNNCIVIFGASGDLTYRKLIPALYNLYKIGRLTEHFSVLGVARTELSDEGFREKMRQALIKSEKANGETLDQFCSHLYYQALNTADAADYGKLIPRLDDLHDKYQTCGNTLYYLSTPPSLYGVIPECLAAHGLNTEEFGWKRLIVEKPFGYDIRTAKELDIQIHRFFDEHQIYRIDHYLGKETVQNLLVLRFSNGWFEPLWNRNFIDYIEITGAESIGVEERGGYYDDSGAMRDMFQNHLLQVLAMVAMEPPAIINADSMRDEVAKVLYCLHPLSEDDLENHLVLGQYTAGTVEGEAVKGYLQEKGVPAESNTETYMALRCEIDNWRWAGVPFYVRTGKRLPSRVTEIVIHFKTTPHPVFSQKAPENKLIIRIQPDEAISMRFGLKKPGAGFEAKEVSMDFRYADLASPSLLTAYERLLLDSMKGDATLFARTDAVHACWQFVEPILQYKAQNGRVYEYEAGTWGPTEADKLIAKTGRVWRKPSGLMKKKV

SEQ ID NO: 67336 - protein, 484 aa, Pasteurella multocida
MSVKGDIGVIGLAVMGQNLILNMNDHGFKVVAFNRTTSKVDEFLQGAAKGTNIIGAYSLEDLANKLEKPRKVMLMVRAGEVVDQFIEALLPHLEEGDIIIDGGNTNYPDTNRRVAYLREKGIRFIGTGVSGGEEGARFGPSIMPGGDESAWEHVKPILQAISAKTDKGEACCDWVGRDGAGHFVKMVHNGIEYGDMQLICEAYQFLKEGVGLSDDELEATFKAWRNTELDSYLIDITADILGYKDEDGSRLVDKILDTAGQKGTGKWTGINALDFGIPLTLITESVFARCVSSFKEQRVQASRLFNKVVGKVEGDKAAWVEAVRKALLASKIISYAQGFMLIREASENFGWHINYGGTALLWREGCIIRSRFLGNIRDAYEANPDLIFLGSDAYFKGILENSLGEWRKVVAKSIEVGIPMPCMASAITFLDSYTSERLPANLLQAQRDYFGAHTYERTDKPRGEFFHTNWTGRGGDAASTTYDV

SEQ ID NO: 67337 - protein, 270 aa, Pasteurella multocida
MRIPNYRDQIKIVFFDIDETLLVKDEDYIPATVVPAIRKLKENGIVPAIATGRTLSNFPPKIKGLIEQTDMNLFVTMNGQYVSYQNEPIGKHPLSKAKIQEFVDFCDQHQIVYAQVSPTDTAVSAITDQVRDALDPLKGHYHVDKDYFKHHDVFQILAFYDATQDQFVQDSGVLKGLQSVRWHKYSVDLFDEKISKATGIACAIQHFGFAMENVMAFGDGLNDIEMLRMAGVGVAMGNAHHQLKTVADHVTLPIKEHGIEYFLKQAKLID

SEQ ID NO: 67338 - protein, 446 aa, Pasteurella multocida
MQKFVKNVKKQTVLLSTRAIAAQIILQVLDQGKSLSTLIPDTQHQVKTQDLPLLQEICFGVCRVLPRLELIIKQLVDKPLKGKTRIVHCLLLVGLYQLLYTRIPAHAAVDEVVNATTALKAEHFRGLVNGVLRRFLREQETLLVKVDKHWHTLHPDWLVNRLKEAYPNWREIVEANNHKPPMWLRVNQQKNSTETYRTLLAEQGIEAEKADNPCALRLLQPVAVSQLPAFHEGAVSVQDVNAQWSALLLAPENGELILDACAAPGGKTTHILEQAPQAHVVALDVEATRLKRVHENLARMQQQATVICGDATQPAQWLKQLSESAVQFDRILLDAPCSATGVIRRHPDIKWLRQASDISALVALQKQILQALWTVLKPNGILLYATCSVLPEENALQIEQFLTNNVDAKLEPLPFTAVEGSVGYQFLPTENGGDGFYYAKLRKVVS

SEQ ID NO: 67339 - protein, 458 aa, Pasteurella multocida
MKIIILGAGQVGKTLAENLVSEDNDITLVDNQSLRLENLQSKHDLRVVNGSASSPRVLREAGAQDADLLVAVTSSDEINMVACQISYTLFNTPTKIARIRNAEYLREKDKLFQTNVLPIDHIISPEKLVTDEITRLIDYPGALQVAHFANGRISLVVVKAYYGGPLVGYAISALKDHMPHIECRIVSILRQDKVIRPQGSTIIEAGDEITFICETIHIKAVMSELQRLEKPYKRIMIAGGGNVGIGVAKNLEGKCSVKLIERNAERATALAEKLSNTLIFCGDASDQSFLLEEQIENVDVFLSLTSDDEANIMSALLAKRLGAKKALVLIQRMAYINLIQGGTIDIAVSPQQTTISALLSHVRKGDTVNVASLRHGVAEALEIIVHGEESSSLVIGRKISELKLPQGAIVGAILRGNEVIMAKKNLVIEDNDHVIVYLSDKKFVSDIEKLFQPSVFFI

SEQ ID NO: 67340 - protein, 446 aa, Pasteurella multocida
MTSSLPNIGFISLGCPKNLVDSERILTELRSDGYNIIPSYENADLVIVNTCGFIDSAVQESLEAIGEALEENGKVIVTGCLGAKEDRIREVHPKVLEVTGPHSYEAVMQQVHKYVPKPAYNPYVNLVPKQGVKLTPKHYAYLKISEGCDHRCTFCIIPSMRGDLDSRSITQVLDEAKRLVEAGVKEILVVSQDTSAYALDRSKEEQNKTVFWNGMPIKNNLISLCEQLGKLGVWVRLHYVYPYPHVDQLIPLMAEGKILPYLDIPLQHASPKILKAMKRPGSIERTLERIKKWREICPDLTLRSTFIVGFPGESEEDFQLLLDFLKEALLDRVGCFKFSPVEGAIATEMPDQVPEEVKEARFHRFMQLQQEISAARLQQKVGKVFTVLVDEVDEEGIIARSIADAPEIDGVVYIDNPNRVAVKAGQFIEVKITRADAYDLYASLIN

SEQ ID NO: 67341 - protein, 476 aa, Pasteurella multocida
MATIDNAMIHSLIQHLGGKSNIQSVTNCMTRLRVTLHDSSVVDKDELKKIQGVLGVVEADEQLQLILGPGKATKAAEMMKASLGDNMSSPSLQEIARTQKQQIKSAQTSSIHQFFAKFATIFTPLIPGFIGAGLLLGLATVLQQAFVAGVENPNAFLVDLIAYMKVFSKGLFSFLSILIGYNAAKAFGGSGVNGAILASLFILGYNPEATKGIYSGLSNFFGLTIDPRGNIIGVLIAAIVGAKVERWVRKFIPDSLDMALTSTVTLLIMGCFTFLFIMPIGVYLFNGMSWLFSNLNGNPLGTAVLAGLFLISVMLGIHQGFVPVYFALVETQGFNALFPVLAMAGAGQVGAALALYFKANKGAVLRDQIKGAIIPGFLGIGEPLIYGVTLPRVKPFITACIGGAAGGFTIGLIAYLGFPMGLNTVFGPSGLLAIPLMTSPNGVLPAIATYLLGTVVAYATGFITTYFFATKDVDLS

SEQ ID NO: 67342 - protein, 301 aa, Pasteurella multocida
MPNAIHALVTESRNPFSTHIDQLSTLDMLAVINQEDQKVPFAIENVLPEIAQAVDAIAETFMKNGRLIYLGAGTSGRLGILDASECPPTFGTPHEQVVGLIAGGQQAILKAVENAEDDRSAGEQDLRNLALNEKDVVVGIAASGRTPYVLAGIEYANHVGCVTVGISCNPDSALAALANIAITPIVGPEVITGSSRMKAGTAQKLILNMLTTGAMIKTGKVFGNLMVDVVATNEKLVERQKNIVMEVTQCDRQQAEQALLQSNGQCKVAIVMLLLNMSAEEAKNCLAQANGFIHQALTLVK

SEQ ID NO: 67343 - protein, 640 aa, Pasteurella multocida
MLFFTNLTLKRGQSVLLENTSVAINPGQKVGLVGKNGCGKSSLLALLKKEISAEGGDVSFPSNWTLSWVNQETPALMTSAIDYVIEGDREYCRLQRELVLANEQGDGHKIAHLHAQLDAIDAWTIQARAAALLHGLGFSQSELQQPVKAFSGGWRMRLNLAQALLCPSDLLLLDEPTNHLDLDTVMWLERWLVQYKGTLVLISHDRDFLDPIVNKIIHIEHQKLNEYTGDYSSFEVQRATKLAQQNALYRQQQQKVAHLQKYIDRFKAKASKAKQAQSRVKALERMELIAPAYVDNPFHFTFREPLSLPNPLLAMQQVSAGYPSAEGQSAVEILEKIKLNLVPGSRIGLLGKNGAGKSTLIKLLAGELTPLSGQVQLAKGVQLGYFAQHQLETLRLDESPLWHLQKLAPQHTEQQLRDYLGGFAFKGDKVNEAVKSFSGGEKARLVLALIVWQRPNLLLLDEPTNHLDLDMRQALTEALVDYQGSLVVVSHDRHLLRNTVEEFYLVHDKKVEPFSGDLEDYQKWLTDVNRNTEEKADTNAPVDNANSSANRKEQKRREAELRQQTAPLRKKLQQLEQKMETVSSHLGQIEAQLVESDLYLAENKEKLTALLNEQVSNKKHLETLEMDWLALQEELEGLLE

SEQ ID NO: 67344 - protein, 319 aa, Pasteurella multocida
MIEQKSKPFPLPINYFGIILGLSALSLAWRYATPLCEGATLVSESLFAVSAMIWLAFIGAYAYKWFKSHQQLKADLQHPLLGNFVSLIPITTILIGIGLVPYNMLFGTVLISLGIAIQLAFATYYIPAMWRGIHQAEMTLPAIYLPTVATNFVSATALGVLGYSELGMVFLGAGFFSWLVLEPIVLQRLRTLQPVPEPLRPMIGIQLAPAFVGCSAYLTLNGGKLDLFALMLLGYGVLQLLFLIRLLPWIFVNGFTPAMWAFSFGLASMAKVALLFYQNTSDNLLATLSLALFIFANFSIGLMLLNTGYLVLKGRFFIK

SEQ ID NO: 67345 - protein, 341 aa, Pasteurella multocida
MQNLQPFHTFSLPVQAQKIIEITDIEQLKQQWAACQTNKLPVLLLGQGSNVLFLRDFQGVVLLNRLMGIQHTQDADFHYLHVNGGENWHQLVAWSIQQGIFGLENLALIPGCAGSAPIQNIGAYGVEFKDVCDYVEVLNLHTNEIFRLSNEQCQFGYRDSIFKHAYATGYVIIAVGLKLSKNWIPVLKYGSLANLEKSAVNAQQIFDEVCAIRRSKLPDPAEFGNAGSFFKNPVISKVDFDHLQQEYPDIPHFPQADGRVKLAAGWLIDQCGLKGYQLGGAAVHQQQALVLINQQDATSSDVVELAHHIRQKVAQRFAVWLQPEVRFIDEDGEVDSEQAIC

SEQ ID NO: 67346 - protein, 568 aa, Pasteurella multocida
MKIKHSVSTKIANYLFIIMIFAGVITSLSLMIMASNKSDAESINVSGSLRMQSYRLLHELEHHPELVETGLRQYRISLHSPALLEIDQWFVPDEVKQSYHQLIKRWERMERYAKQREINAYKNEIADYVAQVDQFVFTLQRFAEKKWIIAVLIMSLSMLSIIAMVAYVVWYARKEVVMPLKQLTQASIQVQMRQFSHVKVDTQKEDELGNLARAFSQMSSELEKLYSSLEESVNEKTQKLRQTNRSLTMLYESSQQLTTTNVDESILQHVLKNIFISEHLRYMALVVEGAEHWNIRFGQKQANQDCQEVTLQIEDEKLAVLYWQAGFPCPDPRTMRNIAQILSRTLYFHKTQRQQQQLLLMEERAIIARELHDSLAQVLAFLQIQLTLLKHNINQKSEEAAQQSINIIASFEQALRDGYVQLRELLATFRLTVQEANLKLALEQVVDSLRNQTDIQMCVQCSLPAQSFNAKQLVHILQIVRESVLNAIKHSKGNRIEVIAHINEDGEYEFIVRDDGIGIPSLEEPEGHYGLNIMHERATQLNAHLRIANRPSGGTEIKLTLHQNRNLT

SEQ ID NO: 67347 - protein, 828 aa, Pasteurella multocida
MNLSRRDFMKTNAAVAAAAVAGLAIPVKNVEASPDKIIKWDKAPCRFCGTGCSVLVGTQNGRVVASQGDPDADVNRGLNCIKGYFLPKIMYGKDRLTSPMLRMTNGKFDKHGEFTPVSWDQAFTIMAEKFKKALKEKGPNGAGMFTSGQSTIFEGIAKSKLFKAGLRSNNIDPNARHCMASAAVAFMRTFGMDEPMGCYDDIEKADAFVLWGSNMAEMHPILWSRISDRRLSHPDVKVAVLSTFEHRSFELADLGVIFTPQSDLAIMNYIANYLIQHDAIDHDFIQKHTKFKRGETDIGYGLRETHELEKAAKNVKTAGKMHDSDFEEYKKLVAPYTLEKAHEISGVPKEQLEALAKMYADPKLNIVSFWTMGFNQHTRGVWANHLIYNIHLLTGKISKPGCGPFSLTGQPSACGTAREVGTFAHRLPADLVVTNPKHVEKAEKLWKLPKGVIQTQVGYHAVAQDRALKDKKMNVLWQMCTNNMQGGPNINQERFPGWRDEENFVIVSDPYPTVSALAADLILPTAMWVEKEGAYGNAERRTQFWYQQVKAPGESKSDVWQLVEFSKYFTTDEMWPAEVLAANPEYKGKTLYEVLFRNGQVDKFQVPTDKPGYMNDEAEHFGFYLQKGLFEEYAVFGRGHGHDLADFETYHKARGLRWPVVDGKETLWRYREGYDPYVKEGEGVAFYGYPDKKAIILAVPYEPPAEAPNAEYDLWLTTGRVLEHWHTGTMTRRVPELHRSFPNNLVWMHPLDAKKRGLRHGDKVKISSRRGEMISHLDTRGRNKVPQGLVYTTFFDAGQLANYLTLDATDPISKETDFKKCAVKVEKA

SEQ ID NO: 67348 - protein, 317 aa, Pasteurella multocida
MTTQLDSLRNMTVVVADTGDIEAIKKYQPEDATTNPSLILSASALPQYASLIDEAIAYAKSKSNCSKQQLIDAEDKLAVNIGLEILKIVPGRISTEVDARLSYDTQATIEKAKKLIALYNEAGISNDRILIKIASTWQGIRAAEELEKQGINCNLTLLFSEAQARACAEAGVYLISPFVGRILDWYKANSDKKDYAPAEDPGVISVTKIYNYYKQHGYNTIVMGASFRNVGEITELAGCDRLTIAPALLKELQENNAPLERKLSYTGEVKAKPQPLTEAEFYWQHNSDAMAVEKLADGIRKFAADQEKLEAMLLTKF

SEQ ID NO: 67349 - protein, 415 aa, Pasteurella multocida
MQSKVVIPQGEKIQLDAKGALIVPDHPIIPFIEGDGIGVDVTPAMRTVIDAAVEKAYGGKRKISWMEIYAGGKANEVYGENTWLPDETMTFIRDYHVAIKGPLMTPVGGGIRSLNVAMRQGLDLYNCLRPIRYYDGTPSPVKHPELVDMVIFRENSEDIYAGVEWVAGSAEANKVIAFLQQEMGVKKIRFTEDCGIGIKPVSKQGTQRLVRAALQYVIDNDRKSLTLVHKGNIMKFTEGAFKEWGYQVAQEFGAELLDGGPWMTLKNPKTGREIIIKDSIADAFLQEILLHPTEYDVIATLNLNGDYISDALAAQVGGIGISPGANIGAEAAIFEATHGTAPKIAGQDKGNPGSLILSGEMMLRHLGWLEAADLVVKAVSKTIADKTVTFDFAEMLEGAKLRSTSEFAQDIVANM

SEQ ID NO: 67350 - protein, 238 aa, Pasteurella multocida
MTTPIAKSTRRIVAVVPAAGIGSRMQMDKPKQYLHIHGKTILEHTLSVLLGYPLIEKIILAVAANDPYISTCPLLTHPKIQLVEGGSSRADSVLNGLNAVKSAVQNSEDFWVMVHDAARPCLTHQDLDKLVQVEDQNGAILAIPATDTIKRALHNQQIHYTEDRSQLWLAQTPQFFPIATLAQALEQALAQGLQVTDEASAMEFAGFRPHLVAGRSDNIKVTRPEDFALAEFYLSRTK

SEQ ID NO: 67351 - protein, 158 aa, Pasteurella multocida
MIRIGHGFDVHAFGGEGPIIIGGVAIPYEKGLLAHSDGDVALHALTDALLGAVALGDIGKLFPDTDMQYKGADSRGLLREAYTQVQAKGYKVGNVDVTIIAQAPKMRPHIDAMRAAIAEDLACDIEQVNVKATTSERLGFTGRGEGIACEAVALVVKS

SEQ ID NO: 67352 - protein, 157 aa, Pasteurella multocida
MTEKLTALCPCQSGQLYQACCQPYHQQQQFPANAMLLMRSRYAAYALKNIDYIVQTTVPNQQALLPVAALQDWADKTTWVGLDILQHVSLSKTHSQVEFKAFFAQQNQTQVHHEISLFVNIAQRWYFVDPTVTLPNMKQPCLCGSNKKFKHCCGGLL

SEQ ID NO: 67353 - protein, 333 aa, Pasteurella multocida
MSKPVVLSGVQPSGELTIGNYLGALRQWVKMQDDYECLFCIVDLHAITVRQDPESLRKATLDVLALYLACGIDPEKSTIFIQSHVPEHTQLAWVLNCYTYFGEMGRMTQFKDKSARHAENINVGLFTYPVLMAADILLYQANQVPVGEDQKQHLEITRDIANRFNALYGDLFAVPEPFIPKAGARVMSLLEPEKKMSKSDENRNNVIGLLEDPKAVAKKIKRAVTDSDEPPVVRYDVQNKAGVSNLLDILSGVTGKSIAELETEFEGKMYGHLKGTVADEVSAMLTTLQERFHHFRNNEALLNDIAREGAQKARERAKATLDAVYQAVGFVSL

SEQ ID NO: 67354 - protein, 611 aa, Pasteurella multocida
MPKLRSATSTQGRNMAGARALWRATGMKENDFGKPIIAVVNSFTQFVPGHVHLKDMGQLVAREIEKAGGVAKEFNTIAVDDGIAMGHGGMLYSLPSRDLIADSVEYMVNAHCADAMVCISNCDKITPGMLMAALRLNIPCVFVSGGPMEAGKTKLSDKIIKLDLVDAMIQGANPNVSDEDSAQIERSACPTCGSCSGMFTANSMNCLTEALGLSLPGNGSCLATHADRKQLFLDAGKQVVELCKRYYEQEDDSVLPRSIANKKAFENAMSLDIAMGGSTNTVLHLLAAAQEAEVDFTMADIDRLSRQVPCLSKVAPNTQKYHMEDVHRAGGIMAILGELDRANLLHNDTRTVLGMSLAEQIAKYDIVLTKDEAVHKFFRAGPAGIRTTEAFSQDCRWDTVDDDRENGCIRSKTFAYSQDGGLAMLSGNLAMDGCIVKTAGVDESILKFTGDAIVFESQEDAVAGILGGKVQAGHVVVIRYEGPKGGPGMQEMLYPTSYLKSMGLGKACALLTDGRFSGGTSGLSIGHCSPEAAAGGLIGLVKDGDKIEIDIPNRSIQLCVAEEELAQRRAEQDKLGWQPVNRQREVSFALKVYGHFATSADKGAVRDKTKI

SEQ ID NO: 67355 - protein, 272 aa, Pasteurella multocida
MSFFPFRAIVSDLDGTLLNAHHMIGDFTIQTLQQLAAKGIDIMLATGRNHTDLLPILKKVNIEKAVMITSNGARAQDLQGNLLVRDYLPEQIAFDIMNLDFDRQRVCVSAYQGDDWFINIDVPQLRKYHQDSGFMYEVVDFAQHHGRETEKVFFIGREPQDLIGLEQHLQANYADTTSITYSTPVCLEIMNKNVSKASALEKVLADRDYDLQHCLAFGDGMNDVQMLSRVGKGCVMGNADPRLKEACPHLEVIGMNAQESVANYIRTVFDIE

SEQ ID NO: 67356 - protein, 317 aa, Pasteurella multocida
MIREPHFTHFALAELHPFAAQFPLQDVQGKKGVRITYRHFVQDNPVQRNLVILVNGRAENLLKWTELAYDFYQQGYDVLVFDHRGQGYSQRLLPDHEKGYIDEFRFYADDMAILLAKISALYPYENQHILAHSLGALISTYYLANYDHQVKSAVFSAPFYGIPLKHSFRDELIINLMMLLGQGSRYVFGKGRYQPADLDNNDLSCCRTRMRWMNRINRRYPHIHLGGPTFRWVHLCFSAIKKLPTILPRIEIPVLILQSEKEKIVENKNLRKLTALLPRGELTQIAQSKHEILFERDLIRSEALKKISQFFTANSAK

SEQ ID NO: 67357 - protein, 369 aa, Pasteurella multocida
MQNVGFIGWRGMVGSVLMDRMQEENDFANINPVFFTTSQAGQNAPVFGGKQAGELKDAFDIAELQKLDIIVTCQGGDYTNEVYPKLRAAGWKGYWIDAASALRMEKDAIIVLDPVNQNVISEGLKNGIKTYVGGNCTVSLMLMALGGLFERDLVEWVSVATYQAASGAGAKNMRELLVQMGQLEDSVKVDLDNPASSILDIERKVTAKMRGDLPIENFGAPLAGSLIPWIDKLWEDGQTKEEWKGYAETNKILGLDDSPIPVDGLCVRIGALRCHSQAFTIKMKKDLPLEEIEQILASHNEWVKVIPNEKDVTLRELTPTKVTGTLSVPVGRLRKLKMGPEYLAAFTVGDQLLWGAAEPLRRILKQLVA

SEQ ID NO: 67358 - protein, 668 aa, Pasteurella multocida
MATRRELANAIRFLSMDAVQKAKSGHPGAPMGMADIAEVLWRDFLKHNPSNPHWADRDRFILSNGHGSMLIYSLLHLSGYDLSIEDLKQFRQLHSKTPGHPEYGYAPGVETTTGPLGQGITNAVGFAIAEKTLAHQFNRPGHEIVDHHTYVFLGDGCLMEGISHEACSLAGTLGLGKLIAFYDDNNISIDGHVDGWFTDDTQKRFEAYGWHVIPAVDGHNPEQILEAVKQAQAETTKPTLIICKTIIGYGSPNKANSHDCHGAPLGDDEIAAAREFLKWEHAPFEIPAEIYAQWDAKEKGQVAEKAWEEKLAAYAKAYPELAAEFTRRVNAELPANWAAESQAFIEHLQANPANIASRKASQNAIEAYAKLLPEFLGGSADLASSNLTLWSGSKPIRAVENADGNYINYGVREFGMSAIMNGIALHGGFIPYGATFLMFMEYAHNAVRMAALMKQRSLFVYTHDSIGLGEDGPTHQPVEQTSALRLIPNLETWRPCDQVESAVAWKAAVERKEGPSALIFTRQNLAQMDRTAEQLANVARGGYVLRHCCENQNCPDLILIATGSEVELAMKAADVLDAEGVKVRVVSMPSTNVFDKQDAAYRESVLPSHITKRVAIEAGIADFWYKYVGFEGRVVGMNSFGESAPADQLFKLFGFTVENVVAKAKEIL

SEQ ID NO: 67359 - protein, 316 aa, Pasteurella multocida
MTQLDSLRSMTVVVADTGDIEAIKQYQPQDATTNPSLILSASALPQYAPLIDDAIAYAKTKSDCPRQQLVDAEDKLAVNIGLEILKIIPGRISTEVDARLSYDTQATIEKARKLIKLYNEAGIENHRILIKIASTWQGIRAAEVLEKEGINCNLTLLFSEAQARACAEAGVYLISPFVGRILDWHKANTGRQDYPAAEDPGVISVTQIYNYYKQHNYKTVVMGASFRNVDEIIELAGCDRLTISPTLLSHLQAREGELVRKLAFSGELKDRPQPLTESEFYWQHNSDPMAVAKLAEGICKFAEDQEKLEKMLLERL

SEQ ID NO: 67360 - protein, 151 aa, Pasteurella multocida
MKIAIGCDDAAYNLKVELIKFLTSLGIECDDFGAGAGDTTLYPNVAEKVAIAVAKGEYDRGILTCGTGIGMCITANKIPGIRAAVCHDVFSAERARKSNDAQIICFGERVIGVELAKALLKTWLACDFAGGGSTPKVAQINEIDSKYHRSL

SEQ ID NO: 67361 - protein, 317 aa, Pasteurella multocida
MSEEEMDLLTEIAVSYYEHELTQEEIANRFNISRVKIGRLLKKARQEGIVEINVKYHPIFTSKLEQRLIEQFGIHRALIAIDTQNEVEQRKQVAALVNAYLSSTLKDGMTVAVGQGRNVAAVGEYVGVFPERNCKFICGIGGTHRIGPPIDADHICRNLARKFNGTNETLYSPAYLEKPEFRDIFLQNGVIKETLDKARKADIALVGIGDMNENSYMVQLGWFTPQEITHARMNLGVVGEIAGYGFFNFQGEPADTVMNNRVIGLSLEDLRKIPCVIGIASENTKATAILGALRTGIINIIATTASNINTILSLTKS

SEQ ID NO: 67362 - protein, 89 aa, Pasteurella multocida
MTLANIKSAKKRAIQSEKRRQHNASQRSMMRTYIKKVYAAVAAGDKSVAEKAFVEMQKVVDRMASKGLIHANKAANHKANLSAQIKKLA

SEQ ID NO: 67363 - protein, 510 aa, Pasteurella multocida
MTLLSRILGLVRDVVIANLLGAGVAADVFLFANKIPNFLRRLFAEGAFSQAFVPVLAEYRKSGDLDKTREFIGKVSGTLGGLVSIVTILAMVFSPLIAALFGTGWFIDWVNEGPNAEKFEQASFLLKITFPYLWFVTFVALSGAILNTIGKFGVMSFSPVLLNIAMIATALFLAPHMDSPDLALAIGIFTGGLLQFLFQIPFLKQAGLLVKPKWAWHDEGVKKIRTLMIPALFGVSVSQINLLLDTLIASFLMTGSISWLYYSDRLLEFPLGLFGIAISTVILPTLARHHVNRHDHSSQSAIDFRHTLDWGIRMILLLGVPAMVGIAILAQPLLLVLFMRGNFGLNDVQAASLSLWAFNAGLLSFMLIKILANGYYARQDTKTPVKIGIIAMVSNMGFNLLAIPFSYVGLAMASAMSATLNAYLLYRGLVKEEVYHFSRQSAVFFGKVLLSASVMGGLVWYNTPTLLEWHAMTFLTRLHWLIWLIGFAVVIYFSMLALVGIRKHHLTTKG

SEQ ID NO: 67364 - protein, 311 aa, Pasteurella multocida
MRLIRGIHNLPPNLSGCALTIGNFDGVHLGHQAILRHLRQKADALNLPVVVMLFEPQPREYFTGDAIPARLMRLRDKLHYLAQAKVDYVLCIRFNENFASQTAEEFIEDWLVKKLNVRFLSIGDDFRFGAKRQGDFALLQKSGEAFGFFVEDNHSFCCDELRISSTAIREALAEDDLAYAEKMLGKPYRILGRVAHGNKLGRTIGFPTANIPLHRQVNPVKGVYAVKVRLKNQEIYHGVANIGKRPTINGVVQLLEVHIFDFHSTIYGQCLEVEFCHKIRNEFKFPSFEALKEQIAQDVETAKHFFRTQQI

SEQ ID NO: 67365 - protein, 932 aa, Pasteurella multocida
MTVDYKNTLNLPETGFPMRGDLAKREPNMLKSWYEKDLYQKIRQASKGKKSFILHDGPPYANGTIHIGHAVNKILKDIIVKSKTALGYDSPYIPGWDCHGLPIELKVEGLVGKPNQNISAAQFREACRQYAAEQVEGQKKDFIRLGVLGDWDNPYLTMNYHTEANIIRAFGKAVENGHLYKGSKPVHWCLDCASSLAEAEVEYEDKVSPSIYVRFSAVDSDAVLAKFNATDKGTGNISAVIWTTTPWTIPSNRAIAIHENLDYQLVQFNDERVILAKDLVEEVAKAAGVEQVVILGESKGKDLEWLRFQHPFYDFSVPFILGDHVTTDGGTGLVHTAPDHGHDDYIIAQKNGIEMAGLIGNDGLFKADVPFFAGKGVFESNDLVVAKLQEVGAMLKFSKIKHSYPHCWRHKTPIIFRATPQWFIGMEKQGLRQQALSEIKKVRWIPDWGQARIEKMVENRPDWCISRQRTWGVPVALFIHKETEELHPRTVELVEEVAKRVEQKGIQAWWDLDTAELLGADADNYIKVPDTLDVWFDSGSTYYSVVKDRPEFNGQEADMYLEGSDQHRGWFMSSLMLSTATDNKAPYKQVLTHGFTVDGQGRKMSKSIGNIVTPQEVMDKFGGDILRLWVASTDYTGEISVSDEILKRAADAYRRIRNTARFLLANLNGFDPKRDLVKPEEMMVLDRWAVDCAYQAQNEIKDAYDNYQFHAVIQRLMKFCSIEMGSFYLDIIKDRQYTTKADSLARRSCQTALWHIAEALVRWIAPVLSFTADEIWQYIPGERGEFVFTEEFYNGLFALDANEQMNDAYWQQVITLRNEVNRVLEQARNDKIIGAALEAELTIYANDTYAPLLAKLQNELRFVLLTSKAEVKPLADADVAEGEVKGFAVKVVRSANHKCPRCWHYSDSKDAESLCSRCDENVNGQGEVRQFA

SEQ ID NO: 67366 - protein, 202 aa, Pasteurella multocida
MKQKIVLATGNLGKVKEMSDVLADFGFEVIAQTELNIESPEETGLTFVENALLKARYASKMSGLPAIADDSGLVVPALGGAPGLYSARYAGVDGPDADAKNRAKLLHVLHHIAPTHRQAKFVSCIVMLQHEHDPSPIIAEGECYGEIGFAEKGENGFGYDSLFFSPEVNCTFAELATSEKKKISHRAKALSVLQTKLATKGA

SEQ ID NO: 67367 - protein, 243 aa, Pasteurella multocida
MVLVDINSAKRWLNTIVPYNSIYAGIVVKKMEINMTTGKFIVLEGIEGAGKTTARDSIVRALHAHGIHDIVFTREPGGTPLAEKLRQLIKHETEEPVTDKAELLMLYAARIQLVENVIKPALAQGKWVIGDRHDMSSQAYQGGGRQLDQHLLHTLKQTILGEFEPDLTLYLDIDPVLGLSRAKGRGALDRIEQQNLDFFHRTRQRYQELVRHNPKAVTIDASQTMSKVAEDVESAIETWLTTR

SEQ ID NO: 67368 - protein, 327 aa, Pasteurella multocida
MMTLYPWLLPYYQQRIDAFQQGHGHHALLFQAEQGLGTEQLLFALGHWLICQQPQNQQPCQQCHHCHLFQAQTHPDIYTLTPIENKDIGVDQVREVNEKINQHAQQGGNKIIYVLGVSRLTEAAANAMLKTLEEPRPNTYFLLYTEASDSVMPTIYSRCQTQKLALPAETSAIAWLQQQTTQEIAAIQTALRISYGRPLHALTVLQQDLLEKRREFLRQFWLFYRKRSPLELLPFFDKAILLHQLDWLLAFLSDALKAKLQIKSDWLCQDLAAGVLQLSQQQSAQALLHATQIIQKVRTDLTQINAVNQELILLDGLTQLITDVFKG

SEQ ID NO: 67369 - protein, 260 aa, Pasteurella multocida
MFIVDSHCHLDALDYENLHSSVDDVVNKAMEREVKHLLAVGVTLTRFEQIYATLAKFKNVSLACGVHPLDLDDEPFDADRLLKLADDPKVVAIGETGLDYYYSAENKTTQQAIFANQIQIANQLNKPVIVHTRSAREDTIRLLAENHADKCGGVLHCFTENWDMAKKGLDLGLYISLSGIITFKNAEEIRDVARRVPLDRLLIETDSPYLAPVPYRGKQNQPAYVREVCEYVATLKGVSFEEFAQLTTQNFERLFKINVQ

SEQ ID NO: 67370 - protein, 449 aa, Pasteurella multocida
MFLPSLPYRSKQRYFMSLFEAILSLGILIIISAVISAAEMSLAGARKIKLQSLVNDGDARAQLVLELQSQPGRFITVVQIGLNMVAILGGIIGESAIRPYLALVLTQHVSVEWLDSAASWLAFALVTTLFVLLADLVPKRLAMINPEKVALRTVRIMSVCIFLLKPLVMIFDSIANGFFKLFRISTIREENMTPEDIVAIVGAGAEAGVVNAQEHYLIENIFEMQQRTVTSTMTTRENIVFLDRSFDRQAVLDTLTHNSHSKLLICDNGLDRILGYVESHTLLTMYLQVEKGVSLTDSRLLRKALFIPDTLSLFEVLELFKSTGEDFAVIVNEYALVVGIITLNDVMSIVMGELVSNEEEQIVRRDEDSWLIDGATPLEDVMRALNLSHFPGEENYETIGGFMMYMLRKIPKKTDFVLYDKYKFEIIDTENVKIDQLLVSLRKDIDPTV

SEQ ID NO: 67371 - protein, 649 aa, Pasteurella multocida
MYSNSEKNHRTLLFPIFFFVFVNLIVFTLSRLGLSLWQAERVSAVNGWVELFVQGLRIDIVSLCYLFGVPALFTVLLYHHNALGRVWQKILRVWLTFGSVFILFMEIATPAFIETYDFRPNRLFIEYLIYPKEVFTMLFEGHLLSMVISLVVTATATLCYWKLAGWAVKNLSSPSWKFRPVVALLVIAIAFIGARSTFAHRGINPAMVAFSSDGLVNSLVLNSGYSVIYAAQQFKDEDNAASLYGKMADDEMLRIVKQTRGRPESDYISSQYPTLTRNQATYQGKPKNIVIILEESLGAQFIGSLGGLPLSPEFDKLAQEGWLFENLYATGTRSVRGIEAVTAGFTPTPARAVVKLSNSQHGFFTIAELLAKQGYHTSFIYGGEKHFDNMASFFYGNGFQYIIDELDYVNPKFKATWGVSDEDLFDKAHETFTALHKEGKPFFSLVFSSSNHDPFEFPDGKIELYEQPKQTRNNAAKYADYAIGHFFKLAKQADYWKDTLFLVIADHDSRVGGAALVPIKHFHIPALLLGDHVEVKRDARLVSQIDMPTTLLSLAGISGDYPMIGYDLTKEDNPNRAFMQYDQTLAMMKGNEVVILAPKVEAKGYLYDKQTNRFTEANLSEALKKEALAHSLLGSYLYKNRLYKSEDKK

SEQ ID NO: 67372 - protein, 268 aa, Pasteurella multocida
MTDQHAFATEQVQLDPTLSPTTEETTHFGFKTVAKSEKQKMVANVFHSVAGKYDLMNDLLSFGIHRVWKRFTIDCSGVRKGHKVLDLAGGTGDFTAKFSRLVGPSGEVILADINDSMLRVGREKLRNLGVVGNVNYVQANAEALPFPDNTFDCVIISFGLRNVTDKDKALRSMFRVLKPGGRLLVLEFSKPILDPLSKIYNFYSFNILPKIGEVVVNDSESYRYLAESIRMHPAQDVLKQMMIDAGFEQVNYYNLSAGIVALHRGYKF

SEQ ID NO: 67373 - protein, 341 aa, Pasteurella multocida
MTQQIFANFPQRRLRRMRKQAFSRRLMAENKLSVEDLIYPVFIIEGEKQREPVPSMPGVERLTIDELLIEAELLVKYGVPVIALFPVIAQEKKSLMAEEAYHPDGLVQRAVKALKDKFPTELGILTDIALDPYTTHGQDGIIDQHGYVLNDVTSDILVKQALSHAKAGADIVAPSDMMDGRIGKIRHALEEKGFINTLIMAYSAKYASHYYGPFRDAVGSATNLKGGDKKTYQLDPANSDEGLQEVALDLQEGADMVMVKPGMPYLDLVYRVKTHFGVPTFAYQVSGEYAMHQAAIQNGWLKEKECIMESLLCFKRAGADGILTYYAKQVAEWLYWEKQHQ

SEQ ID NO: 67374 - protein, 315 aa, Pasteurella multocida
MTIYSDNSYSIGNTPLVRLKHFGQGNIVVKVEGRNPSFSVKCRIGANMVWQAEKDGILTKEKEIVDATSGNTGIALAYVAAARGYKITLTMPETMSAERKRLLRGLGVNLVLTEGALGMKGAIAKAEEIVASDPQRYVMLKQFENPANPAIHQQTTGPEIWRDTDGQIDVLVAGVGTGGTITGISRYIKQDKGKAILSVAVEPAESPVISQTLAGEEIKPAPHKIQGIGAGFIPKNLDLALVDRVETVSSEEAMQTARRLMAEEGILGGISSGAAVAAADRLAKLPEFAEKLIVVILPSASERYLSTALFEGIEA

SEQ ID NO: 67375 - protein, 323 aa, Pasteurella multocida
MDLNTILIILGIIALIILVVHGLWANRREKSQYFKSANTFTRDSRLREPPAHIQSASEEKKDANTSTPTAEVSPAQRTFAFEAEKQFAHEQQAVEQAIENIKITLPKEEQPYQAKIEPDTPPTSPALTTIAEVENYANQEEGIDTHSEQLRQQLADLAQQSPSVTLAALQEEQALMESQAQQQASEDVRQDTDATFIMMYVVAPENYQFQGARLAKILDELGFLFGEHNIYHRHSDLSVNSPVLFSVANIEQPGTFDYNMHDFSTVGIALFMQLPSEGNDLMNLRMMIRAAKSIAEDLGGFVLTDQQAIFDDQAEKAYLDKVR

SEQ ID NO: 67376 - protein, 201 aa, Pasteurella multocida
MSLFAIFYLFLAYLLGSVSSAILLCRLAGLPDPRESGSHNPGATNVLRIGGRWVALSVLLFDMLKGMLPVWLGYYLGLTHFELGMVALGACLGHIFPIFFKFKGGKGVATAFGAIAPISWGVAGSMLGTWLLIFFVSGYSSLSAVMTALLVPFYVWWFKPEFTFPVALVCCLLIYRHHDNIQRLWRGQEDKVWNKLKNKKD

SEQ ID NO: 67377 - protein, 301 aa, Pasteurella multocida
MTNKQGYGYFCLLLATFFWGGNYLFGKILSTDIPPIVLNYARWFPAALILLLLFSKRSCQFTPVIRQHWRILIALSLLGIVIFPVFLYQGLQTTTSLNASIYLAVVPIFVLFLNRLVFGDPINFTGLTGALFSFVGVLWLLSRGDIQRLTQLEVNQGDLWALGSALSWSIYCCLIRLKPAQLPNTVLLTTLVCMAMLLFTPLFIWQYQQLPPAFFSTLTPTQYSIITYLIIGPSILSYGFWNYGISLVGADKGAAFTNATPLFAALLGVLVLNEALAFYHMISAGLIITGLLLCNRKSCSS

SEQ ID NO: 67378 - protein, 236 aa, Pasteurella multocida
MKFYRTLRPFKLISFDLDDTLYDNSDVIRLAEENFIEKVKLESQLNISSEEWRAWKQRIEQRHPMLCEDVVAWRIETLHQLLANYQKSAAEIERVCQQAMALFVEWRHKIDVPVQSQQVLNLLKQKYPLVAITNGNVEPQRIGLSQFDLVLRGGEQGRAKPHQDLFHQTAQHFGVQPHEILHVGDNLMTDVQGAIQADCQAVWINLSGKVLRDFPEARLMPTLEITELKQLLMLVA

SEQ ID NO: 67379 - protein, 295 aa, Pasteurella multocida
MQEQLDKYWNYLRIERQVSPHTLTNYQRQLYRIVDILAENGITSWQAVTPSIVRFILAQSNKDGLKERSLALRLSVLRRFFTYLVQQQDINVNPATGVSAPKQNRHLPKNIDAEQVQQLLNNDSKEPIDIRDRAILELLYSSGLRLSELQSLNLNSINTRVREVRVMGKGNKERIVPFGRYASHAIQQWLKVRILFNPKDEALFVSQLGNRLTHRAIQQRLEVWGIKQGLSSHLNPHKLRHSFATHMLEASSDLRAVQELLGHSNLSTTQIYTHLNFQHLAEVYDSAHPRAKRKK

SEQ ID NO: 67380 - protein, 855 aa, Pasteurella multocida
MNIEKFTTKFQQALQEAQSLAIGKDNQFIEPVHLLTALLNQQGGSTAPILTASGANLPLLRNELNAELSKLPQVSGSGGDVQVSRSLVNLLNLCDKLAQQRQDKFISSELFLLAALEDKTLGDVLKKCGVKKENLQQAIEKVRGGQNVNDPNAEESRQALEKYTIDLTARAESGKLDPVIGRDEEIRRAIQVLQRRTKNNPVLIGEPGVGKTAIVEGLAQRIVNGEVPEGLKNKRVLSLDMGALIAGAKYRGEFEERLKAVLNELSKEEGRVILFIDEIHTMVGAGKTDGAMDAGNLLKPSLARGELHCVGATTLDEYRQYIEKDAALERRFQKVFVGEPTVEDTIAILRGLKERYEIHHHVQITDPAIVAAATLSHRYVSDRQLPDKAIDLIDEAASSIRMEIDSKPQPLDRLERRIIQLKLEQQALQKEDDDASRKRLAMLEKELGEKEREYAELEDVWKAEKAALSGTQHIKAELDSAKTQMEQARRASDFAKMSELQYGVIPALEKQLAQAESAEGKEMTLLRYRVTDEEIAEVLSRATGIPVAKMMEGEKEKLLRMEEELHKRVIGQHEAIEAVSNAIRRSRAGLSDPNRPIGSFLFLGPTGVGKTELCKTLANFLFDDENAMVRIDMSEFMEKHSVSRLVGAPPGYVGYEEGGYLTEAVRRRPYSVILLDEVEKAHHDVFNILLQVLDDGRLTDGQGRTVDFRNTVVIMTSNLGSHLIQENSTLDYPSMKELVMSVVGQHFRPEFINRIDETVVFHPLGKENIREIATIQLARLIKRMESHGYQLHFTDACLDFIGEVGYDPVYGARPLKRAIQQEIENPLAQQILSGKLLPNQLVTIDYVDGKVIANQ

SEQ ID NO: 67381 - protein, 288 aa, Pasteurella multocida
MLISGKILDTIGALHDSLTKTEKRIAATILASPDLLSQSSLSDIAKHLDVGEATFIRFCRTLGFRGFTDFKLELAIELATREKQYHSLLDTDISPSDDPKNIAAKLQGAVTNVIAETINLLDFNELEKVVNTMMKAKRIFLFGVGSSGITAEDAKNKFMRIGLQVDSTSNNHFMYMQAALMQEGDVVVGISHSGYSKEVIQALNIAKKNSATTIAITHNLRSPITHAADYVLINGNRQGQLQGDSMGTKIAQLFVLDLIYTLIVQATEDTATKTKQKTVNVILEQRVK

SEQ ID NO: 67382 - protein, 673 aa, Pasteurella multocida
MTDSIKLEIEQLRQTLRYHEYQYHVLDNPQIPDAEYDRLFHRLKTLEQQYPQWFSPDSPTQRVGAKPLSAFAQVQHEMPMLSLDNAFSDEELHAFVKRIQDRLVFSPKLLEFCCEPKLDGLAVSILYVDGKLTQAATRGDGSTGEDITLNIRTVRNIPLQLLMENPPTRLEVRGEVFMSQAGFEVLNEKALARGEKTFANPRNAAAGSLRQLDPRITSQRPLLLNAYSIGVAEGIDLPDTHFERLQWLKSIGIPVNNEIQLCEGTENVLNFYRAIMQKRSTLGYDIDGTVIKVNDIALQEELGFISKAPRWAIAYKFPAQEELTVLNAVEFQVGRTGAITPVAKLQPVFVAGVTVSNATLHNGDEIARLDVAIGDTVIIRRAGDVIPQIIGVLHEKRPANAEKIVFPTECPVCGSVIVRIEGEAVARCTGGLFCAAQRKEALKHFVSRKAMDIDGVGAKLIEQLVDREQIHTPADLFKLDLNTLARLERMGLKSAQNALDSLQKAKKTTLARFIFALGIREVGEATALNLANHFKTLEALKEATLEQLQEVQDVGEVVANRIFVFWREPHNVAVVEDLIAQGIHWETVEVKDVGDNPFKEKTVVLTGTLTQMGRTEAKALLQQLGAKVSGSVSAKTDLVVAGDSAGSKLTKANELGVKVIDENTFLAWSKPYL

SEQ ID NO: 67383 - protein, 850 aa, Pasteurella multocida
MTHLKKSSLPLILTSLCLSSNVWSSVNTTSCGEGCTVTEEIDTATDTHIITIDGDKTRSYSHHLAVLEDNKRYRLTNHLHLENGDYKVNAPERNNARSAEIINHGKLISSAPAGATSAIDAQWGNITEKLHVTNYGEIRTDGLGSNECAICSRYFKRSPNGNTISTPTEVVYEVHNLGKEAQLLANGGPSIWLDNGKFTHINNEGTILSKSTRIPAILIRHSAQVELQNRGNIKSLGHSAVFIQNANKIDFMNSGNLENSDPTKTVVSLGGESVSLVNAGKISFSQNDPTKQSRAIGLTGSEKVELILKTGSEIDGFVATSANGKNNQLILTETGEEQGLLYGKNKFQNFHALTMRGEKWTLSDPFTFKETMYAESGQLVLKQGSLTAANIILGEKSELMFASDYELNGKFTHQGKFTFAHHEPTPVFKNVTINEDYQGHNGTLHLSADFNGTTNPTDTLFIRGNATGKTRVAIHHIGADAENAVNGVKIIETNTSTDNAFVIDNYLSKGAFVYHLEKRHETNQDNWYLTSYIGGTPSYRAEMASYANNLYAAHQLFQLRLEDRLSRHHFLNQSADKTFWIRAVEGTNHNRMRDNQNTTKAQRYVTQLGKTVINQAHYHAGVMFGYAKQSSKTRSSRVGTSRGKVQGYALGVYGTWYQNPNDDTGLYIDSWLQYQWFKNQVINPASSSDNYRTQGLSASLELGYHLPLVQYTVADLKHSLNIQPQAQFIWQKLNSKQHRDPQQTLIHYIGQQNTQTRLGVRFSLDSHFLNTQWNLKPYFEVNWLHHAKDYGITINDVVNHIEGAKQLFEYKAGIASQFGRHLRFWLDTTHQRGKQQFKDNQLNVGFNILF

SEQ ID NO: 67384 - protein, 190 aa, Pasteurella multocida
MNTDSLLRQKIRNDIRKRRQKLTALEQQQAEQSITQQALQLITQKKANTVALYLSFDGEVSTQQLITCLWQQGIQVAVPVLHPFCPGHLLFLRYHPESVMYKNSFGILEPQLNVQDVVPISALEIIFTPLVAFDKQGNRLGMGGGFYDRTLQGWQEKSFIPVGLAHACQFVEHLPSQAWDMPLAQILIAE

SEQ ID NO: 67385 - protein, 389 aa, Pasteurella multocida
MKTFDLVIVGGGMVGLTLAARLANAPLRIALIEAFPPTTPLETVTHRVSALNLASQHLLTQLGVWQDITHIRATEYNAMHVWEKDSFAHIHFTTAGLGISHLGHIVENHVIQQTLWQKVNQQKNIEILTALPQTLGLTESHAMLSLNDGQMVATKLLVAADGANSWVRKQANIPLVFRDYGHHALVCNVATTEPHQHCARQIFSKDSILAFLPLHQQHLCSIVWSQPGEQAEHLAQCDEEEFNRALSVAFDMHLGLCQVQGERQAIKLTARYARDFAQNRIALVGDAAHTIHPLAGLGVNLGLQDVIELARTIEENIKADVDIGQYRYLRHYERKRKKETMKMLLVMQGLKDLFHGAHPIKKMIRGIGLSATDKFSLVKTELMKQALGL

SEQ ID NO: 67386 - protein, 229 aa, Pasteurella multocida
MFDQLWADFTQEMTPRIWELVGLSTLETLYMGFIATLFAIVIGLPIGLLAFLTGKGEILENRRANQVLNVIINIGRSVPFIILLIILLPFTRLVVGTTLGTTAAIVPLSVSAIPFFARLTANALLEIPSGLTEAAKSMGATNWQIVTKYYLPESIPILINGITLTLVALIGYSAMAGAVGGGGLGNLAITYGEHRNMIYVKWIATIIIVLIVMLSQKLGDHLAERFDHR

SEQ ID NO: 67387 - protein, 276 aa, Pasteurella multocida
MKLTKLFGLATLVSAVALAGCKDDKPAAAAAPQEPAARKLTVGVMTGAEAQVTEVAAKIAKEKYNIDVKLVEFTEYTQPNDALTKGDLDANAFQHKPYMDKEVEQRGYKLAIVGNTFVFPIAAYSKKIKNVSELQDGATVAVPNNPSNLGRALLLLEKQGLIKLKDPSNLFSTSIDVIENPKNLQIKEVEGSLLPRMLDDVDFAIINNNYAVQQGLTAEKDGIFVEDKDSPYVNLVVSREDNKDNEAIKDFVKAFQTEEVYQEALKHFQGGVVKGW

SEQ ID NO: 67388 - protein, 610 aa, Pasteurella multocida
MCGIVGAIAQRDVAEILVNGLHRLEYRGYDSAGIAIVDQEKRLQRVRCLGKVQVLAEAVAAEKITGGTGIAHTRWATHGAPSEDNAHPHVSGQFAVVHNGIIENYEQLRIDLQQKGYQFLSQTDTEVIAHLVHWVMRNETSLLRAVQQVVKQLKGAYGMVVMDCEQPNHLVAARSGSPLVIGLGIGENFLASDQLALLNVTRRFIFLEEGDVAEITRRTVDIYDVNGHPVQRDSQDSHLTHDATEKGTFRHFMQKEIFEQPRAILNTLEGRLHQHNVLVDSIGNGAERLLEQVEHIQIVACGTSYNAGMVARYWFEHLAGISCDVEIASEFRYRKFVTRPKSLLITLSQSGETADTLAALRLAKEKGYMGAMTICNVAGSSLVRESDLAFMTRAGVEIGVASTKAFTTQLATLLMLVIAIGKVTGNISLSQEEELVKALQSLPAEIEKALAFNQQIESLAQDFADKHHALFLGRGEYYPIAMEGALKLKEISYIHAEAYAAGELKHGPLALIDADMPVIVVAPTNDLLEKVKSNIEEVRSRGGQLYVFADKEAGFTETEGMKIMTMPKVNEVIAPIFYTIPMQLLAYHVALIKGTDVDQPRNLAKAVTVE

SEQ ID NO: 67389 - protein, 90 aa, Pasteurella multocida
MNKTDLIDAIASAAELNKKQAKAALEATLEAISGSLKAGEPVQLIGFGTFKVNSRKARTGRNPQTGAEIKIAASKVPAFVAGKALKDAVK

SEQ ID NO: 67390 - protein, 1417 aa, Pasteurella multocida
MKDLVKFLKAQSKTSEDFDVIKIGLASPDMIRSWSFGEVKKPETINYRTFKPERDGLFCARIFGPVKDYECLCGKYKRLKHRGVICEKCGVEVTQTKVRRERMGHIELASPVAHIWFLKSLPSRIGLLLDMPLRDIERVLYFESYIVIEPGMTDLDKGQLLTEEQYIDAEDRWGDEFDAKMGAEAIQALLRDMDLPQECENLREELQETNSETKRKKITKRLKLLEAFIQSGNKPEWMVMTVLPVLPPDLRPLVPLDGGRFATSDLNDLYRRVINRNNRLKRLLDLIAPDIIVRNEKRMLQESVDALLDNGRRGRAITGSNRRPLKSLADMIKGKQGRFRQNLLGKRVDYSGRSVITVGPYLHLHQCGLPKKMALELFRPFIYAKLESRGFASTIKAAKKMVEREDAIVWDILADVIREHPILLNRAPTLHRLGIQAFEPLLIEGKAIQLHPLVCAAFNADFDGDQMAVHVPLTLEAQLEARALMMSTNNILSPANGEPIIVPSQDVVLGLYYMTRDKVNGKGEGMLLQDPREAEKAYRTGQVELHSRVKVRITEYVKNAVGEFEPQTNLVDTTIGRAILWMIAPKGMPFSLFNQTLGKKAISKLINESYRRLGMKPSVLFADQIMYTGFAYAARSGSSVGIDDMVIPAKKYEIISAAEDEVAEIQEQFQSGLVTAGERYNKVIDIWAAANERVAKAMMENLSTEEVINREGQPEKQASFNSIFMMADSGARGSAAQIRQLAGMRGLMARPDGSIIETPITANFREGLNVLQYFISTHGARKGLADTALKTANSGYLTRRLVDVAQDLVIIEDDCGTHEGIVMTPLIEGGDVKEALRDRVLGRVVAEDVLKPGTEEVLIARNTLLDEKLCDVIDSNSVDSIKVRSVVTCNTDFGVCAKCYGRDLARGHLINQGEAVGVIAAQSIGEPGTQLTMRTFHIGGAASAAAKESSIQVKNTGTLRLANVKFVTNNEGKLVLTSRNTELTIIDAFGRTKEHYKVPYGAILSKGDGQEVTAGETVANWDPHTMPVVSEVSGFVKFIDLIDGLTVTRQTDELTGLSSIVVQDVGERATAGKDLRPAIKLVDAKGNDILIPGTDVVAQYFLPGKAIVTLDDNAEVHIGEPLARIPQESVGTKDITGGLPRVADLFEARKPKEPAILAEISGIVSFGKETKGKRRLLITPAEGETYEEMIPKWRQLNVFEGEMVERGDLISDGAETPHDILRLRGVHAVTEYIVNEVQEVYRLQGVKINDKHIEVIVRQMLRKGIVTKAYDSEFLEGEQVEVARVKIVNRKREAEGKPLVEFERELLGITKASLATESFISAASFQETTRVLTEAAVAGKRDELRGLKENVIVGRLIPAGTGFAYHQNRQKKVVMSDEMPVKLSAADEEEIAAEFTVTAEDATASLAEMLNMADDAE

SEQ ID NO: 67391 - protein, 1342 aa, Pasteurella multocida
MVYSYTEKKRIRKDFGKRPQVLNVPYLLTIQLDSFDKFIQRDPEGQQGLEAAFRSVFPIVSNNGNTELQYVSYQLGEPVFDVRECQIRGTTYAAPLRVKLRLVSYDKDAAPGTIKDIKEQEVYMGEIPLMTDNGTFVINGTERVIVSQLHRSPGVFFDSDKGKTHSSGKVLYNARIIPYRGSWLDFEFDPKDNLYARIDRRRKLPATIILRALNYTTEQILDIFFDKVVFEISNNKLLMTLVPERLRGETATFDIEANGKVYVERGRRITARHIRALEKDQITQVEVPTEYIVGKVAAKDYVDLESGEIVCPANMEISLEMLAKLAQAGYKTIETLFTNDLDYGPYISETLRVDPSNDRLSALVEIYRMMRPGEPPTKEAAEGLFDNLFFSSDRYDLSAVGRMKFNRSLGIDEETGSGILSNDDIIGVMKKLIEIRNGRGEVDDIDHLGNRRIRSVGEMAENQFRIGLVRVERAVKERLSLGDLDAVTPQDLINAKPISAAVKEFFGSSQLSQFMDQNNPLSEVTHKRRISALGPGGLTRERAGFEVRDVHATHYGRVCPIETPEGPNIGLINSLSVYARTNDYGFLETPYRKVVNGQVTEEIEYLSAIEEGKYVIAQANSNLDEELRFTDAFVTCRGEHGESGLYRPDEIHYMDVSTQQVVSVAAALIPFLEHDDANRALMGANMQRQAVPTLRADKPLVGTGIEKAVAVDSGVTVIAKRGGMVQYVDASRIVVKVNEDETIPGEAGIDIYNLVKYTRSNQNTCINQIPCVSLGEPIGRGEVLADGPSTDLGELALGQNMRVAFMPWNGYNFEDSMLVSERVVQEDRFTTIHIQELSCVARDTKLGSEEITADIPNVGEAALSKLDESGIVYIGAEVKGGDILVGKVTPKGETQLTPEEKLLRAIFGEKASDVKDSSLRVPNSVSGTVIDVQVFTRDGVEKDKRALEIEEMQLKQAKKDLVEELEILEAGLFTRVRSLLIAGGFDAKNLDKLDRTKWLEQSLSDEAQQNQLEQLAEQYEELRKEFERKLEVQRGKIIQGDDLAPGVLKVVKVYLAVKRQIQPGDKMAGRHGNKGVISKINPVEDMPYDENGQPVDIVLNPLGVPSRMNIGQILETHLGLAAKGIGDKINAMIKQQQDVAKLREYMQKAYDLGHGSQKVDLSTFSDEEVMRLAQNLRKGLPLATPVFDGAHESEIKGLLELGGLPTSGQITLFDGRTGEKFERPVTVGYMYMLKLNHLVDDKMHARSTGSYSLVTQQPLGGKAQFGGQRFGEMEVWALEAYGAAYTLQEMLTVKSDDVNGRTKMYKNIVGGTHQMDPGTPESFNVIMKEIRSLGINIDLDED

SEQ ID NO: 67392 - protein, 122 aa, Pasteurella multocida
MSLTNEQIIEAIASKSVTEIVELIAAMEEKFGVSAAAAAVAVAAGPAEAAEEKTEFDVVLAGAGANKVAVIKAVRGATGLGLKEAKDLVESAPAVLKEGISKAEAEALKKELEEAGAQVEVK

SEQ ID NO: 67393 - protein, 163 aa, Pasteurella multocida
MALNLQDKQAIVAEVNEAAKGALSAVIADSRGVTVDKMTELRKVARENGVSMRVVRNTLLRRAVEGTEFECLKDTFVGPTLIAFSTEHPGAAARLFKDFAKANDKFEIKGAAFEGKIQDVEFLATLPTYDEAIARLMGTMKEAAAGKLVRTLAALRDKLQEAA

SEQ ID NO: 67394 - protein, 229 aa, Pasteurella multocida
MAKLTKKMKSIKAAVDSTKAYEINEAIAVLKQFATAKFVESVDVAVNLGIDPRKSDQNVRGATVLPHGTGRSVRVAVFTQGANAEAAKEAGADLVGMEDLAELVKKGEMNFDVVIASPDAMRVVGQLGQILGPRGLMPNPKVGTVTPNVADAVKNAKSGQVRYRNDKNGIIHTTIGKVNFSEEQLKENLQALLAALAKAKPTTSKGVFIKKVSLSTTMGAGVAIDQASL

SEQ ID NO: 67395 - protein, 142 aa, Pasteurella multocida
MAKKVQAYVKLQVAAGMANPSPPVGPALGQQGVNIMEFCKAFNARTESLEKGLPIPVVITVYADRSFTFITKTPPAAVLLKKAAGIKSGSGKPNKDKVGKVTLEQVRQIAETKAADMTGSSIETKMKSIAGTARSMGLVVEE

SEQ ID NO: 67396 - protein, 183 aa, Pasteurella multocida
MTETTTKKRWYVLQAFSGFEGRVATTLREYIKLHQMEDQFGEVLVPTEEVVENVAGKRRKSERKFFPGYVLVQMEMNDETWHLVRSVPRVMGFIGGTADKPAPISQREADRILNRLQESSEKPRHRKEFQPGEEVRVTEGPFADFNGTVEEVDYEKGRLKVSVSIFGRATPVELEFSQVEKTN

SEQ ID NO: 67397 - protein, 136 aa, Pasteurella multocida
MALEIEKKKNAHEVENQKSKGLNRFLWLLVIVVIATAALGNIYFVEQFSTPIRVVGVVVLLLIALGLAALTNQGVKARHFFSESRIELRKIVWPTRPEAMQTTLIVAGVTIVVSLILWGLDSVIVALITFLTDLRF

SEQ ID NO: 67398 - protein, 394 aa, Pasteurella multocida
MSKEKFERTKPHVNVGTIGHVDHGKTTLTAAITTVLAKHYGGAARAFDQIDNAPEEKARGITINTSHVEYDTPTRHYAHVDCPGHADYVKNMITGAAQMDGAILVVAATDGPMPQTREHILLGRQIGVAYIIVFLNKCDMVDDEELLELVEMEVRELFSQYDFPGDDTPIVRGSALQALNGVAEWEEKILELANHLDTYIPEPQRAIDQPFLLPIEDVFSISGRGTVVTGRVERGIIRTGEEVEIVGIKATTKTTVTGVEMFRKLLDEGRAGENVGALLRGTKREEIERGQVLAKPGSITPHTDFESEVYVLSKEEGGRHTPFFKGYRPQFYFRTTDVTGTIELPEGVEMVMPGDNIKMTVSLIHPIAMDQGLRFAIREGGRTVGAGVVAKIIK

SEQ ID NO: 67399 - protein, 176 aa, Pasteurella multocida
MTTIVSVRRNGQVVVGGDGQVSLGNTVMKGNARKVRRLYNGKVLAGFAGGTADAFTLFELFERKLEMHQGHLLKSAVELAKDWRTDRALRKLEAMLIVADEKESLIITGIGDVVQPEADQILAIGSGGNFALSAARALVENTELSAREIVEKSLKIAGDICVYTNTHFTIEELPNS

SEQ ID NO: 67400 - protein, 450 aa, Pasteurella multocida
MLQGIFQIMSAAGSVVFANLALLLCIGLGIGLAKRDKGVAALAAVVGYLIMTGTINALISIFSPEVKGIDTGVIGSLVMGLLTVKLHNRYHNIQLPQILGFFGGSRFVPIVTAFAAIFVGFLFFLIWPTFQGWLVSAGEGIASMGAIGTFFYGFLMRLSGAVGLHHMIYPLFWYTELGGTEIVNGETIIGAQKIFFAQLADPNHQGLFTEGTRFFAGRFDTMMFGLPAACLAMYHCVPKARRGLIGGLFLGAALTSFITGITEPIEFMFLFVAPWLYVFHAFLDGVSFFIADFLNISIGNTFSGGFIDFLLFGILQGNENTNWILVVVVGVFWAMLYYFSFRFLITKFDVMTPGRAEEQEEVVESTNSSLTENAHHIIEALGKAENIEHVDACITRLRVNVKDVKAVDKARLKALGAIDVLEVGGGIQAIFGAKAVLYKSEVNQILGKED

SEQ ID NO: 67401 - protein, 843 aa, Pasteurella multocida
MIYLIFPTSFWLFNRIDVSMSVYSITIGGYVMDKLLVNSRLTRRSLLQRTSIGAALAATNLSLPFKAVANEKKATSSSTENLQEKVVWSACTVNCGSRCPLRMHVKDNKIIYVETDNTGTDTYNVDHQVRACLRGRSMRRRVYNPDRLKYPMKRVGKRGEGKFKRISWDEALNEIATSLRKNIAQYGNESIYLNYGTGTLGGTMTKSWPPGSTMLARFMNCLGGYLNHYGDYSTAQIAVGLDYTYGGGWALGNGLADIENTKLVVLFGNNPAETRMSGGGLTYCIEQARQKSNAKMIIIDPRYTDTAAGREDEWIPIRPGTDAALVSALAYVMITEDLVDQAFLDTYCVGYDEKTLPEGAPKNGHYKAYILGEGDDGIVKTPEWAAKITGIPEQRIIKLAREIAGTKPAYISQGWGPQRRSNGELISRAIAMLPILTGNVGINGGNTGARESTYKVPFVRMPTLTNPVKASIPMFLWTDAIFRAHEMTALTDGIRGVEKLTAPIKVIWNYASNCLINQHSDINRTHEILQDETQCELIITIDNHMTSTAKYSDILLPDCTASEQMDFCTDAFVANMNYVIFADQVIPPSFECRNIYDMLTDLAEKMGVKQAFTEGRTQEEWLRHIYQQSRENLPELPTFEEFRQQGIFKKVDPNGFYVAYKAFREDPQANPLKTPSGKIEIYSERLAEIAKTWSLKDDEVIHPLPVHADSFEHYGDKLMEKYPLQMTGFHYKARTHSTYGNVDVIKAATPQEVWINPIDAQARNIKNGDMIRIFNDRGEVQIHAKVTPRIIPGVVALSEGAWYAPDSQGVDHSGCVNVLTTQRPSPLAKGNPQHSNLVQVAKV

SEQ ID NO: 67402 - protein, 367 aa, Pasteurella multocida
MMKYGVVGVGYFGADLARFMNENENAKVTMVYDPENGETIAKELQCIAATSLKQLVSSPEVDCVIVATPNYLHKEPVIEAAKHGKHVFCEKPIALNYQDCDEMVRTCEENGVIFMAGHVMNFFNGVHHAKELIKQGVIGKVLYCHSARNGWEDEQPSISWKKIRAKSGGHLYHHIHELDCIQFIMGGMPKTVTMTAGNVAHQSEKFGDEDDMLFLNLEFEGGRFAVLEWGSAFRWGEHYVLIQGEKGAIKLDMYHCKGTLRVDGKDSHFLIHETQEEDDDRTRIYTSTEMDGAIQYGKPGKRTPMWLSSIMKKEMKYLNDILHGMKPTEEFEKLLTGEAARAAIATADACTKSRYENRKVEVAEITG

SEQ ID NO: 67403 - protein, 235 aa, Pasteurella multocida
MDKLTKKAASLALQEKIKTLIIRRKMKSGDLMPTENELIDLFGVSRSSLREAIKSLEALHILDIHHGIGTFVGTSSLIPMIRGLTFYAQLHLQDNLKSILDILDVREILQYGFAPIALQKINAEEVLQLQSLVRLLEENAQQGRFSIKEEQQIHLLMYQSVQNHLLTQYLDAFWQIYQQLDAELPAILISPTDLAMQYREWVDAIEARDLERVQRAVLYYFQAIRQRLTQGKAHE

SEQ ID NO: 67404 - protein, 359 aa, Pasteurella multocida
MSNIKIALIGCGFFGQQLALGFTKAGADLLGVTDLSMEFAERLAAKFNTKAYSDMETLFHEVTPDLVLIATPNYAHKVPALTALKHGCHIFIETPFSIHQTDCSEILTLAKQKKKSVFIGHLLRTLPGLLKAKELMMQNVLGKITVARASRQRWIDAFQDKNWWKNDVNLTGGKLFNEIHELDLLCWLLGDVSSVYAQATNRAHTDTPDNHDIIQLLLQFESGVFASLEMGTAYRLHEWGITIHGELGALMVNFFTSTMTLSFADGTRQQFNLYDEFEADLSLRESGKATQKYNLPTALSPLWLTRAVEIEADMVVKHLLGVTEHCILSQATTKAIAVACAAKKSIETQQRVELDTASM

SEQ ID NO: 67405 - protein, 310 aa, Pasteurella multocida
MKKIILDCDPGHDDAIAILLAHGNPEIDLLAITTVVGNQTLEKVSRNALAVAEIANILNVPIAKGCVRPLVREVEVAPSIHGESGMDGPVLPEPTLSLDSRHAVDLIIELVMTHPPKTITLVPTGGLTNIAMAVRKEPRIVERVKEIVLMGGGYHTGNWSAVAEFNIKIDPEAAHIVFNEKWSLTMVGLDLTHQALATEDVIKNIEKIQTKPAKFVLELLAFFRKMYKQAQNFDYPPVHDPCAVAYVIDPTVCTTKVVPINIELTGTHTLGMTVADFRYPIPENCHTQVAMQLDKAKFWGLIYDALQRIG

SEQ ID NO: 67406 - protein, 380 aa, Pasteurella multocida
MMENQEFLSLDEAVLLSNKFNLNFSKEDILYLSSLDHFKAYNNIQYVYMGDVQKPVYKIHGLKGFFKTRLETKSRLLLQELDIIRTNDSYVIDKKKEQGFSRDIWTIKERNNLKSVLYLHLSNRYDDLYFIDYGFASVTLPIYEERVKKHDIVKGMVESTMLSNIAIRNKPQNAKLFVSFLSKSLTNHYVPNSSFDIFEFNIAGIIDYPFSLEPYILSYKEKEDDDLLELYNEYNFDEIFYFKHTDLLEYFQKIIDKEEKIQKSYQYQTELITELQGRIAELEKENQSLKENVKEPETSKPIRPDEKETLLKLIYALAMGRTDKDFSASAYFNKKGVLKVSTMINEIVADLEQVGIMNFSDGTLRKRLSEILQMGELKAD

SEQ ID NO: 67407 - protein, 84 aa, Pasteurella multocida
MTQYNKLRIEWDCRRGMLELDNVIMPFYRQHFDALSDTQKDTFIRLLACSDLQLFSWFFNRGMATDPQLQQMVDYIQKTLKLTD

SEQ ID NO: 67408 - protein, 388 aa, Pasteurella multocida
MNIFLTQKEDIGNAKVFLLHQVITAAAHQQGHQITTLDEADLVIVFGEAIHNPQFVGKKCVIVDAEEAFNAPENTLTKAFAEATPYVLNEHAESVTPSFSTPYNVNRLIAITACPTGVTQTFMAAEAIMNYAKQQGWDVKVETRGQIGVKDILTEADIAEADLVLVATDVETDLSKFEGKMLYRTSTRAVLNNTESTFQQALTQATVYHAPKEDDVGIITPPPRDYHNDFATCDATKKIVAVTACPTGVTQTFMSAEAIMLYAKTQGWCVKVETHGQMGADNLITAEEVAAADLVFAATDIEIDLSKFEGKPLYRTSTHATLKNIAQEFDKAFMQATPYTHTKQEASKNACCSTSTTSECCQLKCGIARWLPLILLAALIIALVAYFK

SEQ ID NO: 67409 - protein, 311 aa, Pasteurella multocida
MTKVLTITLNSAYDLVGHLPHLTRGAVNQVDSLGLYPAGKGINVGKVLHDLGVNVALTGFLGQENQTGFQQLFSRLGLTDHFHRITGATRINVKLTESDGVVTDLNFQGYHVSKTDWQTFVDFSLQQCQTFDVIAVCGSLPRGISVDDFTAWLSQLNKNNIKLILDTSQQAFASGIQAKPWLVKPNRDELASWYGSPLATQQDIIRAATLLQRQGIPHVVVSMGEEGAIWLNENTVLHAQPPQDTPIVSTVGAGDTMVAGLIYGMLNAYSAEKTLAFATALSSLAVSQSNVGITDLTLLNPILEKIKITFI

SEQ ID NO: 67410 - protein, 197 aa, Pasteurella multocida
MCKRLANIDFHSIINDQCTGLNKELIMLKSLSLISLITLLSACSMSSYVPFMNDKKAVIDLDKTQIDQKSYATAYEATLATYKGRVNQDYDVHSFSSGANDWYLNRILLPIDKIKENLYQGGHDSNIHAYYSGVVFASALQSNFNKLNPNCWSYLDAPSVTQGIYDAMKDLQKGKQRAEDDPYIVQGSEQLLKRCAQ

SEQ ID NO: 67411 - protein, 458 aa, Pasteurella multocida
MKEKALSIVILAAGKGTRMYSDLPKVLHKIAGKPMVKHVIDTVKSIHAKNIHLVYGHGGEVMQTRLQDEPVNWVLQAEQLGTGHAMQQAAPFFADDENILMLYGDGPLITAETLQTLIAAKPEHGIALLTVVLDDPTGYGRIVRENGNVVAIVEQKDANAEQLKIQEINTGLLVADGKSLKKWLSQLTNNNAQGEYYITDVIALANQDGCQVVAVQASDFMEVEGVNNRQQLARLERYYQRKQADNLLLAGVALADPERFDLRGELSHGKDVEIDVNVIIEGKVSLGHRVKIGAGCVLKNCQIGDDVEIKPYSVLEEAIVGQAAQIGPFSRLRPGTALADNTHIGNFVEIKKAHIGTGSKVNHLSYVGDAEVGMQCNIGAGVITCNYDGANKFKTIIGDNVFVGSDVQLVAPVTIETGATIGAGTTVTKDVACDELVISRVPQRHIQGWQRPTKQTKK

SEQ ID NO: 67412 - protein, 1300 aa, Pasteurella multocida
MTEHIAAQPASPEQQNQTPPVKRPKSFWHKLLCGLSAVIFLSILAFFITLSTSAGQRWLIELLDKALPQLSIAQVNGGLQEGLVLNQVRFDAEGVQTQLEQVRLQLDLSCLWRLHICVKEIALHQPHIQVNTALLPPKAKEKPTSAPMQRIHLPISVDVDNVVVEQLRLVIDDNAVDLAHFQTAASLNNESGLTIAPTTIQALLVKVVPPTAAVKEPSQTEKAPIDWVQIEKQLSAPLLAKLENIVLPFDMHIQHIQGQHWQYQQVNAQHTQVIDIPVFQLQANATGAQIELSQFNVESNLANLHGSGHLQLNADFPLHVALHAEMHALNEGEAILLPASQVDVTLSGNLKKQTALTLQSRGALNANLNGQFALSQEKTPFQIKLSSQDFRYPFQPVQPALVHIPQLNLQVSGNLLDYQLQLNTEAEGANIPKTALQFDAKGELLSLDITQLHLDTLKGSADLQGKIGWQNGVQWYSNLQLDKLNLSDYLAGLPTILSGQLFSTGLINQQQWLFDIPHLNLEGTLSQRPLALKGSLSVGSETWLHQLLLKVPDLVLTYGENKIVATGFLGEKSDLKLDINAPDLRGLMPNLSANLQGHLQLNGQLVQPTVALDLVGNQIKLNDLNINKVTLKGHVDMAKQTAGELALQVNKFQSGDVKLDTLDLTLHGNEAQHNLTLVSQGEPVAPKLSLEGQFDRATQRWQGALKQVSIASVIGHWHTDKNVVLAYDNSTMQTEISAHCWQNNDVELCFPQAFRVGKSGEVPFKITKFDLALVNDLLEQDLLQGQLQSEGKVAWFSDKPLQLNVQVKGDNLSFTQKIDYRTFGLDIPKLTLNADLQNNHFVLNSNLLLQDQGNISANLEVKDLAQARQLGGNLIIHKLNLDIFNQLLSNNEVITGDIVANLKFAGTLNAPNLNGQFKLSRLNAKMKSLPFDIEGGELALNFAGNRSTLNGHIKTPDSRLNLEGDASWQNLDNWRSRLHAKADQFKVDIPAMAKLKISPNVEITASPKRLQLTGNIDIPWARIEIESLPESAVSVSPDEVILDNQTSQKITAKLPSKTKSGMEILSDLKINIGQDVYLNAYGLKTNLNGLLSVRQEKGNLGLFGQIHLTNGRYASFGQDLLIRKGMISFSGQPSQPMLNIEAIRNPESMDTAGVVAGIKVLGLAESPEIKVFSEPGMSQDQALSYVLTGRSLENSGEAGSGGSIGAALLGLGLAKSGKAVGGIGQAFGIQDLNLGTQGVGDSSKVVVSGNITPRLQVKYGVGLFDGLAEFTVRYRLIPKLYLQSVSGVTQAVDLLYQFEF

SEQ ID NO: 67413 - protein, 312 aa, Pasteurella multocida
MVVMMTRKSLRIATRQSPLALWQANYVKACLEKIHAGLVVELVPMVTKGDVILDTPLAKIGGKGLFVKELEQALLKGEADIAVHSMKDVPMQFPAGLMLSTICQREDPRDAFVSNSYRTLMELPAGAVVGTSSLRRQCQLKQLRPDLHIHSLRGNVGTRLAKLDNGDYDAIILAAAGLIRLGQQQRITSLIDVTQCLPAVGQGAVGIECRQEAEIELLLAPLADPETTACVLAERAMNRHLQGGCQVPIAGYAIIEEGQLFLRALVGEVDGSSILRAEGRSAVADAETLGIQVAEKLLQQGADKILQTLYSN

SEQ ID NO: 67414 - protein, 125 aa, Pasteurella multocida
MQEKGFSEQEIDDTLAFCQQKNWQNDRRFAENYLTFRAQRGYGFARIKQELQQLKGISSALISEAEQTLAPDWQHHALTVLRKKFPQYAEITDLKLKQKVWRYMLSHGFKPEQFAHYVGHTEYEE

SEQ ID NO: 67415 - protein, 354 aa, Pasteurella multocida
MATKEEKNKALAAALGQIEKQFGKGSIMKLGDTQALDVEAVSTGSLSLDVALGIGGLPMGRIVEIFGPESSGKTTLTLSVIAQAQKEGKTCAFIDAEHALDPIYAAKLGVNVNELLVSQPDNGEQALEICDALVRSGAVDVIIVDSVAALTPKAEIEGEMGDSHMGLQARLMSQALRKLTGQIKNSNCLVVFINQIRMKIGVMFGNPETTTGGNALKFYASVRLDIRRTGAIKEGEEVIGNETRVKVVKNKVAAPFRQVDFQILYGQGISKTGELIELGVKHKLVDKAGAWYAYNGEKIGQGKANAMKWLEEHPEEALALETKLRNELLANPEKVLAADIAEKNESSTGLEADY

SEQ ID NO: 67416 - protein, 860 aa, Pasteurella multocida
MDNLDLHTPMMRQYLALKAENPDILLFYRMGDFYELFYDDAKKAAALLDISLTKRGQSAGQPIPMAGVPYHAVEGYLAKLVQLGESVAICEQVGDPATSKGPVERQVVRIVTPGTVSDESLLPERQDNLIATVYQEKDRFGLAVLDITSGRFQISEPEDRASLQAELQRISPVELLYCEDFVDMALLEPFKGLRRRPIWEFELGTAIQLLNRQFHTKDLRGFGVEKAILGLCAAGCLLQYAKDTQRTALPHIQSLTLLQHSEHIQLDAATRRNLELTQNLAGGSENTLASVLDKCVTPMGSRLLKRWMHQPIRQHEKLMVRQNRITALLQQDLVAAIQPYLQQIGDMERILARVALRSARPRDLTRLRTALEQIPYLRDILAQQTSSDLTALLQPIGEFSAQLDLLQRAIIDNPPMLIRDGGVIAEGYNAELDEWRSLSDGATRYLEELEQRERESTGIDTLKIGFNAVHGYYIQISQGQAHKAPMHYVRRQTLKNAERYIIPELKTYEDKVLKAKGAALALEKQLYEQLFDELLPHLGALQLASLTLAELDVLTNLAERAETLNYVAPQFSDDIGVHIQQGRHPVVEQVLNAPFIANPVELHPQRHLLIITGPNMGGKSTYMRQTALITLMAYMGSFVPAESAVIGPIDRIFTRIGASDDLASGRSTFMVEMTEMANILHQATANSLVLIDEIGRGTSTYDGLSLAWACAEWLAKKLRSLTLFATHYFELTVLPEQLAGSANVHLDAIEHNDTIAFMHAVQEGAASKSYGLAVAALAGVPQSVIKLAKQKLAQLEKLSQQNADQRIQDLRQLNQTQGELALMEEDDSKTAVWEMLEKLDPDELSPKQALAYLYQLKKLV

SEQ ID NO: 67417 - protein, 321 aa, Pasteurella multocida
MKICLVKTSSMGDILHSLPALTDAQRALPNLQVDWVVEESFAEIPHWHSAVRQVIPIALRRWRKTPFTALTRKQWKTYRTLLQSEQYDAVIDAQGLLKSALFATRLARGTRHGYDRHSIREPIAACFYDKKYAISYQQHAVERIRQLFAQSLNYPLPHTQGDYGIARHFPQHAQTMPYVLFFHGTTRQDKFLPDRQWRTLAEKLTAQGIQIHVPWSNSQEKQRAERIAQGLDLVTILPKSTLSELAQQIVNASAVVSVDTGLAHLSAALDKTNLTLYGATDPKLIGSYGKNQHYLVAESMDKIEADEIFQKLTALLSLNTI

SEQ ID NO: 67418 - protein, 455 aa, Pasteurella multocida
MQLNALTALSPIDGRYQDKVSSLRSIFSEFGLLKFRVTVEVRWLQKLAATDQIQEVSLLSQEANDYLNHIVENFSVQDAERIKEIERTTNHDVKAVEYFLKEKSEALPELAKISEFIHFACTSEDINNLSHALMLKTAREEVILPEWQNLIADISALANEYKTIPLLSRTHGQPASPSTIGKEMANVVYRLQRQFKQLQQIDILGKINGAVGNYNAHLSAYPDIDWHQFSEEFVTSLGLTWNPYTTQIEPHDYIAEFFDNVARFNTIIIDFDRDLWGYIALNHFKQRTIAGEIGSSTMPHKVNPIDFENSEGNLGLANAVMAHLGAKLPVSRWQRDLTDSTVLRNLGVGLGYCLIAYAATRKGISKLEVNEQHLRDELDQNWEVLAEPIQTVMRRYGIEKPYEKLKALTRGKRVDAEAMREFIETLDIPAQEKIRLQQMTPATYIGAAVELVEKL

SEQ ID NO: 67419 - protein, 239 aa, Pasteurella multocida
MNVNFYVTCIGDALKSNVAKQSVLLLEQLGCKITFLEQQGCCGQPALNSGYVLSAIPGMKKLIETFEVNDYPIVAPAGSCVYAIKTYAEYLKEEPEWAARAQKVADRFYDLTDFIVNQLKVVNVGAKLAGNAVYHPSCSLFRKLGVKEEPVKLLQQVEGLNLLPIHNQETCCGFGGTFSVKMAEISGEMVKEKVQHIMAVKPLYLIGADVSCLLNIGGRLKREGHHVKVMHIAEVLMSR

SEQ ID NO: 67420 - protein, 86 aa, Pasteurella multocida
MALLITDKCTNCDMCEPECPNQAISMGEEIYVIDPALCTECVGHYDIPTCQKVCPINHCIITDPDHIETNEQLWERFVLIHHADKL

SEQ ID NO: 67421 - protein, 387 aa, Pasteurella multocida
MSVIKMTDLDLSGKRVFIRADLNVPVKDGKVTSDARIRATIPTLKLALEKGAKVMVTSHLGRPTEGEFDEANSLKPVVDYLNANLDVPVRLVRDYLDGVDVNQGEIVVLENVRINKGEKKNDPELGKKYAALCDVFVMDAFGTAHRAQASTYGVAEYAPVACAGPLLAAELDALGKALKEPARPMVAIVGGSKVSTKLEVLNSLSKIADQIIVGGGIANTFIAAAGHNVGKSLYEEDLIPVAKNLAASTDIPVPVDVRVGLEFSETAAATEKAVNEVKDDESIFDIGDKSAEQLAEIIKNAKTILWNGPVGVFEFPNFRKGTEIISHAIANSEGFSIAGGGDTLAAIDLFGIKDKISYISTGGGAFLEFVEGKVLPAVEILEKRANG

SEQ ID NO: 67422 - protein, 257 aa, Pasteurella multocida
MSLGLFSFVIGLHSFSRQQYRQMLWAIIATLFGILGSVLSTARGGWIGLPLLLCFALFAYRQYLSKKILFFVSLFFVFLLAAVAFAPKTKLISRVTEAYTETQQYFDAQAEQSTSIGARFALWKSALLMAKEKPLLGWGNAGAMEKRQVQQQEGMISEYAANFTHAHNQYLDNLSKYGLVGLVALLAIFSVPFCYFYRKRHAIKGEEKLVATLGMLHIISVMCYSLTQAFLNHNSGNIFYFLSVFIFYGCLKHSEKE

SEQ ID NO: 67423 - protein, 118 aa, Pasteurella multocida
MYKTTGLTHLIKATGYSLKGLKSAVKFETAFRHELLAALFLVPLAFWLGENGIEIALMLGSLLLVLAFELINSAIEAVVDRISLDHHELSGRAKDFGSASVFIAMVNVVVVWALVLFY

SEQ ID NO: 67424 - protein, 739 aa, Pasteurella multocida
MVAVRGSHLLNPKDFVIETWCASLEVSPEVRENLVNAWYYSQKYIPQHHDASSCSLHSGVEMVEILHSLNMDADSLLTAMLYPTIHHKLVELSQINEDFGANIYKLAKGVMEMDNIRQLNASQSANNAQVDNIRRMLLAMVDDFRCVIIKLAERITFLRDAEQTCSEEDKVLAAKECANIYAPLANRLGIGQLKWELEDYCFRYLHPEQYRSIANLLKERRLDREQYIADFVSEVSDYLRHNIDKVDVYGRPKHIYSIWRKMQKKHLEFSDLYDVRAVRIIVPKLQDCYTALGIVHTHFKHIPKEFDDYVANPKPNGYQSIHTVVLGKGGKPVEVQIRTQQMHDDAELGVAAHWKYKEGATGGRSGYEEKITWLRKLLAWQDDITDSGEIMAEMRSQVFDDRVYVFTPKGEVIDLPTGSTPLDFAYAIHSEIGHRCIGAKVSGRIVPFTYQLQMGDQIDIITQKNANPSRDWLNPNLGFTHTAKARAKIHAWFKKQDREKNIPAGKEMLENELTRLNIGLKQIEPHALARYNLKNLEDLYAGIGGGDIRLNHLINFLQNKLIKTTAQEVDEEILRHVANKSAANNQQKEKPRGYVIVEGVGNLMHHIARCCQPIPGDHIMGYITMGRGISIHRSDCEQFLELQQAHPERVVESIWGDNYASGFKISIRIIASDRSGLLRDITTVLANDKISVLGVSSRTDTKKQLATIDMEIELNNVQILSKILARLSKLDDVIEAKRL

SEQ ID NO: 67425 - protein, 244 aa, Pasteurella multocida
MRIPRIYHPVLLQGVKHCELSEDAANHVGRVLRMQAGDKLVLFDGSNHVYDAQITQISKKHVEVDILQHQWDDRESPLKIHLGQVISRGERMEFTIQKSVELGVHVITPLWSERCGVKLDADRLEKKIQQWQKIAVAACEQCGRNVVPEIRPMMKLQDWCAEKDGALKLNLHPRAQYSIRTLPDIPAAGVRLLIGSEGGLSAQEIAQTEQQDFIEVLLGKRVLRTETASLAAITALQICFGDLG

SEQ ID NO: 67426 - protein, 433 aa, Pasteurella multocida
MAKIVKVIGREIIDSRGNPTVEAEVHLEGGFVGLAAAPSGASTGSREALELRDGDKARFLGKGVLKAVAAVNNEIAQALVGKDATNQAEIDQIMIDLDGTENKSKFGANAILAVSLANAKAAAAAKGMPLFAWIAELNGTPGQYSMPLPMMNIINGGEHADNNVDIQEFMIQPVGAKTLKEALRIGAEVFHNLAKVLKGKGLSTAVGDEGGFAPNLESNAAALACIKEAVEKAGYVLGKDVTLAMDCASSEFYNKENGMYEMKGEGKSFTSQEFTHYLEELCKEYPIVSIEDGQDESDWEGFAYQTKVLGDKVQLVGDDLFVTNTKILKEGIEKGIANSILIKFNQIGSLTETLAAIKMAKDAGYTAVISHRSGETEDATIADLAVGTAAGQIKTGSMSRSDRIAKYNQLIRIEEALGDKAPFLGLKAVKGQA

SEQ ID NO: 67427 - protein, 542 aa, Pasteurella multocida
MATNYIFVTGGVVSSLGKGIAAASLAAILEARGLKVTMLKLDPYINVDPGTMSPTQHGEVFVTQDGAETDLDLGHYERFIRTKMTKRNNFTTGKIYSEVLRKERRGDYLGATIQVIPHITNEIKSRVIDGAAGHDVAIVEVGGTVGDIESLPFLEALRQLAVQVGRERTLFMHLTLVPYIPTAGEVKTKPTQHSVKELLSIGIQPDVLICRSDRMVPPNERAKIALFCNVPERAVISLKDVSSIYQIPALLKSQGLDDFICQRFHLDCPEADLSEWEQVLYQEANPTGEVVIGMVGKYTELPDAYKSVNEALKHAGLKNRLSVQIKYIDSQDVETKGTEVLEGVDGILVPGGFGNRGVEGKILTAKYARENHIPYLGICLGMQVAYIEYARNVAGLTDANSTEFDRTCDYPVVGLITEWQDAEGNIETRTDASDLGGTMRLGAQQCHLMEGSKARELYGAETIEERHRHRYEVNNVLRPQVEKAGLKVTGLSADKKLVEIIEVPNHPWFVACQFHPEFTSTPRDGHPLFAGFVKAAKDNQKK

SEQ ID NO: 67428 - protein, 294 aa, Pasteurella multocida
MTYSLLTETQAHVVCDLQQYTLLEIQGEDAEKYLQGQLTCDVNKLAVGESTLAAHCDAKGKINSLFRLIRTAPQTFYLLVKKGLLPTALDQLKKYAVFSKVTFTPCDWQIIGLAGEKIINACDEIDAQIRVTLSSQQPRVILIHPTALDLQANASHVVWDLLDIQDGIPLLSPETQAEFIPQALNLQCLEHAISFQKGCYIGQEIVARAKYRGANKRAMFTFVAQSQEMPNIKSEVEMQLENHWRKTGNIISAVNFEGTLWLQVVLNNQLEEDVQFRLSEHTALTRFPLPYTLS

SEQ ID NO: 67429 - protein, 287 aa, Pasteurella multocida
MIYSMTAFARLEIKQDWGDAVWEIRSVNQRYLETFFRLPEQFRGLENTLREKLRQKLTRGKIECTLRIDNKKQAATEIHLNKAFALQVIQSLQWIKQQAGEGEIHLNDVLRYPGVVEVPEQDLDLISQQLLSAFDSLLTEFIAMRAREGEKLNTLLQQRLDAVEVEANKVRSKMPEILQWQRDRLLQRFDEIQLQVDPQRVEQEMVLLAQRVDVAEELDRLQLHVKETKAILQKGGAVGRKLDFMMQELNRESNTLASKSISTEVTNSAVELKVLIEQMREQIQNLE

SEQ ID NO: 67430 - protein, 214 aa, Pasteurella multocida
MEAYKSEFIQFALSRQVLKFGEFTLKSGRISPYFFNAGLFNTGADLARLGEFYAKAIQASGVEYDVIFGPAYKGLPIATTVSVALFNHFQIDKPVCFNRKEAKDHGEGGQLIGYGLSGKILLVDDVITAGTAIRESMTLIAQNQAELSAVMIALNRQEKGKGELSAIQEVERDYQCQVLSIVNFDDLMTFIEQAPEYQQYLPAMRAYREQYGVK

SEQ ID NO: 67431 - protein, 233 aa, Pasteurella multocida
MPKILLVDDDVELIELLAELLTLEGFEIDMANNGLQALQKLDLSYDLVLLDIMMPVLNGVETLKKIRQEFSVPVIMLTARGDDIDRILGLELGADDYIPKPFNDRELVARIKAILRRTQPAATLNTEVKENRSEFVFCDITLYPGRQQAFHHDKDLELTGTEFALLQKLVLNPGQILSRESLSIEILGKQLTPFDRAIDMHMSNLRKKLPPRTDGSPWFKTLRGRGYLLVSEK

SEQ ID NO: 67432 - protein, 235 aa, Pasteurella multocida
MKNTFSIFNDQQTRRALILLSFFHILIIAASNYLVQIPFEITLPLSQLGTREDFSFHSTWGTLTFPFIFLATDLTVRIFGAKEARWIIFVVMIPALVISYVISTLFQDTQYQGLNALAHFNTFVFRIAVASFFAYVFGQLLDVLVFNRLRQLKTWWIAPSSSMIFGSMADTFLFFAIAFYASSDPFMAEHWAALGFVDYLFKLFVGIILFVPAYGVVLNFILRKIQALNAQPQVA

SEQ ID NO: 67433 - protein, 70 aa, Pasteurella multocida
MQTVTLNIEGMHCGGCVKTVERVLNGLDGVTQVDVNLEHACATIQYDTNRVSIAQLIDVVENAGFDVQPI

SEQ ID NO: 67434 - protein, 724 aa, Pasteurella multocida
MQQKITLHIQGMTCQACASRIEKVLNKKPYIQQAAVNFASEQAQVSFDNSEHSPQDILQLIENVGFTGSLQSEQAPPLVEPNLPSWRLWLLLLINLPFMFGMIGMLLGQHHWMLAPEWQFVLASIVQFGLAIPFYKSAWGSLKGGLANMDVLVSLGTLSIYFYSVFMLFTAYGHTHEGMPHVYFEASVMVLGFVSLGKFLEERTKKHSLNSLGLLVKLTPQQVNVQRDGQWQTLPLDQVQIGDLLRVKQGERIAADGIVQSGTGWSDESHLTGEFKPEMKKVGSQVLAGAMLSDGSLVYQAQQLGSQTLLGDMMNALSEAQGTKAPIARFADKVAAVFVPTVVVIALLTFAFTYWIKQDWVSALMHAVAVLVIACPCALGLATPAAIMVGMGNAVKHGIWFKDAAAMEESARVNTVVLDKTGTLTQGKPQIAACWLVENSPYTEQDVYRLAASVEQHASHPLAKAIVQHAQEKGIDLLHAEQIQTALGAGIQAEVEGIGRVKVGKADYCHFTLPALADPIWQLASIVAVAVNDQPIGAFAIADKLKPDSIEGIKRLQSAQIEVYIMSGDQQSAVQYLADHLGIKHAYGNLSPRDKANKIAQLQAEGNVVAMVGDGINDAPALARANVSFAMKNGADVAEHTASATLMQQSVNQMVDGLLLAQATLKNIKQNLFFAFIYNVLGIPIAAWGLLNPIIAGAAMALSSVSVLMNALRLKQVKFNRDMS

SEQ ID NO: 67435 - protein, 164 aa, Pasteurella multocida
MTFSLIVAMTKNHVIGKDNQMPWHLPADLAWFRQNTTGKPVIMGRKTFESIGRPLPKRTNLVLSRQPYLHEGVIWQNSLESAVDFVKDSPEILLIGGGELFKQYLHKADKLYLTEIQTELEGDTFFPEIVWQDWQIEYEAWHQADEKNPYDCRFLILSRNTKNE

SEQ ID NO: 67436 - protein, 386 aa, Pasteurella multocida
MINGKLASILCDKNKKIEKMKIDKTLVVKFGTSTLTQGSAKLNLPHMMDIVRQLAQLHQAGFRLVIVTSGAIAAGRHYLNHPQLPPTIASKQLLAAVGQSQLIQTWEKLFAIYDIHIGQILLTRADIEDRERFLNARDTLRALLDNQIIPVINENDAVATSEIKVGDNDNLSALVAILVQAEQLYLLTDQQGLFDRDPRKHPDAKLIADVDKITDHIRAIAGGSGTSLGTGGMSTKISAADVATRSGIETIIAPGNRPNVIVDLAYGQAIGTKFSVQADRLESRKQWLYAAPSAGIITIDAGAENAMLMQHKSLLPAGIVNVEGRFSRGEVVKIRTQQGKDVALGMPRYNSDALHLIQGKHSQDIEQVLGYEYGAVAVHRDDMIVL

SEQ ID NO: 67437 - protein, 468 aa, Pasteurella multocida
MKSRMLGDYNKLFRLCKYLREFTPVERAIHNRGETMNEQQLLECDRQHIWHPYAALNADFPLFVVERAEGVYIQLKNGQQLIDGMSSWWSAIHGYNHPRLNHAATQQLSQMSHVMFGGLTHQPAVELAQQLVNILPESLDKIFFADSGSVAVEVAMKMAVQYQHAKGETQRCKFATIRSGYHGDTWHAMSVCDPVTGMHSLFAKGLPVQYFLPQPPVKFGQAWQPEAMQPLQDLLAQHGDEIAGLILEPVVQGAGGMYFYSPEYLVQAKALCEQYGILLIFDEIATGFGRTGKLFACEHANVVPDVMCIGKALTGGYLTLSATITNQTVADVICSGEAKCFMHGPTFMANPLACAVAAESIKLLLASPWQQRIQQIEQQLRQELRQAEALDCVAEVRVLGAIGVIEMKAPVNMASLQPRFVQNGVWVRPFGKLVYLMPPYIISSDQLSQLIHGTIRTLQEEYAHKESL

SEQ ID NO: 67438 - protein, 387 aa, Pasteurella multocida
MIRYYQQQLADLKAQNQFRQLPQLIHRGRFIQREDNTMLNMSSNDYLGLANNEALRQAFFTQYQDQLPALTSSSSRLLTGSFPIYDELESLMAQAFGRETALLFNSGYHANIGILPALADKKTLIVADKLVHASMIDGIRLAQCEFVRFRHHDYAHLEQILQKNDRTFERIIVVTESVFSMDGDCADLTQLVALKQRYPQVMLYVDEAHAIGVLGEKGLGLAEQQGCINQIDILVGTFGKALGSMGAYVICDQVIRDYLVNKMRPLIFSTALPPFNVAWTHFVFQQLPHLQAERAHLAQLSQHLRQAIVDIFQVPMPSESCIVPYILGDNELTVRTAQRLQQQGYYCLPIRPPTVPKGTSRIRFSLTADMQVAEVEQFIACLQELAE

SEQ ID NO: 67439 - protein, 330 aa, Pasteurella multocida
MTTHNLLLDVQDLRVTFKTPDGDVTAVNDLTFSLNAGETLGIVGESGSGKSQTAFALMGLLADNGRISGSAKFNGQEILNLPETQLNRLRAEQIAMIFQDPMTSLNPYMKIGEQLMEVLMLHKGMDHKTAFEESVRMLDAVKMPESRKRMNMYPHEFSGGMRQRVMIAMALLCRPKLLIADEPTTALDVTVQAQIMTLLNELKSEFNTAIIMITHDLGVVAGICDNVLVMYAGRTMEYGTAEQIFYTPSHPYSIGLIGAVPRVDGQEEELITIPGNPPNLLRLPSGCPFQPRCVHATKQCLKAPALTLLNDQRLRACFVPAEQLIRGNAS

SEQ ID NO: 67440 - protein, 317 aa, Pasteurella multocida
MYSKILSTGSYLPKHIRTNADLEKMVDTSDEWISERTGIKERRIAEASETVATMGFEAAQNCLAVSPMDVNEIDLIVVATTSATHAFPSTACQIQKMLGIKDAIAFDVAAACSGFVYALTVADQFIRTGKVKKALVIGADLFSRALNPEDRGTIILFGDGAGAVILEASEQAGIISTHLHATGESAEVLTLANQARGIESDPAYLEMQGNATFKIAVRELANVVEETLEANQLDKKDIDWLVPHQANLRIISATAKKLDMDMSQVVVTLDRHGNTSAGSIPSALDEAVRDGRIQRGQLLLLEAFGGGLTWGSALVRF

SEQ ID NO: 67441 - protein, 312 aa, Pasteurella multocida
MKKFAMVFPGQGSQAVGMLAELATEYPVVEETFKQASDVLGYDLWQLVQQGPAEELNKTWQTQPALLAASVAIYRVWQEKYPHLKPDVMAGHSLGEYSALVCAGALDFQDAVKLVELRGKLMQQAVPEGTGAMYAIIGLDNEAIISACADAAQGEVVSAVNFNSPGQVVIAGAKAAVERAAAACKDAGAKRALPLAVSVPSHCALMKPAADQLAVSLDNIAIRTPTTAVINNVDVACETENSEIRHALVRQLYSPVRWTETVERMAKDGVQVLVEVGPNKVLTGLTKRIVADLQATAVNDLTSLNAVDELFA

SEQ ID NO: 67442 - protein, 242 aa, Pasteurella multocida
MQGKIALVTGATRGIGRAIAEELSAKGAFVIGTATSEKGAESISAYLGEKGKGLVLNVSDLASIETTLEKIKADFGEIDILVNNAGITRDNLLMRMKDEEWFDIMQTNLTSVYHLSKAMLRSMMKKRFGRIITIGSVVGSMGNPGQTNYCAAKAGLIGFSKALAKEVASRGITVNVVAPGFIATDMTDVLTEEQKAGILSQVPAGRLGDPKDIAKAVAFLASDDAGYITGTTLHVNGGMYTN

SEQ ID NO: 67443 - protein, 76 aa, Pasteurella multocida
MSIEERVKKIIVEQLGVKEDEVKPEASFVEDLGADSLDTVELVMALEEEFDIEIPDEEAEKITTVQSAIDYVQNNQ

SEQ ID NO: 67444 - protein, 420 aa, Pasteurella multocida
MHLTELKNRPVSELVELGEGQMGLENLARLRKQDIVFAILKQHAKSGEDIFGGGVLEILPDGFGFLRSADSSYLAGPDDIYVSPSQIRRFNLQTGDKIEGKIRPPKEGERYFALLKVDQVNDDRPEVSRSKILFENLTPLHANSRLRMERGNGSTEDLTARILDLASPIGKGQRGLIVAPPKAGKTMLLQNIAQSITYNYPECELIVLLIDERPEEVTEMQRSVKGEVIASTFDEPATRHVQVAEMVIEKAKRSVEHKKDVVILLDSITRLARAYNTVTPASGKILSGGVDANALHRPKRFFGAARNVEEGGSLTIIATALVDTGSKMDEVIFEEFKGTGNMELHLSRKIAEKRVFPAIDFNRSGTRKEDLLTSPDELQKMWILRKILHPMGEVEAMEFLIDKLMVAKTNDEFFEMMKRS

SEQ ID NO: 67445 - protein, 155 aa, Pasteurella multocida
MKIQLIAVGTKMPNWVTMGFEEYQRRFPKEMPFELIEIPAGKRGKNADIKRILEQEGKAMLAACGKSRIVTLDIPGKPWTTEQLATQLEVWKNDGRDLSLLIGGPEGLSAECKAAAEQSWSLSPLTLPHPLVRVVVAESLYRAWSVTMNHPYHRE

SEQ ID NO: 67446 - protein, 320 aa, Pasteurella multocida
MGTPFKMERGVKYRDAAKTSIIPVKNIDPNQELLKKPEWMKIKLPANSAKIDSIKNGMRRHGLHSVCEEASCPNLHECFNHGTATFMILGAICTRRCPFCDVAHGKPLPPDPEEPRKLAETIQDMKLRYVVITSVDRDDLPDRGAGHFAECVKEIRQLNPNIKIEILVPDFRGRIEQALDKLKDNPPDVFNHNLENVPRLYREIRPGADYQWSLKLLKDFKAMFPHIPTKSGLMVGLGETNEEILQVMQDLRDHGVTMLTLGQYLQPSRHHLPVARYVPPAEFDEFRDKAQAMGFEHAACGPFVRSSYHADLQAKGEIVK

SEQ ID NO: 67447 - protein, 236 aa, Pasteurella multocida
MSLFLLRWNGAMLKLDLGLRSSNLKKFYHLKIFLKILLLVVEICQRTITVQKGDFVVLGGATSSVGIATIQIAKMQGANVIALSRTHAKGDVLLQKGADFVIATKEDDVTAKLLEITNGKGVNLVFDPVGGKEAAKIINAMTQDGKYIIYGALSHDDIAVPVFPILGKHLTVRGYELFEITTVPEKLAQAKKFVFDGLASGQLKPEIDKVFAFDEMAEAHRYMESNAQIGKILVKV

SEQ ID NO: 67448 - protein, 147 aa, Pasteurella multocida
MLACIVFIGVIITRNFNISSMIEMFFNCPKPPFQIQKPTSHFSLFLSHSMKNLETRLNLRLFNRTTRNVSLTEAGQQFFEQLLPLYQAINQEVDALNDFLNTPSGLIRINAPAMAAEAVLYPKLKPILNQYPKTRLEIVVDDRWQIL

SEQ ID NO: 67449 - protein, 166 aa, Pasteurella multocida
MAGVNKVIIVGNLGNDPEIRTMPNGEAVANISVATSESWIDKNTNERREVTEWHRIVFYRRQAEVAGEYLRKGSKVYVEGRLKTRKWQDQNGQDRYTTEIQGDVLQMLDSRNERQQTGGYAPQTAAPQYNAPTGSYGAQPSRPATKPAPQNEPPMDMGFEEDNIPF

SEQ ID NO: 67450 - protein, 943 aa, Pasteurella multocida
MDKIEVRGARTHNLKNINLTIPRDKLIVITGLSGSGKSSLAFDTLYAEGQRRYVESLSAYARQFLSLMEKPDVDHIEGLSPAISIEQKSTSHNPRSTVGTVTEIHDYLRLLFARVGEPRCPNHDVPLAAQTISQMVDKVLSLPEESKMMLLAPVVKERKGEHVKLLEQIAAQGYIRARIDGEICDLSDAPKLELHKKHTIEVVVDRFKVRSDLATRLAESFETALELSGGTAVVASMDEPETEELVFSANFACPHCGYSVPELEPRLFSFNNPAGACPTCDGLGVQQYFDEKRVVQNPSISLASGAVKGWDRRNFYYYQMLTSLAKHYEFDIESPFEALPKKIQQIILNGSGKEEIEFQYMNDRGDVVVRHHAFEGILNNMARRYKETESLSVREELAKNISTCPCHDCGGSRLRQEARHVYIGTTTLPDVAEKSIGETLHFFSELHLSGQRAQIAEKILKEIKERLQFLVNVGLDYLSLSRSAETLSGGEAQRIRLASQIGAGLVGVMYVLDEPSIGLHQRDNERLLNTLLHLRNLGNTVIVVEHDEDAIMAADHIIDIGPGAGVHGGQIVAEGSAKAIMANPHSITGKFLSGVEKIEIPAKRTALDKKKMLKLEGATGNNLKSVNLAIPVGLFTCVTGVSGSGKSTLINDTLFPLAQNALNRAENTQFAPYQSISGLEFFDKVIDIDQSPIGRTPRSNPATYTGLFTPIRELFAGVPESRARGYNPGRFSFNVRGGRCEACQGDGVIKVEMHFLPDVYVPCEQCKGKRYNRETLEIRYKGKTIHQVLEMTVEEAREFFDAIPQIARKLQTLMDVGLSYIRLGQSSTTLSGGEAQRVKLATELSKRDTGKTLYVLDEPTTGLHFADIKQLLTVLHRLRDQGNTIVVIEHNLDVIKTADWIIDLGPEGGNGGGQIIATGTPEQVAEVKGSHTARFLKTLLQKR

SEQ ID NO: 67451 - protein, 351 aa, Pasteurella multocida
MLFKKIRGLFSNDLSIDLGTANTLIYVKGQGIVLDEPSVVAIRQERSGALKSIAAVGRDAKLMLGRTPKSIAAIRPMKDGVIADFFVTEKMLQYFIKQVHSSNFMRPSPRVLVCVPAGATQVERRAIKESAIGAGAREVYLIEEPMAAAIGAKLPVSTATGSMVIDIGGGTTEVAVISLNGIVYSSSVRIGGDRFDEAIISYVRKTFGSIIGEPTAERIKQEIGSAFIQEGDEVREIEVHGHNLAEGAPRSFKLTSRDVLEAIQAPLNGIVAAVRTALEECQPEHAADIFERGMVLTGGGALIRNIDVLLSKETGVPVIIADDPLTCVARGGGEALEMIDMHGGDIFSDDI

SEQ ID NO: 67452 - protein, 468 aa, Pasteurella multocida
MSKTLYEKLFDAHVVHEANGETPLIYINRHLVHEVTSPQAFDGLRAMGRSVRQPSKTVATMDHNVPTDSRDLAGSGEMGRVQMVELAKNTEQFGITLYDINHINQGIVHVMGPEQGLTLPGMTIVCGDSHTATHGAFGALAFGIGTSEVEHVLATQTIKQARAKKMKIEVRGKVRDGISAKDIVLAIIGKTTMGGGTGHVVEFCGEAIRDLSMEGRMTVCNMAIELGAKSGIIAPDETTFAYLKDKPYAPKGKDWDEAVAYWQTLHSDEGAEFDTVVTLEASEIEPQVTWGTNPGQVIGINQPIPNPAEMSDPIERQSAEKALAYMDLPHSIKLTDVAIDKVFIGSCTNSRIEDLRAAAAIAKGRKVADGVQALVVPGSGLVREQAEKEGLDKIFIEAGFEWRLPGCSMCLAMNNDRLAPGERCASTSNRNFEGRQGRGGRTHLVSPAMAAAAAVYGKFVDIRNLELH

SEQ ID NO: 67453 - protein, 122 aa, Pasteurella multocida
MDTTTILIFFAAFMWLIQIILGWQQVSAFNRAFMSISQKGKILTGRNSGRFNPKSIIVLAIDDNETVIDSLQMKGFSVFARPQTCEQVIGLKVDQIQPERIFPKDKKSQFALKIAISSLYRN

SEQ ID NO: 67454 - protein, 259 aa, Pasteurella multocida
MSKVAVVIGGGQTLGAFLSEGLAEAGYRVVVADLNGENAKQVATRINTQQGIGHAIGLQVDAADETSVETLVHATDQAFGKIDLLVYSAGTAKASPIYDFDLKDFDLSVKVNLTGYFLCAKHFSRLMIRDGIKGRIIQINSKSGKVGSKHNSGYSAAKFGGVGLTQSLALDLADYGITVHSLMLGNLLKSPMFQSLIPQYAKKLGIPEEEVEQVYIDKVPLKRGCDYQDVLNVLKFYASEEASYCTGQSINITGGQVMF

SEQ ID NO: 67455 - protein, 147 aa, Pasteurella multocida
MGLFDFVSDIGRKLFSKQEDAAEALAKHIKEDNPGIEDLNVKVEDGVASIEGTAKSASALEKAVLMAGNVAGITKVKVDKVVIVSGESLSGEDEFYVIQKGDTLWKIAEKTYGNGSKYTAIVEANKEVIKDADKIFPGQKIRLPKVL

SEQ ID NO: 67456 - protein, 411 aa, Pasteurella multocida
MEKDTELHCSFCGKEQKHVSKLIAGTSGYICNECIELCHDMLLSDAVETPEVESTEQQKLPTPHEIRAHLDDYVIGQDYAKKVLSVAVYNHYKRLRSDKQITDVELGKSNILLIGPTGSGKTLLAETMARMLNVPFAMADATTLTEAGYVGEDVENVLQKLVQSCDYDVERAEQGIIYIDEIDKITRKSENPSITRDVSGEGVQQALLKLIEGTVASIPPQGGRKHPQQEMLRVDTSKILFICGGAFAGLDKVIEKRVHVGSGIGFSAEVKSKQDKATLSQLFEQVEPDDLMKFGLIPEFIGRLPVVAPLAELDEEALVKILTEPKNALIKQYQALFSLEDVALEFSPEALTAMAKKALARKTGARGLRSIVEAILLDTMYDLPSLQHLEKVIVEASTITDNQPPTLVYKA

SEQ ID NO: 67457 - protein, 804 aa, Pasteurella multocida
MSAKKTQQQSIPVLPLRDVVVFPYMVMPLFVGRPKSIRSLDEAMETGKQLLLVSQKQADLEEPTVDDVYRVGTVANIIQLLKLPDGTVKVLVEGQQRATIEQLDDNGEYFSAQIRLIETEFGDDKELEVVKKATLAEFEKYAKLNKKVQPDVHAALERIEEFDRLSDTLAAHMPVAVKHKQKVLEIAKVVARFEYLLGLMESETDLLQIEKRIRGRVKEQMEKTQRDYYLNEQIKAIQKELGEGDSADEIEQLRQKIEEAKMPAEAKSKAEAELQKLKMMSPMSAEATVVRSYIDWMIQVPWHKRTKVKKDLTKAQQVLDADHYGLERVKERILEYLAVQTRLNQIKGPILCLVGPPGVGKTSLGQSIAQATGRKYVRMALGGVRDEAEIRGHRKTYIGALPGKLIQKMAKVGVKNPLFLLDEIDKMSSDMRGDPASALLEVLDPEQNTSFNDHYLEVDYDLSDVMFVATSNSMRIPAPLLDRMEVIRLSGYTEDEKLNIATRHLIAKQMERNGLKAGELTIEDSAILDIIRYYTREAGVRSLEREISKICRKAVKNLLLDKKVKSLKVNATNLHDYLGVKRFEFGRADTQNRVGEVTGLAWTEVGGDLLTIETASVLGKGKLTYTGSLGDVMKESIQAAMTVVRSRAEKLGIASDFHEKRDIHIHVPEGATPKDGPSAGIAMCTALVSCLTGNPVKADVAMTGEITLRGKVLPIGGLKEKLLAAHRGGIKTVIIPKENVKDLEEIPDNAKSNLTIHAVETIDEVLTIALENAPTGVEFMKLTPVSAAKTVRKGRSTSRKSAVN

SEQ ID NO: 67458 - protein, 374 aa, Pasteurella multocida
MKRWIKNVYFLSGKEIRSFFSDYTLLVLVIIMFTVMIYSIAKGITTEVKNATVAILNEDRSPLSYRIQDAMLPPQFKSVVEIQRADIDAAMDSGEFIFVLTIPPHFSADVLAHKQPELQLLVDATAMSQAAVGAGYLSHIIQQQLSEYLSHIPLDKTLLEPKLNVLFNPNLKTEWYMPITQITGNSTLLTLILVGAAVIREREHGTIEHLLVMPVSASEIVISKILANGFIILIAAFLSLYFVVHQFIGVPINGSMTLFIVTEAIFLSSMAGLGIYLATHAPTMPQFSLLCLPVYVVLYLLSGSLSPLENMPVAVQYLMQLSPLTQFISIGQDVLFRGAGFTVIWPKVLMISLMGAFFIVVAIFRFRHMLARQS

SEQ ID NO: 67459 - protein, 252 aa, Pasteurella multocida
MEAKPQLKGNIIMAQVSMRDMLQAGVHFGHQTRYWNPKMKPFIYGPRNGVHIINLEKTVPMFNEALVELTRIAGNNGKILFVGTKRAATEAVKAAALDCQQYYVNHRWLGGMLTNWKTVRQSIRRLKDLETQSQDGTFDKLTKKEALMRTREMEKLELSLGGIKEMGGLPDALFVIGADHEHIAVKEANNLGIPVFAIVDTNSDPDGVDFVIPGNDDAARAIQLYLSAAAAAVKEGRHQDAVTEENFVAEAE

SEQ ID NO: 67460 - protein, 282 aa, Pasteurella multocida
MAEITASLVKELRERTGAGMMECKKALVEANGDIELAIDNMRKSGQAKAAKKAGRVAAEGVILARIGAGFGVLVEMNCETDFVAKDAGFLGLANEVADYALANKGVTIEALQAQFEEKRATLVAKIGENMNIRRVQFLDGDVVGSYLHGAKIGVLVAGKNADEDLLKKIAMHVAASRPEFVKPEDVSADVVAKEREIQVAIAMESGKPREIAEKMVEGRMKKFTGEVSLTGQPFVMDPAKSVGEFLKESGADVTNFVRFEVGEGIEKVESDFAAEVAAMQKI

SEQ ID NO: 67461 - protein, 242 aa, Pasteurella multocida
MSQPIYKRILLKLSGEALQGDEGFGIDPSILDRMALEIKELVAMGVEVGVVLGGGNLFRGAKLAKAGMNRVVGDHMGMLATVMNGLAMRDALHRADVNAKLMSAFQLNGICDTYNWSEAIKMLREKRVVIFSAGTGSPFFTTDSAACLRGIEIEADVVLKATKVDGVYNCDPAKNADAVLYHQLNYADVIEHELQVMDLAAFTLARDHHMPIRVFNMGKPGALRRVILGEVEGTLICDQKLS

SEQ ID NO: 67462 - protein, 185 aa, Pasteurella multocida
MINEIKKDTQLRMEKSLETFKNHIAKVRTGRAQPSLLDGIQVEYYGSPTPLRQLANVVAEDARTLAVTVFDRSLISAVEKAILTSDLGLNPSSAGTTIRVPLPPLTEERRRDLIKIVKGEAEQGKIAVRNVRRDANDQIKALLKDKEISEDEERKAQDEIQKITDTFVKKVDEVLADKEKELLDF

SEQ ID NO: 67463 - protein, 240 aa, Pasteurella multocida
MVELDPNNIPQHVAIIMDGNGRWAQQKGKMRIFGHKNGVKAVREAVSYARKVGIKVLTLYAFSSENWNRPKKEVNALMALFMQALDLEVKKLHKNNIKLNILGDVTGFSASLQNKIHQAEKLTENNTALTLNIAANYGGCWDIVQATKSLAQQVKEGKLAVDEINAQVLQQALVTKEQPQVDLLIRTSGEQRISNFLLWQIAYAELYFSDVLWPDFNEKEFNEAIIAYQQRHRRFGGAEE

SEQ ID NO: 67464 - protein, 289 aa, Pasteurella multocida
MLKERVLSAIMLIAIVFIALFFFSPFYFALAVGVVVILAVWEWTQFAHFKWSFWRLGLTGLSAAFLFLWIYGESDYLNAGRVFENTLSLLLFSSVLWWFVALGLVISYPKGATYWGKNKLLQFAFAFLTLVPFFAGVLRLRLAHYVTDPYHGLILLLYVFILVWSADSGAYFAGRQFGKNKLAPKVSPGKSWEGVIGGLVTAGILASIFIHFTQESLLSGISIPAFIALSVATVAVSILGDLTESMFKRQSGIKDSSQLIPGHGGILDRIDSLTAAVPFFAYFYFFVIS

SEQ ID NO: 67465 - protein, 342 aa, Pasteurella multocida
MQVYSLQELAQQIGATIRGNADVVVESIAPLDKATEKQLTFISNPKFRSLLAQSHAGILVVSEADVAFCAEQSNLLIVKDPYVAYAVLAQYMDSTPKAASGIAASAVVSASAVIGKNVSIGANAVIEDGVTLGDHVVIGANCFVGKNSKIGAYTQLWANVSVYHEVEIGQHCLIQSGAVIGSDGFGYANDRGRWIKIPQVGQVIIGNHVEIGACTCIDRGALDPTVIEDNVIIDNLCQIAHNVHIGTGTAVAGGVIMAGSLTVGRYCLIGGASVINGHMEICDKVTITGMGMVMRPITEPGVYSSGIPLQTNKEWRKTAALTLGIDAMNKRLKALEKKFEKK

SEQ ID NO: 67466 - protein, 152 aa, Pasteurella multocida
MTTETTTTKIIEANEIMKLLPHRYPFLLVDRVVDYEEGKWLKAVKNISVNEPCFTGHFPEQPIFPGVLILEAMAQATGVLACKTYRQLENEIYYFAAIDNARFKRPVLPGDQMVLEVHFLKERRGITRFTGVATVDGQVVCEAELMCARRPA

SEQ ID NO: 67467 - protein, 392 aa, Pasteurella multocida
MKEIHKQPPTIAIVAGEVSGDILGAGLIRSLKVQYPHARFIGIAGPRMLAEGAETLVDMEELSVMGLAEVVKHLPRLLKIRRQLIHTMLQEKPDIFIGIDAPDFNIDVELKLKENGIKTIHYVSPSVWAWRQNRIHKIAKATHLVLAFLPFEKAFYDRFEVPCRFIGHTMADAIALKPNRQEACEYLNLDASQRYVAILVGSRGSEVTFLAEPFLQAAKLLKQQYPDIQFLVPLINAKRREQFEQIKAQVAPELELILLDGKARQAMIAAEATLLASGTAALEAMLCKSPMVVGYRMKATTYFLAKRLVKTEYVSLPNLLANEMLVPELIQEQCTAENLAEKLALYLSQEESALQQRHTLIQRFTDLHKLIQCDADKQAAQAVIALLEQEDK

SEQ ID NO: 67468 - protein, 197 aa, Pasteurella multocida
MVFEYPKGVELIAGVDEVGRGPLVGAVVTAAVILDPHQPILGLNDSKKLSEKKRLLLAEEIKQKALAWSLGRAEAEEIDQLNILHATMLAMKRAVENLKIQPHFVLVDGNRVPELMIPAQAIVKGDGLVAEISAASILAKVARDQEMAELDKRYPEYAFAQHKGYPTALHLAKLAELGPLAQHRRSFAPVRKLLNTL

SEQ ID NO: 67469 - protein, 209 aa, Pasteurella multocida
MLAKLIDFLLCRFTSFITGVRPQKNVTQQSTGKNRLYYANHNSHGDFILLWVSLPYEVRQNTRPVAGADYWLKGKVRRFLAKKVFNMLLIERGSDDPKVATNQISDALKDSSLIIFPEGTRKTDDDLALQPFKSGLFHLAKQNPTLELVPVWISNMHNVLPKGFILPIPLLCDLYLGEPLSYQQGEEKADFLARAQNALLRLNPKYQGE

SEQ ID NO: 67470 - protein, 192 aa, Pasteurella multocida
MTAVLKIGLVSVSDRASQGVYADQGIPELQAWLEKALCEPFEIETRLIPDEQDRIEQTLCELVDDYHCHLVLTTGGTGPAKRDVTPDATLAVADREMPGFGEQMRQVSLHFVPTAILSRQVGVIRKNSLILNLPGQPKAIKETLEGVKDENGQVIVKGIFSAVPYCLQLINGIYIDTHPDVIESFRPKSARR

SEQ ID NO: 67471 - protein, 318 aa, Pasteurella multocida
MNTATNNIEEKVLTLGEQFRQAREALNLSIEDVSKKISLRPSILQLIETNQLAQKSIPATFMRGYVRSYAKFLKLPESVWVHASFGEDHKNDLGKNARATRAVNHYSSHNHWIGWLSLLVVLIVAGMTGLWWWENYTQSNAERESLVQHYVDTTPQSSVVQSTPIASSTALTDTTQNATVLSASSVVIPTTQTTSSTDLPVTISPVSDQPITSADVLKAEMEKLDEKSEKNLLSHETVVTPSHELHIEVTGGCWISVQNESGKILAQKEYKQGDVLTFNEGVTYSLIIGAPANVKITYKGEDYPLKVDGRVARFKLPQ

SEQ ID NO: 67472 - protein, 367 aa, Pasteurella multocida
MLAKPTIKRRESTKIYVGNVPIGGDAPIAVQSMTNTRTTDVEATVAQIKALERVGADIVRVSVPTMDAAEAFKLIKQQVNVPLVADIHFDYRIALKVAEYGVDCLRINPGNIGREDRIRAVVDCARDNNIPIRIGVNAGSLEKDLQEKYGEPTPEALLESALRHVEILDRLNFDQFKVSVKASDVFLAVESYRLLAKAIKQPLHLGITEAGGFRAGAVKSAVGLGMLLAEGIGDTLRISLAADPVEEIKVGFDILKSLRIRSRGINFIACPTCSRQEFDVIGTVNALEQRLEDIITPMDVSIIGCVVNGPGEALVSDLGVTGGNKKSGYYLDGERQKERFDNDDLINQLEAKIRAKVAAQDPKNRII

SEQ ID NO: 67473 - protein, 423 aa, Pasteurella multocida
MAKTIQAIRGMNDCSPTESPLWQWVEGKVRSVLQNYGYSEVRMPIVESTPLFARAIGEVTDVVSKEMYTFWDNDEQLTLRPEGTAGCVRAAIEHGWIYNQEQRLWYMGPMFRHERPQKGRYRQFHQAGVEVFGIPNPEIDAELIMLTARLWKELGIAEHVTLQLNSIGSLEARKNYRSALVAFLQQHVDLLSEEEKERLEKNPLRILDTKNQALQEVLNDAPKLLAYLDDDSREHFAQLCALLDAVGIQYEVNPKLVRGLDYYNKTVFEWVTSALGAQGTVCGGGRYDGLVEQLGGHATTGVGFAMGLERLVLLVQEVNQSIRLPSAVDIYVVYQGEGTTLAAFQLAETLRTELPQLRVMTHCSGGNFKKQFKRADKSGATLALVIGESEVQNQQVVVKHLLGGAEQQTLALDDIVDYIKNNF

SEQ ID NO: 67474 - protein, 464 aa, Pseudomonas putida
MSTEKTNQSWGGRFSEPVDAFVARFTASVDFDKRLYRHDIMGSIAHATMLAQVGVLSDAERDTIIDGLKTIQGEIEAGNFDWRVDLEDVHMNIEARLTDRIGITGKKLHTGRSRNDQVATDIRLWLRDEIDLILGEITRLQQGLLEQAEREAETIMPGFTHLQTAQPVTFGHHLLAWFEMLSRDYERLVDCRKRTNRMPLGSAALAGTTYPIDRELTCKLLGFEAVAGNSLDGVSDRDFAIEFCAAASVAMMHLSRFSEELVLWTSAQFQFIDLPDRFCTGSSIMPQKKNPDVPELVRGKSGRVFGALTGLLTLMKGQPLAYNKDNQEDKEPLFDAADTLRDSLRAFADMIPAIKPKHAIMREAALRGFSTATDLADYLVRRGLPFRDCHEIVGHAVKYGVDTGKDLAEMSLDELRQFSDQIEQDVFAVLTLEGSVNARDHIGGTAPAQVRAAVVRGKALLASR

SEQ ID NO: 67475 - protein, 297 aa, Pseudomonas putida
MAKIGFIGTGIMGKPMAQNLQKAGHSLFISTHHDAAPADLIAAGAVALANPKEVAQEAEFIIVMVPDTPQVESVLFGENGVAEGVGPNKVVIDMSSISPTATKAFAEKIKATGAAYLDAPVSGGEVGAKAATLSIMVGGCPNAFERTLPLFEAMGKNITRVGGNGDGQTAKVANQIIVALNIQAVAEALLFAAKNGADPAKVREALMGGFASSKILEVHAERMIKGTFDPGFRINLHQKDLNLALQGAKELGINLPNTSNAQQVFNTCQALGGGNWDHSALIKGLEHMANFSIRDDK

SEQ ID NO: 67476 - protein, 341 aa, Pseudomonas putida
MTEQQPVAVLGGGSFGTAVANLLAENGVPVRQWMRDPAQAEAMRVNRENPRYLKGIRLHDGVEPVNDLLATLQASELIFVALPSSALRSVLAPHAELLRGKGLVSLTKGIEAQSFKLMSQILEEIAPEARIGVLSGPNLAREIAEHALTATVVASEHEDLCQQVQAVLHGRTFRVYASADRFGVELGGALKNVYAIIAGMAVALGMGENTKSMLITRALAEMTRFAVSQGANPMTFLGLAGVGDLIVTCSSPKSRNYQVGYALGQGQSLEEAVNRLGEVAEGVNTLKVLKTKAQQVQVYMPLVAGLHAILFEGRTLNQVIEHLMRAEPKTDVDFISISGFN

SEQ ID NO: 67477 - protein, 197 aa, Pseudomonas putida
MRYPWFRLAIFIVGCLFPVWWLYEAAMNLLGPDPGKIMMDRLGLGALTFLLVTLSMTPLQKLTGWSGWIVVRRQLGLWVFAYIVLHILCYLFFILGLDWGQLAVELRKRPYIIVGALGFLGLLVLAVTSNRYSQRRLGARWKKLHRLVYAVLGLGLLHFLWIVRSDLREWAIYAFIGAVLMVLRIPAVARALPKVAR

SEQ ID NO: 67478 - protein, 338 aa, Pseudomonas putida
MKVFYDKDCDLSIIQGKKVAIIGYGSQGHAQACNLKDSGVDVTVGLRKGSATVAKAEAHGLKVADVATAVAAADLVMILTPDEFQGALYKNEIEPNIKKGATLAFSHGFSIHYNQVVPRADLDVIMIAPKAPGHTVRSEFVKGGGIPDLIAIYQDASGNAKNVALSYASGVGGGRTGIIETTFKDETETDLFGEQAVLCGGTVELVKAGFETLVEAGYAPEMAYFECLHELKLIVDLMYEGGIANMNYSISNNAEYGEYVTGPEVINEESRKAMRNALKRIQDGEYAKMFISEGATNYPSMTAKRRNNAAHGIEIIGEQLRSMMPWISANKIVDKTKN

SEQ ID NO: 67479 - protein, 163 aa, Pseudomonas putida
MRHIISLLLENEPGALSRVVGLFSQRNYNIESLTVAPTEDPTLSRLTLTTVGHDEVIEQITKNLNKLVEVVKLVDLSESAHIERELMLVKVKATGAQRAEIKRTTDIFRGQIVDVTASVYTVQLSGTSDKLDSFIQAIGTASILETVRSGVTGIARGDKVLSI

SEQ ID NO: 67480 - protein, 641 aa, Pseudomonas putida
MGKIIGIDLGTTNSCVSILENGNVKVIENAEGARTTPSIVAYANDGEILVGQSAKRQAVTNPHNTLFAVKRLIGRRFEEDVVQKDIKLVPYKIVKANNGDAWVEAAGKEMAPPQISAEVLKKMKKTAEDYLGEPVTEAVITVPAYFNDSQRQATKDAGRIAGLDVKRIINEPTAAALAYGMDKAKGDHTVIVYDLGGGTFDVSVIEIAEVDGEHQFEVLATNGDTFLGGEDFDMRLIDYLVDEFKKESGMDLKNDPLALQRLKEAAEKAKIELSSAQSTDVNLPYITADATGPKHLNVKISRAKLESLVEDLVKRTIEPCRIALKDAGIDASKIDDVILVGGQTRMPLVQKEVADFFGKEARKDVNPDEAVAMGAAIQGAVLAGDVKDVLLLDVSPLTLGIETMGGVMTALIEKNTTIPTKKSQVFSTADDNQSAVTIHVLQGERKQAAQNKSLGKFDLADIPPAPRGVPQIEVTFDIDANGILHVGAKDKATGKTQSIVIKANSGLSDEEIERMVRDAEANAEEDRKFEELAAARNQGDALVHSTRKMVADAGDKVTAEEKTAIEAAVVALEAAVKGDDKAAIDAKVEELSKVSAPVAQKMYAEQSAEQPQGGAQQAEPEAKHDDVVDAEFEEVKDNNKQ

SEQ ID NO: 67481 - protein, 255 aa, Pseudomonas putida
MVFDQVRQRRLSDDIVDRLEGMILEGTLTSGQRLPAERVLAEQFGVSRPSLREAIQKLVAKGLLVSRQGGGNFVAESLGSTFSDPLLQLLEHSAEAQRDLLEFRHTLEASCAYYAAQRATEPDRARLKAAFDALQDCYARVDEVTRAEEGAADARFHLAIAEASHNAVLLHTIRGLFDLLKRNVVTNIGGMYQQRTETRDMLISQHRELYLAIVEGRAEDAREVSSRHILYVQEVLHEAHEEAQRVARAERRSGR

SEQ ID NO: 67482 - protein, 576 aa, Pseudomonas putida
MTALLIDNLPLLAGAPNGIRKLRELILELAVRGKLVPQEPNDEPASELLARIALESAQLVAGGKAKKGNVKAGVVAQGLDSAELPTTWIWTSFDDLINPEYPIAYGVLVPGPDVADGVPFVRIADLDLVAPPHKPEKSISPEVDRQYERTRIRGGEILMGVVGSIGKLGIAPESWAGANIARAICRVVPSVHVSKDYIIWLLQSDLMRKQFLGDTRTLAQPTLNVGLIRSAAAPLPPLAEQHRIVAKVEELMALCDRLEAQQADAESAHVQLVQAMLDSLTQAIDAADFATSWQRLAEHFHTLFTNEFAIDALKKTLLQLAVMGKLVPQDVTDESASELLKRIEGEKQRLVNEGLMKKQKPLVESTSGQIKPALPSSWKWVPLLDITTGMDSGWSPACLGNSSPSDDVWGVLKTTAVQVMSYLQHENKELPSHLEPRPEAETKVGDILFTRAGPMNRVGISCLVESTRPKLMISDKIIRFHPVELGVYGRFVALCLNAGETAKYLEQAKSGMAASQVNISQEKLRLAPIPLAPLREQHRIVTKVDQLMKLCDTLKQQINVARSKQTELLDTLMAQV

SEQ ID NO: 67483 - protein, 1174 aa, Pseudomonas putida
MSVPFVHLRVHSEFSLVDGLVRIKPLAKALTGMNMPAVAITDQSNMCSLVKFYKTAMGAGIKPICGADLWLAGADPEAPLSRICFLAMDPKGYRNLTELISRGWTDGQRNGLVILQREWIAPASEGLIALSAGKEGDIGMALLAGRQDEAEALLQDWMGMFPERFYVEVQRTNRARDEEYVHAAVALADKLGAPLVATNDVRFIKQADFDAHETRVCIGEGWTLDDPRRPRCYSDQQYLKSAEEMAELFSDLPDAIANTVEIAKRCNIQVQLGKYFLPDFPTPNGMGIDDYLRHVAHEGLEERLAVLWPKETTPNYEEKRQVYLDRLKFELDIIIQMGFPGYFLIVMDFIKWAKNNDVPVGPGRGSGAGSLVAYVLKITDLDPLAYDLLFERFLNPERVSMPDFDVDFCMDGRDRVIDYVAEAYGRNAVSQIITFGTMAAKAVVRDVARVQGKSYGLADRLSKMIPFEVGMTLEKAYEQEEILRDFLKGDEDAREIWDMALKLEGVTRGTGKHAGGVVIAPTKLTDFSPIACDEEGGGLVTQFDKDDVEAAGLVKFDFLGLRTLTIIKWAMEIINREQAKKNLPDLNIDFIPLDDRKTYELLQKAETTAVFQLESRGMKELIKKLKPDCLEDLIALVALFRPGPLQSGMVDDFINRKHGRAELAYPHSDYQYEGLKPVLAPTYGIILYQEQVMQIAQVMAGYTLGGADMLRRAMGKKKPEEMAKQRGGFIEGCVANNIDADLAGNIFDLVEKFAGYGFNKSHSAAYGLVSYQTAWLKTHYPAPFMAAVLSADMHNTDKVVVLVEEVRSMKLRLDAPDVNFSDFKFTVNNDGRIVYGLGAIKGVGEGPVEAIVEARAQGGPFKDLFDFCERIDLKRVNKRTLDALVRSGALDRLGPHFHDEIKAYHANIDINRATLLSALGEAIKAAEQAAHTADSGHVDLFGSMFDAADVDVYANHRKVRELTLKERLKGEKDTLGLYLTGHPIDEYETEIRRFARQRIVDLKPSRETQTIAGMIIALRVMKNKKGDKMGFVTLDDRSGRIEASLFADAFMAAQSLLQTDAMVVVEGEVSNDDFSGGLRLRVKQVMTMEDARTKLAESLRLKVAHDALKGDRLKWLGELITRHRGACPITLEYTGSDAKAMLQFGEQWAIDPADGLIQALRDQFGRENVFLQYR

SEQ ID NO: 67484 - protein, 313 aa, Pseudomonas putida
MRVACLILFLVLCAASLAVGVRELAWSQLLTLQGDAWLTLTASRLPRLAALILVGVGLAVCGVILQQIVRNRFVEPGTTGGLDAARLGILLSLGLAPAAGALLRMLFALAVCFAASLLFVALIRRIRARNAVLVPVIGLMYGGVLSALAEFYAYRFNLLQSMQGWLLGDFSKVVQGRYEILYLIVPIVLLTYLYAQRFTVLGMGEGMATSLGLNYTANVTVGLLLVAVTVSASVIIVGAIPFVGLVVSNLVALRHGDNLRRTLPLVALGGAALLLVCDLLGRLLIYPFEVPIGLTAGGLGGLIFLGLIIWRQR

SEQ ID NO: 67485 - protein, 258 aa, Pseudomonas putida
MITVHDLHKTYGSKEVLSGVSASFPRGQLTSLIGPNGAGKSTLLMMLARLLAPASGDIRLDGQSIDSIAIGDYARRVATLRQSVDFNLRLTVDELVAFGRFPYSRGALTAADRRAIDQAIAFLSLEPLRQAYLNELSGGQRQMAFLAMTIAQQTDYLLLDEPLNNLDMRHAVQIMRALRRLCDEFGRTVILVVHDINFAAAYSDCIVAMQGGRVHCSGSVEQVVTERQLHALYGLDFDITHSARGRLCNYFNPPGEQQ

SEQ ID NO: 67486 - protein, 748 aa, Pseudomonas putida
MKAFGKILGLGLLGLLLIIVALGFALTHLFDPNDYKDEIRQLARDKAHVELTLNGDIGWSLFPWLGLELHEASIATLNKPKEPFADLQMLGLSVRVLPLLRREVQMSDVRVEGLNLTLARDEQGHGNWEDIGKPLPAQNGASTDASAQAPAEQTPATTNSNDRAIKLDIDSLTVNNARVQYTDAKTGHSYSAESIQLSTGPIHEGANIALKASAFISASQPSIKARTELAGELRFDRKLKRYNFEDMRLSGETSGEPTGGKTVTFAAQGQLLVDLAANVASWNGLKVSANQLRALGELNLRDLDKAPQLSGGLSIAQFNLRAFLESIGHPLPATNDPAAFAKLELVTRLLGTPSSLALEDLAVKLDDSTFSGRVAVEDFAKQALRLQLKGDTFDADRYLPAKSEEAKGATAARQAEVKQQEASAVAGAGTTPLPNAPTQVAWSDDKLLPVDRLRALDLQADLAFGSLTLDKLPIESAQLKAVGQGGLLTLQTLRGELYNGTFEAKGTVDVRPAVPQLGVNTNIQRVPVEHFIKTEGKEQTPPVKGLLTLTSDLTATGNSQKALVDTLNGSANFAINDGVLVNANLEQQLCQAIATLNRKTLSSEPRGKDTPFQELRGSLVVRNGVASNPDLKARIPGLTVNGHGDLDLRVLGMDYNIGIVVEGDQRAMPDPACQVNERYVGVEVPLRCRGPLELGAKACRLDQNGLGKVAAKLAGNRLKDKIDEKLDEKLGDKVSPELKDALKGLFNR

SEQ ID NO: 67487 - protein, 314 aa, Pseudomonas putida
MHSLIRRSLLPLALSSIVATPLFAAEPAACKNVRLGVVNWTDVIATSAMAQVLLDGLGYQTKQTSASQQIIFAGIRDKRLDMFLGYWNPIMTQTITPFVDANQFKVLDKPSLEDARATLAVPKYLYDKGLKTFADIHKFEKELGGKIYGIEPGSGANTQIKAMITKNQFDLGKFQLVESSEAGMLAAVDRAVRRKEAVVFFGWAPHPMNVNIDMAYLGDSQDALGPDEGRATVWTVTAPDYAERCPNALRLLANLKFSAEDESRMMQPLLDHKDALESARQWLKDHPEDKARWLEGVTTFDGKPAADNLKLTAN

SEQ ID NO: 67488 - protein, 159 aa, Pseudomonas putida
MKKSSAQGSEDPILQWVTFRLDNESYGINVMQVQEVLRYTEIAPVPGAPSYVLGIINLRGNVVTVIDTRQRFGLMPTEVTDNTRIVIIEADKQVVGILVDSVAEVVYLRQSEIETAPNVGNEESAKFIQGVCNKNGELLILVELDKMMTEEEWSELENI

SEQ ID NO: 67489 - protein, 259 aa, Pseudomonas putida
WALAIQKGGVGKTTTTIALAGLLAEAGKRVVVVDLDPHGSMTSYFGHNPDALEHSCYDLFLHKGPVPEGLPGQLLLPTSDERISLLPSSTALAVLERQSPGQNGLGLVIAKSLAQLWQDFDYALIDSPPLLGVLMVNALAASQQLVIPVQTEFLAVKGLERMVGTLAMVNRSRKQALPYQIVPTLFDRRTQASLGTLKLLRDTYGQHVWQGYIPVDTRLRDASRKGVTPSQFDSKSRGLIAYRALLKHLLTYKNAVQVA

SEQ ID NO: 67490 - protein, 352 aa, Pseudomonas putida
MKQNVIALVFGGRSSEHSVALRSAATIHAALMALGHRVHCVGIDREGNWRYQGEPCQFPGAVDRSAPLISIRPGHRSLSYTTQESGTVEIGIDLLFPALHGRWGEDGTIQGLAAMCGLPCVGSGVLGSAMAMDKDVTKRMVQSAGLVVVPWLAMNSMRPWEELVECLGSSTLFVKPATSGSSIGVSRVSNALEYAAAFAIAAREDTKVLVEAAVCGREIECGVLELEEGLMASVVGEIIKKEGHAYYDYQAKYDSNSVTGLRVPSLLPPDIVARIQALSVQAFRCLELKGYARVDFFLTEEGEIILNEINTLPGFTSASMYPKMFECSGYPPPKLVGALVEYGLSSASKERL

SEQ ID NO: 67491 - protein, 222 aa, Pseudomonas putida
MSVFILLLRREARLLFRRPAELANPLVFFAIVVAMFPLAVGPESQLLQTLSPGLVWVAALLAVLLSLDGLFRSDFEDGSLEQWVLSPHPLPLLVLAKVLAHWIFSGLALVLLAPLLALMLGLPSHCLPVLLGSLLLGTPVLSLLGAVGAALTVGLKRGGLLLALLILPLYIPVLILGSGALQAALQNMPATGHLLWLASLTALAVTLAPFAIAAGLKISVGE

SEQ ID NO: 67492 - protein, 345 aa, Pseudomonas putida
MKRRVSPRTLFISLSLLCLLAIWLSLALGPVSLPMFDTLRAGLRLLGLPVSEDGLQQAEMILGQIRLPRTLLGLAVGAVLALSGVAMQGLFRNPLADPGLVGVAAGAAVGAAVAIVGGAWFGGMPDAFAPYLLSFCAFVGGLGVTALVYRLGRRDGQTNVATMLLAGVAMTALGGAAVGLFSYLADDATLRTLTFWNLGSLNGASYERLWPLLLVATGVAVWLPRRAKALNALLLGESEARHLGVDVERLKRELVFCTALGVGAAVAAAGLIGFIGLVVPHLVRLLAGPDHRVVLPASLLAGGVLMLFADLAARLLLAPAELPIGIVTAFIGAPFFLFLLMRGRG

SEQ ID NO: 67493 - protein, 41 aa, Pseudomonas putida
MIGTPLLSDILCALIRQGNEIPQRCCEINLPSVQAPLALGQ

SEQ ID NO: 67494 - protein, 403 aa, Pseudomonas putida
MAEQMGIENMARSRKQDVIFALLKKHAKSGEEISGDGVLEILQDGFGFLRSADASYLAGPDDIYVSPSQIRRFNLRTGDTIVGKIRPPKEGERYFALLKVDTINFDRPENAKNKILFENLTPLFPNKRLKMEAGNGSTEDLTGRVIDLCAPIGKGQRGLIVAPPKAGKTIMLQNIAANITRNNPECHLIVLLIDERPEEVTEMQRTVRGEVVASTFDEPPTRHVQVAEMVIEKAKRLVEHKKDVVILLDSITRLARAYNTVIPSSGKVLTGGVDAHALEKPKRFFGAARNIEEGGSLTIIATALVETGSKMDEVIYEEFKGTGNMELPLDRRIAEKRVFPAININRSGTRREELLTADDELQRMWILRKLLHPMDEIAAIEFLVDKLKQTKTNDEFFLSMKRK

SEQ ID NO: 67495 - protein, 259 aa, Pseudomonas putida
MFTCIAEPLEDCVLLWDGVLALGELPVRKLACSVSECVDVGGDVWRVRLRAPAGKPLRYHAGQYLMIEREGGKQAAFSLASAPHAGRELELHVLAREPSAVQLIDQLRRDGLARIEMPFGDTHLAELPDGPLVLIAAGTGMGQMHSLVEHCRAQGFKHPVHLYWGVRRPEDFYQIEHWDEWQRLPNLFLHQVVSDLCGWEGRCGMLHEAVCEDIADLNSVHVYASGSPNMIYATLDALVEAGMDAHRMRADVFAYAPRG

SEQ ID NO: 67496 - protein, 233 aa, Pseudomonas putida
MEPEHARKRGHSRAHDLVSSLTQQILLGTFKPGDKLPSENTLVREHGVSRTVVREALSKLQASGLVEPRHGIGTFVMERQAQAGLRVAAESAANVRDLLELRIGLEGQAAALAALRRDEGHLARMRQALDDYQDLAAAGDSCIEADRRFHLLIAEATGNLYFTEMLLQLGNGLIPRNRMAQAERAGAKLARQAYLANLEHEAILNAIRRQDPDAARAAVCLHLSNSRDRLLPD

SEQ ID NO: 67497 - protein, 134 aa, Pseudomonas putida
  MISC_FEATURE (20)..(20): X=any amino acid
  MISC_FEATURE (25)..(25): X=any amino acid
  MISC_FEATURE (77)..(77): X=any amino acid
  MISC_FEATURE (80)..(80): X=any amino acid
  MISC_FEATURE (86)..(86): X=any amino acid
  MISC_FEATURE (127)..(127): X=any amino acid
  MISC_FEATURE (129)..(129): X=any amino acid
GILTCFPSTTLFSLALGTDXPCVDXRCAGNLGLSACEFFTRIVVTHVSIRTSDTSSKLLNSPSQAYRTLLYRIIIRXYPXLRCMVXAPLHLPRRPTRLVSYYAFFKGWLLLSQPPSCLSLPTSFPTXPXLWDLS

SEQ ID NO: 67498 - protein, 152 aa, Pseudomonas putida
  MISC_FEATURE (51)..(51): X=any amino acid
  MISC_FEATURE (115)..(115): X=any amino acid
  MISC_FEATURE (146)..(146): X=any amino acid
ISLSLGWRQRRHRYAIRAGRNLPDKEFRYLRTVIVTAAVYRGFDQELRLRXPHQLTFRHRAGVTPYTSTFVFAECCVFNKQSQRPGIFDRHGLTEQVLHPRRAHLLPKLRCHFAXFLHPSSLKRLGILYLTTCVGLGYGSQLSEAXELFLEA

SEQ ID NO: 67499 - protein, 122 aa, Pseudomonas putida
  MISC_FEATURE (19)..(19): X=any amino acid
MLSAVISSEHSYPAMPLAXQPEHQRFVHSGPLVLGAAPLKSQTSTADRDRTVSRRSKPSSRTTLNGEQPYPWDRLQPQDVMSRHRGAKHRRRYELLGGISLLSPEYLLSVERWPFHTEPPDH

SEQ ID NO: 67500 - protein, 62 aa, Pseudomonas putida
MLILTRRCAESLIIGDGEITVTVLGVKGNQVRIGVSAPKEVAVHREEIYLRIKKEKDEEPSL

SEQ ID NO: 67501 - protein, 355 aa, Pseudomonas putida
PSGEKLQKVLARIGVGSRRDVEAWISQGRIKVNGVEATLGQRVDLHDAIAVDGKLIKREEAAEATRRVIMYNKPDGEICTRDDPEGRPTVFDRLPRPKEGRWINIGRLDINTTGLLLFTTDGELANRLMHPSYEMDREYAVRVRGEVDDEMIERLKAGVMLEDGPAKFTDIQKAPGGEGFNHWYHCVVMEGRNREVRRLWESQGMVVSRLKRVRFGPVFLNSDLPMGRWREMTQGEIDILAAEVGLQPVALPAMKLKAKDKMERLQRKSTRPLGRGERVRNLRPAHEGAATGERPARQPREEAPRKPTRGSTVAERPSEMRKRPGKPDGDKPAGRGRGKPVANKPVWSSRNQPSG

SEQ ID NO: 67502 - protein, 1141 aa, Pseudomonas putida
MSATAGKQTWGNLPGAALSLAIAEAASSAGRFTLLLTADSQAADRLEQELRFFAPDLPVLPFPDWETLPYDLFSPHQDIISQRIASLYRLPELSHGILVVPITTALHRLAPTRFLLGSSLVLDVGQTIDVEQMRLRLEASGYRCVDTVYEHGEFAVRGALIDLFPMGSKLPYRIDLFDNEIETLRTFDPETQRSIDKVDSVRLLPAREFPMQKEEVTRFKARFRERFDVDFRRSAIFQDLASGIIPAGIEYYLPLFFEETSTLFDYLPTDTQVFSLPGVEQAAEHFWNDVRGRYEDRRGDLSRPLLPPAELFLPVEDCFARLKQWPRVVVSSEELEPGVGRERFPARALPNLAIEAKANQPLAELANFLDQFPGRVLFTAESAGRREVLLELLERLKLRPHTVEGWDDFITGAERLAITIAPLDDGLLLDDPGLALIAESPLFGQRVMQRRRRDKRGETANDAVIKNLTELREGAPVVHIDHGVGRYLGLATLEIDGQAAEFLTLEYAENAKLYVPVANLHLIARYTGSDDALAPLHRLGSEAWQKAKRKAAEQVRDVAAELLDIYARRAARKGYAFADPSADYATFSAGFPFEETPDQQAAIEAVRADMLAPKPMDRLVCGDVGFGKTEVAMRAAFIAVHSGRQVAVLVPTTLLAQQHYNSFRDRFADWPVTVEVMSRFKSAKEVAAAAADLAEGKIDILIGTHKLLQDDVRFKDLGLAIIDEEHRFGVRQKEQLKALRSEVDILTLTATPIPRTLNMAVAGMRDLSIIATPPARRLSVRTFVMEQNKSTVKEALLRELLRGGQVYYLHNDVKTIEKCAADLAELVPEARIGIGHGQMRERELEQVMSDFYHKRFNVLVASTIIETGIDVPSANTIVIERADKFGLAQLHQLRGRVGRSHHQAYAYLLTPTRQKVSADAEKRLEAIANTQDLGAGFVLATNDLEIRGAGELLGEGQSGQIQAVGFTLYMEMLERAVKAIRKGTQPNLEQPLGGGPEINLRLPALIPEDYLPDVHARLILYKRIASAADEEGLKDLQVEMIDRFGLLPEPTKNLMRLTSLKLHAEKLGIKKVDAGPNGGKLEFEAETPVDPLTLIKLIQGQPKRYKFEGATQFRFLVPMERPDERFNTLEALFERLTPQPA

SEQ ID NO: 67503 - protein, 423 aa, Pseudomonas putida
MSDVSPARALGIDFGTSNSTVGWHRPGVESLIALEDGKITLPSVVFFNIEERRPVYGRLALHEYLEGYEGRLMRSLKSLLGSKLIKHDTSVLGSALPFKDLLGMFIGELKKRAEAAAGREFDQVVLGRPVFFVDEDPAADQEAEDTLAEVARKIGFKDVSFQYEPIAAAFDYESSISREELVLIVDIGGGTSDFTLIRLSPERHLVAERQSDILATGGVHIGGTDFDKQLSLQGVMPLFGYGSRMKSGALMPTSYHLNLATWHTINALYSQKSQLALGSMRYDIEDSFGIDRLFKLIEQRAGHWLAMEVEASKIELTEHDSRHIDLRRVEPELTAELTRTLFEEAIEGLLERVRGSVTELLAKAGVSEGQVDTVFFTGGSSGIPALRNSVSAMLPNARHVEGNIFGSIGSGLAIEARKRYGAA

SEQ ID NO: 67504 - protein, 293 aa, Pseudomonas putida
MNYLFPLTAILIWAGNTVVTKMSAGAIHPAEIGFYRWLLAALLFTPFLLPAVWRNRAAIRPHLAKVFVLGVLGMAMYQSLAYFAAGITSATNMGIILSLMPLMSLALSIAWLGQRLSYGALLGAVVSFFGVLEVVSAGHPASLLQQGLNSGDLLMLVATLAYALYSFLLKKWQLRLPPMQLLYLQVLVAIVVLLPLFLLSDKTGLNSHNIGLVLYACVLASMIAPLVWMQAVHRLGPSRTTLFFNLLPLVTALIAAVVLDEQLASYHLVGGLLTLAGVVLAERWTTPIRRQGT

SEQ ID NO: 67505 - protein, 450 aa, Pseudomonas putida
MWADVLARFEKKAPASVMAKLALEQAIAPEWVDQVFEEHRQRQYSRELLFSTIIKLMSLVSLGLKPSLHAAARQLDDLPVSLAALYDKISRTEPALLRALVTGCAQRLAPTIHELGCSAMLPDWQVRVVDGSHLASTEKRLGALRQERGAARPGFSVVVYDPDLDQVIDLQPCEDAYASERVCVLPLLAEAKTNQVWIADRLYCTLPVMEACEQVKTSFVIRQQAKHPRLIQEGEWQAPMPVATGTVREQSIEVKGGHRWRRVELTLHSPNDSGDNSLMFWSNLPESISAQQIADFYRRRWSIEGMFQRLEAILESEIETLGSPRAALLGFTTAVLAYNVLALLKRSVEQAHRDALPENWEASIYHLAVQIRGGYEGMQIALPSEYMPVVPMENLAQRLLELARNIQPRQVAKSPRGPKVLKAKAWVQGTAVHAHVSTDRVIKAAKTKRP

SEQ ID NO: 67506 - protein, 337 aa, Pseudomonas putida
MPMKAISFIHKGLPIEDPASLQDIFMPKPSPGPRDLLVEVKAVSVNPVDTKVRAGTFTGEPKILGWDAAGVDREVGRQVTLFKPGDQVYYAGSIARPGSYSEYHLVDERIVGHQPRSLGAAQAAALPLTAITAWELLFDRLGIAEGGGEGDALLIVGAAGGVGSMLVQLARQLTRLTVIGTASRAETSNWVRELGAHHVIDHSAPLQGQLQALGIESVSHVASLTHTDQHFAQLVEVLRPQGRLGVIDDPQTLDVMPLKRKSLSLHWELMFTRSLYETDDMVRQHELLERVAGLIDQGTLRTTLGEHFGAINAANMRRAHALVESGKARGKIVLEGF

SEQ ID NO: 67507 - protein, 197 aa, Pseudomonas putida
MKLRYDDTRQHLLDTGHRMMVVKGFTGVGLNEILQAANVPKGSFYHYFKSKEQYGQSLLEDYFRNYLASMDERFAVTGNTARERLMGYWQKWLDSYCEPCDDQKCLVVKLSAEVADLSEPMRLTLRDGADQIIARISECIEQGQRDGSLAMGDAFHTATALYQLWLGASLLSKLHRNSRPLENAMATTQTILTSDNI

SEQ ID NO: 67508 - protein, 667 aa, Pseudomonas putida
MPPPHHYPRESVRAIRRNRKESHHMKLCSLRISGFQSFGQDITDITFDGVTYLLGPNGAGKTATLQALARMFGFEPGLRRLRRSDFHVPLNEQEVPAQRSLWIEADFTFDETLDDAEDDTVPPFFTQMTLQTADGVPRIRYRLEGILHPDGEVEERLHYVTRMDEHGQPTTLKPVAKRERDEIHVHYLPARRDPADHIAFGASALLGRLLRAVNWSDDRDSIKQLTEQITECLSENESIKTLSAGLSGAWQRLHKGDFFANPSLTFANSEIEAILRHLSISFTPGHGESNVDYARLSDGQKSMLYLSLVLTSLTIGREVRSGQNTSFDPLKLKPAAYTILAVEEPENSLSPHYLGRIVSSLKSSVGVDAQALIATQAPSMLRRVEPDQIRYLRLNSKRETDVSTIVLPDKHSDAYKFVREAVQAFPELYFARLVVLGEGDSEEIVLPRILQAKGAPVDEYAVAIAPLGGRHVNHFWRLLNALGTPHMTLLDLDVGRHQGGWGRVNYVRTQLDVFDPTRSIPDHWTRHSWDDAERPIRTHHWFDNGNETQSSLFQELESRDVFFSDPLDLDFAMLKAFPDAFGAELSAPTPHDHVTVLGKSHFNPGQYNAEEQQLFAAYHKLFKLSSKPAAHLDALGNLTDTELLASLPPSLNRLADRVKAKLEESPE

SEQ ID NO: 67509 - protein, 711 aa, Pseudomonas putida
MPSKKTDAPKHSEAAGTQTPDRANTNAKLQSLEADRSDATGQALRTNQGVRIADNQNSLKAGDRGPSLLEDFIMREKITHFDHERIPERIVHARGTGAHGFFQSYGNHAELTKAGFLQDPEKITPVFVRFSTVQGPRGSGDTVRDVRGFAVKFYTDEGNFDLVGNNMPVFFIQDAIKFPDFVHAVKPEPHNEIPTGGSAHDTFWDFVSLVPESAHMVMWAMSDRAIPRSLRMMEGFGVHTFRLINAEGVASFVKFHWKPRQGVHSLLWDEAQKLAGKDTDFQRRDLWEAIETGDYPEWELGVQIVPEADEHKFDFDLLDPTKIIPEELVPVTPLGKMVLNRNPDNFFAEVEQVAFCPGHIVQGIDFTNDPLLQGRLFSYTDTQISRLGGPNFHQIPINRPVAPNHNNQRDALHQHVVHKGRASYEPNSIDGGWPKETPPAAQDGGFESYQERIDAHKIRQRSESFGDHFSQARLFFHSMSPTEQQHIIKAYSFELGKVEREHIRAREVNEILANIDLKLAAAVAANLGLPAPKAGTVKVKGSQLAQSPALSQMNHPGSVGIKGRKIAVLVADGVDAASVDKLVKALEAHSARPMLLGPTSAPVKAADGKQLPVAASMEGMPSIMFDGIVVPAGKASTDALAASGLAKHFVLEGYKHLKALVLTKELAKALGLKEDKGLLLGDEQKAVDAFVKAVEGHRVWEREAAAEAVPA

SEQ ID NO: 67510 - protein, 215 aa, Pseudomonas putida
MATERHYSPLDRLLLQADTAMRTLLPFSGQPTRPSPAIVQPDADLDEQQARHIAGLMRINHTGEVCAQALYQGQALTAKLPEVRKAMEHAAEEEVDHLAWCEQRIRQLNSHPSVLNPLFYGMSFGIGALAGLVSDKVSLGFVAATEHQVCKHLDEHLEQLPHEDEKSRAILEQMRIDEEQHAESALEAGGYRFPAPVRFGMSLLAKVMTKSTYRI

SEQ ID NO: 67511 - protein, 267 aa, Pseudomonas putida
MNEQYQHRARKRFGQNFLHDAGIIDRILRAINAKAGEHLLEIGPGQGALTEGLLGSGAQLDVVELDKDLVPILQHKFADRSNFRLHQGDALKFDFNQLGVPPRSLKVVGNLPYNISTPLIFHLLSHAGLIRDMHFMLQKEVVERMAAGPGGGDWGRLSIMVQYHCRVEHLFNVGPGAFNPPPKVDSAIVRLVPHEVLPFPAKDHLLLERVVREAFNQRRKTLRNTMKGLLDSAAIEAAGVDGSLRPEQLDLAAFVRLADQLADQQQA

SEQ ID NO: 67512 - protein, 423 aa, Pseudomonas putida
MSYVIDRRLNGKNKSTVNRQRFLRRYREHIKKAVEEAVSRRSIMDMEHGEQISIPGRDIDEPVLHHGRGGKQTIVHPGNKEFTAGEHIPRPQGGGGGGGRGKAGNSGEGMDEFVFQITQEEFLEFMFEDLELPNLVKRHLTGADTFKTVRAGIANEGNPSRINIVRTLRSAHARRIALTGSSRALLREAQKELDRLRVEEPDNFTDIQEVEQEIERLKARINRLPFLDTFDLKYNLLVKQPNPSSKAVMFCLMDVSGSMTQATKDIAKRFFILLYLFLKRNYERIEVVFIRHHTSAREVDEEEFFYSRETGGTIVSSALKLMQEIMAERYPASDWNIYAAQASDGDNWNDDSPICRDILSKQIMPHVQYYTYVEITPREHQALWYEYERIGDAFPDTFAQQQLVSAGDIYPVFRELFQRRLAT

SEQ ID NO: 67513 - protein, 491 aa, Pseudomonas putida
MAERYALDTYPNQIEVITAEQMMDAYASVGMPLGYHHWSYGKQFLSTEKSYSRGQMGLAYEIVINSDPCIAYLMEENTMCMQALVIAHACYGHNSFFKGNYLFRTWTDASSIIDYLVFAKQYIAQCEERHGIDAVEDLIDSCHALMNYGVDRYKRPYPISAEEERRRQQEREEHLQRQINDLWRTIPKNAEKGNDRDEGRFPAEPQENILYFIEKNAPLLEPWQREVVRIVRKIAQYFYPQRQTQVMNEGWATFWHYTLMNDLYDEGLITEGFMMEFLQSHTSVVFQPGFDSPYYSGINPYALGFAMYTDIRRMCENPTEEDRHWFPEIAGSDWLSTIKFAMSSFKDESFILQYLSPKVMRDLKLFSILDDDQRDDLLVPAIHDEAGYRVIREQLAAQYNLGNREPNVQIWSVDRRGDRSLTLRHQQHNRKPLGDSTDEVLKHLHRLWGFDIHLETVQGEQVMSTHHMPPRGEHSESADYGRMDLAVIHHL

SEQ ID NO: 67514 - protein, 368 aa, Pseudomonas putida
MHIYKVGGAVRDRLLGRPVSDIDWLVVGATVEEMLANGYRPVGADFPVFLHPKTGEEYALARTERKSGRGYGGFTFHASPDVTLEEDLIRRDLTINAMAEDEAGTVYDPYQGKNDLDQRLLRHVSPAFAEDPLRVLRVARFAARYAPLGFRVADETLALMRQISASGELQALTAERSWKEIERALMEVQPQVFFKVLSACGALQELLPELDDGSRTLAALEQAAAHEQPLNVRWACLLRGLPPTSIKAVNQRLKAPRECQELAMLTGECLAQGNQALELPATALLELLQKFDVYRRPQRFEDFLTVCEMAARGDGEQGYPQADYLRGAAAAARAVDVKPLVQAGLTGQALGEALKGERLKALEAYQRG

SEQ ID NO: 67515 - protein, 189 aa, Pseudomonas putida
MFWLLALLAYLLGSLSFAIVLSRLSGSPDPRSSGSGNAGATNMLRLAGRKLAILTLLGDLCKGLLPVLLARAAGLDLHAQAWVGICAVLGHLFPLYFRFKGGKGVATAAGMLMALYFPAALLAIGAWLLTFYLTRTSSLAALIATPLTLPLLAWREPEALLPISVLTVMIVWRHRNNLRDLFAGRERHF

SEQ ID NO: 67516 - protein, 660 aa, Pseudomonas putida
MAGLIPQSFIDDLINRLDIVDVVSSRVQLKKTGKNYSACCPFHKEKTPSFTVSPDKQFYYCFGCGAGGNALGFVMDHDNLDFPQAVEELARAAGMEVPREQGRRDQKPRQPTDSPLYPLLDAASEFYRQALRSHPSRKAAVDYLKGRGLSGEIARDFGLGFAPPGWDNLLKHLGADTLQQKVMIDAGLLIENAESGKRYDRFRDRVMFPIRDSRGRIIAFGGRVLGDDKPKYLNSPETPVFHKGQELYGLYEARKHNRNLDEIIVVEGYMDVIALAQQGLRNAVATLGTATSEEHLKRLFRVVPSVLFCFDGDQAGRKAAWRALESTLSNLQDGRRARFLFLPEGEDPDSLVRAEGTDAFMARINQHSQPLADYFFEQLGVEADPRSLEGKAHMATLAAPLIEKIPGANLRQLMRNRLKEITGLDPQQVEQLAQQAPATSSMPDYDPGYDYDAMASYTPDYGDMPQHDYAPVHQEQAWKPNKGGSKKPWSDKPWDKNRKGGKPWQQRDEAPPRVPAPVEPPTLAALRTLLHHPLLAGKVEDASHFADEEHLYSQLLVALIEAAQKNPGLSSMQLIARWHGTEQGRLLRALAEKEWLIVADNLEQQFFDTITSLSARQRERSLEQLLRKSRQSELTSEEKTQLLALLSRNVPAQTPTSSGA

SEQ ID NO: 67517 - protein, 613 aa, Pseudomonas putida
  MISC_FEATURE (148)..(148): X=any amino acid
  MISC_FEATURE (168)..(168): X=any amino acid
KAQQQSRIKELITRGREQGYLTYAEVNDHLPEDISDPEQVEDIIRMINDMGINVFESAPDADALLLAEADTDEAAAEEAAAALAAVETDIGRTTDPVRMYMREMGTVELLTREGEIEIAKRIEEGIREVMGAIAHFPGTCRLHSRRIXPRHHRGWPPVGRSQRLHRPXRQHCRANRRSADPRCQGRLRRRKSPTTTKKNPKAVTTRKRPRAARIRSSQPNASVRYPISFRATSKVLKKNGRNHKESIEALQALADLFMPIKLVPKQFEVLVERVRDALNRLRQQERAIMQLCVRDARMPRADFLRMFPSNETDQTWSGDLAKRNTKWAAALGEKNAAIVACQQKLIDLETETGLTVAEIKEINRRMSIGEAKARRAKKEMVEANLRLVISIAKKYTNRGLQFLDLIQEGNIGLMKAVDKFEYRRGYKFSTYATWWIRQAITRSIADQARTIRIPVHMIETINKLNRISRQMLQEMGREPTPEELGERMEMPEDKIRKVLKIAKEPISMETPIGDDEDSHLGDFIEDSTMQSPIDVATVESLKEATRDVLSGLTAREAKVLRMRFGIDMNTDHTLEEVGKQFDVTRERIRQIEAKALRKLRHPTRSEHLRSFLD

SEQ ID NO: 67518 - protein, 233 aa, Pseudomonas putida
MTTTNSTTDVGSAYLTSLQKQTSKTDSSTGAAGSALGKDAFLQLLVTQMQNQNPLDPQENGEFVAQLAQFSSLESMQSLNDAVTYIAAGLQSSQALQASSLVGRNVIVQTDKAVVDTSKDMKGSVNLTSSSTSTSVGIYDKDDKLVRTIELGTQKSGSIDFTWDGLNDDGEVAAAGTYTFKATASIDGKATAMTTNLPASVTSVTMGSNGSEMTLNLAGLGSVALSKIQSIGI

SEQ ID NO: 67519 - protein, 461 aa, Pseudomonas putida
MSMQQIIQTTLLIIGGGPGGYVAAIRAGQLGIPTVLVEGQALGGTCLNIGCIPSKALIHVAEQFHQASRFTEPSPLGISVASPRLDIGQSVTWKDGIVDRLTTGVAALLKKHGVKVVHGWAKVLDGKQVEVDGQRIQCEHLLLATGSSSVELPMLPLGGPVISSTEALAPKTLPQHLVVVGGGYIGLELGIAYRKLGAQVSVVEARERILPTYDSELTAPVAESLKKLGIALHLGHSVEGYENGCLLASDGKGGQLRLEADQVLVAVGRRPRTKGFNLECLDLKMNGAAIAIDERCHTSMHNVWAIGDVAGEPMLAHRAMAQGEMVAEIIAGKARRFEPTAIAAVCFTDPEVVVVGKTPEQASQQGLDCIVAQFPFAANGRAMSLESKSGFVRVVARRDNHLIVGWQAVGVAVSELSTAFAQSLEMGACLEDVAGTIHAHPTLGEAVQEAALRALGHALHI

SEQ ID NO: 67520 - protein, 423 aa, Pseudomonas putida
MGTHVIKMPDIGEGIAQVELVEWFVKVGDIIAEDQVVADVMTDKATVEIPSPVSGKVLALGGQPGEVMAVGSELIRIEVEGSGNHVDVPQPKPVEAPAAPIAAKPEPQKDVKPAVYQAPANHEAAPIVPRQPGDKPLASPAVRKRALDAGIELRYVHGSGPAGRILHEDLDAFMSKPQSNAGQAPDGYAKRTDSEQVPVIGLRRKIAQRMQDAKRRVAHFSYVEEIDVTALEALRQQLNSKHGDSRGKLTLLPFLVRALVVALRDFPQINATYDDEAQIITRHGAVHVGIATQGDNGLMVPVLRHAEAGSLWANAGEISRLANAARNNKASREELSGSTITLTSLGALGGIVSTPVVNTPEVAIVGVNRMVERPVVIDGQIVVRKMMNLSSSFDHRVVDGMDAALFIQAVRGLLEQPACLFVE

SEQ ID NO: 67521 - protein, 715 aa, Pseudomonas putida
MLEQAQRVLKDIFGYDSFRGRQAAIIECVANGGDALVLMPTGGGKSLCFQVPGLLRPGLTVVVSPLIALMDDQVATLDELGVSAAALNSTLTAEQQRELAGRLRRGEVKMLYLAPERLVQPRMLDFLRDLDISLFAIDEAHCVSQWGHDFRPEYLQLGQLAELFPHVPRIALTATADMRTREEIVQRLHLQGAERFLSSFDRPNIFYRIVPKEAPRKQLMAFLGERRGNAGIVYCLSRKKVDETAAFLCSQGFPALPYHAGLAAETRAANQHRFLNEEGLIMVATIAFGMGIDKPNVRFVAHLDLPKSLEAYYQETGRAGRDGLPSDAWMAYGLQDMVMLKQMLQNSEGDERHKRIEQHKLDAMLALCEETRCRRQSLLAYFDEILEQPCGHCDNCVDNIQTWDATEPARQALSAVFRTGQRYGVGHLVDVLLGKDTEKVRNFGHEKLSVFGVGKGLAEVEWRSLFRQLVARGLVDIDLEGYGGLRLSDSCRPLLRGEVTLQLRRDLKPQTTAKTSSSSGGSPASQLVRAEERDLWEALRTLRRKLAEEHSVPPYVIFPDSTLLEMLRSQPVSLSDMAQVSGVGARKLERYGQAFLEVLNNSGGTDEAPKVVLDLRHELVSLARAGMTPAQIAGQLNCSEKNVYSLLAEALGRQELSLDQAIDLPEDLMMEVQDAFLDGEGELPPVSAIAPQFGARVPEGVLYCVRAALAAEFEL

SEQ ID NO: 67522 - protein, 363 aa, Pseudomonas putida
EIQPILNTIKDLTERSQSIRGYLDYDHKHDRLIEVNRELEDPNVWNKPEYAQALGRERAMLAQVVETLDKLSNGLGDCQDLLDMAVEENDEGAVGDVVTELESLEENLAQLEFRRMFSGEMDMNNAYLDIQAGSGGTEAQDWANILLRMYLRWADKRGFDATIIELSEGEVAGIKGATVHIKGEYAFGWLRTEIGVHRLVRKSPFDSGARRHTSFSAVFVSPEIDDKVEIEINPSDLRIDTYRSSGAGGQHVNTTDSAVRITHVPTNTVVACQNERSQHANKDTAMKMLRAKLYELEMQKRNAASQALEDSKSDIGWGHQIRSYVLDDSRIKDLRTGVERSDCQKVLDGDLDQYLEASLKQGL

SEQ ID NO: 67523 - protein, 558 aa, Pseudomonas putida
MSESFAELFEESLKTLNLQPGAIITGIVVDIDGDWVTVHAGLKSEGVIPLEQFYNEAGELTIKVGDEVHVALDAVEDGFGETKLSREKAKRAECWIVLEAAFAAEEVVKGVINGKVKGGFTVDVNGIRAFLPGSLVDVRPVRDTTHLEGKELEFKVIKLDQKRNNVVVSRRSVLEAENSAEREALLETLQEGQQVKGIVKNLTDYGAFVDLGGIDGLLHITDMAWKRIKHPSEIVNVGDEVDVRVLKFDRERNRVSLGLKQMGEDPWVAITARYPEGTRVQARVTNLTDYGCFAELEEGVEGLVHVSEMDWTNKNIHPSKVVQVGDEVEVMVLDIDEERRRISLGIKQCKSNPWEDFSGQFNKGDKITGTIKSITDFGIFIGLDGGIDGLVHLSDISWNETGEEAVRRFKKGDELETVILSVDPERERISLGIKQLEDDPFSNFVAVNDKGAIVKGIVKEVDAKGAIVTLADDIEATLKASEISRDRVEDARNVLKEGEEIEAKIISVDRKSRVISLSIKSKDDAEEREAIQSLKNAPEAAADTTMAALLREAMAKQN

SEQ ID NO: 67524 - protein, 806 aa, Pseudomonas putida
MIAVGALCLYLWMALLTYDTSDPGFSHTSNVDQVQNAAGRAGAYFADILFMVLGYFAYIFPLLLAVKTWQIFRERHQPWDWSGWLFSWRLIGLVFLVLSGAALAHIHFHPPASLPFSAGGALGESLGDLARNLLNVQGSTLMFIALFLFGLTVFTDLSWFKVMDLTGKITLDLFELVQGAATRWWEARNERKRLEAQLREDEPVFKAAPMAAEKREPAKPSLRERILKREEPPAQPVEPREPTLAREPIVPPRETAPEALAPRETVVPRQQHAAPTIVPPSAASRAPEPSKRAMKEKQAPLFVDSAVEGTLPSISILDPAEQKKIEYSPESLAGVGQLLEIKLKEFGVEVAVDSIHPGPVITRYEIQPAAGVKVSRIANLAKDLARSLAVTSVRVVEVIPGKTTVGIEIPNENRQMVRFSEVLATPQYDEQKSPVTLALGHDIGGKPVITDLAKMPHLLVAGTTGSGKSVGVNAMILSILFKSSPEDARLIMIDPKMLELSIYEGIPHLLCPVVTDMKDAANALRWSVAEMERRYKLMAAMGVRNLAGFNRKIKDAQEAGEVIHDPLYRRESMDDEPPALKTLPTIVVVVDEFADMMMIVGKKVEELIARIAQKARAAGIHLILATQRPSVDVITGLIKANIPTRMAFQVSSKIDSRTIIDQGGAEQLLGHGDMLYMPPGTSLPIRVHGAFVSDDEVHRTVEAWKLRGAPDYNDDILNGVEEAGSGFDGGGGGGEGDDAETDALYDEAVQFVLESRRASISAVQRKLKIGYNRAARMIESMEMAGVVTPMNSNGSREVIAPGGPRD

SEQ ID NO: 67525 - protein, 441 aa, Pseudomonas putida
MDLFRSEPVAQPLAARLRPSSLDEYVGQEHLLARGKPLREALEQGALHSMIFWGPPGVGKTTLARLLAQFCDAHFETVSAVLAGVKEIRQAVEVAKQQAGQYGRRTILFVDEVHRFNKSQQDAFLPYVEDGTLLFIGATTENPSFELNNALLSRARVYVLKSLDEAALRKLVNRALTEERGLGKRNLRVGDDAFKMLMAAADGDGRRMLNFLENASDLAEDGSEIDVEMLQSLLGDSRRRFDKGGEAFYDQISALHKSVRGSNPDGALYWFARMLDGGCDPLYIARRVVRMASEDIGNADPRALSLCLAAWDVQERLGSPEGELAVAQAITYLACAPKSNAVYVGFKTALREAAEHGSLEVPLHLRNAPTKLMKQLGYGDEYRYAHDEPDAYAAGEDYFPDELEPRQYYQPVPRGLELKIGEKLRHLADLDRNSPRQRRKP

SEQ ID NO: 67526 - protein, 426 aa, Pseudomonas putida
MLDSKLLRGQLQEVADRLASRGFSLDVARIESLEERRKAVQTRTEQLQAERNARSKSIGQAKAKGEDIAPLMADVERMANELAAGKAELDAIQAELDGILLTIPNLPDASVPVGASEDDNVEVRRWGTPKAFDFEIKDHVALGEISGGLDFEAAAKLSGARFAVLRGPVARLHRALAQFMINLHTGEHGYEEHYTPYMVQAPALQGTGQLPKFEEDLFKITREGEADFYLIPTAEVSLTNLVAGEILDAKQLPLKLVAHTPCFRSEAGASGRDTRGMIRQHQFDKVEMVQVVEPSKSMEALEGLTANAERVLQLLELPYRVLALCTGDMGFGAVKTYDLEVWVPSQDKYREISSCSNCGDFQARRMQARWRNPETGKPELVHTLNGSGLAVGRTLVAVLENYQQADGSILVPEVLKPYMGGVEVIR

SEQ ID NO: 67527 - protein, 463 aa, Pseudomonas putida
MDYLPLFHKLQGGRVLVVGGGEIALRKARLLADAGGVLRVVAPDVDGQLAALAREGGGEVLVRGYQAADLVGCRLVIAATDDPGLNAQVSADAQALSLPVNVVDAPALCTVIFPAIVDRSPLVIAVSSGGDAPVLARLIRAKLEAWIPSAYGELAGLAARFRHKVKSLYPDVNQRRGFWETVFQGPIAERQLAGQGAEAERLLQAMVDGAPVQQGGEVYLVGAGPGDPDLLTFRALRLMQQADVVLYDRLVAPAIIDMCRRDAERIYVGKRRADHSVPQDQINRLLVDLARQGKRVLRLKGGDPFIFGRGGEEIEELAEHGIPFQVVPGITAASGCSAYGGIPLTHRDYAQSVRFVTGHLKDGTSNLPWNDLVAPAQTLVFYMGLVGLPTICAELIRHGRAASTPAALVQQGTTRNQRVFTGTLADLPDLVAQHEVHAPTLVIVGEVVQLRDKLAWFEGSQNS

SEQ ID NO: 67528 - protein, 757 aa, Pseudomonas putida
MRGRGLCCYFKRTLQGSDGAVQGLAWAHHLGGQLGIRGVVAADVGWLALNGVELGDDGRFVLGQGFCQWCEACLQGSVVRLSGQGLGPVQGQVEVATAVVDTADFARWRLVGVEELAGSLVQGVGQNLGARVVVGVAQVLQGSGQGQEFTQRVPTQEVLFNQLLHVLRSRTAGAGFEQATAVHQRHDRQHLGACAQFHDREQVGQVVAQHVAGHRDGVLAFADAGQGELDGVDRCQDTDVQAGGVVIFQVLLHLLDHDAVVGTSRVQPEHRRGVAQAGTVDGQLDPILDRRVLGLAHAEDVTGFDVLLQHDVALAIDYANHAVSLDLEGLVVGAILFGFLRHQANVRHAAHGGRVEGTVDLAVFDGGLVDAGVAAVRDHGLGVLQFACGVPHLARVTDHGRHRGVDDHVARHVQVGDAFVGVDHGQGWALCVQGLDVGFDLGLLVGWQVLDAGVQVADTVVGVEAYFGQGSGVLGQHVVVEFFDDDAEHDRVGDLHHGGFQVHRQQHASGLGIGDLLGDEGFQGLAAHGGAVDDFGGFDGGLFFQHGGAAVFADQLDAQAVVSFDQCGFFAAVEVALGHVGNVRLGVSGPGAHLVWVLAGVVLDRQRRAAVGVAFAQHRVHGGALDAVVAGAGFFFFRGGRLVGVVRDVEALALQFLDRGFELRYRGADVRQLDDVGFRGGSQLAQFRQVIAYLLLCAQLLREGGKDTASQGNVASFDSDVSRSGERFDDRQQRVSGEGGGFVGEGIDDLGTGGHAG

SEQ ID NO: 67529 - protein, 380 aa, Pseudomonas putida
MLIVADENIPLLDAFFQGFGEIRRYPGRSLDAASVKDADILLVRSVTKVDRQLLEGSRVRFVGTCTIGTDHLDLDYFAEAGIHWSSAPGCNARGVVDYVLGSLLTLAELDGVALPERVYGVVGAGEVGGRLVRVLHGLGWKVLVCDPLRQAAEGGDYVSLETILQQCDVISLHTPLQRGGQHPTWHLLGQAQLAQLRPGAWLVNASRGPVVDNVALRELLLDREDVHAVLDVWEGEPQVDLQLADLCTLATPHIAGYSLDGRQRGTARIYQALCRFLGVNEQVRLAELLPKPPLAQIELDASTDLSWALATLCRAVYDPRRDDADFRRSLSDDPQQQRAAFDQLRKQYPPRREIEGLAVRLHGEAPQLAQLVSALGGVLV

SEQ ID NO: 67530 - protein, 418 aa, Pseudomonas putida
MGYQKIKVPTDGTKITVNADHSLNVPDHPIIPYIEGDGIGVDVSPVMIKVVDAAVQKAYGGKRKIAWMEVYAGEKATQVYDQDTWLPQETLDAVRDYVVSIKGPLTTPVGGGIRSLNVALRQQLDLYVCLRPVLWFQGVPSPVKKPGDVDMVIFRENSEDIYAGIEWKAGSPEANKVIKFLKEEMGVTKIRFDQDCGIGVKPVSKEGTKRLVRKALQYVVDNDRESLTLVHKGNIMKFTEGAFKDWGYEVARDEFGAELLDGGPWMKFKNPKTGREVIVKDAIADAMLQQILLRPAEYDVIATLNLNGDYLSDALAAEVGGIGIAPGANLSDTVAMFEATHGTAPKYAGQDKVNPGSVILSAEMMLRHMGWTEAADLIIKGTNGAIAAKTVTYDFERLMEGAKLVSSSGFGDEMIKHM

SEQ ID NO: 67531 - protein, 1106 aa, Pseudomonas putida
MAKRSRPAAFIDDPLWYKDAVIYQLHIKSFFDSNNDGIGDFAGLISKLDYIAELGVNTLWLLPFYPSPRRDDGYDIAEYKAVHPDYGSMADARRFIAEAHKRGLRVITELVINHTSDQHPWFQRARHAKRGSKAREFYVWSDDDQKYDGTRIIFLDTEKSNWTWDPVAGQYFWHRFYSHQPDLNFDNPQVLKAVIGVMRFWLDLGVDGLRLDAIPYLIERDGTNNENLAETHDVLKAIRAEIDANYPDRMLLAEANQWPEDTRPYFGEGDGDECHMAFHFPLMPRMYMALAMEDRFPITDILRQTPEIPANCQWAIFLRNHDELTLEMVTDRERDYLWNYYAEDRRARINLGIRRRLAPLLQRDRRRIELLTSLLLSMPGTPTLYYGDELGMGDNIYLGDRDGVRTPMQWSPDRNGGFSRADPQRLVLPPIMDPLYGYQTVNVEAQSHDPHSLLNWTRRMLAVRKQQKAFGRGSLRTLTPSNRRILAYIREYTDADGNTEVILCVANVSRAAQAAELELSQYADKVPVEMLGGSAFPPIGQLPFLLTLPPYAFYWFLLASRDRMPSWHIQPTEGLPELTTLVLRKRMEELLQAPASDTLQSTILPQYLPKRRWFAGKEGPIDAVRLCYGVRFGTATTPVLLSEIEVLSDGTATRYQLPFGLLREEQIHTALPQQLALSRVRRAHQVGLITDAFVLEPFIHAVMQACQDGLRLPCGDAEGELRFECTEQLAGLALDEESEVRYLSAEQSNSSVVIGDRVVLKLIRRVNPGIHPELEMSAYLTAAGFANISPLLAWVSRVDEQHAPHLLMIAQGYLSNQGDAWGWTQNTLERAIRDQMEPTRNDAEAHTDALAELSGFAALLGQRLGEMHLLLAAPTEDPAFQPRPSDAQDSERWCAQISTELTHALDLLAQHRDTLDSDSQSLVDDLQQQRDGLAQHIDTLSKQAQGGLLMRVHGDLHLGQVLVVQGDAYLIDFEGEPARPLEERRAKHSPYKDVSGVLRSFDYAAAMILRSASAVDLSEPARQARQRVARQYLHQSRHAFVEAYGLATAAMPHAWQHAEGERAALELFCLEKAAYEITYEAENRPSWLAVPLHGLHGLISTWGESE

SEQ ID NO: 67532 - protein, 39 aa, Pseudomonas putida
MLQVKMFIVAGLLDAVTMIGVGIALFFTFANPFVGQIAG

SEQ ID NO: 67533 - protein, 339 aa, Pseudomonas putida
MSDNRAVTAKLSRVDKAAILLLSLGETDAAQVLRHMGPKEVQRVGVAMAQMGNVHRDQVEQVMSEFVDIVGDQTSLGVGSDAYIRKMLNQALGEDKANGLVDRILLGGNTSGLDSLKWMEPRAVADVIRYEHPQIQAIVVAYLDPDQAGEVLSNFDHKVRLDIVLRVSSLNTVQPAALKELNQILEKQFSGNSNAARTTLGGIKRAADIMNFLDSSVEGALMDAIREIDSDLSEQIEDLMFVFNNLADVDDRGIQALLREVSSDVLVVSLKGADERVKDKIFKNMSKRASELLRDDLEAKGPVRVSDVETAQKEILTIARRMAEAGEIVLGGKGAEEMI

SEQ ID NO: 67534 - protein, 352 aa, Pseudomonas putida
MNDHNNSINPETAMATTTMTMIQALRSAMDVMLERDDNVVVYGQDVGYFGGVFRCTEGLQNKYGKSRVFDAPISESGIVGTAVGMGAYGLRPVVEIQFADYFYPASDQIVSELARLRYRSAGEFIAPLTLRMPCGGGIYGGQTHSQSPEAMFTQVCGLRTVMPSNPYDAKGLLIASIECDDPVIFLEPKRLYNGPFDGHHDRPVTPWSKHPHSAVPDGYYTVPLDKAAITRPGNDVTVLTYGTTVYVAQVAAEESGVDAEVIDLRSLWPLDLDTIVESVKKTGRCVVVHEATRTCGFGAELVSLVQEHCFHHLEAPIERVTGWDTPYPHAQEWAYFPGPSRVGAALKKVMEV

SEQ ID NO: 67535 - protein, 380 aa, Pseudomonas putida
MAESESGQDKTEDPTEKRKRDAREKGEVARSKELNTVAVTLAGAGGLLAFGGHVAETLLALMRMNFSLTRDIIVDERAMGAFLLASGKMAIWAVQPVLILLFVVSFVAPIALSGFLFSGSLLQPKFSRMNPLSGIKRMFSMQALTELLKALAKFFVILVVAVVVLSGDRQALLSIANEPLEQAIIHSLQVVGWSALWMSAGLLLIAAADVPFQLYQTHKKMKMTKQEVRDEYKDSEGKPEVKQRIRQLQREVSQRRMMAAVPDADVIITNPTHYAVALQYDPEKGGAAPLLLAKGSDFMALKIREIGVEHNIQILESPALARAIYYSTELEQEIPAGLYLAVAQVLAYVFQIRQYRAGKGKRPEPLKDDLPIPPDLRRDS

SEQ ID NO: 67536 - protein, 299 aa, Pseudomonas putida
MPTAGLDNYVQGAKFGKDEEFMFGKIGASFLPRKAEEQETSDLCVEAAQALFASNPDLDPQSIDALIVVTQNGDEEGLPHTAAIVQSKLGLSTRVAAFDVSLGCSGYVYGLYAIKGFMEAAGLKNGLLITADPYSKIVDPEDRNTTMLFGDAATATWMGENAVWNLGQARFGTDGSGAEHLKVSDGKFFMNGRQVFNFALIKVPAHLHELLDASGLKSSDIDAFCIHQGSAAIVDAVARRFEEQHPEKFVKDMLETGNTVSSSVPLLLQKHMLDGSWKRVAISGFGVGLSWGSAILYRD

SEQ ID NO: 67537 - protein, 583 aa, Pseudomonas putida
MAISGSVGADQVLPTPPELASGYRSGLQPVHASRHMVAAANPLASEAGRAMLRAGGSAIDAAIAMQMVLTLVEPQSSGIGGGAFILYWDGKRVQAFDGREAAPAAVTEKLFLQADGTPMPFRVAQIGGRSVGVPGVLRALKQAHEQHGKLPWHALFAPAIALARNGFAVSERLHTLLAGDPYIARSPAMARYFLDEQGRPLAVGTILRNPELAQTLEQIAAQGPEVFYSGEIAEAIVAKVRGHANAGYLSLQDLQQYQAKEREPLCGPYKAWQICGMPPPSSGGVTVLQTLGLLDAVQRTAPQRDLAALRPLATSSPARLEAPPLAVHLIAEAERLAYADRAQYLADNDYVPVPVKALTDSAYLASRAALIGEHSMKRARPGQPQGADLALAPDRSPLRISTSHLSAVDDNGQALAMTTSVEAAFGSHLMVKGFLLNNQLTDFSFIPHEHGKPVANRVQPGKRPLSAMAPTLVFSRATGEFVASLGSPGGSQIIGYVNKALVGLLDWRLDPQQAADLPNFGSRNAGTEVEAGLSSPALIRQLAAWGHEVTPMTMTSGMQIIQRSGEGWSGGADPRREGVALGD

SEQ ID NO: 67538 - protein, 449 aa, Pseudomonas putida
MSTMIESVDNFLARLKQRDPGQPEFHQAVEEVLRTLWPFLEANPHYLQSGILERMVEPERAVLFRVSWVDDQGKVQVNRGYRIQMSSAIGPYKGGLRFHPSVNLSVLKFLAFEQVFKNSLTSLPMGGGKGGSDFDPKGKSDAEVMRFCQAFMSELYRHIGADCDVPAGDIGVGAREIGFMFGQYKRLANQFTSVLTGKGMTYGGSLIRPEATGYGCVYFAEEMLKRQDKRIDGRRVAVSGSGNVAQYAARKVMDLGGKVISLSDSEGTLYAEAGLTDAQWDALMELKNVKRGRISELAGQFGLEFRKGQTPWSLPCDIALPCATQNELGAEDARTLLRNGCICVAEGANMPTTLEAVDIFLDAGILYAPGKASNAGGVAVSGLEMSQNAMRLLWTAGEVDSKLHNIMQSIHHACVHYGEEADGRINYVKGANIAGFVKVADAMLAQGVV

SEQ ID NO: 67539 - protein, 1035 aa, Pseudomonas putida
MNLSGPFIRRPVATMLLSLAIMLLGGVSFGLLPVAPLPQMDFPVIVVSANLSGASPEVMASTVATPLERKLGSIAGVTTLTSSSNQGSTRVVIGFELGRDIDGAAREVQAAINATRNLLPSGMRSMPTYKKINPSQAPIMVLSLTSDVLQKGQLYDLADTILSQSLAQVSGVGEVQIGGSSLPAVRIAVEPQLLNQYNLSLDEVRTAVSNANQRRPMGFVEDAERNWQVRANDQLESAKDYEPVVIRQQNGTILRLSDVATVTDGVENRYNSGFFNDQAAVLLVVNRQTGANIIETVDQIKAQLPALQSLLPASVQLNVAMDRSPVIKATLKEAEHTLLIAVVLVILVVYLFLGSLRASLIPSLAVPVSLVGTFAVMYVCGFSLNNLSLMALILATGLVVDDAIVVLENISRHIENGQPPMKAAFLGAKEVGFTLLSMNVSLVAVFVSILFMGGIVRNLFQEFSITLAAAIIVSLVVSLTLTPMLCARWLKPQQAEQTRLQRWSDTLHQRMVAAYDHSLGWALRHKRLTLLSLLATIGINIALYVVVPKTLMPQQDTGQLMGFIRGDDGLSFTVMQPKMEIYRRALLADPAVQSVAGFIGGNSGTNNAFVLVRLKPISERKIDAQKVIERLRKELPKVPGGRLFLMADQDLQLGGGGRDQTSSQYLYTLQSGDLAALREWFPKVVAALRALPELTAIDARDGAGTQQVTLVVDRDQAKRLGIDMDMVTAVLNNAYSQRQISTIYDSLNQYQVVLEINPKYAWDPSTLEQVQVITADGARVPLSTIAHYENSLANDRVSHEGQFASEDIAFDVAEGYSPDQAMAALERAVAKLGLPEEVIAKLGGTADAFAQTQQGQPFMILGALLLVYLVLGILYESYIHPLTILSTLPSAGVGALLALYVTGGEFSLISLLGLFLLIGVVKKNAILMIDLALQLERHQGFSPEESIRRACLLRLRPILMTTLAAILGALPLLLSQAEGAEMRQPLGLTIIGGLVFSQILTLYTTPVVYLYLDRLRHRFNRWRGVRTDAALETPL

SEQ ID NO: 67540 - protein, 393 aa, Pseudomonas putida
MRGGKGMGMIGGRPGFGGSSDPVPVRVVPVRIGDFPLYYKALGTVTATNTVNVRSRVAGELVKIHFKEGQRVKAGDLLAEIDPRPYRIALQQAEGTLAQNQAQLKNAQVDLARYKGLYAEDSIAKQTLDTAEAQVAQFQGLVKTNQAQVNDARLNLDFTQIRAPISGRVGLRQLDLGNLVAANDTTALVVITQTEPINVAFTLPETELSTVLERYRSGASLPVEAWDRGDSKLQSTGVLGSIDNQIDTTTGTLKFKGRFENKDLALFPNQFVNVRLLADTLKQVVMAPAAAIQFGNDGTFAYVVNEQSTVNVRKLKVGASDGENSVILDGLKAGDRLVLEGTDRLREGTKVEVVEDSSQVPTSPGQHLQGQEAKGAAQTGEAQPGNAAGKAGA

SEQ ID NO: 67541 - protein, 185 aa, Pseudomonas putida
MEALDALLNRVSVPRLTDPAPNAAQREALFQAALRAPDHGQLRPWRFLTIEGQGREKLGELFAEAVQHKGDASQAALDKARAMPLRAPLLIVVVARLQDHFKVPKSEQRLAAGCAAHGILIAAHAQGIGAVWRTGDMAFDAHVHKGLGLAENEELIGYLYVGTPLTEPRTAPVLETADFVSSWGE

SEQ ID NO: 67542 - protein, 480 aa, Pseudomonas putida
MTEVEVKKAQESLQDRLAQVVELLQRQRMVEDLTHRQEGAHNDLVENLVHRQNLVELQRKLDDLHPADIAYILEALPLEDRLTVWQLVRSERDGDILLEVSDSVRQSLIADMDDHELLAAAKEMDADELADLAPELPRDVVHELMETLDAQQRERVRSALSYDEEQVGALMDFEMVTIREDVSLEVVLRYLRRLKELPNHTDKLFVVDYDGILKGVLPIKRLLVNDPEKKVAEVMATDPVSFQPEEDAYDAAQAFERYDLVSAPVVDKSERLIGRLTIDEMVDLIREESESEVLNMAGLREEEDIFASVWRSFRNRWAWLAINLITAFVASRVIGLFEGSIEKLVALAALMPIVAGIGGNSGNQTITMIVRAMALDQVSPGNTSRLMRKELAVSLINGLVWGGVIGAVAFWLYGSWSLGVVMTAAMTLNLLLAALMGVLIPMTLARLGRDPAMGASVMITAVTDSGGFFIFLGLATLFLL

SEQ ID NO: 67543 - protein, 484 aa, Pseudomonas putida
MALPTLRIIGFIIGIFLITLAVSMAVPMATLVIFERTGDMPSFLWSSLITFIAGLALVVQGRPEHVHLRPRDMYLLTVSSWLVVCVFAALPFLLTQHISYTDAFFESMSGITATGATVLSGLDNMSPGILMWRSMLHWLGGIGFIAMAVAILPLLRIGGMRLFQTESSDRSEKVMPRSHMVAKSIVGVYVGFSILGALAFWWAGMSPFDAINHAMSAISTGGFSTSDQSLAKWDIPAVHWVAVVVMIMGSLPFTLYVATLRGNRKALIRDQQVQGLLGMLVVTWLVLGTWYWYSTNLHWLDALRHVALNVTSVVTTTGFSLGDYSLWGNFSLMLFFYLGFVGGCSGSTAGGIKIFRFQVAYILLKASLNQLIHPRAVIKQKYNGHRLDEDIVRSILTFSFFFAITICVMALLLSLLGVDWMTALTGAAGTVSGVGPGLGEVIGPSGNYATLPDAAKWILAAGMLLGRLEIITVLVLCMPAFWRH

SEQ ID NO: 67544 - protein, 172 aa, Pseudomonas putida
MRVQLDAVFVPLNIAVLTVSDTRTYDNDTSGALLANRSVEVGHRLVARALLKDDLYKIRAQVASWIADEQVQVVLITGGTGFTGRDSTPEAVECLLDKRIDGFGELFRALSILDIGSSTVQSRALAGLSNRTLVCCLPGSTGACRTAWEGILAEQLDARHRPCNFVKHLLPM

SEQ ID NO: 67545 - protein, 353 aa, Pseudomonas putida
MSERTTSASWASGIVKALELEGLDCRAMFKQLGLDFAALDDPDARFPQDSMTRLWQLAVELSGNEAIGLNMARVVRPASFHVVGYALMSSRTLAEGFERLVRYQRIIAESSDLSFVLGPEGYSLILTVHGDHLPPTRHSAEASLACALALCKWLSGRPVQPRRVLVQGPQPKNVEPYKVAFHSPLVFGAPHDALVFERADMEAPLPTANEAMAVLHDRFAGEYLARFSESRVSHRVRQVLCRILPQGEPKRETLAQALHLSQRTLQRRLQEEGTSFQTLLDDTRRELAEQYLAQPGMTLLETAYLLGFADPSNFYRAFRRWFDATPSEYRARLGAEGEVLSDARTPACTTPTP

SEQ ID NO: 67546 - protein, 260 aa, Pseudomonas putida
MTDTPLATLYQSLDQHRPATLEALLAGVSLLLPMLDAIPNAAIFIKDSAARYALANNTLVQRCGLKRLQPLLGKTSAEVFPAQFGPGYTEQDRRVLKEGLVLEDQLELHLYGSREPGWCLTHKRPLYNPAGEIIGLVGISVDLQSAADSHPAYQRLAAVDEHIRQHFHQPISMSELTRIAGISVAQLERYCKRVFHLTPRQMIHKARLEHAHRLLHSELPITEVAMRCGYTDHSAFSRQFKQLTGFTPRQYRQATADQLA

SEQ ID NO: 67547 - protein, 335 aa, Pseudomonas putida
MLALGKLLELTLTDHEPAEKTQVTPKGARLRWLGEGALEVRPAESDDCGLDLLLSAGIHGNETAPIELLERLLHGVANGKIRPRARVLFLFGNPAAIRKGERFIEQDINRLFNGRHELSSGFEALRAAELEQFARVFFSKPGRNRLHYDLHTAIRGSKIEQFALYPYKEGRKHSRRELARLAAAGMEAVLLQSKSSITFSAFTYEQLEAEAFTLELGKARPFGQNEQVNLDKLEERLIRIIEATEPEDESSLDGLQLFSVSREIIKHSDSFHLHLPADIENFSELSKGYLLAEDLAEMRWVVEEEGARIIFPNPKVKNGLRAGILIVPDSGQRLG

SEQ ID NO: 67548 - protein, 406 aa, Pseudomonas putida
MSVEQAPVQRADFDQVMVPNYSPAAFIPVRGEGSRVWDQSGRELIDFAGGIAVNALGHCHPALVKALTEQANTLWHVSNVFTNEPALRLAHKLVDATFADRAFFCNSGAESNEAAFKLARRVAHDRFGPQKHEIIATVNSFHGRTLFTVSVGGQPKYSDGFGPKITGISHVPYNDLEALKAQISDKTCAVVIEPIQGESGVVPADKAYLEGARKLCDEHNALLIFDEVQTGVGRTGSLYAYQHYGVIPDILTSAKSLGGGFPIGAMLTTTELAKHLAVGTHGTTYGGNPLGCAVACAVLDVVNTPETLAGIKAKHERFKTRLEQIGQQYNLFSQVRGVGLLLGCVLTEAWKGKAKDVLNAAEKEGVMVLQAGPDVVRFAPSLVVEDADIDEGLDRFERAVATLTKG

SEQ ID NO: 67549 - protein, 691 aa, Pseudomonas putida
MSRSLVDLLPTPLHAEHLLALAPQHNSADLLQLLDRWVERGWLRALDRAFVSFLEERAPGSDPLLLLAAALASHQLGHGHVCLDLQQTLAEPDFALSLPPEGDALIGPLLLPSQLLANLDLNAWLQRISASPLVAAGDTPGQQARPLVRSGERLYLRRYWSYERRIDQALRQRLSQAEAPPADLPERLAQLFEGGAPAGQVDWQKLACALATRAGFSIITGGPGTGKTTTVVRLLALLQAPAVEQGRPLRIRLAAPTGKAAARLTESIGQQVERLQVSAEVRGQIPTEVSTVHRLLGSRPGSRHFRHHAGNPLPLDVLVVDEASMIDLEMMANLLDALPPRARLVLLGDKDQLASVEAGAVLGDLCRDAEEGFYSPATAAWLQQVSGESLAGSGLKAGDEQRHPLAQQVVMLRFSRRFGEGSGIGQLARLVNRQDAHAARNLLAAPPADVHSLSLKHEQDRAFDRLLLDGLNRGTDGPQGYRSYLRTLGRYRPALDTAFDDPAWEQWAGKVLRSFEDFQLLCAVRRGAWGVEGLNERVARVLHNAGLIDSQQPWYEGRPVLVTRNDYGLGLMNGDIGIALRLPDEHGQPLLRVAFPRNDGSGGVRFVLPSRLNEVETVFAMTVHKSQGSEFSHTALVLPEALNPVLTKELVYTGITRAKHCFSLVEPRQGIFEEAVARKVRRISGLMLEQV

SEQ ID NO: 67550 - protein, 1224 aa, Pseudomonas putida
MTQDRPLALSFPLHGSQLIEASAGTGKTFTISALYLRLILGHGGEQGFERELLPPQILVVTFTDAATKELRERIRARLAEAARFFRGELEGADPLLHQLRDDYPQENWPRCAGRLEIAVQWMDEAAVSTIHGWCQRMLREHAFDSGSLFTQTLETDHSELLGQVMRDYWRRFCYGMQGDALAWVRGNWGSPDALLPRIRPLFGRVRAQQNGPEPAALIQASLQQRGAQLARIKAPWAQWAEELRQICRDALAAKQVDGRKMQARYFEPWFDKLCAWASDEQLVELDLGTGFTRLTPAGMAEAWKGEPPEHPALNAMQHLQQQLQALDSPDAPLLEHAASWVSARFEVEKRRRAEMGFDDMLVRLQHALASEAGERLASLIREQFPVALIDEFQDTDPVQYGIFERIYQISENRAETGLFMIGDPKQAIYAFRGADIYTYLAARRATSGRLHSLDTNYRSSKAMVAAVNQVFLQAEAREAGRGAFLFREADDNPLPFIEVRAKGRGEQLLIDGEVSAALQCWQLESEEPVSSSVYRQQMAASCASHIVALLNGGQQGTSGFRNAEGELRACLPSDIAILVRDGHEAQMVRAELAAREVRSVYLSDKDSVFAAQEAHDLLAWLKACAEPDSERLLKAALASLTLGLSLAALDRLNQDERVWESWVMRFRLYRDTWQRQGVLPMLRHLLHDFQLPRTLIRRSDGERVLTNLLHLAELLQQAAGELDGEQALIRHLAEHLASSGQAGEEQILRLESDEQLVKVVTIHKSKGLEYPLVYLPFICTSKPVDGSRLPLAWHDSEGNAHLTLTPDQEQIERADDERLAEDLRLLYVALTRAQHACWLGVADLKRGNLKSSQLHRSAFGYLLGGGLALAGSAQLTDWLQALAASCPHITCPGLPQADEQMYRMPHAERELLPARRPRHAAAEHWWIASYSALRVGDQTLGADSSQAQQLLDDEVPDAQVLREVPADSGDIHRFPRGPNPGTFLHGLLEWAGREGFSEVSANPQLIERTVGQRCNRRDWAGWIPTLSHWMQRLLSEALPLPGSDQSVTLGQLRHYQIEMEFWFASHRVDAEQLDRLVARHTHPGLARPAAQPTVLNGMFKGFIDLAFELDGRYYVTDYKSNWLGADIQAYDAMAMEKAILEHRYDLQYVLYLLALHRQLRARLADYDYDRHVGGALFIFLRGASSSGHGVYHAKPPRELIESLDALFRGEHAPVQQDLFAGVAP

SEQ ID NO: 67551 - protein, 122 aa, Pseudomonas putida; identical to SEQ ID NO: 67499
  MISC_FEATURE (19)..(19): X=any amino acid

SEQ ID NO: 67552 - protein, 450 aa, Pseudomonas putida
MSNQLFDAYFTAPAMREIFSDRGRLQGMLDFEAALARAEASAGLVPHSAVAAIEAACQAERYDVGALANAIATAGNSAIPLVKALGKVIATGVPEAERYVHLGATSQDAMDTGLVLQLRDALDLIEADLGKLADTLSQQALKHADTPLVGRTWLQHATPVTLGMKLAGVLGALTRHRQRLQELRPRLLVLQFGGASGSLAALGSKAMPVAEALAEQLKLTLPEQPWHTQRDRLVEFASVLGLVAGSLGKFGRDISLLMQTEAGEVFEPSAPGKGGSSTMPHKRNPVGAAVLIGAATRVPGLLSTLFAAMPQEHERSLGLWHAEWETLPDICCLVSGALRQAQVIAEGMEVDAARMRRNLDLTQGLVLAEAVSIVLAQRLGRDRAHHLLEQCCQRAVAEQRHLRAVLGDEPQVSAELSGEELDRLLDPAHYLGQARVWVARAVSEHQRFTA

SEQ ID NO: 67553 - protein, 141 aa, Pseudomonas putida
MSAVLDTPVAIRRTAMDLLARREHGRVELTRKLRQRGASDELIEPELDRLAEEGLLSEARYLESFIRYRSGSGYGPARIREELCQRGLARADIDQALRESEVNWSERMRDVWQRKFAGQRPQDRAAAPSRPGSWLTVGSLW

SEQ ID NO: 67554 - protein, 1050 aa, Pseudomonas putida
MSKFFIDRPIFAWVIALVIMLVGALSILKLPINQYPSIAPPAIAIAVTYPGASAQTVQDTVVQVIEQQLNGIDNLRYVSSESNSDGSMTITATFEQGTNPDTAQVQVQNKLNLATPLLPQEVQQQGIRVTKAVKNFLLVIGLVSEDGSMTKDDLANYIVSNMQDPISRTAGVGDFQVFGAQYAMRIWLDPAKLNKFQLTPVDVKTAVAAQNVQVSSGQLGGLPALPGTQLNATIIGKTRLQTAEQFESILLKVNKDGSQVRLGDVAQVGLGGENYAVSAQFNGKPASGLAVKLATGANALDTAKALRETIKGLEPFFPPGVKAVFPYDTTPVVTESISGVIHTLIEAVVLVFLVMYLFLQNFRATIITTMTVPVVLLGTFGILAAAGFSINTLTMFAMVLAIGLLVDDAIVVVENVERVMSEEGLPPKEATKRSMEQIQGALVGIALVLSAVLLPMAFFGGSTGVIYRQFSITIVSAMGLSVLVALIFTPALCATMLKPLKKGEHHTAKGGFFGWFNRNFDRSVNGYERSVGAILRNKVPFLLAYALIVVGMIWLFARIPTAFLPEEDQGVLFAQVQTPAGSSAERTQVVVDQMREYLLKDEADTVSSVFTVNGFNFAGRGQSSGMAFIMLKPWDERSKENSVFALAQRAQQHFFTFRDAMVFAFAPPAVLELGNATGFDVFLQDRGGVGHEKLMEARNQFLAKAAQSKILSAVRPNGLNDEPQYQLTIDDERASALGVTIADINNTLSIALGASYVNDFIDRGRVKKVYIQGEPSARMSPEDLQKWYVRNGAGEMVPFSSFAKGEWTYGSPKLSRYNGVEAMEILGAPAPGYSTGEAMAEVERIAGELPSGIGFSWTGMSYEEKLSGSQMPALFALSVLFVFLCLAALYESWSIPIAVVLVVPLGIIGALIATSLRGLSNDVYFLVGLLTTIGLAAKNAILIVEFAKELHEQGRSLYDAAIEACRMRLRPIIMTSLAFILGVVPLTIASGAGAGSQHAIGTGVIGGMISATVLAIFWVPLFFVAVSSLFGSKEPEKDVTPENPRYEAGQ

SEQ ID NO: 67555 - protein, 185 aa, Pseudomonas putida
MINDIKKDAQERMGKSIEALSRNLAAIRTGRAHPSILDSVKVTAWGSEMPLNQVAAITVEDARTLKIVAHDKNLSAAIEKAILTSDLGLNPSSAGTTIRVPMPALTEETRKGYTKQASGVAEDAKVAVRNVRRDALADLKKLTKDKEISEDEERRAADEIQKLTDKFVAEVDAAFKAKEKDLMAV

SEQ ID NO: 67556 - protein, 251 aa, Pseudomonas putida
MEKTKPAAPSSVPRHVAIIMDGNNRWAKKRLLPGVAGHKAGVDAVRAVIEVCAKSGVEVLTLFAFSSENWQRPAEEVGALMELFFSALRREAKRLDENNISLRIIGDRSRFHPELQAAMREAEAVTAGNNRFILQIAANYGGQWDIAQAAQRLAREVQAGHLRPEDITPGLLQTCLATGDLPLPDLCIRTGGEHRISNFLLWQLAYAELYFSDLYWPDFKHEAMRNALADFASRQRRFGKTSEQVEAGARA

SEQ ID NO: 67557 - protein, 271 aa, Pseudomonas putida
MLKQRIITALILLPVALGGFFLLNGGDFALFIGFVVTLGAWEWARLAGLMAQPLRIAYAAVVAGALMLLHILPELAPWVLGAAVIWWGLATWLVLTYPRSSDLWASAACRLLIGLLVLLPAWQGLVLLKHWPLGNWLILSVMVLVWAADIGAYFSGRAFGKRKLAPQVSPGKSWEGVYGGLAVSLLITLGVGISRDWGFGQILLGLLGAALLVMSSVVGDLTESMFKRRSGIKDSSNLLPGHGGVLDRIDSLTAAIPIFAVLLWAAEWGVM

SEQ ID NO: 67558 - protein, 121 aa, Pseudomonas putida
MTSPFKGQTGLKRIFNAAGYSLDGLRAAFKGEAAFRQLVLLNVLLIPIAFWLPVSRAERAIMIAVCLLGLIVELFNSAVEAAIDRISLERHPLSKNAKDMGSAAQLVALTMVALVWGVILL

SEQ ID NO: 67559 - protein, 351 aa, Pseudomonas putida
MSVTMTLGQLAEVLGATLKGPEALQITGLATLQEAGPTQLSFLANPQYRKYLDNSQAGAVLLKAADAESFAGNTLVVADPYLAYARISHLFDPKPKAEAGIHPSAVVAEDAQVDASASIGPFAVIESGARIGANVSIGAHCFIGARCVVGEGGWLAPRVTLYHDVTIGKRVVIQSGAVIGGEGFGFANEKGIWRKIAQIGGVTIGDDVEIGVNTAVDRGALSDTRIGDGVKLDNQIQIAHNVQIGDHTAMAACVGISGSTRIGKHCMLAGGVGLVGHIDICDNVFVSGMTMVTRSITEPGSYSSGTAMQPLADWRKSAARIRHLDDMAKRLQQLEKRVDTVTSGGLPTSEG

SEQ ID NO: 67560 - protein, 676 aa, Pseudomonas putida
MTLRQRLENLPVGQKLLAALLVLLVTILLMANLTFISAAYWITQESMAPQAMQTIGRLVANPQLAARAGDTPETARALLKELESYTPLRAAAVYGGDGRMLAQLQHGEPLALPKRFRNIDGWRLMEFRSTQLIRIPRDANPPAHLLLVASSELPTAFYTGTLSASLGILVFSVLLWIVIARQIKRLITQPINQLEELSRQVTREESYALRAQRGNDDEIGSLAEAFNTMLSRIEAREQQLKSARDEFQSAYDQAQGLAEETRHTNRKLELEVQVRSKIEKKLTGFQNYLNSIIDSMPSALIALDEQLYVTQWNHEATVLSGTPLDEALNQPVFIAFEPLKPFLPQLKETVEKHRVAKIERVTWPKGDDLRHYALTFYPLTGGGGRGVVIRIDDITQRLSLEEMMVQSEKMLSVGGLAAGMAHEINNPLGAILHNVQNIRRRLSSDLPRNQEQAEELGIDLATINRYLDSREVPQLLDGIQQAGARAAKIVTHMLSFSRRSNRQLVPCELPALIDQALEIAGNDFDLAIGFDFKGQAIVRQFDPDLGPVPCTANELEQVLLNLLKNAAQAIHQRPQPSEPGRITLRTRLNPPWAEVQVEDNGVGMPEAVRKRTFEPFFTTKEIGQGTGLGLSVSYFIITNNHKGQMEVQSTPGQGTCFTLRLPLTQPAAAVPARTEQ

SEQ ID NO: 67561 - protein, 146 aa, Pseudomonas putida
MMDINEIREYLPHRYPFLLVDRVTDLDFEAQSIRAYKNVSINEPFFNGHFPAHPIMPGVLIIEAMAQAAGILGFKMLDAKPADGTLYYFVGSDKLRFRQPVLPGDQLVLEAKFLSRKSMIWKFECRALVDGKPVCSAEITCAERSL

SEQ ID NO: 67562 - protein, 375 aa, Pseudomonas putida
MAQLCVALVAGEASGDILGSGLMRALKARHPDVRFIGVGGPLMEAEGLQSYFPMERLAVMGLVEVLGRLRELLKRRKLLIQTLIEEKPDVFIGIDAPDFTLNIELKLRQAGIKTVHYVSPSVWAWRQKRVLKIREGCDLMLTLLPFEARFYEEQGVPVRFVGHPLADTIPLEADRPAARAALGLGEGPVVALMPGSRGGEVGRLGALFLDAAERLSQQVPGVRFVLPCANATRRAQIEQMLEGRQLPLTLLDGQSHQALAACDAVLIASGTATLEALLYKRPMVVAYRLAPLTFWILKRLVKSPYVSLPNLLAQRELVPELLQDDATSEALANTLAPLVRDGSQQTERFDEIHRTLRRDASNQAAEAVLALLKDR

SEQ ID NO: 67563 - protein, 207 aa, Pseudomonas putida
MQIGLDFNLVEDLVAGVDEVGRGPLCGAVVTAAVILDPARPILGLNDSKKLTEARREALFDEICEKALSFCIARAEVEEIDSLNILQATMLAMQRAVEGLHITPKLALIDGNRCPKLAVPAAPVVKGDSQVPAIAAASILAKVTRDREMSAFELIYPGYGIGGHKGYPTPVHLEALARLGPTPIHRRSFAPVRAAWEAREGVTDSLI

SEQ ID NO: 67564 - protein, 315 aa, Pseudomonas putida
MNPNFLDFEQPIADLQAKIEGLRLVGNDNSLNISDEIARLQDKSNTLTESIFGNLTSWQIARLARHPRRPYTLDYLEHIFTEFEELHGDRHFSDDAAIVGGTARLDGKPVMVIGHQKGREVREKVRRNFGMPRPEGYRKACRLMEMAERFKMPILTFIDTPGAYPGIDAEERNQSEAIAWNLRVMARLKTPIIATVIGEGGSGGALAIGVCDQLNMLQYSTYSVISPEGCASILWKTADKAADAAEAMGITAERLKSLNIVDKVIQEPLGGAHRDPAKMSESIRADLVQQLDMLGKFDNDALLARRYERLMSYGL

SEQ ID NO: 67565 - protein, 427 aa, Pseudomonas putida
MINLTPWLNAPTWYVAFSGGLDSTVLLHLLAEYARNHASPPLRAIHIHHGLQAAADAWPAHCQAICDNFDVELQVIHVQVSPGASLEQAARDARYAAFRQVLGPGDILFTGQHRDDQAETLLFRLLRGAGLRGLAAMPGQRALGQGSLVRPLLACSRQHLQEYAQAQGLTWIEDPSNVDTQFARNYLRGEVMPHLQQRWPQASQNFARAAEHLGEALGLLDELAQEDLALAGKGAPLAWPGLDSLDLAALLALSPARQRNALQYWLSQRTRLPDTRHWAGWADLRDAGADARPVWRLADGRLVRSHGRIWWLSGDWLQQPAGSLAWPDPDGPLRLPGNGCVRLVGAAVPSGLRIAYRQGGEMLEVPGRGRRDLKRLLNEQQVPHFLRSRLPLLYHGECLLAVANLPGLVQADCQLHWQLPTNAQGLS

SEQ ID NO: 67566 - protein, 542 aa, Pseudomonas putida
MTRYIFVTGGVVSSLGKGIASASLAAILEARGLKVTMLKLDPYINVDPGTMSPFQHGEVFVTHDGAETDLDLGHYERFIRTTMTQNNNFTTGRIYEHVLRKERRGDYLGATIQVIPHITDEIKRRIIKGAGDADVALVEIGGTVGDIESQPFLEAIRQLRVEVGSKRAMLMHLTLVPYIATAGETKTKPTQHSVKELRSIGLQPDVLICRSDHPVDASSRRKIALFTNVEERAVISLEDVDTIYKIPGVLHAQGLDDFVVERFGLQCNGADLSEWDKVVDAKLNPEHEVTIAMVGKYMELLDAYKSLIEAMSHAGITNRTKVNLRYIDSEDIENQGTSLLEGADAILVPGGFGLRGVEGKITAVQYARENKVPYLGICLGMQVAVIEFARNVMGWKDANSTEFDRNSGHPVVGLITEWADATGAVETRDEASDLGGTMRLGAQDCQLAAGSKVHDCYGKDVITERHRHRYEVNNNLLPQLVEAGLVVSGRSEDGALVEVVESKDHPWFVACQFHPEFTSTPRDGHPLFSGFVKAALAQKNKA

SEQ ID NO: 67567 - protein, 235 aa, Pseudomonas putida
MIDILPAFWAVIPAAGVGARMAADRPKQYLELAGQTLLEHSLDCFLGHPALKGVVVSIAEDDPYWPGLRCASDPRIHCAAGGRERADSVLNALLVLHAQGAADSDWVLVHDAARPNLARSDLDKLLSELADDPVGGLLAVPARDTLKRADSHGRVSATVDRSTIWQAYTPQMFRLGALHRALAECLVSDVVVTDEASAIEWSGQAPRLVEGRSDNIKVTRPEDLEWLRQRWAGKR

SEQ ID NO: 67568 - protein, 157 aa, Pseudomonas putida
MRIGHGYDVHRFCDGDFITLGGVRIPHKYGLLAHSDGDVLLHALSDALLGAAALGDIGKHFPDTDPQFKGADSRALLRHVVGIVKAKGWKVGNVDATIVAQAPKMAPHIETMRQLIAEDLQVELDQVNVKATTTEKLGFTGREEGIAVHSVALLLPA

SEQ ID NO: 67569 - protein, 620 aa, Pseudomonas putida
MDQDFGESPMTPTHRLRRLAGSLLLACLSLPALAAPQHALTLYDEPPKYPADFKHFDYVNPDAPKGGTFRQSSFGGFDSLNPFINKGVAAENIGIIYDTLMRQSQDEPFTEYGLVAGKIEKAPDNSWVRFYLRPEARFHDGHPMRADDVVFTFNALIKDGAPLYRQYYADVAEVVAEEPLKVLFKFKHKNNRELPLILGQLPVLPKHWYENREFNRGNLEIPLGSGPYKVAKVKAGRSVRYERVKDYWAKDLPINRGFYNFDAMTFDAYRDTTVALEALKAGAFDYGLEVSAKNWATAYNVPAVREGRLIKEELPNGNPTGMQGFIFNIRRPVFQDVRVRQALSLLLDYEWTNKQLFNGAYTRTGSYFENSEMAARGLPSPNELKILEPLRGKVPEQVFTEVFHNPVSDGSGMIREQQRQAYKLLQEAGWKIVDDKMVDAQGKPASIEFLLAQTEFERILLPFKRNLADLGIELNIRRVDVSQYITRLRSRDYDMIVGGYPQSNSPGNEQREFWSSAAADNPGSRNFIGLRDPAIDQLVDQLINADSRQSLIDHCRALDRVLLWGYYVIPNWHIKTWRVAYWNHIGHPNVSPKYDIGIDTWWIKPDVTPAVSEAPADEAN

SEQ ID NO: 67570 - protein, 294 aa, Pseudomonas putida
MSVLINKDTKVICQGFTGSQGTFHSEQAIAYGTKMVGGVTPGKGGTTHLGLPVFNTVKEAVEATGADASVIYVPAPFCKDSILEAAFGGIKLIVCITEGIPTLDMLDAKVKCDELGVTLIGPNCPGVITPGECKIGIMPGHIHLPGKVGIVSRSGTLTYEAVKQTTDAGFGQSTCVGIGGDPIPGSNFIDILKLFQEDPKTEAIVMIGEIGGSAEEEAAAYIKAHVTKPVVSYIAGVTAPAGKRMGHAGAIISGGKGTADEKFAALQDAGVKTVRSLADIGKALAELTGWEAKK

SEQ ID NO: 67571 - protein, 632 aa, Pseudomonas putida
METQKETLGFQTEVKQLLHLMIHSLYSNKEIFLRELISNASDAADKLRFEALAKPELFEGDADLKIRLSFDKDAGTVTLEDNGIGMSREDVIAHLGTIAKSGTADFMKNLTGDQKKDSHLIGQFGVGFYSAFIVADKVDVYSRRAGQPAAEGVHWSSKGEGEFEVATIDKPQRGTRIVLHLKKDEQEFADGWRLRNVVKKYSDHIALPIQLPKEQAATEGEEQPAEEWETVNRASALWTRSRTEVKDEEYQEFYKHIGHDFENPLAWSHNKVEGKLEYNSLLYVPARAPFDLYQREAPRGLKLYVQRVFIMDQAESFLPLYLRFIKGVVDSNDLSLNVSREILQKDPIIDSMKTALTKRVLDMLEKLAKNEPEKYKGFWKNFGQVLKEGPAEDFANKEKIAGLLRFASTQDDSGEQSVALADYLARAKEGQDKIYYLTGESYAQVKNSPHLEVFRKKGIEVLLLTDRIDEWLMSYLNEFDGKAFVDIARGDLDLGKLDSEEDKKAQEEVAKDKEGLVERLKGALGDSVAEVRVSHRLTDSPAILAIGEQDLGLQMRQILEASGQKVPESKPIFEFNPSHPLIEKLDHEQSEDRFAELSHILFDQAALAAGDSLKDPAAYVRRLNKLLVELSA

SEQ ID NO: 67572 - protein, 3249 aa, Pseudomonas putida
  MISC_FEATURE (650)..(650): X=any amino acid
  MISC_FEATURE (1081)..(1081): X=any amino acid
  MISC_FEATURE (1088)..(1088): X=any amino acid
  MISC_FEATURE (1114)..(1114): X=any amino acid
DIEDIYPLSPMQEGLLMHTLLEPGSGIYLMQYCYRVDHAIDVGAFSEAWKAVIARHDVLRTSFCWDLGERMVQIVHRRTEPALRLLDWRHLAEDQYEQALQAELEAELRQGFDMAKEVPFRLRLILLDADQFGFVFSNHHVLLDAWCRMGVVDEFFKVYQSLTTGVPVQLPTPPRYRDFIALLQRWDREASRDFWRNELQGFERPTALPFDRSASAEHNHAAVADELVYLTREQSAQVAQRAQAAQLTVNTLVQGAWALLLQRYSGDRDVVFGVTVAGRPVEFPEMQATVGLFINSIPLRVRLPGAEAGVTAKAWLKSLLDHNLNLREHEHLPLVDIQACSEVGSGQALFDSLFVFENAPVESSVGAQASTMKVKAGSSRTHTNYPLTVVVYPGEVLGLHLSYDQRLFDSATISVLLADFRALLLALSEQLDADFHAVAAALPGSAPEVPTALPEAYEQGYARLFDATVQRAGQLPAAACQGREWSYAELDQRARRLAGVLQGNGVSVDHLVAVLGERDLSLLGMVVGVFQAGAGYLSLDPSLPVARLADVLRLSQARVLVCDEHCLGLAQAMLEGFQAPPTLLVWEQVQAHAAPAQMLHLPINAAKLLAYVIFTSGSTGVPKGVMVEQAGMLNNQLASYRTWACGAATXSPRTASQSFDISVWQLLTAALCGCRVEIFPDAVAQDPQALLQQVEATGVTILECVPAMIQAMLELPARQLPRLRYLLTTGEAMSPALARRWRERYPQVELVNAYGPAECSDDVALYRVRDDASSVHLPIGAATEHNRLHVLNDLLEPMPARATGELHVAGVGVGRGYLGDPVRTALSFVPDPFASRPGERLYRSGDLAHVCADGQTLEYVGRADFQVKIRGYRIELGEIESRLLAHEGVHSAVVVDAQVAGGKQLVAYWVARDASVAAAEMRSVLADYLRASLPGYMVPALWVRLDSLPLTANGKLDRKALPAPDPSTAQQRYQAPETSLQQQLAQVWSEVLGVERISLGDDFFELGGHSLLVVQVVARVGRELGIEVSLRSLFEHPTLGAFSEAVAVLQGQGASIQDELAKSLAALKRLTAEEIDELTQXRSAGPVXPGPARQLQYTQSRQPSGSFICSAASXACRGLARSAGKDRCPGRRCSSASIARFRGVTVSRERKALAALLKQQGVNLYGVTRIFARDPADPTPVSYAQERQWFLWQLDPASGAYNIGAALQLQGRLDIEGLRGACQALIQRHEVLRTTLRQDSDRVVQIIHPQMPFELLIEPLIGMSATSDALREHVEACIAKPFDLEQGPLLRLNLLPLGEDDHVLVLTVHHIAADGWSMPILINDLVQCYERLSQGQAPNLPALPVQYADYAIWQRNWMEAGEQARQLAYWKDTLGGEQPVLSLPTNRSRPVAPSGRGARVGIEIDAVLLQSLKALANAQGVTLFMLLLASFQTLLHRYSGQPQVRVGVPIANRNRSEVQGLIGFFVNTQVLKADFALHSRFIDVLQQVKETALQAQAHQDLPFEQLVEALQPERSMSHSPLFQVMFNHQAQAASDAHAQLSGLQVRGLEWDSRTTQFDLTLDTREHADGLFASLTYATDLFDVSRIEQMARHWRNLLIQACQDPRKRVLELALLEHDERERILGQWNQTQMAYPTKLGVYRLFEQQVCRTPDAVALRFGEQTLSYAELNRQANQLAHALRERGVGPEVLVGVAMPRGPRMLVGLLAIFKAGGAYVPLDPDYPAERLAYMIEDSGLGLLLTEQAVLARLQVPATVASLCLDTDTACYASAAAEDLPLDVDADHPAYVIYTSGSTGRPKGVTVRHGALVNFLTSMAVQPGIAASDRVLALTSLSFDIAGLELYLPLLHGASVVLLADQQNKDPFALLRVIEQQAVSVIQATPSTWRMLLDNAPPQALRGKRVISGGEALSSELAQRLIDQAGHVWNLYGPTETTIWSGIEKVTDSRQVWLGKPIGNTTFHVLDAQFDAVPVGVSGELFIGGDGLARGYLKRPGLTAERFIPNPHGHGRLYRTGDLVRYRDDGVLEYMGRIDHQLKIRGFRIELGEIEASLQGFGAVREVAVIDVDGPLGKQLAGYIVPYDASLLQADAEVQETLRLALKAHALKSMPDYMVPTHLVFIPRMPLTPNGKLDRKALPAPDLAAAQRPYQAPTSPLQQALAAIWADVLKVGQVGLSDSFFELGGHSLLASQMIGRVRQQLALEVPLRSVFEAQDLAGFAERVAAATTGAQLPAIAVVPRGEPLALSYAQQRQWVLWQLEPHSAAYNIASALHLRGALDVAALQQAFQALVARHESLRTTFVQVDGEARQVIHAPEAQGACLRQADVDAVELQATVEQLAREPFDLVNGPLIRVDLLRLEAQAHVLVMNLHHIITDGWSMAVLVNELVALYQGYRHGQAVELPALAVQYADYAAWQRQWLEASEQARQLAYWEAQLGGEQPVLELPTDYPRPAQPSRAGGQLSLALDAPLVQALRRQAQAQGVTLFMLLLASFQTLLHRYSTQPDIRVGVPVANRTRGETEGVVGFFVNTQVHKAEFHLRLRFVELLRQVRQTALDAQAHQDLPFEQLVAALKPDRILNQNPLFQVMFNHQAEAKGAPREVPGLQIEAVDWQVHSTQFDLALDTAEHADGMTAAFTFATELYDRQTIEQMARHWRNLLQAISRDANQVVAQLPMLDDLEQQCMLHDWNATAVAYPQARLVHQLFEDQAQRHPQAPALIFADATLSYTELDQRANRLANKLREQGVGPEVLVGVAVERSLELVIGLMAVLKAGGAYVPLDPDYPSDRLAYMIEDSGIGLLLSQQALAERLPVPAAVRILCLDQDAQWLAGYADTAPEVDVRLANLAYVIYTSGSTGRPKGAGNTHEALLNRLQWMQGAYGLDASDTVLQKTPFSFDVSVWEFFWPLMTGARLAVALPGDHRDPQRLCQTIIDHQVSTLHFVPSMLQAFMASAEVEQCRSVRRVVCSGEALPAVLAQQCRERLPHAGLYNLYGPTEAAIDVTHWTCGDKQGFSVPIGQPIDNLRTHILEPDLLPAARGVNGELYLAGIGLARGYHGRPALTAERFVPDPFDEQGGRLYRTGDLARYRPDGVIDYAGRIDHQVKIRGLRIELGEIEARLAEHAQVREAVVLAQDGPSGKQLVGYVVPMAAEQAEPGSEAGQRLREQLAHFLGQGLPDYMVPAHLMLLANLPVTANGKLARNLLPAPDFNAARQVYVAPRTALEQQLASIWETVLNLPQVGMQDNFFALGGDSIIAIQV

SEQ ID NO: 67573 - protein, 479 aa, Pseudomonas putida
MPLFAFLSALLCLSAAPGLVQAADVPAPDPAPSAATLVAKDPVFSQEQLDQMLAPIALYPDQLLAQVLMASTYPGQVNEAVTWSKANPKATGDDAVRQVAKQPWDPSVQALVAFPQVLATLGQDPVWVQRLGDAFLAQPDDVMGSVQRLRHQAQAAGNLQSSQYQNVTVQTAPAPAPAASGSSTQGAAASSPPTTIVIEPADPQVVYVPSYNPTTTYGTWAYPASPPMYYPGSALVAGLAFGTGVAIVASLWGDCDWDNNDIDIDVNRYNNLNVNNRITNNQNKWQHNSANRDGVPYRDSRSRQQYGRQLDGATQRTAFRGDDAQRAQARDKARASMDRAGIERPATSNRQAREQMREAKAGSPDGNRMLSRDDGARATDRRQDTRNDQGRQQNGNLANQRRQGDGQVRQPAQSRPANTAGRARNNAFDGVRSPSRTSVQANRGRTSQSFAQRPGASRAAGHPISRPSAPARRGAGGRR

SEQ ID NO: 67574 - protein, 335 aa, Pseudomonas putida
MNAAHPEVAVAPGQNPGELLRLAREKRDWSQAEVARKLNLTVSSLNHVETGAFDKLPGHTFARGYIRAYAKLMDLDQAALVDAFDRYTGTHAKGSDVHSLGRIEEPVRLSHNILRGVSLLLLVAVVGGGFFWWQDQGSLRGKELAKIALEHVEVESADGTTQIHPLDEPEDQAVSAGQQPESAPLALEQGAAEQPAAAEQAPVSSEATIATAPVQPAPAASPAPVTPPVQATAAPAPAPAPAPAVAAVEPAAVPAGSAKVAIQFTADCWTQVSDGNGKVLFSAIKRKGDNLELTGKPPFAVRLGFARGAQVSYNGQAVDVAPFTSGETARLKLGQ

SEQ ID NO: 67575 - protein, 369 aa, Pseudomonas putida
MHGESPIKRRESRKIWVGNVPVGGDAPIAVQSMTNTDTNDVAATVAQIQRLVDAGVDIVRVSVPDMDAAEAFGKIKQRVSVPLVADIHFDYKIALRVAELGVDCLRINPGNIGREDRVRAVVDAARDRGIPIRIGVNAGSLEKDLQKKYGEPTPAALVESALRHVEHLDRLDFQDFKVSVKASDVFMAVEAYRLLAKQIVQPLHLGITEAGGLRSGTVKSAVGLGMLLAEGIGDTIRISLAADPVEEVKVGYDILKSLHLRSRGINFIACPSCSRQNFDVVKTMNELEGRLEDLLVPLDVAVIGCVVNGPGEAKEAHVGLTGGTPNLIYIDGKPAQKLTNDNLVDELEKLIRQKAAEKAEADAALIARG

SEQ ID NO: 67576 - protein, 483 aa, Pseudomonas putida
MHQLTLAEIARGLADKSFSSEELTGALLARIKQLDPQINSFISVTEDLALGQARAADARRAAGETSALLGAPIAHKDLFCTNGVRTSCGSKMLDNFKAPYDATVVAKLAEAGMVTLGKTNMDEFAMGSANESSHYGAVKNPWNLEHVPGGSSGGSAAAVAARLLPATTGTDTGGSIRQPAALTNLTGLKPTYGRVSRWGMIAYASSLDQGGPLARTAEDCALLLQGMAGFDAKDSTSIEEPVPDYSASLNASLQGLRIGLPKEYFGAGLDPRIADLVQASVKELEKLGAVVKEISLPNMQHAIPAYYVIAPAEASSNLSRFDGVRFGYRCEEPKDLTDLYKRSRGEGFGVEVQRRIMVGTYALSAGYYDAYYVKAQQIRRLIKNDFMAAFNDVDLILGPTTPNPAWKLGAKSSDPVAAYLEDVYTITANLAGLPGLSMPAGFVDGLPVGVQLLAPYFQEGRLLNVAHRYQQVTDWHTRAPNGF

SEQ ID NO: 67577 - protein, 275 aa, Pseudomonas putida
MPRVLAPLLALSLLLLAGGAQASYITRTLNKPVPGGVAVVDLGPAANAPSARFDGKPVLVVKEQDNWLAIVGIPLTQKPGTAVLNQGGRTLPFSVRSKKYPEQRITLKNTRQVNPNPADLKRIERELAEQIKAYRSFSPNLPSNLVLDKPVNGPLSSKFGVRRFFNGEERNPHAGLDFAVPAGTPIKTPANGKVILVGDYFFNGRTVFVDHGQGFISMFCHMSKIDVQVGQQLRRGEVVGRVGSTGRATGPHMHWNVSLNDARVDPAIFIGAFQP

SEQ ID NO: 67578 - protein, 459 aa, Pseudomonas putida
MIKDPFERLGLDREVLTVSQLNGRARVLLEDVFRSVWVEGEISNLARPASGHMYFTLKDSGAQVRCALFRQNATRVRQALRDGLAVRVRGKVSLFEGRGDYQLILDTVEPAGDGALRLAFEALKEKLGAEGLFSAERKKPLPAHPQRIGIITSPTGAVIRDIISVFGRRAPQVELNLIPTAVQGREAIAQIVRAIRLADSLGFDALILARGGGSLEDLWCFNEEAVARAVAACVTPIVSAVGHETDVSISDFVADVRAPTPSAAAELLAPDNSGLRQRLDGLQRRLLLRMQNRLTHDRLRLESLTRRLRHPGERLRQRAQRLDDLDMRLRRAFMLNLNQRRERLARLDARLAAQHPGRNLKLLNQRLDSLAERLPRAMREVLKDRRQRFQAQLQTLQVVSPLATLARGYSILLDEQGQAIRSAEQTRNGQRLTARLNEGELLVRVEDNHLTPVTLSLLD

SEQ ID NO: 67579 - protein, 580 aa, Pseudomonas putida
MNIAIVTACPNGQVSSVLSARLLSAAAQRRGWSTSVEVQNTEHPERQLSAAQIAEADWVLVVSTGPVDLARFVGKRLYQSTPSQALADREGFLDEAAANAELLAAVTGAPAAASSAGARIVAVTACPTGVAHTFMAAEALQQAAQQLGYQLTVETQGSVGARNPLSAEAIAAADVVLLAADIEVPTARFAGKRIYRCGTGIALKQARATLDKALAQATVENGADAAAATTPTKSEKTGVYKHLLTGVSFMLPMVVAGGLLIALSFVFGIEAYKEAGTLPAALMQIGGEAAFKLMVPLLAGYIAWSIADRPGLAPGMIGGLLASTLGAGFIGGIVAGFLAGYSAKAIARWARLPSSLEALKPILIIPLLASLFTGLVMIYVVGQPVAAMLEGLTHFLDSMGTTNAILLGLLLGGMMCVDLGGPINKAAYAFSVGLLASSSYAPMAATMAAGMVPPIGLGIATFLARRKFAQSEREAGKAALALGLCFISEGAIPFAAKDPLRVIPASIAGGALTGALSMYFGCKLMAPHGGLFVLLIPNAINHALLYLLAIVAGSLVTAVVYAVIKKSERVELAVAPAKSV

SEQ ID NO: 67580 - protein, 444 aa, Pseudomonas putida
MLRVITRNSPATYFQDRNGETGFEYELVQHFADDLGVKLQIETADNLDELYDALGKPSGPVLAAAGLVSSERRKTQVRYSHPYLEVTPQVIYRNGRPRPTGAKGLVGKKIMVLKGSSHADQLAELKKQYPALQYEESDAVEVVDLLRMVDEGQIDLTLVDSNELAMNQVYFPNVRVAFDLGETRDQRWAVAAGEDNSLLNEINEYLDKAQKNGTLQRLKDRYYGHVDVLGYVGAYTFAQHLQQRLPKYEKHFKSYAKVEQVDWRLLAAIGYQESMWQPEVTSKTGVRGLMMLTQRTAQAMGVSNRLDPRQSIQGGAKYFMKIKEELDDSIKEPDRTWFALAAYNVGGGHLEDARTLAKREKLNPNKWLDVKKMLPRLAQKQWYRQTKYGYARGGEPVHFVANIRRYYDILTWVTQPQLEGQVAEGNLHVPGVNKDKPADKSSPM

SEQ ID NO: 67581 - protein, 603 aa, Pseudomonas putida
MIKRLPVGFVLFVPASSRVNSLLRRLHRIRTLCRTCRRGFTREGAGTGAIHSADFGPGPTSGMILPLSNPPVRRFPMTNQAAEVAKRRTFAIISHPDAGKTTITEKLLLMGKAIAVAGTVKSRKSDRHATSDWMEMEKQRGISITTSVMQFPYREHMINLLDTPGHEDFSEDTYRTLTAVDSALMVLDGGKGVEPRTIALMDVCRLRDTPIVSFINKLDRDIRDPIELLDEIEAVLKIKAAPITWPIGCYRDFKGVYHLTGDYIVVYTPGHGHERTEAKIIQKLDSDEARAHLGDQYDSFVEQLELVQGACHEFNQEEFINGQLTPVFFGTALGNFGVDHVLDAVVDWAPRPLGRVAHERTVEPVEEKFTGFVFKIQANMDPKHRDRIAFMRICSGKYEKGMKMRHVRLNKDLRIGDALTFFSSEREQLEEAFAGDIIGLHNHGTIQIGDTFTEGEALGFTGIPHFAPELFRRVRLKDPLKSKQLRQGLQQLAEEGATQVFFPERSNDIILGAVGVLQFDVVASRLKEEYKVECAYEPITVWSARWISCDDKKKLEEFQTKAMENLAIDGGGHLTYLAPTRVNLALMEERWPDIKFRATREHH

SEQ ID NO: 67582 - protein, 322 aa, Pseudomonas putida
MAVVLSARELTRHYEVSRGLFKGHALVRALNGVSFELEAGKTLAVVGESGCGKSTLARALTLIEEPSSGSLQIAGTEVKGASKAERKQLRRDVQMVFQSPYASLNPRQKIGDQLAEPLLINTSLSKAERRDKVQKMMEQVGLRPEHYQRYPHMFSGGQRQRIALARAMMLQPKVLVADEPTSALDVSIQAQVLNLFMDLQKEFNTAYVFISHNLAVVRHVADQVLVMYLGRPAEMGPKEDIYAKPLHPYTQALLSATPAIHPDPLKPKIRIVGELPNPLNPPDGCAFHKRCPYATERCAKEVPALRQVSTRQVACHYAEQFL

SEQ ID NO: 67583 - protein, 336 aa, Pseudomonas putida
MLSFIARRLGLLIPTFFGITLLTFALIRLIPGDPVEVMMGERRVDPEMHAQAMERLGLNKPLPVQYLDYVGKLAQGDLGESLRTRESVWREFLTLFPATLELAFAALLFAGVVGLLAGVIAALKRGSLFDHGVMGISLAGYSMPIFWWGLILIMFFSVSLGWTPVSGRIDLLYDIEPKTGFMLIDTLLSDEEGAFKDAVMHLILPAIVLGTIPLAVIARMTRSSMLEVLREDYIRTARAKGLSPARVVFVHGLRNALIPVLTVFGLQVGTLLAGAVLTETIFSWPGIGKWLIEAIGARDYPVVQNGILLIACLVILVNFVVDILYGLANPRIRHQR

SEQ ID NO: 67584 - protein, 378 aa, Pseudomonas putida
MSAGLPAKGCKAVPIKASSMKVLLVILALVAGSAKAEDWPDPQWQNDPATLDWQAVDAYAFPARSPSERNGIRTDALLIIRDGRILHERYTAPTRAATAHLTWSVSKSVLATVMGVAQGEGRFQLQDPVSRFYPPMRAHPGVRVADLLHWASGLEWQEDYEYAPLKSSVVAMLYTRGRADMAAYAAARGAAASPGQRFLYSSGDSNLLAAALRGMLDAGQYPDYPWHALFTPLGIGSAVWERDRAGTYVGSSYLYLSARDLARIGLLMQRDGRWQGRQLLPKAWVAFNRTPFVQAQALPGEAIPGGHWWLNQPLAGAERPWPSAPADTFAALGHWGQALYVLPEQKLVIVRYADDRDSSYRHDELLKRVLAVLAGEGA

SEQ ID NO: 67585 - protein, 1006 aa, Pseudomonas putida
MALVAIGVAAYDEFRTSELQSREFSKLASTLTYSLQPGPSDAIIYPGDGPFDKRLGYSALGEFLPRLLKRDYLISEQVKFSPALMNYVDHGLFAPYIEKIQAGLSITDCRGDTLYQYNYPQHLYPDFAAIPPVMVNSLLFIENRDLLDTQDPRNNPAVDWPRFAKAAYSQVAKYLALPGQSAGGSTLATQLEKYRHSPDGLTVSGAEKIRQMISASVRAYQGGPDTTEARQRIVRDYLNSVPLSAVPGHGEVHGMAEGLRVWYGADFDQVNQALNATATDPQSMAARGLALRQVLSLMIAQRRPSHYLSKGRVELAELTDSHIRLLAANKVIDQPLADAALASKAVYRDWVAQPTIVPIITNKGISLARNRLSAMLNRPLYDLDRLDLSATSTLQADLQLQVSQYLKNLADPEFAAQIGLIGERLLTAKTTDQVSYSFTLFERTADGSRVRVQTDSTNQPFDINEGSKLELGSTAKLRVLTTYLEIIAELHDKYAGKPAAELKKVEVAELDRITQWSLEWLALNSKNQSLDAMLDAALERKYSANTGEAFFTGGGMHVFNNFRKEDNNRNPTLKDALRESINLPFIRLMRDLVRYVTYQQPYNRVPLLKDDADPRRQEYLARFADKEGTNYLMRFWKKYQRKTSQQRLDTFLDSMRVTPQRLAAVHRYLFPEASQETFNAFVRAHLKGDKVVLGKLTDGRLSEMYVAYGPGKYDLPDQGYIAKVHPLDLWLLGYLLKNPSSTLTEMINASRFERQEVYGWLFKSRHQGARDSRIRTMVEIEAFLDIHQRWKRVGYPFDHLVPSLATAIGSSGDRPAALSELVGIIQNDGVRLPTLRIDTLHFAANTPYETKLITDPDRGVRILPVEVARALKGAMSQVVDAGTARRISGSFKLQDGTPLVMGGKTGTGDNRIESFGAGGRLIGSRSLNRTATFVFFLGDNHFGTLTAFVPGRTAEAFKFTSALPVQVLKGMAPILMPYLQPGNPNECKPPQVALHTPSPAGNTSTQ

SEQ ID NO: 67586 - protein, 1434 aa, Pseudomonas putida
MNLPAKHHPVLELFHPAVSTWFRRHFATVTDAQAQAWPLIHAGQSMLLAAPTGSGKTLSAFLAVLDELLREGMKHQGELPAQTLVIYVSPLKALSNDIRLNLQAPLEGISQAIAEQGLNAPRITTAVRTGDTPQKERAAMRKLAPHILVTTPESLYVLMGSASGREGLAHVHTVIVDEIHALAGNKRGAHLALTLERLQALCKKPLRRIGLSATQRPVERVAQFLVGSGRPCAIVDIGHARKRDLAIEVPPVPLGAVMAIDVWGLVYDRLATLAREHRTTLVFVNTRRLAERITRHLSDRLGKEAVAAHHGSLSKALRLDAEQRLKSGQLQVLVATASLELGIDIGDIDLVCQVASPGSIAAFLQRVGRAGHQVDGVPKGRLFPTSRDDLIECVALLDCVRQGELDALHIPRAPLDVLAQQIVAEASNQAWHEQELLDCLRQATPYAELDQHHYQALLRMLAEGYNGRQGVRSAYLHRDAVSGTLRGRRGSQLTALTSGGTIPDNADYAVLLEPQALNIGSVNEDFAVESIAGDIFQLGNASYRILRVEPGRVRVEDAHGLPPTIPFWLGEAPGRSDELSAAVARLQARIDQQLALAGGDTVEVLAWLQATFELDEACAGQLLDYLARTREVLGALPSQDTLVMERFFDESGGTQLIIHSPYGSRINRAWGLALRKRFCRTFNFELQAAASEDAIVLSLSTSHSFELDEVWRYLNSRSAEPILIQALLDAPLFGVRWRWNAGVAMALPRFVGGRKVAPQIQRMKSEDLVAAVFPDQIACLENIAGERQIPDHPLVEQTLDDCLHEAMDSEGWLALLRRMESGAVRLLCRDLPAPSPLASAILNARPYAFLDDAPLEERRTQAVLNRRWNDVHSSDDLGALDADAIAAVAAEAWPQPANPDEMHEALMSLGAIGQVEVDANPCWDLLLRQLAKAGRALRLPDDKLWLARERLNLLLALYPTAHREPALERLAGFDQPIEPDHALSELLRARLSGHGPQTLAQIAAPLGKPVTDIEQALARLEAEGYVLRGHFSPGATDLQWCERHLLARIHRYTVKRLRREIEPVSLQDFMRFLFDWQHLAPDERLRGPQAVAEVLGQLQGFPSAAAAWEAELLPARIKDYSPHWLDEACRSGQFAWSRLAATVASSTLTSTPLVLLPRDQLNTWRSLAPAPAVDALGLRAQRVHEALKTQGALFFDELAHEAHLLPSELETALQELVGSGLARADSFTGLRSLITPATKRSSRNSRRGHPPLSSSMAHAGRWALLRRSDAPPDHDQRLEHIARTLLRRYGVICWRLLARESDVLPPWRELLRCYHRLEARGEIRGGRFIAGLAGEQFALPEAVVLLRQVRRREPDGTLQVVSAGDPLNLIGSLLPGAKVPAVIGNRLLYRDGIPVAVRMAGRYAYLVEASAQEQESWRQKLLRDTLERVYPRIR

SEQ ID NO: 67587 - protein, 442 aa, Pseudomonas putida
MNQAPLTVLIVEDDPHVLLGCQQALALEDIACEGVGSAEQALERIGDDFAGIVVSDIRLPGIDGLELLNRLKARDRSLPVVLITGHGDIDMAVGAMRNGAYDFMEKPFSPERLVDVVRRALEQRGLSREVVALRRQLAEQSSLEGRIIGRSPAMEHLRELIANVADTSANVLIEGETGTGKELVARCLHDFSRRQSHPFVALNCGGLPENLFESEIFGHEANAFTGAGKRRIGKIEHANGGTLFLDEVESMPINLQIKLLRVLQERTLERLGSNQSIPVDCRVIAATKADLDALGQSGQFRSDLYYRLNVVTLELPPLRERREDILQLFEHFLQQSALRFDRETPTLDSQTLSRLMAHDWPGNVRELRNVAERYALGLPAFKKGPSGGANQGLLFAEAVEAFERNLLTDALQRTGGNLSQASQELGMAKTTLFDKVKKYGLA

SEQ ID NO: 67588 - protein, 305 aa, Pseudomonas putida
MRIVRQLLGAAIAAAVIASPAMAEELTGTLKKIKESGTITLGHRDSSIPFSYLAGKPEPVGYSHDIQLAVVDALKKQLGTDIKVRYNLVTSQTRIPLVQNGTVDLECGSTTNNVERQQQVGFSVGIFEVGTRLLTKVKDGQPAYKDFPDLAGKNVVTTAGTTSERILKAMNADKQMKMNVISAKDHGEAFNMLESGRAVAFMMDDALLAGEMAKARKPADWVITGTPQSYEIYGCMVRKDDAAFKKAVDDAIVAYFKSGEVNKSYEKWFMQPIPPKGLNLNFQMSEELKKLIAEPTDKAADEKKS

SEQ ID NO: 67589 - protein, 313 aa, Pseudomonas putida
MSKKRYPRLFGILPFLGMLLLSGCNWTLLDPKGQVGIEQKNLILIATGLMLLVVIPVIIMTLAFAWKYRASNKAATYTPDWSHSTKIEAAVWIIPILIIIALGYVTYHSTHKLDPYRPLDSDVKPIQIDVVALDWKWLFIYPEQGIATVNKIVFPANTPVNFRVTSDAVMNSFFIPGLGGQIYAMAGMTTKLHLIANENGEFDGISANYSGAGFTGMKFKATATSQEDFDKWVAEVKQSPKKLDKAEYDALAKPSENNPVALYSEASPEQFQLIVDKYEGMNRGRSHEEAGSKDLATTKGVESSMQPAAGAEE

SEQ ID NO: 67590 - protein, 499 aa, Pseudomonas putida
MTDTQDKNYIIALDQGTTSSRAIIFDRDANVVGTSQREFAQHYPQAGWVEHDPMEIFATQSATMVEALAQAGISHAQVAALGITNQRETTVVWDKETGRPVYNAIVWQCRRSTEICAQLKRDGHEDYIRETTGLVTDPYFSGTKLKWILDNVDGARERAERGELLFGTIDTWLIWKLTGGKVHVTDYTNASRTLMFNIHSLQWDDKLLEILGIPRQMLPEVRPSSEVYGHTKSGIAIAGIAGDQQSALFGQMCVEPGQAKNTYGTGCFLLMNTGDQAVKSSHGLLTTIACGPRGEVAYALEGAVFNGGSTVQWLRDELKIVNDALDTEYFASKVKDSNGVYLVPAFTGLGAPYWDPYARGALFGLTRGVKVDHIIRAALESIAYQTRDVLDAMQQDCGQRLSELRVDGGAVANNFLMQFQADILGTCVERPQMRETTALGAAYLAGLACGFWSGLDELRDKAIIEREFSPQLDETQKEKLYAGWKKAVERTRDWEDHEA

SEQ ID NO: 67591 - protein, 283 aa, Pseudomonas putida
MTTALRQPTLSSQCLAEFLGTALLIFFGTGCVAALKVAGASFGLWEISIIWGVGVSMAIYLTAGISGAHLNPAVSIALTLFAGFDKRKLPFYMLAQVCGAFCGAALVYTLYSNLFFDFEQAHAMLRGSEGSLELASVFSTYPHPSLSTSQAFLVEVVITAILMAVIMALTDDNNGLPRGAMAPLLIGLLIAVIGSAMGPLTGFAMNPARDFGPKLMTFLAGWGEIAFTGGRDIPYFLVPVFAPILGACLGAASYRGLIARNLPMAPAATPETNDIRQGDTQAN

SEQ ID NO: 67592 - protein, 349 aa, Pseudomonas putida
MRVADFSFELPDSLIARHPLAERHGSRLLVLDGPTGALAHRQFPDLLDYLRPGDLMVFNNTRVIPARLFGQKASGGKLEVLVERVLDSHRVLAHVRASKAPKVGAVILIDGGGEAEMVARHDTLFELRFTEEVLPLLDRVGHMPLPPYIDRPDEGADRERYQTVYAQRAGAVAAPTAGLHFDEALLEKIADKGVERAFVTLHVGAGTFQPVRVDKIEDHHMHKEWLEVGQDVVDAIEACRARGGRVIAVGTTSVRSLESAARDGVLKAFSGDTDIFIYPGRPFHVVDCLVTNFHLPESTLLMLVSAFAGYPETMAAYAAAVEHGYRFFSYGDAMFITRNPAPRGPEDQA

SEQ ID NO: 67593 - protein, 371 aa, Pseudomonas putida
MSFELLATDGKARRGRITFPRGTVETPAFMPVGTYGTVKGMLPRDIEAIGAEMILGNTFHLWLRPGTEVIKKHNGLHDFMQWKGPILTDSGGFQVFSLGAMRKIKEEGVTFASPVDGSKVFMGPEESMQVQRDLGSDVVMIFDECTPYPAEHDVARTSMELSLRWAQRSKNAHADNTAALFGIVQGGMYQDLRMRSLEGLENIGFDGLAIGGLSVGEPKHEMIKVLDYLPDQMPADKPRYLMGVGKPEDLVEGVRRGVDMFDCVMPTRNARNGHLFVDTGVIKIRNAFHRHDESPLDPTCDCYTCTNFSRAYLHHLDKCGEMLSSMLNTIHNLRHYQRLMAGLREAIQQGKLAAFVDAFYAKRGLPVPPLD

SEQ ID NO: 67594 - protein, 1014 aa, Pseudomonas putida
MAFTDTFIQRPVLASVVSLLILLLGFQAWNKLQIRQYPQMENALITVTTAYPGANAETIQGYITQPLQQSLASAEGIDYMTSVSRQNFSIISIYARIGADSDRLFTELLAKANEVRNKLPQDSEDPVLSKEAADASALMYVSFYSKEMSNPQITDYLSRVIQPKLATLPGMAEAEILGNQVFAMRLWLDPVKLAGFGLSATDVTNAVRRYNFLSAAGEVKGEYVVTSVNASTELKSAEAFAALPLKTSGDSRVLLGDVARVEMGAENYDTVSSFDGTPSVYIGIKATPAANPLDVIKEVRRIMPELESQLPSALNVSIAYDATRFIQASIDEVIKTLGEAVLIVIVVVFLFLGALRSVLIPVVTIPLSMIGVLFFMQMMGYSLNLLTLLAMVLAIGLVVDDAIVVVENIHRHMEEGKSPFDAALEGAREIAMPVVSMTITLAAVYAPIGFLTGLTGALFKEFALTLAGAVIISGIVALTLSPMMCALLLRREQNPSGLAHRLDQLFERLKGRYQRLLHATLDSRPVVLVFAVIILCLIPVLLKFTQNELAPNEDQGVIFMMSSSPQPANLDYLNAYTDQFTPLFKAFPEYYSSFQINGFNGVQTGIGGFLLKPWNERERTQMELLPLVQAKLEEISGLQIFGFNLPSLPGTGEGLPFQFVINTAGDYPALLDVAQRIKTRAQESGKFAFLDIDLAFDKPEVVVDIDRAKAAQMGVSMDTLGGTLATLLGEAEINRFTLEGRSYKVIAQVERPYRDNPGWLNNYYVKNDQGQLLPLSTLITLTDRARPRQLNQFQQLNAAIIQGVPMVSLGEALKTVQDIAREEAPEGFAFDYAGAARQYVQEGSALWVTFGLALAIIFLVLAAQFESFRDPLVILVTVPLSICGALLPLFLGVSSMNIYTQVGLVTLIGLISKHGILIVEFANQLRDERGLSVREAIEEAAAIRLRPVLMTTAAMVFGMVPLILASGAGAVSRFDIGMVIATGMSIGTLFTLFVLPCIYTLLAHKASAKAPAIA

SEQ ID NO: 67595 - protein, 348 aa, Pseudomonas putida
MSDRLTLLRPDDWHIHLRDGAVLPHTVGDVARTFARAIIMPNLVPPVRNVTEAGAYRERILAARPAGSRFEPLMVLYLTDRTSPEDVRAAKASGFVYAAKLYPAGATTNSDSGVTSIDNIFPAIEALAEVGMPLLVHGEVTRSEIDVFDREKRFIDEHMRRVVERFPTLKVVFEHITTSDAAQFVTEAPANVGATITAQHLLYNRNHMLVGGIRPHFYCLPILKRNTHQVALLDAATSGNPKFFLGTDSAPHARHAKEAACGCAGCYTAYAAIEMYAEAFEQRNALDKLEGFASLHGPAFYGLPANTDTITLVREEWTAPESLPFGEQTVVPLRAGEKLRWRLLEKNA

SEQ ID NO: 67596 - protein, 296 aa, Pseudomonas putida
MFDYKLLAALAAVIEQGGFERAAQVLGLSQSAISQRIKLLEARVGQPVLVRASPPGATEVGRQLLNHVQQVRLLERDLQRQVPALDEEGMPERLRIALNADSLATWWAGAVGNFCAQQNVLTDLVVEDQEVGLKRMRAGEVAACLCGSERPVAGARSLPLGAMRYRALASPVFMARHFPQGFVASRLARTPAIVYGPDDFLQHRYLASLGIEGGFLHHLCPSSEGFLRMTEAGLGWGLVPELQAREQLASGQLVEICRDTPIDVPLYWHHWRNGGQLLAQLTDHLRHTAQHWLVPL

SEQ ID NO: 67597 - protein, 330 aa, Pseudomonas putida
MRILVTGASGFIGGRFARFALEQGLDVRVSGRRAEGVEHLVKRGAQFIPGDLGDAELARRLCQGVEAVVHCAGAVGNWGRYQDFYQGNVVVTENVVEGCLKEHVRRLVHLSSPSIYFNGPSRLDVREDQVPRRFHDHYGQTKYLAEQKVFGAQEFGLEVLALRPRFVTGAGDASIFPRLMQMQRKGRVAIIGNGLNKVDFTSVHNLNEALLSALFADDRALGQAYNISNGQPLPLWDVVNYVMRQMQLPQVTRYRSYGLAYSLATLNEAACMLWPGRPQPTLSRLGMQVMSRDFTLDISRARQYLDYQPKVSLWTALDEFCGWWKHLPPG

SEQ ID NO: 67598 - protein, 100 aa, Pseudomonas putida
MPLDLDEIIKALAHPVRREILSWLKDPATQFPDQYHSTENGVCAGQIDQRCGLSQSTVSAHLATLQRAGLISSQKIGQWHFFKRDEATIQAFLEQLRQAL

SEQ ID NO: 67599 - protein, 679 aa, Pseudomonas putida
MSEPRQILVTSALPYANGSIHLGHMLEYIQTDMWVRFQKLRGNQCIYVCADDAHGSAIMLRAEKEGITPEQLIANVQAEHSSDFADFLVDFDNFHSTHSDENRELSSLIYSRLREAGHIATRSVTQYFDPEKGMFLADRFIKGTCPKCAAEDQYGDNCEKCGATYAPTELKNPKSAISGATPVLRDSQHFFFKLPDFQAMLQQWTRSGTLQDAVANKLAEWLDSGLQEWDISRDAPYFGFEIPGEPGKYFYVWLDAPIGYMASFKNLCARRPELDFDAFWHEGSKAELYHFIGKDIVNFHALFWPAMLEGAGFRKPTAVNVHGYLTVNGAKMSKSRGTFIKARTYLDHLQPEYLRYYYAAKLGRGVDDLDLNLEDFVQKVNSDLVGKVVNIASRCAGFIHKGNEGVMVGGDAAPELTEAFLAAAPSIAEAYEARDFGRAMREIMALADRANAWIADKAPWSLAKQEGKQDEVQAICAQGINLFRQLVIFLKPVLPVLAADAEAFLNVAPLTWNDHLTRLENHQLNPFKALMSRIEPAKVEAMVAASKEDLLAAEAKAPAGNGELAKDPLSAEIEFDTFAAVDLRVALIVKAEAVAGADKLLQLTLDIGDERRNVFSGIKSAYPDPSKLEGRLTMMVANLKPRKMRFGVSEGMVMAAGPGGEEIYLLSPDSGAKPGQRIK

SEQ ID NO: 67600 - protein, 262 aa, Pseudomonas putida
MTVNYDFSGKVVLVTGAGSGIGRATALAFAQSGASVAVADISTDHGLKTVELVKAEGGEATFFHVDVGSEPSVQSMLAGVVAHYGGLDIAHNNAGIEANIVPLAELDSDNWRRVIDVNLSSVFYCLKGEIPLMLKRGGGAIVNTASASGLIGGYRLSGYTATKHGVVGLTKAAAIDYANQNIRINAVCPGPVDSPFLADMPQPMRDRLLFGTPIGRLATAEEIARSVLWLCSDDAKYVVGHSMSVDGGVAVTAVGTRMDDLF

SEQ ID NO: 67601 - protein, 303 aa, Pseudomonas putida
MAAYTLRQLKYFVTTVEAGSVAEASRQLYIAQPSISTAIKSLEESFGVQLFIRHHAQGVSLTPSGKRFYAKTKSLLQMAHEFEQNALADNDTVAGQIDIGCFETVAPLYLPRLIAGFRQRYPGVDIRLRDGEQQDLIQGLTAGTFDLAFLYDHDLDGTIEAEPLMPPQKPYVLLPENHRFASQAQVSLRDLCPEPMILLDVAPSRTYFVSLFNEMGLAPNIVFSSPSIEMVRGMVGQGFGFSLLVTRPHSEYTYDGQRLAMLDIAEPVALSGLAAAWLKRVQLTKPAQLFVEFCREELAKFLK

SEQ ID NO: 67602 - protein, 869 aa, Pseudomonas putida
MGKSLVIVESPAKAKTINKYLGNQYVVKSSIGHIRDLPTSGSASASKEPAAKRGKAAGEAPALSPKEKARRQLVARMGVDPDHGWKAKYEILPGKEKVIEELRRLAKDADTIYLATDLDREGEAIAWHLREAIGGDDTRYKRVVFNEITKKAIQEAFSQPGELDIDRVNAQQARRFLDRVVGYMVSPLLWAKIARGLSAGRVQSVAVKLVVEREREIRAFIPEEYWEIHADLGTAKNAKVRFEVAREKGEAFKPLNEAQAMAALEKLKASSYSVVKREDRPTSSKPSAPFITSTLQQAASNRLGFGVKKTMMMAQRLYEAGYITYMRTDSTNLSADALDMARSYIEREFGKQYLPEAPLVYGSKEGAQEAHEAIRPSDVNTHPTKLSGMERDAERLYELIWRQFLACQMPPAQYLSTSVTVAAGDFELRAKGRILKFDGYTRVLPQQSKPGEDDVLPEMVQGEALKLIQIDPSQHFTKPPARFTEASLVKEMEKRGIGRPSTYAAIISTIQDRGYVTLHNRRFYSEKMGDIVTERLSESFSNLMDYGFTADMEENLDDVAQGERDWKNVLDEFYGDFSKKLQTAESSEDGMRANQPTMTNIPCKECGRPMMIRTASTGVFLGCSGYSLPPKERCKATVNLVPGDEIAADDEGESESRVLLGKHRCPICATAMDAYLLDEKHKLHICGNNPDCVGYEIEEGNYRIKGYEGPSLECDKCGSEMQLKTGRFGKFFGCTNPACKNTRKLLKSGEAAPPKMDKVDMPELKCEKVDDTYVLRDGASGLFLAASQFPKNRETRAPLVLEIVPHKHEIDPKYHFLCDAPQKDPDGRPAVIRYSRKTKEQYVQSEVDGKPTGWKAFYDGNAWKVEDKR

SEQ ID NO: 67603 - protein, 391 aa, Pseudomonas putida
MSLNPRDVVIVDFGRTPMGRSKGGMHRNTRAEDMSAHLISKLLERNGKVDPKEVEDVIWGCVNQTLEQGWNIARMASLMTPIPHTSAAQTVSRLCGSSMSALHTAAQAIMTGNGDVFVVGGVEHMGHVSMMHGVDPNPHLSLHAAKASGMMGLTAEMLGKMHGITREQQDLFGLRSHQLAHKATVEGKFKDEIIPMQGYDENGFLKVFDFDETIRPETTLEGLASLKPAFNPKGGTVTAGTSSQITDGASCMIVMSGQRAMDLGIQPLAVIRSMAVAGVDPAIMGYGPVPSTQKALKRAGLTMADIDFIELNEAFAAQALPVLKDLKVLDKMDEKVNLHGGAIALGHPFGCSGARISGTLLNVMKQNGGTLGVATMCVGLGQGITTVFERV

SEQ ID NO: 67604 - protein, 179 aa, Pseudomonas putida
MKAKADTPFVALNIAVLTVSDTRTFDTDTSGQMFVDRLSAAGHRLAERVLLKDDLYKIRAQVATWIADDNVQVVLITGGTGFTGRDSTPEAVACLLDKQVDGFGELFRQISVADIGTSTVQSRALAGLANGTLVCCLPGSTNAVRTGWDGILAEQLDARHRPCNFVAHLKQAAACDSRG

SEQ ID NO: 67605 - protein, 1214 aa, Pseudomonas putida
MKILAIRLKNLASLAGPIDIDFTAEPLASAGLFAITGPTGAGKSTLLDALCLALFGTVPRLNAIGREAKVPDADGDIPTSDPRNLLRRGTGSGFAEVDFVGIDGRRYRARWEANRARDKANGKLQHSRQSFYDLDSEQVLGSGKNEYKQLVEARLGLNFEQFTRAVMLAQSEFGAFLKADDKDRSELLEKLTNTAIYTRLGQRAFSKAREAGEAHNALKERASHLLPMAAEARAELDQRLEQAQQQFKADQAGERQLEQQRNWLNEQRQLQAQHTEASTTLQAAELDWQQLAEPRLDLARLERLAPQRHQFHRRQALSAQLAPVAAKIAEQQQQQAELQVRTRELEQALDTARQALADRQAEHGENAPRLRQAFAAQDTLARLDQELAAQRSISQQAQQQVADGQQQLQQLEDNQQRSVQQLALIDTALADSQHLAGLANAWHAYLPQLKQVMLIGGRLTKGREELPGLQAQASQANARLQAERDAYDLLFREAKAEPQALAEQIDLLGGMLQDNRKQQRAVEEMSRLHGREQELRQQLDALRERQQQAMLQRQQLITEGTAAKAELEAAEQALTLTRQLLERQRLARNTSVEELRNQLRDGEPCPVCGSAEHPFHQPEALLQSLGRHDQAEEHAAQKQVETLNSKLVELRTQLGVVNAQLKDFQQQQQRLGEQLQPLVAQVQAHSLWPALAPQDDKARSAWLDSQLRRLDEEISQDEKRQSALLALQRDAARLNQQLQAAHDAQQQAQRHLEQQHQALANDEQLLQQGLNDLAGVLPEEALKALNDDPANAFLALDQQIAQRLQQLEQRKDELEEQQARQTQLDKLRDQQQARVQGQQQLQQKLAALDEQRQQALASLAELLGEHASAEAWQQHMDTALEHARTLDADTAQRLQDLRTQGVQLASELKANTQQQQALDAECQQLQAQIAQWRSEHPELDDAGLDRLLAMDDAQVNELRQRLQGAEKAIEQGRVLLQEREQRLQHHAAQMTVDTTVQALEQALAELRERLANHEQQCAELRAQQADDQRRQQAHQALAAEIEQAHQQWQRWARLNALIGSASGDVFRKIAQGYNLDLLLHHANAQLRQLARRYRLKRGGSALGLLVLDTEMGDELRSVHSLSGGETFLVSLALALGLASMASSTLRIESLFIDEGFGSLDPESLQLAMDALDGLQAQGRKVAVISHVQEMHERIPVQIQVRRQGNGLSDVEVCG

SEQ ID NO: 67606 - protein, 885 aa, Pseudomonas putida
MRTEQPQVIYLKDYQAPEYLIDETHLTFELFEDHTLVHAQLVMRRNPARGAGLPPLELDGQQLELLRASLDDQELQPGEYQLDADSLTVQPKAERFTLDTSVKIHPESNTALEGLYKSGKMFCTQCEAEGFRKITYYLDRPDVMSTFTTTVIAEQHRYPVLLSNGNPIGSGPAEDGRHWATWEDPFMKPAYLFALVAGDLWCVEDSFTRQSGREVTLRIYVEPENIDKCDHAMVSLKKSMRWDEEVYGREYDLDIFMIVAVNDFNMGAMENKGLNIFNSSCVLARAETATDAAHQRVEGVVAHEYFHNWSGNRVTCRDWFQLSLKEGFTVFRDAEFSADMNSRTVKRIEDVAYLRTHQFAEDAGPMAHPVRPDSFIEISNFYTLTVYEKGAEVVRMVRTLLGSEGFRKGSDLYFERHDGQAVTTDDFIKAMEDANGVDFTQFKRWYSQAGTPRLEVSEAYDAAAQTYSLTFRQSCPQTPDKAEKLPFVIPVELGLLDADGNDLPLQLTGEDAAQGTSRVLSVTEAEQTFTFQGIQAKPLPSLLRGFSAPVKLSFPYDRDQLMFLMQHDSDGFNRWEAGQQLSVQVLQELIGQHQRGEALKLDQRLITALGTVLGNVSLDPAMVAEMLSLPGEAYLTEISQVADVDAIHAAREFARQQIAEHLFDALWARYQANREVSRSTAYVASAEHFARRSLQNIALSYLMQSGKQQVLDATLEQFEHCDNMTERLTALAVLVNSPFEAERAKALEAFAEHFKDNPLVMDQWFSVQAASTLPGGLARVKALMQHPAFTLKNPNKVRALIGAFAGQNLVNFHAADGSGYRFLADLVIELNALNPQIASRQLAPLTRWRKYDDARQALMKGELERILASGELSSDVYEVVSKSLA

SEQ ID NO: 67607 - protein, 308 aa, Pseudomonas putida
MTSKLEQLKQFTTVVADTGDLDAITRLKPVDATTNPSLLLKAAAIPGYADLLKQVKADAKGNVDLACDKFAVAVGSGILKVIPGRISTEVDARLSFDEPALLNKARQLIALYEAAGVAKERVLIKLASTWEGIRAAEQLEKEGIQTNLTLLFSFAQAQACADAGVFLISPFVGRIYDWYKKSTGQEYVGAEDPGVQSVTRIYNYYKANGYNTVVMGASFRNIGQIEQLAGCDRLTISPELLQQLSDDQGELPQVLKPGNAGEAKQHLNESQFRWAMNEDAMGTEKLAEGIRQFARDQEKLEKLIAEKA

SEQ ID NO: 67608 - protein, 246 aa, Pseudomonas putida
MSLQGKVALVTGASRGIGQAIALELGRQGATVIGTATSASGAERIAATLKEHGITGTGMELNVTSAESVEAVLAAIGEQFGAPAILVNNAGITRDNLMLRMKDDEWFDVIDTNLNSLYRLSKGVLRGMTKARWGRIISIGSVVGAMGNAGQANYAAAKAGLEGFSRALAREVGSRGITVNSVTPGFIDTDMTRELPEAQREALQTQIPLGRLGQADEIAKVVSFLASDGAAYVTGATVPVNGGMYM

SEQ ID NO: 67609 - protein, 124 aa, Pseudomonas putida
MENDANGASASGKRLGAAMLGLLHSHIELFGIELQEQKGRTLSLLLFAGLALVFALLLLTALSGLLLVLLWDSYRLAGIIGLCVFYGIAALYCGVRLKAAVFDESSPFGATLDELAKDRERLLP

SEQ ID NO: 67610 - protein, 192 aa, Pseudomonas putida
MLPLLLASSSAYRRELLARLHLPFTWASPDIDEQRLDGEPPVELVRRLARQKAEALAGSHPRHLIIGSDQVAVLGEQVLGKPHTFERACEQLLECSGQQVSFLTGLALLNSATGQCQVDCVPFTVTLRELSREQVERYVAAEQPLDCAGSFKAEGLGVSLFQSTHGCDATSLIGLPLIRLVDMLTKEGVMVP

SEQ ID NO: 67611 - protein, 1209 aa, Pseudomonas putida
MARVINRLLLVLLLSGATQAGHREAASFTLLARSSARPVQPVLTPEQRQWREGRQELVLGTSAPDYPPFDITGGGNDYQGLTAEYANLIGKALQLPVRVLRFSSRQAAVEALRHGDIDLLGSANGYEAASDGLALSRPYAVDQPVLVTREDENRALDTDLAGMRLGMLYHYLPRQEVLTAYPKAELLAFGSSSQALNAVAFGQADVFIGDTISTHYQLNRGHLPRLRMANFGKHEAIGFGFALRQQDTVLLDLVNTILDRQSPAIRSSIFKRWSAGSDLLLSDRQLQLSAAEQQWLEKHPVMRVAADDAAAPLSYFDDSGHFRGITADLLELIRLRTGLRFEVQRASGIADMVARLKDGRADVIAALASAGKAGDDLQISRPYLESAYVLVNHKDNNALSSLEQLQGHRIAITRYSTMNAMLSRDYPKISWVETESAFYSMALLNSGAVDAVITTLIDANHALASNPELVIRTSVGSEPANFAMATIAPSPALLSILDKALLSISPEELGVINNRWRGFGRHEDDNSKGYSRLALQVVLATAVLLLLALLWNARLRLQIRQRQRAERALNDQLAFMRALLNGTPHPMYVRDREGCLKSCNYSYLEAVQARSDQVIGKKLKDSLFADSEQARQIQADYQKVMAAGSPLIKDRPLRIKGRDLTIYHWILPYRDSLGEVQGIIGGWIDISERRQLVLELRQAKQQADDANRAKSTFLATISHEIRTPMNAVIGMLELAVKRADQGRVDRSALELAHHSAKDLLGLIGDILDIVRIESGHLSLAPEVVDLAALVESVARIFDGQARQKGLALEVQIAPAARCHVLLDPLRFKQVLSNLVSNAIKFTEHGQVRISVRLLDDGTSTPAVLELEVRDSGIGIHPDDLQRLFNPFIQANPHSQGARAGTGLGLAICRNLCEMMGGSLSMKSLEDVGTQVRLKMPLQRVDGAEQPKPLPEQLDVPDPRLNVLVIDDHPANLQLMAQQLGYLGLEHASARDGQEGLATWREGDFDVLVLDCNMPHMNGYQLATAVRAEERHGKRPPCTILGYTANAQPEVRRKCLTAGMDDCLLKPISLSTLSQRLAGIRPRRQQRPRRKLYQLDGLAAVVGPDPVDRQRFLETLHQSLQADLASLMALHPQHDSGAIAEQAHKVLSAARMLEAPDLMAACEALEASDLPTAQVRLRRQALARHMCRVERALAKELATSTDTQAGNHTC

SEQ ID NO: 67612 - protein, 484 aa, Pseudomonas putida
MIKTLRPLILAGLLLPLALPSHAAVNTTLPAKVQQALKANKLQDTALSLVMLPLDGPGTPTVFNADVSVNPASTMKLVTTYAALELLGPTFQWKTEFYTDGTLSNGVLNGNLYLKGGGDPKLNMEKLWLLMRDLRANGVRTVTGDLVLDRSHFVQPNLPQFNDDGGDENKPFLVKPDSLLVNLKALRFVARNDGGKVTVAVEPPIARIRIDNQVKPVASKKCTGDVRYNPVPQADGISVTVSGQLGDGCNSQTYLSLLDHSTYAAGAVRAIWNELGGNIQGGDRIENVPKSARLLARAFSPDLVEVIRDINKYSNNTMAQQLFLSLGAQFRTDADGDDARAAQRVVRQWLAKKGITAPHLVMENGSGLSRAERVSTREMAEMLKAAWKSPYAAEFMSSMPLVGMDGTMRKRLKRTAMAGEGHIKTGTLNTVRAIAGFSRDSNGHTWAVAAILNDPKPWGASQVLDQVLLDLYRQPKLAGSTAAN

SEQ ID NO: 67613 - protein, 339 aa, Pseudomonas putida
MTVQWQEQVSLKPYNTFGIDVKARYFSQVQDDQQVRQALGQAQQRGLPVLVIGGGSNLLLTRDIDALVLHMASRGRRVLSDDGERIVVEAEAGEPWHAFVQWTLAQGYCGLENLSLIPGTVGAAPMQNVGAYGVEIKDVFAGLTALDRETGELRDFSLAECAFGYRDSLFKRNPGRWLILRVRFALTRTLHAHLDYGPVRQRLSERGVTELTAQAISDAICSIRREKLPDPAELGNAGSFFKNPVVTADLVERIRAQYPGVVAYPQADGQVKLAAGWLIEQAGWKGHREGDAGVHRLQSLVLVNYGQASGAQMHALARKIQADIFERFGVELEMEPNLY

SEQ ID NO: 67614 - protein, 556 aa, Pseudomonas putida
MSLQLSFAQASATGPRAENQDALRLVTPAPELAASKGYLFALADGVSQCTDGGLAARASLQALALDYYATPATWSVAQALDRLLLAQNRWLRAQGSGQPLLTTLSALVLRGRRFTLAHVGDCRVYRWHEGNLQCLSEDHVWDQPGMQHVLKRALGLDQHLLVDYLEGELQPGECFLLLSDGVWASLGEQHIQAVLREQTDLQLAADTLVASAHLSGSKDNASALLVQVEQLGTANLGDTLAQLQQWPVPGPLREGQVIDGWQVETLHAHSRQSLLYKVRDSQNQPWLLKTLPTAREQEPGAAQGLLLEEWFLRRIAGRHFPELHAASQRQHLYYVMREYPGQNLAALLAEQGPLPLPQWLEVARQLLQAVGVLHRRNLLHRDIKPDNLHLGRDGQLRLLDFGLAYCPGLSEDPLHELPGTPSYIAPEAFDGHPPSPRQDLYAVGVTLYHLLTGHYPYGEVEAFQRPRFGQPVNAARYRPDLPEWLQHNLLQAVASDPAQRFETAEHWLLLLERGDRQELPSRPRPLLEREPLKVWRTLALLSLLINLILLFTLLKG

SEQ ID NO: 67615 - protein, 449 aa, Pseudomonas putida
MRRVSLGSRLALLFAACTATVSLGAGLLFSRASEQHFVELDQQLLDSRLSLFRTQLAGVSTADELQARLPALRDELSHQADLALRISASNGATWFESRSGLPHAAQATGLATLHAPGIDYRSLSVPLTQGAMQSPRLTLYLDITHHQHFLQGMQRLIWLTVGLSALITALLGAWAARSGLRPLRQMGQVAASVSARSLTTRLPVAQMPEELAELASSMNAMLQRLDDAFQRLSAFSADIAHELRTPLSNLLTHTQVTLTRPRSLEEYREALHGNLEELQWMAQMINDMLFLAKADHGLLVPGDAPLALHDEVDALLEYYAPLAEDSDVQMLREGEAVLHGDQHMLRRALSNLLDNAMRFTPAGGQIKVTLGPGPTINVANTGLAIDPAALPRLFDRFYRVDPARREGSSEHAGLGLAITRSIVQAHGGCIRAECEGGWTRFVIEFTQDR

SEQ ID NO: 67616 - protein, 238 aa, Pseudomonas putida
MTLIYGHRGAKGEAPENTLKSFQQCLSHGVTRCELDLHLSSDNELMVIHDPTLKRTTGRRGKVVEHPAAELVKIDARKGGPGHVQPCPIPKLEELFEKCPFEHWQLEVKSASRTRAATTVLAIRELAQQYGLLDKVTITSSSREVLGAALELVPDVKRGLVAEYAWLDPLKVAQNYGCELLALNWTLCTPERLLKAQGQGLHVSVWTVNEPALMRRLADFGVDSLITDFPGLAKTTLG

SEQ ID NO: 67617 - protein, 464 aa, Pseudomonas putida
MAVYNYDVVVLGSGPAGEGAAMNAAKAGRKVAMVDDRRQVGGNCTHLGTIPSKALRHSVRQIMQFNTNPMFRAIGEPRWFSFPDVLKSAEKVIAKQVASRTGYYARNRVDVFVGTGSFADEQTVEVVCPNGVVEKLNAKHIIIATGSRPYRPADIDFHHPRVYDSDTILSLSHTPRKLIVYGAGVIGCEYASIFSGLGVLVELVDNRGQLLSFLDSEISQALSYHFSNNNITVRHNEEYERVEGLDNGVILHLKSGKKIKADALLWCNGRTGNTDKLGLENIGIKVNSRGQIEVDEAYRTTVPNIYGAGDVIGWPSLASAAHDQGRSAAGSIVDNGSWRFVNDVPTGIYTIPEISSIGKNEQELTQAKVPYEVGKAFFKSMARAQIAGEPQGMLKILFHRETLEILGVHCFGYQASEIVHIGQAIMNQPGEQNNLKYFVNTTFNYPTMAEAYRVAAYDGLNRLF

SEQ ID NO: 67618 - protein, 132 aa, Pseudomonas putida
MQEIPQVSSDTGNQLNIALRTRIKLFYRPPTLKGTPTDHLNSLTFSLSVRNGVEQLVVKNPSPFHITFNRLEVKGQGQQHTLKNTAMLEPFGEKTYPLTGITRASSLQARFSIVNDYGGFTEPLSAPIQLAN

SEQ ID NO: 67619 - protein, 719 aa, Pseudomonas putida
MRLDALANPEDQASACLDLLTVVPGAQIVFTPTELHLAISIPQISMRRNTANQVDPSRWDSGINAAFINYQASTLNGRNRSSGRYTSNDLYLNSGINLGEWRLRSTQSWRQGSQGKTEWTRAQTYAQRDIPGTLANLTIGETFTDREVFRSVPISGVRVASDMGMLADNQRGYAPIIRGVAQSRAKVEIWQHGYPIYSTYVSAGPYAIDDLSTAGSGELEVVVTEADGQVRRFIQPYSTMSNLLRPGVWRYSATVGRYNPSSDLETPLLWQGTLAVGSYWDTTVYGGLMASEFYRAGNLGFSKDLGHLGAVAFDVTQASSAIDNAHEREVQGSSYALKYAKAFTTQTNLRFAGYRYSTQGYRDFDEVVRQRSQDTTFSGSRRSRLEASVHQSLGRTSSLTLTLSQQDYWRSNATQRQYQFNFNTQHRGVGYNLFASQSLTDRYGNDRQFGLSVTVPLHFGHRANATFDLQHNANGYSQRATLSGSDSARALSYSTSLSRDEHARKTAALSLGHQAPYASVSAGYTEADNYRSLSLNASGAVLLHADGLEFGRYLGDTAALIEVPGVANVGLQNATGTRTNSRGYALLPYLQPYRTNSVVLETDRLDPDVEIDNGIAQVVPRQGAVVKHRFEARRVSRLVLTLHDTQGQPLPFGAQVLAENGTQLGMVGQAGLVMLTNPSQEQPLQVSWGEQPNAGCQVHLDELDAPVVDGYRQQTLTCI

SEQ ID NO: 67620 - protein, 272 aa, Pseudomonas putida
MKRTAFFISDGTGITAETLGQSLLAQFESIPFNKFTRPYIDSPDKARVMVQQINAAAERDGVRPIIFDTIVNQDIREILATSNGFMIDIFSSFLSPLEQELIAHSSYSVGKSHSIGGNSNYMERIEAVNFALDNDDGARTHYYDKADLILVGVSRCGKTPTCLYMAMQFGIRAANYPLTEDDMERLQLPAVLKKHHSKLFGLTIDPDRLTAIRHERKPNSRYSSFAQCEFEVREVESLFRRENIPNINSTHFSVEEISAKILVEKGVERRFK

SEQ ID NO: 67621 - protein, 712 aa, Pseudomonas putida
MLAGPLFFASACWAETLVDADTQLDAGSTLDSYRVIGPAVLTATGATTLQIAAQAGATVNLSDSQVTAESNGNGLALNGASATVHRSTIRSDARGLALSAAGAGNGSRALINDSVIEGGVQGATLNASSAELQRSELRGTGASSEGARLVAGTLIARDGSTISGGNYGARILEDDGRGSTLVVDNSLIEGRNGPAIAVGRGAGFAASAQIDVINGASLSGGNGMLLHVAEDAAANLRVNNSHLVGDIVAASGGTANVLLENFATLKGRLDNVASLEINSGGEWTLVDNSQVTDLSLDNGAVRFGGPGEFFTLSVENLTGNGTFIMEADFSTSQSDFLDVTGTASGNHQLLISASGNDPLTDNSLHVVHTAAGDSQFSLLGGSVDLGAYSYDLVQRGDNDWYLDATTRTVSPGTQTVMALANVVPTIWYGELGVLRSRMGDVRRNPGKAGGWVRSYGNQFNVSATSGAAYQQQQQGLSIGADAPLAAGDGNWLVGITAGYSNSDLNLARGSSASVDSYHAGAYATWLDPESGYYIDTVARINRFRNQADVRLSDGSKAKGDYSNLGAGVSLEVGRHLNLADDWFLEPFAQLSGLVVQGKDYSLDNGMRANSNSTHSLLGKVGTSVGRTFSAGTGRSVQPYLRVAAVHEFVNDNQVKVNDNRFSSNLAGSRAEIGAGVAVAWGEKWQAHADFDYSHGSKLEQPWGVSVGARYNW

SEQ ID NO: 67622 - protein, 493 aa, Pseudomonas putida
MTTVRTRIAPSPTGDPHVGTAYIALFNYCFAKQHGGEFILRIEDTDQLRSTRESEQQIFDALRWLGIEWNEGPDVGGPHGPYRQSERGEIYAKYAKELVDAGHAFYCFCTAEELEQMRAEQQARGETPRYDGRALLMSAEEVQRRLDAGEPHVIRMKVPSEGICVVPDMLRGDVEIPWDRMDMQVLMKNDGLPTYFLANVVDDHLMGITHVLRGEEWLPSAPKLIKLYEYFGWEQPKLCYMPLLRNPDKSKLSKRKNPTSVTFYERMGFMPEAMLNYLGRMGWSMPDEREKFSLAEMVEHFDLSRISLGGPIFDIEKLSWLNGQWLRELPVEEFAARLQKWAFNSDYMMKIAPHVQGRVETFSQVAPLGGFFFEGALKLDAKLFESKKLSADQVRQVIQLILWKLESLRQWEKERITGCIQAVVEALELKLRDAMPLMFAAITGQASSVSVLDAMEILGPDLTRYRLRQALDLLGGVSKKENKEWEKLLASIA

SEQ ID NO: 67623 - protein, 570 aa, Pseudomonas putida
MGLCGCTRGRPMTQETGGFAALDLNPNIVAAVVATGYEEPSAIQQQSIPIILAGHDMIGQAQTGTGKTAAFALPILNKIDVSKREPQALILAPTRELALQVATAFETYAKQMPGVNVVAVYGGAPMGPQLRAIRNGAQIVVATPGRLCDHLRRDEKVLSTVQYLVLDEADEMLKLGFMDDLEVIFDAIPATRQTVLFSATLPSSIRSIAERHLREPKHVKIQTKTQTVTAIEQAHLMVHADQKIPAVLRLLEVEEFDALIAFVRTKQATLDLAAALEAKGYKAAALNGDIAQNQRERVIDSLKDGRLDIVVATDVAARGLDVPRITHVFNVDMPYDPESYVHRIGRTGRAGRDGRALLLVTPRERRMLQVIERVTGQKVAEARLPNAQAVLDARIKKLTSSLAPLVAEAEATHGELFDRLTTDLGCSARALASALLRKATNGQALDLAAVEREQPLVPSFAPRGERTERGERGERPDRGDRERRAPLPLAEGRVRCRTALGARDGIAAKNLLGAILNEGGLARDAIGRIQVRDSFSLVELPEDGLEKLLSKLKDTRVAGKQLKLRRYRED

SEQ ID NO: 67624 - protein, 297 aa, Pseudomonas putida
MEYELQDIRSFVKIAELGSFHEAAEALHLSQPALSRRIKKLEEGLGTSLLERTTRRVSLTSVGRDFLPKARRLLDDFEDSILSIRELAERQTGQVTLACIPTAAFYFLPSVIRDYNEQYPKIRIRLLDLSANDGLEAVLRGEADFGINMMSGQHPDIEFVSLVQEHFVLACRRDHPLANRASVTWTELADYRLIGVGRLSGNRMLLDHALSGLNLRPKWFYEVQHLSTSLGMVEAGLGVSAMPSLAMPNADHPTLVSVPLIEPQVTRTLGLVYRRGASLSPAAEKFVSILLQKWPNR

SEQ ID NO: 67625 - protein, 51 aa, Pseudomonas putida
MRELIRLVSSAGTGHFYTTDKNKRTTPDKIEIKKYDPVVRKHVVYKEAKIK

SEQ ID NO: 67626 - protein, 78 aa, Pseudomonas putida
MSRVCQVTGKGPVTGNNISHANNKTRRRFLPNLQHHRFWVESEKRFVRLRVSAKGMRIIDKRGIDAVLVDIRKAGAKV

SEQ ID NO: 67627 - protein, 256 aa, Pseudomonas putida
MKKLLAVAAAVAAFSAQADTLTVAATPVPHAEILNFVKPQLAKEGVELKVKEFTDYIQPNVQVAEKRLDANFFQHQPYLDEFNKAKGTSLVSVAGVHIEPLGVYSTKIKKLDELSSGATVVIPNDATNGGRALLLLDKAGVIKLKDNKNILSTVKDVAENPKNVKFRELEAATIPRVLTQVDAALINTNYALEAKLNPEKDALAIEGSDSPYVNILVARPDNKDSDDMKKLAAALHSPEVKQFIIEKYKGAVVPAF

SEQ ID NO: 67628 - protein, 223 aa, Pseudomonas putida
MDALNFFANVDWAEIWLATVDTMIMLFGSLFFTVLLGLPLGVLLFLCGPKQMFEQKGVYALLSLVVNILRSLPFIILLIVMIPFTVLITGTSLGVAGAIPPLVVGATPFFARLVETALREVDRGIIEATQSMGATTRQIITSALLPEARPGIFAAITVTAITLVSYTAMAGVVGAGGLGDLAIRFGYQRFQTDVMVVTVVLLLVLVQVLQSVGDKLVVHFSRK

SEQ ID NO: 67629 - protein, 606 aa, Pseudomonas putida
MIENLRNIAIIAHVDHGKTTLVDKLLRQSGTLERNELNDERVMDSNDQEKERGITILAKNTAINWNGYHINIVDTPGHADFGGEVERVMSMVDSVLLLVDAQDGPMPQTRFVTKKAFEAGLKPIVVINKVDRPGARPDWVLDQIFDLFDNLGATDEQLDFKVVYASALNGIAGLDHTAMAEDMTPLYQSIVDNVPAPSVDRDGPFQMQISALDYNSFLGVIGVGRIARGRVKPNTPVVAIDTNGKKRNGRILKLMGHHGLHRVDVEEAQAGDIVCISGFDELFISDTLCAPDAVEAMKPLTVDEPTVSMTFQVNDSPFCGKEGKFVTSRNIKDRLDKELLYNVALRVQETDSPDKFKVSGRGELHLSVLIETMRREGFEMAVGRPEVIIREVDGVKQEPFENVTIDIPEESQGKVMEEMGLRKGDLTNMVPDGKGRVRLEYNIPARGLIGFRNQFLTLTNGAGILTSIFDRYDTMKSGQMSGRLNGVLVSVETGKALTYSLETLQARGKLFVEHGQEIYNGQIIGLNSRDNDLGVNPTKGKKLDNMRASGKDEVIALVPPVRHTLEQALEFIQDDELCEVTPKSIRLRKKILDEGERTRAAKKAKN

SEQ ID NO: 67630 - protein, 915 aa, Pseudomonas putida
MSQAPLVLVDGSSYLYRAFHALPPLTTSKGMPTGAVKGVLNMLKSLRKQYPDSLFAVVFDAKGGTFRDAMFAEYKANRPSMPDDLRVQIEPLHASVKALGYPLLCVEGVEADDVIGTLARSSAALGRPVIISTGDKDMAQLVDGHITLVNTMTGSVLDVAGVHEKFGVGPEHIIDFLALMGDKVDNIPGVPGVGEKTAVGLLTGIGGGLSDLYANLDKVPALAIRGAKTLPAKLEEHRDAAFLSYELATIKVDVPLDVEVEALVCGEPDREALLALYTEMEFKSWVAELQRDAAKAGDDVAPAVEPAVKVEAKYETILDQARFDAWLEKLRQAPLFAFDTETTGLDAQQAQLVGLSFAVEPHEAAYVPLAHDYEGAPVQLDREAVLLALKPLLEDPAKAKVGQNAKYDINILANGSPAIEMRGVAYDTMLESYVLNSTATRHDMDSLAQKYLDHTTIAFEDIAGKGAKQLTFNQINLDKAGPYAAEDADITLRLHHALQARLAQTPSVQPVLMDIEMPLVPVLARIERQGALVDAELLKVQSGELGVKMAELELRAYELAGETFNLGSPKQLGTILYDKLGMPVLSKTAKGQPSTAEAVLDELALQGYPLPEVLMQYRSLSKLKSTYTDKLPGQINPRTGRIHTSYQQAVAATGRLSSSDPNLQNIPIRTAEGRRIRQAFIASPGYKLLAADYSQIELRIMAHLAKDEGLLHAFRNDLDVHRATAAEVFGVALEDVTTDQRRSAKAINFGLIYGMSAFGLAKQIGVDRKQSQDYIDRYFARYPGVLAYMERTRAQAAEQGFVETLFGRRLYLPDINAKNPALRKGAERTAINAPMQGTAADIIKRAMVKVDNWLSESGLDARVILQVHDELVLEVREDLVQQVKDEIRQHMSQAAQLDVPLLVEAGVGANWDEAH

SEQ ID NO: 67631 - protein, 469 aa, Pseudomonas putida
MILTRSSLVKRLTLMIMFAVIAVLVVAGISFNMLSQHHFRMLDEQALSEKLESTRHILSIQAPGTGMEELRPQLRALLGAHQDLTAEILTSEGEVLFSDLKAVQIPDKYKRADKEEMWEWQDESHNFRGITTDVEIQGQPAPGTVMLMLDITSHAHFFETLQRWFAIGLVISALVSAGIGWLVAKSGLRPVEQITKVATSISARSLQERIPLEPVPLELQTLILSFNGMLARLEDAFVRLSNFSADIAHELRTPVSNLLTHTEVVLTRKRDVDAYEENLYSNLEDLKRMSRMIDDMLFLAKSDNGLIIPEQVDIQLHDLVSKLFEYYQLLADDRGIRLTLQGKGVISGDRLMIDRAVSNILSNAVRYTPDGSGISVEIQQAADKVTLTIKNGGATIDPQHINKIFDRFYRADPARREGGPSNAGLGLAITRSIVKAHDGKVWCTSSEGVTAFNFIFPAAHRTAHIRTRH

SEQ ID NO: 67632 - protein, 205 aa, Pseudomonas putida
MNKLVVSLLLTLGVAGAATAAQPIKGDAAAGQAKTAVCGACHNPDGNSLAPNFPKLAGQGQRYLEKQLHDIKSGKRTVLEMTGMLAAFSDQDLADIAAYFSSQKGSVGAADPKLVERGRALFNGGDLEKGMPACTGCHSPNGAGIALAGFPHLGGQHSQYVAKQLTDFREGNRTNDGDAMTMRTIAGKLSNHDIEALASYIQGLH

SEQ ID NO: 67633 - protein, 532 aa, Pseudomonas putida
MSAFIALLRQIFYRPWMLATLAALASAAVLLSASIGIALQQMKQSESEQMNAQGERFLERLEQVFGQLREGVDLLQAQPLRGCSPAMLAALQQVGLNSRFIYEAAYVDGNVACSNRGDERAFVPLRAPDIQGPTYSYWLNTTTEPNENLAALMLGRGKFLVSTSRGHLTDVVDLPPGGSLVVVLDNGARAIPVLGPPQVWPPPSAWSTSHKSLLELSDRLIYRMPTKSPDYQLVLIAPRASLPLKMNGMLWLLFPGSVLAACCIGWLVLQLILQRRSMSSELQNALRRGELQVLYQPIIELDSRRCVGAEALVRWRRPDGTLTSPDLFIPLAENTGQIRQITDFVLQRVLEQLGQLLRSHPKLYISINLAACDVMVPRIGRVAARLLALHRVAPSQIAFEVTERGLIDVVVARDNLQALRAVGHQVLIDDFGTGYCSLAYLQTLPVDCLKIDKAFIDALGHDAASSGVAPHIIRMAHDLHLRVIAEGIEFEDQAVLLNSEGVNYGQGWLFARPLNARQFAELVTRGHLPRRV

SEQ ID NO: 67634 - protein, 593 aa, Pseudomonas putida
MKWPPMKLRTRLFLSISTLVTVALLGLLLGLVSMLQMATVQQRLVRDTTHALEVGLKLRQNLGEQLMLILDEDTAPESLRLLQDNFQDLLNQGLEQGGERTGFSKASSNYQAFLQTYRDSATPARSMGVDQPLGAAFNQVRTDLIDSHKQALDLITRSEERTRDRALLVSGVLGLMGLVVLVLGFITAHNIARRFGQPIEALAKAADQLGKGNFDVTLPVTQAAELNQLTRRFGLMADALRKHQATNVDELLAGQQRLQAVLDSIDDGLLIIDRQGRLEHLNPVAQRQLGWNDSRLGSSLVEALQRPELEQQLRQVLRGGSLDRPPDDLNMEVDEESRLLTYSLTPVSHPQGPILGAVMVLHDVTEQRAFERVRSEFVLRASHELRTPVTGMHMAFGLLRERVKFPPEARENDLLETIGEEMQRLTQLINDLLNFSRYQSGLQKLELAPCAIDDLLDHAQSRFAEQAAHKQIELIKELDPPLPRIQADVAQLDRVLDNLLHNAIRHTANGGRIRLHARRHAERVIISVEDNGEGISYGQQARIFEPFVQVGRKKGGAGLGLALCKEIVQLHGGRMGVFSRPGQGTQFYMALPV

SEQ ID NO: 67635 - protein, 409 aa, Pseudomonas putida
MLNGLWLGFFLVAAVSAMAQWLVGGNAGIFAAMVESIFAMAKLSVEVMVLLFGTLTLWLGFLKIAEKAGIVEWLAKVLGPLFARLMPEVPPGHPALGLITMNFAANGLGLDNAATPIGLKAMRALQELNPGSTTASNAQILFLVLNASSLTLLPVTVFMYRAQQGAPDPTMVFLPILLATSVSTLVGLLSVAVMQRLRLWDPVVLAYFIPGALLLGGFMAFLGTLSAAALASLSSLLGNLTLFGVIMLFLVVGALKRVKVYEAFVEGATEGFDVAKSLLPYLVAMLVAVGVLRASGALELALDGIRHAVSWMGLDTRFVEGLPTALVKPFSGSAARAMLIETMQTQGVDSFPALVAATIQGSTETTFYVLAVYFGAVGIQRVRHAVGCALLAEFSGVVAAIFVCYWFFA

SEQ ID NO: 67636 - protein, 153 aa, Pseudomonas putida
MFHVILFQPEIPPNTGNIIRLCANSGCALHLIEPISFELDDKRLRRAGLDYHEYATLKRHESLAGCLESLGNPRLFAFTTKGSHPFHEVAFQPGDAFLFGPESRGLPAEVLDSLPAEHRLRLPMRPGCRSLNLSNTVAVTVYEAWRQNGFAGS

SEQ ID NO: 67637 - protein, 84 aa, Pseudomonas putida
MKPVIVYSSDYCPYCMRAKYLLESKGVAFEEIKVDGKPQVRAEMSQKAGRTSVPQIWIGSTHVGGCDDLYALERAGKLDALLAA

SEQ ID NO: 67638 - protein, 255 aa, Pseudomonas putida
MRYLLCLLFCLMAGIAQAAPANKAYMSIIIDDLGQSPERDSRTLALPGPVTMAIMPDTPHATDFARQAHKAGKTVILHMPMDPATGPYAWHPGIAIEELARRLDAALVKVPYAAGINNHMGSRMTAQREPMAWLMGELQRRHLFFVDSRTSAATVAAAEAQAHDVAHVSRDVFLDDVRTPEAIDAQLQQGIALARKQGSAVLIGHPYPQTLAVLESQIPRLKQLGIELVTLQQMIATRGNQAMPAHGKHGRYSNR

SEQ ID NO: 67639 - protein, 565 aa, Pseudomonas putida
MSQEFDYIIVGAGSAGNTLATRLTEDAGVTVLLLEAGGPDYRFDFRTQMPAALAFPLQGRRYNWAYETDPEPYMDGRRMECGRGKGLGGSSLINGMCYIRGNAMDFDGWAELPGLEDWTYLDCLPYFRKAETRDIGPNDYHGGEGPVSVTTPKAGNNPLFHAMVEAGVQAGYPRTEDLNGYQQEGFGPMDRTVTKNGRRSSTARGYLDQAKKRPNLTIVTHALTDRVLFDGKRAIGVTYLVGDSEERVEARARKEVIVSSGAIASPQLLQRSGVGPRALLESLDIPVVHDLPGVGENLQDHLELYLQYACTQPVSLYPSLLWWNQPAIGAEWMFNGTGIGASNQFEAGGFIRTRPEFKWPNIQYHFLPVAINYNGSNGVKEHGFQAHMGSMRSPARGRIQVKSKDPRQHPSILFNYMSTEQDWQEFRDGIRLTREIMAQPALDPYRGREISPGADVQTDEQLDKFIREHAETAFHPSCSCKMGTDDMAVVDGEGRVHGMKGLRVVDASIMPLIITGNLNATTIMIAEKISDKIRGRKPLPRSTAKYYVAGDAPVKGKPMREVKQG

SEQ ID NO: 67640 - protein, 1102 aa, Pseudomonas putida
MSLRVYLRTALLGLCLSLSFAAGAAEAPTTASIQNSLDKIAERKLPEADQKALQQVLEQTLSLLAAKEDNEKKLAALKQQLSSAPKETSDSQKELAKLKETKAQPVAQRYATLTVPQLEQMLSERNTQQGELQKALSEANSLIINSQTRPERAQAEISSSQTRTQQINNILKTGKDGGKAINADQRNQLNAELASLNALTLLRRQELAGNSLLQDLGNARHDLMVERAARLEQEIQDLQTLINAKRLAQSQEAVTQQSIEAQKAGGSSLLATESAINLKLSDYLLKSTDRLNELTQQNLRTKQQLDSLTQADQALDEQINVLKGSLLLSKILYKQKQTLPHLKVDRDLADQIADTRLYQFEVNQQREQMSSPVTYVDKLLAAQPQEDVTPQLRKALLEVAITRSDLLERLNRELSALLNESITLQLNQKQLLGTAQSLRTTLDEQMFWIPSNKPLDWDWLQYVPKRLADQVANLPWGSSLKELADGLSQRPLLFLPLLLVIGALLWRRKYLYQRLGKVHQDIGHFRRDSQWHTPQAILINILLAMPVSLGLALCSYALQIDARGQNANLGAALWQLAQAWLVFYTAYRILAPGGVAEVHFRWHKPQVEFLRGWVRRLGTVVLALVGVVAVAEHQPSALADDVLGIGVVLTCYALMAWLLSRLLLSSPAHRDTSLFRRAVGVAFTALPIALFVAVCFGYYYTALKLTDRLIYTLYLLLFWLVIEAAFVRGLSVAARRLAYQRALTKRAAAKEGLDGEVITEEPTLDIEQVNQQSLRLIRLALLGGFIAGLYWVWADLISVFAYLNNFVLYEYTSGTGAAASMVPISLGDLLGALVIVGITFALAGNLPGLLEVLVLSRLNLAQGSAYATTTLLSYTIVGIGIVSTLSTLGVSWDKLQWLVAALSVGLGFGMQEIFANFISGIMILFERPVRIGDTITIGNLSGTVSKIRIRATTITDFDRKDIIVPNKTFITGQLINWSLTDTVTRVTLKLGIDYGSDLDLVRDLLLKGAHENPRVLKDPEPIVYFLNFGESSLDHELRMHVRDLGDRNPTLDEINRYINREFKAHNIKISVRQVEVFLMDAKGSKQQLIPMEQPKSDGTASA

SEQ ID NO: 67641 - protein, 425 aa, Pseudomonas putida
MLFSLRQRYPPVKTAVAPLLLEPKPAILTEMWIEKGTPAFMKTVLALFSGGFATFALLYCVQPMMPLLSREFAINAAQSSLVLSVSTAMLAFGLLITGPISDRIGRKPVMVFALVCAALSTLASAVMPSWELVLATRALVGLSLSGLAAVAMTYLSEEIHPQHIGLAMGLYIGGNAIGGMSGRLITGVLIDFVSWHTAMLTIGGLALVAALVFWKVLPESRNFRAQTMNPRSLLDGFVMHFKDAGLPWLFLEAFLLMGAFVTLFNYIGYRLLAEPYHMNQALVGLLSVVYLSGIYSSAQVGALADKLGRRKVFWASIVVMAVGLLMTLASPLVMVIVGMLVFTFGFFGAHSVASSWIGRRALKAKGQASSLYLFCYYAGSSVAGTAGGVFWHQWGWNGIGLFIGSLLAVALMVALHLSKLPPKTV

SEQ ID NO: 67642 - protein, 1468 aa, Pseudomonas putida
LYHPEEFKDNCGFGLIAHMTGEPSHHLLQTAMQALTCMTHRGGINADGKTGDGCGLLMQKPDQFLRAMAQEHFAVELPKQYAVGMVFFNQDPVKAEAARANMDREILAAGLKLVGWRKVPIDTSVLGRLALERLPQIEQVFIGGEGLSDQEFAIKLFSARRRSSVANAHDADHYICSFSHKTIIYKGLMMPRDLAAFYPDLGDERLQTAICVFHQRFSTNTLPKWPWRSRSASSPTTARSTPSPATATGPGSRTKFANDQIPDLEELGPLVNRVGSDSSSMDNMLELMVTGGIDLFRGVRMLVPPAWQNVETMDADLRAFYEYNSMHMEPWDGPAGIVMTEGRHAVCLLDRNGLRPARWVTTTNGYITIASEIGVWGYQPEEVLAKGRVGPGQILAVDTETGQILDTDAIDNRLKSRHPYKRWLRQHATRIQATLTDDQGVASYDADQLKQYMKMFQVTFEERDQVLRPLGEQGQEAVGSMGDDTPMAVLSQRVRSPYDFFRQQFAQVTNPPIDPLREAIVMSLEICLGAERNIFQESPEHASRVILSSPVISPAKWRSLMNLEREGFDRQLIDLNYEQSVGLEAAIRNIADQAEEAVRGGKTQLVLSDRYIAPGKLPVHASLAVGAVHHRLTEQGLRCDSNILVETATARDPHHFAVLLGFGASAVYPYLAYEVLADLIRTGEVLGDLDEVFKYYRKGISKGLLKILSKMGISTIASYRGAQLFEAIGLAEEVVGLSFKGVSSRIKGARFEDLENDQKLLAAEAWSARKPIQQGGLLKFVHGGEYHAYNPDVVNTLQAAVQQGDYAKFKEYTTLVDQRPVSMIRDLLKVKVADQPLALEQVEPLEAILKRFDSAGISLGALSPEAHEALAEAMNRLGARSNSGEGGEDPSRYGTIKSSKIKQVATGRFGVTPEYLVNAEVLQIKVAQGAKPGEGGQLPGGKVNGLIAKLRYAVPGVTLISPPPHHDIYSIEDLAQLIYDLKQVNPQALVSVKLVAEAGVGTIAAGVAKAYADLITISGYDGGTGASPLTSIKYAGAPWELGLAETHQTLRGNDLRGKVRVQTDGGLKTGLDVIKAAILGAESFGFGTAPMIALGCKYLRICHLNNCATGVATQNDKLRKDHYIGTVDMVINFFTFVAEETREWLAKLGVRSLGELIGRTDLLEVLPGDTERQQYLDLSPLLGSSHIPADKPQFCEVDKNPPFDLGELAEKMVDMAMPAIRDQAGGEFSLDICNCDRSIGARVSGEIARLHGNQGMAAAPITFRFKGTAGQSFGVWNAGGLNLHLEGDANDYVGKGMTGGKVTIVPPAGSPFETQHSAIVGNTCLYGATGGKLFAAGTAGERFAVRNSGAHAVVEGTGDHCCEYMTGGFVCVLGKTGYNFGSGMTGGFAYVLDMDNSFVDKLNHELVEIQRISGEAMEAYRSHLARVLAEYVDETGSEWGRELSENLDDYVRRFWLVKPKAANLKQLL

SEQ ID NO: 67643 - protein, 773 aa, Pseudomonas putida
MQIPLRVYSSDGKLIAEFGEMRRSPIRFAEIPPQFIQALLSAEDDNFLNHYGVDPSSLMRAATQLVKTGHIQTGGSTITMQVAKNFFLTSERSFSRKTNEILLALQIERELTKDEILELYVNKIYLGNRAYGIDAAAQVYYGKSIRDVSLAQMAMIAGLPKAPSRFNPLANPVRAKERRDWILGRMYKLGKIDQASYEAALAEPLNASYHVPTPEVNAPYIAEMARAEMVGRYGSDAYTEGFRVTTTVPSDMQEMANKAVLKGLSDYDERHGYRGPEARFPGRTQAAWLQELGKQRTLGGLEPAIVTQVEHTGLKVLTRDGQEAQVAWDTMKWARPFINNNAQGRSPQSPADVAQVGDLVRLQRLDDGTLKFSQVPVAQSALVTLDPNNGAIRALVGGFSFEQSNYNRAVQAKRQPGSSFKPFIYSAALDSGYTASSLVNDAPIVFVDESVDKVWRPKNDTNTFLGPIRMREALYKSRNLVSIRLLQAMGVDRTIDYIAKFGFNKQDLPRNLSLALGTATLTPMEIATGWSTFANGGYKITPYLIERIESRSGETLFTANPARVPQGAQDQAGLAAPEQPISTAAMPGEAPSAFSQVAAASQAPAVAEQIIDGRTTYILTSMLQDVIKRGTGRRALALGRTDLAGKTGTTNESKDAWFSGYNADYVTTVWVGFDQPETLGRREYGGTAALPIWMNFMGAALKDKPAHAPAEPEGILSLRVDPVSGRAASPSTPNAYFELFKAEDSPPSVDELGNGAAPGSPLPADEATPMDLF

SEQ ID NO: 67644 - protein, 71 aa, Pseudomonas putida
MKEGIHPNYEVVAVTCSCGNKFETRSTLGNVLSIDVCNLCHPFYTGKQKVLDTGGRVQKFADRFGMFGAKK

SEQ ID NO: 67645 - protein, 221 aa, Pseudomonas putida
MSYQHQYVDGTRIHFPLGKVVCIGRNYAEHAKELDNPIPTEPLLFIKPGSCVVPAEGGFKIPAERGSVHYEVEIAVLLGKPLSTHPSEEEVLDAISGYAPALDLTLRDVQAKLKEKGLPWELAKCFDGACVLPPFVSAASFEDVTDIPVRLTVNGEVRQDGNSAMMLNPIVPMIQYMAAHFSLQAGDVILTGTPAGVGPFNVGDELVLELPGVSRFESRVL

SEQ ID NO: 67646 - protein, 228 aa, Pseudomonas putida
MSTLADNLSAISARIASAAQAVGRDPASVQLLAVSKTKPASAIREIHAAGVHDFGENYLQEALTKQQALSDLPLIWHFIGPIQSNKTKAIAEHFDWVHSVDRLKIAQRLSEQRPAGLAPLNICLQVNVSGEDSKSGCTPADLPALAKAVAALPNLRLRGLMAIPEPTEDRATQEAAFASLRKLQEGLGLGLDTLSMGMSHDLEAAIAQGATWVRIGTALFGARDYGNT

SEQ ID NO: 67647 - protein, 198 aa, Pseudomonas putida
MMNFQQLVLASHNAGKLKELQAMLGHSVQLHSIGEFSQVEPEETGLSFVENAILKARNAARISGLPALADDSGLAVDFLGGAPGIYSARYADGKGDAANNAKLLEALKDVPEAERSAQFVCVLALVRHADDPLPILCEGLWHGRILFEASGDQGFGYDPLFWVPERNCSSADLAPADKNQLSHRARAMALLRKRLGLA

SEQ ID NO: 67648 - protein, 235 aa, Pseudomonas putida
MGRSKGRGGMNIREWPAEERPREKLLQRGAGSLTDTELLAVFLGSGVRGCNVVELSRGLLVKFGSLRRLLEADREAFVGELGLGPVRYSQLQALLEIGRRHLATSIERESAMDSPAAVRRYLKAMLRHEASEVFGCLFLDTKHRPLAFEILFRGTIDRASVYPREVVRRALVHNAAALILCHNHPSGISEPSQDDVHLTLSLKRGLALIDVRVLDHIIIGDGEPLSMVEHGWIVV

SEQ ID NO: 67649 - protein, 236 aa, Pseudomonas putida
MLSTLIRRLSRALLWFVAGSIVLVLVFRWVPPPGTALMVERKVQSWVNGEPIDLQRDWEPWENISDELKVAVIAGEDQKFASHWGFDLPAIQAALAHNERGGNIRGASTLTQQVAKNLFLWSGRSWFRKGLEAWFTALIELFWSKERILEVYLNSAEWGKGVFGAQAAARYHFGVDASRLSRQQAAQLAAVLPSPIKWSASRPSAYVASRAGWIRRQMSQLGGPSYLMQLDSSRKL

SEQ ID NO: 67650 - protein, 494 aa, Pseudomonas putida
MFGSNDDKKAPAEAGEKKGLFSWFRKKPQPPAGAGVPAHEPPAVEQSAAAPVEGSAAEAPQAPEPVQAVAAPQLAEPQPVAAPPRPPVVEAPVPEPVASQPLQAPEPEPVASQPLVAPAPQPVASMPLQAAPVESAPVEAAAPVSNLVLPVAEEPVALVPDLEPKAPPAIPERAAPAPVAAPVEQAKPGFFARLKQGLSKTSASIGEGMASLFLGKKVIDDDLLDEIETRLLTADVGVEATSAIVQNLTQKVARKQLADADALYKSLQEELAALLRPVEQPLNVQAQNKPYVILVVGVNGAGKTTTIGKLAKKLQLEGKKVMLAAGDTFRAAAVEQLQVWGERNQIPVIAQHTGADSASVIFDAVQAAKARGVDVLIADTAGRLHTKDNLMEELKKVRRVIGKLDVEAPHEVLLVLDAGTGQNAISQAKYFNQSVELTGLALTKLDGTAKGGVIFALAKQFNIPIRFIGVGEGIDDLRTFEAEPFVKALFAERD

SEQ ID NO: 67651 - protein, 451 aa, Pseudomonas putida
MNALARRAAGLLLGTLCLPLAAFAADVQPTHEFILDNGLKVVVREDHRAPVVVSQIWYKVGSSYETPGQTGLSHALEHMMFKGSAKVGPGEASRILRDLGADENAFTSDDYTAYYQVLARDRLPVALELEADRLASLRLPADEFSREIEVIKEERRLRTDDQPNAKAFELFRAMAYPASGYHTPTIGWMADLERMKVEELRHWYESWYAPNNATLVVVGDVTADEVKGLAQKYFGNIPKRAVPPAKLPLELAEPGWRQLTLHVRTQLPSLIYGFNVPGLPTAKDPRTVHALRLISALLDGGYSARMPARLERGQELVAGASSSYNAFTRGDSLFLISATPNVQKQKTLADVEKGIWQLLEELKSTPPSAEELERVRAQVIAGLVYDRDSISSQATTIGQLETVGLSWKLIDSELDELKRVTPQDIQNAARTYFTRERLSVAHVLPEESAHE

SEQ ID NO: 67652 - protein, 287 aa, Pseudomonas putida
MVHSMTAFARVERAGSQGTLVWELRSVNHRYLEPHLRLPEALRDLEGGVREGLRQGLSRGKVECTLRLNEDSNGKPLKVDHERAAQLVAAAEEVAGLIKQPAPLNPLEVLSWPGVLVADTSDPQALNAEAMALFDEALAELKAGRQREGQELARLINERLDNMASEVTTLRALVPQMLAAQRQKILDRFGDMQAELDPQRLEQEMVLLAQKSDVAEELDRLSTHVTEVRRVLKGGGAAGRRLDFLMQELNREANTLGSKAFDPRSTQAAVNLKVLIEQMREQVQNIE

SEQ ID NO: 67653 - protein, 702 aa, Pseudomonas putida
MPGIEALAERLSTYLGPEQVNLVRRAYFYAEQAHDGQRRRSGEPYVTHPLAVASILADMHMDHQSLMAAMLHDVIEDTGIAKEALSQQFGETVAELVDGVSKLTQMNFETKAEAQAENFQKMAMAMARDIRVILVKLADRLHNMRTLEVLSGEKRRRIAKETLEIYAPIANRLGMHTVRVEFEDLGFKAMHPMRSSLIHRAVKSARGNRKEIVAKIEHSLANCLAADGIEGEVSGRQKHLYGIYKKMRGKRRAFNEIMDVYAFRIIVDKVDTCYRVLGAVHNLYKPLPGRFKDYIAIPKANGYQSLHTTLFGMHGVPIEIQIRTREMEEMANNGIAAHWLYKSNDDEQPKGSHARARQWVKGILELQQRAGNSLEFIESVKIDLFPDEVYVFTPKGRIMELPKGSTAVDFAYAVHTDVGNSCIACRINRRLAPLSEPLQSGSTVEIVSAPGARPNPAWLNFVVSGKARTNIRHALKQQRRSESISLGERLLNKVLTGFDSSLEKIPQERIQSILAEYRLELIEDLLEDIGLGNRMAYVVARRLLSAEGEQLPAPEGPLAIRGTEGLVLSYAKCCTPIPGDPIVGHLSAGKGMVVHLENCRNISEIRHNPEKCVQLSWAKDITGEFNVELRVELEHQRGLIALLASSVNAADGNIEKISMDERDGRISVVQLVVSVHDRVHLARVIKKLRTLTGVVRITRMRT

SEQ ID NO: 67654 - protein, 611 aa, Pseudomonas putida
MCGIVGAVAERNITAILIEGLKRLEYRGYDSAGLAVLTQNGELQRRRRIGKVSELEVAVADDPLAGQLGIAHTRWATHGAPTEGNAHPHFSGNDVAVVHNGIIENHEELREELKGLGYVFTSQTDTEVIVHLIHHTLKSIPDLTDALKAAVKRLHGAYGLALISAKQPDRLVAARSGSPLVIGLGLGENFLASDQLALRQVTDRFMYLEEGDIAEIRRDQVSIWDQQGNKVQRETVQYHEGAEAADKGAYRHFMLKEIHEQPSVVQRTLEGRLGKDNVLVQAFGPQAADLFAKVRNVQIVACGTSYHAGMVARYWLESLAGIPCQVEVASEFRYRKVVVQPDTLFVSISQSGETADTLAALRNAKELGFLGSLAICNVGISSLVRESDLTLLTLAGPEIGVASTKAFTTQLVSLMLLTLALGQVRGTLEAGVEAELVEELRRLPTRLGEALAMDATVEKIAELFADKHHTLFLGRGAQYPVAMEGALKLKEISYIHAEAYPAGELKHGPLALVDNDMPVVTVAPNNELLEKLKSNLQEVRARGGELVVFADEHAGMTNGEGTHVIKVPHIADALAPILYTIPLQLLSYYVAVLKGTDVDQPRNLAKSVTVE

SEQ ID NO: 67655 - protein, 455 aa, Pseudomonas putida
MHKETELKLRASRETLAALREHPLLKKRNKSGWQTRELLNQYFDTPERELSAARVALRLRRDGDAVIQTLKCRGQSVAGLSERNEYEWNLDKVKLDLKKLDATCWPEQLANLDKKTIKPLFTTDFSREYAEIAWGRGKSKVVIEAALDQGFVIAGKRKEEICELELELREGEPQALLELAAELAASLPLMPCDISKAERGYRLLEPDSYELDLPHTALDAEMALDDAYAALAWQLLGSSQRLAEQYRHNGHWRLLQDWVECLSELRALTASLGQAAPRATTRDLRASLDALLEDWRPLVQAGNDDEDIRRAAPEQFAEELEDVRWGQFSLETSRWLMARTWTAERKGRGERQGKAQLASWLGHLLGEEGRALKLPLYTQRPEDLAEQLPRIEQLLAWLHHARQVLEAPQMDRLYGDLKKLHELAEQPISDEVLEARIEQARAVDQSRGWKHLLKA

SEQ ID NO: 67656 - protein, 243 aa, Pseudomonas putida
MMKTRSNMARYGGSLAIVLGVHVVAVLLTLNWSVPQAIELPPAAMMVELAPLPEPAPPPPPKAAPQPPAPVEEPPLPKLAEAPKPKIAIPKPPKPKAKPQPPKPEKKPEPPKEAPPTEQTVDAPPSNSPPQKSAAPAPSIASNSNALPTWQSDLLRHLAKYKRYPEDARRRGLQGMNRLRFVVDAEGKVVSYSMAGGSGSAALDRATLEMIRRAGTVPKPPPELLNNGTIEVVAPFVYSLDRR

SEQ ID NO: 67657 - protein, 263 aa, Pseudomonas putida
MAKVFAIANQKGGVGKTTTCINLAASLAATKRRVLLIDLDPQGNATMGSGVDKHELEHSVYDLLIGECDLAQAMHYSEHGGFQLLPANRDLTAAEVVLLEMQVKESRLRNALAPIRDNYDYILIDCPPSLSMLTLNALVASDGVIIPMQCEYYALEGLSDLVDNIKRIAARLNPELKIEGLLRTMYDPRLSLNNDVSAQLKEHFGPQLYDTVIPRNIRLAEAPSFGMPALAYDKQSRGALAYLALAGELVRRQRRPSRTAQTT

SEQ ID NO: 67658 - protein, 557 aa, Pseudomonas putida
MHTPDNPALDLKRVLQALLADQHLHASDTLQVLEHAAAHPASHPLEHIAACSLESRQHPGQPLDLEHLCQWLADKVGQPYLRIDPMQLDLPQVTSLISPAFAQRHGILIVAADASSVTVASAQPFQDDWQADLARSLGRSIRRVLASPQQIRQSAQSFHRLAQSVKGAQYQQSASLGELEQLLELGKRQAEASADDAHIVHIVDWLLQYAIEQRASDIHLEPRREQGQLRYRIDGLLHTVYAFPAGVTLALVSRLKHLGRMDVAEKRRPQDGRLQSRLPGGGEVELRLSTLPTPFGEKLVLRLFDPHQLQEGFDRLGLHGQQLAQWQRLLRQRQGIILVTGPTGSGKTSTLYTSLKLLATPQVNLCTIEDPIERLEPAFNQLQVQPALDLGFANAVRAMLRQDPDIIMIGEIRDRETALVAVQAALTGHLVLSTLHTNDACAAITRLQELGVADYLIKATLIGVMAQRLVRTVCTDCQTGSSATCRACRGTGFQGRTGLFELLEPSDTLRALIGPDADLTCLRRQALADGLVDLRRCGEAKVAAGQTRAEEVLRVCN

SEQ ID NO: 67659 - protein, 216 aa, Pseudomonas putida
MSSLVTPQHAEELSTGARQLGVELTAEQHEKLLGYLALLIKWNKAYNLTAVRDPDEMVSRHLLDSLSVMSFIHNDRDNWLDVGSGGGMPGIPLAILHPHKRVTVLDANGKKTRFLTQVKMELKLDNLTVIHSRVEAFQPAQPFDGIISRAFSSMENFTNWTRHLGDTGTQWLAMKGLHPADELVALPADFTVESEQALTVPGCQGQRHLLILRRKA

SEQ ID NO: 67660 - protein, 124 aa, Pseudomonas putida
MKFRFLLWAMGLLMARASRNNPAFQQQLKGKDLVFQMQTLDGKVARHFIVNNERISSKGGAHPQPAFAIAFKDAAYGFATMQAGNKQLAFMQGIQDKHIQIKGNPALVMWFQGLMKYLKPKKKG

SEQ ID NO: 67661 - protein, 83 aa, Pseudomonas putida
MSLIITDDCINCDVCEPECPNEAISQGEEIYVIDPNLCTQCVGHYDEPQCQQVCPVDCIPLDEAHPETEEQLMAKYRRITGKG

SEQ ID NO: 67662 - protein, 270 aa, Pseudomonas putida
MPELPEVETTRRGIAPHLEGQRVSRVVVRDRRLRWPIPEDLDVRLSGQRIVSVERRAKYLLINAEVGTLISHLGMSGNLRLVELGLPAAKHEHVDIELESGLMLRYTDPRRFGAMLWSLDPLNHELLLRLGPEPLTDLFDGERLFQLSRGRSMAVKPFIMDNAVVVGVGNIYATEALFAAGIDPRREAGGISRARYLKLAIEIKRVLAAAIEQGGTTLRDFIGGDGQPGYFQQELFVYGRGGQPCKVCGTELREVKLGQRASVYCPRCQR

SEQ ID NO: 67663 - protein, 398 aa, Pseudomonas putida
MSLPSLRLKANADRRLRAGHLWVYSNEVDVSATPLQGFQAGQQAILEAANGKPLGIVALSPNNLICARLLSRDIKLPLDKSLLVHRLNVALSLRERLFEQPCYRLVYGDSDLLPGLVVDRFFDILVVQLASATMEAHKDDVIAALVQVLKPSGILFKNDSAARDAEGLQRYVETVYGEVPDWVPLEENGVKFEAPVREGQKTGWFYDHRMNRARLAPYVKGKRVLDLFSYIGGWGVQAGAFGASEVFCVDASGFALDGVERNAALNGISEKLTCIEGDVFEALRELKAAEERFDVIIADPPAFIKRKKDLKNGEAAYRRLNEQAMRMLNKDGILVSASCSMHLPEDDLNNILLTSARHLDRNMQLLERGGQGPDHPVHPAIAETRYIKSITCRLLPNS

SEQ ID NO: 67664 - protein, 613 aa, Pseudomonas putida
MPDYRSKTSTQGRNMAGARALWRATGMKDEDFKKPIIAIANSFTQFVPGHVHLKDLGQLVAREIERAGGVAKEFNTIAVDDGIAMGHDGMLYSLPSREIIADAVEYMVNAHCADAIVCISNCDKITPGMLMAALRLNIPVIFVSGGPMEAGKTKLASHGLDLVDAMVIAADSTASDEKVAEYERSACPTCGSCSGMFTANSMNCLTEALGLALPGNGSTLATHSDREQLFLTAGRTIVELCKRYYGENDESVLPRSIANFKAFENAMMLDIAMGGSTNTILHLLAAAQEGEVAFDLRDIDRLSRKVPQLCKVAPNIQKYHMEDVHRAGGIFSILGSLARGGLLHTDLPTVHSRSMEEAIAKWDITQTDDEAVHTFFKAGPAGIPTQTAFSQSTRWETLDDDRENGCIRSFEHAYSQEGGLAVLYGNIALDGCVVKTAGVDESIHVFEGTAKIFESQDSAVRGILADEVKAGDIVIIRYEGPKGGPGMQEMLYPTSYLKSKGLGKACALLTDGRFSGGTSGLSIGHASPEAAAGGAIGLVRDGDKVLIDIPNRSINLLVSDEELAQRRVEQDKKGWKPAEVRPRKVTTALKAYALLATSADKGAVRNKAMLEGL

SEQ ID NO: 67665 - protein, 432 aa, Pseudomonas putida
MSGPLAAKAGLLITGRTLTPRHAHYGPFRDDEGLVLDEGIALFFPGPNSFTGEDVLELQGHGGPVVLDMLLQRCVQVGCRLARPGEFSERAFLNDKLDLAQAEAIADLIEASSSQAARNALRSLQGEFSRRVHSLTEALIALRIYVEAAIDFPEEEIDFLADGHVLSMLDAVRSELSTVQREAGQGALLRDGMTVVIAGRPNAGKSSLLNQLAGREAAIVTDIAGTTRDILREHIHIDGMPLHVVDTAGLRDTDDHVEKIGVERALKAIGEADRVLLVVDSTAPEASDPFALWPEFLAQRPDPAKVTLIRNKADLSGERVALEQCDDGHVTITLSAKGDDTGLQLLRDHLKGCMGYEQTAESGFSARRRHLDALRQASEHLEHGRAQLTLAGAGELLAEDLRQAQHALGEITGAFSSDDLLGRIFSSFCIGK

SEQ ID NO: 67666 - protein, 165 aa, Pseudomonas putida
MPVWLPRTAVLFCRVVVPKAVSVWPFDFSAQVVSQDFSREKRLLTPRHFKAVFDSPTGKVPGKNLLILARENGLDHPRLGLVIGKKSVKLAVQRNRLKRLMRDSFRLNQQLLAGLDIVIVARKGLGEIENPELHQHFGKLWKRLARSRPTPAVTANSAGVDSQDA

SEQ ID NO: 67667 - protein, 360 aa, Pseudomonas putida
MGQRTLLYDLHLALGAKTVDFGGWDMPLHYGSQVEEHHQVRSDCGVFDVSHMTVIDVDGTDATVWLQRLLANDVARLDDPGKALYSPLLNEQGGVIDDLIVYRTETGYRLVTNAATRAKVLDWLQLQRAGFSVDFQVRPDLAILAIQGPRAREKVAALLSPARAALIRELRPFEGVADGDWFIARTGYTGEDGLEIIFPGDQAVAFFNDLVGAGIAPSGLGARDTLRLEAGMNLYGQDIDENHTPLTSNLGWSIAWEPAERNFIGRVGLLAEIEHGVQEKLVGLVLEERGVLRAHQVVRVAGIGEGEITSGSFSPTLSKSIALARVPMATGDRAEVEIRGKWYPVRVVKPTFVRHGKILI

SEQ ID NO: 67668 - protein, 44 aa, Pseudomonas putida
MKRTFQPSTIKRARTHGFRARMATKNGRAVLSRRRAKGRKRLAI

SEQ ID NO: 67669 - protein, 506 aa, Pseudomonas putida
MSVELWQQCVELLRDELPAQQFNTWIRPLQVEAEGDELRVYAPNRFVLDWVNEKYLGRLLELLGENGSGIAPALSLLIGSRRSSAPRAAPNAPVSAAVAASLAQTQAHKTAPAAAVEPVAVAAAEPVLVETSSRDSFDAMAEPAAAPPSGGGRAEQRTVQVEGALKHTSYLNRTFTFDTFVEGKSNQLARAAAWQVADNPKHGYNPLFLYGGVGLGKTHLMHAVGNHLLKKNPNAKVVYLHSERFVADMVKALQLNAINEFKRFYRSVDALLIDDIQFFARKERSQEEFFHTFNALLEGGQQVILTSDRYPKEIEGLEERLKSRFGWGLTVAVEPPELETRVAILMKKADQAKVELPHDAAFFIAQRIRSNVRELEGALKRVIAHSHFMGRDITIELIRESLKDLLALQDKLVSVDNIQRTVAEYYKIKISDLLSKRRSRSVARPRQVAMALSKELTNHSLPEIGDMFGGRDHTTVLHACRKINELKESDADIREDYKNLLRTLTT

SEQ ID NO: 67670 - protein, 684 aa, Pseudomonas putida
MSAQDFLVELGTEELPPKALASLGDAFLAGIEKGLQAAGLNYTGKQVYAAPRRLAVLIRQLDVQQPDRSINIDGPPLQAAFNAEGEPTQAALGFAKKCGVELAEIDQSGPKLRFSQHIPGKATVGLLPTIVEDSLNDLPIPKRMRWAASREEFVRPTQWLVMLLGDQVVDCTILSQKAGRESRGHRFHHPENVLITTPANYVEDLRKAYVLADFAERRELISKRTAELAMQQEGTAIVPPALLDEVTALVEWPVPLVCSFEERFLEVPQEALITTMQDNQKYFCLLDSEGKLLPRFITVANVESRDPKQIVQGNEKVVRPRLTDAEFFFKQDKKQPLETFNERLKNVVFQAQLGTVYDKAERVSRLAAFIAPLIGGDAQRAGRAGLLSKCDLATEMVGEFPEMQGVAGYYYALNDGEPEDVALALNEQYMPRGAGAELPQTLTGAAVAIADKLDTLVGIFGIGMLPTGSKDPYALRRAALGVLRILIEKQLDLDLTGAVEFAVKQFGAKIKAPGLAEQVLEFIFDRLRARYEDEGIDVATYLSVRALQPGSALDFDQRVQAVQAFRKLPEAEALAAVNKRVSNLLSKAEGAIAEQVEPKYFDNANEFSLYSAIQQADQAVQPMAAARQYSESLARLAALRDPVDAFFEAVMVNAEDAKVRANRYALLSRLRGLFLGVADISLLG

SEQ ID NO: 67671 - protein, 407 aa, Pseudomonas putida
MEMRADLLIVGAGMVGSALALALRHSGLQILLLDGGPLTVVPFDAQAPFEPRVSALSAASQRILERLGAWDGIAQRRATPYSDMHVWDGSGTGQIHFSAASVHAQVLGHIVENRVVQDGLLERLHDSDIGLLANARLEQLRRSGDEWLLTLADGRQLRAPLVIAADGANSAVRRLAGCETREWDYLHHAIVTSVRCSAGHQATAWQRFTDEGPLAFLPLTRDGQQDWCSIVWSTTPEHAEQLMAMDEAAFLQALERAFEGRLGEVLQADPRVCVPLRQRHAKRYVDEGLVLIGDAAHTIHPLAGQGVNLGFLDAAVLAEVLVNACERGERLADVKVLSRYERRRMPHNLALMAAMEGFERLFQADPLPLRWLRNSGLKLVEQMPEAKALFVRQALGLSGDLPDLAKA

SEQ ID NO: 67672 - protein, 446 aa, Pseudomonas putida
MDPSSGISLTSLFADFGMIIFAFLLVLLNGFFVAAEFAMVKLRATRVEAIAEKHGWRGNILRKVHNQLDAYLSACQLGITLASLGLGWVGEPAFAHLLEPLLAYLGVDSAELVKAISFFVAFFVISYLHIVVGELAPKSWAIRKPELLSLWTAVPLYLFYWAMYPAIYLLNASANTILRIAGQGEPGPHHEHHYSREELKLILHSSRGQDPSDQGMRVLASAVEMGELEVVDWANSREDMISIDAHAPLKQILALVRRHKFSRYPVYDAEREEFTGLLHIKDLLLELAELEHLPETIDLEDLARPLERVSRHMPLAQLLEQFRKGGAHFVLVEEADGKVIGYLTMEDVLEVLVGDIQDEHRKTERGILAYQPGKLLVRGDTPLFKVERLLGIDLDHIEAETLAGLIYETLKRVPEEEEVLEVEGLRIIIKKMKGPKIVLAKVLKLD

SEQ ID NO: 67673 - protein, 323 aa, Pseudomonas putida
MKQYLDLVRDVIDNGTLQGNRTGIRTISLPGAMLRFDLQKGFPAITTRKLAFKSAIGEMVGFLRGVKNAGEFRELGCKVWDQNANENAQWLANPFRQGHDDLGEIYGVQWRQWPGYKRIPLSNPAAIEMAEQAGFRRIAQDEEDGVAFVILYKAIDQVRQCLDTIANDPGSRRILFHGWNCAQLDEMALPPCHLLYQFHPNVETREISLTLYIRSNDLGLGTPFNLTEGAALLSLFGRLTGYTPRWFTYFIGDAHVYENHLDMLNEQLKREPLEAPKLVISDRVPAFAETGKYEPEWLEKIEPSDFWLEGYEHHAPMTAPMAV

SEQ ID NO: 67674 - protein, 202 aa, Pseudomonas putida
MTENVPLTRPQLRRLLRNARRALTPAQQRQATLGLYRQLAQHPLFRRARHIALYLPNDGEIDPRLLMREAQRRGKCIYLPVLHAWPRTRMVFQRFEQGEKLKPNRFRIPEPIIDRKRQRPIWALDLILLPLVGFDEVGGRLGMGGGFYDRSLAYQARRQTWKKPLLLGLAHECQKVERLAQASWDVPLQGTVSDRGWYLAPR

SEQ ID NO: 67675 - protein, 132 aa, Pseudomonas putida
MIELEQEDPIPQGDLALQITALPRETNGFGDIFGGWLVAQMDLAGTAMASRVAGGRVATVAIDRMAFLVPVAVGAQLSFYTQTLEIGRSSIQMMVEVWSDDPLSSEWRKVTEAVFVFVAIDGSGRTRSVPRR

SEQ ID NO: 67676 - protein, 356 aa, Pseudomonas putida
MWFACSPGYRHITCSVMRPSQTGLPSMLHSHLTTLNAVSLILNVFQADGCEASALLAGSGIGPADLGHADARITTQQELQVCANAVARREDIGLELGQRMRVSCYGMLGYALLSSATLGDALRLALQYPALLGTVFKLRLLDDGQRVWFSASDYQDSPALSAFNAEFCLVSLKVICDDLLGRPLPLLGARFEHPRPGYHALYAGAFQCPIGFAAEDNAFAFERRWLDMPLPLADPITHKAMSERCRRLNLEFTGRQAWLGRIRQLLAQQLDAAPGLEGLARQMNCSSRTLRRHLQALGSSYQQLLDELRFERAKQLLADEQMPIYRIAETLGFSETASFRHAFQRWSGVAPSHFRG

SEQ ID NO: 67677 - protein, 285 aa, Pseudomonas putida
MSKRLVPSMTALQCFEAAARHLSFTRAAEELHLTQSAVSKQVAQLEDMLRHHLFLRIRRRLQLTPAGSLYLAEVNKILTQVDMSSRYVLTYGEQTEILKVATQPSFGVRWLIPHLKGFGKRHGNIHLDIRNEMEPFALLQGSADVVFFYGQGTWPGATCVELFREEVVPVCAPELLAGRKLAGAEELAELVLLQSTSRPEAWHEWFLEQDLQSVSAYHGPRFDTFYMALSAAQAGCGVALVPRYLAAKELADGSLVVPWNHAMRSAGAHYLAYPSMRQRCQRCGR

SEQ ID NO: 67678 - protein, 471 aa, Pseudomonas putida
MIKKILIANRGEIAVRIVRACAEMGIRSVAIFSDADRHALHVKRADEAHSIGAEPLAGYLNPRKLVNLAVETGCDALHPGYGFLSENAELAEICAERGIKFIGPAADVIRRMGDKTEARRTMIAAGVPVTPGTEGNVADIHEALSEGDRIGYPVMLKATSGGGGRGIRRCNSREELEQNFPRVISEATKAFGSAEVFLEKCIVNPKHIEAQILGDSFGNVVHLFERDCSIQRRNQKLIEIAPSPQLTPEQRAYIGDLAVRAAKAVNYENAGTVEFLLADGEVYFMEMNTRVQVEHTITEEITGIDIVREQIRIASGLPLSVKQEDIQHRGYALQFRINAEDPKNNFLPSFGKITRYYAPGGPGVRTDTAIYTGYTIPPFYDSMCLKLVVWALTWEEAMDRGLRALDDMRVQGVKTTAAYYQEILRNPEFRSGQFNTSFVESHPELTNYSIKRKPEELALAIAAAIAAHAGL

SEQ ID NO: 67679 - protein, 669 aa, Pseudomonas putida
MSRLNPRQQEARDYVGGPLLVLAGAGSGKTSVITRKIAHLIQNCGIRAQYIVAMTFTNKAAREMKERVATLLRPGEGRGLTVCTFHNLGLNIIRKEHERLGYKPGFSIFDESDIKALLSDIMQKEYSGDDGIDEIKNMIGAWKNDLVLPPEALEKARNPREQTAAIVYTHYQRTLKAFNAVDFDDLILQPVKLFQEHPEVLERWQNRVRYLLVDEYQDTNASQYLLVKMLIGMRNQFTVVGDDDQSIYAWRGARPENLMLLKEDYPSLKIVMLEQNYRSTSRILRCANVLIANNPHAFEKQLWSEMGVGDEIRVIRCKNEEAEAERVAMEILTLHLRTNRPYSDFAILYRGNYQAKLIELKLQHHQVPYRLSGGNSFFGRQEVKDLMAYLRLLVNPDDDNAYLRVINVPRREIGSTTLEKLGNYATERGISMYAASEELGLGEHLDARYTERLQRFKHWLDGVRHKVALEDPIAALHEMIRDIDYENWIRQQTASDKAAEFRISNVWFLVEALKNTLEKDEEGDMTIEDAIGKLVLRDMLERQQEEEENAEGVQMMTLHASKGLEFPYVFIMGMEEEILPHRSSIEADTIEEERRLAYVGITRARQTLAFTFAAKRKQYGEIIDCTPSRFLDELPPDDLAWEGLDDAPVEVKAARGNNALADIRAMLKR

SEQ ID NO: 67680 - protein, 480 aa, Pseudomonas putida
MTIPCDILVFGGTGDLALHKLLPALYHLFREARLNPAVRVIALARRNLPRIDYLKLAERHCRAQIARSDFDEEVWQRFSARVDYFPMDASQSADFGRLARYLGEPGGLTRIFYLATAPNLFVPIANHLRIAGLADTEARIVLEKPIGHSLESATAINEAIGTVFEERQVFRIDHYLGKETVQNLMALRFANALLEPVWRNNQVDHVQISVCETLGVENRGAYYDRAGAIRDMLQNHLLQLLCLVAMEPPAQFEAEAVRDEKVKILRALKPITGQDVQDKTVRGQYGAGRIGGQEVPAYYFEKDVDNDSDTETFVAIEAHIDNWRWAGVPFYLRTGKRMARRASQIVIQFKPVPHELFSGGQVNQLLIQLQPDERISLRMMTKSPGKGMRLEPVDLDLNLAQVFSQTRRWEAYERLLLDVLEGDSTLFMRRDEVEAAWAWVDPIIKGCEEHFQAPRPYPAGSFGPEQANSLLARHGRHWHG

SEQ ID NO: 67681 - protein, 728 aa, Pseudomonas putida
MRTDDLSLLLNSLNDAQRQAVAATLGRQLVLAGAGSGKTRVLVHRIAWLIQVEQASPHSILSVTFTNKAAAEMRQRIEQLLGINPAGMWVGTFHGLAHRLLRAHWQEARLVQNFQILDSDDQQRLIKRVMRELGLDEQKWPARQAQWFINGQKDEGLRPQHIQAGGDLFLATMREVYTAYEQACERAGVIDFSELLLRALDLWRDHPGLLEHYQRRFRHVLVDEFQDTNAVQYAWLRLLARGGDSLMAVGDDDQSIYGWRGAKIENIHQYTADFPDAEMIRLEQNYRSTGGILKAANALIANNSGRLGKELWTDMGEGEPLTLYAAYNEHDEARYVVETIESLVKQGNARNEIAILYRSNAQSRVLEEALLRERIPYRIYGGQRFFERAEIKNAMAYLRLIEGRGNDAALERVINVPPRGIGEKTVEAIREHARHSQLSMWEAMCQLIAAKALKGRAASALGAFIELIEGLAAKVVDMPLHTMTQTTIEQSGLITYHQEEKGEKGQARVENLEELVSAARNFESTDEDADLSPLSAFLGHASLEAGDTQADEHEDSIQLMTLHSAKGLEFPYVFLVGMEEGLFPHKMSLEEPGRLEEERRLAYVGITRAMRQLVMTYAETRRLYGSETYNKVSRFVREIPAGLVQEVRLSNSVSRPFGGAKTATNSNLFANASIPQTAFNLGQRVQHAVFGEGVILNFEGSGAQARVQVNFAEGSKWLMLGYAKLEAV

SEQ ID NO: 67682 - protein, 152 aa, Pseudomonas putida; identical to SEQ ID NO: 67498
  MISC_FEATURE (51)..(51): X=any amino acid
  MISC_FEATURE (115)..(115): X=any amino acid
  MISC_FEATURE (146)..(146): X=any amino acid

SEQ ID NO: 67683 - protein, 122 aa, Pseudomonas putida; identical to SEQ ID NO: 67499
  MISC_FEATURE (19)..(19): X=any amino acid

SEQ ID NO: 67684 - protein, 596 aa, Pseudomonas putida
  MISC_FEATURE (403)..(403): X=any amino acid
  MISC_FEATURE (456)..(456): X=any amino acid
MCGLAGELRFTPIDQAPRPADLAAVERITHHLAPRGPDAWGFHSQGPIALGHRRLKIMDLSDGSAQPMVDNTLGLSLAFNGAIYNFPELREELQALGYSFWSDGDTEVLLKGYHAWGAALLPKLNGMFALAIWERDNQRLFLARDRLGVKPLYLSRNGERLRFASTLPALLKGGDIDPMLDPVALNHYLNFHAVVPAPRTLLANVQKLEPGTWMRIDRHGEVERQVWWQLHYGPHPDERELDLEGWTTRVLDATRDAVAIRQRAAVDVGVLLSGGVDSSLLVGLLREVGVDDLSTFSIGFEDAGGERGDEFQYSDLIAKHYGTRHHQLRIAEHEIIDQLPAAFRAMSEPMVSHDCIAFYLLSREVAKHCKGVQSGQGADELFAGYHWYPQVDGADDAYAGLPXGVLRPQPRRIPRHRAGPLAAGNRRCRRLRARTLRAPRRTGCRGQGRCAWTAPXCWSTDPVKRVDNMTMAWGLEARTPFLDYRLVELSARIPARFKLPDGGKQVLKQAARRVIPHEVIDRKKGYFPVPGLKHLEGATLGWVRELLTDPSQDRGLFNPTMLDRLLSNPHGQLTPLRGSKLWQLAALNLWLSEQGI

SEQ ID NO: 67685 - protein, 65 aa, Pseudomonas putida
MQVFNVQGMTCGHCVKAVTRAVQERDAAARVEVDLAGKQVRVQSELAQEQILTAIRDEGYQAELA

SEQ ID NO: 67686 - protein, 247 aa, Pseudomonas putida
MAQQVSGRQPRYKRILLKLSGEALMGSEDFGIDPKVLDRMALEVGQLVGIGVQVGLVIGGGNLFRGAALSAAGMDRVTGDHMGMLATVMNGLAMRDALERSNIPALVMSAISMVGVTDHYDRRKAIRHLNSGDVVIFSAGTGNPFFTTDSAACLRAIEIDADVVLKATKVDGVYTADPFKDPHAEKFDHLTYDEVLDRKLGVMDLTAICLCRDHKMPLRVFNMNKPGALLNIVVGGAEGTLIEEGQA

SEQ ID NO: 67687 - protein, 674 aa, Pseudomonas putida
MTARKYNDMSLPKNHLELLSPARDVAIAREAILHGADAIYIGGPSFGARHNACNEVSDIAELVEFAHRYHARVFTTINTILHDNELEPARKLIHQLYDAGVDALIVQDLGVMELDIPPIELHASTQTDIRTLERAKFLDQAGFSQLVLARELNLQQIRAIAAETDAAIEFFIHGALCVAFSGQCNISHAQTGRSANRGDCSQACRLPYTLKDDQGRVVAFEKHLLSMKDNNQTANLADLVDAGVRSFKIEGRYKDMGYVKNITAHYRKELDAILEDRPQYARASSGRTQHFFLPDPDKTFHRGSTDYFVTDRKVDIGAFDSPTFTGLPVGVVEKVGKRDMQVVTDVPLTNGDGLNVLVKREVVGFRANIAEPRGEFEEDGQKRYRYRVEPNEMPEGLHKLRPNHPLSRNLDHNWQQALQRTSSERRVGVEWHAVLREQRLMLTLSSEEGVSVQVALDGPFGVANKPQQALEQLHDLLGQLGTTLYHADRIELDAPQAYFIPNSQLKALRREAIEALTAARVQAHPRGGRKAETTPPPVYPESHLSFLANVYNQKARDFYHRHGVQLIDAAYEAHEEHGEVPVMITKHCLRFSFNLCPKQAKGVTGVRTKVAPMQLIQGDEVLTLKFDCKPCEMHVIGKMKSHIIDLPTPGSAVAQVVGHISPEDLLKTIPRGPH

SEQ ID NO: 67688 - protein, 130 aa, Pseudomonas putida
MKRISTLFLLATLGLAAGTAQAAQPDAGLTGCAAKRSAIENQLKIARDHGNSDQVGGLEEALRGVDNCTDASLRKEREQKVLDARHEVAQREKDLKKAEKKGDAEKINKRKDKLAESRKELQEAVDALDR

SEQ ID NO: 67689 - protein, 286 aa, Pseudomonas putida
MNVDLHCHSTASDGALSPSVLVARAHEHGVQALALTDHDTLEGLPEARQACVDLGMRWVSGVELSCTWGGATIHVLGYDFPLDAPPLLAAIQALHHGRWLRAEEIDRRLAAKGMPGTLEGARAVQHELGDSGNAPARPHFAEYLVRAGHVKDRGEAFRKWLGAGKLGDVKQHWPTLDETVATLRQSNAWVSLAHPMHYDLTRSKRRRLIADYIQAGGQALEVVNGMMPAEQVGTMSILAREFGLLASAGSDFHGPGTWGEIGAYRPLPEDLPPLWRRFSHEQPLAL

SEQ ID NO: 67690 - protein, 92 aa, Pseudomonas putida
MFLSPAEISSTSFGAGYITLYPAACSVLAWADPHDHWQIRLGICGGCRTQDDGYDTKADICGHGFRAMACSALVESGLWSETAIEPVKPPHA

SEQ ID NO: 67691 - protein, 399 aa, Pseudomonas putida
MKSVEEQLALIKRGAEEVLVESELVEKLKRGQPLRIKAGFDPTAPDLHLGHTVLINKLRQFQDLGHQVIFLIGDFTGMIGDPSGKSATRPPLTREQVLENAETYKQQVFKILDPAKTEVAFNSTWMDKLTPADFIRLASQYTVARMLERDDFDKRYTTNQPIAIHEFLYPLVQGYDSVALKADVELGGTDQKFNLLMGRELQRSYGQEAQNIVTMPLLEGLDGVKKMSKSLGNYVGIQEAPGVMYSKLVSIPDTLMWRYFELLSFRSMEEIEQFRADVANGANPRDIKIKLAEEIVARFHGEEAAANAHRAAGNRMKEGELPEDLPEIEVAAAEDLPIAAVLNRAGLVKNSAQARDLLNSGAVKVDGAVVDKDFMFVLGATHVCQAGKKSFGRVTLKAE

SEQ ID NO: 67692 - protein, 261 aa, Pseudomonas putida
MKKTLLTTALAAALSFSGLAAAAEKLVVAATPVPHAEILELIKPTLAKEGVDLQIKVFTDYVQPNVQVDQKRLDANYFQTLPYLQNFNEGKGTHLETVVGVHVEPFGGYSKKVKALSELKEGATVAIPNEGSNSGRALLLLQKAGLITLKDPKNALATPKDIAENPKKLKFRELESAMLPRVLDQVDLDMINTNYALEAGLNPAKDALVIEGADSPYVNFLVARPDNKDSEAIQKLAKALTSPEVKAFIAKKYQGAVLPAF

SEQ ID NO: 67693 - protein, 180 aa, Pseudomonas putida
MLTGQLYHAGCPELQAEQIANKHWMHRYNNSVELLNDARHGLLVEHFGQVGEGAVIRPPFYCDYGYNISVGRNTFMNFNCVILDVVPVRIGEDCQIGPNVQIYTADHPLDPEVRRSGLESGRPVTIGDNVWIGGAAIILPGVTIGDNAIVGAGSVVTRDVPAGATVVGNPARVRQPDQGQ

SEQ ID NO: 67694 - protein, 332 aa, Pseudomonas putida
MDVTDLLARAVDAGASDLHLATGQIPMLRLDGELQRMGLPPLSQGALIEGMASVLDNDQRRQWAQGDEMDLALELPALGRFRLNLFRQLNGPAVTFRLIPGRIATVSELDLADVFQAVAHCRDGLILVGGPTGSGKSSTLATLLDQLNRERALHIITLEDPVEIIHDSQRSLVNQREMGRHSRGFAQGLRSALRQDPDVIMIGELRDLETIRLALRAAETGHLVLATVHARSATSSIDRLVEVFAAEEKPLVRAMLAESLRLVVAQVLVRRVGGGRVAAREVLVATPAVRNLVREGRLAQLSSVMQGGAAEGMLTMEGALRRLRERGLIKGL

SEQ ID NO: 67695 - protein, 300 aa, Pseudomonas putida
MRRFVRLFLVLAALALLLLGWAGQEFRLFERGWFNLKTWWQPVERSIGLDRYRVVLEAQPIEGLDDDISALTYDPDRKTLFTVTNARSELIELSLDGRILRRVPLTGFGDPEAVEYVGPNSYVITDERQQRLIRVRLEDDTMFLDAGDAEQLTLGIGLNGNKGFEGLAYDSAGKRLFVAKERDPMLIYEVHGFPHDNPEKPYAVHVVQDRKRDSRLFVRDLSSLQFDERSGHLLALSDESRLVLELDVQGQPLSTLSLRKGFQGLQATVPQAEGIAMDEAGTIYLVSEPNLFYVFKQPTD

SEQ ID NO: 67696 - protein, 472 aa, Pseudomonas putida
MAERLNNDFQFIEVGRKDPKKKLLRQRKKEFVEIYEPFKPQQSVEQAHRCLGCGNPYCEWKCPVHNFIPNWLKLVSEGNILAAAELSHQTNTLPEVCGRVCPQDRLCEGACTLNDGFGAVTIGSVEKYITDTAFAMGWRPDMSKVKPTGKRVAIIGAGPAGLGCADVLVRAGVTPVVFDKNPEIGGLLTFGIPEFKLEKTVLSNRREVFTGMGIEFRLNTEVGKDVTMEQLLAEYDAVFMGMGTYTYMKGGFPGEDLPGVHDALDFLIANVNRNLGFEKSPEDFVDMQGKKVVVLGGGDTAMDCNRTSIRQGAKAVTCAYRRDEANMPGSRKEVKNAKEEGVKFLYNRQPIAIVGEDKVEGVKVVETRLGEPDARGRRSPEPIPGSEEILPADAVVIAFGFRPSPAPWFEQHGIQLDSQGRVVAPEKGKFKHQTSNPKVFAGGDMVRGSDLVVTAIFEGRTAAEGILDYLEV

SEQ ID NO: 67697 - protein, 154 aa, Pseudomonas putida
MIGIDNSMPWHLPGDFKYFKATTLGKPIIMGRKTWDSLGRPLPGRLNIVVSRQPGLELAGAEVFASLEEALVRAEQWAREQGVGELMLIGGAQLYGQALEKGLVSRMYLTRVELAPEGDAWFPAFDEGQWRLTSSEAQAEEGKPAYHFEVWDKG

SEQ ID NO: 67698 - protein, 435 aa, Pseudomonas putida
MQLQARLGTPANLAAQHHQRRAEEPVQRHLVHAVQRHIEHARQPAFQLHAAHQVTHQVAHRREARQRHQRAIVLVLVRRQGLVLQARLQALRQHRSLLVRRLCARRHVTIAAGLRAGGAVTEGEDVVVAGGLQGRAHDQLVDAVGFQAIDVLEETWRADTGCPHLQAGLDHFTVLGFQAVLGHFTDCGVGHHLHPEFFQGFVNRYADALRQRWQNARARLDKGDVHVLGLDAVQAIGRQLVGSVVQLGRQLYTGGTGADNGYADFLAGHVAGVGTQVVVEQLLVETLGLLAGIQEQAVLRCAQGAEVVGVGAHGNHQGVVAQGARRQQLAALFVEGGSQLNLLAFTVQAAHAPQLEIEVVPLGLGHVVQFVFRGVQRAGGHFVQQWLPDVREVGVDQGDFGLLALAQAFTQAGRQFQAAGAAADNHDAMSHGNIS

SEQ ID NO: 67699 - protein, 329 aa, Pseudomonas putida
MSAKKKPVSTPLHLLQQLSGSLLEHLEEACSQALADAEKLLAKLEKQRGKAQEKLHNGRLKLQDAAKAGKAKAQSKAQKAIGELEELLESLKERQTQTRSYIQQLKRDAQDSLKLAQGVGKVREAAGKALDQRAAKPAAKATAAAKPAAKPAARATAAAKPAAKPAAKTTTAAKPAAKPAAKATAAAKPAAKPAAKATAAAKPAAKPAAKATAAAKPAAKPAAKATAAAKPAAKPAAKATAAAKPAAKPAAKAAAAAKPAAKPAAKAPAAKPAAKPAATKAPARTAAKPAAKPAEAKPATPAATTNSVSPAAAAPSAPVSTPSQAPSAS

SEQ ID NO: 67700 - protein, 957 aa, Pseudomonas putida
MSQSPSLHQLQELNPFLRRHLGPDATEQQAMLNALGIASRNELIEQTVPPDIRLNRPLDLPAALDEQAALAKLAGYAEQNQVWTSLIGMGYHGTITPTVILRNVLENPGWYTAYTPYQPEIAQGRLEALLNFQQMVIDLTGLPLANASLLDEATAAAEAMALAKRVARNKSNAFFADEHCHPQTLSVLKTRAEGFGFELIVDSVDNLAKHSVFGALLQYPDTHGEVRDLRPLIDQLHSQQALACVAADLLSLVVLAPPGELGADVVLGSTQRFGVPMGYGGPHAAYFACRDDYKRAMPGRIIGVSRDARGNTALRMALQTREQHIRREKANSNICTAQVLLANIAGFYAVYHGPEGLQRIAQRVHRLTFILAAGLEAKGIKRLNQHFFDTLTLNVGGAQAAIIESAEAAHINLRILGRGHLGVSLDETCTEQTVLRLLDIFLGVDHGLEITALDQLALPEGIPASLVRRTPFLAHPVFNLHHSETEMLRYLKQLENKDLALNQSMIPLGSCTMKLNATSEMIPITWPGFAQLHPFAPAAQAAGYKAMIDELESWLCAITGFDAICMQPNSGAQGEYAGLMAITRYHCSRHQPMRTLCLIPSSAHGTNPASAQMAGMEVVIVDCDNDGNVDLADLKAKAHAAGERLSCLMITYPSTHGVYEEGIREICDVVHQYGGQVYMDGANLNAQVGLARPADIGADVSHMNLHKTFCIPHGGGGPGMGPIGIRAHLKPFVASHPVVPVPGLDPNNSAVSAAPWGSASILPISWMYIAMMGPQLADASEVAILSANYLASQLGAAFPVLYRGRNQRVAHECILDLRPLKALTGISEEDVAKRLMDYGFHAPTMSFPVPGTLMVEPTESESKAELDRFVEAMLAIRAEIDEVQQGNWPAENNPLKHAPHTLADVLGVWDRPYSLEQAVAPSAHVRQHKYWPAVNRVDNVYGDRNLFCACVPVEAYR

SEQ ID NO: 67701 - protein, 297 aa, Pseudomonas putida
MKRFSFSKLMLVLGLLFIYLPMLILVIYSFNASKLVTVWGGWSIKWYVGLLDNSQLMGSVMRSLEIACYTAVAAVALGTLAAFVLTRVTRFKGRTLFGGLVTAPLVMPEVITGLSLLLLFVAMAQMIGWPQERGIVTIWIAHTTFCAAYVAVVVSARLRELDLSIEEAAMDLGAKPWKVFFLITIPMIAPSLAAGGMMSFALSLDDLVLASFVSGPGSTTLPMEVFSAVRLGVKPEINAVASLILLSVSLVTFFVWYFSRQAEERRRKAIQQAIEEGAAANASQPQVKRPAQVAASA

SEQ ID NO: 67702 - protein, 327 aa, Pseudomonas putida
MQLGIIGLGRMGGNIARRLMRAGHRTVVHDRNRDAITGLEGEGAQGAHDLGALVQKLKAPRAVWVMLPAGDATEQTIAQLAEMLEPGDAIIDGGNTFYKDDMRRAAELAKRGLHYLDVGTSGGVWGLDRGYCMMIGGEKDVFERLEPLFKALAPGVGDIPRTHGRSGEHQRAEHGYIHAGPPGAGHYVKMVHNGIEYGLMQAYAEGFDLLRSKGGNELPEDQRFDLNVAEIAEVWRRGSVVTSWLLDLTADALVADPQLSQFSGSVSDSGEGRWTIDAAVEQAVPVPVLSSALFARFRSRQQQGTYGDKILSAMRLGFGGHVEKKGE

SEQ ID NO: 67703 - protein, 152 aa, Pseudomonas putida; identical to SEQ ID NO: 67498
  MISC_FEATURE (51)..(51): X=any amino acid
  MISC_FEATURE (115)..(115): X=any amino acid
  MISC_FEATURE (146)..(146): X=any amino acid

SEQ ID NO: 67704 - protein, 99 aa, Pseudomonas putida
MNQERVFKVLLGPHVSEKATVLAEKKGQFVFKVATDATKLEIKKAVEGLFNVKVENVSTVNVLGKTKRTARGLGKRNDWKKAIVSLQPGQDLDFSSSAE

SEQ ID NO: 67705 - protein, 552 aa, Pseudomonas putida
MLTLLNLLSAVTLLVWGTHIVRTGILRVFGSNLRRIISQNMDKRPLAFIAGILVTAMVQSSNATAMLVTSFVGQGLMAMTPALAIMLGADVGTALMARVLTFDLSWLSPLLIFLGVIFFLSRKQTRAGQLGRVGIGLGLIILALELIVQAAAPITQAQGVKVLFASLTGDIMLDALVGAMFAMISYSSLAAVLLTATLAGAELISLPVAIGLVVGANIGSGLLAFISTSMQNAAGRRVALGSLLYKLIGLVLIIPVLHPLVAWMDSLSFSPQELVIGFHLLYNTLRCLIMLPTVKPMGRLCNALLPEREIGNGQVRPRHLDASALETPSLALANAARETLRLGDIVDSLLEAMLGALRGTQTALPQQVRALGEDAEALYSAIKLYLAQMSREDLSEQDNRRWAEIIELSINLKLACDLIERMLRKVQQQKTSQRREFSQVGLEELTGLQEQLLANLRLGLSVFLSADPESARLLLREKRRFRAQERRLAHAHVSRLQRKVVQSIETSSLHLELIADMKRLNSLFCSSAYVVLGGSDTGGLMLDSVPDEARLP

SEQ ID NO: 67706 - protein, 321 aa, Pseudomonas putida
MGASLGSAADAYGAQLVLKVVAPNDQELALINSGSLLVGMLNPFNGELIGKMAERGITAFALEAAPRTSRAQSLDVLSSQANIAGYKAVLLAAHHYPRFMPMLMTAAGTVKAARVLVLGAGVAGLQAIATAKRLGAVIEASDVRPAVKEQIESLGAKFIDVPYETDEERECAEGVGGYARPMPASWMQRQAQAVHERAKQADIVITTALIPGRKAPTLLSAETVAQMKPGSVVIDLAAAQGGNCPLTVADQVVQENGVIIVGPTNLPAQVSADASALYARNLLDFMKLLFDKDGALIINLEDDIVAACLMCRDGQVVRKNG

SEQ ID NO: 67707 - protein, 363 aa, Pseudomonas putida
MSGNTYGKLFTVTTAGESHGPALVAIVDGCPPGLEISLADLQHDLDRRKPGTSRHTTQRQEADEVEILSGVFEGRTTGCSIGLLIRNTDQKSKDYSAIKDLFRPAHADYTYHHKYGIRDYRGGGRSSARETAMRVAAGAIAKKFLATQGITVRGYMSQLGPIEIPFKTWESVEQNAFFSPDPDKVPELEAYMDQLRRDQDSVGAKITVVAEGVMPGLGEPIFDRLDAELAHALMSINAVKGVEIGAGFASVAQRGTEHRDELTPEGFLSNNAGGILGGISSGQPIVAHLALKPTSSITTPGRSIDVDGNPVDVITKGRHDPCVGIRATPIAEAMMAIALMDHLLRHRAQNADVQVNTPVLGQR

SEQ ID NO: 67708 - protein, 405 aa, Pseudomonas putida
MTQSQYRPGPDANGLFGSFGGRYVAETLMPLVLDLAREYEAAKADPKFLEELAYFQRDYIGRPNPLYFAERLTEHCGGAKIFFKREELNHTGAHKVNNCIGQVLLAKRMGKKRLIAETGAGMHGVATATVAARFGLPCVIYMGATDIERQQANVFRMKLLGAEIVPVTAGTGTLKDAMNEALRDWVTNVEDTFYLIGTVAGPHPYPAMVRDFQSIIGKETRAQLQEKEGRLPDSLVACVGGGSNAMGLFHEFLEEPSVQIIGVEAGGHGVHTDKHAASLNGGVPGVLHGNRTYLLQDQDGQITDAHSISAGLDYPGIGPEHAYLHEVKRVEYVSITDDEALDAFHATCRLEGIIPALESSHALAEAIKRAPKLPKDHLMVVCLSGRGDKDMQTVMNHMAAQEKQA

SEQ ID NO: 67709 - protein, 434 aa, Pseudomonas putida
MRPIFSEFGLIRFRALVEVRWLQRLAAHPQIGEVPAFSAEANALLDSLATDFKLEHAERVKEIERTTNHDVKAIEYLLKEQAAKLPELAKVSEFIHFACTSEDINNLSHALMLRAGRDEVLLPLMRQVADAIRALAHAHAEVPMLSRTHGQPASPTTLGKELANVVYRLERQIAQVAAVPLLGKINGAVGNYNAHLSAYSQIDWEENARAFIEDELGLQFNPYTTQIEPHDYIAELFDAIARFNTILIDFDRDVWGYISLGYFKQKTVAGEIGSSTMPHKVNPIDFENSEGNLGIANALFQHLASKLPISRWQRDLTDSTVLRNLGVGFAHSVIAFEASLKGIGKLEVNEARIAADLDACWEVLAEPIQTVMRRFNIENPYEKLKELTRGKGITPEALLTFIDGLDMPAEAKAELKQLTPATYIGNAAAQAKRI

SEQ ID NO: 67710 - protein, 337 aa, Pseudomonas putida
MSAVRIGQYTLRNNLILAPMAGVTDQPFRTLCQRLGAGMVVSEMVSSDMSLWNSRKSSLRRIHEGDPEPRSVQIAGGDAQMMAAAAKANVEAGAQIIDINMGCPAKKVCNKAAGSALLRDEALVSEILHAVVSAVDVPVTLKIRTGWDRANKNGLNVAKIAEQAGIQALAVHGRTRADLYTGEAEYDTIGAIKQAVSIPVFANGDITSPEKARAVLETTGVDGLLIGRAAQGRPWIFREIEHYLRTGEHLPAPQLDEVERILLEHLAALHAFYGDVMGVRIARKHVGWYLATRPGGKEFRARFNALEDTQAQCANVRAFFSERRQSLETEDGQGVAA

SEQ ID NO: 67711 - protein, 325 aa, Pseudomonas putida
MSNQLSTEQLLHAYEVMRTIRAFEERLHVEFATGEIPGFVHLYAGEEASAAGVMAHLRDSDCIASTHRGHGHCIAKGVDVYGMMAEIYGKKTGVCGGKGGSMHIADLEKGMLGANGIVGAGAPLVAGAALAAKLKGRDDVSVAFFGDGASNEGAVFEAMNMASIMNLPCIFVAENNGYAEATASNWSVACDHIADRAAGFGMPGVTIDGFDFFAVYEAAGAAIERARSGQGPSLIEVKLSRYYGHFEGDAQTYRAPDEVKNLRESRDCLMQFRNKTTRAGLLTAEQLDAIDARVEDLIEDAVRRAKSDPKPQPADLLTDVYVAYP

SEQ ID NO: 67712 - protein, 1020 aa, Pseudomonas putida
MNLSRLFILRPVATTLSMLAIVLAGLIAYKLLPVSALPQVDYPTIRVMTLYPGASPQVMTSAVTAPLERQFGQMPGLEQMASTSSGGASVLTLRFNLDMNMDVAEQQVQAAINAASNLLPSDLPAPPVYNKVNPADTPVLTLAISSKTMPLPKLNDLVDTRVAQKLAQISGVGMVSIAGGQRQAVRIKVNVDALAANGLNLDDVRTLIGASNVNQPKGNFDGPTRVSMLDANDQLRSPEEYANLILAYNNGAPLRLKDVAEIVDGAENERLAAWANENHAVLLNIQRQPGANVIEVVDRIKGLLPSITDNLPAGLDVSVLTDRTQTIRAAVKDVQHELLIAIVLVVMVTFVFLRRFSATLIPSIAVPLSLIGTFGVMYLAGFSVNNLTLMALTIATGFVVDDAIVMLENISRHIEEGETPMQAALKGARQIGFTLISLTFSLIAVLIPLLFMADVVGRLFREFAITLAVAILISLVVSLTLTPMMCARLLKREPKEEEQGRFYRASGAWIDWLIQHYGSALQWVLKHQPLTLLVAVASLVLTVFLYMVVPKGFFPVQDTGVIQGISEAPQSTSFAAMSERQQALSKVILQDPAVQSLSSYIGVDGDNATLNSGRLLINLKPHGERDVSASEVISRLQPQVDRLVGIRLFMQPVQDLSIEDRVSRTQYQFSLSSPDADLLAQWSGKLVQALQQRPELADVASDLQDKGLQVYLVIDRDMASRLGISVSQITNALYDAFGQRQISTIYTQASQYRVVLQSSDAATIGPQALESIHVKATDGGQVRLSALARIEQRQAQLAISHIGQFPAVTLSFNLAHGASLGEAVQVIEQVQKDIGMPLGVQTRFQGAAEAFQASLSSTLLLILAAVVTMYIVLGVLYESYIHPITILSTLPSAAVGALLALLISGNDLGMIAIIGIILLIGIVKKNAIMMIDFALEAERNQGMSPRDAIYQAALLRFRPILMTTLAALFGAVPLMLATGSGAELRQPLGLVMVGGLLVSQVLTLFTTPVIYLYFDRLARR

SEQ ID NO: 67713 - protein, 529 aa, Pseudomonas putida
MALAGVTVPGALYVQRQLTREEFPETPGEAVVELADTATQQLGDTLRGIWRWSFKGAQAGLPGLQGETLELFIDVAQKGRSIRGYLDTAERLRSGAEPRYRVLGDLPADKPGRLRWRLFDSADGGRMPRYECHLVLDEVWGVFGNAGPATLNGSILDLERPLAMPEQDNRFLAHKQTFPEARERTALSPAMIDWLIAPEHRLFHQLWHASRDKWHKLDKDKRNALRGLGWQPGPRDRERDARGRHKDRNGSGEDFLFMHRHMLGAARAIQDLPSWPRFPLPQPELERDRLGFARYFDNHDGNALPPTWLAYDDDEYTQWVRDIKSAETFHGNFEVWESRYSDPQYLSRLTLGQFGSELELGLHDWLHMRWASVPRDPSNGMPVPMARTPDDFAARWYGAQNDFLGDPFSSHVNPVFWRFHGWIDDRVEDWFRAHERFHPGAVVRQEVNGVPWFAPGRWVEVADPWLGPDTHGCSNVAGLRPGRSVEMDPETMKLALRLIYSDEERFDGLVGKVPRRPWYARHLKVRQRS

SEQ ID NO: 67714 - protein, 590 aa, Pseudomonas putida
MASIPTISFDAIIIGGGGAGMRAALQLAQGGHKTAVVTKVFPTRSHTVSAQGGITCAIASADPNDDWRWHMYDTVKGSDYIGDQDAIEYMCQEGPAAVFELDHMGLPFSRTETGRIYQRPFGGQSKDFGKGGQAARTCAASDRTGHALLHTLYQGNLKAGTTFLNEYYAVDLVKNQDGAFVGVIAICIETGETLYIKSKATVLATGGAGRIYASTTNALINTGDGIGMALRAGVPVQDIEMWQFHPTGIAGAGVLVTEGCRGEGGYLINAHGERFMERYAPNAKDLAGRDVVARSMVKEIIAGNGVGPNKDHVLLKLDHLGEEVLHSRLPGICELSKTFAHVDPVVAPVPVVPTCHYMMGGVATNIHGQAITMDADGQDHIIPGLFAVGEVACVSVHGANRLGGNSLLDLVVFGRAAGLHLEKALSEGVEYRDASDTDVDVALNRLNKLNERTSGEDVASLKRELQSCMQNYFGVFRTGEYMQKGIEQLAGLRDRIANVKINDKSQAFNTARIEALELQNLLEVAEATAIAAEARKESRGAHAREDFEDRDDENWLCHTLYYPGEKRVAKRGVNFAPKTVPAFEPKVRTY

SEQ ID NO: 67715 - protein, 921 aa, Pseudomonas putida
MEELYELYLHDPNAVPEEWRTYFQKLPADGSTATDVSHSTIRDHFVLLAKNQRRAQPVSAGSVSSEHEKKQVEVLRLIQAYRMRGHQAAKLDPLGLWQRPAPVDLSINHYGLTNADLDTTFRAGDLFIGKEEASLRDIFDALQKTYCRTIGAEFTHIVDSEQRSWFQQRLESVRGRPEYSADVQAHLLERVTAGEGLEKYLGTKYPGTKRFGLEGGESLIPMLDEMIQRSGSYGAKEVVIGMAHRGRLNVLVNTFGKNPRELFDEFEGKKMNELGSGDVKYHQGFSSNVMTPGGEVHLAMAFNPSHLEIVSPVVEGSVRARQDRRNDTVGDKVVPISIHGDAAFAGQGVVMETFQMSQTRGFKTGGTVHIVINNQVGFTISNPLDARSTEYATDVAKMIQAPILHVNGDDPEAVLFVTQLAIDYRMQFKRDVVIDLVCYRRRGHNEADEPNGTQPLMYQQISKQRTTRELYAEQLIQAGRIDAERAQAKIDEYRNALDNGLHVVKSLVKEPNRELFVDWRPYLGHAWTARHDTRFDLKTLQDLSAKLLELPEGFVVQRQVSKIYEDRQKMQAGGLPINWGYAETMAYATLQFEGHPIRMTGQDIGRGTFSHRHAVLHNQKDASTYIPLQNLFPGQPRFDLYDSFLSEEAVLAFEYGYSTTMPNALVIWEAQFGDFANGAQVVIDQFITSGEHKWGRLCGLTMLLPHGYEGQGPEHSSARLERYLQLCAEHNIQVCVPTTPAQIYHLLRRQVIRPLRKPLVVLTPKSLLRHKLAISTLEDLAEGSFQTVIPEIDAIDPAKVERLVLCSGKVYYDLLEKRRAEGREDIAILRIEQLYPFPEDDLVEILAPYTNLKHAVWCQEEPMNQGAWYSSQHHMRRILGRHNKALVLEYAGRDASAAPACGYASKHAEQQEKLLQDAFTV

SEQ ID NO: 67716 - protein, 478 aa, Pseudomonas putida
MTQKFDVVVIGAGPGGYVAAIKAAQLGLKTACIEKYTDAEGKLALGGTCLNVGCIPSKALLDSSWKYKEAKESFNVHGISTGEVKMDVAAMVGRKAGIVKNLTGGVATLFKANGVTSIQGHGKLLAGKKVEVTKADGTTEVIEAENVILASGSRPIDIPPAPVDQNVIVDSTGALEFQAVPKRLGVIGAGVIGLELGSVWARLGAEVTVLEALDTFLMAADTAVSKEAQKTLTKQGLDIKLGARVTGSKVNGNEVEVTYTNAEGEQKITFDKLIVAVGRRPVTTDLLASDSGVTIDERGYIFVDDYCATSVPGVYAIGDVVRGMMLAHKASEEGIMVVERIKGHKAQMNYDLIPSVIYTHPEIAWVGKTEQALKAEGVEVNVGTFPFAASGRAMAANDTGGFVKVIADAKTDRVLGVHVIGPSAAELVQQGAIAMEFGTSAEDLGMMVFSHPTLSEALHEAALAVNGGAIHVANRKKR

SEQ ID NO: 67717 - protein, 2174 aa, Pseudomonas putida
MNAQDSLKLARRFIELPAAKRRLFLDAMRGEGVDFALLPIAPGVEVAARDALSYAQQRMWFAWRLDAKSAAYNLPMAVKLKGPIAPEALQQALDTLVARHESLRTLFPEVDDQPRQRVQAQASIRGEMLDLSHLQGEAQAQQVEAACAAESAAPFDLAAGPLMRVRLLRTSATEHLLLITLHHIIADGWSLGILIDELVRLYDAAVAGQASALAPLAIQYRDFALWQRSWLEAGEQARQLEYWLDHLGNDHPVLQLPSDHLRPALPSYRGERLELQIDAALAQRLQALARRHNVTLFVVLLAAFKTLLYRYSGQSRVRVGVPIANRNRSEVEGLIGCFINTQVLQTDIDPTQGGAHLLSQVKACAAQAQSHQDVPFDQLVEALGLERTGGVSPLFQVLFNHQSMVTDVATVRTASGLELEKLELRKSTARFDLTLDTVEVAGQLRAAFTFALDLFERDTVEAMGRDWLSLLAALSRDDVAALGDWPLAGAPVAAPQVLPYAGPLLHQRVTAFAKAQPQRIAVVSADGSLSYGELDARADQLCAQLQAHGVVADQPVGLIAERSVNLLVGLLAILKAGGAYVPLEPGQPQQRMAFMLRDAQIKVLLRAEDEPGPAIGGVQCLALNAAGGEAGVPVAVHSGNLAYVIYTSGTTGMPKGVAVSHGALANYLEGLSERIALGDLEHFAMVSTPAADLGHTMLFGALWAGKTVHLLQREAVLDADGFAAYLSANHVDALKIVPSHLGALLDACADASVLPQRCLVLGGEACPPALLARIGTLRPGLKVLNHYGPTETTVGVLTAELAAGEVTHLGSPLRNSRVQVLDATLQAVPGMAKGELCIAGAGLARGYLARPGLTAERFVPDAHGEPGARLYRTGDVVQRDRQGRLLYLGRVDHQLKIRGYRVEPGEIEACLQGLPDVDKAVVRATGQDGSLQLLAYLVAPRLLARERDAEAAQEAVQQALKLHVQAHMVPARVLFLDSLPLTANGKVDLARLPLPDQQHPVASHTPAQTPLQIDLANLWQEVLGCPQVGLDDNFFALGGHSLMATQIVSRARRQLGLDIPLRLLFDTADLRSFSHRVSQLGEVADAPIQVLDRQAWLPVSHAQYRQWLFWKIHPHSSAYHTPMAVRITGALDREALAQAFSALVSRHESLRTCFEEQQGVPGLRVHANLAVTLEQQQAQAFDPAQLLQQLQADIQQPFDLANGPLIRMKLYQRGEQEHLLLVTLHHIVSDGWSMGVMVRECIAVYNHHAAGAAQPDFAPLPVQYADYASWQRERLSEGQMQAQLGYWQAHLEDDFAVLQLPADRPRPELQSYRGGRLDVRLPAQLTADLRRLAVRCNATLFHVFLASFGLLLARYSGNEKINIGVPMTNRNRLELEGLIGFFVNTVVLRLSVDYSVSFEQLLAHTKEISLQAQANKDLPFDALVEALQPERGMGYNPLFQVMYNHLRDLGEQVTGQSLNGLQVEEVDLDEGTAQFDLSLDTVERSDGVLATFTYAVDLFDPSRIQRMATHWLNLLQALCAQPHVCVDRLALATADERRLVERDWCQGPAEQLSDTAVARQFEAQVLRAPDAVAVIHEGQAWSYAELNRRANRLAHRLQALGAGPEVLIGVALERGLGMVAGLLAILKVGAAYVPLDPDYPAERLAYMIEDSGLALLLTQASLSEQLAVPACVTQVCLDALLEDGDASNPQVAIDPATLAYVMYTSGSTGRPKGVAITQGALSQHAQVSLGFFNLKPSDRILQFATFNFDGFVEQLYPALICGASVVVRGPELWGSERFYRELISNDISVVDVTTAYWFMLAKDFAEHGPRDYGRLHQFHAGGEAMPPEGLLAWQAAGLGHVTLLNTYGPTEATVTVTAHDCAPYLGATAQALPPVMPIGRVLAGRSIHLLDNSGGAVLNGAVGELMIGGELLARGYHQRPGLTAERFIPDPFGAPGSRLYRSGDLARYLADGQIEYAGRIDHQVKIRGFRIELGEVGARLLEHASVRDALVIDVDGPLGKQLVGYLVPAVADVAQASVQTQQELLAQLRTDLRSSLPDYMVPAHLIWLPELPLSPNGKLDRKALPQPDLAQLQVRYVPPYSDTECKVAAIWADVLRIEQVGLDDNFFELGGHSLLAAQALSRINSQLGIDMPIRLIFETPVLRAFAQALEGAGQALTEEGLAGIEQLMNELTEA

SEQ ID NO: 67718 - protein, 1663 aa, Pseudomonas putida
MPAHVQRLVFYRPSCHGLAIVDPYTAHAATLQLLQSPSGVPQMAFFTAASKADFQHQLQAALAQHISEQSLPQVALFAEQFFGIISLDELTQRRLSDLAGCTLSAWRIIERFDPEYPQVRVYNPDYERNGWQSTHTVVEVLHHDLPFLVDSVRTELNRRGYSIHTLQTTVLSVRRGAKGELLELLPKGTQGEGVRYESLMYLEIDRCANAAELTVLTREIEQVLAEVRVVVADFEPMKAKLREVVAQVEQTAFGPAQNEKGEVKAFLEWLLDNHFTFLGYEEFTVKGDADGGQMVYDEQSFLGLPRRLRVGLTAEELRIEDYAVAYLNEPLLLSFAKAALPSRVHRPAYPDYVSIRQLDADGKVIKEHRFMGLYTSSVYGESVHAIPYIRVKVAEVERRSGFDPKAHLGKELAQVLEVLPRDDLFQTPIDELFSTVMAIVQIQERNKIRVFLRKDPYGRFCYCLAYVPREIYSTEVRQKIQQVLMERLKASDCEFWTFFSESVLARVQLILRVDPKNRIDIDPQQLEREVIQACRSWHDDYSALVVENFGEAQGTNILADFPKGFPAGYRERFAAHSAVVDLQHVLNLSESKPLAMSFYQPLTQVGERILHCKLYHADTPLALSDVLPILENLGLRVLGEFPYRLRHANGREYWIHDFAFTYSEGLSLDIQQLNDTLQDAFIHIVRGDAENDAFNRLVLTAGLPWRDVALLRAYARYLKQIRLGFDLGYIASTLNNHTDIARELTRLFKTRFYLARKLTQDDLDDKQQRLEQAILSALDDVQVLNEDRILRRYLDLIKATLRTNFYQPDANGQNKSYFSFKFNPKLIPELPKPVPKFEIFVYSPRVEGVHLRFGNVARGGLRWSDREEDFRTEVLGLVKAQQVKNSVIVPVGAKGGFLPRRLPLGGSRDEIAAEGVACYRIFISGLLDITDNLKDGGVVPPANVVRHDDDDPYLVVAADKGTATFSDIANGIAIDYGFWLGDAFASGGSAGYDHKKMGITARGAWVGVQRHFRERGINVQEDPITVIGVGDMAGDVFGNGLLMSDKLQLVAAFNHLHIFIDPNPDPATSFAERKRLFDLPRSAWSDYDTSIMSEGGGIFPRSAKSIAISPQMKERFAIEADRLTPTELLNALLKAPVDLLWNGGIGTYVKASTESHADVGDKANDALRVNGNELRCKVVGEGGNLGMTQLGRVEFGLNGGATNTDFIDNAGGVDCSDHEVNIKILLNEVVQGGDMTEKQRNQLLGSMTDEVAGLVLGNNYKQTQALSLAARRARERIAEYKRLMADLEARGKLDRAIEFLPSEEQLAERLAAGQGLTRAELSVLISYSKIDLKEQLLKSLVPDDDYLTRDMETAFPPSLVSKFAEAMRRHRLKREIVSTQIANDLVNNMGITFVQRLKESTGMSPANVAGAYVIVRDIFHLPHWFRQIEALDYQVPAEIQLTLMDELMRLGRRATRWFLRSRRNEQDAGRDTAHFGPKIAQLGLKLDELLEGPTRERWMVRYQGFVDAGVPELLARMVAGTSHLYTLLPIIEAADVTGHEPAQVAKAFFAVGSALDLTWYLQEISNLPVENNWQALAREAFRDDIDLQQRAITISVLQMADAPQDMDARVALWSEQHRGMVERWRAMLDDLRNATGTDYAMYAVANRELVDLAMSGQAAVVPS

SEQ ID NO: 67719 - protein, 357 aa, Pseudomonas putida
MRPARALIDLQALRHNYRLARELTGAKALAVIKADAYGHGAVRCALALEAEADGFAVACIEEALELRAAGIKAPVLLLEGFFEASELALIAEHDLWCVVHSLWQLEAIEKTPLHKPLNVWLKLDSGMHRVGLHPKDYHDAYQRLLASGKVSRIVLMTHFARADELDADATSQQIAVFEAARQGLAAECSLRNSPGVLGWPQAPSDWVRPGLMLYGATPFEVAQAEAARLQPVMTLQSRVISVRELPAGEPVGYGAKFVSPRPTRVGVVAMGYADGYPRQAPNGTPVLVAGKRTQLIGRVSMDMLSIDLTDVPQATVGSPVEFWGKQVLASEVAAHAGTIPYQIFCNLKRVPRDYIGE

SEQ ID NO: 67720 - protein, 619 aa, Pseudomonas putida
MHLCSIDQAVEQVLSRLPAHIHMGLPLGLGKPNAFVNALYARVRELPERRLTIYTALSLGRPPLGDGLQRRFLEPFVERVFADYEELSYLADLRNDTLPPNIRVEQFFMQPGSLLHSESAQQDYVSSNYSHAARDINAKGLNLIAQLVAATPEKPVHLSLACNPDITLDLLPMIAKRRAAGETILMLGQVHAELPYMPGDAELPIDAFDLLLDEVEQRRLFSTPNMPVGIQDHCIGLHASSLVRDGGTLQIGIGAMGDAVAAALLARQGDNAGYRAVLKALDVGPWQALIEREGGLDTLTHGLYGCSEMFVNGLLVLAEAGLLRRPADEQGAILHGGFFLGPQAFYQRLREMPLEQRAQFVMTRISFINELYGQEALKRRQRRDARFINTAFGMTLLGAGVADQLEDGRVLSGVGGQYNFVAQGHALEGGRSILLLRSWREAGGEVTSNLFWTYGHCTIPRHLRDIVVTEYGIADLRGQTDSEVIARLLAVSDSRFQPGLIKQAKDAGKLADDFQLEARFTDNTPQRLEAIRAQHARLFPEYPMGTDFTAEERDLLRALNWLKSKFKLSEVLELGKAALDAPGPEGYESHLGRMQLGQPQGLKEELYQRLLLAGLAATR

SEQ ID NO: 67721 - protein, 477 aa, Pseudomonas putida
MAGKTLYDKLWEAHEVKRRDDGSSLIYIDRHIIHEVTSPQAFEGLRLANRKPWRIDANIATPDHNVPTTPERKGGIEAIVDQVSRLQVQTLDENCDEYGIVEFKMNDERQGIVHVISPEQGATLPGMTVVCGDSHTSTHGAFGALAHGIGTSEVEHVLATQCLVAKKMKNMLVRVEGQLPAGVTAKDIVLAVIGKIGTAGGNGHAMEFAGSAIRELSMEGRMTICNMSIEAGARVGLVATDATTVAYVEGRPYAPKGEQWKQAVESWKDLVSDDDAVFDTVVELDASQIKPQVSWGTSPEMVLAVDQRVPDPAAETDLVKRGSIERALKYMGLTANQAITDIKLDRVFIGSCTNSRIEDLRAAAEIAKGRKVAASVKQAIVVPGSGLVKAQAEREGLDKIFLEAGFEWREPGCSMCLAMNPDRLESGEHCASTSNRNFEGRQGAGGRTHLVSPAMAAAAAVAGHFIDVRELIQGSAA

SEQ ID NO: 67722 - protein, 408 aa, Pseudomonas putida
MTAVAEVSQARPLMPVEQALEQLLALAEAAPIRETENLPLAEAEGRVLATDLVASLDLPPWPNSAMDGYALRLADWQGQPLPVSQRIFAGHAPQPLQPGTCARIFTGAPVPEGADCVEMQENTEVLEDGRVRFLEALRTEQNIRPQGQETRKGEQVMSAGTRLGPIELGLAATLGHGRLDVVRKVKVAVLSTGDELVEPGLPLGPGQIYNSNRRLLVSWLQRLGCEVVDAGILPDDLARTRACLAELGGVDLILSTGGVSVGEADYLGAALREAGELALWKLAIKPGKPLTFGHFQGVPVIGLPGNPASTLVTFGLLTRPYLLRRQGVIDVTPLRFDMPAGFDWPKPGTRREYLRARIEQGRVRIYKNQSSGVLRSAAWAEGLVEVREGSTPKQGDIVPFIPFSELLG

SEQ ID NO: 67723 - protein, 295 aa, Pseudomonas putida
MQGRKAMLVLHGKQAMNEDVRSAVGDLRDSGWVLDVRVTWEAGDAQRLVAEALAAGYSHIVAGGGDGTLRDVAEAMGLAATQASLALLPLGTANDFAKAAGIPLEPASALALLNVAPQPIDLGQAGDQLFLNMATGGFGSQVTANTSEDLKKVLGAAAYLFTGLSRFSELQAASVELQGPGFHWQGDLLALGIGNGRQAGGGQVLCPEAMVNDGLLDVAILPAPQEVVGALRDLLGGDGLFVRARLPWVEIKSSQGLDINLDGEPLQAANLRFQARPAALHLHLPAGSPLLSHPG

SEQ ID NO: 67724 - protein, 490 aa, Pseudomonas putida
MIDLFSGLDAWVLVSLLLALTFVLAFEFINGFHDTANAVATVIYTKAMPPHLAVFFSGVFNFLGVLLGGVGVAYAIVHLLPVELLINVNTGHGLAMVFSLLAAAITWNLGTWYFGIPASSSHTLIGSILGVGLANALINDIPLGDGVNWQKAIDIAMSLVVSPMAGFAVAALVLIGLKWWRPLSKMHKTPEQRRKLDDKKHPPFWNRLVLVVSAMGVSFVHGSNDGQKGIGLIMLVLIGIVPAKFVLDLNSTTYQIERTRDATLHMSQFYQRNAATLGEFLALGKAKASDLPEQFSCNPQQTEPTIAALQTSLKGVTDYHSLDAEKRVEVRRYLLCLDDTAKKVGKLPGLDAREKSDLEKLRKDLTATTEYAPFWVIVAVALALGLGTMVGWKRVVLTVGEKIGKQGMTYAQGMSAQITAACAIGMANVFALPVSTTHVLSSGVAGTMVANKSGLQGGTVKTILLAWVLTLPASMGLAAGLFWLASKAIG

SEQ ID NO: 67725 - protein, 283 aa, Pseudomonas putida
MRTYRLVIACPDRVGIVAKVSNFLALYNGWINEASHHSDEQSGWFFMRHEIRAESLPFGIEAFREAFAPIAEEFSMTWRITDSAQKKRVVLMASRESHCLADLLHRWHTDELDCEIPCVISNHNDLRSMVEWHGIPFFHVPVDPKDKAPAFAEVSRLVQEHAADVVVLARYMQILPPQLCRDYAEKVINIHHSFLPSFVGAKPYHQAALRGVKLIGATCHYVTEELDAGPIIEQDVVRVSHADSIEDMVRFGRDVEKMVLARGLRYHLEDRVLVHGNKTVVFD

SEQ ID NO: 67726 - protein, 313 aa, Pseudomonas putida
MADSAFFCPLSHEGILAVRGSDAGKFLQGQLTCNINYLSQEHASLGARCMVKGRMQSSFRIVPEGNGYLLAMASELLDAQLADLKKYAVFSKATLTDESTAWARFGLQGGDAALQALGLVVPAAAGSTVRHDGLIAIAVSAGRVELWVPVADAEPVRQALAAALPEGTLNDWLLGQIRAGIGQVMGPTRELFIPQMINLQAVDGVSFKKGCYTGQEIVARMQYLGKLKRRQYRLALDQQAIPAPGAEIFSPTHGSSVGEVVIAAGNGTGCELLAVLSAEAVEDGHLHLGSLEGPRLQVLTLPYELDRDREIQR

SEQ ID NO: 67727 - protein, 484 aa, Pseudomonas putida
MSIRRTKIVATLGPASNSPEVIEQLILAGLDVARLNFSHGTPDEHKARARLIRDIAAKNGRHVALLGDLQGPKIRIAKFANKRIELKIGDKFTFSTAHPLTEGNQDIVGIDYPDLVKDCGVGDELLLDDGRVVMRVETATADALHCVVIIGGPLSDHKGINRKGGGLTAPALTEKDKADIKLAAEMDLDYLAVSFPRDASDMEYARKLRDEAGGSAWLVAKIERAEAVADDETLDKLIAASDAVMVARGDLGVEIGDAELIAIQKKIIQHARRNNKAVIVATQMMESMIQNPMPTRAEVSDVANAVLDNTDAVMLSAESAAGSYPIEAVQAMARICLGAEKHPTSQKSSHRLHTTFQRCDESIALAAMYTANHFPGVKAIIALTESGYTPLIMSRLRSHVPIFALSPHRATQARASMFRGVYPIAFDPAALPADKVSQAAVDELLKRGLVEQGDWVILTKGDSYHTIGGTNGMKILHVGDPLVG

SEQ ID NO: 67728 - protein, 268 aa, Pseudomonas putida
MNKLAELVQAQLLDAIEKDDLVLPTLPEVALSIREAAEDSEISVAALSKVIGRDAALSARLIKVVNSPLLRAAVEVTDLHTAITRLGINYSCNLAIGLVIEQIFHARSPAVEQKLRDIWASSLEVAGISYEICRRFTPLKPDQATLGGLVNQIGALPVLIYAEEHNELLSDPVCLHYVIEQLQPVLGDKILKAWEFPEQLVHLPSQVHDLDRQTDKIDYIDIVQIARCISQRGRHRPLAALPAYRHLGLPFGTELEVDELLEARSMLR

SEQ ID NO: 67729 - protein, 504 aa, Pseudomonas putida
MDTLSYLGQGFGIALSPYNLVTALSGTLIGTVVGLLPGLGPINGVALLIPIAFALGLPPESALILLAAVYLGCEYGGRISSILLNIPGEASTVMTTLDGYPMARQGLAGVALSLSAWSSFIGAFIATCGMVLFAPLLAKWAIAFGPAEYFVLMVFAIVALGGMAGDKPLKTFIAALIGLFLSAVGIDANSGVYRFTGDSVHLADGIQFVVLVLGLFSISEILLLLEKTHHGHQAVKATGRMLFNFKEAASVFLVNIRCGLLGFIMGVLPGAGATLASAVAYMTEKRMAGESGKFGKGDARGLAAPETAIGASCCGALVPMLTLGVPGSGTTAVMIGALTLYNITPGPLLFEQQPDIVWGLIASLFVANIMLVILNIPMIRIFTRILAVPNWALVPVIAIITAIGVYAVHATTFDLFLMVGIGIMGYIMRKLDFPLSPILLGFILGGLMEQNLRRALSISNGELGILWSSPISMGIWALVVVMLALPLLRIWRKRSLQRRALADA

SEQ ID NO: 67730 - protein, 530 aa, Pseudomonas putida
LSLGYCLGMPCHQRRQPCRESPAPVQINVVAINDLHGYLEPNPQDYAGAQGATRLTYGGIATLGAMLDELRTQDPDLLFIGAGDLIGGSPAISALWADEPVLEALNAMGMVVSASGNHELDAGKAEFLRQIHGGCESTRPEKACKFRGNYPGSGFPYIASNLIDTTTGKRLLPAYHIEQVKGVKIAFVGAVPRNMEKVVSARAFAGLKATDEAQAINDVIPELKAKGVNAIIAVMHQGGDTAEPFDTQDCSQLSGTIVDVAKRLDPAVDAVISGHSHASYQCKVGDLSITQAGKYGHFLTQLKLQVTPGTHHVTNITARNIPADPQNYLPNAQLAGLLEEVRQRSGEKLLEPIGRISTAELDRKENAAGETTLGNLVTDAQLAMTQAFNTQVAFLNLGGLRSDLIQPADSDLTYEQLFAVQPFNNPLVVQELTGKQITELLNLQWNRGSFNPLQVSKGFHYEWDGSRPVGSRVVEGSVRLHGKPVEPLTHYRVVSNLFLADGGGGLATFKEGRRRQDTGITDLEALVEYV

SEQ ID NO: 67731 - protein, 230 aa, Pseudomonas putida
MRLDRFLANLPSYNRQNVRLMLAQRRVRVDGQVVSDPLTDVREFSRVELDEQLLQAGRPARYLMLYKPTGCVSATHDPQHRTVLDLLPAALRDDLHIAGRLDFNTTGLMILTNDGQWSRRLTQPATKLPKHYLVDTEDEIGEHYVAKFREGFYFAFEDLTTQPAQLDILGPHRARLAIVEGRYHQVKRMFGHFNNKVIGLHRESMGAIRLDPGLAPGEYRELTANEIATV

SEQ ID NO: 67732 - protein, 758 aa, Pseudomonas putida
MLGLAMGLASQAALAAPTAPPLQDKQAFIEHLISQMTEAEKIGQLRLISIGPEMPRDKIREEIAAGRIGGTFNSRTAPENRPMQDAAMRSRLKIPMFFAYDTVHGERTIFPIGLGMAATWDMEAVAKVGRTAAIEASADALDMTFAPMVDIARDPRWGRTSEGFGEDTYLTSRIGQVMVRSFQGSSPANPDSIMAIVKHFALYGAVEGGRDYNTVDMSLPKMYNDYLPPYRAALDAGAGGVMVALNSINGVPATSNTWLMNDLLRKEWGFKGVTISDHGAIQELIRHGVARDGREAAKLAIKAGIDMSMNDTLYGEELPGLLKSGEVTQRELDQAVREVLGAKYDMGLFKDPYVRIGKAETDLKDYYGNDRLHREAARDVARRSLVLLENRNQTLPLKKAGTIALVGPLADAPIDMMGSWAADGKPVHSVTVREGLRRAVEGKAKLVYAKGSNVTGDKAIFDYLNFLNFDAPEIVDDPRPPAVLIDEAIKAAKQSDVVVAVVGESRGMSHESSSRTTLEIPASQRELIKALKATGKPLVLVLMNGRPLSISWEREQADAILETWFAGTEGGNAIADVLFGDYNPSGKLAITFPRSVGQIPMYYNHTRIGRPFTPGKPGNYTSQYFEEPNGPLYPFGYGLSYSSFELSGLNLSSKDLKRGDTLDAKVTVKNTGKVAGETVVQLYLQDVSASMSRPVKELKNFQKLMLEPGETRTLTFRISEDDLKFYNGQLQRVAEPGEFNVQVGLDSQAVQQQSFELL

SEQ ID NO: 67733 - protein, 201 aa, Pseudomonas putida
MYYYEPAKGHGLPHDPFNAIVGPRPIGWISSQDREGRLNLAPYSFFNAFNYIPPIIGFCSVGRKDSLNNIEQTGEFVWNLATRPLAEQMNLSCAPVAAEVNEFELSGLTAAPSSIVKVPRVGETPVAFECKVSQIVQLKRADQEQVPSWLILGEVVAVHIAEHLLNNGIYDTAAAEPILRGGGPADYFELGNLFKMARPPA

SEQ ID NO: 67734 - protein, 178 aa, Pseudomonas putida
MNATPEKADDLIVVGKIFSVHGVRGEVKVYSFTDPIENLLDYPRWTLRHEGKVKQVELVSGRGSQKGLVVKLKGLDDRDEARLLSGYEICIPRSLLPNLAADEYYWYQLVGLKVINQDEQLFGKVDHLLETGANDVMVVKPCAGSLDDRERLLPYTEQCVLAIDLEAGVMRVEWDADF

SEQ ID NO: 67735 - protein, 269 aa, Pseudomonas putida
MFSSPSLIPNLIAAGLYIAAAIYQGSYLSQGRKAEKRLLGLLGAIAVLAQAGALFFQLITPLGLSLDFFSAASLIAVAVISLTLLACLRIPVENLLVLLFPLGAVTALLAQFAPPGTVPLINEEPGILAHILLSILAYGLFTIAVFQSLLLLLQDRQLKNKHPSGLIRNFPPLQTMESLLFGFLWAGWCLLSLSLISGWLFLDNLFAQHLAHKTLLACVAWVVFSVLLWGRTRLGWRGHMAIRWTLSGFCLLMLAYFGSKLVREFILHI

SEQ ID NO: 67736 - protein, 418 aa, Pseudomonas putida
MSISLPARQLLPGLLAMSCALPAFAANEGGFIEDAKATLNLRNFYINRNFVDPAHPQGKAEEWTQSFILDARSGFTQGTVGFGVDVLGLYSVKLDGGKGTTNTHLLPVHGDGRPADDFGRLGVALKAKLSETELKVGEWMPVLPILRSDDGRSLPQTFRGGQLTSREIAGLTLYAGQFRGNSPRNDASMEDMSLNGKAAFTSDRFNFGGGEYTFNDKRTMIGLWDAQLKDIYRQQYLNLTHSQPLGDWTLGANLGYFIGKEDGAERAGKLDNRTASALLSARYQGHTFYVGLQKVSGDDAWMRVNGTSGGTLANDSYNSSFDNAKERSWQVRHDFNFATVGVPGLTLMNRYIKGDNVTVGSVDDGKEWARETELAYVVQSGSFKDLSLKWRNSTMRRDFSTNAFDENRLIVSYPLNLL

SEQ ID NO: 67737 - protein, 137 aa, Pseudomonas putida
MPNIIRIAAALLIDPQGRTLLVRKRGTEAFMQPGGKIDAGETPVQALVRELQEELGLRIDPAQAMHLGQFSAPAANEPGFEVQAELFRVDSAAAVVPAAEIEEVVWLTADQAPVMPLAPLTRDLILPLYRQALNAPR

SEQ ID NO: 67738 - protein, 333 aa, Pseudomonas putida
MTLRIAINGFGRIGRNVLRALYTQGYRQDLQVVAINDLGDSTMNAHLLKYDSVHGTFDATVEADHESLTVNGDRIAVSAIRNPAELPWKAEAIDVVFECTGLFTDRAKAAAHLAAGAGKVIVSAPAKGADATVVYGVNHDILRASHQIISNASCTTNCLAPIAQVLHREFGIEQGLMTTIHAYTNDQVLTDVYHSDPYRARSATQSMIPSKTGAAEAVGLVLPELAGKLTGMAVRVPVINVSLVDLTVNLKREATAEQVNQLFLEASKHSKVLGYNALPLVSCDFNHNPLSSIFDANHTRANGRMLKVLAWYDNEWGFSNRMLDNCLALHRAG

SEQ ID NO: 67739 - protein, 662 aa, Pseudomonas putida
MPITFQALFAPSSLALKFAIKTLLGGGLALWLAMRWGLEQPSWALMTAFIVAQPLSGMVVQKGLARLAGTLVGTVMSVLFIGLFAQTPGLFLLTLALWLALCTAASTQLRSAWAYAFVLAGYTAAIIALPAIDHPLQVFDQAVARCTEICLGIFCATASSALLWPMRVEQQLGGQARQAWQNGLQAASAMLGGEDEARKGLLESLGRIVAIDSQREHAWFEGNRGRQRARAIRGLSQKLMVLLRISRSVRRQWRQLDEGEVEHLTPWLQEVRTLLAQPDQPSLLLLRQRIWDAAHDEQISSAEHFCLARMALLLDYAMAASQALEDVEAGRAPKDVSQGLAAHRDWSLALLFGSRSALAFLVMSGFWLATAWPSAPGGLVLTCVVCSLFASRENGAQIGLSFLRGIFLAIPAAFVVGQIMLPQWSSFAMLCLGMGVPLFLGALGMAHPRTGATATSYCLHFIVLVSPLNAMQFGVATMLNSALAMLVGVSAAVMAFRLLVFRHPAWLGRRLRAATQNDLVRLTRRDLRGADSWFGGRMADRLMQLARHASELPEGERKRWDDGLHGLDIGDELVHLRMCLAVAQAPLGRAEREYLQHVEAALAKGPAAGRGQLLDAASEQFIAALRRLPASDPLRLAEGAVLQLQKSWGKWCRWQEDTHGFA

SEQ ID NO: 67740 - protein, 289 aa, Pseudomonas putida
MRAAVRILVTLCVVALAVLAGYQLWQYYMLTPWTRDARVRADVVVIAPDVSGWVRELKVHDNQQVKAGDLLMSIDRERFQAALDQASAVTETRAQQLRLREREAARRTALGPEAISAELRENAQINAAIARGELHEAEAQLQVARINLARSEVRAPRSGHITNLRLAEGNYVNTGESVMALVDDSTFYIQAYFEETKLPRIRVGDTVKVWLMGTGEPMQGHVESISRGITDRNSNPDSQLLPEVEPTFNWVRLAQRIPVRIRLDQVPEGLTLSAGMTASVQVHEDREPQ

SEQ ID NO: 67741 - protein, 1299 aa, Pseudomonas putida
MLILRGAPALSAFRHGKLLEQLSQKVPAVTGLYAEFAHFADVDGELTADQQQVLGRLLKYGPSVPVQEPTGRLFLVVPRLGTISPWASKASDIAHNCGLQSIQRLERGIAYYVAGTLSDADAELIAAELHDRMTQRVLGQLEQAADLFSHAQPKPMTSVDILAGGRDALAKANIDLGLALAEDEIDYLVNAFQGLKRNPNDIELMMFAQANSEHCRHKIFNASWDIDGQAQEKSLFGMIKNTYQMHNEGVLSAYKDNASVIVGNVAGRFFPNPETRQYGAVQEPVHILMKVETHNHPTAIAPFSGASTGSGGEIRDEGATGRGAKPKAGLTGFTVSNLRIPGFEQPWEQAYGKPERIVDALDIMIEGPLGGAAFNNEFGRPALTGYFRTFEQAINTPHGEEVRGYHKPIMLAGGMGNIREDHVQKGEITVGAKLIVLGGPAMLIGLGGGAASSVATGASSADLDFASVQRENPEMERRCQEVIDRCWQLGDENPIAFIHDVGAGGISNAFPELVNDGGRGGRFELRNVPNDEPGMAPHEIWSNESQERYVLAVSAVDFERFKAICERERCPFAVVGEATEEQHLTVSDSHFGNTPVDMPLDVLLGKPPRMHRSVTREAELGDDFDPSELDLDSAVQRVLNHPAVASKSFLITIGDRTITGLVARDQMVGPWQVPVADCAVTATSFDVYTGEAMAMGERTPLALLDAPASGRMAIGETLTNLAASRIEKLSDIKLSANWMSAAGHPGEDARLYDTVKAVGMELCPELGITIPVGKDSMSMKTKWSDEGVEKSVTSPMSLIITGFAPVTDIRKTLTPQLRMDKGETDLILIDLGRGKNRMGASILAQTYGKIAAQAPDVDDAEDLKAFFAVIQGLNADGHLLAYHDRSDGGLVTTVLEMAFAGHCGLDLQLDPLTDSKGEVPAILFNEELGAVIQVRQDATPDVLAQFSAAGLGEECVAVIGKPVNNAEVTISLNGEVLFDDDRRMLQRQWAETSYQIQRLRDNADCADQEFDLLLEEDNPGLSVKLGFDVNDDIAAPYIKKGVRPQVAILREQGVNGQVEMAAAFDRAGFAAIDVHMSDILAGRVDFEAFKGLVACGGFSYGDVLGAGEGWAKSALFNARARDAFQAFFERTDSFALGVCNGCQMMSNLHELIPGTEYWPHFVRNRSEQFEARVAMVEVQKSNSIFLQGMAGSRMPIAIAHGEGHAEFASEEALLEADVSGCVALRYVDNHGKVTEAYPANPNGSPRGITGLTSRDGRVTIMMPHPERVFRAVQNSWRPDEWQEDAALMRMFRNARVWVN

SEQ ID NO: 67742 - protein, 148 aa, Pseudomonas putida
MLGLAAAVSQDDTMQRLLKAPRLTSAEKAATFIDVCGDKFNAQAQNFIHVAAENDRLLLLPEIAALFDLYKAEQEKSVDVEVTSAFALNQEQQDKLAKVLSARLGQEVRLHASEDASLIGGVVIRAGDLVIDGSVRGKIAKLAEALKS

SEQ ID NO: 67743 - protein, 514 aa, Pseudomonas putida
MQQLNPSEISEIIKGRIDNLDVSSQARNEGTVVSVSDGIVRIHGLADVMYGEMIEFPGSVYGMALNLEQDSVGAVILGAYDTLAEGMSAKCTGRILEVPVGKELLGRVVDALGNPIDGKGPLGNTQTDAVEKVAPGVIWRKSVDQPVQTGYKSVDAMIPVGRGQRELIIGDRQIGKTAMAIDAIINQKDSGIFCVYVAVGQKRSTVANIVRKLEETGALANTIVVVASASESAALQFLAPYAGCTMGEFFRDRGEDALIVYDDLSKQAVAYRQISLLLRRPPGREAYPGDVFYLHSRLLERASRVSEEYVEKFTNGAVTGKTGSLTALPIIETQAGDVSAFVPTNVISITDGQIFLESAMFNSGIRPAVNAGVSVSRVGGAAQTKIIKKLSGGIRTALAQYRELAAFAQFASDLDEATRKQLEHGQRVTELMKQKQYAPMSIADMALSLYAAERGFLIDVEVSKIGSFEQALIAFFNRDHAELMAKINVKGDFNDEIDAGLKAGIEKFKATQTW

SEQ ID NO: 67744 - protein, 521 aa, Pseudomonas putida
MHRLSLLLPFLTWLPRQSGRSLRQDLLVGLSGAILALPQSIAYALIAGLPAEYGLYAAIVPVLIACLWGSSWYLICGPTAAISIVLYASISPLAVAGSADYITLVLLLTFLGGIFQLLLGLLRFGALVNFVSHSVVLGFTLGAAIVIALGQLPNLLGMALPSQATALMTVQDLASHAGEVDLPSLLLGLATVVIGAAFKLWRPRWPSLLISLILVSLLAWLLPGFFGHVPRVAAFTGQLPPFSPLPLLDMELMLRLLPSAVAVGMLGLVTSLSIARSLSARSEQLIDPDQEIRAQGLSNIAGAFFSGYLSAGSFTRSGLSYEAGARSPMAGVFSALWVALFAVTGAGLIAHLPIPAMAGSILLICWGLVDHRGIRALFRVSRSEFLVMALTAAATLLLELQTAIYAGVLASLFFYLKRTSRPRIQQSREGDADVLRVGGSIFFGAAHYLQVRLQRCQGPHVVIDARQVNFIDYSGVDMLHREARRLRRLGGSLTLHRARPQVIEELQKLEGVELCPIRFEE

SEQ ID NO: 67745 - protein, 586 aa, Pseudomonas putida
MHAISFIQDLAVIMLVAGVVTILFHRFKQPVVLGYIVAGFIIGPHTPPFGLIHDEDTIKTLAELGVIFLMFCLGLEFSLRKLFKVGATAFIAAFLEIVLMIWIGFEIGRWFGWSTMDSLFLGAILAISSTTIIVKALNDLKMKNERFAQLIFGVLIVEDILGIGIIALLSGIAVSGTVSSGEVFSTVGKLSLFMVVALVIGILLVPRLLAYVARFESNEMLLITVLGLCFGFCLLVVKLEYSMVLGAFLIGAIMAESRQLLKIERLIEPVRDLFSAIFFVAIGMMIDPEVLIDYAWPIVVITLAVVLGKMLSCGMGAFIAGNDGRTSLRVGMGLSQIGEFSFIIAALGMTLQVTSDFLYPVAVAVSAITTLLTPYLIRAADPLSQKLGNVVPARLARVLSLYGEWLRNIQPQGESAMLAAMIRRILLQVGVNLALVIAIFFSGGYFAGRLGNWLSEWVSDVSHQKAVIWGAALLLSLPFLIAAYRKLKALSMLLAEMGVKPEMAGRHTQRVRRVIAEVIPLLSLLVIFLLLSALSASILPTSELLLVIAVVAAVVVALLWRWLIRVHTRMQIALLETLENSRENSH

SEQ ID NO: 67746 - protein, 436 aa, Pseudomonas putida
MNPRLAAARALAAVLSGKASLNSSLPAQLDKVDERDRGLTQDLAFGTARWQPRLDLLAAQLLQKPFKAADADVQALLLVGLYQLFYTRIPAHAAIGETVGCADKLKKPWAKGLLNAVLRRAQREGEELLAGMERDPVVRTAHPRWLQKALKAFWPEQWEAICAANNAHPPMILRVNRRHHSRDAYLALLAEAGIGASACQYSRDGIVLAEACDVRGLPGFAEGWVSVQDEAAQLSADLLELAPGQRVLDACCAPGGKTCHLLEAEAGLANMVAIDLEAKRLTRVRENLDRLQLDAELIACDARDTASWWDGKPFQRILLDAPCSATGVIRRHPDIKMTRQADDIPALATLQGELLDALWPTLEVGGMLLYATCSTLPTENTEVIKAFLARTPGARELDLATEAGLRQPHGRQLLAQEGGHDGFYYAKLIKIAASRG

SEQ ID NO: 67747 - protein, 457 aa, Pseudomonas putida
MKIIILGAGQVGGTLAEHLASEANDITVVDTDGDRLRDLGDRLDIRTVQGRGSLPTVLRQAGADDADMLVAVTNSDETNMVACQVAYSLFHTPTKIARVRESSYLTREELFDNDHIPVDVLISPEQVVTNYIKRLIEHPGSLQVIDFAEGKAQLVAVKAYYGGPLVGQQLRQIRAHMPNVDTRVAAIFRRDRPITPRGDTVIEADDEVFFIAAKKDIRAVMGELRRIDETNKRIVIAGGGQIGERLAEAIESRYQVKIIEMSPARCRHLSDTLESTVVLQGSASDKDLMLEENIADADIFLALTNDDEANIMSSLLAKRLGAGKVMTIINNPAYVDLVQGGDIDIAISPQLATIGTLLAHVRRGDIVSVHSLRRGAAEAIEAVAHGDSKSSKVVGKAIEDITLPPGTTIGAIIRDEEVMIAHDDTMIESGDHVILFVVDKKHIRDVEKLFHVGLSFF

SEQ ID NO: 67748 - protein, 315 aa, Pseudomonas putida
MSQPTPAVRTFQDLILALQNYWAAQGCVVLQPYDMEVGAGTFHTATFLRAVGPETWNAAYVQPSRRPADGRYGENPNRLQHYYQFQVVLKPNPANFQELYLGSLKAIGLDPLVHDIRFVEDNWESPTLGAWGLGWEIWLNGMEVTQFTYFQQVGGIECYPVTGEITYGLERLAMYIQGVDSVYDLVWADGPFGKVTYGDVFHQNEVEQSTYNFEHANVDKLFELFDFYESEANRLIKLELPLPTYEMVLKASHTFNLLDARRAISVTERQRYILRVRTLARDVAQSYLQARARLGFPMATPELRDEVLAKLEAAQ

SEQ ID NO: 67749 - protein, 256 aa, Pseudomonas putida
MSILQAIRIFLFYLLLGTSSLLWCSLSFFVAPFLSFPKRYKFINVYWCRCALFLVRTILGIDYKITGAENVPAEPCVILSNHQSTWETFFLSQYFSPLSQVLKRELLYVPFFGWAMAMLRPIAINRDNPKEALRQVASKGDELLKQKTWVLIFPEGTRVPFGTIGKFSRGGTALAVNAGLPVLPIAHNAGKFWPKTGWGKRAGTIEVVIGEPMYANGTGPRAIAELNDRAAAWNEATQRAMGSLPPAAEKPQEQMA

SEQ ID NO: 67750 - protein, 602 aa, Pseudomonas putida
MSKKIHVTDTILRDAHQSLLATRMRTEDMLPICDKLDKVGYWSLEVWGGATFDACVRFLKEDPWERLRKLRAALPNTRLQMLLRGQNLLGYRHYSDDVVKAFVAKAAVNGIDVFRIFDAMNDVRNLRVAIEAVKAAGKHAQGTIAYTTSPVHTIEAFVNQAKQMEAMGCDSVAIKDMAGLLTPFATGELVKALKAEQSLPVFIHSHDTAGLAAMCQLKAVENGADHIDTAISSFAWGTSHPGTESMVAALKGSEFDTGLDLELLQEIGLYFYAVRKKYHQFESEFTAVDTRVQVNQVPGGMISNLANQLKEQGALNRMNEVLAEIPRVREDLGFPPLVTPTSQIVGTQAFFNVLAGERYKTITNEVKLYLQGGYGKAPGVVNEQLRRQAIGSEEVIDVRPADLLKPEMAKLRSDIGALARCEEDVLTFAMFPDIGRKFLEEREAGTLTPEVLLPIPEAGAVAAPGGEGVPTEFVIDVHGETYRVDITGVGVKAEGKRHFYLSIDGMPEEVVFEPLNEFVSGGGSKRKQATDPGHVSTTMPGNIVDVLVKEGDMVKAGQAVLITEAMKMETEVQAAIAGKVVAIHVAKGDRVTPGEILIEIEG

SEQ ID NO: 67751 - protein, 81 aa, Pseudomonas putida
MGIIGTIFIGLIVGLLARFIKPGDDSMGWIMTILLGIAGSLLATYGGQALGIYQAGQAAGFFGALVGAVVLLVIYGFIKKR

SEQ ID NO: 67752 - protein, 560 aa, Pseudomonas putida
MDIKRTILIAALAVVSYVMVLKWNDDYGQAALPTQNTAASTVAPGLPDGVPAGNNGASADVPSANAESSPAELAPVALSKDLIRVKTDVLELAIDPVGGDIVQLNLPKYPRRQDHPNIPFQLFDNGGERVYLAQSGLTGTDGPDARASGRPLYAAEQKSYQLADGQEQLVVDLKFSDNGVNYIKRFSFKRGEYDLNVSYLIDNQSGQAWNGNMFAQLKRDASGDPSSSTATGTATYLGAALWTASEPYKKVSMKDIDKGSLKENVSGGWVAWLQHYFVTAWIPAKSDNNVVQTRKDSQGNYIIGYTGPVISVPAGGKVETSALLYAGPKIQSKLKELSPGLELTVDYGFLWFIAQPIFWLLQHIHSLLGNWGWSIIVLTMLIKGLFFPLSAASYRSMARMRAVAPKLAALKERFGDDRQKMSQAMMELYKKEKINPLGGCLPILVQMPVFLALYWVLLESVEMRQAPWILWITDLSIKDPFFILPIIMGATMFIQQRLNPTPPDPMQAKVMKMMPIIFTFFFLWFPAGLVLYWVVNNCLSISQQWYITRRIEAATKKAAA

SEQ ID NO: 67753 - protein, 622 aa, Pseudomonas putida
MIVIGGGHAGTEAALASARMGVKTLLLTHNVETLGHMSCNPAIGGIGKSHLVKEIDALGGAMALATDKSGIQFRVLNNRKGPAVRATRAQADRAIYKAVVREILENQPNLWIFQQSCDDLIVEQDQVKGVVTQMGLRFFAESVVLTTGTFLGGLIHIGLQNHSGGRAGDPPSIALAHRMRELPLRVGRLKTGTPPRIDGRSVDFSVMTEQPGDTPIPVMSFMGNAEMHPRQVSCWITHTNARTHEIIASNLDRSPMYSGVIEGVGPRYCPSIEDKIHRFADKESHQVFIEPEGLNTHELYPNGISTSLPFDVQLELVRSIRGMENAHIVRPGYAIEYDYFDPRDLKYSLETKVIGGLFFAGQINGTTGYEEAGAQGLLAGTNAALRAQGRDSWCPRRDEAYIGVLVDDLITLGTQEPYRMFTSRAEYRLILREDNADLRLTEKGRELGLIDDQRWAAFCAKRDGIEREEQRLKSTWVRPNTEQGQAIVDKFGTPLSHEYSLLNLLARPEIDYAGLIEATGGEAIDPQVAEQVEIRTKYAGYIDRQQDEIARLRASEDTRLPVDIDYTTISGLSKEIQGKLSQTRPQTLGQASRIPGVTPAAISLLLIHLKKRGAGRELEQSA

SEQ ID NO: 67754 - protein, 251 aa, Pseudomonas putida
MGFWAFHLDTLGWSVALGLIFLLIFRMAAKKATSGQPGGLQNFVEVMVDFVNGSVKDSFHGRSPVIAPLALTIFVWVFLMNAVDLIPVDWIPQLAILISGDPHIPFRAVSTTDPNATLAMAFCVFALIIFYSIKVKGLGGFIGELTLHPFGSKNIFVQILLIPVNFLLEFVTLIAKPISLALRLFGNMYAGELVFILIAVMFGSGLLWLSGLGVVLQWAWAVFHILIITLQAFIFMMLTIVYLSMAHEDNH

SEQ ID NO: 67755 - protein, 281 aa, Pseudomonas putida
MELTMQQDSHTHGIDMSALGRNKQSLRMAEETVAIEVPGLSLFYGDKQALFDVQMNIPKQRVTAFIGPSGCGKSTLLRTFNRMNDLVDGCRVEGAINLYGNNIYRKGEDVAELRRRVGMVFQKPNPFPKTIYENVVYGLRIQGINKKRVLDEAVEWALKGAALWDEVKDRLHESALGLSGGQQQRLVIARTIAVEPEVLLLDEPCSALDPISTLKVEELIYELKSKYTIVIVTHNMQQAARVSDYTAFMYMGKLVEFGDTDTLFTNPAKKQTEDYITGRYG

SEQ ID NO: 67756 - protein, 298 aa, Pseudomonas putida
MKRHNAPPAGQVGRCACWRTFMFPAMLNVGLGLRRGLLPELLAMEAGAVDFLECAPENWIAVGGAYGKGLAQLAERFAVTCHGLSLSLGGSAPLDRHFLEQTRQFLDRYQVRLYSEHLSYCSDDGHLYDLMPIPFTDEAVRHVAARIRQAQEQLERRIAVENISYYAAPYQAMSELDFIQAVLEEADCDLLLDVNNVYVNACNHGYDAQQFLAGLPQARVAGMHVAGHYDEAPDLKVDTHGAAVKEDVWALYASACARFGVQPTVLERDFNYPPLAELLAETARMRAVQCAAGGQADE

SEQ ID NO: 67757 - protein, 640 aa, Pseudomonas putida
MPVITLPDGSQRSFDHAVSVAEVAASIGAGLAKATVAGKVDGKLVDACDLISNDATLQIITPKDEEGLEIIRHSCAHLVGHAVKQLYPTAKMVIGPVIDEGFYYDIAYERPFTPEDMAAIEKRMMELIEKDYDVVKKMTPRAEVIDVFKARGEDYKLRLVEDMPDEQAMGLYYHEEYVDMCRGPHVPNTRFLKAFKLTKLSGAYWRGDAKNEQLQRVYGTAWADKKQLAAYIQRIEEAEKRDHRKIGKQLDLFHLQEEAPGMVFWHANGWTVYQVLEQYMRGVQRENGYQEIKTPQVVDRILWERSGHWSNYAENMFTTSSESRDYAVKPMNCPCHVQVFNQGLKSYRDLPLRLAEFGACHRNEPSGALHGIMRVRGFVQDDAHIFCTEDQVKKEAADFIKLTLDVYKDFGFSDIAMKLSTRPAKRVGSEELWDRAETALADALNESGLEWEYQPGEGAFYGPKIEFTLRDCLGRNWQCGTLQYDPNLPERLDASYIAEDNSRVRPVMLHRAILGSFERFIGMLIEHYAGVFPAWLAPTQAVIMNITDKQADFALEVEKSLNGSGFRAKSDLRNEKIGFKIREHTLLKVPYLLVIGDREVETQTVAVRTREGADLGSMPVAQFVELLTQAVSRRGRQESE

SEQ ID NO: 67758 - protein, 69 aa, Pseudomonas putida
MRSSNMPKMKTKSGAAKRFLKTASGFKHKHAFKSHILTKMSTKRKRQLRGASLLHPSDVAKVERMLRVR

SEQ ID NO: 67759 - protein, 338 aa, Pseudomonas putida
MENLDALVSQALEAVERAEDINALEQIRVNYLGKKGELTQVMKTLGNLPAEERPKVGALINDAKERVTVVLNARKAAFEEAELSARLAAECIDVTLPGRGQATGGLHPITRTLERIEQFFTHIGYGIAEGPEVEDDYHNFEALNIPGHHPARAMHDTFYFNANMLLRTHTSPVQVRTMESTQPPIRIVCPGRVYRCDSDITHSPMFHQVEGLLIDRDINFADLKGTIEEFLRVFFEKELAVRFRPSFFPFTEPSAEVDIQCVMCSGNGCRVCKQTGWLEVMGCGMVHPNVLRMSGIDPEEFQGFAFGMGAERLAMLRYGVNDLRLFFDNDLRFLAQFR

SEQ ID NO: 67760 - protein, 793 aa, Pseudomonas putida
MKFSEQWLRGWVNPQVSRDELVARLSMAGLEVDSVTPAAGQFSGIVVGEILATEQHPDADKLRVCQVSSGQETFQVVCGAPNARPGIKIPFAMIGAELPGDFKIKKAKLRGVESFGMLCSAAELQISEENDGLLELAADAPVGEDIRTYLSLDDASIEIGLTPNRGDCLSIAGLARDVSALYDTPVTRPVVPAVAAAHDEVRPVEVSAPAACPRYLGRVIRNVDLSKPTPLWMVERLRRSDVRSIDAAVDITNYVMLELGQPMHAFDLAEINGGIRVRMAEEGEKLVLLDGQEVALRADTLVIADHTRALAIAGVMGGEHSGVNTEKTRDLFLESAFFEPISVAGKARSYGLHTDASHRYERGVDSQLAREAMERATQLLLDIVGGEAGPVVEAVSEQHLPQVAPVTLRAERITQMLGMEMDPAQVEQLLNALELTTTKSGEGQWTVSVPSHRFDISLEVDLIEELARLYGYNNLPVRYPQARLAPQGKPETRGDLPTLRRLLVARGYQEAITYSFIDPKLFELFSPGVEPLLLANPISSDMAAMRASLWPGLVKALQHNLNRQQDRVRLFESGLRFVGQLGDLQQQPMIAGVITGSRLPEGWANGRDGVDFFDVKADVEALLGYSGALSDFTFSAGKHPALHPGQTAVIERDGKLVGYLGAIHPELAKALGLDRPVFLFELVLGDVVEGRLPKFSELSKFPETRRDLALIAGRDVASSAVLELIRDNAGEWLTDLRLFDVYQGKGIDPDRKSLAVGLTWQHPSRTLNDDEVNTTLQNILTSLEQRLNTTLRK

SEQ ID NO: 67761 - protein, 344 aa, Pseudomonas putida
MPQSKLINRRVVLASRPHGAPLEANFRIEQSPIPEPAEGQVLLRTVYLSLDPYMRGRMSDAPSYAAPVEIGGVIVGGTVCRVEASKNPAYKVGDWVLSFAGWQDYTLSDGSDLTALGESPAHPSYALGIFGMPGFTAYMGLLDIGRPQAGETLVVAAATGPVGATVGQIGKIKGCHVVGVAGGAEKCRHAVEVLGFDACLDHRAPDFAEQLAKACPAGIDIYFENVGGKVFDAVLPLLNTKARVPVCGIIAHYNDTALPNGPDRLPALMGSILRKRIHVQGFIIFDDYGHRYNEFFNDMSSWFAQGRIKYREELVSGLEEAPKAFIGLLEGRNFGKLVVRVSED

SEQ ID NO: 67762 - protein, 399 aa, Pseudomonas putida
MNGPIPTHLPPTTGSGSWLSVIALALAAFIFNTTEFVPVALLSDIGRSFDMSTAQVGLMLTIYAWIVALASLPMMLLTRNIERRRLLLFVFLVFIVSHLLSWLSQSFAMLLVSRIGIALAHAVFWSITASLAVRVAPPGQQAKALGLLATGTTLAMVLGIPLGRVVGEALGWRITFLSIAGVALATMLCLIKSLPLLPSQNSGSLRSLPVLFKRPALVITYLLVTLVITAQFTAYSYIEPFALHVAQIGGDRTTLLLLLFGGAGVFGSLLFSRYSERFPHGFLVGSIGVLAACLLLMLPLSGNFYVFAVLSMFWGVAILSFSLALQSKTLKLASDATDVAMALFSGIYNIGIGGGALLGSIVSSQMDVADIGLVGGSVAVVGLVLAVASTRRFREALTR

SEQ ID NO: 67763 - protein, 344 aa, Pseudomonas putida
MLYSLQALRAFAAWVVVCHHFMQIFFDFHATGPIGQLLTDRGAVGVDIFFVISGLVIYLSTRDKTVEPRQFLLNRALRIVPAYWFYTALMAILLLAFSQWMPHQSFDWRHLFLSLLFIPAENPGGYGLYPTLNVGWTLNFEMFFYLLFGLAFLVRQRHHLLLVTAALLLVSEVLGRMGVVSRFYNNDIIYEFLLGIGVGVLYRRGLIRQGRWLPLALLGVAGMAIYCLDASQRLLHWGLPSAMIVLAFVAMEPLFQGNRLLKALGDCSYSVYLIHVLVLYAGWFASQRLHLNPFLTFALCVPSIGLMSWFSYQWLERGLYRRMQAWLAAQRGPAPEYALSRVNC

SEQ ID NO: 67764 - protein, 319 aa, Pseudomonas putida
MKLPFPGRLLALAVISSLSLALPLSAAHAEDKPKVALVMKSLANEFFRTMEDGAKDYQKTHADEFELIANGIKNETDTGEQIRIVEQMVNAGAKALVIAPADSKALVSAVKKAMDQGVVVINIDNRLDPDLLKSKGISVPFVGPDNRKGARLVGDYLASQKLKAGDQVGIIEGVSTTTNAQQRTAGFKDAMDAAQMKIVSVQSGNWEIDKGNAVAASMLNEYPDLKALLAGNDSMALGAVSAVRAAGKTGQVQVVGYDNINAIKPMLEDGRVLATLDQAASQQAVYGIQAALKMVKGEKPDVDADNVIQTPVELITKKP

SEQ ID NO: 67765 - protein, 517 aa, Pseudomonas putida
MPALANEVVLAASGLGKTYAQPVLGEVSLSLRAGEVLALTGENGAGKSTLSKLISGLEVPTTGHMTYRGQAYAPGSRGEAERLGVRMVMQELNLLPTLTVAENLFLDNLPSRFGWISHKRLRQLATAAMARVGLDAIDPDTPVGELGIGHQQMVEIARNLIGDCHVLILDEPTAMLTAREVALLFTQIERLRARGVAIVYISHRLEELQRVAQRIVVLRDGKLVCDEPIQRYSSAELVNLMVGRELGEHIDLGRRQLGAPLLKVDKLCRGDKVREVSFEVRAGEIFGISGLIGAGRTELLRLIYGADRADSGGIALGQPPQAVSIDSPKAAVRAGIALITEDRKGEGLLLTQSISANIALGNLGAVSRAGVLDSEAEKALAERQIQAMRIRSAGAQQVVGELSGGNQQKVVIGRWLERDCQVLLFDEPTRGIDVGAKFDIYGLLAELARQGKALVVVSSDLRELMLICDRIAVLSAGRLIDTFARDHWSQDQLLAAAFAGYQKRDALLHDAAPRMDA

SEQ ID NO: 67766 - protein, 340 aa, Pseudomonas putida
MATIKDVAALAGISYTTVSHVLNKTRPVSEQVRLKVEAAIIELDYVPSAVARSLKARSTATIGLLVPNSVNPYFAELARGIEDACERNGYCVILCNSDDNPQKQRSYLRVLLEKRIDGLVVASVGQDDDLLQSLASVRTPMVIVDRELEGVDADLVRIDHEQGAYLATRHLLELGHRDVAYIGGPAETGVTQLRLSGFRRAMAEAGAPVPGSRVLHCDFTSPGGHAAAAQVLEGKRPSAIFAGNDMIGFGVLRAAAERNISVPGELSVIGFDDIELSRYVYPSLTTVGQSIRELGESAASLLLTRIATPRQGAAEQRIVAPRIVLRESTGPRPDLFNDYR

SEQ ID NO: 67767 - protein, 336 aa, Pseudomonas putida
MPPMLKSLLQGVVFMAAASTLQAAPIDLIIDTDPGADDVVALFLAMASPHELSIRAITTVAGNVRLDKTSRNARLAREWAGREDIPVYAGAGRPLVRTPIYAADVHGEEGLTGVQVHEPKAPLAQGNAVQYLVDTLGAAEPHSITVAMLGPQTNLALALIQRPSIVKGIKEVVVMGGAHFNGGNITPVAEFNLYADPHAAEVVLASGVQLTYLPLDVTHKLLTSNARLKQLAAVNNQASKRVVDILNAYITHDMDVYGIPGGPVHDASVIAYLLKPELFSGRRIHMSIDSREGPTFGQTIADWYGVLKRPANVLWVEQGDAQGLFDLLSARLARLE

SEQ ID NO: 67768 - protein, 3619 aa, Pseudomonas putida
MSSPDRSRATAMANFSKSDLEFILKQIFIAEAHADGASLIDLLPNSQVPFGLRTVDGSYNNLVTGQSEFGAADNSFLRLLEASYRANYVGTGNVVDSQPRTISNLIVDQTANNPAAVEANGGAAPVMSPGIDGVFGTADDKPVFFIPNVSPDAGLTAGFNAWMTFFGQFFDHGLDLVSKSSTDIVFIPLRPDDPLFVAGSPTNFMVLSRAVRTAGADGVVGTADDSQPNTTSPFVDQSQTYSSHPSHQVFLREYTVNAAGDPVATGRLITNRDLGADGKFGTADDGNGESGGMATWAVVKAQARDLLGINLTDADVHSVPLLATDAYGNFLRGPNGMPQVVMRVNNGADGIAGTADDVTQLVEGDRNAPISLANAVSTGHGFLDDIAHNAAPVVVGGALQADADTLVGNAQPVGQGGNNLTYDNELLDAHYIAGDGRVNENIGLTAVHHVFHSEHNRLVQQTKDTLLAAGDLAFLNEWLIDDVTAIPTTPADIAALVWDGERLFQAAKFGTEMQYQHLVFEEFARTIQPQIDEFLAPNGYDTSINPAILAEFAHVVYRFGHSMLTETVDRYDPAFNPVSADPANPDQQLGLIAAFLNPLAFAGSGATADEAAGAIIRGVTRQVGNEIDEFVTEALRNNLLGLPLDLPALNIARGRDTGIPSLNEARREFYAATGDSQLKPYMSWVDFADHLKHPASLINFIAAYGTHSSITGATTEAAKRAAAVALVLGGDGAPLDRLDFLNGTGAYANVTLAGADGIAGTADDIAGVTVTGVDAIDFWVGGLAEKKMPFGGMLGSSFNFVFETQLEALQNGDRFYYLSRTAGMNFGTELENNSFAKLIMANSDVTHLSNTVFLTPTFTLEVNQANQFTGLGADGKADPTGGIEINGVEIVPLVIRDNPDTVGPDSNFLHYTGEDHVVLGGTAGNDIIISSEGDDTLYGDAGDDLLEGGAGNDAVLGGAGDDIITDSFGDNRLEGNAGNDVIVAGSMGVAGNLILGGDGQDFIITTEDISTTFGGLGDDFILGAKTNLPPTGNEGDDWIEKGTQDGAPGDNFAPLLGDEVIGNDIFVGGGGFDEMIGEGGDDIFVGSDAQDKMDGMSGFDWVTNKNDRVGVTVDLSLAALAQPHGNAPNQNAGVFNPVGASPASILDRFAEVEGVSGSAYADVLKGDDVDAVTILNHGGATGSALTNVALIRGLQQFLADAGLPTTGFATGNIMLGGNGSDLIEGRGGDDLVDGDKWLNVRIAVYAPGDVNHTGPEIASFDSMADMIPFMLDRTYNPGQLKAVREILPGTSTGGAAFDTAVFSGLQSEYVVTQNTKGTADVADDVWTVTDTVAGRDGVDTLLHIERLQFADSQRVLVEGVNAQPTGSPTLLDGNGGEITVGDMLTVSVAAVRDADNISAGNPAGSLADRSVSYYWQFEADPGSGVFQDIILLPAGDLAFQSADGTSFKVSPDLAGLSLRVKAIYQDAHGTTEVLYSQPTTVVQPGAPVVPTVATPVVDASDGGAGLHMVRSDLNFILAQIKIAEADAAGQDILSLIPNVRAAMGLRAVDGSNNNLMNLNGNNNTQYGAADNVFPRVTDPVFNPAEGAPAGFFGPGSPAIPGSSYQQTSGPVFDSQPRTISNLIVDQTSNNPAAYATAYDPGADGVLNFGAAGNDDVLKDGVRIVASPGMDGQFGTTDDHDVYLFENTAADAGLSAPFNAWMTFFGQFFDHGLDLVTKGGSGTIYIPLQPDDPLYVEGGFTNFMVVTRATNLPGPDGILGNADDIREHTNTTTPFVDQNQTYSSHPSHQVFLRAYVMTDDGPVATGRLITNRDLGADGRFGTADDTEIGGMATWKVVKAQARDLLGINLTDADVDNVPLLATDAYGNFIKGPNGYPMVVMKGLDGIAGTADDQEVEGNPLAPLDLTNAVRTGHQFLADIAHNAVPVFSGGVLAPDADNVAGNAVPVNPQTGANLAYDNELLDAHYIAGDGRVNENIGLTAVHAIFHSEHNRLVAQTMDTVLDSGDLAFLNEWLLNPVSALPVTPAEIGALVWNGERLFQAAKFGTEMQYQHLVFEEFARTVQPRVDLFFAPTQVYDVDLDASIVAEFAHTVYRFGHSMLTETVDRFDIDFNVIQDPASANPDQQLGLIAAFLNPLAYAASGVTPEDATSAIVRGVTRQAGNEIDEFVTEALRNNLLGLPLDLPAINIARGRDVGIPSLNAVRREIYGQTGDTQLKPYTSWVDLVQHLKHPESLINFIAAYGTHSTITNATTLLEKRAAAMALVFGGDGAPADRMDFLNSSGAWANVTLPGKDGVLGTADDLKAVTVTGVDAIDLWIGGLAEAKAPFGGMLGSTFNFVFENQMEKLQDGDRFYYLERTAGLSMNAELESNSFAKLIMANSSATHLPGLVFSDPGFYLELDQTKQYNEGLGSADPLGENGEQVVFRDSPLTAGPDTHYIRYAGAEHIVLGGTNGDDILVSSEGDDTVWGDAGNDRIEGGDGNDQLRGGAGDDIISDMGGDDNIQGGDGNDVLHGGNGVNLIIGGFGNDFIVTGEDASEAIGGQGNDFILGSKANEQDMGNEGDDWIEKGTSDGAPGDNFDPLGNDPIIGNDVFVGGNENDKFNGEGGDDIMVGSLGFGDRYIGGSGYDWSTFKDLAQGVSIDMSDRFFDVPPVPGSGASTLVRFDIMEGLSGSAHGDFLRGDSEDATSLPTAGATGSVLTNISLIDGLAGLLAAGATFYDGGNIILGGSGSDLLEGRGGDDILDGDKWLNVRISVRANPDGTGPEIASFNSMEPMVPFMLNGTYNPGQLVIVREILSGTDHYDTAVYSGVSTDYSVVVDGNSVTVTDLVAGRDGVDHLTGIERLQFSDSSQASGVGTAVNAGPTGHLAILDATTGLRDDTPVSGQLLRVSNLAVHDADNVSATNATGAVNGPVAYYWQVEALPGSGVYEDITVVAAGEATRATGTTYRVTDDVAGLNIRVRAVYQDAKGTLEIVDSSPNSAPSAGPTVTGLLVQNQTLTANPATIVDADGLSNPQFSFQWQSNRGVGWVNIAGAISSTFVLTQAQVGQNMRVMVSYVDDFGVQESVASDILDPVANVNDAPTGALLISDTTPDQGQTLTALTGAIADIDGLGAFSFQWQQGTGGTFADIAGATAATFTPGFAQGNQQLRVIVRYTDGFGTLESLTSAATAAVTVPPGVVLVGTNAANTLTGTTGNDVISGLGGNDTLNGLGGSDQLFGGIGNDILNGGDDPDFLNGEDGNDTLNGGLGADAMNGGAGNDTFLVDNAGDTVTEALNGGTDQVQTSLASYTLGANVENLTYTGSSAFTGTGNALANTLTGGAGNDLLNGGAGADRLVGGVGNDTYVVDDAGDVVVEATGAGTDLVRTTLASHTMAANVENLAYTGVGNFTGTGNGLANIIDGGAGNDTLSGDGGNDVLNGNAGNDTLNGDAGNDQLFGGLGDDQLRGGGGDDSLDAGGGNDTLLGEAGNDNLNGGAGDDSLDGGNGNDTLQGGDGNDTLFGDVGTDTLIGGAGNDFLNGAAGNDTVVGGAGNDTMIATDGNDVFQFAAGFGNDLIINFDAIAAGGQDRLDITALNITAATFGASVTIADVGADTLVSIGAADSIRLVGVADATTVTAADFILAG

SEQ ID NO: 67769 - protein, 284 aa, Pseudomonas putida
MRLIIVSGRSGSGKSTALDVLEDSGFYCIDNLPAGLLPQLAENALINTELLQPKVAVSIDARNLPSHLMRFPELLEEARARHIQCDVLYLDADEEVLLKRFSETRRRHPLTNANRSLAEAIRVESDLLGPIADLADLKIDTTNLNLYQLRDSIKLRLLNQPEPGTAFLVESFGFKRGMPVDADLVFDVRCLPNPYWKPELREHSGLDQPVIDYLAAQPDVEDMYNDISSYLLKWLPRFAASNRAYVTIAIGCTGGHHRSVYITERLGRQLQQTLKNVQVRHRDL

SEQ ID NO: 67770 - protein, 90 aa, Pseudomonas putida
MPAREITIINKLGLHARAAAKFVGVAGRFPCQVRVGRAPDKLVDGKSIMAVMMLAAGKGTQVHLHTEGEQDSDAMDALVELINNFFDEGE

SEQ ID NO: 67771 - protein, 173 aa, Pseudomonas putida
MVDSNDDAFDGEKSKTQIKRELHALVELGERLTTLKADTLARLPLTDELRKALAEASKHTAHGARKRHMSFVGKLMRVQDLDAIHALLEQMDSSTRQYNERFHSLERWRDRLIDGNDEDLERFVNEYPDTDRQQLRSLVRHAQHEKARNKPPAAARKVFKYIRDLDELQRGLR

SEQ ID NO: 67772 - protein, 217 aa, Pseudomonas putida
MSLLDTFAHLDWAQVLQLTWQHIMLVGIAVGLAILVGVPLGILMTRFPAVAGPLQASATVLLTIPSIALFGLLLPFYSKFGQGLGPLPAITAVFLYSLLPILRNTYLALTNVEPGIREAARGIGMTFGQRLRMVELPIAVPVILAGVRTAVVMNIGVMTIAATIGAGGLGVLILTSISRSDMSMLLVGAVLVSLLAIIADLLLQTLQRALTPEGLRS

SEQ ID NO: 67773 - protein, 385 aa, Pseudomonas putida
MIELKNLSKTFNVNGKDVKAVDSVSLTVNEGEICVFLGPSGCGKSTTLKMINRLITPTSGQVFINGEDTTGLDEVTLRRHIGYVIQQIGLFPNMTIEENITVVPRLLGWDKQKCHERARELMHMIKLEPKQYLQRYPRELSGGQQQRIGVIRALAADAPVLLMDEPFGAVDPINREMIQNEFFEMQRALNKTVIMVSHDIDEAIKLGDKIAIFRAGKLLQLDHPDTLLAHPADDFVSNFVGQDSTLKRLLLVRAEDAADNAPSVSPETPVGDALELLDEHDRRYVVVTDAQNKALGYVRRRDMHRQQGTCGDFLRPFNATASHDEHLRILLSRMYEFNRAWLPVLDAEQVFLGEVTQESIAAYLSSGRSRGAKSSIVSPAEAVVS

SEQ ID NO: 67774 - protein, 95 aa, Pseudomonas putida
MALERCDVEKIAHLARLGLNDGELPRITDALNSILGLVDQMQAVDTTGIEPLAHPLEASQRLRPDQVTESNQRDAYQAIAPSTESGLYLVPKVIE

SEQ ID NO: 67775 - protein, 396 aa, Pseudomonas putida
MNTPALRITLVSETFPPEINGVANTLGRLSDGLRQRGHEVEVVRPRQAGEGHVHNDPQLMLCRGWALPGYPGLQWGEVSMHKLLRRWRRQRPDVLYIATEGPLGLSALRAARRLGVAVVSGFHTNFPQYSGQYGLGLLARLLTHYLRWFHRRTAITLVPSASQRLELERRGFERLELLARGVDACLFNPARRSQALRESWGLGPEDIAVLHVGRLAAEKNLGLLRPCFEALRKTYPQKRLRLIMVGDGPQRTKLEQEIPDAVFCGAQRGERLAEHYASGDLFLFPSLTETFGNVVLEAMASGLAVVAYDEAAAAQHIRHGHSGALAMPGDQAAFVDAACWLLEEVETLRRVRLNARQHASRQGWPAIVEQFEGYLNSACRQPGATAGRSAQCLQRL

SEQ ID NO: 67776 - protein, 328 aa, Pseudomonas putida
MKSQEAFSMKQHGTDAVREQAAAWFARVQDAPRDAGLHKQLHAWLASDEHHREEYEHLCRVWQAADFIPRQHLEALCRPDPVQQLPRRRFMRQALAASVAVVALGLGWSGWHHLQLNHQGSLQTAFNERRQVELPDGSHLELNGNTQLQVEFSAGQRHVRLNAGEVMFSVAHDSNRPFVVDTAQGSVIVTGTRFDVRLDPASTRVAVEQGSVRVQGKGDSPAQLTAGQGSHIDAQGLVAAPYAVNTGAITAWRQGKLVFDNATLAEVVAETSRYRRQPLRVAPGKVARLRLSGTFSTNDTDALLRALPSILPVAIKAHEDGSSEIIAK

SEQ ID NO: 67777 - protein, 686 aa, Pseudomonas putida
  MISC_FEATURE (40)..(40): X=any amino acid
IAPTDFGVGLTSIAWAWAHLGACRPEGRLLQAYRPAPPGXHRPERSTELVARTHGIKPPVPLSLAHVERMLGDGQLDELLEEIIRLYQQACVGNDVVVVEGMVPTRHASYAARVNLHLAKSLDAEVILVSAPENEVLSELSGRVELQAQLFGGPRDPKVLGVILNKVRTDESMADFATRLREHSPLLRGNDFRLLGCIPYQPELNAPRTRDVAELLGAQVLNAGDYEQRRMSKIIICARTVANTVPLLTSGTLVVTPGDRDDIILAVSLAAINGVPLAGLLLTSDSKPDVRILGLCRGALQAGLPILSVSTGSYDTANQLNSLNREIPVDDRERAEFITDFVASHLDAAWLHQRCGTPRELRLSPAVFRYQLIQRAQQANKRIVLPEGAEPLLVQAAAICQARGIARCVLLAKPEDVDAVARAQGITLPPGLEILDPELIRGRYVEPMVELRKSKNLNAPMAEQQLEDPVVIGTMMLALDEVDGLVSGLVHSTANTIRPALQLIKTAPGSSLVSSVFFMLFPEQVLVYGDCVMNPHPSAAELAEIAQQSAASAQAFGIAPRVAMISYSSDSASDEEVEKVREATRLAQDAAQELLIDGPLQYDAAANPAIARELAPASPVAGRATVFVFPDLNTGNTTHKAVQRSADGVSLGPMLQGLRKPVNDLPRGAQVDDIVHTIALTAIQAS

SEQ ID NO: 67778 - protein, 309 aa, Pseudomonas putida
MRIVVALGGNALLRRGEPMTADNQRANIRTATEQIAKIHPGNELVIAHGNGPQVGLLSLQALSYKPDEAYPLDVLGAETEGMIGYMIEQELGNLLAFEVPFATLLTQVEVDANDPAFKDPTKFIGPVYSKEEAERLAKEKGWVVKADGDKYRRVVASPKPKRIFEIRPIKWLLEKSSIVICAGGGGIPTMYDENRKLKGIEAVIDKDLCSALLAEQLEADLLIIATDVDAAYIDWGKPTRKAIAQAHPDALETLGFAAGSMGPKVQAACDFARNTGKVAVISSLENIEDIVKGKAGTRVSTEKPGISYR

SEQ ID NO: 67779 - protein, 481 aa, Pseudomonas putida
MQWEVVIGLEIHTQLATQSKIFSGSATTFGSEPNTQASLVDLGMPGVLPVLNEQAVRMACMFGLAIDAEIGKRNVFARKNYFYPDLPKGYQISQMDLPIVGKGHLDIALEDGTIKRIGVTRAHLEEDAGKSLHEDFSGSTGIDLNRAGTPLLEIVSEPDMRSAKEAVAYVKAIHALVRYLGICDGNMAEGSLRCDCNVSIRPKGQTEFGTRCEIKNVNSFRFIERAINSEIQRQIDLIEDGGKVVQETRLYDPNKDETRSMRSKEEANDYRYFPDPDLLPVVIEDSFLETIRAGLPELPPQKVERFQTQYGLSAYDANVLASSREQADYFEEVVKIGGDAKLAANWVMVELGSLLNKLGVEIDQAPVSAAQLGGMLLRIRDNTISGKIAKTVFEAMAAGEGDADSIIESKGLKQVTDTGAIDKMLDEMLAANAEQVEQYRAADEAKRGKMFGFFVGQAMKASKGKANPGQVNQLLKAKLEG

SEQ ID NO: 67780 - protein, 380 aa, Pseudomonas putida
MIGWKHAAVLTLAVLAAGCSSNSKKELPPAELTKFTEEVVLKKQWSRSIGDGQGETYNTLVPAIENDRIYASDVNGEVFALDRITGDVVWKKDLELQVSGAVGVGYGLVMLGTLKGEVIALDSSTGEERWRSRVTSEVLAPPANNGDVVVVQTQDDRLIGLDAATGDRRWIYENSPAVLTLRGTGAPIATNRLAVAGLSTGKVVAVDINNGVPVWESRVAIPKGRSELDRVVDIDGGLLLSGGTLYVSTYQGRVAGLDLESGRELWQRDASSYVGVAQGFGNVYVSEASGTVESVDERSSSALWSNDSMARRQLTAPEVFSSYVAVGDFEGYLHLLSQVDGRFVGRERIDSDGLRARPLVVGDTIYVFGNSGKLEALTIR

SEQ ID NO: 67781 - protein, 429 aa, Pseudomonas putida
MSKSLQAIRGMNDILPEQSPLWRYFEGTVAGLLDTYGYSQIRTPIVEFTELFKRSIGEVTDIVEKEMYTFEDRNGDSLTLRPEGTAACVRAVLEHGITGNGQVQKLWYIGQMFRHERPQKGRYRQFHQIGVEVFNLDGPDIDAELIMLTWRLWGLLGIQDAVKLELNSLGTSEARARYRDALVEFLSARLEQLDEDSQRRLKSNPLRILDSKDQNTQAVLVGAPKLEDYLDEESRVHFEGLKARLDAAGIPFVINTKLVRGLDYYSKTVFEWVTDKLGAQGTVCAGGRYDGLVEQMGGKPTTGVGFAMGIERLILLLETLGKVPESISRQIDVYLCAFGEQAELAGLRLSEGLRDRLPGLRLAVNAGGGSFKSQFKKADKSGALFALILGDDELAKQEIGLKPLRGQGEQQNIAWDALAEHLETAIAQA

SEQ ID NO: 67782 - protein, 332 aa, Pseudomonas putida
MDPRSEVLLRQAELFQGPLLIAGAPADDLLGQLPQAQAWTWHAGDQAMLESRFAGRSHYGVEAPEAAFDSAVLFLPKSRELAAYLLNALASRLAGRELYLVGEKRGGIEGAAKQLQAFGKPRKLDSARHCQLWQVTIDQAPQAKPLESLAERFELALEDGPLQVVSLPGVFSHGRLDRGTALLLKHLDGLPGGHMLDFGCGAGVLGATLKRRYPQSRVTLLDVDAFAVAASRLTLAANGLEGEVISGDGIDAAPTELSLILSNPPFHTGVHTNYQASENLLKKSAVHLRKGGEMRLVANSFLRYQPLIEGALGNCQVRDEADGFRIYQATRG

SEQ ID NO: 67783 - protein, 502 aa, Pseudomonas putida
MAQNESVDVVLVGAGIMSATLAVLLKELDPTLKLEVVEAMDSGAAESSNPWNNAGTGHAGLCELNYTPQAADGSIDIKKAVHINTQFEVSRQFWAYLTKKGNFGSARAFINPVPHLSYVEGDKGVSFLKKRFELLKQHHAFAEMEYTEDKAVMNDWMPLMMPGRPADQHIAATRVAKGTDVNFGALTNKLLKLLGDSPDAQVKYSKKVVGLRRNGSGWTVSIKDVNSGGSREVDARFVFLGAGGAALPLLQLSGIPESKGFGGFPVSGQWLRCDNPEIVKQHQAKVYSQAAVGAPPMSVPHLDTRVVDGKTSLLFGPYAGFTTKFLKHGSLMDLPLSVRMGNIGPMLAVARDNMDLTKYLVSEVMQSMEQRLEALRRFYPQAKAEDWRLEVAGQRVQIIKKDPKKGGVLQFGTELVSAQDGSLAALLGASPGASVTVSIMLELIERCFPEQAKGAWAAKLKEIFPAREKTLATDAALYHKISADNDAALDLAESSPAAKHYA

SEQ ID NO: 67784 - protein, 212 aa, Pseudomonas putida
MPTREIRHPLIRHKLGLMRRADISTKNFRELAQEVGALLTYEATQDLPLETYEIDGWCGKVSVEKIAGKKITVVPILRAGIGMLDGVLSLIPGAKVSAVGVARNEETLEAHTYLEKLAPDINQRLALIIDPMLATGGSMVATIDLLKKAGCKEIRAMVLVAAPEGIEVVEKAHPDVKIYTASIDQRLNEHGYIVPGLGDAGDKIFGTKQKDA

SEQ ID NO: 67785 - protein, 182 aa, Pseudomonas putida
MLGNRILAHILKLPWYPIAMRLTTKGRYAVTAMLDLALHAKHGPVSLADISERQGISLSYLEQLFAKLRRSSLVSSVRGPGGGYQLSRGMETIQVAQVIDAVNESVDATRCQGLGDCHAGDTCLTHHLWCDLSQQIHEFLSGISLADLVKRRDVQEVAQRQDLRRVAGRTAQLDKIETSAVD

SEQ ID NO: 67786 - protein, 261 aa, Pseudomonas putida
MFERLREDIQSVFHRDPAARNAFEVLTCYPGMHAIWLHRLGNALWRRDFKWLARLVSNFGRWLTGIEIHPGATIGRRFFIDHGMGIVIGETAEIGDDVTLYQGVTLGGTSWNKGKRHPTLENGVVVGAGAKVLGPFTVGAGAKIGSNAVVTKAVPAGATAVGIPGRIIVKSEDTEVEAKRKAMAEKIGFDAYGVSGDMPDPVARAIGQMLDHLQAVDERLEGMCGALTKMGSDYCAKELPALPEDDFSEAAQVAQRDTQPH

SEQ ID NO: 67787 - protein, 458 aa, Pseudomonas putida
MSLSVFDLFKIGIGPSSSHTVGPMRAAARFAEGLRRDGLLARTASVKAELYGSLGATGKGHGSDKAVLLGLEGEHPDIIDTDSIPARLQVIRDSGHINLLGEHSIAFIEKQHLAMIRKPLDYHPNGMIFRAFDDAGLQIRSREYYSVGGGFVVDEDAAGHDRIVEDTTVLAYPFKTAKALLGHCTAHDLSVSQVMLANESAWRPEAETRAGLLRIWQVMQDCVAAGCQHEGILPGGLKVKRRAPALYRQLSGHPEASLRDALSVLDWVNLYALAVNEENAYGGRVVTAPTNGAAGIVPAVLHYYMRFVPGASEDGVVRFLLTAAAIGILYKENASISGAEVGCQGEVGVACSMAAGALCEVMGGSVQQVENAAEIGMEHNLGLTCDPIGGLVQVPCIERNAMGSVKAINAVRMALRGDGQHYVSLDKVIRTMRQTGADMKSKYKETARGGLAVNIIEC

SEQ ID NO: 67788 - protein, 452 aa, Pseudomonas putida
MLKRGDLAGKPGQTLLLQNLSGLKAERVLLVGSGKEEALGDRAWRKLVASVAGVLKGLNGADAVLALDDIAVSNRDAHYGKYRLLAETLLDGEYVFDRFKSQKAEPRALKKVTLLADKAGQAEVERAVKHASAIASGMAFTRDLGNLPPNLCHPSYLAEQAKELGKAHKALKVEVLDEKKIKDLGMGAFYAVGQGSDQPPRLIVLNYQGGKKADKPFVLVGKGITFDTGGISLKPGAGMDEMKYDMCGAASVFGTLRAVLELQLPINLVCLLACAENMPSGGATRPGDIVTTMSGQTVEILNTDAEGRLVLCDTLTYAERFKPQAVIDIATLTGACIVALGSHTSGLMGNNDDLVGQLLDAGKRADDRAWQLPLFEEYQEQLDSPFADMGNIGGPKAGTITAGCFLSRFAKAYNWAHMDIAGTAWVSGGKDKGATGRPVPLLTQYLLDRAGA

SEQ ID NO: 67789 - protein, 142 aa, Pseudomonas putida
MSKVDFYILPTDSLSARLDFACKLCEKAWRLGHRVYLHCQDAEQRSELDQRLWRFKGEAFVPHDLAEVHADADVVLGLADNAGEHHGLLINLGASVPGFVGQFERVAEIVVEEPAIRQSARERFRFYREQGYALQDHRLQRL

SEQ ID NO: 67790 - protein, 246 aa, Pseudomonas putida
MELVVMADAFRRSSASRITAVIPYFGYARQDRRPRSARVAISAKVVADMLTVVGIDRVLTVDLHADQIQGFFDIPVDNIYGSPVLVDDIEDQRFENLMIVSPDIGGVVRARAVAKSLGVDLGIIDKRREKANHSEVMHIIGDVEGRTCILVDDMVDTAGTLCHAAKALKEHGAAKVYAYCTHPVLSGRAIENIEKSVLDELVVTNTVPLSAAAQACDRIRQLDIAPVVAEAVRRISNEESISAMFR

SEQ ID NO: 67791 - protein, 197 aa, Pseudomonas putida
MTEFTLNAQARTDLGKGASRRLRHSANIPAVVYGGNQDAQSLTILAKEITKLFENEAAFSHVLELNVDGAKQNVVVKALQRHPAKGFIMHADFVRVVAGQKLTAKVPVHFINEEAPVKKGGEISHVESEIEVSCEAKDLPEFIEVDLANAEIGTIIHLSDLKAPKGVEFVALAHGDDKAVANVHAPRVAPEAEGAAE

SEQ ID NO: 67792 - protein, 366 aa, Pseudomonas putida
MGFNCGIVGLPNVGKSTLFNALTKSGIAAENFPFCTIEPNSGIVPMPDARLAALAEIVKPNRILPTTMEFVDIAGLVAGASKGEGLGNKFLANIRETDAIAHVVRCFEDENVIHVSNSVDPKRDIEIIDLELIFADLDSCEKQLQKVARNAKGGDKDALAQKAILEKLIPHFTEGKPARSLMKHMADDEKAVIRGFHLLTSKPVMYIANVAEDGFDNNPHLDVVKAIAEEEGAVVVPVCNKIEAEIAELEDGEEKDMFLEALGLEEPGLNRVIRAGYELLNLQTYFTAGVQEVRAWTVRVGATAPQAAGVIHTDFEKGFIRAEVVAYDDFIQFKGEAGAKEAGKWRLEGKDYIVKDGDVMHFRFNV

SEQ ID NO: 67793 - protein, 6310 aa, Pseudomonas putida
MDNIVVADKQSEVATQSAWGNINLNAPSVVQVPVSPDKVATVTQRGQDLIVTLKSGEKITIGNFFAVDQAGVGSDMVFVGEDGTLWHAQYDAAAFTGFTFEEVASLDELVAGIGTAGSAMPTWAIAGLSLLGVGGAAAAADNGGGGSSGGSDPDTSAPATPIDLLVSPDGLRLTGRGEAGTTVNIRDAAGNLIGSGTVGADGNFNVTLNAPQINSENLDVTLTDAAGNVSAPGAVTAPDATAPLAPTDLAINEQGNTLTGRAEPGSTVSVRGAGGVLLGTAVAGADGQFSITLQPPQSDGQALEISAADAAGNISPVASITAPDVDNPDTTAPEQPTDLALADGVTFTGRGEPGATVQVRDAAGNLIGTGVVGADGLFSLTLSPAQTNGEALDVRLVDAAGNSSAPLQFDAPDITPPDAVTNITVGADGLALSGRGEPGATVEVRDANGTVIGTGVVGANGTFLIDLAPAAQPGEQLSLVQTDPSGNASVATEYDVPLTTAPDSPSNLAIDADGTTLTGTAPAGSRVEVHDANGTLIGSAIANADGSFSIELNPAQANGELLDVVAIDDGGVSSLPAQITAPDITAPAAPTELAVSADGSVITGRAEPGSTVRIVAADGTELGTAVVGPTGVFSLNLNPPQVDGEVLQATATDAAGNTSPSSAVTAPDIDGVDTTPPAAPTDLVIGLAGSQLSGRGEAGSTVQVRDAAGNILATGTVAADGTFTVTLAPAVNDGSTLQVTLTDAAGNVSQPGSVTSADLLPPAQPTDLALTDGITFTGRGEPGATVQVRDAGGAVIGTGVVGADGLFSLTLSPAQTNGEALDVRLVDAAGNSSIPLEFTAPDITPPDAVTDILVGPGGTALSGRGEPGATVEVRDANGTVIGTGVVGANGTFLIDLAPAAQPGEQLSLVQTDPSGNASVATEYDVPLTTAPDSPSNLAIDADGTTLTGTAPAGSRVEVHDANGTLIGSAIANADGSFSIELNPAQANGELLDVVAIDDGGVSSLPAQITAPDITAPAAPTELAVSADGSVITGRAEPGSTVRIVAADGTELGTAVVGPTGVFSLNLNPPQVDGEVLQATATDAAGNTSVTSSVTAPDIDGGDTTPPEAPTNLVIGLAGSQLSGRGEAGTTVQVRDAAGNILATGTVAADGTFTVTLNPAVNDGSTLQVTLTDAAGNVSQPGSVTSADLLPPAQPTDLALADGVTFTGRGEPGATVQVRDAAGNLIGTGVVGADGLFSLTLSPAQANGEALDVRLVDAAGNSSIPLEFTAPDITPPEAVTDILVGPGGTALSGRGEPGATVDVRDANGTVIGTGVVGANGTFLIDLAPAAQPGEQLSLVQTDASGNASSALQFEVPLTTAPASPSDLVFAEDGSSISGTAPAGTRVEVHDANGTLVGTVVAGPDGSFTVTLDPPQANGELLDVVAIDDGGVSSLPTQITAPDITAPAAPTELVINADGSVVTGRAEPGSTVRVLAADGTTVLGSVVVGATGSFSITLDPPQIDGEVLQVTATDAAGNASTASNLTAPDIDGGDTTPPEAPTNLVIGLAGSQLSGRGEVGSTVQVRDAAGNILATGTVAADGTFVIALDPAVNDGSTLQVTLTDAAGNVSQPGSVTSADLLPPAQPTDLALADGVTFTGRGEPGATVQVRDAGGAVIGTGVVGADGLFSLTLSPAQANGEALDVRLVDADGNASAPLQFDAPDITPPGAVSNIAVGADGLALSGRGEPGATVEVRDASGTVIGTGVVGANGTFLIDLAPAAQPGEQLTLVQTDPSGNASSALQFEVPVTTAPASPSDLVFAEDGSSISGTAPAGTRVEVHDANGTLIGTVVAGPDGSFTVTLDPAQTNGELLDVVAIDDGGVSSLPTQITAPDITAPAAPTELVINADGSVVTGRAEPGSTVRVLAADGTTVLGSVIVGATGSFSITLDPPQIDGEVLQVTATDAAGNASTASNLTAPDIDGGDTTPPEAPTNLVINPAGSQLTGRGEAGTSVQVRDGAGTVVATGTVNPDGTFAITLNPAITDGSTLQVTLTDAAGNVSQPGSVATPDLLAPTQPTELALIDGVTFTGRGEPGATVQVRDATGSLIGTGLVNEDGTFSVTLFPAQANGEALDIRVVDAAGNSSTPLAFTAPDVTPPAAVSNVVVGADGLVLSGRGEAGATVQVRDANGSVIGTATVGANGTFLVDLTPAAQPGEQLSLVQTDASGNASEALQYEIPATTTPASPSDLVVAANGASITGTAPTGSRVEVHDANGTLVGSVVVGAGGTFTVILNPAQANGELLDVVAIDGTGASSLPVQIAAPDITPPVTPSELAISANGSEVTGRAEVGSTVRVLAADGTTVLGSVVVDATGSFSITLDPPQVSGEVLQVTATDAAGNTSTAGDITAPDIDGGDTTPPDAATNLVVGLAGAQLNGRGEAGASVQVRDAQGNVLANGSVNPDGTFQITLDPPVKDGSNLQVVLTDASGNASAPASVVTPDLQAPAQPTGVALADGVTLSGNGEPGATVQVRDALGNLLGTGLVTETGSFSITLSPAQANGEILDIRLIDAAGNISSPLQFEAPDITVPAVVSSIVVGADGLTLGGRGEAGATVEVRDANGTLVGTGTVTANGTFLIDLDPAALPGERLSLVQTDPSGNASEALTYDVPLVVTPTSPSELVVAADGSSISGSAPAGSRVEVHDANGTLVGSIVVGAEGTFTVVLIPAQANGELLDVVAIDNNGTSSLPVQVAAPDITAPVAPSDLAISGDGTVVSGRAEAGSTVRVLAADGTTVLGSVVVGASGAFSIGLTPPQVAGEQLQVTATDVAGNASTAGSVTAPIVDNGGDTTPPEPATELAISNDGRTVSGRGEAGATVEVRNDQGQVLVSGTVQPDGSFNVQLPTPVVDGSSLQVTLTDAAGNVSTPSPLTAPDQVAPLQPTDLVLSNGDSLAGTAEGGARVEVKDASGNLIGSAIAEPDGSFSLTLDPPQANGETLSITVTDAAGNTSVPLSYVAPDITAPAIVADVVASDGSLAVSGRGEPGATVEVRDAQGAVIGTGTVAPNGTFVIDLEAPLAAGENLVLVQTDAAGNTSAGVSVTVADTPLPESPSGVVVAGDGSSVSGTAPADTQVEVRDAQGNVLGSAQAGPDGSFTVGLTPAQANGETLDVVAVDGAGNSSLPTQITAPDITPPNEASELQLSADGSLLTGRGEPGTTVQVISADGTVLGNAQVGADGVISVVLNPAQTDGQELDVVLRDPAGNTSTANIVAPDTDGPLQPSGLAIDTAGIHLTGQGQSGSIVTVRDADGNVLGTATVGGDGRFDVTLNAPQRNGESLTVEATDNLGNSAGPVDFTAPDSTPPQVVTNPAIDGIGTTITGNGEPGATVTVRGPDGSVLGSTVVGAGGAFEITLDEPQTNGQALTVEQRDAAGNLSAAVDLSAPDTQAPDSPTGLVLAGDGSSLSGSGEPGAQVTVTGTGGAVLGTATVQPDGTFQVAIDPPQLNGQTLSVTQADNSGNGSPAGTVIAPDFEAPLPAQGLGLDPTGTLLSGQGEAGSTVEVRNAAGNLLGTIPVNADGTFEVALSPAQTNGEVLSVVLIDGGGNASPSATFTADDSTAPAAPAGLTITPGGSAIQGSGEAGSTVEVKLADGTLVGTVVVPAGGSFTVPLSPAQLDGQALNVTLTDAAGNISQPSQIFAPDITPPALPTDVAVSSDGTAVTGNAPGASSVTVSDGAGNVITVAVNPDGSFSVPLDTPQNNGQTVTVVVTDAAGNDSAPVSVTAPDTTNPEPATGLTVSPDGSTVGGTAEPGSTVEVRNPDDTVRGTVTAGPDGTFVIPVAPPLASGETVDVVVIDPAGNESPEIPLTGPTGTEVATPSALAISVDGFLLTGQGTVGSLITVTSGGTTLGSATVGSDGTFRVFFQNAQLNAQILQVSAKATVDGQPSVPAIIVANDTTAPDAPTQVNLNATGSTLTGQGEVGATVRVTDLQGTLLGTATVDSNGLFSVSFSPAVANGQNLIVTQADAAGNVSLAATLQAPDLQAPLAASNLSLNSAATVLSGQGEAGASVTVRDASGAILATGTVNQSGQFQITLPSAQVTGSPLQVTLSDAAGNVSGPASLATPDHTPPAAISNPVLSQDGRQLSGSGEAGATVQVRNAAGALLGTATVGTDGRFTVTFDTPQANGQVIGVTQMDAASNTSPAINVTTPDLTPPAPLTNVVLNNNGLTLTGLGEAGATVTVHGPDGTIIGTGLVAANGSFTLTLNSAQLNAQLLSVTQTDAGNNTSTAVAVTAPDFTPPTAPTALALSGTGLQLTGNAEAGSTVTVRDASGNVLGTAVAGGNGTFQVTLNSAQTNGQILQVTATDAAGNVSPAAPYTAADTTPPAAVANLAVSANGATLTGDGEAGATVTVRAPDGTVLGNATVAADGHFSVSLSPAAITGESLSVVQADAAQNVSPAQNVTAPGALAPATPDNLILAADGLSVSGTAEAGSTIKVYGPNGVLLGSSPVTNDGTFTVNLGSAQANGEVLQVSATGPDGTVSLPATLQAPDTTAPQPLTNLVLSNDGLVLSGRGEAGATVTVLGEGGIELGTAVVDANGDFNVDLSVAQINGEQLSASQSDVAGNESNSVSLTAPDRVAPDAAGNLAFAGGGSLLNGTGEAGAAVRVLAADGSVLGSATVRADGTFQVNLVSPQANGQQVQVVLADAAGNQSAASAITAPDTTPPSAPGELAVSGDGVTLTGRGEVGARVTVTNPAGEEIGSATVDASGHFTITLSPALGNAELLSFTQADAAGNVSAVATLQTPDFTPPDPLTQVVINADGSVVSGLGEAGATVIVSNAAGTVLGTGIVLADGSFSVELSPAQINNQTLSVLQADPPGNVSLPVNVQAPDLTPPAAATELRLNAAGDELGGVGEVGATVRVYVGTTQIGTGTVGANGTFIVELDAAQLDGQVLQVTLTDATGNISPISSVTAVDTTPPATVVATINDSGTQVIGTAEAGTRVTVVNNNGDLLGQVTVEPDGTFVLDLNLPQINGETLTIIAQDATGNPSVPLAVTAPDLTPPVQPTDLLLNAAGTSMTGTAEAGSTITVRGPDNNIVGTVEVGENGQFTVPISPAQNNGQLLTVVSTDDAGNASVAVPYQTNDTSPPDLVTNLAINNTFNVLTGKGEANATVTVSFDGDVIGTGVVDGAGNFQITLVPAVGSLATLEVTQSDGINTSAVATYLTPLIAPPVPPTDVTLGSDGLTLTGSAPSGVGIRVYDAAGNLIGTGVASLNGSFTLTLDAAQLNGEHISVTAVALIGGESQPTFLQAADITPPTNPVVTSLSVNGLVLTGTGEAGATVTVRDAGNNVLGTAVVNGGGVFTVNLNAAQLNGQVLGVSQADTAGNVSGSTSYTAADLQPPAAPTNVAINGTGTVLTGSGEAGATITVQGPNGQVGTGVVQANGTFSITLTSPQNDGQLLVVRQADAAGNLSASTSLTAPDTTPPAAPLATINANGTSVSGSGQVGSTVTVRNSAGTVLGTATVGSNGLFVVSLTAAQIDNQALSVTLTDSAGNVSTGTALTAPDLTPPAAAGNLLFSADGGTLTGTGEVGATVTVRSAGGTVLQTATVQADGTFTVTLSPPQDNGQILSVTLSDPRGNVSGNVNVTAPDVDANAPVIASDNLATATVNLAAVSATKTYTDSFTTLLSGFSKTYTWTVAAGTTADPTLTLTTNSVLALLNNTSFTLQVKDASGAWVTIATGNTQGLLDLIVLPIGLQVDIGVLQAGDYRLTVGSGGIGLITEVSTTLDIVSTSLTQFTGTGIATSGNVITDVGTDGAVDARGPDSAAVLQVLKDGSYVSAGTATTVQGQYGTLVIRADGSYTYTPNGSPNSVGKVDVFSYQLVHPNGLSDAANLYVRIDSPQATEVWSDTNYGAPATVVDAVNDVGTSQVTLDNRVDSSSSTLGSLNLPVIGTRQATYTTTVAANTTADLQVVVNSTNLLSLLNGTTIELLKLNPATGQYVLVQSVPGGSLVSILGGGAGYTFENQGAGTYHVRVTAGGIGLLSSITTSLNTTTTYLTEFVVSGATAATGNLLADDNVGSALTVLSVLTAANTYTIPGYNGVSVAGTYGTLLVHADGSYTYTLNAGLTSAVVGQHDTFTYELSHPNGTTDTATLTINVDSAAGLTATTSLLADTGDESAALASLAAATDVIAGTDGNDHLDGSQGGHITLQGGAGDDTLVVVDQNFASVDGGSGTDTLLWGGGDASIDLGNLAGRVHDIEILDLNDTSSVALTLNLADVVAITETATDTLIIKGDDKDSVHMTDNWTLVGNQTADGIDYNQYTAQEDPSHHLWVQNGIHVV

SEQ ID NO: 67794 - protein, 241 aa, Pseudomonas putida
MATLKAQHLAKSYKGRQVVRDVSLSIDSGQIVGLLGPNGAGKTTCFYMIVGLVQAEQGRVLIDNLDVSHQPMHGRARAGIGYLPQEASIFRKLSVADNIMAILETRKDLDRDGRRKELESLLQEFHISHIRDNLGMSLSGGERRRVEIARALATAPKFILLDEPFAGVDPISVGDIKQIIHHLKAKGIGVLITDHNVRETLDICETAYIVNDGRLIAEGDAETILANELVKEVYLGHEFRL

SEQ ID NO: 67795 - protein, 541 aa, Pseudomonas putida
MLKHAVIPFLLGAGLLSGAPSAVAASNLVFCSEGSPAGFDPGQYTTGTDFDASAETVFNRLTQFERGGTAVIPGLATKWEVSDDGKTYTFHLREGVKFHTTDYFKPSRPFNADDVLFTFNRMLDKDNPFRKAYPTEFPYFTDMGMDKNIAKVEKLDEHTVKFTLNEVDAAFIQNLAMSFASIQSAEYADQLLKNGKAADINQKPIGTGPFVFSKYQKDAQIRFKGNKDYWQPEDVKIDNLIFAITTDASVRMQKLKKNECQVTLFPRPADIEPLKADKNLQMPQQAGFNLGYIAYNVMDKIKGSNEANPMAQLKVRQALDMAVDKKKIIESVYQGAGQLAVNAMPPTQWSYDDSIKDAAFDPEKAKQLLKEAGIKEGTEITLWAMPVQRPYNPNAKLMAEMLQSDWAKIGIKAKIVSYEWGEYIKRSKGGEQGAMLIGWSGDNGDPDNWLGTLYGCDAVDGNNFSKWCYKPYDDLIKQAKATSDQAKRTELYQKAQHILKEQVPITPIAHSTVYQPMSAKVKDFKISPFALNSFYGVSVDK

SEQ ID NO: 67796 - protein, 722 aa, Pseudomonas putida
MSDSIDVTLPNQAPAPEQAAAHRPDLGPWLEVMLQVAHHYRLDVSPQRIRLAAAEDARPLNEILRHMARQAGLALRFVHFDAKGLRQWRTPLVLELDDGQLAVVESVTEEDDLAVVFAGDQGLTSRLPRDTLKGRISRVALLRPARPLRDVRTDDYTAPYDRHWFARIVLRDLRPYGQVMIASLVANVLALAGVLFSMQVYDRVIPAESLPTLYVLFGGVVLALVFDFSMRLLRLKVTDLLGKRADLRVSDLVYGHALRLRNSVRPKSTGSFISQLRELESIRDLITSSTATVLADLPFFLLFLFVFWLIGGVLVFIPLVALLAMVLPGLLAQRRLARLANASMRESALRNAMLVESIQGLDEIKALQAEARFERQWNQYNAACAHTNLRLRTLTNGLVTWTQNVQGAVFAVVIVIGAPMVIAGDLTTGSLVAASMLSSRMMAPLAQLTHVLTRWQQAKVALQGLDKLMQSPVDHPEGEARVHLPAIHGEYRLRQANFRYSEDYPPVLNIGRLDIQPGERIAVLGRNGAGKSTLLQALGGAMDLVQGEISLDGIAMAHLDPADLRRDVGLLPQYARLFHGTLRENLTLGAGQASDQELVAALAATGALDFVRRLPKGMDHLILEGGLGLSGGQRQALVLSRLLVRQPQVLLLDEPTASLDDMTERKLLDNLERFCQGRTLVIATHRLSVLQRVDRILVLDAGRIVIDDARDAALAKLQGAQA

SEQ ID NO: 67797 - protein, 316 aa, Pseudomonas putida
MPDGTPAQAQVDQAIDWLVKLRFDTPSPRTEQQFQHWLASHPHNRLAWQRVSNLGDELAGLPKDLSRRTLDASQHPKASRRDHLKLLGLLAVGGSLGWAAREPLGLPQLLADTSTATGERRQWQGSDGSRLQLNTASAIDLHYSAEQRQLKLIHGEVSLESNPNDNRPFHVATRVGPLTTFDGQLLLRENSQGLLLSVRRGEVTLFPASASARQVLPGETLQVTADGSIQARTLHNDPWGWTEGVLSVQQMPLAEFASELGRYRPGLLRCAPEVAGLKVSGTYQLADTGQILQLLTRSLPVRVEYRTRYWVSIGAA

SEQ ID NO: 67798 - protein, 239 aa, Pseudomonas putida
MTVLNLLCLPYSGASAMVYSRWRRKLPAWLQVRPVELPGRGARMAESLHTDMQVLARQLASEQRLAASAPYALLGHSLGALLAFELAHELQALGCPAPLALFACGTAAPTRREDYDGNNWREPKSDAELISELRALQGTPEEVLANAELMSLTLPTLRADFLLCGTYTYRQRPALQCPLHVLGGVEDRASDEQLRAWRSETQGAFSLQMFPGGHFFIHEQEDRVLAALTASLQPLRLSA

SEQ ID NO: 67799 - protein, 218 aa, Pseudomonas putida
MNDNKPILRYNANERSNHWAVAILFILAGLSGLALFHPALFWLSNLFGGGPWTRILHPFIGVAMFVFFLGLVLRFWRANFITANDRLWLRRVDRVMRNEEEGVPPIGKYNAGQKLLFWTLLVCMLVLLVSGVVIWRAYFSHWFGIDAIRLSALLHALAAFVLILSIIVHIYAGIWIKGSIGAMLHGWVSRAWARKHHELWYREVTGDKTPGDHGRKEG

SEQ ID NO: 67800 - protein, 318 aa, Pseudomonas putida
MITDEKKDERLSIILEPGQIEASAVTPPFLHLPAANLFELRAARLEQLAEGNALGDYLRLIARLCRIQQQLVDNPPGGMPVAEARQRLCMDHGLPPLAADSLVREGPWLVWLQALLEHLSGETRGPMGEALQVLRGSDDNQRKGWGIALLAGQYDGVPAALVPFLGAALQAAWSSWLLALPAHQLKPAGSLAQCPACGSPAMAGVVRNRGKHNGLRYLACSLCACEWHVVRVKCVYCESSKDLRYTSLEDDRHAPGKAPLRAECCPGCDSYLKQNYLENDAAAEPLADDLASLALDIRLDGEGFHRLAPNLMLAPGGG

SEQ ID NO: 67801 - protein, 306 aa, Pseudomonas putida
MITGAAQMDGAILVCSAADGPMPQTREHILLSRQVGVPYIVVFLNKADLVDDAELLELVEMEVRDLLSTYDFPGDDTPIIIGSARMALEGKDDNEMGTTAVKKLVETLDSYIPEPVRAIDQPFLMPIEDVFSISGRGTVVTGRIERGIVRVQDPLEIVGLRDTTTTTCTGVEMFRKLLDEGRAGENCGVLLRGTKRDDVERGQVLVKPGSVKPHTKFTAEVYVLSKEEGGRHTPFFKGYRPQFYFRTTDVTGNCELPEGVEMVMPGDNIQMTVTLIKTIAMEDGLRFAIREGGRTVGAGVVAKIIE

SEQ ID NO: 67802 - protein, 122 aa, Pseudomonas putida
MTPKTEAQESRFDLFKWLAVVALVVVGVVGNQYYSGSPILYRVLVLLVLAAVAGFVALQTAKGKSFFALAKEARTEIRKVVWPTRQETTQTTLIVVAVVLVMALLLWGLDSLLGWAVSLIVG

SEQ ID NO: 67803 - protein, 143 aa, Pseudomonas putida
MAKKIQAYIKLQVKAGQANPSPPVGPALGQHGVNIMEFCKAFNARTQGQEAGLPTPVIITVYSDRSFTFETKSTPASVLLKKAAGLTSGSARPNTVKVGTVTRAQLEDIAKAKQADLTAADLDAAVRTIAGSARSMGLNVEGV

SEQ ID NO: 67804 - protein, 231 aa, Pseudomonas putida
MAKLTKRQKAIAEKIEAGKAYNFEEAATLLASLPAAKFVESYDIAVNLGVDPRKSDQVVRSATVLPHGTGKTVRVAVFTQGPAAEAALAAGADRVGMDDLAAEMKGGDLNYDVVIASPDAMRVVGQLGQVLGPRGLMPNPKVGTVTPDVATAVKNAKAGQVRYRTDKNGIIHTSVGKIGFEADKLKENVEALIADLKRIKPASSKGIYVKRVTLSTTMGPGLVIDQSSLNV

SEQ ID NO: 67805 - protein, 195 aa, Pseudomonas putida
MVLPIRYRIRHQNDIRPRPDETVKTRSKPVAIKLEDKKAIVAEVNEAAKVALSAVVADARGVTVSAMTGLRKEAREAGVYVRVVRNTLLKRAVEGTEFSILNDAFKGPTLIAFSNEHPGAAARLFKEFAKGQDKFEIKAAAFDGNFIAANQIDVLATLPTRDEAIARLMSVIQGATSKLARTLAAIRDQKEATAA

SEQ ID NO: 67806 - protein, 121 aa, Pseudomonas putida
MSLTNEQIIEAIGQKTVLEVVELIKAMEETFGVTAAVAAAGPAAAAAVVEEQTEFNVVLVEAGDKKVNVIKAVRELTGLGLKEAKEKVDGAPQVVAEGVSKEAAEDAKKKLEEAGAKVELK

SEQ ID NO: 67807 - protein, 378 aa, Pseudomonas putida
MNMPSQAAILDAHYMARALELARKGLYTTHPNPRVGCVIVRDGEVVGEGWHVRAGEPHAEVHALRQAGELARGACAYVTLEPCSHHGRTPPCAEALVKAGVARVVAAMQDPNPQVAGQGLRRLAEAGIEVASGVLEAEARALNPGFLKRMEHGLPFVRAKLAMSLDGRTAMASGESQWITGPAARSAVQRLRARSSVVLTSAASVLADNARMTVRGAELGLDAETTALALSRTPLRVLVDGRLRLPLAAPFFQAGPALVVTAVADDPRYAAAGHELLSLPGDNGQVDLGALLHALAARGVNEILLEAGAGLVGAFARQGLVDEYQLFVAGTFLGSQARPLLDWPMDKMSEAPRLKITEMRAVGDDWRVTAIPLPAPGV

SEQ ID NO: 67808 - protein, 221 aa, Pseudomonas putida
MFTGIIESIGTIRSLTPKGGDVRVYVETGKLDLGDVKLGDSIAVNGVCLTAVELPGDGFWADVSVETLKRTAFIDLKSGSKVNLEKALTPTTRLGGHLVSGHVDGVGEIISRSDNARAIQFRVRAPKELAKYIAHKGSITVDGTSLTVNEVNGAEFELTIVPHTLSETIMADYRAGRRVNLEVDLLARYLERLLLGDKAAEPSKGSGITESFLAANGFLKS

SEQ ID NO: 67809 - protein, 158 aa, Pseudomonas putida
MTLKTIEGTFIAPKGRYALVVGRFNSFVVESLVSGAVDALVRHGVSESDITIIRAPGAFEIPLVAQKVAQQGAYDAIIALGAVIRGGTPHFEYVAGECTKGLAQVSMEFGVPVAFGVLTVDSIEQAIERSGTKAGNKGAEAALSALEMVSLLAQLEAK

SEQ ID NO: 67810 - protein, 323 aa, Pseudomonas putida
MGEFELINHYFAAAPCAQGGEGVALGIGDDCALLDLPPGEQLAVSTDTLVAGVHFPAVCDPLLLGQRSLAVAASDLAAMGATAIGFTLALTLPDVGPDWLAAYADGLGRMAHRCRMSLIGGDTTRGPLSITVTVFGRVPAGQALRRSGARPGDLLCVGGSLGKAAGALPLVLGEREAPAAQAEPLLAHYWSPMPQLTLGALLRGKATAALDISDGLLADCGHIAKASGVALEVNLAQVPVSPALEAFLGREAALQAALTGGDDYVLAFTLPPEALAPLAGLGCIEVHIIGRVLEGQGVTLRDSQGQDITPVQRGYQHFGRDRD

SEQ ID NO: 67811 - protein, 270 aa, Pseudomonas putida
MRLLPGLLALFACTVLAAEPLRVVSLAPSMSEIMLELQADDLLVGVLDGGERPAALRHLPSVGRQGQLDMERLLSLRPDLLLLWPGSVPPAQRDQLKRLGIATFSAEPHDISQLIEQIEAIAERVGRAKQGHSYARALRERLQQLRQQYRRDEPLQVFYQVWDRPLYTLGGRQVVTDALAVCGARNVFADLGQPAPQVNVESVLLRNPQVILAADEAQLASWKAWPQIRAVADGRLLVVPDKGLERPSGQMIEATARLCALLDAKAPVSR

SEQ ID NO: 67812 - protein, 746 aa, Pseudomonas putida
MVQVRVHQPVNTDGSINLEAWLDHVVSVDSALDRAALKEACEFALEVEKKGNPAKHSWADGTSSFQAGLEIAEILADLKLDQDSLVAAVIYRSVREGKVTLAEVSQRFGPVVSKLIDGVLRMAAISASLSPRQSLVLGSQAQVENLRKMLVAMVDDVRVALIKLAERTCAIRAVKSADDEKRLRVAREVFDIYAPLAHRLGIGHIKWELEDLSFRYLEPDQYKQIAKLLHERRLDRERFISDVMNQLQNELLATGVKADISGRAKHIYSIWRKMQRKGLEFSQIYDVRAVRVLVPEIRDCYTALGIVHTLWRHIPKEFDDYIANPKENGYRSLHTAVIGPEGKVLEVQIRTHGMHEEAELGVCAHWRYKGTDVKPSSNHYEEKISWLRQVLEWHEELGDIGGLAEQLRVDIEPDRVYVFTPDGHAIDLPKGATPLDFAYRVHTEIGHNCRGAKINGRIVPLNYSLQTGEQVEIITSKHGNPSRDWLNSNLGYVTTSRARAKIVHWFKLQARDQNVAAGKTLLERELSRLGLPQVDFERLAEKTNVKTAEDMFASLGAGDLRLAHLVNAAQQLLEPERIEQIELVPRKPTGPRTGKRGDIQIQGVGNLLTQMAGCCQPLPGDAIVGYITQGRGVSIHRQDCASVLQLAGKEPERMIQVSWGPIPVQTYPVDIVIRAYDRPGLLRDVSQVLLNEKINVLAVNTRSNKEDNTALMSLTIEIPGLDALGRLLGRISQLPNIIETRRNRTP

SEQ ID NO: 67813 - protein, 1357 aa, Pseudomonas putida
MAYSYTEKKRIRKDFSKLPDVMDVPYLLAIQLDSYREFLQAGASKDHFRDVGLHAAFKSVFPIISYSGNAALEYVGYRLGEPAFDVKECVLRGVTFAVPLRVKVRLIIFDKESSNKAIKDIKEQEVYMGEIPLMTENGTFVINGTERVIVSQLHRSPGVFFDHDRGKTHSSGKLLYSARIIPYRGSWLDFEFDPKDCVFVRIDRRRKLPASVLLRALGYSTEEVLNTFYTTNVFHISGEKLSLELVPQRLRGEVAVMDIHDETGKVIVEQGRRITARHINQLEKAGVKQLDVPMEYVLGRTTAKAIVHPATGEILAECNTEMTTELLIKVAKAQVVRIETLYTNDIDCGPFISDTLKIDTTSNQLEALVEIYRMMRPGEPPTKDAAETLFNNLFFSAERYDLSAVGRMKFNRRIGRTEIEGSGVLSKEDIVEVLKTLVDIRNGKGIVDDIDHLGNRRVRCVGEMAENQFRVGLVRVERAVKERLSMAESEGLMPQDLINAKPVAAAVKEFFGSSQLSQFMDQNNPLSEITHKRRVSALGPGGLTRERAGFEVRDVHPTHYGRVCPIETPEGPNIGLINSLAAYARTNQYGFLESPYRVVKEGVVSDDIVFLSAIEEADHVIAQASAAMNDKKQLIDELVAVRHLNEFTVKAPEDVTLMDVSPKQVVSVAASLIPFLEHDDANRALMGSNMQRQAVPTLRADKPLVGTGMERNVARDSGVCVVARRGGVIDSVDASRIVVRVADDEVETGEAGVDIYNLTKYTRSNQNTCINQRPLVSKGDKVQRGDIMADGPSTDMGELALGQNMRIAFMAWNGFNFEDSICLSERVVQEDRFTTIHIQELTCVARDTKLGPEEITADIPNVGEAALNKLDEAGIVYVGAEVGAGDILVGKVTPKGETQLTPEEKLLRAIFGEKASDVKDTSLRVPTGTKGTVIDVQVFTRDGVERDSRALAIEKMQLDEIRKDLNEEFRIVEGATFERLRSALNGQVVDGGAGLKKGTVITDEVLDGLEHGQWFKLRMAEDALNEQLEKAQQYIVDRRRLLDDKFEDKKRKLQQGDDLAPGVLKIVKVYLAIRRRIQPGDKMAGRHGNKGVVSVIMPVEDMPHDANGTPVDVVLNPLGVPSRMNVGQILETHLGLAAKGLGEKIDRMLEEQRKAAELRVFLTEVYNEIGGRQENLDEFTDEEILALANNLKKGVPMATPVFDGAKEREIKAMLKLADLPESGQMVLFDGRTGNKFERPVTVGYMYMLKLNHLVDDKMHARSTGSYSLVTQQPLGGKAQFGGQRFGEMEVWALEAYGAAYTLQEMLTVKSDDVNGRTKMYKNIVDGDHRMEPGMPESFNVLIKEIRSLGIDIDLETE

SEQ ID NO: 67814 - protein, 1409 aa, Pseudomonas putida
PLPAPPGGKALKDLLNLLKNQGQVEEFDAIRIGLASPEMIRSWSFGEVKKPETINYRTFKPERDGLFCAKIFGPVKDYECLCGKYKRLKHRGVICEKCGVEVALAKVRRERMAHIELASPVAHIWFLKSLPSRIGLLMDMTLRDIERVLYFESYVVIDPGMTTLEKGQLLNDEQYFEALEEFGDDFDARMGAEAVRELLHAIDLEHEIGRLREEIPQTNSETKIKKLSKRLKLMEAFQGSGNLPEWMVLTVLPVLPPDLRPLVPLDGGRFATSDLNDLYRRVINRNNRLKRLLDLSAPDIIVRNEKRMLQEAVDALLDNGRRGRAITGSNKRPLKSLADMIKGKQGRFRQNLLGKRVDYSGRSVITVGPTLRLHQCGLPKKMALELFKPFIFGKLEMRGLATTIKAAKKMVERELPEVWDVLAEVIREHPVLLNRAPTLHRLGIQAFEPVLIEGKAIQLHPLVCAAYNADFDGDQMAVHVPLTLEAQLEARALMMSTNNILSPANGEPIIVPSQDVVLGLYYMTREAINAKGEGRVFADLQEVDRVFRAGEAALHAKIKVRINETVKERDGSVVKNTRIVDTTVGRALLFQVVPAGLPYDVVNQPMKKKAISKLINQCYRVVGLKETVIFADQLMYTGFAYSTISGVSIGVNDFVIPDEKARIIGNATDEVKEIESQYASGLVTQGEKYNKVIDLWSKANDEVSKAMMANLSKEKVIDREGKEVEQESFNSMYMMADSGARGSAAQIRQLAGMRGLMAKPDGSIIETPITANFREGLSVLQYFISTHGARKGLADTALKTANSGYLTRRLVDVAQDLVVTEIDCGTDQGLVMTPHIEGGDVVEPLGERVLGRVIARDVFKPGTEDVIVPAGTLVDEQWVEFIELNSIDEVIVRSPINCETRYGICAKCYGRDLARGHQVNIGEAVGVIAAQSIGEPGTQLTMRTFHIGGAASRTSAADSVQVKNGGMVRLHNLKQVERADGNLVAVSRSGELAIADEFGRERERYKLPYGAVISVKEGEKVEAGAIVAKWDPHTHPIVTELKGTVTFVGMEENITIKRQTDELTGLTNIEVLDVKDRPAAGKEIRPAIKMVDAAGKDLYLPGTDVPAQYFLPANALVGVADGAQIGVGDVIARIPQETSKTRDITGGLPRVADLFEARRPKEASILAEVSGTIAFGKETKGKRRLVITPTDGSEPYEELIPKWRHLNVFEGEQVNRGEVISDGPSDPHDILRLLGVSALAKYIVNEIQDVYRLQGVKINDKHIETILRQMLRKVEISESGDSSFIKGDQMELTPGAGRERASRSEDKFISKFTRVLLGITKASLSTESFISAASFQETTRVLTEAAVTGKRDYLRGLKENVVVGRLIPAGTGLAYHSERKRRRDADKPLRVSASEVEAALTEALNSSGN

SEQ ID NO: 67815 - protein, 715 aa, Pseudomonas putida
MARTTAINRYRNIGICAHVDAGKTTTTERILFYTGLSHKMGEVHDGAATTDWMVQEQERGITITSAAVTTFWKGSRGQYDNYRVNVIDTPGHVDFTIEVERSLRVLDGAVVVFCGTSGVEPQSETVWRQANKYGVPRVVYVNKMDRAGANFLRVVGQIKNRLGHTPVPVQLAIGSEDNFQGQVDLIKMKAIYWNDDDKGTTYREEEIPADMVELANEWRNNMVEAAAEATEELMNKYLEEGELSVEEIKAGLRARTLASEIVPAVCGSSFKNKGVPLVLDAVIDFLPAPTEIPAIKGIHPDLIDVPKDEVKPEQFDERHADDDEPFSALAFKIATDPFVGTLTFVRVYSGFLTSGDSVINSVKGKKERVGRMVQMHANQREEIKEVRAGDIAALIGMKDVTTGDTLCNADKPIILERMDFPEPVISLSVEPKTKQDQEKMGIALGKLAQEDPSFRVKTDEETGQTIISGMGELHLDILVDRMKREFNVEANIGKPQVSYREKITKSNVEIEGKFVRQSGGRGQFGHCWVRFSEPDVDDKGNITEGLVFSNEVVGGVIPKEYIPAIQKGIEEQMKNGVVAGYPLIGLKAAVFDGSYHDVDSNEMAFKIAASMATKQLAQKGGGVVLEPIMKVEVVTPEDYLGDVMGDLNRRRGLVQGMDESVSGRVVRAEVPLGEMFGYATDVRSMSQGRASYSMEFSKYAEAPSNIVEALVKKQG

SEQ ID NO: 67816 - protein, 397 aa, Pseudomonas putida
MAKEKFDRSLPHVNVGTIGHVDHGKTTLTAALTRVCSEVFGSAVVEFDKIDSAPEEKARGITINTAHVEYNSNIRHYAHVDCPGHADYVKNMITGAAQMDGAILVCSAADGPMPQTREHILLSRQVGVPYIVVFLNKADLVDDAELLELVEMEVRDLLSTYDFPGDDTPIIIGSARMALEGKDDNEMGTTAVKKLVETLDAYIPEPVRAIDQPFLMPIEDVFSISGRGTVVTGRIERGIVRVQDPLEIVGLRDTTTTTCTGVEMFRKLLDEGRAGENCGVLLRGTKRDDVERGQVLVKPGSVKPHTKFTAEVYVLSKEEGGRHTPFFKGYRPQFYFRTTDVTGNCELPEGVEMVMPGDNIQMTVTLIKTIAMEDGLRFAIREGGRTVGAGVVAKIIE

SEQ ID NO: 67817 - protein, 94 aa, Pseudomonas putida
MKAFDHRLIDQSTQEIVETAKRTGAQVRGPIPLPTRKERFTVLVSPHVNKDARDQYEIRTHKRVLDIVQPTDKTVDALMKLDLAAGVEVQISLG

SEQ ID NO: 67818 - protein, 200 aa, Pseudomonas putida
MQLNVNDAQAIEVSELTFGGEFNETLVHQAVVAYMAGGRQGTKQQKTRSDVAGGGKRPWRQKGTGRARAGTTRGPIWRGGGVTFAARPQDHSQKLNKKMYRAALRSILAELVRSDRLVVVQDFAVEAPKTKDLLNKLNGMGLSDVLIVSDAVDQNLYLAARNLPHVDVRDVQGSDPVSLIAYEKVLITVSAVKKFEELLG

SEQ ID NO: 67819 - protein, 274 aa, Pseudomonas putida
MAIVKCKPTSPGRRFVVKVVNKELHKGAPHAPLIEKKSKSGGRNNNGRITTRHVGGGHKQHYRLVDFRRNDKDGIPATVERIEYDPNRTAHIALLCYADGERRYIIAPKGVSAGDQLIAGALAPIKAGNSLQLRNIPVGSTIHGIELKPGKGAQIARSAGASAQLIAREGVYVTLRLRSGEMRKVLAECRATLGEVSNSEHSLRSLGKAGAKRWRGVRPTVRGVAMNPVDHPHGGGEGRTSGGRHPVSPWGFPTKGAKTRGNKRTDNMIVRRRK

SEQ ID NO: 67820 - protein, 110 aa, Pseudomonas putida; identical to SEQ ID NO: 43493

SEQ ID NO: 67821 - protein, 237 aa, Pseudomonas putida
MRTSNGVDQMGQKVHPTGIRLGIVKEHTSVWYADGATYADYLLKDLKTREYLQDKLKSASVSRIDIHRPAQTARITIHTARPGIVIGKKGEDVEKLRQDLTKQMGVPVHINIEEIRKPELDAMLVAQSVAQQLERRVMFRRAMKRAVQNAMRIGAKGIKIQVSGRLGGAEIARTEWYREGRVPLHTLRADIDYNTYEAHTTYGVIGVKVWIFKGEVIGGRQEELKPQAPAPRKKAAK

SEQ ID NO: 67822 - protein, 137 aa, Pseudomonas putida
MLQPKRTKFRKQMTGHNRGLALRGSKVSFGEFALKAVARGRLTARQIESARRALTRHVKRGGKIWIRVFPDKPISKKPLEVRMGKGKGSVEYWVAQIQPGKVLYEIEGVSEELAREAFALAAAKLPLATSFVKRTVM

SEQ ID NO: 67823 - protein, 90 aa, Pseudomonas putida
MIMAEAEKTVRTLTGRVVSDKMDKTITVLIERRVKHPIYGKYVKRSTKLHAHDEANQCKIGDKVSIRETRPLAKTKSWALVEVLERAVEV

SEQ ID NO: 67824 - protein, 104 aa, Pseudomonas putida
MQKIRRDDEIIVIAGKDKGKRGKVLKVLADDRLVIGGVNLVKRHTKPNPMAGVQGGIVEKEAPLHASNVAIFNGETNKADRVGFKVEDGKKIRVFKSTQKAVDA

SEQ ID NO: 67825 - protein, 179 aa, Pseudomonas putida
MARLKEIYRNEIAPKLKEELKLSNVMEVPRVTKITLNMGLGEAIGDKKVIEHAVADLEKITGQKPVVTFARKSIAGFKVREGWPIGVKVTLRSDKMYEFLDRLLAISLPRVRDFRGLNAKSFDGRGNYSMGVKEQIIFPEIDYDKIDALRGLDITLTTTARSDDEGRALLRAFKFPFRN

SEQ ID NO: 67826 - protein, 177 aa, Pseudomonas putida
MSRVAKNPVKLPSGVEVKFAGQQLSVKGAKGTLELNVHSSVEVTEESGELRFVARNGDQQARAMAGTTRALVNNMVQGVSQGFERKLQLVGVGYKAQAKGTVLNLALGFSHPVDYELPAGITAETPSQTDILIKGIDKQLVGQVAAEIRDFRPPEPYKGKGVRYADEVVRRKEAKKK

SEQ ID NO: 67827 - protein, 116 aa, Pseudomonas putida
MTDKKVIRLRRARKARLKMHELEVVRLCVFRSSQHIYAQVISADGSKVLASASTLDKDLRDGATGNIDAATKVGKLVAERAKAAGVSQVAFDRSGFKYHGRVKALADAAREGGLEF

SEQ ID NO: 67828 - protein, 166 aa, Pseudomonas putida
MANNDQKRDEGYIEKLVQVNRVAKTVKGGRIFTFTALTVVGDGKGRVGFGRGKSREVPAAIQKAMEAARRNMIQVDLKGTTLQYATKAAHGASKVYMQPASEGTGIIAGGAMRAVLEVAGVQNVLAKCYGSTNPVNVVYATFKGLKAMQSPESIAAKRGKSVEEIF

SEQ ID NO: 67829 - protein, 144 aa, Pseudomonas putida
MKLNDLSPAPGSRREKHRPGRGIGSGLGKTGGRGHKGQTSRSGGSIAPGFEGGQQPLHRRLPKFGFVSLKAMDRAEVRLSELAKVEGDVISVQSLKDANVINQHIQRVKIMLSGEVTRAVTIKGIAATKGARAAIEAAGGKFEE

SEQ ID NO: 67830 - protein, 118 aa, Pseudomonas putida
MARIAGVNIPDNKHTVISLTYIYGVGRTTAQKICADAGVNPAAKIKDLSDEQIETLRGEVAKFTTEGDLRRDINMKIKRLMDLGCYRGLRHRKGLPVRGQRTKTNARTRKGPRKPIRK

SEQ ID NO: 67831 - protein, 129 aa, Pseudomonas putida
MAKPAARPRKKVKKTVVDGIAHIHASFNNTIVTITDRQGNALSWATSGGSGFRGSRKSTPFAAQIAAERAGQAALEYGLKNLDVNVKGPGPGRESAVRALNSCGYKIASITDVTPIPHNGCRPPKKRRV

SEQ ID NO: 67832 - protein, 333 aa, Pseudomonas putida
MQISVNEFLTPRHIDVQVVSPTRAKITLEPLERGFGHTLGNALRRILLSSMPGCAVVEAEIDGVLHEYSAIEGVQEDVIEILLNLKGLAIKLHGRDEVTLTLSKKGSGVVTAADIQLDHDVEIVNPDHVIANLASNGALNMKLTVARGRGYEPADSRQTDEDESRSIGRLQLDASFSPVRRIAYVVENARVEQRTNLDKLVIDLETNGTLDPEEAIRRAATILQQQLAAFVDLKGDSEPVVVEQEDEIDPILLRPVDDLELTVRSANCLKAENIYYIGDLIQRTEVELLKTPNLGKKSLTEIKDVLASRGLSLGMRLDNWPPASLKKDDKATA

SEQ ID NO: 67833 - protein, 128 aa, Pseudomonas putida
MRHRKSGRHLSRTSSHRKAMFQNMAVSLIEHELIKTTLPKAKELRRVAEPLITLAKEDSVANRRLAFDRTRSKSAVGKLFNDLGKRYATRQGGYLRILKCGFRAGDNAPMAYVELVDRPVGGAVEAAE

SEQ ID NO: 67834 - protein, 484 aa, Pseudomonas putida
MTTLMVQGTTSDAGKSTLVTALCRWLLRQGVAVVPFKPQNMALNSAVTADGGEIGRAQAVQAQACRLQPHTDMNPVLLKPNSDTGAQVIIHGRAVTSMNAVAYHDYKTTAMQAVLASHHRLSAAYPVVMVEGAGSPAEINLRAGDIANMGFAEAVDCPVILVADINRGGVFAHLVGTLELLSTTEQARVKGFVINRFRGDIALLQPGLDWLEQRTGKPVLGVLPYVTDLHLEAEDGIDVRQGVKHERVLKVIVPVLPRISNHTDFDPLRLHPQVDLQFIGPGQPIPAADLIILPGSKSVRGDLAQLRERGWDKAIERHLRYGGKLIGICGGLQMLGREVHDPLGLEGAAGSSQGLGLLDYATVLEAEKQLRNVAGTLSLEAATVTGYEIHAGVTTGPALAQPAVQLADGRHDGAVSADGQILATYLHGLFEGSQSCAALLRWAGLEDVQVIDYEALREHDIERLADLVEKHLDTVQLRQLCGVA

SEQ ID NO: 67835 - protein, 188 aa, Pseudomonas putida
MILDLLRHGETEQGGLRGSRDDALTDKGWAQMRGAVADAGPWQVLVSSPLQRCGRFADELGAQLNLPVQREPALQELHFGDWEGQSAAQIMEHQADALGRFWADPYAFTPPNGEPVEAFAERVLAAVERLRLQHAGKRVLLVTHGGVMRLLLARARGLPREQLLQVEVGHGALMRLVPGGDGQLVEAP

SEQ ID NO: 67836 - protein, 181 aa, Pseudomonas putida
MARGVNKVILVGTCGQDPEVRYLPNGNAVTNLSLATSEQWTDKQSGQKVERTEWHRVSLFGKVAEIAGEYLRKGSQCYIEGKLQTREWEKDGIKRYTTEIIVDINGTMQLLGGRPQGQQQGGDPYNQGGGNYGGGQQQQYNQAPPRQQAQRPQQAPQRPAPQQPAPQPAADFDSFDDDIPF

SEQ ID NO: 67837 - protein, 421 aa, Pseudomonas putida
MKKVMLKTSLGVAVALASSQLFASGFALNEQSISSMGTGFAGRSSSAEDASTVFGNPAGMSRLKREQFTVGGAAVIAKTDISGPGSNLGGETDGDMVPVVGVPMGYYVKPIDDHWSVGFGIYVPFGLVTDYGSDDAARYWGKKSHVQVVTFQPTVSYAFNDKVSIGFGPTINRIEGELGSSLINPFTPGRNDGEVKIKGDDTAVGYNIGILVQATDRTRVGLTYHSMVDYELEGKTRVSTPLIGPFNGNKFDASLKIKTPESVDLSVTHELDDQWTLYAGSTWTRWSRLENITVQNDVPAPLAGSAFQTITEEQNWHDTWAHAIGASYKVNKEWVLRTGFTVDQSPTNNHDRSPRIPTGDRRIFSLGAGWSPNDDMTIDVAYSYLWEEDTKVNQVSATKGSYQAKYENSAHGIGASLTYRF

SEQ ID NO: 67838 - protein, 392 aa, Pseudomonas putida
MLAAIKRYPHTVRLLLTTTFTLTVARALTLPYLVVYLADNFQLPISQIGLLIGGALIVASLLSLYGGHLVDTLSNHTLVSASTLLFALAFVGAVASRSALPFFFCLVLINLALAVVDIAAKAGFCALLPVDERAEVFAIKYTLSNVGYAAGPLLGVAMLELNDHVPFLASALLGLAMCLAYWRLGDRSLQASAPDKPAAGFGQVALGLARDRRLVCFTVGGVLSAVVFGQFTAYLSQYLVVTSNPAEAARLIGYLVTTNAVTVIALQYLIGRRISRQRLMPWLLAGMGLFIAGLLGFALAGSVLAWCLAMLVFTLGEIIVIPAEYMFIDLIAPEHLRGVYYGAQNLSNLGAALGPVMVGFALVHLWPGAVFYLLVLSVILAGVFYWLGTRRG

SEQ ID NO: 67839 - protein, 443 aa, Pseudomonas putida
MSTTPATPKVGFVSLGCPKALVDSERILTQLRMEGYEVVPTYEDADVVVVNTCGFIDSAKAESLEVIGEAIKENGKVIVTGCMGVEEGSIRDVHPSVLSVTGPQQYEQVVNAVHEVVPPRQDHNPLIDLVPPQGVKLTPRHYAYLKISEGCNHSCSFCIIPSMRGKLVSRPVGEVLSEAERLVKAGVKEILVISQDTSAYGVDVKYKTDFWNGRPVKTRMLELCEALSSLGAWVRLHYVYPYPNVDDVIPLMAAGKILPYLDIPFQHASPKVLKSMKRPAFEDRTLARIKNWREQCPELVIRSTFIVGFPGETEEDFQYLLDWLTEAQLDRVGCFQYSPVEGAPANDLGLAEVPDDVKQERWDRFMAHQQAISAARLQLRIGKEIDVLIDEVEEQGSVGRSFFDAPEIDGSVFIDGDHGFKPGDKVRCRVVDADEYDMWAEPI

SEQ ID NO: 67840 - protein, 665 aa, Pseudomonas putida
MPSRRERANAIRALSMDAVQKANSGHPGAPMGMADIAEVLWRDYLKHNPSNPSFADRDRFVLSNGHGSMLIYSLLHLTGYDVTIDDIKGFRQLHSRTPGHPEYGYTPGVETTTGPLGQGIANAVGFALAEKVLAAQFNRDGHNIVDHNTYVFLGDGCMMEGISHEVASLAGTLGLNKLIAFYDDNGISIDGEVHGWFTDNTPARFEAYNWQVIRNVDGHDAEEIKMAIETARKSDRPTLICCKTTIGFGSPNKQGKEDCHGAPLGNDEIALTRQALNWNHGPFEIPADIYAEWDAKAAGAKVEAEWNQRFDAYAKAYPELAAEFKRRASGELPADFSEKAQAYINEVAAKGETIASRKASQNALNAFGPLLPEFLGGSADLAGSNLTLWKGCKGVEANDASGNYVFYGVREFGMTAIMNGVALHGGLVPYGATFLMFMEYARNAVRMSALMKQRVIHVYTHDSIGLGEDGPTHQPIEQLTSLRSTPNLDTWRPADAVESAVSWKNALERKDGPSALIFSRQNLQHQDRDAQQIADISRGGYVLKDCAGEPELILIATGSEVGLAVQAFEKLTEQGRKVRVVSMPCTSVFDAQDAAYKQSVLPLEVGARIAIEAAHADFWYKYVGLEGRIIGMTTYGESAPASALFEEFGFTLENILGTAEELLED

SEQ ID NO: 67841 - protein, 387 aa, Pseudomonas putida
MTVLKMTDLDLQGKRVLIREDLNVPVKDGVVASDARILAALPTIKLALEKGAAVMVCSHLGRPTEGEFSAENSLKPVADYLSKALGRDVPLVADYLDGVAVQAGELVLFENVRFNKGEKKNADELAQKYAALCDVFVMDAFGTAHRAEGSTHGVAKFAKVAAAGPLLAAELDALGKALKAPAKPMAAIVAGSKVSTKLDVLNSLSSVCDQLIVGGGIANTFLAAAGHPVGKSLYEPDLVDTAKAIAAKVSVPLPVDVVVAKEFAESAEATVKAIADVAADDMILDIGPQTAANFAELLKSSKTILWNGPVGVFEFDQFGNGTKVLAKAIADSAAFSIAGGGDTLAAIDKYGVSKEISYISTGGGAFLEFVEGKVLPAVAILEERAKA

SEQ ID NO: 67842 - protein, 349 aa, Pseudomonas putida
MALISMRQMLDHAAEFGYGVPAFNVNNLEQMRAIMEAADKTDSPVIVQASAGARKYAGAPFLRHLILAAIEEFPHIPVCMHQDHGTSPDVCQRSIQLGFSSVMMDGSLGEDGKTPTDYEYNVRVTQQTVAMAHACGVSVEGELGCLGSLETGMAGEEDGIAAEGVLDHSQMLTDPEEAADFVKKTQVDALAIAIGTSHGAYKFTKPPTGDVLAIDRIKEIHKRIPNTHLVMHGSSSVPQEWLAIINQYGGDIKETYGVPVEEIVEGIKHGVRKVNIDTDLRLASTGAMRRLMAQNPSEFDPRKFFGETIKAMRDVCIARYEAFGTAGNASKIKPISLEGMYQRYLKGEL

SEQ ID NO: 67843 - protein, 148 aa, Pseudomonas putida
MNLLRERYRVDLVGLQAACEANYARLMRLLPDMRTTQSSRRIGMTQGDQMLGVLVLDVVLACPYTTTLHVRQEHSLPWLPVPHLEVQVYHDARMAEVVSAEHTRRLRSIYPYPNDAMHQPDEKAQLNLFLGEWLSHCLACGHELASVR

SEQ ID NO: 67844 - protein, 218 aa, Pseudomonas putida
MADSWPPFTDAKMPGGGLATSIVTTALARAGYASGYEEVPWARALLGVGEGRYDVLINAWYNDSRANIGQFSSAYLSNRIRLLQRKGEAFSYKRLSDLYAYSIAVVRDYAYSPEFDGDPRLHKVPVRNFSSAVRMLAAGRVSLAVEDEYVARYNLQREPQDVRDGVMLVDPPLGENTLHILVSLKHPEHDRIVERFEQAIAAMKADGSYARLLRQYGF

SEQ ID NO: 67845 - protein, 266 aa, Pseudomonas putida
MSPPDQSRPVHVVQLTDAHLFADPAGSMLGLKTRDSLRHVLAQVRREQPLVDLLLCTGDLSQDASVASYEAFRELTAPFAVPTRWLPGNHDEAQVMAQVAPELVQAVTDIGAWRVVMLNTAVQGATHGFLQDDQLAVLEAALKEAGERHCLVCFHHQPVDIGCAWIAPIGLRNAQALFDIVEGYPQVRALLWGHVHQEWDEVREGRRLLATPSTCIQFAARSEDFQVSEEHPGYRWLRLHADGRLETGVERALDFEVQLDFDSPGY

SEQ ID NO: 67846 - protein, 192 aa, Pseudomonas putida
MLKKTFAALALGTALLSAGQAMAAEYKIDKEGQHAFVDWKISHLGYSFIHGTFKDFDGNFSWDSAKPEASKISVDLKTASLWSNHAERDKHIASADFLDVKKYPDAKFVSTSVKSTGDKTADVTGDLTMHGVTKPVTFKATFNGEGKDPWGGERAGFNATTTLNLNDFGIKGPGATSQTLDLDISVEGVKQK

SEQ ID NO: 67847 - protein, 278 aa, Pseudomonas putida
MNYRHAFHAGNHADVLKHIVLTRLIALMSRKEQPFAYIDTHAGLGLYDLQGDQASRTGEYLEGVARLWNRDDLPAMADDYLRIIKRLNADGELRYYPGSPELARRLMRQQDRALLNEKHPEDGPLLKENMKKDPRVTVHLGEGWHVPRALLPVQEKRAIMLIDPPFEQADELKRCTTAMKEAIGRMRQTVAAIWYPIKDQRSLTRYYQDLTSTGAPKLLRVELYVHHQDSPQGLNGSGLAIANPPWGLEDELKELLPWLAKELAQTAGSYRMDWLIAE

SEQ ID NO: 67848 - protein, 602 aa, Pseudomonas putida
MAETPRPAEHTSSLKIYFRLLSYVKPYVGIFLLSIVGFVIFASTQPMLAGILKYFVDGLSNPEAVLFPNVPYLRDLQLLQAVPLLIILIAAWQGLGSFLGNYFLAKVSLSLVHDLRVALFNKLLVLPNRYFDNHNSGHLISRITFNVTMVTGAATDAIKVVIREGLTVVFLFAYLLWMNWHLTLVMVAILPVIAVMVSIASKKFRKQSKKIQVAMGDVTHVASETIQGYRVVRSFGGEAYEQQRFGQASQSNTDKQLRMTKTGSLYTPMLQLVIYSAMAALMFLVLFLRGDSTAGDLVAYITAAGLLPKPIRQLSEVSSTIQKGLAGAESIFEQLDEAPEVDTGTVEKERVEGRLEVRNLSFTYPGTEREVLSDISFVAEPGQMIALVGRSGSGKSTLAALIPRFYHHDKGQILLDGVEIEHYRLRNLRRHVSQVTQHVTLFNDTVANNIAYGDLAGAPRADIEAAAADAYAKEFVDRLPKGFDTEVGENGVLLSGGQRQRLAIARALLKNAPLLILDEATSALDTESERHIQAALDHVMQGRTTLVIAHRLSTIEKADQILVMDQGRLVERGTHTELLAANGHYARLHAMGLDEPAKADIT

SEQ ID NO: 67849 - protein, 469 aa, Pseudomonas putida
MPRFDQAPVLVVGDVMLDRYWHGGTSRISPEAPVPVVKVDQIEDRPGGAANVALNIAALGAPASLIGVTGQDEAADSLANSLQAAGVRSVFQRIAHQPTIVKLRVMSRHQQLLRIDFEEPFATDPLSLGAEVDSLLEGVKVLVLSDYGKGALKNHQNLIQAARAKGIPVLADPKGKDFSIYRGASLITPNLSEFETIVGRCVDEAELVAKGLQLLQDLDLGALLVTRGEHGMTLLRVGQPALHLPARAREVFDVTGAGDTVISTLAAAIAAGEDLPHAVALANLAAGIVVGKLGTAAISAPELRRAIQREEGSERGVLGLEQLLLAIDDARAHNEKIVFTNGCFDILHAGHVTYLEQARAQGDRLIVAVNDDASVSRLKGPGRPINSVDRRMAVLAGLGAVDWVISFPEGTPENLLSQVKPDVLVKGGDYGIDQVVGADIVKGYGGTVKVLGLVENSSTTAIVEKIRKN

SEQ ID NO: 67850 - protein, 271 aa, Pseudomonas putida
MHSWIDGQPATALNLQNRGLAYGDGLFETIAVRGARPSLLDGHLARLALGCQRLAINADLALVRDELLRYASQLGEGVVKLILTRGDSQRGYAPAVDAAPRRILQGSPLPRYPVEHAEHGVRLFPCHTRLGEQPLLAGLKHLNRLEQVLARAEWQDSDHAEGLMRDAQGRVIEGVYSNLFLVRDGVLLTADLSRCGVAGVMRAALLEQAPLLGIAVQVCDLSFEALEQANEVFVCNSVYGIWPVRGVAALNWSPGPLTRKLQAVARTLLET

SEQ ID NO: 67851 - protein, 122 aa, Pseudomonas putida
MSGLFITLEGPEGAGKSTNRDYLAARLREHGLDVVLTREPGGTPLAEKVRELLLTPSDEGMAADTELLLVFAARAQHLAQVIRPALARGAVVLCDRFTQGLYSFNAQGKHEEKFDGELGLVA

SEQ ID NO: 67852 - protein, 154 aa, Pseudomonas putida
MRVLFVCLGNICRSPTAEGVLRHQLHAAGLADKVQVASAGTGDWHVGKAPDSRTCKAALARGYDLSQQRAQQVKASHFAEYDLVLAMDEHNLRDLRALRPSTAVGELDLFLRRYGAALDEVPDPYYGGADGFEQVLDLVEAACQALVLEIKGRL

SEQ ID NO: 67853 - protein, 364 aa, Pseudomonas putida
MAALKTCCLRHFADEVLKCDRLVCVSIQVFRFRAWPRAWRTLSDDKIIRACSMSASLAFVFPGQGSQSLGMLAELGAEKPVIIETFKEASEALGYDLWKLVQDGPEEQLNQTDKTQPAILTASIALWRLWLEEGGAKPAFVSGHSLGEYSALVAAGSISLKDAVRLVERRGQLMQEAVPAGHGAMAAILGLDDAVVVELCAEAAEDEVVSAVNFNSPGQVVIAGNKAAVDRAMELCKAKGAKRALPLAVSVPSHCALMKPAAERFAESVNAIEWKAPQIPVVQNVTAAVAADLDALKHDLLAQLYQPVRWVECVQTLAANGAVNLVECGPGKVLAGLNKRCADGVTTYNLNTPDAVAATRAALA

SEQ ID NO: 67854 - protein, 328 aa, Pseudomonas putida
MAEAYPWQQALWQQLAGRSRHAHAYLLHGPQGIGKRAMAERLMARLLCQQPQGLDACGACKSCLLLKAGSHPDNFVLEPEEADKPIKVDQVRELVAFVVQTAQLGGRKVVLIEPVEAMNVNASNALLKSLEEPSGDTVLLLVTHQPSRLLPTIKSRCQQVACPQPSLAQSQAWLAGALPDCDEVERDELLTLAAGSPLMAVSLQAQGVREQRALVTDGVKKLLKQQQSPSQLADAWSGVPLLLLFDWFCDWTHLILRYQLTQDEEGLGLADMRKVVQYLAQKSRQAKVLEVQAWILEQRQKVLGKANLNRALLLESLLAHWLQLPGAR

SEQ ID NO: 67855 - protein, 78 aa, Pseudomonas putida
MSTIEERVKKIVAEQLGVKEEEVTVEKSFVDDLGADSLDTVELVMALEEEFETEIPDEEAEKITTVQAAIDYVKAHQA

SEQ ID NO: 67856 - protein, 414 aa, Pseudomonas putida
MSRRRVVVTGMGMLSPLGTDVPSTWQGILAGRSGIGPIEHTDLSAYSTRFGGSVKGFEVEQYLSAKEARKLDLFIQYGLAAGFQAVRNAGLEVTDANRERIGVAMGSGIGGLTNIEETSRTLHDSGPRRISPFFVPGSIINMISGFLSIHLGLQGPNYAIATACTTGTHCIGMAARNIAYGEADVMIAGGAEMAACGLGMGGFGASRALSTRNDEPSRASRPWDKGRDGFVLSDGAGALVLEELEHAKARGATIYAELVGFGMSGDAYHMTSPPDSGEGAARCMANALRDAGIQPEEVSYINAHGTSTPAGDVAEVAAIKRVFGEHAYKLAVSSTKSMTGHLLGAAGAVEAIFSVLAINSQMAPPTINLDEPDEGCDLDFVPHQARSMPIDVVLSNSFGFGGTNGSLVFRRFAG

SEQ ID NO: 67857 - protein, 453 aa, Pseudomonas putida
MTITSFGPANRIARSAETHPLTWRLRDDGEPVWLAEYESKNGYAAARKALAQMSADDIVQSVKDSGLKGRGGAGFPTGVKWGLMPKDESMNIRYLLCNADEMEPNTWKDRMLMEQQPHLLVEGMLISARALKAYRGYIFLRGEYTTAAKNLNRAIDEAKAAGLLGKNILGSGFDFELFVHTGAGRYICGEETALINSLEGRRANPRSKPPFPAAVGVWGKPTCVNNVETLCNVPAIVANGNDWYKSLAREGSEDHGTKLMGFSGKVKNPGLWELPFGVTARELFEDYAGGMRDGFKLKCWQPGGAGTGFLLPEHLDAQMYAGGIAKVGTRMGTGLAMAVDDSINMVSLLRNMEEFFARESCGWCTPCRDGLPWSVKMLRALENGQGRAEDIETLLGLVNFLGPGRTFCAHAPGAVEPLGSAIKYFRSEFEAGVAPESAATLRPDLAKPIVVGA

SEQ ID NO: 67858 - protein, 156 aa, Pseudomonas putida
MAASSVFAVAAATDWLDGYLARRLQQSTPFGAFLDPVADKLMVAVALVLLVQTHANFWLTLPAAVIIGREIVVSALREWMAELGARAHVAVSNLGKWKTAAQMLALVILLGNPPVVTFWVILGYGLLLVAAGLTLWSMVHYLLAAWPHLREGSEKK

SEQ ID NO: 67859 - protein, 441 aa, Pseudomonas putida
MALTREQQIAALEKDWAENPRWKGVTRTYTAADVVRLRGSVQPEHTFARQGAEKLWKLVTEGAHPSFRPDKDFVNCMGALTGGQAVQQVKAGIQAIYLSGWQVAADNNSAESMYPDQSLYPVDSVPTVVKRINNAFRRADQIQWKAGKNPGDDGYIDYFAPIVADAEAGFGGVLNAYELMKNMIEAGAAGVHFEDQLASVKKCGHMGGKVLVPTQEAVQKLVAARLAADVSGVPTIILARTDANAADLLTSDCDPYDQPFVVGERTREGFYKVRAGLDQAIARGLAYAPYADLIWCETAKPDLDEARRFAEAIKKEYPDQILSYNCSPSFNWKKNLDDATIAKFQRELSAMGYKHQFITLAGIHNMWHGMFNLAHDYARNDMTAYVKLQEQEFADASKGYTFVAHQQEVGTGYFDDMTTVIQGGASSVTALTGSTEEEQFH

SEQ ID NO: 67860 - protein, 200 aa, Pseudomonas putida
MSFSPLIRQLIDGLRILPGVGQKTAQRMALQLLERDRSGGLRLAQALTQAMEGVGHCRQCRTLTEQELCPQCADPRRDDTQLCVVEGPTDVYAVEQTGYRGRYFVLKGHLSPLDGLGPEAIGIPQLMARIEEQGTFTEVILATNPTVEGEATAHYIAQLLSEKGLVASRIAHGVPLGGELEMVDGGTLAHAFAGRRPISL

SEQ ID NO: 67861 - protein, 691 aa, Pseudomonas putida
MSYQVLARKWRPRSFREMVGQTHVLKALINALDNQRLHHAYLFTGTRGVGKTTIARIIAKCLNCETGITSTPCGTCSVCREIDEGRFVDLIEIDAASRTKVEDTRELLDNVQYAPSRGRFKVYLIDEVHMLSTHSFNALLKTLEEPPPYVKFILATTDPQKLPATILSRCLQFSLKNMSPERVVEHLSHVLAAENVPFEEDALWLLGRAADGSMRDAMSLTDQAIAFGEGKVLAADVRAMLGSLDHGQVYGVLQALLEGDARALLEAVRNLAEQGPDWSGVLAEMLNVLHRVAIAQALPEAVDNGQGDRERVLALASALPAEDVQFYYQMGLIGRRDLPLAPDPRGGFEMVLLRMLAFRPADTDDAPKPVLKPTGISQATADPAGQVAAAAPVALSPPVAAVPAEPVAQAPQLEVPAPATADHEPEAEADVELKAEAEAISVPEPVAEVVDLPWEEPAVAPAPLAAEPAPEPAPAPEPVAPVAPTQAAPAHDEPPFDPSAYAAVGMERDDEPPLDEDYYGGESDPAGFSYLDELAEHVQEDVSKPAAEPLPAAKPATGLALQWLELFPQLPVSGMTGNIAANCTLIAADGDDWLLHLDPGQGALFNATQQRRLNEALNQHLGRTLNLRIELILPEQETPAQAAARKRAERQQDAVASIEQDPLIQQMIKLFGAKVRQDTIEPVEALASQGQ

SEQ ID NO: 67862 - protein, 4317 aa, Pseudomonas putida
MTDAFELPLSLVQALAQRAAQTPERIALRFLADTPGEQAVLSYRDLDQRARTIAAALQGRASFGDRAVLLFPSGPDYVAAFFGCLYAGVIAVPAYPPESARQQHQERLLSIIDDAEPRLLLTVAALRDSLQGLEALAADNAPQLLAVDGLDPALAANWREPVLKGDDIAFLQYTSGSTALPKGVQVSHGNLVANEQLIRQGFGIDLNPDDVIVSWLPLYHDMGLIGGLLQPIFSGVPCVLMSPRYFLARPLRWLQAISEYGGTISGGPDFAYRLCSERVSEASLAGLDLSRWRVAYSGSEPIRQDSLATFADKFQACGFDPQSFFASYGLAEATLFVSGSRRGQGIAALELDAKAFAANRAEPGTGSVLMSCGFPQPGHAVRIVEPQQLQVLGDNQVGEIWAGGPSIARGYWRNPEASARTFVEMDGQTWLRTGDLGFIREGEVFVTGRLKDMLIVRGQNLYPQDLEKALEREVQVLRKGRVAVFAVEHQGEEGIGVAVEISRNVQKALKPQDLIKTLRQVVADACRQAPAVVLLLNPGALPKTSSGKLQRSACRLRMDDGSLDCYARFPEVSAAGIRATAGDELQARIAAVWRDILKVEAVAADDHFLLLGGNSIAATQATARLADELGIDLSLRTLFEAPVLADYSKAVAQIIADGAAATTAITTLERAQALPQSLAQNRLWLLWQLEPQSAAYNIPAGLHLRGELDVNALHVAFQALVARHESLRTVFSEENGQALQRILPQQPLSLHRLDLEGHSPEQVAAQRETEARQPFDLTQGPLLRVTLVRLGDEEHQLWVTLHHIVADGWSLNILLEEFAKLYAARCQGLEANLAPLPLGYADYGSWQRQWLADGEAERQLQYWKAHLGGELPALDLCTDHPRASQREHSAARFSLKVPVRLGEALKGLAHQQQASLFMVLLAGWQALLQRYSGQADIRVGVPNANRPRLETQGMVGFFINTQVLRARFDGRHSFTQLLTQVRQATLQAQANQDLPFEQLVEALPDAREQGLFQVMFNHQQRDLSALRRLPGLLAEELAWHSREAKFDLQLHSEEDHLGRLSLAFDYAAELFEASTVERLAHHLLALLEQVCAAPQQALGDVQLLDEPGRAQLLGWGQAPAAAAQHLLVEQLNEQVRLTPQRTALVWDGGSLDYAGLHQQANRLAHYLRDKGVGPDTCVAIAIERSPQLLVGLLAILKAGGAYVPLDVDYPAERLAYMLADCDARLLLSHSSLLGKLPQVDGVSAIALDQLHLDSWPSHAPGLHLHGDNLAYVIYTSGSTGQPKGVGNTHAALAERLQWMQTTYALNDSDVLMQKAPISFDVSVWECFWPLVTGCKLVLAGPGEHRDPQRIAALVQAYGVTTLHFVPPLLQVFVQEPQASACSSLRWVFSGGEALSATLRDRVLQVLPQVQLHNRYGPTETAINVTHWHCQVVDGERSPIGRPLGNVLCRVLDDELELSAPGVPGELYLGGAGLARGYLGRPGLTAERFVPQADGNGQRLYRSGDRARWQVQLEALEYLGRLDQQVKVRGFRVEPEEVQACLLAQAGVEQALVLIHKDAIGAQLVGYYSGSAQPAEVLAVLAEQLPAYMVPAQLIPLAQMPLGPSGKVDRKALPAPVWQQREHVEPRTELQQQVAAIWRDVLNLPRIGLQDDFFALGGHSLLATQIVSRTRQACDVELPLKALFEASELGAFCAEIARLRAAGERNLQGAITRVDRRQAVPLSYSQQRMWFLWQMEPDSPAYNVGGMARLRGTLHVDAFERALQALIVRHETLRTTFPSIDGVPYQCVAEDSGLHLDWQDFSALSDDACQQRLQQLADDQAHQPFDLERGPLLRACLVKANEREHFFVLTLHHIVTEGWAMDIFARELGELYEAFVDDRESPLAPLPVQYLDYSVWQRQWLESGEGARQLAYWKHRLGDEHPVLALPADRPRPAVQSHRGELYRFELDPALVARVHAFNSQRGLTLFMTMTATLAALLHRYSGQRDLRIGAPVANRIRPESEGLIGAFLNTQVLRCELDGQMTASALLEQVRQAAIEGQSHQDLPFDQLVEALQPPRSSAYNPLFQVMCNVQRWAFQQSRTLAGMQVDYLVNDASATKFDLYLEVTDLDGRLGCCLTYSRDLFDAPRIARMAEHWQQLLVGLLDNPQHRLCELPMLSSAEQQVLTGQLQGEHDFDLGQTLHGLFAAQAARTPQAGALTFAGQHLTYAELDQQANRLARALRERGVGPQVRVGLALERSLEMVVGLLAILKADGAYVPLDPEYPLDRLRYMIEDSRIGLLLSQRALLHTLGELPEGVASWSLEDDAASLAAYSDAPLDNLSLPQHQAYLIYTSGSTGKPKGVVVSHGEFAMHCQAVIAAFGMRSDDCELHFYSINFDAASERLWVPLLCGARVVLRAQGQWGAEDICQLVREQQVSILGFTPSYGSQLAQYLGGRGEQLPVRLVITGGEALTGEHLQRIRQAFAPQQCFNAYGPTETVVMPLACLAPEALPADLGSVPIGRVIGSRTAYILDEDLALLPQGGIGELYVGGAGLAQGYHDRPGLTAERFVADPFSAEGGRLYRTGDLVRLGTDGLVEYVGRADQQVKIRGFRIELGEIESRLLAHEDVDEAVVLALDLPGGKQLVGYLVCRQATAGNDVQQLLREAVKADARQHLPDYMVPAHLVLLDSLPLMGNGKLDRHALPLPDLEQARQQYQAPGNEVEAQLAQIWRDVLNVARVGVQDNFFELGGDSILSIQVVSRARQAGLQFTPRDLFQHQTIQTLATVVQLSEAASTVEQGLRQGQAGLTPIQHWFFDSDVPQPQHWNQTVLLEVRQPLVEATLEQALAALVQHHDSLRLRFSDAQGRWQAQYVQPGAEQLLWSATVADFNDCQALYTDVQRSLDLQQGPLLRALLVRDGQGTQRLLLAIHHLVVDGVSWRVLLEDLQALYRGQPLPAKTHAVGDWAARLASYAGSDSLRDELAWWQGQLGGVRRELPCDHPQGSNLHRHAQTLAIGLDVEQTRQLLQLAPAAYHTQVNDLLLTALARALCRWSGDEEVLVQLEGHGRDGLFEDMDLTRSVGWFTNAYPLSLRPLPGEDDAARAGSIKRIKEQLRHVPHKGLGYGVLRYLADAAGREQMAALPQARITFNYLGQFDQQFDSAALFQPLEASAGLAHDLDAPLPNWLSVDGQVYGGALQLRWTFSAERYDQQTIARLAEGYRQELLALVAHCLADGNGSFTPSDFPLAHLTQEQIDALPVPAAQIEDVYPLTPMQEGMLLHTLLEPGTGLYYMQDRYRINSALDPERFAQAWQAVVARHEALRASFSWNSGEAMLQIIHKPGNLAVDYQDWRGLADDAQEQRLQALHKQEREAGFALLSEAPFHLRLVRVAEERYWFMMSNHHILIDAWCRSLLMNDFFEVYQALGEGRQAQLPVPPRYRDYIGWLQRQGLDDARAWWQANLAGFERATAIPSDRPLRHDHAGSGMVVGDCYTRLEMNDGVRLRELAQAHQLTVNTFAQAAWALVLSRYSGDRDVAFGVTVAGRPVSMPQMQRTVGLFINSVALRVQLPAASERCSVRQWLQGLLQSNMELREYEYLPLVAIQACSELPKGQPLFDSLFVFENAPVETAVLNHAQHLNASSDSGRTHTNFPLTAVCYPGDDLGLHLSFDQRYFDYPTVERLLAEFKRLLLALVQGFEGEVSELPLLSAQEQGFLLEDCNRTERVYPLEQSYIAQFEAQVVAHPQRTVARCLEASYDYAGLNLAANRLGHALVAAGVCVDQPVALLAERGLPLLGMIVGSFKAGAGYLPLDPGLPAARLQSIIQLSRTPVLVCSAACAEQGRQLLGELEASLRPQLLVWEDVQANPIASHNPGIHSGPDNLAYVIYTSGSTGLPKGVMVEQRGMLNNQLSKVPYLALSEQDVIAQTASQSFDISVWQFLAAPLFGAKVEIVPNVIAHDPQGLLAHVQATGITVLESVPSLIQGMLASDHQALDGLRWMLPTGEVMPPELAAQWLQRYPQIGLVNAYGPAECSDDVAFFRVDAASTQGSYLPIGTPTDNNRLYLFGEDQALVPLGAVGELCVAGAGVGRGYVGDPVRTALAFIPHPYGAPGERLYRTGDLARQRLDGVLEYVGRIDHQVKIRGYRIELGEIEARLHEQAEIRDAAVAVQEGVNGKHLVGYLVAHQGVSADAALLEQVKQRLRAELPEYMVPLHWGWFDSLPHNANGKLDRKALPAIDIGGQYSQAYLAPRNELEDVLAGIWADVLKAERVGVHDNFFELGGHSLLATQIASRVQKQLQLNVPLRAMFECSTVEALAEYVQGLQGSALDDDKVDRLSDLMAELEGL

SEQ ID NO: 67863 - protein, 297 aa, Pseudomonas putida
MEIGLREWLILIGIIVIAGILFDGWRRMRGGKGKLKFRLDRSYSNLPDEEGGSAEVLGPSRVLDTHKEPELDESDLPSLSASARDREREPKPVKASKRGKRASAAADVHQGDLNLSAEPREPDLFSDSDDDFAADNNRSSGAAPASNSVKELPPAEEVLVISVISRDEGGFKGPALLQNILESGLRFGEMDIFHRHESMAGHGEVLFSMANAVKPGVFDLDDIDHFSTRAVSFFLGLPGPRHPKQAFDVMVAAARKLAHELNGELKDDQRSVLTAQTIEHYRQRIVEFERRALTQKR

SEQ ID NO: 67864 - protein, 1076 aa, Pseudomonas putida
MTTMPKRTDIKSILILGAGPIVIGQACEFDYSGAQACKALREEGFRVILVNSNPATIMTDPAMADATYIEPIKWQSVAKIIEKERPDAVLPTMGGQTALNCALDLERHGVLEKFGVEMIGANADTIDKAEDRSRFDKAMKDIGLECPRSGIAHSMEEANAVLEKLGFPCIIRPSFTMGGTGGGIAYNREEFEEICTRGLDLSPTKELLIDESLIGWKEYEMEVVRDKKDNCIIVCSIENFDPMGVHTGDSITVAPAQTLTDKEYQIMRNASLAVLREIGVETGGSNVQFGICPNTGRMVVIEMNPRVSRSSALASKATGFPIAKIAAKLAIGYTLDELQNDITGGRTPASFEPSIDYVVTKLPRFAFEKFPKADARLTTQMKSVGEVMAIGRTFQESLQKALRGLEVGACGLDPKVDLASPEAASILKRELTVPGAERIWYVADAMRSGMTCEEIFNLTGIDMWFLVQMEDLIKEEEKVKTLALSAIDKDYMLRLKRKGFSDQRLAVLLGITDKNLRRHRHKLEVFPVYKRVDTCAAEFATDTAYLYSTYEEECEANPSTRDKIMILGGGPNRIGQGIEFDYCCVHAALALREDGYETIMVNCNPETVSTDYDTSDRLYFEPLTLEDVLEVCRVEKPKGVIVHYGGQTPLKLARALEEAGVPIIGTSPDAIDRAEDRERFQQMVQRLSLLQPPNATVRSEEEAIRAAGSIGYPLVVRPSYVLGGRAMEIVYELDELKRYLREAVQVSNDSPVLLDHFLNCAIEMDVDAVCDGTDVVIGAIMQHIEQAGVHSGDSACSLPPYSLSKEVQDEVRVQVKKMALELGVVGLMNVQLALQGDKIYVIEVNPRASRTVPFVSKCIGTSLAMIAARVMAGKTLKELGFTQEIIPNFYSVKEAVFPFAKFPGVDPILGPEMKSTGEVMGVGDSFGEAFAKAQMGASEVLPTGGTAFISVRDDDKPQVAGVARDLIALGFEVVATAGTAKVIEAAGLKVRRVNKVTEGRPHVVDMIKNDEVSLIINTTEGRQSIADSYSIRRNALQHKIYCTTTIAAGEAICEALKFGPEKTVRRLQDLHAGLKA

SEQ ID NO: 67865 - protein, 283 aa, Pseudomonas putida
MSSVQYPTRLPCGSRVLDLSHTHVMGILNITPDSFSDGGRFSQRDEALRHAEAMVAAGATLIDIGGESTRPGARAVSVTEELERVAPMVEAINSRLDVVISVDTSTPAVMREAARLGAGLINDVRALERDGALDAAADTGLPVCLMHMRGEPGNMQDDPQYQDVTADVTRYLEQRMAACAAAGIDADRIILDPGFGFAKTLAHNLSLFKHMEALYRLGRPLLVGVSRKSMIGLTLERPVGERLYGSLALAALAMTKGASILRVHDVAETVDVVRMIAAVQNAE

SEQ ID NO: 67866 - protein, 701 aa, Pseudomonas putida
MNPVIKTFQFGQSTVTLETGRIARQATGAVLVTVDNDVTVLVTVVGAKQADPGKGFFPLSVHYQEKTYAAGKIPGGFFKREGRPSEKETLTSRLIDRPIRPLFPEGFMNEVQVVCTVVSTSKKTDPDIAAMIGTSAALAISGIPFEGPIGAARVAFHESTGYLLNPTYEQLAASSLDMVVAGTSDAVLMVESEAQELTEDQMLGAVLFAHDEFQAVIQAVKELAAEAGKPTWDWKPAVANTELFNAIRAEFGEAVSQGYTITVKADRYARLGELRDQAVAKFSGEEGQPSASEVKEIFGEIEYRTVRENIVNGKPRIDGRDNKTVRPLNIEVGVLPKTHGSALFTRGETQALVVATLGTARDAQLLDTLEGEKKDPFMLHYNFPPFSVGECGRMGGAGRREIGHGRLARRSVQAMLPAADVFPYTIRVVSEITESNGSSSMASVCGASLALMDAGVPMKAPVAGIAMGLVKEGDKFAVLTDILGDEDHLGDMDFKVAGTAKGVTALQMDIKINGITEEIMEIALGQALEARLNILGQMNQVIGQSRTELSANAPTMIAMKIDTDKIRDVIGKGGATIRAICEETKASIDIEDDGSIKIFGETKEAADAAKQRILGITAEAEIGKIYVGKVERIVDFGAFVNILPGKDGLVHISMLSDARVEKVTDILKEGQEVEVLVLDVDNRGRIKLSIKDVPAAKASGV

SEQ ID NO: 67867 - protein, 89 aa, Pseudomonas putida
MALSVEEKAQIVAEYQQAAGDTGSPEVQVALLTANINKLQGHFKANDKDHHSRRGLIRMVNQRRKLLDYLKGKDTTRYSALIGRLGLRR

SEQ ID NO: 67868 - protein, 601 aa, Pseudomonas putida
MPDYKAPLRDIRFVRDELLGYEAHYQSLPGCQDATPDMVDAILEEGAKFCEQVLSPLNRVGDQEGCTWSESGVKTPTGFKEAYQQFVEGGWPSLAHDVEHGGQGLPESLGLALSEMVGGSNWSWGMYPGLSHGAMNTISAHGTAEQQHTYLTKLVSGEWTGTMCLTEPHCGTDLGMLRTKAEPQADGSYKVSGTKIFISAGEHDMADNIVHIVLARLPDAPAGTKGISLFIVPKFLPNAEGGVGERNGVSCGSIEHKMGIHGNATCVMNFDAATGYLIGPANKGLNCMFTFMNTARLGTALQGLAHAEVAFQGGLKYARERLQMRSLTGPKAPDKAADPIIVHPDVRRMLLTMKAFAEGNRAMVYFTAKQVDIVKYSQDEEERKKADALLAFLTPIAKAFMTEVGFEAANHGVQIYGGHGFIAEWGMEQNVRDSRISMLYEGTTGIQALDLLGRKVLMTQGEALKGFTKIVHKFCQAQEGNEAVKEFVEPLAAINKEWGELTMKVGMAAMKDREEVGAASVDYLMYSGYACLAYFWADIARLAAEKLAAGTSEEAFYTAKLQTARFYFQRILPRTRTHVATMLSGANNLMAMDEEHFGLSY

SEQ ID NO: 67869 - protein, 352 aa, Pseudomonas putida
MSASTTATTRHDWALAEVKALFQQPFNDLLFQAQTVHRAHFDPNRVQVSTLLSIKTGACPEDCKYCPQSGHYNTGLEKQKLMEVQKVLEEAARAKAIGSTRFCMGAAWKHPSAKDMPYVLEMVKGVKAMGLETCMTLGKLDQEQTKALAQAGLDYYNHNLDTSPEFYGSIITTRTYSERLQTLAYVRDAGMKICSGGILGMGESLDDRAGLLIQLANLPEHPESVPINMLVKVAGTPLAEEEDVDPFDFIRMLAVARILMPKSHVRLSAGREQMNEQMQALAFMAGANSIFYGEKLLTTANPQADKDMQLFARLGIKPEAREEHADEVHQAAIEQALVEQRSSEMFYDAATA

SEQ ID NO: 67870 - protein, 324 aa, Pseudomonas putida
MSHPFDTLTPDLVLDAVESLGFLSDARVLALNSYENRVYQVGIEDAQPLIAKFYRPGRWSDAAILEEHAFTAELADCEVPVVAPMQHDDRTLFEHKGFRFTLFPRRGGHAPEPGNLDQLYRLGQLLGRLHAVGASKPFKHREALAVDNFGHASLNTLLEGNFVPHELLPAFESVARDLLKRVEDIYARTPHQLIRLHGDLHPGNLMHRDEVYHVVDLDDCRMGPAVQDLWMMLAGNREERLGQLAELIDGYNEFHDFDPRELALIEPLRALRQLHYSAWLARRWDDPAFPPSFPWFGQPRYWGDQILALREQMAALDEAPLKLF

SEQ ID NO: 67871 - protein, 546 aa, Pseudomonas putida
MSELIRVPDIGSGEGEIIELFVKVGDRIEADQSLLTLESDKASMEIPAPKAGVIKELKVKLGDRLKEGDELLVLEAEGAAAAAPEAPAAAAAPAAAPAPAAEAAPAAPAAAPAAASVQDIHVPDIGSSGKAKIIEVLVKVGDTVEADQSLITLESDKASMEIPSPAAGVVEEVLCKLEDEVGTGDLIFKLKVAGAAPAAAPAPAAAPAPAKAEAAPAAAPAAAAPAAAPAPAATAPAAGSNAKVHAGPAVRQLAREFGVELGAVAATGPHGRILKEDVQVYVKAMMQKAKEAPAAAGATGGAGIPPIPAVDFSKFGEVEEVALTRLMQVGAANLHRSWLNVPHVTQFDSADITELEAFRVAQKAVAEKAGVKLTVLPLLLKACAFLLKELPDFNSSLAPSGKAIIRKKYVHIGFAVDTPDGLLVPVIKNVDQKSLLQLAAEAAALAEKARTKKLSADEMQGACFTISSLGHIGGTGFTPIVNAPEVAILGVSKATMQPVWDGKAFQPKLMLPLSLSYDHRVINGAAAARFTKRLGDVLGDIRTMLL

SEQ ID NO: 67872 - protein, 172 aa, Pseudomonas putida
MSSAQSPHADLVGALYRDHRGWLLAWLQRSMACRQRAEDLSQDTFVRLLGREQLDTPREPRAFLAAVAKGLMFDHFRRAALEQAYLAELALIPEAEQPSPEMQHLILEDLKAIDRLLGKLSSKARAAFLHSRLDGMGHAEIAERLGVSVSRVRQYIAQGMRQCYVALYGEPT

SEQ ID NO: 67873 - protein, 303 aa, Pseudomonas putida
MYIQVLGSAAGGGFPQWNCNCVNCKGYRDGTLKATARTQSSIALSDDGVHWILCNASPDIRAQLQAFAPMQPARALRDTGINAIVLLDSQIDHTTGLLSLREGCPHQVWCTDMVHQDLTTGFPLFNMLSHWNGGLQWNRIELEGSFVIDACPNLKFTPFPLRSAAPPYSPHRFDPHPGDNLGLMVEDTRTGGKLFYAPGLGQVDEKLLAMMHGADCLLVDGTLWEDDEMQRRGVGTRTGREMGHLAQNGPGGMLEVLDGFPRQRKVLIHINNTNPILDENSPERAEVLRRGVEVAFDGMSIEL

SEQ ID NO: 67874 - protein, 132 aa, Pseudomonas putida
MKKLFMLCCASLLAACSSQTPPNQASLDGEVFYLQRIALPPAATLSVELQDVSLMDAPAVTLARQAGPVKGNVPLPFHLTYDPAQVKPGHRYAVSARIELNGKLLFINTEHHGVALDGSDPQSVRIKVDQVR

SEQ ID NO: 67875 - protein, 900 aa, Pseudomonas putida
MPQVDPELFDRGQFQAELALKASPIAAFKKAIRLAGEVLDKRFRAGSDIRPLIEARAWLVDNILQQAWNQFDWGDQSGIALVAVGGYGRGELHPHSDIDLLILLGAAEHEQYRDAIERFLTLLWDIGLEVGQSVRTVDECAEQARADLTVITNLMESRTIAGPEALRQRMLEVTSTAHMWPSKEFFLAKRAELKARHHKYNDTEYNLEPNVKGSPGGLRDIQTVLWVARRQYGTLNLHALAGEGFLLESENELLASSQDFLWKVRYALHMLAGRAEDRLLFDHQRSIATLLGYSDENPKRAIEQFMQQYYRVVMSISQLCDLIIQHFEEVILADEESGSTQPLNARFRLHDGYIEATHPNVFKRTPFAMLEIFVLMAQHPEIKGVRADTVRLLREHRHLIDDTFRTDIRNTSLFIELFKCEIGIHRNLRRMNRYGILGRYLPEFGLIVGQMQHDLFHIYTVDAHTLNLIKHLRKLQYTPVSEKFPLASKLMGRLPKPELIYLAGLYHDIGKGRQGDHSEIGAVDAQKFCERHQLPAWDSRLIVWLVQNHLVMSTTAQRKDLSDPQVINDFALHVGDETRLDYLYVLTVADINATNPSLWNSWRASLLRQLYTETKRALRRGLENPLDREEQIRQTQSSALDILVREGTDPDDVEQLWAQLGDDYFLKHTAADVAWHTDAILQQPADGGPLVLIKETTQREFEGGTQIFIYAPDQHDFFAVTVAAMSQLNLNIHDARIITSSSQFTLDTYIVLDNDGGSIGDNPQRVKQIRDGLTEALRNPEDYPTIIQRRVPRQLKHFDFPPQVTILNDAQRPVTILEITAPDRPGLLARLGRIFLEFDLSLQNAKIATLGERVEDVFFITDADNQPLSDPQLCSRLQEAIVQQLQAGQGSDTSQTRVTF

SEQ ID NO: 67876 - protein, 250 aa, Pseudomonas putida
MTIYFIGAGPGDPELITVKGQRLIRQCPVIIYAGSLVPAAVLEGHQAETVINSAELHLEQIIAAMRSAHEKGQDVARVHSGDPSLYGAIGEQIRHLQALGIDYQIIPGVTATAASAALLGCELTLPQVAQTVILTRYGDSSPMPPGEQLGDLARHGSTLAIHLGVKHLSRIVAELMPHYGAHCPVAVVHRATWPDQDWVCGNLGDIVERVAAKDFRRTALILVGHVLGDTPFAESALYRAGHAHLYRPGD

SEQ ID NO: 67877 - protein, 450 aa, Pseudomonas putida
MFGLATDTFLLLDALVTIVGLILLITHFKVHPFVALTLAAGFLGLTSGMPVAKVMKSFQDGFGGVLGFVGIVLALGTMLGKLMADSGGADQIAQTLIRAFGKKNVHWAMMFAAFLVGIPLFFEIGFVLLIPLVFIVARRSGVSLVKIGIPLLAGLSVVHGLVPPHPGPLLAIGIFHADIGKTIFYGLIVALPTAIIAGPLFGNFISRYIPGNPSQELMDQIAKDSDQGNLPSFSITLVTVLLPVALMLLKTFADVVLPAEHIVRQWMDLIGHPITALLAALLLAFYTFGSARGFNRQQIMKMLDQSLAPTAAIVLIVGAGGGFKQMLVDTGVGNVIGQMAVQAEISPIMLAWLVAAVIRIATGSATVATITGAGIVAPVIDLVPGVNRELLVLATGAGSLILSHVNDAGFWLVKQYFNMTVAETFKTWSMMETILSIVGIIFIMLLSLVV

SEQ ID NO: 67878 - protein, 1059 aa, Pseudomonas putida
MNFSKFFITRPIFAAVLSLVLLIAGSISLFQLPISEYPEVVPPTVVVRANFPGANPKVIGETVAAPLEQAITGVENMLYMSSQSTADGKLTLTITFALGTDLDNAQVQVQNRVTRTQPKLPEEVTRIGITVDKASPDLTMVVHLTSPDNRYDMLYLSNYAILNIKDELARLGGVGDVQLFGMGDYSLRVWLDPNKTASRNLTASDVVAAIREQNRQVAAGQLGAPPAPGSTSFQLSINTQGRLVNEEEFENIIIRAGADGEITRLKDIARVELGSSQYALRSLLNNQPAVAIPIFQRPGSNAIEISDEVRAKMAELKKDFPEGMDYSIVYDPTIFVRGSIEAVVHTLFEALVLVVLVVILFLQTWRASIIPLLAVPVSLIGTFAVMHLFGFSLNALSLFGLVLAIGIVVDDAIVVVENVERNIGLGLKPLEATQKAMSEVTGPIIATALVLCAVFVPAAFISGLTGQFYKQFALTIAISTVISAFNSLTLSPALAAVLLKDHHAPKDRFSRFLDKLLGSWLFSPFNRFFDRASHSYVGGVRRVIRSSGIALFVYAGLMGLTYLGFSSTPTGFVPAQDKQYLVAFAQLPDAASLDRTEAVIKRMSEIALKQPGVADSVAFPGLSINGFTNSPNSGIVFTPLKPFDERKDPSQSAAAIAAALNAQFADIQDAYIAIFPPPPVQGLGTIGGFRLQIEDRGNLGYEALYKETQNIIAKSHNVPELAGLFTSYQVNVPQVDAAIDREKAKTHGVAITDIFDTLQVYLGSLYTNDFNRFGRTYQVNVQAEQQFRLDAEQIGQLKVRNNLGEMIPLATFLKVSDTSGPDRVMHYNGFITAEINGAAAPGYSSGQAEAAIEKLLKEELPNGMTFEWTDLTYQQILSGNTALLVFPLCVLLAFLVLAAQYESWSLPLAVILIVPMTLLSAITGVIVSGGDNNIFTQIGLIVLVGLACKNAILIVEFAKDEQAKGLDPLAAVLEACRLRLRPILMTSIAFIMGVVPLVFSSGAGSEMRHAMGVAVFSGMIGVTVFGLFLTPVFFFLIRRFVERRQARKAEHAQVLENHA

SEQ ID NO: 67879 - protein, 704 aa, Pseudomonas putida
MCCRHSVRTPPWHCQTPTSVVSPSATALGSMEGYNATHSQVATKTSMPLVETSQSVSVVTRQQMDDQGSQTVAQAMRYTPGVLTNPYGATHRYDYVAMRGFNDGSVDNIYVDGLKSMGDNGTYSTMQVDPYFLERIDILKGPSSVLYGRSSPGGLVALTTKKPLFAPYHQVQATMGTQGQRGVGFDFSGPVDDDKRIAYRLTGLADASDTQFDHNKEERYAIAPAISVDFTEDTSLTLQAYLQHDPNGGYHGGNPADGMLHKRNGLRLSDHFFEGEPSIDNYERTQQSFSYQFEHRFNDVFTARQNFRYQDSDVSMDQVYSAGWADVDSNRLNRAYTGGDERLHSYIIDNMLQAEFFTGAAKHTLLLGADYQRRKADVTWRYGTVDPLDAGNPQYGNGNLQVLGENRYQRRLQQTGVYLQDLVELDQWRFSLGLRQDWVKVSEENRDSDSKVSDQRSRFTSRAGVLYLFENGIAPYISYSESFNPNTVSDQQGRPLAPTEGTQWEAGIKYQPPGSDNLFTASVFRIEQENLASKQPDEDFYRPVGEVRSQGLELEAHVQLTDSLKLLGGYTFTDIEYSKSMPSLVSGDLDNKGNSPTQAPKQMLSLWADYNFRQGALDGLRLGGGVRYVGYSWVDAENSMKVPSYTLFDASIGYDLGKLGLTGVDVRLNANNLTNESYITSCASLNYCYMGEERNVSATVSYQF

SEQ ID NO: 67880 - protein, 329 aa, Pseudomonas putida
MRRPLFHRALLYPSLLSGALALASSHTMAATAWVSNEKDNSLSLIDLQTLEVTETLPVGQRPRGLLLSHDSKLLYICASDSDRVQVMDVATRKIIKELPSGKDPEQFALHPNDRWLYVSNEDDALVTVIDTVTDKVLGQIEVGIEPEGMAVSPDGKWAVNTSETTNMLHWIDTSTQTLADSTLVDQRPRFVEFSKDGSRLWASAEIGGTVTILDVTTRQVLKTLNFQIKGVHPDKVQPVGIKLSADGKYAFVALGPANHVAVIDAKTFDVLDYLLVGRRVWQLAFTPDQSQLLATNGVSGDVSVIDAKQLKVLKSVKVGRYPWGVVVTP

SEQ ID NO: 67881 - protein, 285 aa, Pseudomonas putida
MSDYPTPPFPSQPQSVPGSQRKMDPYPDCGEQSYTGNNRLAGKIALITGADSGIGRAVAIAYAREGADVAIAYLNEHDDAQETARWVKAAGRQCLLLPGDLAQKQHCHDIVDKTVAQFGRIDILVNNAAFQMAHESLDDIDDDEWVKTFDTNITAIFRICQRALPSMPKGGSIINTSSVNSDDPSPSLLAYAATKGAIANFTAGLAQLLGKQGIRVNSVAPGPIWTPLIPATMPDEAVRNFGSGYPMGRPGQPVEVAPIYVLLGSDEASYISGSRYAVTGGKPIL

SEQ ID NO: 67882 - protein, 219 aa, Pseudomonas putida
MNYLPLTLLLALSPALAVNADDAGTDTPLTINGCVIAEASQCPGANLRGANLANQDLRKMNLAGADLRDADLRHAQLDLANLEKARLQGANLTRASLQQSNLRLADLSNSRLVAIQGWGLFAQGAQFEKADLRAAYLQFARLSGAKLQQANLQAADLEMAWLSKADLQEANLGDANLQEAKFGQSNLAHADLRGARQHYGNFQEANMEGCKGCPETWDK

SEQ ID NO: 67883 - protein, 211 aa, Pseudomonas putida
MMSMEVWLGFFAACWVISLSPGAGAIASMSSGLQYGFWRGYWNALGLQLGLIMQIAIIAAGVGAVLAASATAFQVIKWFGVGYLVYLAYKQWRALPMDMSDESGVRPIGKPLSLVFRGFLVNISNPKALVFMLAVLPQFLNPHAPLLPQYVAITVTMVTVDLLVMAGYTGLASHVLRMLRTPKQQKRLNRTFAGLFIGAATFLATLRRAPV

SEQ ID NO: 67884 - protein, 313 aa, Pseudomonas putida
MSTREIRIATRKSALALWQAEYVKARLEQAHTGLQVTLVPMVSRGDKLLDAPLAKIGGKGLFVKELETALLDNEADIAVHSMKDVPMDFPEGLGLYCICEREDPRDAFVSNTFDSLEALPAGSIVGTSSLRRQAQLLARRPDLQIRFLRGNVNTRLAKLDAGEYDAIILAAAGLIRLGFEDRITSTISVDDSLPAGGQGAVGIECRSADVEIHALLAPLHHVDTADRVIAERALNKRLNGGCQVPIACYAVLEGDQLWLRGLVGQPSGGTLLVADARAPRAAAEALGVQVAEDLLGQGAEAILKEVYGEAGHP

SEQ ID NO: 67885 - protein, 247 aa, Pseudomonas putida
MNVLIVDDEPQGRERLTRLLGELEGYTVLEPSATNGDEALALIESLKPDVVLLDIGMPGLDGLQVAARLCEREAPPAVVFCSGDDEYGAEAFKDSTLSHVTKPFQAHALRDALRKAEKPNRAQLAALTRPANEGGGPRSHISARTRKGIELIPLPQVIYFIADHKYVTLRHEAGEVLLDEPLKALEDEFGERFVRIHRNALVARERIERLQRTPLGHFQLYLKGLDGDALTVSRRHVAGVRKMMQTL

SEQ ID NO: 67886 - protein, 426 aa, Pseudomonas putida
MYRSFTLRAFVCLTTLAPATALYAAADPQVEALRQELIELKRRYEAQQQALMVLEQRVRQVEEAPAAAQPKRLVKSPAEGVKGAQTVASGAPGTTGSSYGQALTADSEPAQSVSNLYDEASGFFGGGKFSFETGVTYTHYDTRALTLNGFLALDSIFLGSINLDRIKADNWTLDMTARYNLAQRWQFDINVPVVYRESTYSSGGAGGAGATTSDASVTRDPEIGDINVGVAYKFLDEDETWPDAVATLRIKAPTGKDPYGIKLREVDGNNNLAVPESLPTGNGVWSITPGISLVKTFDPAVLFGSLSYTYNMQDSFSDISPQVNSKVPGDVKLGDSWQIGGGIAFALNEKMSMSFSVSDQFARKSKIKPDGGDWQSISNSDYNAANFNIGLTFAATDNLTIVPNLSIGLTDDAPDFSFSLKFPYYF

SEQ ID NO: 67887 - protein, 733 aa, Pseudomonas putida
MKNLSDHPSTRLATLAALVLVIPLGTRAMLGWSNPFGYLSDLALGSLLIVLLHRRPWWLALPVLLAWAALWVASAELVSAVGRLPTSADLNYLTDPQFMENSTGGGLAHAWLPWALGGGLLAWLAFAWRSRARRSQPLPRKAWAIPVLLFGAHWGSQQLLPSDADQWRQYNLPHQLMSAGVGNLQRQVEGWMGHTQTFTPLASSGLTQSDLHGQRLLAGPGSARNLLVITLEGIPGAYLRPNRQALNSHFNEDLMPKLSKWAERGMNTPDYVLHTHQTIRGLYAMLCGDYDKLANGTPKGVELLTQNQRNQACLPAQLRQAGFTTHYLQGAGLRFMAKDRIMPHIGFDAVHGQEWFSNKNYLHFPWGKDDRAFFEGALGYVGQLQKQDKPWMLTLLTVGTHQPYSAPAEYLERFDTPKQAAVAYLDDAVGAFLDNLERQGVLKDTLVVVTSDESHGIDGVRLASSWGFNLTLAPEQAQLPTIKRGTYGHIDLATSLLDYFALPIPVALGGRSLYRDYDSGREMISYTNGMLRYHNGQGLFTECDFQQRCRRYASEGFIADQARYLGPADSLLGQQIGALAVVLDQSLLQTPLNLRYQFGGPSPIKLRKRIDDDWADNLIGAQYLEMPGGSHTRVRVKVRSLDPKRAAYIRLKAKQLEQDVPLGLPEEVKVTTDAPLEMEFSFDNPTERKAFSFHLLGYGGGKVEVSDFSVITALPGEDDGADERAEGHIAQSG

SEQ ID NO: 67888 - protein, 373 aa, Pseudomonas putida
MEPGLRERTGEHLRQLGLARVLIVTDAGVKAAGLLDSVYASLDKAGIAYEEVADIKANPRSDDINHTAQRYRGTGIDGLLAVGGGSAMDAAKAISLLLTHDGRIEDYEGSFTLTHAIPPIVAIPTTAGTGSEVTCFSVITDTARHFKMNVLDYRIGPVLALLDSHITDTLPPSIAAATGMDALTHAIEAYTCRVANPISDGLALHAIRLISQHLKAAVQEPDNQAAREQMLVASLIAGMAFGNADVGSVHCISEAIGGMYDTPHGVGNAIFLPFVFGHNRDADIVRHAQVAYALGIDPTLSPVDAAEAAVGHLFQMSKDLGIPRFAEVKGVREEDFPTIAEKSKQNFSDASNAKAMSVEAYHDIITTAYHFVA

SEQ ID NO: 67889 - protein, 367 aa, Pseudomonas putida
MQLLTLPPSPSLATSIRATAQVFEDARSQALLAHLQQVAPSEASVLIIGETGTGKELVARHIHNLSGRRNGPFVAVNCGAFSESLVEAELFGHEKGAFTGALAAKAGWFEEGNGGTLFLDEIGDLPMAIQVKLLRVLQEREVVRLGSRKSIPIDVRVVAATNVQLDKAIAAGNFREDLYYRLNVVSLQLYPLRERPGDILPLTRHFIKTYCNRLGYGEVRLSPEAERKLVSYDWPGNIRELENVIHHTLLVCRNGLVQDDDLRLSHLRIERQDKSPVSTAESAEEQLLRAFQRLFEEQAGGLHEKVEDSLLRSAYRFCHCNQVHTASLLGLSRNITRARLIAIGELVVNRRRPEPQTRPERAMQLSI

SEQ ID NO: 67890 - protein, 412 aa, Pseudomonas putida
MRLFHTSDWHLGQSLHGQERDFEHACFLDWLLGQLRLRQPDALLIAGDIFDTVNPPVKAQERLYDFIVQAHEQQPKLDIVMIAGNHDSGSRIELPAALMRRLRTHALGRVHWLDEGQLDAERLLIPLTNGRGKVAAWCLALPFLRPAEVTGPQLGDDYLQGITQVHQQLIAAALKKRKKDQALIAISHAHMAGGAVSEDSERSLIIGNAEALPAKLFDKAISYVALGHLHKPQKVNREERIRYSGSPIPLSFAEINYPHQVLEVELDGNGLVSVEPRPVPRAVALQRVGPAPLGELLQQLADLPVVDLLEDPNRQPWLEVRVLLDEPQPDLRQQIETALEGKAVRLIRISAEYAGRNNAEDDDLAFVELAQMTPQDLFSRAWEQAYGNPADDQALADFALLLQDVQQEEEQP

SEQ ID NO: 67891 - protein, 425 aa, Pseudomonas putida
MRSTRRVAILGGNRIPFARSNGAYATASNQAMLTAALEGLIERYRLHGLRLGEVVAGAVLKHSRDMNLTRECVLGSRLSPQTPAYDIQQACGTGLEAALLVANKIALGQIDCGIAGGVDSTSDAPIAVNEGLRHILLQANRGKSLGERLKPFLKLRPHHLKPELPRNSEPRTGLSMGEHCERMAHTWRVGRAEQDELALLSHQKLAAAYAEGWQDDLLTPFLSLARDNNLRPDLSLEQLARLKPAFDRSGQGTLTAGNSTPLTDGASLVLLGSEAWAQQQGLQVLAYLVDGETAAVDFVTGREGLLMAPVYAVPRLLARNGLTLQDFDYYEIHEAFAAQVLCTLKAWEDADYCRERLGLEAPLGAIDRSKLNVRGSSLAAGHPFAATGGRILANLAKLLATAGKGRGLISICAAGGQGVTVIVER

SEQ ID NO: 67892 - protein, 554 aa, Pseudomonas putida
MRPLVVPLMLLLWALAAHADPLPGFLDSHEYERRLPSANLPMTDYAPVSPRIRLAGAAIDNPDWAPANTRLVLQKVRFEGGTVFPLGDLREHYQPLIGRETTLGELQQYTQRLTQRYRQKGYLLSYAYLPPQDVADGRVDVVLVEGYVRDYHVEGDIGPANEYLQQLLARIEAERPLSRETLERYLGLATRMPGVVVEAELAMARAADGVAQLTVHARRKQLSAAVTVADSSRDAAQALITVASNAQTRHGERVTASWLLPPGNDRVYYQRLDYSQYLDAAGSQLLLSASRYRSEPGTRIRLDDGRDITREHDSERYAIGLRQPVVVRPNEWLAVQGHLYSVSEHDEDRMAEQPTSRKYDTYVRALSFEGDWRKVEQGRLRIVSAGVHQGLDYLGARSDADYDLDFLRLRLSGLQSDTLLDNWQGVVSGALYWSDDRLPDSERAGFGGQNFGRGYPRDQADGDKGWGVAYELNYSVRSRWLAQVQPYAVVDTAQAWHNRGPVEDAHLASLALGVRLGGGHVFNVALEVAKPLADVALDSLDRGPRLSLNLAIQL

SEQ ID NO: 67893 - protein, 771 aa, Pseudomonas putida
MLRATLISLLVLGGLFWLADRVWPLPLPGDDLARVVLAEDGTPLWRFADADGVWRYPVSPEEVSPLYLQALLTYEDRWFYNHPGVNPLALARAAWLNLRGGRVVSGGSTLSMQVARLLDPHDRTLVGKLRQLWRTLQLEWHLSKRDILQIYLNRAPFGGTLQGVAAASWAYLGKSPLHLTPAEAALLAVLPQAPSRLRPDRHPERAQRARDKVLQRLAEYQVWPAQQIREAAEEPLVLAPRQEPALAPLLARRLNSADSPPLIRTTLDAALQRRLEDLLLGWRARLPERTSAAILVVEAQSMAVRAYLGSIDLSDERRFGHVDMVRSLRSPGSTLKPFLYGMALDDGLIHSESLLQDVPRRYGDYRPGNFSMGFSGPVSASSALALSLNLPAVQLLEAYGPKRFAAQLRMAGMPLILPPLAEPNLSLILGGAGSRLEDLVGGYAALARGGNSAQVRLQPQAPLVEHRLLSPGAAWIIRRILSGQARPDRDPHAELVQRPLLAWKTGTSYGFRDAWSIGVGPRYLIGVWIGRPDGTPVPGQFGLASAAPLMLQVHDLLSNRDSQRGISVPVAPVPANIGVAAICWPLGQPMSKQDTNCRRQRFAWTLDGTTPPTLQAADQPLGLGLREQVWVNERGLRVDGSCPGAKARDIALWPAPLEPWLPRVERRMARLPAIDPACPPQAPASAPPLSIVGVRPGDNLRRPATSTEPLQLQVSALGGGGRRWWFLNGQPLGETQGQDSLLLRLPQVGQAELSALDESGQTARVAFQVSE

SEQ ID NO: 67894 - protein, 316 aa, Pseudomonas putida
MQLVRGLHNLRPEHRGCVATIGNFDGVHRGHQAILARLRERGQALGLPTCVVIFEPQPREYFAPDTAPARLARLRDKIELLATEGIDRVLCLAFNQRLSKLSADAFVKAILVDGLGVRHLEVGDDFRFGCDRAGDFAFLVEAGNAYGFTVEAANTVIQDGLRVSSTEVRKALSEGDFELAEHLLGRPYRITGRVLHGQKLARQLGTPTANIQLKRRRVPLSGVYLASIVIDGKAWPGVGNIGVRPTVAGDGRPHLEIHLLDFAGDLYGRRLTVEFHHKLREEQRFASLEALKSAIDADIAAARAHWHAQPLTKSLK

SEQ ID NO: 67895 - protein, 334 aa, Pseudomonas putida
MTHPLDIAVVGATGSVGEALVQILEELAFPVATLHLLASMESAGSSVMFAGKKLKVREVDSFDFAQVKLAFFATGAAVSRSFAGKALQAGCTVIDLSGGLDDALALVPEANAERLASLSLPARIVSPCSAAVALAVALAPLKGLLDIERVQVMAALAVSAQGREAVSELARQTAELLNARPLEPRFFDRQVAFNLLAQVGAADEQGHTALERRLVSELRVLLGLPELKISVSCVQVPVFFGDSFSVAVQSRRPVDLAAVNQALEAADSIERVENDDYPTPVGDAVGQDVVYVGRVRHGVDEDQQLNLWLTTDNVRKGAALNAVQVAQLLIKHMP

SEQ ID NO: 67896 - protein, 296 aa, Pseudomonas putida
MEQFRNIGIIGRLGSSQVLDTIRRLKKFLLDRHLHVILEDTIAEVLPGHGLQTSTRKLLGEVCDLVIVVGGDGSLLGAARALARHNIPVLGINRGNLGFLTDIRPDELEQKVAEVLDGHYLVENRFLLQAEVRRHHEAIGQGDALNDVVLHPGKSTRMIEFEIYIDGQFVCSQKADGLIVATPTGSTAYALSAGGPIMHPKLDAIVIVPMYPHTLSGRPIVVDGNSELKIVVSKDLQIYPQVSCDGQNHFTCAPGDTITVSKKPQKLRLIHPLDHNYYEVCRTKLGWGSRLGSSDD

SEQ ID NO: 67897 - protein, 297 aa, Pseudomonas putida
MSNWLVDKLIPSIMRSEVKKSSVPEGLWHKCPSCEAVLYRPELEKTLDVCPKCNHHMRIGARARIDIFLDAEGRAELGADLEPVDRLKFRDGKKYKDRLTAAQKQTGEKDALISMSGTLMGMPIVVSAFEFSFMGGSMGAIVGERFVRAANYALENRCPMVCFSASGGARMQEALISLMQMAKTSAVLARLREEGIPFISVLTDPVYGGVSASLAMLGDVIVGEPKALIGFAGPRVIEQTVREKLPEGFQRSEFLLEHGAIDLIISRGELRPRLARLLAQMTGQQTPEEAREAAAVA

SEQ ID NO: 67898 - protein, 394 aa, Pseudomonas putida
MSERLPEPDLDYLKRVLLEMLAIPSPTGFTDTIVRYVAERLDELGIPFELTRRGTIRATLKGRQATPDRAVSAHLDTIGASVRQLQDNGRLALAPVGCWSSRFAEGSRVSVFTDTGVFRGSVLPLMASGHAFNTAIDQMPISWDHVEVRLDAYCATRADCEALGVSIGDFVAFDPLPEFTESGHISARHLDDKAGVAALLAALKAVVESGRQPLIDCHPLFTITEETGSGAAGALPWDVSEFVGIDIAPVAPGQASSEHAVSVAMQDSSGPYDYHLSRHLLKLAGDHDLPVRRDLFRYYFSDAHSAVTAGHDIRTALVAFGCDATHGYERTHIDSLAALSRLLSAYLLSPPVFASDSQPANTSLERFSHQLEHDAQMESDTRVPAVDSLVGNKG

SEQ ID NO: 67899 - protein, 246 aa, Pseudomonas putida
MFDYTARPDLLQGRVILVTGAGRGIGAAAAKAYAALGATVLLLGKTEANLNEVYDQIEAAGHPQPVVIPFNLETALPHQYDELAAMIEGQFGRLDGLLNNASIIGPRTPLEQLSGDNFMRVMHINVNATFMLTSTLLPLLKLSEDASVVFTSSSVGRKGRAYWGAYGVSKFATEGLMQTLADELEGVAPVRANSINPGATRTAMRAQAYPGENPQNNPLPEEIMPVYLYLMGPDSTGVNGQAFNAQ

SEQ ID NO: 67900 - protein, 450 aa, Pseudomonas putida
MSVSLIASDQFRIVVGLGKSGMSLVRFLASRGIAFAVADTREQPPELETLRRDYPQVEVRCGELDVDFLCRANELYVSPGLALATPALQQAAARGVKLSGDIELFARHAKAPIVAISGSNAKSTVTTLVGEMAAKAGKRVAVGGNLGTPALDLLADDIELYVLELSSFQLETTDQLNAEVATVLNISEDHMDRYSGLPAYHLAKHRIFRGARQVVVNRQDALSRPLPVEGRPCWTFGLNPPDFKAFGLREVDGEKYLAFEFQTLMPARELKVRGAHNQSNALAALALGHAAGLPFEPMLEALREFGGLAHRCQWVRERNGVNWYDDSKATNVGAALAAIEGLGADIEGKLVLIAGGDGKGAEFTALREPVKRFCRAVVLLGRDAERLAEALGDAVPLVRVKTLDDAVQQCAELAQAGDAVLLSPACASLDMFKNFEERGRLFAQAAGGLA

SEQ ID NO: 67901 - protein, 360 aa, Pseudomonas putida
MLLLLAEYLQQFHKGFAVFQYLSLRGILGVLTALSLALWLGPWMIRTLQIRQIGQAVRNDGPQSHLSKSGTPTMGGALILSAIAVSTLLWADLSNRYVWVVLIVTLAFGAIGWVDDYRKVIEKNSRGLPSRWKYFWQSVFGLAAAVFLYKTAPTSVETTLILPFIKDVTIPLGVGFVVLTYFVIVGSSNAVNLTDGLDGLAIMPTVMVGGALGIFCYLSGNVKFAEYLLIPYVPGSGELIVFCGALIGAGLGFLWFNTYPAQVFMGDVGALALGAALGTIAVIVRQEIVLFIMGGIFVVETLSVVIQVASFKLTGKRVFRMAPIHHHFELKGWPEPRVIVRFWIITVILVLIGLATLKLR

SEQ ID NO: 67902 - protein, 496 aa, Pseudomonas putida
MMTMPLSKLFAHASRDPLIRELTLDSRSVRPGDLFLAVPGAKVDGREHIADALARGAAAVAYEEQGANVLPLTDVPLIPVKGLIAQLSDIAGRFYGEPSRQLNLVGVTGTNGKTSVTQLVAQALDLLGQRCGLIGTLGTGFYGELQSGRLTTPDPIAVQSTLNDLKKGGARAVAMEVSSHALEQGRVAALEFDIAVMTNLSRDHLDYHGSMEAYEAAKAKLFAWPSLRCQVVNLDDDFGRRLAADFARRPSVDHIETRLLSYSLESPEASLFCREAVFSDDGVRATLVTAQGERILRSQLLGRFNLSNMLAAVATLLALDYALDEILKVTPQLQGPVGRMQRLGGGDKPLVVVDYAHTPDALEKVLEALRPHAHGKLLCLFGCGGDRDRGKRPLMAEVAERLADRVLVTDDNPRTEDPSRIFDDIRPGFTRPDDVEFVAGRGEAIAHLIATAAANDVIVLAGKGHEDYQEINGERHDFSDLTEAEKALAAWEAPHA

SEQ ID NO: 67903 - protein, 315 aa, Pseudomonas putida
MTIDSGFNHITVLLDEAVEALALRADGCYLDGTFGRGGHSRLILSKLGPQGRLLGFDKDPQAIATGQALAAEDGRFVIVQRSFAELGAEVAARGLHGKVSGVLLDLGVSSPQLDDPERGFSFLNDGPLDMRMNPDQGVSAAEFIATAPVEEIARVFKEYGEERFAGRMARAVVERREKQPFTRTADLAEVLKVANPAWEKGKNPATRAFQGLRIHVNNELGDLEAGLEAALDALEVGGRLAVISFHSLEDRIVKLFMRKLVKGEADNLPRNLPVQHKVFEPKIKLIGKAQFASEAELKANPRSRSAVMRVAEKLR

SEQ ID NO: 67904 - protein, 151 aa, Pseudomonas putida
MFRGANAVSLDAKGRLAMPSRYRDELDSRCNGQLIVTIDAVDPCLCVYPLDEWEQIEAKLRALPSLREENRRLQRLLIGNAVDLELDGSGRFLVPPRLREYAKLDKKAMLVGQLNKFQLWDEDAWNAVSAADLAAIQQPGAMPDELRDLIL

SEQ ID NO: 67905 - protein, 130 aa, Pseudomonas putida
MSATQNYGTGRRKTATARVFLRPGTGNISINNRSLDVFFGRETARMVVRQPLELTESVEKFDIYVTVSGGGVSGQAGAIRHGITRALMEYDETLRGALRRAGYVTRDAREVERKKVGLRKARKRPQYSKR

SEQ ID NO: 67906 - protein, 142 aa, Pseudomonas putida
MKTFTAKPETVKREWFVVDAAGQTLGRLATEIATRLRGKHKPEYTPHVDTGDYIVVINAEQVRVTGAKSSDKMYYSHSGFPGGIKEINFEKLIAKAPERVIETAVKGMLPKNPLGRDMYRKLKVYAGAAHPHTAQQPQELKI

SEQ ID NO: 67907 - protein, 398 aa, Pseudomonas putida
MFELVDNVPQSPVIKVIGVGGGGGNAVNHMVKSSIEGVEFICANTDAQALKNIGARTILQLGTGVTKGLGAGANPEVGRQAALEDRERIAEVLQGTNMVFITTGMGGGTGTGAAPIIAEVAKEMGILTVAVVTRPFPFEGRKRMQIADEGIRMLAESVDSLITIPNEKLLTILGKDASLLSAFAKADDVLAGAVRGISDIIKRPGMINVDFADVRTVMGEMGMAMMGTGCASGPNRAREATEAAIRNPLLEDVNLQGARGILVNITAGPDLSLGEYSDVGSIIEAFASDHAMVKVGTVIDPDMRDELHVTVVATGLGARIEKPVKVVDNTLQTAQQAYEASNPAPVRQEQPAVNYRDLERPTVMRNQAHAGAAAAAKLNPQDDLDYLDIPAFLRRQAD

SEQ ID NO: 67908 - protein, 289 aa, Pseudomonas putida
MQGAMIRQQQPVTGRSKPVPRGASRLVADEPVSARLPRPSLGGLKRLLWPVLLVAAGFGAYEGAVRLMPYADRPISKIDVQGDLSYISQQSVQQRIAPYVAASFFSVDLPAMRAELEQMPWIAHAEVRRVWPDEVVIRLEEQLPVARWGDAALLNNQGQAFTPRELANYEHLPQLAGPQRAQQQVMQQYQVLSQMLRPLGFSIARLELRERGSWFLTTGASSAGPGIELLLGRDHLVEKMRRFIAIYDKTLKDQITTIARIDLRYSNGLAVGWREPIAPTTAQPAVAKN

SEQ ID NO: 67909 - protein, 95 aa, Pseudomonas putida
MSDHEHGHQHQSHSDIIKRLKRAEGHLRSIVSMIEDSRACVDIAQQLHAVEKAVCQAKRVLIQDHIDHCLEHTVEALATGERASLEDFKQITKYL

SEQ ID NO: 67910 - protein, 500 aa, Pseudomonas putida
MTDKQTAPQQAGDLVEVENFAPQPSLLDSIISQSRVARSDTERNRTRDLIGELVNQVLEGEMTPSKDLIAVLDSRIAEIDAMLSEQMNEIMHAREFQQLEASWRGLKYQVDQTETSTTLKIHLLNASKKDLVRDLKAASEFDQSALFKKVYEEEYGTFGGAPFGMLIGDYEFNRNPEDMYLLEEISHVAAAAHAPFISAASSELFGWDSFTEMSGPRDLAKIFDTVEYAKWKSFRASEDSRYVGLTLPHVLGRLPYGPDTTPVEEFNFVESVDGRDHNKYLWMNAAYALGTRVTDAFARYGWCVAIRGVEGGGLVEGLPTHTFKTDDGEIALKCPTEIAITDRREKELSDLGFIPLVHCKGTDYAAFFGTQSAQKQKQYNTDIANANARLSAQLQYIFATSRIAHYMKAIMRDKIGSFASRMDVERFLNQWLASYVLLDDTASQEAKAKFPLREARAEVFEVPGKPGVYKAVTYLRPHYQLDELTASLRLVAELPQGARG

SEQ ID NO: 67911 - protein, 613 aa, Pseudomonas putida
MTADLILFNGKLHTVDREKPTATAVAIKDGRFIAVGSDAEAMAHKGAASQIIDLKQRTVIPGLNDSHLHLIRGGLNYNLELRWEGVPSVADALRMLKDQAARTPTPQWVRVVGGWNEYQFAEKRMPTLEEINQAAPDTPVFLLHLYDRALLNRAALKAVGYTKETPNPPGGEIQRDKFGNPTGMLIARPNAMILYATLAKGPKLPLEYQVNSTRQFMRELNRLGLTSAIDAGGGYQNFPDDYSVIQELADNDQLTVRIAYNLFTQKPKEELDDFKKWTSSVKLHSGTDFLRHNGAGEMLVFSAADFEDFLEPRPDLPQTMEEELEPVVRHLVEQRWPFRLHATYNESITRMLDVFEKVNRDIPFNGLPWFFDHAETITPQNIERVRALGGGIAIQDRMAFQGEYFVDRYGAKAAEQTPPIKRMLEMGVPVGAGTDATRVSSYNPWTSLYWLVSGKTVGGMELYPEGLSRDTALQLFTQGSAWFSSEQGKKGQIKVGQLADLAALSLDFFSVDEEAIKGIESVLTIVDGKVVYGAGEFDKFGPPQVPVLPEWSPVTKVPGHWRVGTPSLAAAVHQCSGPCGVHAHSHEKARHSSVPVNDFQGFWGALGCSCFAF

SEQ ID NO: 67912 - protein, 884 aa, Pseudomonas putida
MSDSARADALLANLPRTGRGRLKVFLGAAPGVGKTFAMLQAAHAQQRQGVQVLAGVVETHGRAETEALLGGLHQQPLLRSQYRGVTLEEMDLDGLLRAAPALALVDELAHTNAPGSRHAKRWQDVQELLAAGIDVYTTVNVQHLESLNDKVRDITGVQVRETLPDWVLQEAFELVLIDLPPRELLERLREGKVYVPEQARAAIDAYFSQTNLTALRELAMQTAAAQVDADLAHGYRQRGQEAPALRGRLLVGIDGDDQAERLVRHASRVAQRRHLPWSLVHVDNGRLRDETARHRLQAAQQLAERLGGEVVLLRAGEVARTLIQHAVERRASLVLVGQSRNRLRRRLFGAGVAARLLRESRGLEINVLDRDVQPPAPRSAVRRVWVWRHYLLALLATVMAAGLAWAVSSVLALPNISLVFLAAVLLVAVRSSLGPALACAALSFLVYDFLFIPPNFSFTIQREEDVLTLVFFLLMAALTGNLAARQRRQLQALRETQAQTSQLLDLSRRLTVATDRQAIFKAAGQHLDGWQDAQVCLLERNAEGQLQVASGEACTFSDTERAAADWAWQHGQAAGHGSDTLPNGRWWWWPLAVDDQPLALLGVRPRNGQPLSDPRRRLLTALGQPLAQALARARLAEQLEAARLHGETEQLRSALLASVSHDLRTPLTAMRGSIDSLLALGDAIPAEDRRELLEGTRNEAERLDRYIQNLLDMTRLGHGGLKLARDWVAPADIVGSALNRLRVVLAPLRVHTDVPTELPLLFVHAALIEQALVNVLENAARFSPANGRLELQVAVHDDQLRLTVSDQGPGIPEADREKIFDMFYTAARGDRGGQGTGLGLAICQGMIGAHGGQILVGEGIDGQGTSITLCLPLPPQPEAESETP

SEQ ID NO: 67913 - protein, 534 aa, Pseudomonas putida
MSEQNLIEVRDLAVEFVTGDQVNRVVDGVSFDIRKGETLALVGESGSGKSVTAHSILRLLPYPLARHPSGSIRYEGKDLLQQSEKTLQRIRGNRIAMIFQEPMTSLNPLHCIEKQINEILLLHKGLTGKEATARTLELLDMVGIPEPRKRLKALPHELSGGQRQRVMIAMALANEPELLIADEPTTALDVTVQLKILELLKELQARMGMALLLISHDLNLVRRIAHRVCVMQRGQIVEQAECATLFSSPQHHYTQMLINAEPSGLPAHNPVGAPLLEVDDLKVWFPIKKGFLQRTVDHVKAVDGVNFSLPQGQTLGIVGESGSGKSTLGLAILRLISSQGGIRFHGQNLEGLNQKAVRPLRREMQVVFQDPFGSLSPRMCVADIVGEGLRIHRIGTAQEQEAAIIAALEEVGLDPRTRHRYPHEFSGGQRQRIAIARALVLKPALILLDEPTSALDRTVQRQVVELLRNLQQKYNLTYLFISHDLAVVKALSHQLMVIKHGHVVEQGDAQAIFHAPQHPYTRQLLEAAFLEVGG

SEQ ID NO: 67914 - protein, 350 aa, Pseudomonas putida
MVNNDRLLVQILLVALLGAGLWVMAPFISALLWGAILAFASWPLMRFLTRLLGGRETLAAGLLTMAWILIVALPLVWLGFNLADHIRDATAFVRDVQVDGLPDAPAWLGGIPFVGERLVNGWQSLDQKGAALLTSIKPYFGQVGNWLLARSAQIGSGVLELTLSLVFVFFFYRDGPRLAAFVLRLLHRLVGERAEYYLDLVAATVQRVVNGVIGTAAAQALLALIGFLIAGVPGAIVLGLVTFMLSLIPMGPPLAWIPATAWLVWKGEYGMAVFLGVWGTFVISGVDNVLKPYLISRGGNLPLVIVLLGVFGGLLAFGFIGLFIGPTLLAVGYSLLLDWSRNAAQQPPQQ

SEQ ID NO: 67915 - protein, 659 aa, Pseudomonas putida
RPALVQAFVKLDPRQLKRSPVMLVVALTAVLTTVLCFAPGGGVSIGVAVQIALWLWFTVLFANFAEALAEGRGKARADSLKAGSQGLTAQRRLRDGSYETVAASALRKDDVVRVVAGEMIPGDGEVIEGIAAVNEAAITGESAPVIRESGGDRSAVTGNTRLVSDWLLIRITSNPGESTLDRMIALVEGAKRQKTPNEIALDILLIGLTLIFLIVVVTLQPFAHFAGGSLPLIFLAALLVTLIPTTIGGLLSAIGIAGMDRLVRLNVIARSGRAVEAAGDVHTLMLDKTGTITFGNRRCSALHAAPGITAKELGEGALLASLADDTAEGKSIVEYLRQLHDFVDPPAGQFEAVAFSAETRLSGIDFEQHRYRKGAVDAVLAFVGMQRLEMPAALAREVERIAQSGGTPLLVCVDKRLLGVIHLKDVVKPGIRERFAELRKLGIRTVMVTGDNPLTAAAIAAEAGVDDVLAEATPEKKLARIRQEQNDGRLVAMCGDGANDAPALAQADVGMAMNDGTQAAREAANMVDLDSDPTKLLDVVQVGKELLVTRGALTTFSIANDVAKYFAILPALFAAIYPQLGVLNLMQLASPQSAILSAIVFNALIIIVLIPLALRGVRVQAASAAHLLRRNLLIYGLGGIVVPFAGIKLIDLLLNALNL

SEQ ID NO: 67916 - protein, 181 aa, Pseudomonas putida
MTAYLRPALSLALLMTLVTGALYPLAVTGIAQVAFPNQANGSLVRDAQGQVRGSALIAQDFQGDGWFHSRPSAGAYATVASGASNLSPSNPALAERVKGDAATLYQAQQGPVPQALLTTSGSGLDPHLPPEALAYQIPRVAAARQLPVERLQALLEQATLHPLIGPPVVNVLALNQALEKL

SEQ ID NO: 67917 - protein, 324 aa, Pseudomonas putida
MSRIFADNAHSIGNTPLVQINRIAPRGVTILAKIEGRNPGYSVKCRIGANMVWDAESSGKLKPGMTIVEPTSGNTGIGLAFVAAARGYKLMLTMPASMSLERRKVLKALGAELVLTDPAKGMKGAIEKANEIVASDPEQYFLPGQFENPANPAIHEKTTGPEIWNDTDGAIDVLVAGVGTGGTITGVSRYIKHTQGKAILSVAVEPVASPLISQTLAGEELKPSPHKIQGIGAGFVPKNLDLSIVDQVETVTDEESKAMAIRLMQEEGILCGISCGAAMAAAVRLAEKPEMQGKTIVVILPDSGERYLSSMLFSDMFSEQETQQ

SEQ ID NO: 67918 - protein, 258 aa, Pseudomonas putida
MHNDKGDRVVERLLLNCDMGESFGSWRMGLDAEVMPYIDCANIACGYHAGDPGIMRRTVTLALEHGVTIGAHPAYPDLVGFGRRSMACSPEEIRDLLHYQIGALDGICKVLGGRVAYVKPHGALYNDMMADPLKLRTVLEAVAAYDSNLPLMLMATADNRAAQALGDEIGVPLWFEAFADRAYTASGHLLSRRLPGAVHHDPARVVEQAVRLARGETLLADDGSALQLAARTLCVHGDNDSSVAAVRQIRQALDGLEV

SEQ ID NO: 67919 - protein, 334 aa, Pseudomonas putida
MEQNSRALIDGFNRKIDYLRMSVTDRCDFRCVYCMAEDMQFLPRQQILSLEELFQVAERFVALGTRKIRLTGGEPLVRQGIVDLCGRIAALPGLRELCLTSNGSQLGRLAQPLFDAGVTRLNISLDSLDADRFKQLTRTGDLAQVIAGIDAARQAGFKRTKLNCVVLKGRNDHELVDLVRFAIERELDITFIEEMPLGVISEHERGESFCSSDEVRARLAEQFTLVESTESSMGPARYWRLAEAANTRVGFISPHSHNFCATCNRVRLTVEGRLLLCLGNEHSVDLKHVLRAHPGNPERLEKAIRDSLHLKPYRHHFEVGGDVQILRFMNMTGG

SEQ ID NO: 67920 - protein, 299 aa, Pseudomonas putida
MIVPPSTDVLRVLFTLKGSIVKRIALRCLMVTLLAALIVLVERHYPAYFYPVSATPFTLLGLSLSIFMSFRNNACYDRWWEGRKAWGKLIIETRSFVRESVVITDETLRTELLRNLCGFAHALNARLRNEDERAAARPWLARADAISPHNVCDGILREIGEHCSRLAAQQQISEWRYNLLEQRLAGLTEVQATCERIKGTPLPFPYTLLLHRTIYIFCLLLPFALAEPLGWLAPLFTTIVGYTFFGLDAIGNELEDPFGRDENDLPTDAMVRTVERDVLAGLGEQQLPPALLPVGYVLS

SEQ ID NO: 67921 - protein, 555 aa, Pseudomonas putida
MRIVPFQYLALAAAILSCSSVYAATLEGGAVAAPDQYGAQVAADILKKGGNAVDAAVATAFTLAVTYPEAGNIGGGGFMTLFVDGKPYFLDYREVAPKAATRNMYLDDKGEVIENLSLVGARAAGVPGTVMGLWEAHQKFGKLPWSELLTPAIGYAKNGFKVAEKQYQYRNDAQGMFKTATNFNDYFGNMKVGELFKQPEMAQTLERIADKGVSEFYQGKTADLLVAQMQADKGLITKEDLKDYKAVWREPMAVSWRGNVVYTAPPPSSGGVALAQLLGIKEDRAADFKGVAHNSAQYIHLLAEIEKRVFADRADYLGDPAFTKVPVDQLVAKDYLAKRAAQVNPKAISDTDKVKPGLEPHQTTHFSIVDKQGNAVSNTYTLNLDYGSGVVVKGAGFLLNDEMDDFSAKPGAANAFGVVGGDANAIEPGKRMLSSMSPSLMTRDGKVELVIGTPGGSRIFTSIFQVMNNLYDYGMPLDKAVAAQRVHHQLLPKDTIYFDSYAPLTGPVADELKKMGYVLEDQGWEMGDIQAIRVDGAKLETASDPRGRGVGMIVK

SEQ ID NO: 67922 - protein, 947 aa, Pseudomonas putida
DLGTPARESDVQVSLSIDGRAISVPAGTSVMRAAAMLGTSIPKLCATDSLEAFGSCRMCMVEIEGMRGYPASCTTPVSEGMVVRTETPRLAGLRRNVMELYISDHPLDCLTCSANGNCELQTVAGQVGLREVRYGYDGANHLDEKKDVSNPYFDYEPSKCIVCSRCVRACEDIQGTFALTITGRGFESRVAAAGGENFLASECVSCGACVQTCPTATLTEKSLVQLGQPERSVITTCAYCGVGCSFRAEIKGDQLVRMVPDKNGGANHGHACVKGRFAWGYATHPDRITKPMIRKRLEDPWQEVSWDEAVTYAASEFRRIQLKYGRDSIGGITSSRCTNEEAYLVQKLVRTAFGNNNVDTCARVCHSPTGYGLKQTLGESAGTQSFDSVMQADVVLVIGANPTDAHPVFGSQLKRRLRQGARLIVIDPRRIDLVDSPHARADLHLQLRPGTNVAMLNALAHVIVTEGLLAQSFIDARCETGDFARWRDFVSLPDNAPEVLGPVCGVPAEQSALRPGCMPPAATRAIYYGLGVTEHSQGSTAVMGIANLAMATGNIGREGVGVNPLRGQNNVQGSCDMGSFPHELPGYRHVSNEGVRAEFEQAWGVTLQPDPGLRIPNMFEAALDGSFKALYCQGEDIAQSDPNTQHVTAALLAMECVVVQDIFLNETAKFAHVFLPGSSFLEKDGTFTNAERRISRVRKVMEPLAGKADWEATVALANALGYPMNYRHPSEIMDEIARLTPTFRRISYAELDRHGSLQWPCNDAAPDGTPTMHIDQFVRGKGRFMLTGYVPTDEKVNNRYPLLLTTGRILSQYNVGAQTRRTGNVAWHDADRLEIHPTDAESRGIQDGDWVGIGSRAGQTVLRAKVSTRVAPGVVYTTFHFPESGANVITTDNSDWATNCPEYKVTAVEVVKVFQPSQWQKRYQDFSDEQQRLLKERRTAEKAEVRR

SEQ ID NO: 67923 - protein, 205 aa, Pseudomonas putida
MSLIPEIDAFLGCPTPDAWIEAALADQETLLIDHKNCEFKAASTALSLIAKYNTHLDLINMMSRLAREELVHHEQVLRLMKRRGVPLRPVSAGRYASGLRRLVRAHEPVKLVDTLVVGAFIEARSCERFAALVPHLDEELGRFYHGLLKSEARHYQGYLKLAHNYGDEADIARCVELVRAAEMELIQSPDQELRFHSGIPQALAA

SEQ ID NO: 67924 - protein, 321 aa, Pseudomonas putida
MDQAASNDQAMTRDSLYGTAAESTYAGVVSFSRRRYSRDLRGVDVVVSGVPFDTATSNRPGARFGPRAIRAASVQQAWARHWPWAFDPFDHLAVIDYGDCPFDSGTPQSVPDSIEAHAEHILQAGCAMLTLGGDHFISYPLLKAHARRHGPLALIHFDAHSDTWPDEAGKRIDHGTMFWHAAREGLVDPAHSVQIGLRTTNDDSQGFAILDARQVHRQGTEAVIAAIRQRVGERPVYLTFDIDCLDPAYAPGTGTPVCGGLSTVQALEILGGLRGINLVGMDLVEVAPAYDHADITALAGATLAMEMLCLYAARHKVDNGQ

SEQ ID NO: 67925 - protein, 312 aa, Pseudomonas putida
MMDWTDRHCRFFLRLLSRQTLLYTEMVTTGALLHNDAHRFLRHDASEHPLALQLGGSVPADLAACARLAEEAGYDEVNLNVGCPSDRVQNNMIGACLMAHPALVADCVKAMRDAVSTPVTVKHRIGINGRDSYAELSDFVGQVREAGCRSFTVHARIAILEGLSPKENREIPPLRYDIAAQLKRDFPDLEIVLNGGIKTLDECQAHLETFDGVMLGREAYHNPYLLAEVDQQLFGSDAPVVSRSEALAQLRPYIVAHMESGGAMHHVTRHILGLAQGFKGARRFRQLLSADIHKAAEPLAVFDQAVELLQGR

SEQ ID NO: 67926 - protein, 146 aa, Pseudomonas putida
MSLFSFVKEAGEKLIDLLTPGNANAEEQLKKHVEAVGLGNPNITATVEGDKIILKGEVASQEEKEKIILAAGNISGVASVEDQITVTGPVVQAARFVTVKSGDTLSAIAMVVYGNANQYNKIFEANKPMLKHPDKIYPGQVLRIPD

SEQ ID NO: 67927 - protein, 325 aa, Pseudomonas putida
MLPRFPAVTRSLSLAALLIAGPAAALELPLPPPGEDIVGQVHVIKAKYEDTFADIGTANDLGYLEMIAANPGVDPWLPGAGTEIILPTRFVLPPGPREGIVINLAEYRMYYFPKGESVVYTFPLGIGREGWGSPIANTRITAKTPNPTWTPPASIRKEHAEDGDILPTVVPAGPDNPLGPFKFTLGVPGYLIHGSNKKFGIGMRTSHGCFRMFNNNVLELSKMVPVGTPVRIINEPYKFGISAGKVYLEAHTPLDDQGNPSVVDKHTAVINALLKREDLANNLRMNWDMVRDVVAAEDGMPVEIAVPVENQGAAPMVTSIPPELQ

SEQ ID NO: 67928 - protein, 798 aa, Pseudomonas putida
MKTTLDLPLLPLRDVVVYPHMVIPLFVGREKSIEALEAAMTGEKQILLLAQKNPADDDPGEDALYRVGTVATVLQLLKLPDGTVKVLVEGEQRGAVERFSEVEGHIRAEVSLIDETDTAERESEVFVRTLLSQFEQYVQLGKKVPAEVLSSLNSIDEPGRLVDTMAAHMALKIEQKQEILEIVDLTTRVEHVLALLDAEIDLLQVEKRIRGRVKKQMERSQREYYLNEQMKAIQKELGDGDEGHNEVEELKKRIEAAGLPKDALAKAQAELNKLKQMSPMSAEATVVRSYLDWLVQVPWKAQSKVRLDLAKAEEILDADHYGLEEVKERILEYLAVQKRVKKIRGPVLCLVGPPGVGKTSLAESIAAATNRKFVRMALGGVRDEAEIRGHRRTYIGSMPGRLIQKMTKVGVRNPLFLLDEIDKMGSDMRGDPASALLEVLDPEQNHNFNDHYLEVDYDLSDVMFLCTSNSMNIPPALLDRMEVIRLPGYTEDEKINIAVKYLVPKQVKANGLKKEELEVDVSAIRDIIRYYTREAGVRGLERQIAKVCRKVVKEHTGQKQVKVKVASEQLEHLLGVRKFRYGLAEQQDQIGQVTGLAWTQVGGELLTIEAVVIPGKGQLIKTGSLGDVMVESITAAQTVVRSRARSLGIAADFHEKHDVHIHMPEGATPKDGPSAGIGMCTALVSALTQIPVRADVAMTGEITLRGQVLAIGGLKEKLLAAHRGGIKTVIIPEENVRDLKEIPENIKQDLQIKPVKWIDEVLQIALQYAPEPLPDVAPEIVAKDEKRDGDAKERISTH

SEQ ID NO: 67929 - protein, 221 aa, Pseudomonas putida
PPPARVLTDETETLSENVFRRIQAAIVKGDIAPGSKISEPELARTYGISRGPLREAIHRLEGQRLLVRVPHVGARVVSLNHAELIELYEIRESLEGMACRLAAERMSQADIDELRRVLDTHERDAAFQAGLGYYQQEGDYDFHYRIIQGSGNQTLVKMLCGELYQLVRMYRIQFSATPNRPRQAFAEHHRILDAIADRDGELAELLMRRHIGASKRNIERH

SEQ ID NO: 67930 - protein, 291 aa, Pseudomonas putida
MVAKQKVYLDQASSAMGDLYCGCKWTWVGKSGGRIDAASCGYQTRKQQNRAERTEWEHIVPAHTFGNQRQCWKNGGREHCVDNDPVFRAMEADLFNLYPAVGEVNGDRSNFNYGMVTGNAGEYGQCTTKVDFVQRTAEPRDEVKGLVARTTFYMFDRYKLNMSRQQQQLLMAWDKQHPVSAWEKERDRRIAAIMGHANPFVSGERKWTAGYKPVGSGVVEAVPVNAAKPEAKPSLASAGSVGAVLGNRNSHVYHLSVGCPGYNQVTAKNQVTFANEGEAQAAGYRKAGNCR

SEQ ID NO: 67931 - protein, 307 aa, Pseudomonas putida
MSNLAPLNHLITRFQEQTPIRASSLIITLYGDAIEPHGGTVWLGSLINLLEPIGINERLIRTSIFRLTKEGWLTAEKVGRRSYYSLTGTGRRRFEKAFKRVYSPSQPAWDGAWTLVLLSQLEAGKRKAVREELEWQGFGVMAPNLLGCPRADRADLVATLHDLEAGDDSIVFETHTQEVLASKAMRAQVRESWRIDELGQQYSEFIQLFRPLWQGLKEQPLLDAQDCFLARTLLIHEYRRLLLRDPQLPDELLPGDWEGRAARQLCRNLYRLVFAKAEEWLNAALETADGPLPDVSESFYKRFGGLA

SEQ ID NO: 67932 - protein, 488 aa, Pseudomonas putida
MYSWPVNAGPLDPRGYSPNQMYAQAMVYEPLVRYTAAGTLEPWLAEAWQVSDDGKTYTFTLRDGVRFSDGTPFDAPAAKANLDAVLANTQRHRWMELVTTLDHVEAPERLTLRLVLKHPYYPTLMELAQVRPLRFASPQAKPGQPAGTGPWMRAESRLGEYDRFVRNPQYWGPKPAYGEVMVKVIPDPNSRALALQAGEVELIQGAAGEITAGTFVRLRDQGYATALSAPLATRTLAMNTGRGATRDLAVRQAINEAVDKQAIIDKILYGLEPRADTLFASNMPYADIGLKPYPYDPARAAHALDAAGWTLAPGASVRSKGGEPLAIELVFLGTSALQKSLAEVLQGELAKIGIHIDLRAVEEGALVRRQRDGDFGMIFADTWGAPYDPHSFVSSMRYAGHADYMAQRGLAIKDELDKRIGQVLASTDEQQRAEQYRFILTTLHEQAVYLPISHLTAISVRRDSVAKVQFGSTLFDVPFETMTPKQGD

SEQ ID NO: 67933 - protein, 568 aa, Pseudomonas putida
MRKIRVHYKNKSPPMNCLHPLAALGVLMLGASHAMAAPTVKQPNILLVVADDLGFSDLSALGSEIQTPNLDKLLADGRLMLDFHAAPSCSPTRAMLMSGNDPHLVGLGMMSETRKRLPAGAEVRAGYEGVLGANVATLAELLHDAGYRTYIAGKWHLGMQPAQQPHNRGFDQAYVLLEGGAAHFKQANMDLQSNYSATYRHNGEPIALPDDFYSTTWYTDRLIDAIDQGKASNKPFFAFAAYTAPHWPLQAPDAYLAQYRGRYDQGYEVIAHERLKRQREAGLVPADFSLQAQLEGVPSWASLSDEQKRQSARTMEVYAAMVTALDAEVGRLVEHLRKTGELENTMILFMSDNGPENATRVDPEWIKANFDNRLDNYGRRDSFLMIGSAWAQVSALPSRRYKMTTYQGGIRVPAFVYYPATIKAGRSEELASVRDIMPTLLQLAGAPMPGVKYRDRDIVPPQGTSALNYLQGKDSQIHAHDEALGWEINGSASLRKGPLKLVWDATDSKPSWHLYDLRKDPGEHHDIGAGHPEQVALMLRDWKAYAQRGNIAIDADGRPASPILVKPQ

SEQ ID NO: 67934 - protein, 331 aa, Pseudomonas putida
MQYVKLGSTGLDISRLCLGCMTFGEPDAGTHPWTLGEDASRPIIRHAVEQGINFFDTANSYSAGTSEIILGKLLREFTRREETVIATKVFFPANMWEGASRPNEQGLSRKAIMANIDASLSRLGTDYVDLYQIHRWDYHTPIEETMEALHDVVKAGKARYIGASSMYAWQFAKAQQVAANHGWSRFVSMQNYLNLIYREEEREMIPLCLDQGVGLMPWSPMARGRLTRPHGQQTQRTRTDVSGQSFYEKTEVEDGRVIDVVEQIASERGVPMAQVALAWVLGRAGVSAPIVGASKPAHLDDALGALSLQLSEDEVARLQAPYVPHAVTGFK

SEQ ID NO: 67935 - protein, 393 aa, Pseudomonas putida
MAWNEPGGNSNNQDPWGGRRGGGGGGGDKKGPPDLDEAFRKLQDSLNGMFGGSKKRGGGDRNVGKGGGLGLLGIGLAVLAAIWLYSAVYVVDEQEQAVVLRFGKYYETVGPGLNIYFPPIDRKYMENVTRERAYTKQGQMLTEDENIVEVPLTVQYKISNLQDFVLNVDQPEVSLQHATDSALRHVVGSTSMDQVLTEGREQMAVDIRERLQRFLDNYRTGITVTQVNVQSAAAPREVQEAFDDVIRAREDEQRARNQAESYANGVVPEARGQAQRIIEDANGYRDEVIARAKGEADRFTKLLAEYRKAPDVTRERLYLETMQEVYSNSSKVMVATKDGQSNLLYLPLDKMVEGSRKPSVPTTSASPSANDAAARAAQDMQQQQQPLRTRESR

SEQ ID NO: 67936 - protein, 141 aa, Pseudomonas putida
MRHYEIIFLVHPDQSEQVGGMVERYTKLIEEDGGKIHRLEDWGRRQLAYAINNVHKAHYVMLNVECTGKALAELEDNFRYNDAVIRNLVIRRDEAVTGQSEMLKAEENRSERRERRERPEHADSAEGDDSNDSDSSDNADE

SEQ ID NO: 67937 - protein, 76 aa, Pseudomonas putida
MARFFRRRKFCRFTAEDVKEIDFKDLNTLKAYVSETGKIVPSRITGTKARYQRQLATAIKRARFLALLPYTDSHGR

SEQ ID NO: 67938 - protein, 148 aa, Pseudomonas putida
MELILLEKVANLGNLGDKVKVKAGYGRNFLLPFGKATVANAANLAAFEERRAELEKAAADKKASAESRAAQLAELEVTITATAGDEGKLFGSIGTHDIADALTASGVEVAKAEVRLPNGTIRQVGEYDVAVHLHSDVEATVRVVVVAA

SEQ ID NO: 67939 - protein, 467 aa, Pseudomonas putida
MAMNEITTSEQLDLQTAALKVPPHSIEAEQAVLGGLMLDNNAWERVLDQVSDGDFYRHDHRLIFRAVHKLADANQPFDVVTLHEQLDKEGLSSQVGGLAYLAELAKNTPSVANIKAYAAIIRERATLRQLISISTDIADNAFNPQGRNAAEILDDAERQIFQIAEARPKTGGPVGVNELLTMAIDRIDTLFNSDSDITGISTGYTDLDEKTSGLQAADLIIVAGRPSMGKTTFAMNLVENAVLRTDKAVLVFSLEMPGESLIMRMLSSLGRIDQTKVRSGQLDDDDWPRLTSAVNLLNDRKLFIDDTAGISPSEMRARTRRLAREHGEIAMIMVDYLQLMQIPGSAGDNRTNEISEISRSLKALAKEFNCPVIALSQLNRSLEQRPNKRPVNSDLRESGAIEQDADVIMFVYRDEVYHPETEHKGVAEIIIGKQRNGPIGFVRLAFIGKYTRFENLAPGMYNFDDDE

SEQ ID NO: 67940 - protein, 476 aa, Pseudomonas putida
MRIRALVAIVGLLLTTVTVEALAVTQVKSMRLWRAPDNTRLVFDLSGPVQHSVFTLSAPDRLVIDINGATLAAPLNVATSNTPISSVRSAQRTPTDLRVVVDLKKSVTPKSFTLAPNAQYGNRLVVDLYDQEADAIAASAPPPAPAPVQTPATTPAVPVTPAQPAIKLPPVPSGKRDIVVAIDAGHGGEDPGASGSRGQHEKDIVLQIAKELQRQINSEKGFRAELTRTGDYFIPLRKRTEIARKKGADLFISIHADAAPSRAAFGASVFALSDRGATSETARWLADTENRSDLIGGAGNVSLDDKDRMLAGVLLDLSMTATLSSSLNVGQKVLGNMGRVTSLHKQRVEQAGFMVLKSPDIPSILVETGFISNNNEAAKLASSSHQQALARSIRTGVHQYFQQNPPPGTYIAWLRDTGKIAAGPREHTVRPGETLAMLAVRYQVSVASLRSINSLKTDELKVGQRLDVPATTLAAQ

SEQ ID NO: 67941 - protein, 632 aa, Pseudomonas putida
MSGGSRIQLLSPRLANQIAAGEVVERPASVAKELLENSLDSGARRIDIEVEQGGVKLLKVRDDGSGISADDLPLALARHATSKIRELEDLEGVLSLGFRGEALASISSVARLTLTSRTASASEAWQVETEGRDMTPRVQPAAHPVGTSVEVRDLFFNTPARRKFLKAEKTEFDHLQEVIRRLALARFDVGFHLRHNGKSILSLHEAHDEIARARRVGAICGPGFMEQALPIDVERNGLRLWGWVGLPTFSRSQADLQYFFVNGRAVRDKLVAHAVRQAYRDVLFNGRHPTFVLFLELEPNGVDVNVHPTKHEVRFREGRSVHDFLYGTLHRALADVRPEDQLAAPAAVPELVRPTGQQAGEFGPQGEMRLASPVLEQPRAPQQSFSNGGSGAGYQYQYTPRPSQPLPAAEAQAVYREFYKPLETGAAPATALPESQGDIPPLGYALAQLKGIYILAENAVGLVLVDMHAAHERIMYERLKVAMASEGLSGQPLLVPETLALSQREADCAEEHAQWFQRLGFELQRLGPETLAIRQIPALLKQAEANRLVQDVLADLMEYGTSDRIQAHLNELLGTMACHGAVRANRRLAIPEMNALLRDMENTERSGQCNHGRPTWTQMGLDDLDKLFLRGR

SEQ ID NO: 67942 - protein, 355 aa, Pseudomonas putida
MDDNKKRALAAALGQIERQFGKGAVMRMGDHERQGIPAISTGSLGLDIALGIGGLPKGRIVEIYGPESSGKTTLTLSVIAEAQKNGATCAFVDAEHALDPEYAGKLGVNVDDLLVSQPDTGEQALEITDMLVRSNAVDVIIVDSVAALVPKAEIEGEMGDMHVGLQARLMSQALRKITGNIKNANCLVIFINQIRMKIGVMFGSPETTTGGNALKFYASVRLDIRRTGAVKEGDEVVGSETRVKIVKNKVSPPFRQAEFQILYGKGIYRNGEIIDLGVSQGLVEKSGAWYAYQGNKIGQGKANAAKYLAENPAIGAEIEKQIREKLLKAGAAAEAGKAAAAEADADDMADADAGY

SEQ ID NO: 67943 - protein, 857 aa, Pseudomonas putida
MSDLSAHTPMMQQYWKLKNQHPDQLMFYRMGDFYEIFYEDAKKAAKLLDITLTARGQSAGQSIPMCGIPFHSLEGYLAKLVKLGESVVICEQIGDPATSKGPVERQVVRIITPGTVSDEALLDERRDNLIAALLGDERLFGLAVLDITSGNFSVQEIKGWENLLAELERLNPVELLIPDDWPRDLPAEKRPGARRRAPWDFDRDSARKALCQQFATKDLKGFGCDKLTLAIGAAGCLLTYAKETQRTALPHLRSLRHERLDDTVILDGASRRNLELDINLAGGRDNTLQSVIDRCQTAMASRLLSRWLNRPLRDLKVLQARQDSIRCLLDSYRFEKLQPQLKEIGDIERILARIGLRNARPRDLARLRDALGALPELQNAMTELEAPHLARLAAITGTYPELASLLERAIIDNPPAVIRDGGVLKAGYDNELDELLAISENAGQFLIDLEAREKARTGLANLKVGYNRVHGYFIELPTKQAEQAPGDYIRRQTLKGAERFITPELKAFEDKALSAKSRALAREKMLYDALLETLISHLAPLQDSAAALAELDVLSNLAERALNLDLNCPRFVDEPCLRIEQGRHPVVEQVLTTPFVANDLGLDNSTRMLIITGPNMGGKSTYMRQTALIVLLAHIGSFVPAASCELSLVDRIFTRIGSSDDLAGGRSTFMVEMSETANILHNATDRSLVLMDEVGRGTSTFDGLSLAWAAAERLAQLRAYTLFATHYFELTVLPESEPLVANVHLNATEHNERIVFLHHVLPGPASQSYGLAVAQLAGVPTAVIQRAREHLGRLETTSLPHEQPAAHKAKDAPQVPHQSDLFASLPHPAIEKLGKLQLDDMTPRQAIEMLYQLKNLL

SEQ ID NO: 67944 - protein, 449 aa, Pseudomonas putida
MALGSAIGTGLFYGSASAIQMAGPAVLLAYLIGGAAVFMVMRALGEMAVHNPVAGSFGHYATTYLGPMAGFILGWTYAFEMVIVAIADVTAFGIYMGFWFPEVARWIWVLGIVFLIGGLNLCNVKVFGEMEFWLSLLKVGAIVAMILAGLGIMAFGFSQVGTGHAVGMSNLFDHGGFMPNGVGGLIASFAVVMFAFGGIEIIGVTAGEAKDPQRVIPKAINAVPLRILLFYVLTLFVLMCLYPWPQIGSQGSPFVQIFSNLGIGSAAAVLNVVVISAAISAINSDIFGAGRMMYGLAQQGHAPRGFSKLSKHGVPWMTVVVMGAALLIGVLLNYLIPENVFLLIASIATFATVWVWLMILLTQVAMRRSMSREQVAQLKFPVPFWPYGPAMAIAFMVFIFGVLGYFPDTQAALIVGVIWVVFLVASYLLWCKPRAGQGQPVAEPAELHR

SEQ ID NO: 67945 - protein, 557 aa, Pseudomonas putida
MTDNNKYRDVEIRAPRGNKLTAKSWLTEAPLRMLMNNLDPQVAENPKELVVYGGIGRAARNWACYDKIVETLTRLEDDETLLVQSGKPVGVFKTHSNAPRVLIANSNLVPHWANWEHFNELDAKGLAMYGQMTAGSWIYIGSQGIVQGTYETFVEAGRQHYGGSLKGKWVLTAGLGGMGGAQPLAATLAGACSLNIECQQSRIDFRLETRYVDEQATDLDDALARIAKYTAEGKAISIALHGNAAEILPELVKRGVRPDMVTDQTSAHDPLNGYLPAGWTWEQYRDRAQTEPAAVVKAAKQSMAVHVQAMLDFQKQGIPTFDYGNNIRQMAKEEGVANAFDFPGFVPAYIRPLFCRGVGPFRWAALSGEAEDIYKTDAKVKELIPDDAHLHRWLDMARERISFQGLPARICWVGLGLRAKLGLAFNEMVRSGELSAPVVIGRDHLDSGSVSSPNRETEAMRDGSDAVSDWPLLNALLNTAGGATWVSLHHGGGVGMGFSQHSGMVIVCDGTDEAAERIARVLTNDPGTGVMRHADAGYDIAIDCAKEQGLDLPMITG

SEQ ID NO: 67946 - protein, 320 aa, Pseudomonas putida
MIKHKKAQWPWHGLTALVLVGLALSLYMATSMISYEWRWNRVPQYFAYKAEETQRAAGYGTVQEIVISGDNARVTLKDESGAEQVLDVDKDSLQLSRGDDVAEGDQIGVTRHWAAGPLAWGLWTTLWISVVSGALGLVIGLFAGLCRLSNNPTLRDLSTVYVELVRGTPLLVQIFIFYFFIGTVLNLSREFAGVAALALFTGAYVAEIVRAGVQSIAKGQNEAARSLGLNAGQSMRHVILPQAFKRVLPPLAGQFISLVKDTSLVSVIAITELTKSGREAITTSFSTFEIWFCVAGLYLLINLPLSHIASRLERRLAQSD

SEQ ID NO: 67947 - protein, 468 aa, Pseudomonas putida
MSKSVQLIKDHDVKWIDLRFTDTKGIQHHVTMPSRDALDEDFFEVGKMFDGSSIAGWKGIEASDMILMPVDETAVLDPFTEEPTLIITCDIVDPSSMQGYDRDPRAIAKRAEEYLKSTGIGDTVFAGPEPEFFIFDEVKFHSDISGSMFKIFSEQGSWMTGADVEGGNKGHRPGVKGGYFPVPPFDHDHEIRTAMCNALEEMGQTVEVHHHEVATAGQNEIGVKFNTLVKKADEVQALKYVVHNVADAYGRTATFMPKPLYGDNGSGMHVHMSIWKDGKNTFSGEGYAGLSDTALYFIGGIIKHGKALNGFTNPSTNSYKRLVPGFEAPVMLAYSARNRSASIRIPYVGSPKARRIEARFPDPSANPYLAFAALLMAGLDGIQNKIHPGDAADKNLYDLPPEEAKNIPQVCGSLKEALEELDKGRAFLTKGGVFSDDFIDAFIELKSEEEIKVRTFVHPLEYELYYSC

SEQ ID NO: 67948 - protein, 361 aa, Pseudomonas putida
MTISDAQHRLLLDNLTTATLLLNAELRLEYMNPAAEMLLAVSGQRSHGQFISELFTESTEALSSLRQAVEQAHPFTKREAQLTSLTGQTITVDYAVTPILHQGQTLLLLEVHPRDRLLRITKEEAQLSKQETTKMLVRGLAHEIKNPLGGIRGAAQLLARELPEEGLRDYTNVIIEEADRLRNLVDRMLGSNKLPSLAMTNIHEVLERVCSLVDAESQGCITLVRDYDPSLPDVLIDREQMIQAVLNIVRNAMQAISSQNELRLGRITLRSRALRQFTIGHVRHRLVARVEIIDNGPGIPPELQETLFYPMVSGRPDGTGLGLAITQNIISQHQGLIECESHAGHTAFSIYLPLEQGATAS

SEQ ID NO: 67949 - protein, 758 aa, Pseudomonas putida
MIRRTYMARDNTYYLDEALYISAQAPTGIELSFIGGGGPGSGGWGLSDGYPRGTSPTKNDIARVISTRRVLTEEFQIIEKDYSDKYAHETNQLPETINALKAQIKAEASSTNGAASPFVTEQQILSSRISQIRDGYLQILPDANNYFGVPAFYKRGDSMMSRFLDPGFFAATTGQELGVEWATRLQKSWEGTYRLHLEAQKHQALADELRALASQVDQEELSQQPLDLLQVIARRTAQIHTERQIHFDCLPNVLQHELGQTVIDDTLTLVQTFSTYLATAAALVQAKQSQIPPYQDQNPRINSPLSKPQLEGLLHLVDEQRLRRAGPRWQEYHLALALTESIRFLGVYAGATQNLMQRAAEVENLQAQLAAQEEAARQQAEAERLAAEAERQRQEALRRSVSYINEARLAVSTPAVIPIGATTFAVAEAAYSALAESIAAALTRLVATTVPSVAVGTLAMAWPSTLGNSERQYLISTPLDSLSPAGGPDLAALAASSTSIDLPYLLAGVENENELDLYVVPSGKPVAVRAATFDSERQVYSLALDNPQRILTWTPASAPGGDEGNSTSLPLVPPGTVVYTGSSLNPVVTEQEGYPALDLLDQERLIITFPMDSGLPPILVVFKSPRYEAGTSTGHGAQVSDTWRKEAASLEGAPIPAQIAELLKSREFRNFDAFRRQFWKAVANDPELSKQFDEMSLSRMRKNGYSPIVDFPDSHLSQKTFILHHVIPISEGGGVYDMDNIRIVTPLSHNSIHYGTKP

SEQ ID NO: 67950 - protein, 229 aa, Pseudomonas putida
MLKGYGAVILDGAWLTLQLALSSMALAIVLGLIGVALRLSPVRWLAWLGDLYSTVIRGIPDLVLILLIFYGGQDIINRVAPLLGYEDYIDLNPLIAGIGTLGFIFGAYLSETFRGAFLGIPKGQAEAGVAYGMSPRQVFFRIQVPQMIRLAIPGFTNNWLVLTKATALISVVGLQDMMFKAKQAADATREPFTFFLAVAALYLVLTSVSLLALKYLERRYSVGVKVAEL

SEQ ID NO: 67951 - protein, 874 aa, Pseudomonas putida
MKSAEIREAFLRFFEEQGHTRVASSSLIPNNDPTLLFTNAGMNQFKDCFLGAEKRAYTRAVSSQKCVRAGGKHNDLENVGYTARHHTFFEMLGNFSFGDYFKRDAITFAWTFLTSEQWLNLPKEKLWVTVYATDDEAYDIWTKEVGVPAERMVRIGDNKGAPYASDNFWTMGDTGPCGPCTEIFYDHGPDIWGGPPGSPEEDGDRYIEIWNNVFMQFNRTADGVLHPLPAPSVDTGMGLERVSAVLQHVHSNYEIDLFQNLLAAAAKAIGCSNDGQASLKVVADHIRSCGFLIADGVLPSNEGRGYVLRRIIRRACRHGNKLGAKGSFFYQIVAALAAEMGEAFPELKSQQAHIERVLKAEEEQFAKTLEQGLRILEQDLAQLKGDVVPGDVVFKLYDTYGFPMDLTADIARERELTIDEAGFEREMDAQRERARSASAFGMDYNSLVKVDSATEFLGYDATEGQGKIIALYKDGQSVDQLGEGEEGVVVLDRTPFYAESGGQVGDTGFLQAGAARFDVRDTTKTGGAFLHHGVVTSGALVIGSPVEAKVDADVQHATSLNHSATHLLHEALRQVLGEHVQQKGSLVDSQRLRFDFSHFEAVKPEQIKQLEDIVNREIRKNTPVETELTDIETAKAKGAMALFGEKYGDTVRVLSMGGDFSVELCGGIHAKRTGDISLFKIISEGGVASGVRRIEAVTGAAALAYLNAAEEQVKEAAQLVKGNRDNLIDKLSAVLERNRQLEKQLEQLQAKAASAAGDDLSNAAVEVKGAKVLAARLDGQDGKALLALVDQLKNKLGHAVILLGSEHEGKVVLVAGVTKDLSSQLKAGDLMKQAAAAVGGKGGGRPDMAQGGGVDVAALDQALALAVPFAEQGL

SEQ ID NO: 67952 - protein, 411 aa, Pseudomonas putida
MALIVQKFGGTSVGSIERIEQVAEKVKKHREAGDDLVVVLSAMSGETNRLIDLAKQITDQPVPRELDVIVSTGEQVTIALLTMALIKRGVPAVSYTGNQVRILTDSSHNKARILQIDDQKIRADLKEGRVVVVAGFQGVDEHGSITTLGRGGSDTTGVALAAALKADECQIYTDVDGVYTTDPRVVPQARRLEKITFEEMLEMASLGSKVLQIRSVEFAGKYNVPLRVLHSFKEGPGTLITIDEEESMEQPIISGIAFNRDEAKLTIRGVPDTPGVAFKILGPISASNIEVDMIVQNVAHDNTTDFTFTVHRNEYEKAQSVLENTAREIGAREVIGDTKIAKVSIVGVGMRSHAGVASCMFEALAKESINIQMISTSEIKVSVVLEEKYLELAVRALHTAFDLDAPARQGE

SEQ ID NO: 67953 - protein, 487 aa, Pseudomonas putida
MTTHYIAGNWQAGQGETLQSLNPVTQAVIWQGQGADASQVDAAVQAARQAFPAWAQLSLEARIDVLEKFAAQLKVHAEAMAQCIGEETGKPLWESATEVTSMINKVAISVQSYRERTGEKSGPLADATAVLRHKPHGVVAVFGPYNFPGHLPNGHIVPALLAGNCVVFKPSELTPKVAELTVNCWIAAGLPAGVLNLVQGARETGVALAANPGIDGLFFTGSSRTGNLLHQQFAGRPDKILALEMGGNNPLVVDEVKDLDAAVYTIIQSAFISAGQRCTCARRLLVPQGAWGDALIARLVEVCKTITVGAFDEQPAPFMGSVISLQAARALLAAQVELAAKGGVKLLEMTQPQADAALLTPGIVDVTAVADRPDEEFFGPLLQVIRYADFDAAIDEANNTQYGLAAGLLSDSRARYQYFWLRSRAGIVNWNKQLTGAASSAPFGGVGASGNHRASAYYAADYCAYPVASLETASLALPATLTPGVTL

SEQ ID NO: 67954 - protein, 152 aa, Pseudomonas putida; identical to SEQ ID NO: 67498
  MISC_FEATURE (51)..(51): X=any amino acid
  MISC_FEATURE (115)..(115): X=any amino acid
  MISC_FEATURE (146)..(146): X=any amino acid

SEQ ID NO: 67955 - protein, 122 aa, Pseudomonas putida; identical to SEQ ID NO: 67499
  MISC_FEATURE (19)..(19): X=any amino acid

SEQ ID NO: 67956 - protein, 134 aa, Pseudomonas putida
  MISC_FEATURE (20)..(20): X=any amino acid
  MISC_FEATURE (25)..(25): X=any amino acid
  MISC_FEATURE (77)..(77): X=any amino acid
  MISC_FEATURE (80)..(80): X=any amino acid
  MISC_FEATURE (86)..(86): X=any amino acid
  MISC_FEATURE (127)..(127): X=any amino acid
  MISC_FEATURE (129)..(129): X=any amino acid
GILTCFPSTTLFSLALGTDXPCVDXRCAGNLGLSACEFFTRIVVTHVSIRTSDTSSKLLNSPSQAYRTLLYRIIVRXYPXLRCMVXAPLHLPRRPTRLVSYYAFFKGWLLLSQPPSCLSLPTSFPTXPXLWDLS

SEQ ID NO: 67957 - protein, 524 aa, Pseudomonas putida
MAKTEQEPERGLAASLYAKLAPDRETFLQRARDCSKYSIPTLIPPAGHASGTKFYTPWQAVAARGVNNLGAKLLMALLPPNSPFFRLEIDEFTEEKLTSNPQMHADVQAGLAKIERAVQTEIETTAIRVTGFELLKHLIVGGNGLVYLPQQGGMKFYPLDRYVVRRDPMGNVLDIVVKEEVSLAVLPEEARSLVEPGDDSGDTPRDHNKNVSIYTHITLKGETWNVYQEVKGQIVPGSRGTYPKDKCAWLPIRFVKIDGENYGRSYVEEYLGDIKSLEGLSQAIVEGSAASAKVLFLVNPNGVTSSSELAEAPNGEFVDGVASDVQALQLQKSGDFRVALETINTITERLEFAFMLNSAIQRNGERVTAEEIRYMAGELEAALGGVYSILSQEFQLPLVNRIMFSMQRRKKLPELPKGTVSPTIVTGMEALGRGNDLTKLDQFISTIMQIPDAASRINWGNYMTRRATALGIDTDGLVKTDQEVQQEQQQQQMQQAMQSGVAPAVQAAGRMMEKGQPDGSQAQT

SEQ ID NO: 67958 - protein, 422 aa, Pseudomonas putida
MTNAANDENAHLEQIIGRFHDLPHTGKTYSGHNRYGYDLNEQLQTIQQSRPNWQATQVEDFKYDKAGNLFDGPKLNGLIKHNRVLVYQDKRYRYDRFGRLCEKRIGSNWVQYFEYDAEQRLVCVEQYRSGERERVVFAYDPLGRRISKEVYQRDYPEPRRRVLFHWQGLRLLQEVQSGLASLYVYATPDSYEPLARIDGSMGREVVQYFHTNLAGLPEQLTDANGNAIWRNDYEGWGKTRDEWHSPHQAREQNLRYQGQYVDREISLHYNTFRFYDFTTGHFIQPDPIGLEGGLNSYAYGPNPLAWIDPLGLFCGVAKSSKWNRARQNLNGPGLRDHFEKHGSQVGANSAKEYDFSARTTIQNGRKFTYRDRYTNKPRVGYHDPDTGLFTATSQTGKVPVILTHFPESWSNLRRLPGFSTPN

SEQ ID NO: 67959 - protein, 195 aa, Pseudomonas putida
MMLIKQFPDISLNDTLFVFALEAEAGDVFTEVNTVFTGIGKVNAAIALTKAIATRRPKLIVNLGSAGSQRHGKGEVVCCNRFVQRDMDVTALGFARYETPLSDTPVVLEHGAAIPGLAVETCGSGDSFEINHGDAPYDVVDMEAYVLALIARGEGIPFVCLKYISDDAGSEAAGDWAVQVHLAAEAFKRVLFSQA

SEQ ID NO: 67960 - protein, 305 aa, Pseudomonas putida
MAQVKRIRRNVSGIILLDKPLGFTSNAALQKVRWLLNAEKAGHTGSLDPLATGVLPLCFGEATKFSQYLLDSDKGYETVMQMGQTTNTGDAEGEVLQTRDVTVGRADIEAVLPRFRGPISQIPPMYSALKRDGQPLYKLARAGEVVEREARSVTINRLELLECEGTRARLSVGCSKGTYIRTLVEDIGEALGCGAYVAELRRTQAGPFALAQTVTLEELEQAHAEGGNEALDRFLMPSDSGLQDWPLVSLSEHSAFYWLHGQAVRAPDAPQFGMVRVQDHNARFIGIGEVSEDGRIAPRRLIRSE

SEQ ID NO: 67961 - protein, 260 aa, Pseudomonas putida
MPRFAANLSMLFTEQDFLARFKAAADAGFSGVEYLFPYDFSAADIKQQLEANGLTQVLFNLPAGDWAKGERGITCHPDRIEEFRAGVDKAIEYAKVLGNTQVNALAGIRPQGPDCATVRKTFVENLRYAADKLKGAGIRLVMEMINTRDIPGFYLNTTQQALEIQAEVGSDNLFLQYDIYHMQIMEGDLARTMEANLKLINHIQLADNPGRNEPGTGEINYRFLFEHLDRIGYQGWVGAEYKPLTTTEAGLGWLKTHNAI

SEQ ID NO: 67962 - protein, 471 aa, Pseudomonas putida
MTPDKKVKILATLGPAINGIDDIRQLVEAGVNIFRLNFSHGEHADHALRYQWIREVEQQLNYPLGILMDLQGPKLRVGRFAEGKVQLQRGQALRLDLDKTPGDSRRVNLPHPEIIAALEPGMDLLLDDGKLRLRVTAKHSDAIDTEVLNGGELSDRKGVNVPQAVLDLSPLTEKDRRDLAFGLELGVDWVALSFVQRPEDIVEARQLIGDRAYLMAKIEKPSAVEQLQAIAELADAIMVARGDLGVEVPAESVPQIQKRIIGTCRQLGKPVVVATQMLESMRFSPAPTRAEVTDVANAVAEGADAVMLSAETASGDYPLEAVQMMSKIIRQVENGPDYQAQLDVGRPKAEATVSDAISCAIRRISGILPVAVLVNYSESGASTLRAARERPRAPILNLTPNLNTARRLSVAWGVHSVVNDRLRQVDEVVSTALEIAQAQGMASRGDTLLITAGVPFGKPGTTNTLRIETLI

SEQ ID NO: 67963 - protein, 272 aa, Pseudomonas putida
MQTPQSIRERLFVIVFQTDTVAGRRFDKILLLIILASLVTVILDSIDEVHQGYAGLLAGIEWGFTAIFLAEYITRLYCSPKPLRYAFSFYGLVDLLAIVPGILALYYSDAQYLLIIRVIRMLRIFRVLKLSPYLKQAHYLMEAVRGSKQKIIVFLVTVSTLVTVFGTLMYVIEGPEHGFTSIPKGIYWAIVTLTTVGFGDIVPKTPLGQVLSSLVMITGYSIIAVPTGIFTAELANAMRGEQLQHDCPTCHKKTHEQGAAFCSRCGNGLFPK

SEQ ID NO: 67964 - protein, 330 aa, Pseudomonas putida
VKKLFTASLLAAGLALGNLAQAAPTLLNVSYDVMRDFYKDYNPAFQKHWEAEHNEKVNVQMSFGGSSKQARAVIDGLPADVITMNMATDINALADNGKLVPDDWVTRLPNNSAPFTSATVFIVRKGNPKALKDWPDLLKDGVQVIVPNPKTSGNGRYTYLSAWGYVLKQGGDESKARDFVGKLFKQAPVLDTGGRAATTTFMTNQIGDVLVTFENEAEMIAREFGRDQFEVVYPSVSAEAEPPVTVVDKVVARKGTQAVAEEYLKYLWSPAAQEIAANNYLRPRDATVLAKYTDRFPKVDFLSVEKTFGDWRTVQKTHFNDGGVFDQIYT

SEQ ID NO: 67965 - protein, 530 aa, Pseudomonas putida
MASPCACPLIAVQVHQEPAGMSSSLDLAPELSVASTHPASTLAGHQPDLVLSPRLHNRDLAPTRMEGRRWGGYSIFALWTNDVHNIANYSFAMGLFALGLGGWQILLSLAIGAALVYFFMNLSGYMGQKTGVPFPVISRIAFGIHGAQIPALIRAVIAIAWFGIQTYLASVVLRVLLTAVWPQIAAYDHDSILGLSSLGWVCFVSIWLVQLVILAYGMEMVRRYEAFAGPVILLTVAALAVFMYFKADARIAWSVATPLTGYEMWRNIFAGGALWLAIYGTLVLNFCDFARSSPCRKTIRVGNFWGLPVNILVFAVITVVLCGAQFQINGQIIDSPTQIVAAIPSTPFLVLGCLAFLIVTVAVNIMANFVAPAFVLSNLAPRHLNFRRAGLISATLAVLILPWNLYNSPLVIVYFLSGLGALLGPLYGVIMSDYWLLRKGCINVPELYTEHPAGAYHYSKGINLRAVAAFVPAALLAIVLALVPNFQGIAPFSWLIGAGIAAALYLLIAPRNRHYHDVSGECIAVDHSGH

SEQ ID NO: 67966 - protein, 480 aa, Pseudomonas putida
MSTAISPTAYNYKVVRQFAIMTVVWGILGMGLGVFIASQLVWPQLNLDLPWTSFGRLRPLHTNLVIFAFGGCALFGTSYYVVQRTCQTRLISDSMAAFTFWGWQAVIVGALITLPMGYTTTKEYAELEWPLAILLAIVWVTYGLVFFGTIVKRKTKHIYVGNWFYGAFIVVTAMLHIVNHISLPVSLFKSYSAYSGATDAMIQWWYGHNAVGFFLTTGFLGMMYYFVPKQAERPIYSYRLSIVHFWALITLYIWAGPHHLHYTALPDWAQSLGMVMSIILLAPSWGGMINGMMTLSGAWHKLRTDPILRFLVVSLAFYGMSTFEGPMMAIKTVNSLSHYTDWTIGHVHAGALGWVAMISIGAVYHMIPKLYGREQMHSIGLINAHFWLATIGTVLYIASMWVNGITQGLMWRAINDDGTLTYSFVEALQASHPGYIVRALGGAFFASGMLLMAYNVFRTVRAANPAQAEEAAKIVVVGAH

SEQ ID NO: 67967 - protein, 262 aa, Pseudomonas putida
MDSSQTSLGEFESTLKKHAQELVESLERGRFGEAVQLIHELNQTRDRGLYQEVGKLTRELHSAIVSFQIDPTMPQAEEVSQITDATERLSYVVKLTEGAANRTMDLVEESTPVLNELANEAKALSTDWQRFMRREVAAPEFRDLVKRVDSFLTHSAEGNRKVSGHLNDILLAQDYQDLTGQVIKRVTTLVTEVESNLLKLVLMASQVDRFAGIKHDHDQLRAEKDREKHPTRGEGPQIHADKREDVVSGQDDVDDLLSSLGF

SEQ ID NO: 67968 - protein, 113 aa, Pseudomonas putida
MRRIIKNLLRDLGFTNTDEADDGTTALPMLENGHYDFLVTDWNMPGMSGIDLLRKVRASDKLKSMPVLMVTAEAKRDQIIEAAQAGVNGYVVKPFTAQVLKEKIEKIFERVNG

SEQ ID NO: 67969 - protein, 239 aa, Pseudomonas putida
MPQPTPTRNHHPVPDLLALLGSALVLGLLGGGHCLGMCGGLMGALTLAIPPEQRGKRLRLLLAYNLGRIFSYACAGLLLGLAGWAVASSPAALALRVVAALLLIAMGLYLAGWWSGLTRIEALGRGLWRHIQPVASRLLPVSSLPRALLLGALWGWLPCGLVYSTLLWAASQGNAGYSAGLMLAFGVGTWPVLLATGLAAERMNALLRRRSVRVAGGVLVMLFGIWTLPGPHQHWLMGH

SEQ ID NO: 67970 - protein, 106 aa, Pseudomonas putida
MAGLMKQAQQMQEKMQKMQEELANAEVTGQSGGGLVSVVMTGRHDVKRVSIDQSLMSTDEDDKEVLEDLIAAALNDAVRKVEQSSQEKMGGMTAGMQLPPGFKMPF

SEQ ID NO: 67971 - protein, 776 aa, Pseudomonas putida
MTAETRILELRAELDQHNYRYYVLDEPSVPDAEYDRLFNELKALEAEHPHLVTPDSPTQRVGGAALAAFSQVRHEVPMLSLGNAFEEADLREFGRRVVEGLDQPGAVDYSCEPKLDGLAVSLLYRDGQLVQGATRGDGTTGEDISANVRTVRNIPLKLQGKGWPAVLEVRGEVYMSKAGFDRLNAAQAEAGGKTFANPRNAAAGSLRQLDSKITASRPLEFCCYGVGQVSESIGDSHIGILEQLKAWGLPISRELKHAAGIEECLAYYRDIGERRNSLPYEIDGVVFKVNSLAAQRELGFRAREPRWAIAHKFPAMEELTEVLDVEFQVGRTGAVTPVARLKPVKVAGVTVSNATLHNMDEIARLGLRIGDTVIIRRAGDVIPQVMQVVLERRPQGARPVEVPSACPVCGSQVERTRLVKRSKGKETTSEGAVYRCVGRLACGAQLKQAIIHYVSRRAMDIDGLGEKSVEQLVDEGLIGSPADLYKLQFEQVVGLEGFAEVSTQKLLDAIEASKRPSLARFIYALGIPDVGEETAKVLARSLGSLARVQQALPQVLTYLPDIGLEVAYEIHNFFEDEHNQKVIQQLLDSGMQLQDEGELAAEFAASTTLAGMIAKLDIASVGPTGAEKLVARLDSLDKIIAADGIDLRQALAAKQADAVREFFKDEANQKLARDIEAQLLAFGMHWSSEKKVAEGLPLAGQTWVLTGTLERMSRDIAKDKLESLGAKVAGSVSGKTHCVVAGPGAGSKLAKAAELGVKVLDEDAFVTFLAEQGIAV

SEQ ID NO: 67972 - protein, 1162 aa, Pseudomonas putida
MRLKCIRLAGFKSFVDPTTVNFPSNMAAVVGPNGCGKSNIIDAVRWVMGESSAKNLRGESMTDVIFNGSSGRKPVSQASIELVFDNSETTLVGEYAAYAEISIRRKVTRDGQNSYYLNGTKCRRRDITDIFLGTGLGPRSYSIIEQGMISKLIEAKPEELRNFIEEAAGISKYKERRRETENRIRRTQENLARLTDLREELERQLERLHRQAQAAEKYREYKAQERQLKARLSALRWRDLDEQVRQRESVIGDQGVSHEALVAEQRNADASIERLRDGHHELSERFNQVQGRFYSVAGDIARVEQSIQHGQQRLRQLQDDFKEAERTRLETESHLGHDRTLLATLGEELAMLEPEQEMTLAAAEEAAAALEEAELGMHGWQEQWDSFNSRSAEPRRQAEVQQARLQQLETSLERQAERQRKLVEEREQLGSDPQDAAMLELAEQLASSEMLLEELQLCEEQVIERLESAREQLQQATQAQQQAQGDLQRLGGRLASLEALQQAALEPGAGAAQWLHGQGLEQQPRLAEGLRVEPGWELAVETVLGADLQAVLVDDFNDLDFAGLEQGELRLLLAVGAGATLPGSLLEKVEGRIDLAPWLGQVRPVEDLAQALEQRGSLGEGQSLVSRDGYWVGRHFLRVRRGGEAEGGVLARGQEIERLGQEQLEQEAALEQLDQQLQALREQQLDLEEQREQLRRRTQDENRLHGELKASLSASRARAEQVELRRRRLQEELSELEEQRALEHEQLGEARLLLQEALELMAQDTEQREQLMARRDTLRESLDRVRQEARQHKDHAHQLAVRLGSLRAQHDSTRQALERLEQQAARLTERQEQLSLNLEEGEAPQEELRLKLEELLERRMSVDEEMRLARLHMDEADRELRDAEKRRTQAEQQAQLLRGQLEQLRLECQGLDVRRKTLQEQLLADGYDLQGVLATLEAEASEQGTEQELEQLEARIQRLGAINLAAIEEYEQQSERKRYLDAQDADLVEALETLENVIRKIDKETRNRFKDTFDQINAGLQALFPKVFGGGSAYLELTGEDLLDTGVTIMARPPGKKNSTIHLLSGGEKALTALALVFAIFKLNPAPFCMLDEVDAPLDDANVGRYARLVKEMSESVQFIYITHNKIAMEMADQLMGVTMHEPGCSRLVAVDVEAAMAMVDA

SEQ ID NO: 67973 - protein, 780 aa, Pseudomonas putida
VAKSQAEMAELFSQDLTTGVGRGVKHDSADKHVSGEALYIDDRLEFPNQLHVYARTADRAHARILRIDTTPCYAFEGVRIAITHEDIPGLKDIGPVVAGDPLLAIDKVEFFGQPVLAVAARDLETARKAAMAAIVEYEDLEPVLDVVEALRKKHFVLDSHTHQRGDSAAALASAPHRIQGTLHIGGQEHFYLETQISSVMPTEDGGMIVYCSTQNPTEVQKLVAEVLDVPMNKVVLDMRRMGGGFGGKETQAASPACLCAVIARLTGQPTKMRLPRVEDMTMTGKRHPFYVEYDVGFDDNGRLHGINFDLAGNCGYSPDLSGSIVDRAMFHSDNAYYLGDATVHGHRCKTNTASNTAYRGFGGPQGMVAIEQVMDHIARHLGRDPLAVRKANYYGKTERNVTHYYQTVEHNMLEEMTAELEASSDYAERRESIRRFNANSPILKKGLALTPVKFGISFTATFLNQAGALIHIYTDGSIHLNHGGTEMGQGLNTKVAQVVAQIFQVDFSRIQITATNTDKVPNTSPTAASSGADLNGKAAQNAAEILKKRLTEFAARHYQVTEEDVEFRNAMCGCADQIVSFEQLVQQAYFAQVSLSSTGFYRTPKIFYDRSQARGRPFYYFAFGAACVEVIVDTLTGEYKMLRADILHDVGDSLNPAIDIGQVEGGFIQGMGWLTTEELVWNAKGKLMTNGPASYKIPAVADMPLDLRVKLVENRKNPEDTVFHSKAVGEPPFMLGIAAWCAIKDAVASLADYRVQPQVDAPATPERVLWGCEQMRKAVA

SEQ ID NO: 67974 - protein, 434 aa, Pseudomonas putida
MTVTRKAYRAAILHSIADPAEVGLEASHEYYEDGLLVVDDGRISAVGHASELLPTLDAGIPVEHYQDALITPGFIDTHIHFPQTGMIGSYGEQLLDWLNTYTFPCEKQFADKGHADQVAKIFLKELLRNGTTTALVFGSVHPESVNALFEEAERLDLRLIAGKVMMDRNAPDYLTDTAESGYAESKALIERWHGKGRLHYAVTPRFAPTSTPEQLTLAGQLLKEHPGVYMHTHLSENLKEIDWVKSLFPEQKGYLDVYDHFELLGERSVFAHGVHLCDEECQRLAETGSAVAFCPTSNLFLGSGLFNLPQAERFGVNVGLGTDVGAGTSFSLLNTLNEAYKVMQLQGARLHPYKSLYLATLGGARALRLDDRIGSLRPGNDADFVVLDYKATPLLDYRIQQSNSIEETLFVLTTLGDDRTVRETYAAGRCVHQR

SEQ ID NO: 67975 - protein, 232 aa, Pseudomonas putida
MSMSLGKRMGAELIGTFWLVLGGCGSAVLAASSPLGIGVLGVAFAFGLTVLTMAFAIGHISGCHLNPAVSFGLVVGGRFPAKELLPYVIAQVIGAILAAGVIYLIASGKAGFELSAGLASNGYADHSPGGYTLGAGFVSEVVMTAMFLVVIMGATDARAPAGFAPIAIGLALTLIHLISIPVTNTSVNPARSTGPALFVGGWALQQLWLFWVAPLIGAAIGGALYRGLAKEP

SEQ ID NO: 67976 - protein, 429 aa, Pseudomonas putida
MADKKAQLVIEGAAPVELPILTGTVGPDVIDVRGLGATGHFTFDPGFMATASCESKITYIDGDKGILLHRGYPIEQLAEQSDYLETCYLLLNGELPNAEQKAQFVSTVKNHTMVHEQLKSFFNGFRRDAHPMAVMCGVVGALSAFYHDSLDINNPQHREISAVRLVAKMPTLAAMVYKYSMGQPMMYPRNDLSYAENFLHMMFNTPCEIKPISPVLAKAMDRIFILHADHEQNASTSTVRLAGSSGANPFACIAAGIAALWGPAHGGANEAVLTMLDEIGDVSNIDKFIAKAKDKNDPFKLMGFGHRVYKNRDPRATVMKQTCDEVLRELGIKNDPQLELAMRLEEIALTDPYFIERSLYPNVDFYSGIILKAIGIPTSMFTVIFALARTVGWISHWKEMLSSPYKIGRPRQLYTGEQKRDIVALKDRK

SEQ ID NO: 67977 - protein, 192 aa, Pseudomonas putida
MSLHQALSPRCVETLPLTTIVSVRRNGKVVMGGDGQVSLGNTVMKGNAKKVRRLYHGQVIAGFAGATADAFTLFERFEGQLEKHQGHLVRAAVELAKEWRTDRSLSRLEAMLAVANKDASLIITGNGDVVEPEDGLIAMGSGGAYAQAAARALLNKTDLSAREIAETALNIAGDICVFTNHNLTIEEQDLAD

SEQ ID NO: 67978 - protein, 265 aa, Pseudomonas putida
MCRYPMLVDSHCHLDRLDLTAHQGSLDAALQAARERGVGHFLCIGVSAENAGAVKALSEQYADVDCSVGVHPLDLAPGETPALEWLLRELAHPHVVAIGETGLDYHYEPEAAELQQASFRLHLEASRQTGKPVIVHTRAARADTLALLREANLPQAGVLHCFTEDWDMAKAALDLGYYISLSGIVTFRNADALREVARQVPVDRLLVETDSPYLAPIPHRGKPNLPQYVREVAEYVASLRGASYEQLAEQTTANFKRLFPLARVA

SEQ ID NO: 67979 - protein, 191 aa, Pseudomonas putida
MKALTLATLMTLAASPVFAFNLSDAANAVSAMQNPQQQGQVQAPEAQANLLNTLGSELKITPEQAVGGAGAMLGLARNNLSSEDYGQLTKAVPGLDLLSGANMLGSLSGLGDLLGKNSESQSALSNALGNDVENRNDLDNAFKALGMDTGMIGQFAPLILQYLGQQGIAGSLLQNLGSLWTTPAPVSTPSV

SEQ ID NO: 67980 - protein, 166 aa, Pseudomonas putida
MKSLLAMLSLLALPVMAAEPTIYGRYENIALPELGETLKAKMDTGAFTASLSAKDIELFTRDGDEWVRFRLATKESDGKVYEHKVSRISKIKGRADEEDEGDAPEVSKRPVVDLELCLGDVKRTVEVNLVDRSNFNYPLLVGSKALREFKAAVNPAKKFTAGKPGC

SEQ ID NO: 67981 - protein, 207 aa, Pseudomonas putida
MSTMTLFHSPLSPFVRKVMVVLHETGQLERVQLQPVNISPVSGDPQLNLDNPIGKIPALRLEDGTVLHDSRVICEYLDQQHVGLPLLPREGSARWRRMTLVSQADAIMDAAVSSRYESFLRPEDKRWDGWLQAQGDKIRRSLDNLEQEHLPELISGFDLAAIGVACALGYLDLRQPGFGWRERQPGLAAWYAEVVKRPSMVATAPVA

SEQ ID NO: 67982 - protein, 478 aa, Pseudomonas putida
ERQVREEALRLSQFAIDQSTVGILWVNWDSHVRYANHAAERMLGYSEGALLERPLSDFEPSLNMDRWLELWKGARTGAGGVGQFETQCRRADQSLLPVELSLSFLRFRDSEYLVVYLADVTERHRALAALRESEARLKGIAGNVPGLVFRLERDPAEGDWSSPISVRVARLWWVMHPARSSTRRWACATWCTPRTVLIITGCRTWPWPATRTGPGRGASSPGRANSAGPISRPAPGHLGNGQVVWDGVVWDITQGKRAELALAKSQEQLRELSAHLESVREEEKARIAREVHDELGQMLTVLKLEVSMCELAYAELDPGLNDRLASMKRLIAQLFQLVRDVATALRPPILDAGIASAIEWQARRFEARTQIPCLVQVPDNLPALSDAKATGLFRILQEALTNVMRHAQAHSVEIELVREGGQLRMTVSDDGQGFCREQTRPTSFGLVGVRERVLMLGGSMTLESEPGEGTSLSVAIPL

SEQ ID NO: 67983 - protein, 352 aa, Pseudomonas putida
MRVLIIKTSSLGDVIHTLPALTDAAHAIPGIRFDWVVEEGFAEIPSWHPAVDQVIPVAIRRWRKNLWQTIKSGEWKAFKQRVRERKYDLVIDAQGLVKSAWLTRYVKAPVAGLDRYSAREGWASRFYDRPLSVATGQHAVERVRQLFAMALAYDLPEGIGNYGLDLDRLQLPPAAPYVVFLHGTTWATKHWPEAYWRELAERMGRRKLEVRLPWGNPAEKARAERIAQGLNNCQVLPKLNLAGVARVLAAAKACVAVDTGLGHLAAALDVPTLSLFGPTNPGLTGAYGRTQIHQASDWPCAPCLQKKCTYKPSADDLARFDLKREWPLCFTRLNPEHVASRLSALLLAEDVR

SEQ ID NO: 67984 - protein, 480 aa, Pseudomonas putida
MRLSELKDAGRSPTLPLSITLVDAAGSADLQLLTLLRVLPGQRYVGAGVWRGTPVLAKLLVGGNAARHFQRELQGVKLLAEQGLTTPTLLADGLKEGEGGWLLFEFLDGAQSLADAWAAVENLPVLADEQHLVLGEALTAVAHMHAQGLWQEDLHLDNLLRHAGKLYLIDGAGIRAETPGQQLSRPRVLENLGVFFAQLPKRLEPFIEELLVHYLLANAEHALPLEALQKQVDKVRNWRQKDYLDKAGRECSLFSVQRTLSGLQAIRRSEVEAMQPVLEQADALIDKGHLYKTGGAASVARIEVNGRQLVIKRYNIKNTAHWFKRFWRPSRAWHSWIEGHRLEFLDIATPRPLAVLEQRVLGLRSRAYLVTEYVDGPDLTACFAPHVESGDAPEEQVDALVHVMQQLIRERISHGDFKGHNLFWHNGQWSLIDLDAMCQHATQLSFAPAYARDRARLLRNWPTGSALHQRLDRLLPKLVD

SEQ ID NO: 67985 - protein, 349 aa, Pseudomonas putida
MDIKSALSRIVGQLDLTTEEMREVMRQIMTGQCSEAQIGAFLMGMRMKSESIDEIVGAVSVMRELAEKVELQSLDGVVDIVGTGGDGANIFNVSTASSFVLAAAGCPVAKHGNRAVSGKSGSADLLEAAGIYLNLTPTQVARCIDSLGIGFMFAQSHHSAMKHAAGPRRELGLRTLFNMLGPLTNPAGVKHQVVGVFAQTLCRPLAEVLQRLGSKHVLVVHSKDGLDEFSLAAPTFVAELKNDEITEYWVEPEDLGMKSQSLHGLAVESPQASLELIRDALGRRKTENGQKAAEMIVLNAGAALYAADHAMSLKAGVELAHDVLHTGLAWEKLQELGAFTAVFKVENEA

SEQ ID NO: 67986 - protein, 277 aa, Pseudomonas putida
MSVPTVLERIIARKFQEVAERSAHVSLAELEGLAKAADAPRGFANALIEQAKRKQPAVIAEIKKASPSKGVIREHFVPAEIAVSYEKGGATCLSVLTDVDYFQGADEYLQQARAAVSLPVIRKDFMVDPYQIVEARALGADCVLLIVSALDDVKMAELAATAKDVGLDVLVEVHDGDELERALKTLDTPLVGVNNRNLHTFEVSLETTLDLLPRIPRDRLAITESGILNRADVELMAINEVYSFLVGEAFMRAEQPGLELQRLFFPEQVKKTVQQLD

SEQ ID NO: 67987 - protein, 234 aa, Pseudomonas putida
MTDQPLALSVEQGLHAEQELLAAVCRGERESGVLFWRPTDHALVMPRRMSRLGNFEVACAELAIAGWPVLLRETGGEPVPQSHSTVNVALVYAAPRSEGDHGRIENAYERLCLPLCDVLREWGGVASVGEIDGAFCDGRYNVNLNGRKLVGTAQRWRQGLGGKRPVVLVHGALLLDNERESMVAAVNRFNECCELEQRCRADAHIALHEVAPVAPWFERLSQAYAKVLAELPKD

SEQ ID NO: 67988 - protein, 390 aa, Pseudomonas putida
MAFDLAARLAERRAADLYRQRPLLESPQGPEVVVDGQRLLAFCSNDYLGLANHPEVIAAWQAGAERWGVGGGASHLVVGHSTPHHQVEEALAELTGRPRALLFSTGYMANLGAITALVGQGDTVLQDRLNHASLLDGGLLSGARFNRYLHNDPASLASRLDKAVGNTLVVTDGVFSMDGDLADLPALANVARARGAWLMVDDAHGLGTLGAKGGGIVEHFGLGVDDVPVLIGTLGKACGTAGAFVAGSEALIEALVQFARPYIYTTSQPPALACATLKSLELLRRETWRREHLAALIRQFREGAQQLGLQLMDSPTPIQPIVIGDSAQALRLSRLLRERGLLVTAIRPPTVPAGSARLRVTLSAAHSEAQVQLLLNALAECYPQLENADA

SEQ ID NO: 67989 - protein, 648 aa, Pseudomonas putida
MSLFKQLLLAICLFLVVAFSGSFMVSLESSRSQYVNQLRSHAQDAATALALSLTPNIDDPAMVELMVSSIFDSGYYASIKVVDLGSNAVLVERHAEPDPGGVPLWFVRLIGLEAAGGDAIVSRGWQQAARVEVISHPMFAIAKLWQSALGSLGWLLLCGAASAVLGALLLRRQLRPLDYMVEQSHAIARREFLSLPELPRTPELRRVVQAMNQMVEKLKALFTEQAERSERLRAESYQDSLTGLSNRRYFEMQLNNRVSNLEDARAGYLLLLRVQGLAGLNARLGGQRTDQLLQAVGEQLRRTCASYPETNDLISRSRGGEFAVLAPGMVHEEAVHLAQALEATLQSLHETGASDIDPVACIGLAPFSPGDSPQALLKLADEALARAENQPTPGWVCLEQGVAAVAADSQHAWHERLDQAFINGHFELFFQPVIECASSQRVLHHKVISRLRDGQGEALPAGRFLPWLERFGWMPRLDVLVLEKVLAHLRGHDQVLALNLSAATLADPKALQRVFELLGQNAALGPRLVFEIGEEQLPEQAALEQLTRRLHGLGFGLALQRFGGRFSMIGNLAHLGLAYLKIDGSYIRNIDHEQHKRLFIEAIQRAAHSIDLPLIAERVETEGERLVLLEMGVGGIQGQLVGEPAPWR

SEQ ID NO: 67990 - protein, 458 aa, Pseudomonas putida
MAISVFDLFKIGVGPSSSHTVGPMRAGALFVQGLRERGELERVKRIEVRLYGSLSATGIGHGTDNATIMGLMGEWPDAIDPTQIVPRIADLRETNTLQLDSRLPIEFVWARDMLLLDENLPYHPNAMTLIAEGEQGELHRDTYYSVGGGFVVDAAQAASGVLDADQTVLPYDFNSAAELLRLCKQNDLSVSQLMMANEKVWRSEEDIRAGLHKLWEAMQECVNNGLKYEGTLPGGLNVRRRAAKLHRSLQEIGKPNVIGSTMSAMEWVNLFALAVNEENAAGGRMVTAPTNGAAGIIPAVLHYYMRFSDAVDESSVVDYFLAAAAVGILCKKNASISGAEVGCQGEVGSACAMAAAGLAEVLGATPPQVENAAEIALEHNLGLTCDPVGGLVQVPCIERNAIAAVKAINAVQMALRGDGEHFISLDQVIRTMRDTGADMHDKYKETSRGGLAVSAIEC

SEQ ID NO: 67991 - protein, 325 aa, Pseudomonas putida
MSPAELHADSIVIDGLIIAKWNRELFEDMRKGGLTAANCTVSVWEGFKATVDNIASSQKLIRDNSDLVMPVRTTADIRKAKELGKTGILFGFQNAHAFEDQIAYVDVFKQLGVGIVQMCYNTQNLVGTGCYERDGGLSGFGREIVAEMNRVGIMCDLSHVGSKTSEEVILESKKPVCYSHCLPSGLKEHPRNKSDEELKFIADHGGFVGVTMFAPFLAKGIDSTIDDYAEAIEYTMNIVGEDAIGIGTDFTQGHGQDFFEYLTHDKGYARRLTNFGKIINPLGIRTVGEFPNLTETLLKRGHSERVVRKIMGENWVNVLKDVWGE

SEQ ID NO: 67992 - protein, 368 aa, Pseudomonas putida
MNMSDTFLNPVTTQTWANGRHIVRCVKVIQETWDVRTFCFMADQPIMFFFKPGQFVTLELEIEGKPVMRSYTISSSPSVPYSFSITVKRVPGGLVSNFLHDTMHEGAELPVHGPVGLFNAIDFPAGKVLYLSGGVGITPVMSMARWFYDTNANVDMVFVHSARSPKDIIYHRELEQMASRIPNFSLHIICEKHGLGEPWAGYRGYLNQRLMELIAPDYMERVVFCCGPTPYMTAVKRMLEAVGFDMKNYHEESFGATPPEAKADAVEHAEQAADAPELDVSDLNLVEFIGSEKSIRIAPGETVHAAAAKVGLMIPKACGMGICGTCKVLKLGGEVEMEHNGGITEEDEAEGYILSCCSVPKGDVRIDY

SEQ ID NO: 67993 - protein, 341 aa, Pseudomonas putida
MLVLGLETSCDETGVALYDSERGLLADALFSQIDLHRVFGGVVPELASRDHVKRMLPLIRQVLDEAGCVATEIDAIAYTAGPGLVGALLVGASCAQALAFAWDIPAIGVHHMEGHLLAPMLEENPPEFPFVALLVSGGHTQLVRVDGIGQYELLGESLDDAAGEAFDKTAKLIGLNYPGGPEIARLAEQGVPGRFVFPRPMTDRPGLEFSFSGLKTFALNTWQQCKNAGDDSEQTRCDLSLAFQQAVVETLTIKCKRALKQTGLKRLVIAGGVSANKALRASLEDMLGSIKGNVYYARPQFCTDNGAMIAYAGCQRLLAGQQQDLAISVQARWPMEQLPPL

SEQ ID NO: 67994 - protein, 417 aa, Pseudomonas putida
MFSKQDQIQGYDDALLAAMNAEEQRQEDHIELIASENYTSKRVMQAQGSGLTNKYAEGYPGKRYYGGCEHVDKVEALAIERAKQLFGADYANVQPHSGSSANGAVYLALLQAGDTILGMSLAHGGHLTHGAKVSSSGKLYNAVQYGIDTNTGLIDYDEVERLAVEHKPKMIVAGFSAYSKTLDFPRFRAIADKVGALLFVDMAHVAGLVAAGLYPNPIPFADVVTTTTHKTLRGPRGGLILAKSNEEIEKKLNAAVFPGAQGGPLMHVIAAKAVCFKEALEPGFKAYQQQVIENAQAMAQVFIDRGYDVVSGGTDNHLFLVSLIRQGLTGKDADAALGRAHITVNKNAVPNDPQSPFVTSGLRIGTPAVTTRGFKVAQCVALAGWICDILDNLGDADVEADVAKNVAALCADFPVYR

SEQ ID NO: 67995 - protein, 438 aa, Pseudomonas putida
MGQWLDSLTGWLSANPQWLGLAIFLVACIECLAIAGIIVPGTVLLFAVAVLAGNGTFSLGETLLLGFLGGLLGDAMSYAVGKYFHQNIRRLPLLRHHPEWIGSAESYFQRYGIASLLVGRFIGPLRPMLPMVAGMFDMPLPRFIAVSLLAGAGWSVAYLLPGWATGAAMRLPLPEGFWLDAGIIAGALAVLIGLSLNTSLRDQRHGTRLVAALSFIALAGVFLGWPYFHEFDQGVMTLVQEHRSQAIDGTVVLVTRLGDFRTQLFLGALLTGLLLLARQWRHAFFAAGALMGTAIANGTLKWLFARARPEVLTDPLTSYSMPSGHSSASFAFFLVMAVLAGRGQPPRMRLTWVMLGCIPALAIALSRVYLGAHWPTDILAGALLACCVCALSLTLVQRQQTLPALPLRVWWLVLPACVALLAFFAMHALPQALVRYQY

SEQ ID NO: 67996 - protein, 155 aa, Pseudomonas putida
MRLRLIAVGSRMPKWVEEGWHEYAKRLPAELSLELVEIPLNTRGKNADVARLIRQEGEAMLSKVQPGERIVTLEVHGKPWSTEQLATELDRWRLDARTVNLMVGGPEGLAPEVCARAEQRWSLSPLTLPHPLVRILIGEQIYRAWTVLSGHPYHK

SEQ ID NO: 67997 - protein, 736 aa, Pseudomonas putida
MDLLGWDSCDIIIVTGDAYVDHPSFGMAIIGRLLEAQGFRVGIIAQPNWQSKDDFMKLGEPNLFFGVAAGNMDSMINRYTADKKIRSDDAYTPGGLAGSRPDRASLVYSQRCKEAYKHVPIVLGGIEASLRRIAHYDYWQDKVRHSILIDASADILLFGNAERAVVEVAQRLSNGEKIETITDVRGTAFVRRDTPQGWYEIDSTRIDRPGRVDKIINPYVNTQDTQACAIEQAKGDQEDPNEAKVVQILDSPAVTREKSVIRLPSFEKVRNDPVLYAHANRVLHLETNPGNARALVQKHGEVDVWFNPPPIPMSTEEMDYVFGMPYARVPHPAYGKERIPAYEMIRFSVNIMRGCFGGCTFCSITEHEGRIIQNRSHESILHEIEEMRDKVPGFTGVVSDLGGPTANMYRIACKSPEIEKYCRKPSCVFPGICENLNTDHSSLIELYRKARALPGVKKILIASGLRYDLAVESPEYVKELVTHHVGGYLKIAPEHTERGPLDKMMKPGIGTYDRFKRMFEKFSKEAGKEQYLIPYFIAAHPGTTDEDMMNLALWLKGNGFRADQVQAFYPSPMASATAMYHSGKNPLRKVTYKSEGVEIVKSDEQRRLHKAFLRYHDPKGWPMLREALQRMGRADLIGPGKHQLIPLHQPQTDTYQSARRKNSTPAGSHKVGKDQKILTQHTGLPPRGSDGSKPWDKREKAKAEAFARNQQAAKERKEASKGGKGNKKPRQPVIPR

SEQ ID NO: 67998 - protein, 195 aa, Pseudomonas putida
MPVRSVCVFCGASMGANPAYREAAVALGQAIARRGLTLVYGGGAVGLMGVVADAAMAAGGEVVGIIPQSLLDAEVGHKGLTRLEVVDGMHARKARMAELSDAFIALPGGLGTLEELFEVWTWGQLGYHAKPLGLLDVNGFYDKLGGFLDHIVEEGFVRPQHRAMLLLGQQPDELLEGMDSFVAPVAPKWVDKQPD

SEQ ID NO: 67999 - protein, 275 aa, Pseudomonas putida
MQAVQQEIAQALKVQPPFADAAALEAEVARRVAFIKDCLANARLKTLVLGISGGVDSLTAALLAQRAINELRAETGDKAYTFIAVRLPYQVQHDEHDAQACLEVIKADEVHTVDIAPAVRALAAEVAALKNGSPTLVDFVVGNVKARTRMVAQYTIAGARAGLVIGTDHAAEAVMGFFTKFGDGACDLAPLSGLVKNQVRAIARSFGAPESLVEKVPTADLEDLEPGKPDEASHGVTYAQIDAFLHGQPVDQAAFDIIVATYRKTQHKRELPFAP

SEQ ID NO: 68000 - protein, 401 aa, Pseudomonas putida
MSESAFAERIVHNLLDTDFYKLTMMQGVLHNYPDADVEWEFRCRNGEDLRPYLGEIRNQLERLADLTLDDGQLAFLERISFLKPDFLRFLRLFRFNLRYVHVGIENDQLFLRLKGPWLHVILFEVPLLAIISEVRNRNLHPHMRLAEARDQLYRKFDWLRAHASDDELAELQVADFGTRRRFSSRVQEEVARVLRDDFPGRFVGTSNVDLAWKLDIKPLGTMAHEWIMAHQQLGPRLIDSQIAALDCWVREYRGLLGIALTDCITMDAFLGDFDLYFAKLFDGLRHDSGEPVAWAEKAIAHYQKLGIDPMTKTLVFSDGLNLTRSLEIFRALRGRINVSFGIGTNLTCDIPGVAPMNIVLKMTDCNGAPVAKISDEAAKTQCRDENFVAYMRHVFKVPSKE

SEQ ID NO: 68001 - protein, 375 aa, Pseudomonas putida
MRALLDAPYLNQLFRKLMYRHGIHHAAVVASDRVEVLQAHPVLGAALALETEGGNRQIIAQRIMNRPAKRTQLPYRFHRLDAGGQAFVGALTFHPGATDHTLAGHPAVALEVAGHAADGIVRVVPDIDMAVPVEVHRVVAEAAWHELRQPHGAGVRALERQGIKLLLTGQQQELSQLLAEELGPWRVVEAQRRQGVDHPVVAGIAAKEGFHADDRDNVLRRYAVLLLGTCQYSLVLTPEIHTASDTRIGDEHRPVVLPRFDPLGRARDGVENRLLALHLTKHTHQLLRRKTIVAAHFANKRGYLGRAVVFAGMGQLYSAEQAHRTDPRRTTGSPVTHCLHEIVHLIQTCAIHLRCVWIDIKTPNADSSVTNDVPP

SEQ ID NO: 68002 - protein, 335 aa, Pseudomonas putida
MQEAVPNLIPTQDATPRPAPKKVEAGVKLRGADKVARIPVKIIPTDELPKKPDWIRVRIPVSPEVDRIKQLLRKHKLHSVCEEASCPNLGECFSGGTATFMIMGDICTRRCPFCDVGHGRPKPLDLDEPKNLAVAIADLRLKYVVITSVDRDDLRDGGAQHFADCIREIRALSPGVQLETLVPDYRGRMDVALEITAQEPPDVFNHNLETVPRLYKAARPGSDYDWSLDLLQKFKQLVPHVPTKSGLMLGLGETDEEVIEVMHRMREHDIDMLTLGQYLQPSRSHLPVQRFVHPDTFAWFAEEGYKMGFKNVASGPLVRSSYHADQQAHEAKIKL

SEQ ID NO: 68003 - protein, 505 aa, Pseudomonas putida
MRWITRPGWPGNLLALAAGASTLLALAPFDIWPLAVLSIAVLYLGLRELSPRQAMWRGWWFGFGLYGAGTWWIYVSMNTYGGASPLLAIVLLLAFFAALAWFFALPTWLWARWLRRNEAPLADALCFAALWLLQEAFRGWFLTGFPWLYAGYSQLDGPLAGLAPLGGVWLISFTLALTAALLCNLHRLRPRPSFLAVASVLLLAPWGLGLALKGHAWTIPAGDPLKVAAIQGNVEQDLKWDPAHIDAQLALYRDLSFSSRPVDLLVWPETAVPVLKDQAQGYIDVMGRFAAERHSALITGVPVREEVHHQRRYYNGITVTGEGDGTYLKQKLVPFGEYVPLQDVLRGAIEFFNLPMSDFARGPEDQPLLQAKGYQIAPYICYEVVYPEFAAGLAARSDLLLTISNDTWFGKSIGPLQHLQMAQMRALEAGRWMIRATNNGVTALIDPFGRITTQIPQFQQAVLYGEVVPMQQLTPYLQWRSWPLAIVCALLLGWALLAGRIAKTV

SEQ ID NO: 68004 - protein, 207 aa, Pseudomonas putida
MKLRGLYAITDSQLLAGRFLSHVEAALEGGVCLLQYRDKTDDAARRLREAEGLMKLCERYGTQLLINDDAELAARLGVGVHLGQTDGPLTPARALLGRQAIIGSTCHASLELAAQAASEGASYVAFGRFFNSVTKPGAPAANVGLLEQARAQVKLPIAVIGGITLDNAAPLVAHGADLLAVIHGLFGADSAQEVTRRARAFNALFAS

SEQ ID NO: 68005 - protein, 487 aa, Pseudomonas putida
MSHAFVVVDTPEQAVDRLAALHEQATGALSQALKRYLKDRTEPDTDERDLFRYPALRLTYYSHGEVAATTRAYAKVQVAGTYSVTVTQPAAFRGYLLEQLRPLMHDYTVTVEVGVSEQNIPYPYVVDQGDELAGSGITAAQLARVFPSTDLSAATDNIADGLYDWDRAEIMPLALFDAARVDFSLRRLVHYTGSDWRHVQPWILLTNYHRYVDQFISHGLDQLRDDPRFVRMVLPGNVVIEKGMDHGETQALVASVVWHRYQMPAYHLIAADGDGVTLVNIGVGPSNAKNITDHLAVLRPHCWLMIGHCGGLRQSQTIGDYVLAHAYMRRDGILDRVVPPNIPIPALAEVQMALQEAAAQVTGERGEQLKKRLRTGTVLTYDDRNWELRWAQERPLINLSRAVAVDMESGTIAAQGYRLRVPYGTLLCVSDKPLHSEIKLPGSANAFYNRAVSQHLKIGIAALDLLRTELNSLHSRKLRSFDEPPFR

SEQ ID NO: 68006 - protein, 319 aa, Pseudomonas putida
MDFKDYYKILGVEPTADEKAIKAAYRKLARKYHPDVSKERDAEEKFKEANEAYEVLGDAQKRAEFDEIRKYGGQHGRPFQAPPGWESRGGGGGFEGGDFSDFFSSIFGGRSAGGNPFGGARQQQRSAGRRGQDVELELAVFLEETLSKESKQISFQVPQTNAMGQRTGFTTKTLNVRIPAGVTDGERIRLKGQGAPGSGGGANGDLFLTIRMAPHPLFDVEGHDLIITVPLAPWEAALGAKVAVPTLDGKINLTIRPDSQSGQRLRVPGKGLANKQGERGNLYAQLKVVMPPASDESARELWTKLSEKAAFNPRTQWSK

SEQ ID NO: 68007 - protein, 833 aa, Pseudomonas putida
MPALRQALENRDEVVLEAPPGAGKTTRVPLALLHEPWLAGQSILMLEPRRLAARAAAERLASELGEQVGETVGYRIRLDSKVGPKTRIEVVTEGILTRRLQADPALEGVGLLIFDEFHERSLDADLALALSLNGRELLRDDPPLKILLMSATLEGERLSRLLDDAPVVSSEGRMHPVDIRWGRPFQPGEFIEPRVVDCVLHALADQAGSVLVFLPGQAEIRRVHQSLQEVLGARPEILLCPLHGELDLNAQRAAIDPPAKGLRKVVLATNIAETSLTIDGVRVVIDAGLARVPRFDPGSGMTRLDTQRISRASATQRAGRAGRLEPGVCYRLWSEAQHDQLAAHGSAEILQADLAGLALQLARWGVTPEQLRWLDQPPAAAYAQAQDLLARLSAFRPGSRDTLSEHGQAMAELPAHPRIAHLLLRGQDLGLAQMACDVAALLGERDIQRGGGADLHSRLALVSGESKAARGGQGGVQRARQLARQYRGLLRGKVGAPVADPDHPRWLGALLALAYPDRVAQQRRAGGAEYRLANGRAALFGEVDALMKCPWLVIADLGSRQGQREERIYLAAEFDPALLEGVLAEQVERVDILDWDEREQVLRAERQVKVGELVLSREPLPGLDDEARTRALLGLVRRKGLNLLTWTPELRQWQARVALLRQLDLQKDGHSEWPDLGDEALLASLEDWLQPYLSKVSRLSHFAALDLPSMLRNLLPWPLPQRLEEQAPAHLAVPSGSNIRLDYSETPPILAVRLQELFGLADTPRIANGRQQVKLHLLSPARRPVQVTQDLASFWRTTYAEVKKDLKGRYPKHYWPDDPLVAEATARAKPRGS

SEQ ID NO: 68008 - protein, 228 aa, Pseudomonas putida
MLSSNTLGHPAIHARRKRRLTRKAVGAALGLCMVVAALTTWLATRTHIVDLGNEQQLSDSGLLQDWADGAVIVMIRHAERCDSAPGPCLDDPTGITLSGSQAAARVGQGLHQLGLNKADLLSSPKLRTRQTAHFILGQAVASEDWLESCDSQFANEALAHKRAGHNLVLVTHNGCIDHFARQQHVAGGERQSNYASALFVSVDGNGKARILGRLNEPDWQRVLASTGK

SEQ ID NO: 68009 - protein, 134 aa, Pseudomonas putida; identical to SEQ ID NO: 67497
  MISC_FEATURE (20)..(20): X=any amino acid
  MISC_FEATURE (25)..(25): X=any amino acid
  MISC_FEATURE (77)..(77): X=any amino acid
  MISC_FEATURE (80)..(80): X=any amino acid
  MISC_FEATURE (86)..(86): X=any amino acid
  MISC_FEATURE (127)..(127): X=any amino acid
  MISC_FEATURE (129)..(129): X=any amino acid

SEQ ID NO: 68010 - protein, 277 aa, Pseudomonas putida
MTYTLDDLLHLMARLRDPQYGCPWDLKQNYASIVPHTIEEAYEVADTIERGDFEHLQGELGDLLFQVVYYSQLAREEGRFEFDGVVDSITRKLIRRHPHVFPTGELYAPVDTPSLSEAQVKSRWEEIKAEERAEKSQPEQLSLLDDVPATLPALSRAAKLQKRAATVGFDWPAALPVLDKVREELDEVLQAMADGDADALEDEVGDLLFAAVNLARHLKQDPEHALRRANRKFERRFRFIEQALRDSGRPIEDCDLDELDALWGEAKRQEKNLPSCG

SEQ ID NO: 68011 - protein, 939 aa, Pseudomonas putida
MLVRMRPMGCTGDSWGRPPSLSVEDPADMFAPLLKKLFGSKNEREVKRMLKTVSIVNAFEEKMVALSDEQLRGKTAEFKERLAKGETLDQLLPEAFAVAREAGKRVMGMRHFDVQLIGGMTLHEGMIAEMRTGEGKTLVGTLAVYLNALSGKGVHVVTVNDYLARRDANWMRPLYEFLGLSVGIVSAFQPPEEKRAAYAADITYGTNNEFGFDYLRDNMAFSQDEKFQRELNFAVIDEVDSILIDEARTPLIISGQAEDSSKLYIEINRLIPRLTQHIEEVEGQVTQEGHFTIDEKSRQVELNEAGHQFIEEMLAQAGLLAEGESLYSAHNLGLLTHVYAGLRAHKLFHRNVEYIVQDGQVLLIDEHTGRTMPGRRLSEGLHQAIEAKENLNIQAESQTLASTTFQNYFRLYTKLSGMTGTADTEAFEFQSIYGLNVMVIPPNKPLARKDYNDLVYLTADEKYAAIIADIKESMKLGRPVLVGTATIETSEHMSNLLKKEGIDHKVLNAKYHEKEAEIIAQAGAPGALTIATNMAGRGTDILLGGNWEAEVAALENPTAEQIAQIKADWQKRHQQVIETGGLHVIASERHESRRIDNQLRGRSGRQGDPGSSRFYLSLEDSLMRIFASDRVKNFMKALGMQSGEAIEHRMVTNAIEKAQRKVEGRNFDIRKQLLEYDDVANEQRKVIYHMRNSLLAAENIGDTIVEFRKEVLDATISQHIPPQSLPEQWDVAGLEASLASDFAIKLPIRQWLDEDDHLYEETLREKLLSEITTAYTEKEDQAGLEALRTFEKQILLRVLDDLWKDHLSTMDHLRHGIHLRGYAQKNPKQEYKRESFSLFQELLESIKRDTIRVLSHVQVRREDPAEEEARLRREAEELASRMQFQHAAAPGLGSEQLSEEGAEVAVASAPVRNDQKLGRNEPCWCGSGKKFKHCHGQIE

SEQ ID NO: 68012 - protein, 210 aa, Pseudomonas putida
MSYHLIIGDKLYSSWSLRGALALELAGVPYEETLIKLNQPDTRQRILAFSSTGKVPLLKTEHGVIADSLAIAEYLNEQHPDAQLWPADAAARAQARSACAQMHSGFFALRGAMPFDLSRDQALDTVPLDVQVDIDRIVALWSECRVVAKDSGPFLFGKPSLADAFFAPVAVRLRTYRVEVPAEAAAYIETIYQWPAFQAWQQAGLEERKA

SEQ ID NO: 68013 - protein, 87 aa, Pseudomonas putida
  MISC_FEATURE (58)..(58): X=any amino acid
KGEGQKVYYFHTGQVGTPLELTDRDGTIVKGQYFDSEINLNYNTLLYYGPETEMFITXEPIGLEGGSNFYKYGPEPTGCVDPLGLVS

SEQ ID NO: 68014 - protein, 322 aa, Pseudomonas putida
MNTPFAIPDNPDSACQPPSAKDFLVDRTFRALARIGVVLVLALVFALVYEVGRKALPGIEKHGFDVLFGSVWDVNQGKYGILPAIWGTLYSALIALLIAGFFGVSMAIFLTQDFLPAKLAAVFRTIVELLAAIPSVVYGLWGIYVVIPAIRPLTAWLNSELGWIPFFGTSLSGPGLLPAALVLAIMILPTIAAVSQDALTSVPMKTKQAAYGMGTTHWEAILKVMVPSAATGIFGSLVLGLGRALGETMALAMLVGNANTISLSLFAPANTLAALLALNFPEAGPNEVEVLMYAALVLMFITLLVNVLGSMIMLYAQRGNKQ

SEQ ID NO: 68015 - protein, 477 aa, Pseudomonas putida
MTSSIFWHDYETTGINPRCDRPLQVAGLRTDFDLNEIDEPISLYCRPSDDILPHPAACLVTGITPQLLAEQGLCEAEFMTRVHAQLAQPGTCGAGYNTLRFDDEVTRYSLYRNFFDPYAREWQGGNSRWDLIDIVRTAYALRPEGIEWPQQDGRTSLRLELLSKANGIDHGHAHEALSDVRATIALARLIRQKQPKLYDWLFQLRSKHKVMEQIRLLQPLVHISGRFSAARNYLGVVLPLAWHPRNRNALIVCDLHQETLPLLRESAEVLRQRLYTRHDELAEGELPVPLKLVQINRCPVVAPLSVLRPVDQQRLGLDLTLLQSRGEQLANQQAQWQEKLEHIYGKDEFAPSEDPEQQLYEGFIGDRDRRLCEQVRALEPAQLSHGQWMFDDPRLPELLFRYRARNFPETLTGEERQRWYGFCQQRLSEPQWGAPNTLGDFEKARQQAWEGADEAGRRVLEAWQLHARQLQERYSIG

SEQ ID NO: 68016 - protein, 191 aa, Pseudomonas putida
MSNHQPASLETDRRFPEAAVLLPITRSEAPELVLTLRAKGLSTHGGEVAFPGGRRDPEDPDLVFTALREAEEEIGLPPGLVEVIGPLSPLISLHGLKVTPFVGLIPDFVEYRANDAEIAAVFTVPLEFFRQDPRDHTHRIDYQGRSWYVPSYRYGEYKIWGLSAIMIVELVNLLFDAGISLHHPPERHIEN

SEQ ID NO: 68017 - protein, 458 aa, Pseudomonas putida
MFENLTDRLSQTLRHVTGKAKLTEDNIKDTLREVRMALLEADVALPVVKDFVNSVKDRAVGTEVSRSLTPGQAFVKIVQAELESLMGAANEDLALNAAPPAVVLMAGLQGAGKTTTAGKLARFLKERKKKSVMVVSADVYRPAAIKQLETLANDIGVTFFPSDISQKPVAIAEAAIREAKLKFIDVVIVDTAGRLHIDADMMDEIKALHAAVKPIETLFVVDAMTGQDAANTAKAFGEALPLTGVVLTKVDGDARGGAALSVRAITGKPIKFIGMGEKTEALEPFHPDRVASRILGMGDVLSLIEQAEQTIDKAKADKLAKKLKKGKGFDLEDFRDQLQQMKNMGGLGGLMDKLPSIGGVNLSQMGNAQGAAEKQFKQMEAIINSMTPAERRDPDLISGSRKRRIALGSGTQVQDIGRLIKQHKQMQKMMKKFSAKGGMAKMMRGLGGMLPGGGMPKL

SEQ ID NO: 68018 - protein, 109 aa, Pseudomonas putida
MCLFGIQICSTSCCINCSTDYRNDVHMVTIRLARGGSKKRPFYHLTVTNSRNARDGRFVERVGFFNPIAAGAEVKLSVNQERVTYWLSQGAQPSERVAQLLKEAAKAAA

SEQ ID NO: 68019 - protein, 250 aa, Pseudomonas putida
MGNLRVDVITLFPEMFSAITEYGITSRAVKQGLLQVTCWNPRDYTTDRHHTVDDRPFGGGPGMVMKIKPLEDALVSARQATGAAAKVIYLSPQGRKLTQQAVKGLAEQESLILIAGRYEGIDERFIEAHVDEEWSIGDYVLSGGELPAMVLIDAVTRLLPGALGHVDSAEEDSFTDGLLDCPHYTRPEVYADQRVPDVLLSGNHAHIRRWRMKQSLGRTFERRADLLESRSLSGEEKKLLEEYLRERDDS

SEQ ID NO: 68020 - protein, 116 aa, Pseudomonas putida
MTNKIIQQLEAEQMSKEIPTFAPGDTVVVQVKVKEGERSRLQAFEGVVIAKRNRGLNSAFTVRKISSGVGVERTFQTYSPQIDSLAVKRRGDVRKAKLYYLRDLSGKAARIKEKLS

SEQ ID NO: 68021 - protein, 298 aa, Pseudomonas putida
MPALDHPLIDQFLDALWLEKGLSDNTRVSYRSDLALFNGWLQEHSVSLPDAGRDLILDHLAWRLDQGYKPRSTARFLSGLRGFFRYLLREKLVAIDPTLQVDMPQLGKPLPKSLSEADVEALLQAPDLGEAIGQRDRAMLEVLYACGLRVTELVSLTLDQVNLRQGVLRVMGKGSKERLVPMGEEAVVWLERYQRDGRAELLNGRPSDVLFPSQRGEQMTRQTFWHRIKHHARVAGIDKPLSPHTLRHAFATHLLNHGADLRVVQMLLGHSDLSTTQIYTHVAKARLQQLHAQHHPRG

SEQ ID NO: 68022 - protein, 247 aa, Pseudomonas putida
MRVTQFFAAAALALASTFAVAAATDSNAGAEQAIRKSLQNLELEVPVESVASSPLNGLYEVKLQGGRVLYASADGQFVMQGYLFQIQDGKPVNLTEKTERQGIAKLINGIPAGEMVVYPAKGETKSHITVFTDTTCPYCHKLHAEVPELNRRGIEVRYVAFPRQGLGSSGDQQLQAVWCSSDRRGAMDKMVEGEEIKAAKCSNPVSKQFQLGQSIGVNGTPAIVLESGQVIPGYQPAPQVAKLALAK

SEQ ID NO: 68023 - protein, 469 aa, Pseudomonas putida
MRYISTRGQAPALNFEDVLLAGLASDGGLYVPENLPRFTQEEIASWAGLPYHELAFRVMRPFVEGSIADADFKKILEETYGEFAHAAVAPLRQLNSNEWVLELFHGPTLAFKDFALQLLGRLLDHVLAKRNERVVIIGATSGDTGSAAIEGCRRCDNVDIFILHPHQRVSEVQRRQMTTIFGDNIHNIAIEGNFDDCQEMVKASFADQSFLKGTRLVAVNSINWARIMAQIVYYFHAALQLGGPARSVAFSVPTGNFGDIFAGYLARNMGLPVSQLIVATNRNDILHRFMSGNQYVKETLHATLSPSMDIMVSSNFERLLFDLHGRNGGAIAELMANFKQGGGFSVEQDRWTEARKLFDSLAVSDEQTCETIAEVFAATGEVLDPHTAIGVKAARECRRSLDTPMVVLGTAHPVKFPEAVEKAGVGKALELPAHLSDLFSREERCTVLANDLKAVQGFVSQHGNRGKPL

SEQ ID NO: 68024 - protein, 569 aa, Pseudomonas putida
MRIEPRPLPPTLPFLGNLPPLLTRLYAARGVQSEAELDKSLARLLPYQQLKGIEAGVDLLVEAIDQRQRILIVGDFDADGATASTVGVLGLRLLGAAHVDYLVPNRFEYGYGLTPEIVEVALQRQPQLLITVDNGISSVDGVAAAKAAGLKVLVTDHHLPGEQLPDADAIINPNQPGCSFPSKSLAGVGVIFYVLMALRARLRSLGRYEAQPQPNIGELLDLVALGSVADVVPLDANNRILVHQGLERIRAGRARPGLKAILEVARRDHRRITSTDLGFILGPRLNAAGRLDDMSLGIECLLCEDAALAQDMAQQLDDLNQDRKSIEQGMQREALAQLKDLPVESMPYGLCLFDADWHQGVIGILASRLKERYHRPTIAFADAGDGMLKGSARSVPGFHIRDALDAVAARHPQLISKFGGHAMAAGLSLPEANFSAFAEAFDEEVRRQLREEDLTGRLLSDGSLAVEEFHLDLAKALRHAGPWGQHFPEPLFHGVFQLVEQRVVGERHLKVVLKSECGSVRLDGIAFGIDREVWPNPTVRWVELAYKLDVNEFRGNESVQLMIAHMEPR

SEQ ID NO: 68025 - protein, 548 aa, Pseudomonas putida
MQSAYTVLILLTLVSLSKLVGRVIPLPLPLVQIAAGALLAWPTLGLHVALDPELFLFLFLPPLLFADGWRIPKRELWRIRGPVVALAVGLVLFTVVGAGYFIHWLLPSIPLPVAFALAAVLSPTDAVAVSAIAQDRLPTPLMHMLQGEALMNDASGLVTFKFALAAAITGVFSLADASFSFVLVALGGLAVGVVLSWLIGRLRMWMITRGWDDPATHVVFMLLLPFAAYVLAERLGVSGILSAVAAGMMQSWLDLLPRQTSTRLLNRSVWSLLEFAFNGLIFLLLGLQLPDIIKAVVSHEATLWPTLAYRCLDVVAIFAALIMLRFIWVQSIWRSIGVVRRWRGKPALVLMPTARSCWLLTLGGVRGAVTLAGVMSIPLLIGAGTAFPERDLLIFIAAGVILLSLISACIALPILLRGVTKSPDERLHQEVQEAWRRTAEAAIHALEAEEVIDSNAPQDAAQATLATELKARLMAEYRDELESYDDSAEAKALAAQMDLLERRLRLRALRAQRLELYNLHRQHLVGDEVVRQVLGELDMSEANLGSVK

SEQ ID NO: 68026 - protein, 84 aa, Pseudomonas putida
MVEQTELNRLFWHSRRGMLELDVLLVPFTQEVYPTLNETDRELYVRLLSCEDQDMFGWFMERTESEDPELQRMVRIILDRVQPK

SEQ ID NO: 68027 - protein, 245 aa, Pseudomonas putida
MSQVNMRDMLKAGVHFGHQTRYWNPKMGKYIFGARNKIHIVNLEKTLPMFNDALSFVERLAQGKNKILFVGTKRSAGKIVAEQAARCGSPYVDHRWLGGMLTNYKTIRASIKRLRDLETQAEDGTFAKLTKKEALMRSRDLEKLDRSLGGIKDMGGLPDALFVIDVDHERIAITEANKLGIPVIGVVDTNSSPEGVDYIIPGNDDAIRAIELYMTSMADAVIRGRNNVAGGTEVYAEEAAAPAAE

SEQ ID NO: 68028 - protein, 337 aa, Pseudomonas putida
MKIAIVNDMPLAVEALRRAVALEPAHQVVWVASNGAEAVQRCTEQLPDLILMDLIMPVMDGVEATRRIMAETPCAIVIVTVDRKQNVHRVFEAMGHGALDVVDTPALGAGDAREAAAPLLRKILNIGWLVGQQRAPAARSVAAPLREASQRRGLVAIGSSAGGPAALEVLLKGLPAAFPAAIVLVQHVDQVFAAGMAEWLSSAAGLPVRLAREGEPPQPGQVLLAGTNHHIRLLQNGQLAYTAEPVNEIYRPSIDVFFESVARYWNGDAVGVLLTGMGRDGAQGLKLMRQQGFLTIAQDQASSAVYGMPKAAAAIDAAVEIRPLERIAGRLTEFFAK

SEQ ID NO: 68029 - protein, 287 aa, Pseudomonas putida
MAAITAALVKELRERTGEGMMDCKKALEKAGGDIEKAIDDMRASGAIKAAKKAGNVAAEGAIAVKTDGTSAVLLEVNSQTDFLALQDDFKNFVAESLEEAFAQKLTDAAPLIASREAAREALVAKCGENVNIRRLVRVEGDVVGAYLHGNKIGAVVVLKGGDVELAKNIAMHVAASNPEFLDSSEISAEAIEREKNVFLQLNADKIAGKPENIVENMINGRITKFKAEASLKEQAFVMNPEIKVGELAKKAGAEIVSFTYFKVGEGIEKPVDDFAAEVAAQVAAAKQ

SEQ ID NO: 68030 - protein, 500 aa, Pseudomonas putida
MSDLKTESQDLQQEENALIALRKEKLAAERAKGNAFPNDFRRDSYCNDLQKQYADKTKEELEAAAIPVKVAGRIMLNRGSFMVIQDMTGRIQVYVNRKTLPEETLAAVKTWDLGDIISAEGTLARSGKGDLYVEMTNVRLLTKSLRPLPDKHHGLTDTEQRYRQRYVDLMVNEETRHTFRVRSQVISHIRKFLIERDFLEVETPMLQTIPGGAAAKPFETHHNALDMAMFLRIAPELYLKRLVVGGFEKVFEINRNFRNEGVSTRHNPEFTMLEFYQAYADYRDNMDLTEELFRELAQLVLGSTDVPYGDKVFHFGEPFVRLSVFDSILKYNPELTAADLQDVDRAREIARKAGAKVLGHEGLGKLQVMIFEELVEHKLEQPHFITEYPFEVSPLARRNDDNPAVTDRFELFIGGREIANAYSELNDAEDQAERFLAQVAEKDAGDDEAMHYDADFVRALEYGMPPTAGEGIGIDRLVMLLTNSPSIRDVILFPHMRPQA

SEQ ID NO: 68031 - protein, 284 aa, Pseudomonas putida
MSLNFPLLLVIAVFICGLLGLIDLLFLAPRRRAAIANYQGSVSQPEMAVVERLNKEPLLVEYGKSFFPVLFIVLVLRSFLVEPFQIPSGSMKPTLEVGDFILVNKFSYGIRLPVIDKKVIEVGDPQRGDVMVFRYPSDPNVNYIKRVVGLPGDVVRYTNDKRLFVNGQPVAEQLVGSEPGTLGSAQLYKEKLGAAEHLIRKEMSRYRMPPDQQWTVPAGHYFMMGDNRDNSNDSRFWDDPNIPKELHGMVPDRNIVGKAFAVWMSWPEPKLSHLPNLSRVGLIH

SEQ ID NO: 68032 - protein, 300 aa, Pseudomonas putida
MTDSNPTRCGYVAIVGRPNVGKSTLLNHILGQKLAITSRKPQTTRHNMLGIKTEGDVQAIYVDTPGMHKANDKALNRYMNRNASAALKDVDVVIFVVDRTKWTDEDQLVLERVQYVTGPLIIAVNKTDRMEEKAELIPHLQWLQEQLPNAEVMPISAQQGHNLDALEAQIAKHLPENDHFFPEDQITDRSSRFLAAELVREKIMRQLGAELPYQITVEIEEFKQQGHVLHIHALILVERDGQKKIIIGDKGERIKRIGSEARKDMEVLFDSKVMLNLWVKVKGGWSDDERALRSLGYGDL

SEQ ID NO: 68033 - protein, 216 aa, Pseudomonas putida
MRVILLGAPGAGKGTQAKFITEKFGIPQISTGDMLRAAVKAGTPLGLELKKVMDAGQLVSDELIISLVKERIAQPDCANGCLFDGFPRTIPQAEAMVAAGVDIDAVVEIAVDDEEIVGRMAGRRVHLASGRTYHIQYNPPKVEGKDDETGEDLIQRDDDKEETVRHRLSVYHSQTKPLVDFYQKLSAANGGKPKYSHIEGVGSVEAITAKVLAALS

SEQ ID NO: 68034 - protein, 308 aa, Pseudomonas putida
MAASIATSLLCGFAEHKHKPHAVLPTQGCFAYQRATGGGLTACQAQGILSKNSYICLYNKTRARPMHPLTGDARLPRYQQLRDHMVAQIANNRWRPGEAIPTEAALATEFDLSIGTVRKAVDVLVAEGVLERQQGRGTFIRRPQFQSSLFRFFRFEAANGERIVPESRILSIESLPAPSAVAEALGLAGEAEVIRIIRTRLLGAQPVLAEEIWLPRQTFQPLLDVDLNSEGPLLYPIYEALCGQVVAYAEETLTAEAVDAVHGRLLQLPADSPVVVIERLARDYAGKPLEWRRSRGHAQHFRYRIDIR

SEQ ID NO: 68035 - protein, 280 aa, Pseudomonas putida
MIKINSTIECSNSAPFVLFGGINVLESEDLALTACAEYVRVTQKLGIPYVFKASFDKANRSSIHSYRGPGMEEGLRIFEKVKAEFGVPIITDVHEIYQTAPVAEVVDVLQLPAFLARQTDLVVALAKTGKPVNIKKPQFLSPSQMQNIVHKFKEAGNDQLILCDRGTCMGYDNLIVDMLGFGVMKRTCQDLPIIFDVTHALQNRDPSGAASGGRREQVVELARAGMGVGLAGLFLEAHPNPDQAKCDGPSALPLDKLEPFLAQIKALDDLVKSFPQLTIA

SEQ ID NO: 68036 - protein, 850 aa, Pseudomonas putida
MKATASSGQRERLVIVGNGMVGHHCVEQLVSRGALQRFEVRVFGEERQRAYDRVHLSEYFGGSCAETLALCEHDFYEANGVHLHLGEAVLEIDRERREVVTAAGRYGYDQLVLATGSYPFVPPIEGSSGNARLVYRTLDDLDGIRAAAAGARRGVVVGGGLLGLEAANALKSLGLEAHVVEFAPRLMPVQLDGEGGAALKAQIEALGVGVHLSRATQSVSAGETYRYRMNFDGGEHLETDLIVFSAGIRPQDALGRGCGLDIAARGGVVIDNHCRSSDPRIFAIGECASWNGSVFGLVAPGYSMARNLAGLLMGEAAVAFTGADMSTKLKLLGVDVGSIGDAHGATPGARSYRFIDEANSAYRRLVVDASGKHVLGAVLVGDNSYYDTLLQYAQNGIALPADPAALILPQGGGAPALGADALPDSATICSCHNVSKGAVCAAIDSGCSDLAAVKGCTKAATGCGGCAALLKQVFEHELTARGVAVDKSLCEHFAYTRQELYGLVRVEGIRTFSELLERHGKGHLGCDICKPAVGNILASCWNQPIMDPALVPLQDTNDTFMANMQKNGTYSVVPRIPGGEITPDKLIVIGQVAKKYDLYTKITGGQRIDLFGAQLHELPLIWGELIEAGFETGHAYGKSTRTVKSCVGSTWCRYGVQDSVAMALRLEDRYKGLRSPHKLKFAVSGCTRECAEAQSKDIGVIATDKGWNLYVCGNGGMRPRHAELFATDLDDEALVRLIDRVLMFYIRTADKLQRTSVWRENLEGGLDYLKQVIIDDSLGLASELESQMQHVVDQYECEWANALNDPEKLKRFRTFVNDRRADPDVHFVREREQRRPAAPLHLIPTVEEAV

SEQ ID NO: 68037 - protein, 310 aa, Pseudomonas putida
MNLDTRIKYRHLLCFLEIARQGSLARAADILSISQPAISKTLKELEDLLEARLFERSRQGVELTPAGTRFMRYAGPSVQALRDGVSSLRGEARAPSQVRIGVLSTVEGLLMPEVLCRLHQRHEALVISVVTGVSAQLLGQLHLGELELVVGRMTDSPQIQGLSFEHLYSESMSLVVRPGHPLLASTPVERGQVGRYPLVLPPAGTTIRQHADSLFVQCGIQMPAQRLETLSLALSRRYLLGSDGLWVAPRDAVLLDLRRGELVELDLGVREPGGSVGICRNAALPLSLPGQWVGEVLREVAGEYREGRYP

SEQ ID NO: 68038 - protein, 368 aa, Pseudomonas putida
MIRPCTFGIEEEYLLVNLGSGQVPATPSPAVMGRCREALGRYFAQEMFRSQIELASPVFTNLYEAREFLQRNRQRLRVALAEEGMGPYAAASHPCAAWLLQKPAAQGHYKQLFDDYRHVARRSLLNGLHVHVGVPPACDRMQLINRLLPWLPLLLALSTSSPLWAGQPTGYLSYRRVICGEWPHMGLPEALPDWAAYERYRALLQRTGALAADGDLWWALRPSRRYPTVELRICDGCPNLEDVLCIAALFRHLVEHSIAYRHDPLPCSRELRWIAQENYWRAMRHGRHAQFIGCHEQQPVTAQGWLAQLQAQIPIDSADAERACQHALHVLRHGTHADQQLRCLAQARADGLGKGQALRAVVAAGTCI

SEQ ID NO: 68039 - protein, 715 aa, Pseudomonas putida
MPALLRYLFLLLLLFIAPVQAAGLPGLLGGSAPAQPEATEPLGKSLDEVIKNLENDQQRAKLLADLKKLRDATRQSQPSVEQGVLGLIGGALHDFEKQFSGDASPFHRWAAEIEQAQAELAELVVPVHQWPAILFGFAAVIAVWSVLAYAFNWVGHRVRLRFGLSEELPQHPRTWDLVRFALRKLGPWLVALVFTVYLSFVLPPSLGKSLAMVLAYALVVGTCFSAICVIAFSLLDGPHRHRALHILRRQAFRPLWLIGSFAAFGEAMSDPRMLVALGTHLAHTLATLANVIAALCTGLFILRFRRPIAHLIRNQPLSRRLTRRTLSDTIEILGSFWFIPALILVAISLFATFVSAGDTSTALRQSLMCTVLVVVCMVLNGLVRRHAANPKRASKRQAVYTERLRNFGYLLVHLFIWLVFIELGLRVWGVSMISFAEGDGHDISLRLLGLAGTLIVAWLVWILADTAVHHALVRSRRGLANARAQTMMPLIRNVMFVVIFIIAVIVALANMGMNVTPLLAGAGVIGLAIGFGAQSLVADLITGLFIIIEDSLAIDDYVDVGGHLGTVEGLTIRTVRLRDIDGIVHTIPFSEIKSIKNYSREFGYAIFRVAIPHSMNIDQAISLVREVGQKLRNDPLMRRNIWSPLELQGVESFESGSAILRARFKTAPIKQWEVSRAFNLALKRQLDEAGLDLATPRLSVQVVTAGGGGMTEAGS

SEQ ID NO: 68040 - protein, 448 aa, Pseudomonas putida
MIRSLRVRLMLAAAVLALLFMLALLPALQKAFSLALQESIEQRLASDVTTLISAARIEHGRLQMPTLLPDERYNLPYTGLLGYIFDRDGKLVWQSRATADRHINYQPRYDGRGNEFDRIHQSDGEEFFVYDVEIKLLGGQSAAYSIVALQPVSEYKATLNGLREKLYLGFGAALLALMVLLWAGLTWGLRSLRRLSHELDEVESGARDGLSGEHPRELLRLTRSLNRLLRSEREQRTRYRDSLDDLAHSLKTPLAVLQGVGESLQQRSGEREQARVLQSQIERMSQQIDYQLQRASLRKSGLVRHSVLLRPLLDSLCSTLAKVYREKRVDVVLELPDAAQVPMEQGALLEMLGNLLENAYRLSLGQVRVSLMKAPGYLTLCIEDDGPGVPVDQRERILERGERLDSQHPGQGIGLAVVKDIVDSYDAELSLGDSPLGGAAFRITFHLD

SEQ ID NO: 68041 - protein, 323 aa, Pseudomonas putida
MTFKRKLLLAVLPFAFSVAMPASALDIKFAEIHPAGYPTVVAEQNMGKKLEDASNGEITFKMFAGGVLGSEKEVIEQAQIGAVQMTRVSLGIVGPVVPDVNVFNMPFVFRDHDHMRKIIDGEIGQEILDKITNSDFNLVALAWMDGGSRSIYTKKPVRSLEDLKGMKIRVQGNPLFIDMMNAMGGNGIAMDTGEIFSALQTGVIDGAENNPPTLLEHNHFQSAKYYTLTGHLILPEPVVMSKTTWNKLSPEQQALVKKVAREAQMEERALWDAKSAASEEKLKAAGVEFITVDKKPFYDATASVREKYGAQYADLMKRIDAVQ

SEQ ID NO: 68042 - protein, 959 aa, Pseudomonas putida
MQTDTTRENPQAQVPQAADSNQDLAATAPGQLRVIKRNGTVVPYTDDKITVAITKAFLAVEGGTAAASSRIHDTVARLTEQVTATFKRRMPSGGTIHIEEIQDQVELALMRAGEQKVARDYVIYRDQRAKERATRANTDAVVEPHPSIRITLADGSLAPLDMARLNTIISEACEGLAEVDGDLIQRETLKNLYDGVAIKDVNTALVMTARTLVEREPNYSFVTARLLMDTLRAEGLGFLNVADSATHHEMADLYAKALPAYVAKGIEFELLNPALADFDLEKLGKAINHERDQQFTYLGLQTLYDRYFIHKDGVRFELPQVFFMRVAMGLALEEKDKEARAIEFYNLLSSFDYMASTPTLFNAGTLRPQLSSCYLTTVPDDLSGIYHAIHDNAMLSKFAGGLGNDWTPVRALGSYIKGTNGKSQGVVPFLKVVNDTAVAVNQGGKRKGAVCAYLETWHLDIEEFIELRKNTGDDRRRTHDMNTANWIPDLFMKRVFDDGKWTLFSPSEVPDLHDLTGKAFEERYEYYEALTEYNKIKVFKTVQAKDLWRKMLSMLFETGHPWLTFKDPCNLRSPQQHVGVVHSSNLCTEITLNTNKDEIAVCNLGSINLPNHIVDGKLDTTKLQRTVNTAVRMLDNVIDINYYSVPQARNSNFKHRPVGLGIMGFQDALYLQHIPYGSDAAVEFADKSMEAVSYYAIQASCDLADERGAYETFQGSLWSKGILPLDSQQILIEARGQKYIDVNLEETLDWAPVRARVQKGIRNSNIMAIAPTATIANITGVSQSIEPTYQNLYVKSNLSGEFTVINPYLVRDLKARDLWDSVMINDLKYYDGSVQQIERIPQELKDLYATAFEVETKWIVDAASRRQKWIDQAQSLNLYIAGASGKKLDVTYRMAWYRGLKTTYYLRALAATSTEKSTINTGKLNAVSSGGDSAPVQAAGPAPVPKACAIDEPDCEACQ

SEQ ID NO: 68043 - protein, 416 aa, Pseudomonas putida
MLSWDEFDKEDGEVAAKGNTPAQAAAAATLDKLDSAGGAAALEARAATASDSEAVKRAKAALDALDVAEGLAELEGSSARVAVDEKRMINCRADLNQLVPFKYDWAWQKYLDGCANHWMPQEVNMTADIALWKSQDGLTEDERRIVMRNLGFFSTADSLVANNLALAVYRLITNPECRQYILRQAFEEAIHTHAYQYCIESLGMDEGEIFNMYHEIPSVAKKAAWGLKYTRAISDPEFNTGTVETDKELLRNLIAYYCVLEGIFFYCGFTQILSMGRRNKMTGVAEQFQYILRDESMHLNFGIDVINQIKIENPHLWDAAMKEEATQMILQGTQLEIEYARDTMPRGVLGMNAAMMEDYLKFIANRRLTQIGLKEEYPGTTNPFPWMSEIMDLKKEKNFFETRVIEYQTGGALSWD

SEQ ID NO: 68044 - protein, 237 aa, Pseudomonas putida
MAKTWRRTMQIHLLFKKALLAAAVAGVLSMSIALIPDSISHGSSAYAKDGGGGGGGGGGGGGHGGGGSGGGGGHGGGGSGGGGGHGGGGSGGGGGHGGGGSGGGGGHGGGGSGGGGGHGGGGSGGGGGHGGGSGSGGHGSGGDGGGHAGNSGSGHDGNSNAGRSSNHAEAGDDHGNHVGGEPGDDHGNHVGGKPGDDHGNHVGGEPGDDHGNHVGGEPGNDHGVHAGGEAGDDNSRS

SEQ ID NO: 68045 - protein, 230 aa, Pseudomonas putida
MQHTVVPVGIVHSCFKEKFAIPRQPQLAPAACGVLELLPPFDQGDAVEGLEQVSHVWLLFLFHQALEEKPRLKVRPPRLGGNKSMGVFATRATHRPNGIGQSVVRLEGVEPGRLLLSGIDLLDGTPVLDIKPYVPYADSIAGASNQMANAAPVAIAVQWADNALLQAREHALRLSEPLVELIEQCLAQDPRPAYQIPPSERVYGVKFWDVQVRWHYPQPDVIRVLEVVLG

SEQ ID NO: 68046 - protein, 440 aa, Pseudomonas putida
MTTRQPLYKSLYVQVLVAITIGILLGHYYPETGVALKPLGDGFVKLIKMVIAPIIFCTVVSGIAGMQSMKSVGKTGGYALLYFEIVSTIALIIGLVVVNVVKPGAGMHIDVSTLNASSVAAYAAAGAQQTTVGFLLNVIPNTVVGAFANGDILQVLMFSVLFGFALHRLGSYGKPVLDMIDRFAHVMFNIINMIMKLAPIGAFGAMAFTIGQYGVGSLVQLGYLMACFYITCLLFVLVVLGGICRAHGFSVIKLIRYIREELLIVLGTSSSESALPRMLAKMERLGAKKSVVGLVIPTGYSFNLDGTSIYLTMAAVFIAQATDTTMDITHQITLLLVLLVASKGAAGVTGSGFIVLAATLSAVGHLPVAGLALILGIDRFMSEARALTNLVGNAVATVVVAKWVKEMDNDKLASELDSGGAPLIDTRPTDDLGVAEGPAR

SEQ ID NO: 68047 - protein, 156 aa, Pseudomonas putida
MQSIVLLLWLALCSEQDVRQRQISNVLTLGAAGCALAWLFSTGHSWIGAEASEAGWALAIVMLLTLPGYMLGRFGADDVKLMGALALATSPQYVLGTFIGAGVTVLVWLLTRRRLWTLLNPKVKKRLQALTEEMGDKQAFVPYVLSGFLLTAVWIQ

SEQ ID NO: 68048 - protein, 227 aa, Pseudomonas putida
MNKSLLGASLVALALAAPAAHAYQAGDMILRAGAITTAPNESSGDLKFDGNKVSGTKATLDSDTQLGLTFAYMLTDHIGLELLAATPFKHTVGVKGLGGGLDGKLADIKQLPPTLSLQYYPMEPNSRFQPYAGVGINYTLFFDEDLSSARKEQGFSNLKLQDSVGIAGQLGMDYMLTDNLLVNASVWYVDIDTKASVNGPTALGYSKTKVDVDVDPWVYMVGLGYKF

SEQ ID NO: 68049 - protein, 248 aa, Pseudomonas putida
MVVDDQPVIVEQLSEFLETKGYACVTALSTDEAIEHYVADPTIGLLICDLHMPDRDGIELVRALKEINGSQRTFEAIMLTGRAEKQDLIRAIREGFADYYQKPMDLDELLAGVRRQEAALLERQRNLRDLGGLNQRLQELAESVDELYQDLEKARGQGTHRRASDAEESESELPAAFEKLSPRQLEVARLVGKGKTNYQIACELGITENTVKLYVSQVLRLTHMHNRTQLALALTPSSSPVHQRFTTH

SEQ ID NO: 68050 - protein, 153 aa, Pseudomonas putida
MDIRKVKKLIELLEESGIDELEIKEGEESVRISRHSKTPAAQQFYAPAPMAAAPAAAPVAAAAPAAEATAAAPALKGTVVRSPMVGTFYRKPSPTSPNFAEVGQSVKKGDTLCIVEAMKMMNHIEADIGGVIDAILVEDGQPVEFDQPLFTIV

SEQ ID NO: 68051 - protein, 451 aa, Pseudomonas putida
MSGKLEKVLIANRGEIALRILRACKELGIKTVAVHSTADRELMHLGLADESVCIGPASSKDSYLHIPAIIAAAEVTGATAIHPGYGFLAENADFAEQVEKSGFAFIGPKADTIRLMGDKVSAKDAMIKSGVPTVPGSDGPLPEDEEVALAIARDVGYPVIIKAAGGGGGRGMRVVHKEEDLISSAKLTRTEAGAAFGNPMVYLEKFLTNPRHVEVQVLSDGQGNAIHLGDRDCSLQRRHQKVLEEAPAPGIDEKARQEVFKRCVDACIEIGYRGAGTFEFLYENGRFYFIEMNTRVQVEHPVSEMVTGIDIVKEMLSIAAGNKLSFRQEDVVIRGHSLECRINAEDPKKFIPSPGKVKHFHAPGGNGVRVDSHLYSGYSVPPNYDSLIGKLITYGKDRDEAMARMRNALDEIVVDGIKTNIPLHRDLVRDEGFCKGGVNIHYLEHKLANQE

SEQ ID NO: 68052 - protein, 944 aa, Pseudomonas putida
MDKILIRGARTHNLKNIDLTLPRDKLIVITGLSGSGKSSLAFDTLYAEGQRRYVESLSAYARQFLSMMEKPDVDTIEGLSPAISIEQKSTSHNPRSTVGTITEIYDYLRLLYARVGTPRCPDHDIPLEAQTISQMVDLVLERPEGSKLMLLAPVVRERKGEHLAVFDELRAQGFVRARVNGKLYELDELPKLDKQKKHSIDVVVDRFKVRADLQQRLAESFETALKLADGIALVAPMDDEQGEETIFSARFACPVCGHAISELEPKLFSFNNPAGACPTCDGLGVKQFFDTKRLVNTELTLAEGAIRGWDRRNVYYFQMLGSLAAHYGFSLEEPFGELSAEHQKVILQGSGKQSVDFKYLNDRGDIVKRSHPFEGIVPNLERRYRETESATVREELAKFLGTQPCPDCRGTRLRREARHVWVGEKTLPAVTNLPIGEASNYFGQLTLTGRRGEIAAKILKEICERLQFLVNVGLDYLTLDRSADTLSGGEAQRIRLASQIGAGLVGVMYILDEPSIGLHQRDNDRLLATLNHLRDLGNTVIVVEHDEDAIRLADYVVDIGPGAGVHGGQIVAEGSPQEVMDHPDSLTGKYLSGRKKIVVPAKRTPRNKKLQLKLKGARGNNLQNVDLEVPIGLLTCVTGVSGSGKSTLINNTLYPLAATALNGASSLEAAPHSSMDGLQHLDKVVDIDQSPIGRTPRSNPATYTGIFTPIRELFSGVPESRSRGYGPGRFSFNVKGGRCEACQGDGLIKVEMHFLPDIYVPCDVCKSKRYNRETLEIKYKGKNIHEVLEMTIEDAREFFDAVPALARKLQTLMDVGLSYIKLGQSATTLSGGEAQRVKLSRELSKRDTGKTLYILDEPTTGLHFADIQQLLDVLHRLRDHGNTVVVIEHNLDVIKTADWLVDLGPEGGSKGGQIIACGTPEELSEMKQSYTGHYLKPLLERDRA

SEQ ID NO: 68053 - protein, 362 aa, Pseudomonas putida
MNDLSHTHMRAAVWHGRHDIRVEQVPLPADPAPGWVQIKVDWCGICGSDLHEYVAGPVFIPVEAPHPLTGIQGQCILGHEFCGHIAKLGEGVEGYAVGDPVAADACQHCGTCYYCTHGLYNICERLAFTGLMNNGAFAELVNVPANLLYRLPQGFPAEAGALIEPLAVGMHAVKKAGSLLGQTVVVVGAGTIGLCTIMCAKAAGAAQVIALEMSSARKAKAKEAGANVVLDPSQCDALAEIRALTAGLGADVSFECIGNKHTAKLAIDTIRKAGKCVLVGIFEEPSEFNFFELVSTEKQVLGALAYNGEFADVIAFIADGRLDIRPLVTGRIGLEQIVELGFEELVNNKEENVKIIVSPGVR

SEQ ID NO: 68054 - protein, 506 aa, Pseudomonas putida
MRYAHPGTEGAKVSFKSRYGNYIGGEFVTPVKGQYFENTSPVNGKLIAEFPRSTAEDIDKALDAAHAAADAWGRTSVQDRSNVLLKIADRIEQNLELLAITETWDNGKPIRETLNADIPLAVDHFRYFAGCIRAQEGGAAEINEGTVAYHIHEPLGVVGQIIPWNFPILMAAWKLAPALAAGNCVVLKPAEQTPLGITVLLEVIGDLLPPGVLNVVQGYGREAGEALATSKRIAKIAFTGSTPVGSHIMKCAAENIIPSTVELGGKSPNVYFEDIMQAEPSFIEKAAEGMVLAFFNQGEVCTCPSRALVQESIYPQFMEVVMKKVLQIKRGDPLDTDTMVGAQASQQQFEKILSYLQIAQEEGAELLTGGKVEKLEGSLATGYYIQPTLLKGNNKMRVFQEEIFGPVVSVTTFKDEAEALAIANDTEFGLGAGVWTRDINRAYRMGRGIKAGRVWTNCYHLYPAHAAFGGYKKSGVGRETHKMMLDHYQQTKNLLVSYDINPLGFF

SEQ ID NO: 68055 - protein, 464 aa, Pseudomonas putida
MASFVHTVGHLVYRFDSLKEVMAKASPARSGDCLAGVAASNDAERVAAQMALANIPLTHFLNEALIPYEADEVTRLIIDTHDAQAFAPVSHLTVGGLRDWLLSEEANEDSLRALAPGLTPEMAAAVSKIMRVQDLVLVAQKIRVVTRFRGTMGLRGRLSTRLQPNHPTDEPAGIAASILDGLLYGNGDAMIGINPATDSIASICALLEMLDAIIQRYDIPTQSCVLTHVTTSIEAINRGVPLDLVFQSIAGTEAANAGFGINLNVLQEGYEAGLSLKRGTLGQNLMYFETGQGSALSANAHHGVDQQTCETRAYAVARHFKPFLVNTVVGFIGPEYLYNGKQIIRAGLEDHFCGKLLGVPMGCDICYTNHAEADQDDMDTLLTLLGVAGINFIMGIPGSDDIMLNYQTTSFHDALYARQTLGLKPGPEFEAWLARTGIFTQADGRVRFGDNLPPAFRQALAQLA

SEQ ID NO: 68056 - protein, 206 aa, Pseudomonas putida
MARYIGPKCKLSRREGTDLFLKSGVRALESKCNIEAAPGIHGQRRGRQSDYGTQLREKQKVRRIYGVLERQFRGYYQAAASKKGATGENLLQLLECRLDNVVYRMGFGSTRSESRQLVSHKAISVNGKTVNIPSYQVRPGDVVAVREKSLGQLRIVQALELCAQRGRVEWVDVDAAKKSGVFKNVPARSDLSADINENLIVELYSK

SEQ ID NO: 68057 - protein, 58 aa, Pseudomonas putida
MATVKVTLIKSVSGRLPNHKLCVKGLGLRRIGHTVEVQDTPENRGMINKAYYMLKVEG

SEQ ID NO: 68058 - protein, 431 aa, Pseudomonas putida
MTHRIVIVGGGAGGLELATRLGKSLGKRKQAEITLVDTNLTHIWKPLLHEVAAGSLNSSEDELNYVAQAKWNHFNFQLGRMSGLDREGKQIQLAATLDEEGRELLPARTLGYDTLVIAVGSNTNDFGTLGAAQHCLFLDTRKQAERFHQQLLNHYLRAHAGDVASEKISVAIVGAGATGVELAAELHHAAHELAAYGLDRIQPKDMHITLIEAGPRVLPALPERISVPVHKTLEKLGVKVMTNAAVSEVTEDGLKTKDGEVIQASLKVWAAGIRAPGFLKDIDGLETNRINQLVVRPTLQTTRDDNIFAFGDCAACPQPGSDRNVPPRAQAAHQQASMLAQSLKARLENKALPTYEYKDYGSLVSLSRFSAVGNLMGNLMGSVKLEGWLARMFYVSLYRMHQMALYGFFRTALMMLGSKIGRGTEPRLKLH

SEQ ID NO: 68059 - protein, 854 aa, Pseudomonas putida
MRIDRLTSKLQLAISDAQSLAVGMDHPAIEPVHLLQALLEQQGGSIKPLLMQVGFDINGLRQGLVKELDQLPKIQNPTGDVNMSQDLARLLNQADRLAQQKGDQFISSELVLLAAMDENSKLGKLLLSQGVSKKALENAINNLRGGAAVNDANAEESRQALDKYTVDLTKRAEEGKLDPVIGRDDEIRRTVQVLQRRTKNNPVLIGEPGVGKTAIAEGLAQRIINGEVPDGLKGKRLLALDMGALIAGAKYRGEFEERLKSLLNELSKQEGQIILFIDELHTMVGAGKGEGAMDAGNMLKPALARGELHCVGATTLNEYRQFIEKDAALERRFQKVLVEEPSEEDTIAILRGLKERYEVHHKVAITDGAIIAAAKLSHRYITDRQLPDKAIDLIDEAASRIRMEIDSKPEVLDRLDRRLIQLKVESQALKKEEDEAAKKRLEKLTEEIERLEREYSDLEEIWASEKAEVQGSAQIQQKIEQSRQELEAARRKGDLNRMAELQYGVIPDLERSLQMVDQHGKTDNQLLRNKVTEEEIAEVVSKWTGIPVAKMLEGEREKLLKMEELLHQRVIGQSEAVTAVANAVRRSRAGLSDPNRPSGSFLFLGPTGVGKTELCKALAEFLFDTEEAMVRIDMSEFMEKHSVARLIGAPPGYVGYEEGGYLTEAVRRKPYSVVLLDEVEKAHPDVFNVLLQVLEDGRLTDSHGRTVDFRNTVIVMTSNLGSAQIQELVGDREAQRAAVMDAVGAHFRPEFINRIDEVVVFEPLGREQIAGITEIQLGRLRSRLLERELSLSLSPEALDKLIAVGYDPVYGARPLKRAIQRWIENPLAQLILAGKFLPGTAITAKVEGDEIVFG

SEQ ID NO: 68060 - protein, 271 aa, Pseudomonas putida
MWSFSAWRRKRTLARYPITPQQWQAVRERLPMLDGISDAEDRWLREACILFLLDKHLTCLPGVELDDEQRLMLAAQAQLPLLHLGELNWYQGFHEIILYPDDFKSPQRHRDASGVEHVWDGEHSGEAWQQGPIILAWNGVQASGGWEAYNLVIHELAHKLDMLNGDANGLPPLHSGMPVDEWASAMQQAYDDLNQQLDANPDAETAIDPYAAENPAEFFAVTSEYFFSAPDLLHQAYPKVYHQLSLFYRQDPLARLCRLQAEHPEYRESHA

SEQ ID NO: 68061 - protein, 130 aa, Pseudomonas putida
MSMQDPLADMLTRIRNAQMAEKSVVSMPSSTLKVAVAKVLKDEGYIAGYQVTGEAKPSLSIELKYFEGRPVIEELKRSSRPGLRQYKAVTDLPKVRGGLGVSIVSTNKGVMTDRAARAAGVGGEVLCTVF

SEQ ID NO: 68062 - protein, 122 aa, Pseudomonas putida
MIQTQSMLDVADNSGARRVMCIKVLGGSHRRYAGIGDIIKVTVKEAIPRGKVKKGQVMTAVVVRTRHGVRRADGSIIRFDGNAAVLLNNKQEPIGTRIFGPVTRELRTEKFMKIVSLAPEVL

SEQ ID NO: 68063 - protein, 64 aa, Pseudomonas putida
MMKANELREKSAQQLNEQLLGLLRDQFNLRMQKATGQLGQSHLLSQVKRDIARVKTVLNQQAGK

SEQ ID NO: 68064 - protein, 92 aa, Pseudomonas putida
MANTPSAKKRAKQAEKRRSHNASLRSMVRTYIKNVVKAIDAKDAEKAQAAYVLAVPVIDRMADKGIIHKNKAARHKGRLNGHIKALKEAAAA

SEQ ID NO: 68065 - protein, 295 aa, Pseudomonas putida
MIGTYQASCQARVDAALEPLFIAPSKELERLYAAMRYSVMNGGKRVRPLLAYAACEALGAPAEQANGAACAVELIHAYSLVHDDLPAMDDDDLRRGQPTTHKAFDEACAILAGDGLQSLAFSALLDPCLSPQIDSIRLAMVQVLAKAAGPAGMVGGQAIDLGSVGQKLDQQALEFMHRHKTGALIEASVRLGALASARAEPVQLDALQTYAQAIGLAFQVQDDILDVESDTATLGKRQGADIARDKPTYPALLGLEAAKAYAIELRDQALAALQGFGEKAEPLRALARYIVERRN

SEQ ID NO: 68066 - protein, 393 aa, Pseudomonas putida
MNLRMVLILGALSAFGPLAIDFYLPAFPAMAQAFATDEKHVQATLAAYFLGLSIGQLAYGPVADRFGRRKPLMFGVTLFTLASLACAYAPNLDTLVVARFIQALGGCAGMVLSRAIVSDKCDPVASAKVFSQLMLVMGLAPILAPMLGGVLVNLAGWQSIFLALSLFSAGCLLAVSLGLPESLPEHIPRQPLSGALRQYLRLLADRVFLGHALTGGIAIAGMFAYIAGSPFVFIKLYGVPAEHYGWLFGTNAAGFILVAQVNARLLAKRGPAFLLGRAVWLYLVAGLVLLGVAALRPAQLWPLLVPLFICIASLGCIIPNASACAMSGQGARAGSASALMGCVQFSVAAGAAALVGLLHDGSAVPMAIVISLCGALVVSVALLTRRLQAKAPA

SEQ ID NO: 68067 - protein, 799 aa, Pseudomonas putida
MPASTTYDLPISGMTCASCAGRVERALRKVTGAEQVSVNLTTEKARVLAPPASLPALVEAVREAGYGVPTRTLELQIGGMTCASCVGRVERALGKLAGVEQVSVNLASERAHLEVLAALDDNLLIDAVQKAGYSASLPQSTKDDQSAVQRRLRNERLAVGAALLLALPLVLPMLVQPFGLHWMLPAWAQFLLATPVQFILGARFYIAAWKAVRAGAGNMDLLVALGTSAGYGLSLYQWAQAPAGMAPHLYFEASAVVIALVLLGKYLESRAKRQTASAIRALEALRPERALRVVDGVEEDVAIAHLRVGDLVLVKPGERFPVDGVVEDGSSHADEALISGESLPVPKQPGDSVTGGAINGEGRLLVRTQALGTETVLARIIRLVEDAQAAKAPIQKLVDRVSQVFVPAVLVLALITLIGWWLAGVPLETALINAVAVLVIACPCALGLATPAAIMAGTGVAARHGILIKDAEALERAHAVNRVVFDKTGTLTSGSPQVVHSQALDGNSADLYRLAGALQRGSEHPLAKAVLVACAEQGLDVPTVADSQSLTGRGIAGRVEGRELALGNRRLLDESGLQPGELAAQAQAWEAEGRTLSWLIERGKQPRVVGLFAFGDSLKPGAAQAIETLHAQHISSHLLTGDNRGSANVVAEALGIDDVHAEVLPADKAATVAALKQEGVVAMVGDGINDAPALAAADIGIAMGGGTDVAMQAAGITLMRGDPRLVPAALEISRKTYAKIRQNLFWAFIYNLIGIPLAALGYLNPVLAGAAMALSSVSVVSNALWLKTWKPTSSTQEAP

SEQ ID NO: 68068 - protein, 554 aa, Pseudomonas putida
MAFYRTPHDVTALPAWKALQQHREAMRGFSMSEAFAADAKRFDQFSLSACGLFLDYSKNLITEQSRDLLVNLANEVGLQDAIKSMFSGEIINASEGRPVLHTALRRPVGDKLSVNGVNVMPEVHKVLNQITELVGRIHDGLWRGYSEKPITDVVNIGIGGSFLGPELVSEALLPYAQRGVRCHYLANIDGSEFHELSANLRAETTLFIVSSKSFNTLETLKNAMAARTWYLAQGGSEAELYRHFIAVSSNKAAAVAFGIREENIFPMWDWVGGRYSLWSAIGLPIALAIGTANFKELLSGAYTMDQHFQTAPFDKNMPVLLALLGVWYGNFWDANSHAILPYDHYLRNITKHLQQLDMESNGKSVLQDGTPVKTDTGPVIWGGVGCNGQHAYHQLLHQGTQLIPADFIVPVVSFNPVADHHQWLYANCLSQSQALMLGKTREEAEAELRAKGLNEADIEKLAPHKVIPGNRPSNTLVVERISPRRLGALVAMYEHKVFVQSVIWGINAFDQWGVELGKELGKSVYQRLVGSLEDSAEDGSTQGLINYFRGKHRG

SEQ ID NO: 68069 - protein, 405 aa, Pseudomonas putida
MSLLSVSDVGKAYKTYRSELQRIAHWFFLPTKASSEHWVLKHINFAIEPGEAIGIIGQNGAGKSTLLKMITGTLQPTQGRVQVNGRIAAILELGMGFNPELSGRQNVYHAAGLMGFDVQQINDVIDDIEAFAEIGEYFDEAVRTYSSGMQMRVAFAVATAFRPEILIVDEALSVGDSYFQHKSFERIREFQRLGTSLLIVSHDRGAIQSLCSRALLLENGSIIKDGPPEQVMDYYNALIAEKENSTVQVKQLADGTVQTQSGSGEATIGTVALYDMQGTPVEFVAVGDKVTLSVQVEVHAPIPELVVGYVIKDRLGQHVFGTNTHHLGKAQKALETGEKLEYRFDFEMNLGPGSYSVAVALHANEVHIGSNYEWRDLALVFNVVNTSKPQFVGMAWVPTAVECIR

SEQ ID NO: 68070 - protein, 363 aa, Pseudomonas putida
MAPLALQLAQDSRFEARVCVTGQHRQMLDQVLELFGISPEYDLNIMKAGQDLTGVTTAILQGIRPVLAAFKPDVVLVHGDTATTFATSLAAYYQQIPIAHVEAGLRTNNLYSPWPEEGNRRLTGALAALHFAPTATSRDNLLREGTDPAHIFTTGNTVIDALLEVEQKLQSPALKARFASHFSYLAAERRLLLVTGHRRENFGGGFERICQALVQIARQFPELDVVYPVHLNPNVREPVNRLLGDVSNIHLVEPLDYLPFVYLMTRAYVILTDSGGIQEEAPALGKPVLVMRDTTERPEAVAAGTVKLVGTEVASIVRALSTLLTDEAAYREMSFAHNPYGDGKACARIRKALATWPPPHRSM

SEQ ID NO: 68071 - protein, 178 aa, Pseudomonas putida
MSILSVFHPASPALPNKVLTHHDDIAATLAEQGVRFVHAEPGLRVRPGTAQDEVLEVCRVYLDELMTAHGSKALALLNRDGEDPAQVDVRDEHVHDADELFAVVSGRAQVGLRLGDWVYSVLCEKGDQLLVPAGTRRWVELGDTPFCLALRLYGSEQGMQARFTGDVTARAFLGIDEL

SEQ ID NO: 68072 - protein, 333 aa, Pseudomonas putida
MTQTNRRFLLAKRPVGAVRRDDFSFETVPAEQPGEGQVLVRNLYLSLDPAMRGWMNEGKSYIPPVALGQVMRALGVGEVVASNHPGYQPGDHVSGALGVQDYFTGEPQGLHKIDPKLAPLPRYLSALGMTGMTAYFALLEVGQPKAGDTVVISGAAGAVGSIVGQIAKIKGCRVVGIAGGAEKCQYLKDELGFDGVIDYKAEDVLAGLKRECPKGVDVYFDNVGGDILDAVLTRINFKARIVICGAISQYNNKEAVKGPANYLSLLVNRARMEGFVVMDYTKDYGKAAQEIAGWLANGQVKSKEDVVEGLETFPETLLKLFSGENFGKLVLKV

SEQ ID NO: 68073 - protein, 809 aa, Pseudomonas putida
MTQNVLNERPAGQKPVALSSFRGCINGLYGDVLQGWAIDITQPDQRPVIEVFVDGASVALARADQHEPNAPHGDHFHGFTVQLRQSLLADANRITAQIANTGIHLEGEIELPSQPPQETAAVASQVWHTGGLRVGGWSWDPQAPHRHVVVTLREGSRVVAQVTCNTHHQALAYRATSDHGFAIDLPWELADGKLHVIEVTNDLGQSLPGSPIRLRCRPEGLEGLLHQLELKPDAAMQALVAEVAKEQSSRLPKSAGWQHYPRWYDAFQKREPIAAIPSRFRPGLLLLSEGDATLEKISLDSLGDDAESVHQLAKAAPADLLPAVEQLLAAGCDSIIQIAAGDKLAPRAMAQLRNLLEEGCAWAYADCDRDGPQGQRSQPWFKPVWDIDLFIGADIFSTGAIFSAAIVKEALALLKAGKKQSAINRHDLIAGIALATELNGRSVTHLPRVLYHRSSDTCTSPEQAAPSKQRKDAVAWLCQGLAPGAHVSAVPDYPALLRAHWPLPEQLPRVSLIVPTRDQYKLLHACIEGLLNNTDYPDLEIIVVDNQSTDPQTLAYLAELKQRGVKILAHPHPFNYSTINNRAASAATGELIGLVNNDIEIIESGWLKEMVSQALRPGIGAVGAKLLWPNRMVQHGGVVVGVNGLAAHAGNTLEQRDAGYLGMNQVTRRQSAVTAACLLLRKSLFDSIQGLDERAFPVAFNDVDLCLRIHELGLRNVWTAFAQLIHAESASRGKDISPEKMARAQREQQLFTERWSVSYRDPYYHPALSLDYLTGPYGGLSLPPEPEYCAPRKLASSETHGHIYLADPS

SEQ ID NO: 68074 - protein, 688 aa, Pseudomonas putida
MGRHAPVVQSRSFCGEESRMSDAKNSRVREYLVNLSRRKKRLVQVCADVVLIWLALWLSFIVRLGIDEMYNPVIKHAWLFMVAPLVAIPLFIRFGMYRAVMRYFGNDALVTIIKAVTLSSLILAVVVYWYSNHQVIVPRSIIFNYWWLSMVIIGGLRLIMRQYFLGDWFTGAHQIPFANRDDGLVKVAIYGAGTAGNQLLAALRMGRAMRPVAFIDDDSDLANRVISGLQVYKPKHLQQMIKETGAQEILLALPSVSRARRKEILALLEPYPLHVRSVPAFADLASGRVKVDDIQDVDIADLLGRDPVPAKEGLLERCIHKQTVLVTGAGGSIGSELCRQIIGLGPTTLLLFDHSEYNLYAILSELEQRVARESLPVRLLPILGSVRNQQHLAHVMSTWRVATVYHAAAYKHVPMVEHNMAEGILNNVFGTLCTAQAALQSGVANFVLISTDKAVRPTNVMGGTKRLSELILQALSREAAPVMYGDSSKIARVNKTRFTMVRFGNVLGSSGSVIPLFHKQIKAGGPITVTHPKITRYFMTIPEAAQLVVQAGAMGQGGDVFVLDMGEPVKIVELAEKMIHLSGLSVRSSGNPNGDIAIEFTGLRPGEKLFEELLIGDDVSPTVHPMIMVANEDYVTWDVLRERIAVLLNAVAVDDFGRIRQLLRELVNGYVPEGEIVDWIYQQQRQDS

SEQ ID NO: 68075 - protein, 923 aa, Pseudomonas putida
MGELAKEILPVNIEDELRQSYLDYAMSVIVGRALPDARDGLKPVHRRVLYAMSELGNDWNKPYKKSARVVGDVIGKYHPHGDTAVYDTIVRMAQPFSLRYLLVDGQGNFGSVDGDNAAAMRYTEVRMTKLAHELLADLHKETVDWVPNYDGTEQIPAVMPTRIPNLLVNGSSGIAVGMATNIPPHNLGEVIDGCLALIDNPEVTIDELMQHIPGPDFPTAGIINGRQGIIEAYRTGRGRIYMRARSEIEDIDKVGGRQQIVITELPYQLNKARLIEKIAELVKEKKIEGITELRDESDKDGMRIVIELRRGEVPEVVLNNLYQQTQLQSVFGINVVALVDGRPRLLNLKDLLEAFVRHRREVVTRRTVFELRKARERGHILEGQAVALSNIDPVIALIKASPTPSEAKEALVSTPWESSAVQVMVERAGADSCRPEDLPEQYGLHDGKYFLSPEQAQAILDLRLHRLTGLEHEKLLAEYQEILEQIGELIRILSSAERLMEVIREELEAIRAEYGDVRRTEILNASHDLNYGDMIPEEERVVTISHGGYAKTQPLSAYQAQRRGGKGKSATGVKDEDYIEHLLVANSHATLLLFSSKGKVYWKKTYEIPEASRAARGRPLVNLLPLEEGERITAMLQIDLEALQQNADLDEELDEAEDTVLEGELVEAEEVDEEDGDTPEWVAEPTGAYIFMATASGTVKKTPLVQFARPRSNGLIALKLKEGDTLIAAAITDGAKEVMMFSDAGKVIRFAESVVREMGRNARGVRGMKLGKGQRIISMLIPESGSQILTASERGFGKRTPLSKFPRRGRGGQGVIAMGTKGRNGLLIGAIQVQEGEEIMLISDQGTLVRTRVGEVSSLSRNTQGVTLIKLAADETLVGLERIQEPSEDELDEVIETDEEGVEAVAPDNENEEAAGADEAPQE

SEQ ID NO: 68076 - protein, 242 aa, Pseudomonas putida
MRRSGDSRGRRGQVVNSMAPVITIDGPSGSGKGTVAGLIARELGWKLLDSGALYRLLAFNASNHGVDLTNEELLTKLAAHLDVQFIAAEPGKLQQIILEGEDVSNVIRTETVGAGASMVASLPAVRDALLVRQREFREVPGLIADGRDMGTVVFPDAPLKVFLTASAEERARRRYLQLKGKGEDVSLSSLLDEIRARDERDTQRAVAPLKPAADAIQLDSTELSIEQVLQRIRSEIAQRDLI

SEQ ID NO: 68077 - protein, 97 aa, Pseudomonas putida
MKRICSIYKSPRKNEMYLYVLKADGLERVPEGLLPFFGTPVHAFDLVLTPERKLAREDITKVLENLESQGYHLQMPPLEDEYIEHLPEELLRRNDPV

SEQ ID NO: 68078 - protein, 748 aa, Pseudomonas putida
MKLSLVGLVIVAGFAVYLDAVVQEKFSGKRWTIPAKVYARPLELFTGQKLSKNDFLTELDALGYRRESAANGPGAASVNGNTVDLNTRGFQFYEGMEPAQFVRVRFSGDYVAGLSGANGKALDVVRLEPLMIGGIYPKNLEDRILIKIDQVPKYLLETLVATEDREFYSHFGVSPKSIVRAMWVNTSSGSMRQGGSTLTQQLVKNFYLSSERSLSRKLTEAMMAVLLELHYDKREILEAYLNEVFVGQDGQRAVHGFGLASQFFFSQPLSELKLHQIALLVGMVKGPSYYNPRRHPERALARRNLVLDLVAEQGVASQAEVDAAKKMPLGVTKRGSLADSSFPAFLDLVKRQLRQDYRDEDLTEEGLRIFTSFDPILQMKAETSMSETFKRLAGRKGADDVEAAMVVTNPETGEVQALIGSRQAGFAGFNRAIDAVRPIGSLVKPSVYLTALEQPSKYTLTSWVQDEPFSVKGADGQVWRPQNYDRRPHGTIYLYQGLANSYNLSTAKLGLEVGVPNVIKTIGRLGVNVDWPAFPAMLLGAGGMSPMQVATMYQTIANGGFNTPMRGIRSVLTAEGEPLKRYPFQIQQTFDPGAIYLVQNAMQRVMREGTGRSVYNTLPRSLTLAGKTGTSNDSRDSWFSGFSQDLLAVVWMGRDDNGKTPFTGATGALQVWTSFMKKADPLPLDMPQPDNVVQAWIDPYSGHGSDASCPGAVQMPYIRGSEPPAGAACGGEQDPVESVMDWVKGWMN

SEQ ID NO: 68079 - protein, 154 aa, Pseudomonas putida
MRGGLFMSTLEKQKANQNLYGVAPYQETKGEEYMGEPMRKHFTKILTGWKQELMVGVDKTVDHMKEEAANFADPADRASQEEEFALELRNRDRERKLIKKIDKTLQKIQDEEYGWCESCGIEIGLRRLEARPTADLCFDCKEIAEKKEKTVGKG

SEQ ID NO: 68080 - protein, 774 aa, Pseudomonas putida
MPLRPNPFVHALLLTTTLGLAMPAAQAETRSYHIAAGSLEDALNQFGRESGALISFGSQLTQGMSTQGLDGQYDTRQGLDALLRGSGLQARQETDNAFSLQPITAPAAGAAVELGASTVVGDWLAEAQQDNVFEHPGARDVVRREEFERNGATTAREVLNRIPGVNAPDNNGTGSHDLALNFGIRGLNPRLASRSTVLMDGIPVPFAPYGQPQLSLAPLSMGNMDAVDVVRGGGAVRYGPQNVGGIVNFVTRAIPEQATFKAAMQNQISPSSSHEGFKNSANLLVGGTNDNGLGGALLYSGTRGGDWREHSDTQIDDLILKGKLQLDEANSLHAMAQYYEGEADMPGGLSTADFDADPYQSTRLKDKFWGRRTLFNFGYDYKQDDRQFSVNSFFTKTLRSGYLDQGSFVSLSPREYWVRGIETRFSQGVALGDSWHELGIGYRYVNEAGHELRFREPVNGSLPTTASRNDRDTRGSTEAHAIYLDDRIDIGRWTITPGVRYEMIDSEQSNKLNGQRYQGSYNTALPALNVMYHLTDSWNLYANTEGSFGSVQYSQMPNRVSSGEVKPEKARTWEVGTRYDNGDLQAEIGAFLINFDNQYESNQTNDSVIARGETRHQGIETSVRYALDGLSPALAGFDVHASYAFVDATIREDGPNKGNQVPFSSRHKGNLGVGYTEGPWQLNLDGSFQSSQYADNANTSTESADGSTGRIPGYMLVSTRAGYDFGPQLSNLKVAVGVKNLFNREYYTRSYDDNNKGKYVGEPRTLYLQTSVEF

SEQ ID NO: 68081 - protein, 300 aa, Pseudomonas putida
MPSLTMTDSSYIGRFAPTPSGFLHFGSLVAALASWLDARAVNGRWLLRMEDTDPPREMPGARDAILQTLERYGLHWDGEVVFQSQRHDAYAAVVDRLFNMGLAYACTCSRKQLESYNGIYPGFCRNAGHAREGAAIRLRVPELIYRFTDRVQGEYQQHLGREVGDFVIQRRDGLYAYQLAVVLDDAWQGVTDIVRGADLLDNTPRQLYLQELLGFSQPRYLHIPLIVQPDGHKLGKSYRSPPLQAEHATPLLLRALRALGQETDPELLLATPAEVLAVARAQWRPEAIAQRTTVPEADLR

SEQ ID NO: 68082 - protein, 314 aa, Pseudomonas putida
MPHDAFWLPASEHCSLYVHQWLPATPVKAVVLLAHGMAEHAGRYQRLGQALSEAGFALFAADQRGHGRTAELGNLGLFARHHGWNAVVNDLGCVAQHIGQQFPCTPLFLFGHSMGSYIAQAYLLHHSGSLHGAILSGSNYQPAVLYRFARLIARLESWRQGPLGKSALIEWLSFGSFNNAFKPNRTAFDWLSRDPGEVDQYVNDPLCGFRCTNQLWLDLLQGLAQISQPGNLAQIDPNLPMLVIGGECDPVSAGKRLTHLADALRATGNRHVQLRVYPEARHEVLNETNRGEVIADILGWLEQALALGRPARSE

SEQ ID NO: 68083 - protein, 159 aa, Pseudomonas putida
MTIRAYVGLGSNLDAPAEQLRSALQALDQVEATRLVAASALYTSDSLLPGQPRYTNAVAALDTALAPLALLDALQAIENDQGRVRKERWGPRTLDLDILLFGDQVLDQPRLKVPHYHMHARPFVLYPLAELVPGDFRLADGRALAQLLDECPFVGLERL

SEQ ID NO: 68084 - protein, 280 aa, Pseudomonas putida
MQSFFTAPERGISYMPEVTLTTLNGLKAKGEKITMLTCYDATFAKAASQAGVEVLLVGDSLGMVLQGHDSTLPVTTAEMAYHTASVKRGNDGALILTDLPFMAHATPEQAFANSATLMQAGAHMVKIEGAAWLAETIRLLAERGVPVCAHMGLTPQTVNVLGGYKVQGRQEAQARQMRADAIALEQAGAAMLLLECVPSELAAEITNAVGIPVIGIGAGSATDGQVLVLHDMLGLSLSGRVPKFVKNFMQGQPDIHSALVAYVEAVKQVSFPGSEHGFSA

SEQ ID NO: 68085 - protein, 554 aa, Pseudomonas putida
MAYYRTPHDVTALPAWQALQKHRDAMQSFSMREAFAADAKRFDQFSLSACGLFLDYSKNLITEQSRDLLVNLANEVGLQDAIKSMFSGEIINASEGRPVLHTALRRPVGDKLSVNGVNVMPEVHKVLNQITELVGRIHDGLWRGYSEKPITDVVNIGIGGSFLGPELVSEALLPYAQRGVRCHYLANIDGSEFHELSANLRAETTLFIVSSKSFNTLETLKNAMAARTWYLAQGGSEAELYRHFIAVSSNKAAAVAFGIREENIFPMWDWVGGRYSLWSAIGLPIALAIGTANFKELLSGAYTMDQHFQTAPFDKNMPVLLALLGVWYGNFWDANSHAILPYDHYLRNITKHLQQLDMESNGKSVLQDGTPVKTDTGPVIWGGVGCNGQHAYHQLLHQGTQLIPADFIVPVVSFNPVADHHQWLYANCLSQSQALMLGKTREEAEAELRAKGLNEADIEKLAPHKVIPGNRPSNTLVVERISPRRLGALVAMYEHKVFVQSVIWGINAFDQWGVELGKELGKGVYQRLVGSLEDSAEDGSTQGLINYFRGRHRG

SEQ ID NO: 68086 - protein, 644 aa, Pseudomonas putida [sequence omitted]

SEQ ID NO: 68087 - protein, 137 aa, Pseudomonas putida
MSELPARPGRLNGLRHIALLVPNLEECERFYVDVLGMEVLNRANEDLVYLTCGNDNLSLGRGAGAANGLQTLDHYGFIVDSVEELEAWYQYFKAHGVTLLDRPFNHGDGARSFHLLDPAGNKVQPLYHPAVSGQRLV

SEQ ID NO: 68088 - protein, 306 aa, Pseudomonas putida
MEPPGRTCIYLLASLRKEQHMPLRLPKALLIAIGFALALAACSRIDLAYRNLDRLVPWSLSDYLDMNREQRALLDDRLREHLAWHCKTQLPGYLDWLDRLRDMVADDQVTDQALQQSTREVREAIGRLAEEITPSATELLRGMSDNQVAQMREAFREDISERQKQYVDTPLPKQMARRSERMEKRLTPWFGELTAVQKQRIQAWSQALGDQNREWIANRAHWQQQLLLAMNQRNDSSFEPRLATLLQRKESLWTPEYRAAYRNSEQQARSLLVDLVRQSTPQQRRFLQERLGKVRTHLSEMKCLKA

SEQ ID NO: 68089 - protein, 846 aa, Pseudomonas putida
MTQVTVKELAQEVEAPVERLLQQMREAGLPHTDAGQVVTDNEKQTLLTHLKSSHKSKAEEPRKITLQRKTTSTLRVAGSKSISVEVRKKKVFVQRSPEEIQAEQKRELDERRAAENAARDKVEAEVRQRNEEQARRQAAGSAAAAPAPAAKPEPAPAAAPVAAPAPVVADAPASEDAAARAAERKKDETRRNESRTRDDDRRRGEAPRVSIKVKVKEKEKAPTPRAAPRTTDEESDGARRGRGGKSKLKKRNQHGFQNPTGPVIRDVTIGETITVSELANQMSVKGAEVVKFMFKMGTPVTINQVLDQETAQLIAEELGHKVTLVSDTALEDSLAESLKFEGQTESRAPVVTVMGHVDHGKTSLLDYIRRAKVAAGEAGGITQHIGAYHVETDRGMVTFLDTPGHAAFTQMRARGAKATDIVILVVAADDGVMPQTREAVQHAKAAGVPLVVAVNKIDKPGADLDRIRNELSVEGVTSEDWGGDTPFVKVSAKMGTGVDELLEAVLLQAEILELTATPTAPGRGVVVESRLDKGRGPVATILVQDGTLRQGDMVLCGSNYGRVRAMLDENGKPVKEAGPSIPVEILGLDGTPEAGDELSVVADEKKAREVALFRQGKYREVKLARAHAGKLENIFETMGQEEKKTLNIVLKTDVRGSLEALQGSLGGLGNDEVQVRVIGGGVGGITESDANLALASNAVLFGFNVRADAGARKIVEQEGLDMRYYNVIYDIIEDVKKALTGMLGSDVRENILGVAEVRDVFRSPKFGAIAGCMVIEGTVYRNRPIRVLRDDVVIFEGELESLRRFKDDASEVRSGMECGIGVKSYNDVKVGDKIEVFEKVQVARTL

SEQ ID NO: 68090 - protein, 447 aa, Pseudomonas putida
MEINRHTGSYETFRRWTVVDEADLDDPAIETWLDKIKDTHPEAKVGDVIEEKIESIEFGRIAAQTAKQVIVQKVREAERAQVVDAYRERVGEIISGTVKKVTRDNVIVDLGNNAEALLAREDIIPRETFRVGVRLRALLKEIRTENRGPQLILSRTAPQMLIELFRIEVPEIAEGLIEVMAASRDPGSRAKIAVRSKDKRIDPQGACIGMRGSRVQAVSGELGGERVDIVLWDDNPAQFVINAMSPAEVAAIIVDEDAHAMDIAVAEDNLAQAIGRGGQNVRLASQLTGWTLNVMTEKDIQAKQQAETGDILRNFIEELEVDEELAQVLVDEGFTSLEEIAYVPLEEMLNIDGFDEDIVNELRARAKDRLLTKAIATEEKLADAHPAEDLLSLEGMDKDLAAELAVRGVVNREDLAEQSIDDLLDIDGIDEERAGKLIMAARAHWFE

SEQ ID NO: 68091 - protein, 261 aa, Pseudomonas putida
MKKLALLGALALSVFSLVSQAAEKPLKIGIEAAYPPFAFKQPDGSIAGFDYDIGNALCEEMKTKCTWVEQEFDGLIPALKVRKIDAILSSMSITDDRKKSVDFTKRYYLTPARLVMKDGTTVSDSLDELKGKKIGVQRGSIHDRFAKEVLGAKGATVVPYGTQNEIYLDVAAGRLDGTVADATLLEDGFLKTDAGKGFAFVGPAFTDAKYFGDGIGIAVRKGDKANVDRINAAIDAIRANGKYKEIESKYFNFDIYGPDSK

SEQ ID NO: 68092 - protein, 446 aa, Pseudomonas putida
MSRKYFGTDGIRGRVGEYPITPDFMLKLGWAAGMAFRKQGHCRVLVGKDTRISGYMFESALEAGLSAAGADVMLLGPMPTPAIAYLTRTFHAEAGIVISASHNPHDDNGIKFFSGQGTKLPDEVELMIEELLDQPMTVVESGKLGKVSRINDAAGRYIEFCKSSVPSSTSFEGLKLVVDCAHGATYKVAPSVFRELGADVTVLHAQPDGLNINEGCGSTHIESLQAAVLVGHADLGIAFDGDGDRVLMVDHTGAIVDGDELLFIIARDLQEHGKLQGGVVGTLMSNLGLELALKDLDIPFVRAKVGDRYVMAELLEREWLVGGENSGHVVCCNHTTTGDAIIAALQVLMALKRRGETLAQARQALRKCPQVLINVRFGASKVDPLEHPAVKEASAKVTEALAGRGRVLLRKSGTEPLVRVMVEGEDESQVRAHAEALAKLVGEVCV

SEQ ID NO: 68093 - protein, 392 aa, Pseudomonas putida
MNDVVIVAATRTAIGSFQGALATVPAVDLGAAVIKQLLKQTGLDPAQVDEVILGQVLTAGAGQNPARQAAIKAGLPFSVPALTLNKVCGSGLKALHLAAQAIRCGDAEVVIAGGQENMSLAPYVMPSARTGQRMGHGQLIDSMITDGLWDAFNDYHMGITAENLVDKYGLSREQQDAFAAESQRKAVAAIEAGRFDAEITPIVLPQKKGEPKVFARDEQPRPDTTAESLAKLRPAFKKDGSVTAGNASSLNDGAAAVLLMSAAKAEALGLPVLAKIAAYASAGVDPAIMGIGPVSATQRCLDKAGWQLAELDLIEANEAFAAQALAVGNALAWDAARVNVNGGAIALGHPIGASGCRVLVTLLHEMIKRDVKKGLATLCIGGGQGVALAIER

SEQ ID NO: 68094 - protein, 637 aa, Pseudomonas putida
MNDMAKNLILWLIIAAVLVTVMNNFSSPNEPQTLNYSDFIQQVKDGKVERVTVDGYIITGKRTDGDNFKTVRPAITDNGLIGDLVDNHVVVEGKQPEQQSIWTQLLVASFPILVIIAVFMFFMRQMQGGAGGKGGPMSFGKSKARLLSEDQVKTTLADVAGCDEAKEEVGELVEFLRDPGKFQRLGGRIPRGVLMVGPPGTGKTLLAKAIAGEAKVPFFTISGSDFVEMFVGVGASRVRDMFEQAKKHAPCIIFIDEIDAVGRHRGAGMGGGHDEREQTLNQLLVEMDGFEMNDGIIVIAATNRPDVLDPALLRPGRFDRQVVVGLPDIRGREQILKVHMRKVPIGENVNPAVIARGTPGFSGADLANLVNEASLFAARSNKRLVEMKEFELAKDKIMMGAERKTMVMSEKEKRNTAYHEAGHAIVGRLVPEHDPVYKVSIIPRGRALGVTMFLPEEDRYSLSKRALISQICSLYGGRIAEEMTLGFDGVTTGASNDIMRASQLARNMVTKWGLSEKLGPLMYAEEEGEVFLGRSAGSQHASVSGETAKLIDSEVRSIIDQCYATAKQLLIDNRDKLEAMTEALMKYETIDADQIDDIMAGRTPREPRDWDDDKHSGTPAAQDERPESPIGGPAAEH

SEQ ID NO: 68095 - protein, 325 aa, Pseudomonas putida
MQMPIPVTVLTGFLGAGKTTLLKYMLKAEHGLKLAVIENEFSEAGIDSQLLGEQPVQVMTLANGCVCCSIHGDLTRALYLLLERLDAGEIAFDRLVIECTGLADPAPVAQTFFIDEELRERYILDGIITLVDAAHAELHLTQTIAQAQVGFADRLLLSKTDLVEPAAVEALRERLARINSRAAIRVVEHGCIDLAELLDVRGFNLNPDLGVNLKPMLRPVLKPATPDRISTMVLRTEAPLDIDRLSSFMNELLETHGKQLLRYKGVLNIAGEERKLVFQGVLKLYGFDWDAEWAAGEARESVMVFIADELPEATIRAGFEAMAAG

SEQ ID NO: 68096 - protein, 65 aa, Pseudomonas putida
MFNDLGRLGKYLGQAARLMVGMPDYDNYVEHMQKTHPDKPVMSYEAFFRERQEARYGGKSGPKCC

SEQ ID NO: 68097 - protein, 688 aa, Pseudomonas putida
MNNNNSLLRHIPWLALAVIGACALGVVALRRGEAINALWIVVAAVAIYLVAYRYYSLFIATKVMQLDPRRATPAVLNNDGLDYVPTNKHILFGHHFAAIAGAGPLVGPVLAAQMGYLPGTLWLIAGVVLAGAVQDFMVLFLSTRRNGRSLGDMVREEMGRIPGTIALFGCFLIMIIILAVLALIVVKALAESPWGMFTVMATIPIAMFMGIYMRYIRPGRIGEISVVGVVLLLASIWLGGVIAADPVWGPAFTFTGVQITWMLVGYGFVAAVLPVWLVLAPRDYLSTFLKIGTILGLAIGILIIAPELKMPALTQFTDGTGPVWKGTLFPFLFITIACGAVSGFHALISSGTTPKLLDNETNARYIGYGGMLMESFVAIMAMVAASVIEPGVYFAMNSPAAVVGTDVASVAQTVSSWGFLITPEQLEAVARDIGEHTILARAGGAPTLAVGIAQILHQVLPGENTMAFWYHFAILFEALFILTAVDAGTRAGRFMLQDLLGSFVPALKRTESWGANLLATAGCVALWGYLLYQGVIDPLGGINTLWPLFGISNQMLAGIALMLGTVVLIKMKRQRYIWVTLLPAVWLLICTTAAGLIKLFDPNPAVGFLALAKKYSTALDAGQVLAPAKDIGQMQHVIFNAYTNAGLTILFLLVVFSILFFAIKVGYAALGRKERSDKETPFQALPDA

SEQ ID NO: 68098 - protein, 343 aa, Pseudomonas putida
MTGYQEILTDPSYAQQIVTLTYPHIGNTGTTPEDAESSRVWSAGLVIRDLPLLASNWRNTQSLPEYLKANNVVAIAGIDTRRLTRILREKGAQNGCILAGDNISEEAAIAAARGFPGLKGMDLAKVVSTKERYEWRSSVWELKTDSHPTIDAADLPYHVVAFDYGVKLNILRMLVARGCRVTVVPAQTPASEVLALNPDGVFLSNGPGDPEPCDYAIQAIKEILETEIPVFGICLGHQLLALASGAKTVKMGHGHHGANHPVQDLDTGVVMITSQNHGFAVDEATLPGNVRAIHKSLFDGTLQGIERTDKSAFSFQGHPEASPGPTDVAPLFDRFTDAMAKRR

SEQ ID NO: 68099 - protein, 456 aa, Pseudomonas putida
MAKAKRLYGCTECGATFPKWAGQCGECGAWNTLVETMIESGGAAAPSSGRAGWTGQQAQIKTLAEVSVEEIPRFTTSSTELDRVLGGGLVDGSVVLIGGDPGIGKSTILLQTLCNIAVGMPALYVTGEESQQQVAMRSRRLGLPQDQLKVMTETCIETIIATARVEKPRVMVIDSIQTIFTEQLQSAPGGVAQVRESTALLVRYAKQSGTAIFLVGHVTKEGSLAGPRVLEHMVDTVLYFEGESDGRLRLLRAVKNRFGAVNELGVFGMTDRGLKEVSNPSAIFLNRTQEEVPGSVVMATWEGTRPMLVEVQALVDDSHLANPRRVTLGLDQNRLAMLLAVLHRHGGIPTHDQDVFLNVVGGVKVLETASDLALLAAVMSSLRNRPLAHGLLVFGEIGLSGEVRPVPSGQERLKEAAKHGFKRAIVPKGNAPKEAPAGLQVIAVTRLEQALDALFE

SEQ ID NO: 68100 - protein, 374 aa, Pseudomonas putida
MPLLTTPYAELDLIRQPEQANDPLQAFDAADEYLLAQLHDQAPDANCRVLVLNDSFGALAASLAGQLQVVSSGDSHLGHLALEKNLARNGLPFDSVPFVPASEHWQGPFDRVLVRVPKTLALLEEQLIRLQGQLAPGAQVIAGAMIKHLPRAAGDLMEKYIGPVQASLALKKARLLTATVAERPLAKSPYPSCYRLDAPALDLVNHANVFCREGLDIGTRAFLPHLPRNLGRARVADLGCGNGVLAIASALANPEAEYTLVDESYMAVQSAQENWLAALGERPATFLAADGLAGLEKQSLDVVLCNPPFHQQQVVGDFLAWRMFQQAREALVVGGALYIVGNRHLGYHSKLARLFRGVEQVAATPKFVILKARK

SEQ ID NO: 68101 - protein, 467 aa, Pseudomonas putida
MQFAFTVSFHILFPAITIGLASYLAVLEGLWLRTHNQVYRDLYHFWSKIFAVNFGMGVVSGLVMAYQFGTNWSRFSDFAGAVTGPLLTYEVLTAFFLEAGFLGVMLFGWNRVGRGLHFFSTVMVALGTLVSTFWILASNSWMQTPQGHEIIDGRVVPVDWFAVVFNPSFPYRLMHMATAAFVSTAFFVGASAAWHLLRGRDNPAVRKMLSMAMWMALIVAPIQAVIGDFHGLNTLKHQPVKIAAIEGHWENVPGEPTPLILFGIPDMEAETTRFKIEIPALGSLILTHSLDKQVPAMKEFPPEDRPNSTIVFWSFRIMVGLGFLMIFVGLWSLWLRKRGTLYSSRPFLHVALWMGPSGLVALLAGWFTTEIGRQPWVVYGLMRTADGVSNHSYAQLGFTLVAFVVVYFALFGTGLGYMMRLVRKGPQTGEGDEHTPGGPGQKRTPARPLSAADDGREATSASLNEGN

SEQ ID NO: 68102 - protein, 160 aa, Pseudomonas putida
MAKQKKHPTGTIAQNKKARHDYFIEHKFEAGLVLSGWEVKSLRAGKAHLTDSYVLLKDGEAWLFGSHITPLTTASTHVIADPTRTRKLLLNKRELERVEAAVAQKGYTCVALALYWSKHLIKCEIALGKGKKEFDKRDTMRERDSNRELQRAVRNKGKEE

SEQ ID NO: 68103 - protein, 381 aa, Pseudomonas putida
MIISASTDYRAAAQRKLPPFLFHYADGGAYAEHTLRHNVSDLAGIALRQRVLNNMSELSLETKLFDETLSMPVALAPVGLTGMYARRGEVQAARAAAAHGIPFTMSTVSVCPIEEVAPAINRPMWFQLYVLKDRGFMRNALERAKAAGVKTLVFTVDMPVPGARYRDAHSGMSGKNGPLRRVLQAMTHPEWAWDVGVMGRPHDLGNISKYRGNPTGLADYIGWLGNNFDPSISWKDLEWIREFWDGPMIIKGILDADDARDAVKFGADGIVVSNHGGRQLDGVLSSARALPAIADAVKGDLKILADSGIRSGLDVVRMIALGADTVLIGRAFLYALAVHGQAGVKNLLELFEKEMRVAMVLTGAKSISEITRDSLVRELGA

SEQ ID NO: 68104 - protein, 123 aa, Pseudomonas putida
MSSTSSAAATARLDRILADAKRDKEMGYRDKALRMYPHVCGRCAREFAGKRLSELTVHHRDHNHDNNPQDGSNWELLCLYCHDNEHSRYTDQQYFSEGSTSTPSIAKATHNPFAGLAGMLKKD

SEQ ID NO: 68105 - protein, 489 aa, Pseudomonas putida
MSISSTIKSIQDIMRKDVGVDGDAQRIGQLVWLLFLKIFDDRELEWELMDDNYKSPIPDSCRWRTWAADPEGMTGDALKDFIDNNLFPQLQNLHEYSNTPSAFVVRSVFEDAYNYMKSGQLLRQVINKIQEGVDFNRAQERHEFGNLYEQLLRDLQNAGNAGEFYTPRPVTEFMVRMVDPKLAEKVMDPACGTGGFLTCAIEHKRRRYVKTAEDERTLQASIFGVEKKPLPHLLATTNMILHGIEVPSQIRHDNTLSKPLISWGPSERVHCIVANPPFGGMEEDGIETNFPAAFRTRETADLFLVLIMQLLKDGGRAAVVLPDGFLFGEGIKSRIKEKLLTECNLHTIVRLPNGVFNPYTGIKTNLLFFTKGTPTKQVWFYEHQYPAGVKNYSKTRPMRIEEFAVEEAWWGSEADGFAARAENAFAWQVSVEELQARNWNLDCKNPHTGEQVSHDPDELLRNYASVQDEISDLRDQLKAVLAEALRRKV

SEQ ID NO: 68106 - protein, 547 aa, Pseudomonas putida
MAKAADVVVQCLENEGVEYVFGIPGEENLDLLESLRKSKIKLVLTRHEQSAGFMAATYGRLTGKTGVSLSTLGPGATNLVTASAYAYLGGMPMMMITGQKPIKKSKQGRFQIIDVCGMMDPITKYTHQFASADNIPARMREAFRLAEEEKPGAVHLELPEDIAAEQTDALPIPRSLHRRPLAEHVAIEAAVEKLQNARNPILVIGAGANRKMTAKVLKQLIDKTGIPFITTQMGKGVVDERHPRFLGNAALSSGDFVHRAVEAADLIINIGHDVIEKPPFFMVRGGTEVIHINFRSAEVDAVYFPQVEVIGDIANAVWQISEALNDTSHWDFTRLMAIREANEAQIAEGADDDRFPVYPQRMVADIRRVLPSEGIVALDNGIYKIWFARNYKAHKPNTVLLDNALATMGAGLPSAMAAHLVHPDRPVISVCGDGGFMMNSQELETAVRLGMHITVVILRDDGYGMIRWKQANMGFTDFGLDYGNPDFVKYAEAYGANGHRVESAEGLLPLLEHCIKTPGVHVIDCPVDYSENDRILNSELRERALAV

SEQ ID NO: 68107 - protein, 268 aa, Pseudomonas putida
MRMCRRVVTVLALSLPLAAWAEVPVVDDNAGSYPPAGYGTSGAYAGSGASAPASAQGQLFMQLQQMQDQLSRQQGIIEELQNDVSRMKQENLERYQDLDRRINSGAAPAATPDNSSGGGASNAAPDAAAGAAAQQPAGSSQPGDPAKEKLYYDAAFDLIKQKDFDKASQAFNAFLRKYPNSQYAGNAQYWLGEVNLAKGDLQGASQAFAQVSQKYPKHSKVPDSLYKLADVERRMGHTDKVKGILQQVVTQYPGTSAAQLAQRDLQKL

SEQ ID NO: 68108 - protein, 418 aa, Pseudomonas putida
MNRNLKQAFFSALLVWAVAFPVLGLKLSIDGISLVVHSQGSFTISIIAVCSVLMFLRVLFDKQWSSVMGRRSDRKLIPPAVSNYLTLPKTQRYVIIGLIVVALVWPFFGSRGAVDIATLILIYVLLGLGLNIVVGLAGLLDLGYVGFYAVGAYSYAMLSHYLGWSFWVCLPIAGLMAATFGFLLGFPVLRLRGDYLAIVTLGFGEIIRLFLRNLTDWTGGPNGISNIPKPEFFGLTFERRAAEGMQTFHEFFGLQYNSINKVIFLYLVALLLALLALFVINRLLRMPIGRAWEALREDEIACRALGLNPTVIKLSAFTLGACFAGFAGSFFAARQGLVTPESFTFIESAIILAIVVLGGMGSQLGVILAAIVMILLPELMREFSEYRMLMFGALMVLMMIWRPQGLLPMQRPHMELRR

SEQ ID NO: 68109 - protein, 372 aa, Pseudomonas putida
MQQREPSASESYFWPSVWAIGLHVLVFALLFVSFAMTPELPPSKPIVQATLYQLKSKSQATTQTNQKIAGEAKKTASRQTEVEQLEQKKVEQEAVKAAEQKKADAAQKAEEAREAAEAKKAEDAAKAAEAAKAAEAKKAAEAKKADEAKKAAEKQQADIAKKKAEDEAKKKAEEEAKKAAAEEAKKKAAEDAKKKAAEEAKKKAAEDAKKKAAAEDAKKKAAEEAKKKAAADAQKKKAQEAARKAAEDKKAQALAELLSDTTERQQALADEQGDQVAGDFDDLIRMRAAEGWARPPSARKGMTVVLQINMLPDGTITNVSVARSSGDGPYDSSAVAAVKNIGRLTEMQGMKPSDFNQYRSFKMTFTPEDLAL

SEQ ID NO: 68110 - protein, 678 aa, Pseudomonas putida
MQQSPDHRPSPWHAGEKTLQEKVGVAERMEAFGQKVIRDHMPDQHRTFYHQLPFMVAASVDAQGRPWATLLEGPEGFVSSPDPRMLTIHTTLPADDPATPGLAAGQAVGLLGIELHTRRRNRINGQIRHAAQGQLQVAVEQAFGNCPQYIQLRDYTRVTEPALGRIDATTLDTSTVSMIQAADTFFVASYVEHAYGQRSVDVSHRGGRPGFIKVEGNRLTIPDYAGNLHFNTLGNLVVNPRAGLLFIDFKNGNVLQLYGRAEVLLDSPAIQAFEGAERLWTLQVEKVVWRPAAVALRWAFKEYAPTSLMTGTWAEADARLEQRQQQRQWLAWRVLRVEQESRDIRSFYLEPPAGCRVAFAPGQHLPVQVPRDGESALIRTYSLSSAPDDGFLRISVKAQGPASRYLHERVVAGDVLNVRPPMGSFTLDQQSTRPLVLIGAGVGITPLLAMLRQQLRTGQARRIHLFHGARSLADLPFQQELAALRQQAGDLLQVHRALSQPEGHAQVGRDYEFAGRLGIEQVKATLALDDYDFYLCGPGSFTQQLYEGLRGVHVPDARIHAEAFGPSTLRRHTDADQPVLQQPPAADEPVPVYFAASAKEARWVPGSGTLLELAEARGLAPEFSCRGGSCGTCKTRLVSGQVHYPNPPAELPEAGSVLICCAVPAKVEEGMQALVLDV

SEQ ID NO: 68111 - protein, 537 aa, Pseudomonas putida
MSGKFKKQLSLLDLTFIGLGAIFGSGWLFAASHVSAIAGPAGILSWFLGGFAVLLLGIVYCELGAALPRAGGVVRYPVYSHGPLLGYLMGFITLIAFSSLIAIEVVASRQYAAAWFPGLTKAGSSDPTVLGWLVQFALLGLFFFLNYRSVKTFAKANNLVSVFKFIVPLLVIGVLFTFFKPENFEVQGFAPFGLSGVEMAVSAGGIIFAYLGLTPIISVASEVKNPQRTIPIALILSVLLSTAIYALLQLAFLGSVPTEMLANGWASVTKELALPYRDIALALGVGWLAYLVVADAVISPSGCGNIYMNATPRVIYGWAQTGTFFKYFTRIDAESGIPRPALWLTFGLSVFWTLPFPSWEALINVVSAALVLSYAVAPVSVAALRRNAPHMPRPFRVKGMTVLGPLSFIIAALIVYWSGWNTVSWLLALQIVMFVLYLLCSRFVPTQHLSLGQQVRSSAWLIGFYALTILLSWLGSFGGLGVIGHPFDTVVVAACALGIYYWGAATGVPAHLVRLEGDDESEACAETSNGRPVAVAS

SEQ ID NO: 68112 - protein, 308 aa, Pseudomonas putida
MKQIHVIDSHTGGEPTRLVMKGFPQLRGRSMAEQRDELRELHDRWRRACLLEPRGNDVLVGALYCPPVSADATCGVIFFNNAGYLNMCGHGTIGLVASLQHMGLITPGVHKIDTPVGQVSATLHEDGAITVANVPSYRYRQQVAVDVPGHGVVRGDIAWGGNWFFLVSEHGQRIELDNREALTEYTWAMLKALETQGVTGENGAPIDHIELFADDPNADSRNFVMCPGKAYDRSPCGTGTSAKLACLAADGKLAEGQTWVQASITGSQFHGRYARDGERIRPFITGRAYMTADSTLLIDEQDPFAWGI

SEQ ID NO: 68113 - protein, 157 aa, Pseudomonas putida
MAIDIGISEEDRKSIVDGLSRLLSDTYVLYLKTHNFHWNVTGPSFRTLHLMFEEQYNELALAVDSIAERIRALGFPAPGSYAFYARHSSIKEEEGVPPADEMIRQLVQGQEAVVRTARSIFPVVDKVSDEPTADLLTQRMQVHEKTAWMLRVLLDDK

SEQ ID NO: 68114 - protein, 197 aa, Pseudomonas putida
MFKIVHLVTGVAALLLSLIPSLKTDATPFLQQPDAVYLALLGLLNLVLAPVVPLYHRGARQQLQHLACALLVVAVVLQTLTLLARPEMGNLAALVCAALAVAVHLAVGFARSTRKARGTQHVAQDAGNRDTGTVKWFNTSKGFGFISRDSGDDIFVHFRAIRGEGHRILVEGQRVEFSVMHRDKGLQAEDVVAVNRR

SEQ ID NO: 68115 - protein, 615 aa, Pseudomonas putida
MGLLVAAVGVVYGDIGTSPLYTLKEVFTGGYGVSVNHDGVLGILSLILWSLLWVVSFKYVMFILRADNQGEGGTMALTALARRATAAYPRLRTLMVICGLIGASLFYGDSMITPAVSVLSAVEGVGLAFDGIDHWVVPISLVVLVALFLVQRHGTEKIGKLFGPIMVTWFLALGALGVHGISQSPEVLKAFNPAWAVNFFVVHPGIGVAILGAVVLALTGAEALYADMGHFGRKPIARAWFILVLPALVLNYFGQGALLLQNPEAARNPFYLLAPGWALLPLVGLATMATVIASQAVISGAFSLTRQAIQLGYIPRMQIQHTSSDEQGQIYIGAVNWTLMVGVVLLVIGFESSGALAAAYGVAVTGTMLITTVLVSAVMLLLWKWPPLLAVPILVGFLLVDGLFFAANVPKIAQGGAFPVLAGGVLYLLMSTWKRGKQILVERIDEGALPLPLFISSIRIQPPHRVEGTAVFLTARSDAVPHALLHNMLHNQVLHSQVVLLTVVSEDRPRVPEHERFEVEAYGDGFFRVLLHFGFMDEPDVPAALKLCHLDGLDFTPMRTTYFLSRETVIASRLEGMSRWRGNLFAFLLKNANGNLRFFNLPLNRVIELGTQVEI

SEQ ID NO: 68116 - protein, 435 aa, Pseudomonas putida
MIRSSNMREKLLAAAIIGTFSSQAFSGTVTTDGADIVLKTKGGLEVSTSDKEFSFKLGGRVQADYGRFDGVFTKNGDTADAGYFRRAYLELGGVLYRDWKYQLNYDLSRNTGNDSDGYFDEASLTYTGFKPVQLRFGRFYTDFGLEKATSSKWTTAMERNLSYDLADWINDNAGMGVQATSTIADMAYVSGSVFSETNNNSDGDSTKRYNVRGVFAPLHSDGNVLHVGAQYAYRDLKNSAVDTRIRSRLGVRGVDTNGGGDAGTNGNRMLFGGAAAQDGLWKDDSVWGLEGAWATGPFSVQAEYLRRKLKADQANNDMKASGYYAQMAYTLTGEPRIYKLDGAKFDTIKPENKELGAWEVFYRFDDIKVEDGNLVTAADQSNERKAKSHTVGVNWYVNEAVKVSANYINVRTDNNENTVGDDSGNAIVTRLQYVF

SEQ ID NO: 68117 - protein, 463 aa, Pseudomonas putida
MHPMLKKLFQSFRPPVPGPHHRRTTPEVINKSQHSLQRHQFSRHAVNIVERLQSAGYQAYLVGGCVRDLMLGITPKDFDVATSATPEQVRAEFRNARIIGRRFKLVHVHFGREIIEVATFRAHHSEDDQGDAHRSSHNASGRILRDNVYGTLEEDAQRRDFTINALYYDPVSERILDYANGVHDVRNRLLRLIGDPTHRYQEDPVRMLRAVRFAAKLDFGIEKHTYLPIRGLAPMLREIPPARLFEECLKLFLSGQGAIAFEMLVDLELFEPLFPASAHALDERPTYTHTLISQALNNTDLRVKQGKPVTPAFLFAALLWPALPARVLHLQNQGVPPIPAMNGAAHDLIAEQCARIAIPKRFTLPIREIWDMQERLPRRSGKRADMLLDNPRFRAGYDFLLLRESAGEETDELGQWWTDYQDANDSERREMIRELGSRDESAGPRKRKRSGSKRKRSGDEAFE

SEQ ID NO: 68118 - protein, 539 aa, Pseudomonas putida
MSDYIQEQGAAASSSSRREERKIIFASSLGTVFEWYDFFLYGALAAVISKQFFAGVNDTTAFIFALMAFAAGFLVRPFGALVFGRLGDMIGRKYTFLVTIVLMGLSTFAVGLLPTYASIGIAAPIILVILRMLQGLALGGEYGGAATYVAEHAPPGKRGLHTGFIQSTATLGLLLSLLVVLGSRYISGDQFETWGWRLPFLLSIVLLAISTWIRMSMHESPAFVKMKAQGKVSKSPIRESFTSWPNLKVVLTALFSINAGQAVTFYTAQFYVLFFMTQMLKMDSAQANTLLIISVVIGAPFFVFFGWLSDRIGRKPILMLGLLLATVLYFPLFKALSHYANPQIDAASRQAPIVVTADPQGCTFQFDPVGKARFDSPCDKVKTFLVKQGLPYSSVSVAGSEVVVNIGDKTINGFDETAMRAAIEQAGYPAKADPAQVNQVMVVVLIVAMILIATMTYGPLAAVMVELFPTRIRYTSMSLPYHIGNGWFGGFLPTVSFALVVYTGDIFYGLWYPVLVTGISLVVGIFCLRETKDVDIDKV

SEQ ID NO: 68119 - protein, 157 aa, Pseudomonas putida
CKQNRGCVQSRTLNFLGSTCLTQLRRAVPALCAMPANTHHYKALGEQDYRRNTMSYAVIVTGGKQYKVAEGEFLKIEKLEVATGESVTFDRVLLVANGEEVTIGAPVVAGAKVVAEVVSQGRHDKVRIIKFRRRKHHMKRMGHRQWFTEIKITGIQA

SEQ ID NO: 68120 - protein, 165 aa, Pseudomonas putida
MPNWTLQPVARDAIAEVLAFVDSARRALFPMLANAPLPRDLAHFADTYLDGAGCFLEAREGGRLVAVIGYLPYDHRFAQLDYRAERVVEVVRLFVLPAYRRHGLAAALFGALRERAMQAGLDCLYLHTHPFLPGAIAFWERQGFTVVDVEQDPVWQTTHMQLRLR

SEQ ID NO: 68121 - protein, 177 aa, Pseudomonas putida
MAKRWYVVHAYSGYEKHVMRSLIERVKLAGMEDGFGEILVPTEEVVEMRNGQKRKSERKFFPGYVLVQMEMNEGTWHLVKDTPRVMGFIGGTADKPAPITDKEAEAILRRVADGSDKPKPKTLFEPGEVVRVIDGPFADFNGSVEEVNYEKSRLQVAVLIFGRSTPVELEFSQVEKV

SEQ ID NO: 68122 - protein, 63 aa, Pseudomonas putida
MKKLFKATVAVAVVSGVALLSGCTGQVYNQPKNCTYDYLFHPSVSISKIIGGCGPIDKLPQQQ

SEQ ID NO: 68123 - protein, 868 aa, Pseudomonas putida
MHEQYTPRDIEAAAQKFWDEQQSFAVTEQPGKDTYYCLSMFPYPSGKLHMGHVRNYTIGDVIARYQRMLGKNVLQPMGWDAFGMPAENAAMKNNVAPAKWTYENIDYMKTQLKSLGLAIDWAREVTTCKPDYYRWEQWLFTRLFEKGIIYRKNGTVNWDPADQTVLANEQVIDGRGWRSGALIEKREIPMYYFRITDYADELLESLDELPGWPEQVKTMQRNWIGKSRGMEVQFPYDKASIGHEGTLKVFTTRPDTLMGATYVAVAAEHPLATQAAQGNPALQAFIDECKSGSVAEADMATQEKKGMATSLLVEHPLTGEKLPVWVANYVLMHYGDGAVMAVPAHDERDFEFAHKYNLPVKAVVRTSAGDEVGSEWQAAYGEHGQLINSAEFDGLDFAGAFDAIEAALIRKELGKSRTQFRLRDWGISRQRYWGCPIPIIHCPSCGDVPVPEDQLPVTLPENVVPDGAGSPLARMPEFYECSCPKCGAAAKRETDTMDTFVESSWYFARYASPNYDKGLVDPKAANHWLPVDQYIGGIEHAILHLLYARFFHKLMRDEGLVTSNEPFKNLLTQGMVVAETYYRVASNGGKDWFNPADVEIERDAKAKIIGARLKTDGLPVEIGGTEKMSKSKNNGVDPQSMIEAYGADTCRLFMMFASPPDMSLEWSDSGVEGASRFLRRVWRLAQAHVSQGLPGKLDVAALDDAQKVIRRAIHAAIKQASTDVGQFHKFNTAIAQVMTVMNVLEKAPQATEQDRALLQEGLEAVTLLLAPITPHISHALWQHLGHAGSVIDAAWPSVDEQALVQDSITLVVQVNGKLRGQVEMPAAASREEVEAAARSNENVLRFIDGLTIRKVIVVPGKLVNIVAN

SEQ ID NO: 68124 - protein, 553 aa, Pseudomonas putida
MVISHQLMLRAGMIRKLASGLYTWLPMGLRVMRKVEAVVREEMNAAGALEVLMPSIQPAELWQESGRWEQYGPELLRLKDRHQRDFCVGPTHEEVITDLARNELSSYKQLPLNLYQIQTKFRDEIRPRFGLMRGREFIMKDAYSFHADQASLQETYDRMHQAYSNVFTRLGLDFRPVQADTGSIGGSYSHEFHVLAESGEDDVIFSDSSDYAANIEKAEAIPRETVRPAPTEELRLVDTPNAKTIAQLVENHGLPIEKTVKTLIVRGAEEGKLIALIVRGDHELNEIKATKLEQVADPLVMATEAELRDAIGAGAGSLGPLNLPLEIIIDRSVALMSDFGIGANIDDKHYFGVNWERDLPVPQVADLRNVVEGDPSPDGQGTLVIKRGIEVGHIFQLGTKYSEALKCQVLGENGKPVVLSMGCYGIGVSRVVAAAIEQSYDDKGIIWNDALAPFQIALVPLRYETDVVREATDKLYAELTAAGYEVLLDDRDKKTSPGIKFADMELIGIPHRIVVSDRGLAEGNLEYKHRTEQDAQALPLNEVLTFLQARVRR

SEQ ID NO: 68125 - protein, 460 aa, Pseudomonas putida
MNAPFAPQRQTRDYQAADAAHHIHAFLDQKALNAEGPRVIVGGERLHLWDSEGKRYLDGMSGLWCTQLGYGRRDLTAAAATQMDQLAYYNMFFHTTHPAVIELSELLFSLLPGHYSHAIYTNSGSEANEVLIRTVRRYWQVVGQPGKKIMIGRWNGYHGSTLAATALGGMKFMHDMGGLIPDVAHIDEPYWYAEGGELTPAEFGRRCALQLEEKILELGAENVAGFIAEPFQGAGGMIFPPESYWPEIQRICRQYDVLLCADEVIGGFGRTGEWFAHEYFGFEPDTLSIAKGLTSGYVPMGGLVLSKRIAEALVERGGVFAHGLTYSGHPVAAAVAIANLKALRDEGIVRQVKDDTGPYLQRILREVFADHPLIGQVQGAGLVAALQFAEHKPTRKRFANENDLAWQCRTFGFEEGVIIRSTLGRMIMAPALIANHSELDELVEKTRIAVDRTARLVGKL

SEQ ID NO: 68126 - protein, 554 aa, Pseudomonas putida
MEREYMEFDVVIVGAGPAGLSAACRLKQKAAEAGSEISVCVVEKGSEVGAHILSGAVFEPRALNELFPDWKELGAPLNTEVKRDDIYVLKDAGSATKVPDLFVPKTMHNHGNYIISLGNLCRWLAQQAENLGVEIYPGFAAQEALFDDNGVVRGIVTGDLGVDREGNPKDGLYTPGMELRAKYTLFAEGCRGHIGKQLIKRFNLDSESDVQHYGIGLKEIWEIDPAKHEQGLVVHTAGWPLDVVAKENTGGSFLYHLENNQVVVGLIVDLSYANPYLSPFDEFQRLKHHPVISQYLEGGKRISYGARALAKGGINSLPKMVFNGGALIGCDLGTMNVAKIKGSHTAMKSGMLAAEAVADALIAGSEGGDQLNSYVSAFKASWLYEELFASRNFGPAMHKFGPLLGAAFNYVDQNWFGGKLPFTLHDTKPDYACLKLAADSKKIDYPKPDGKLSFDKLSSVFLSSTNHEEEQPCHLKLTDPSVPIASNLPLYDEPAQRYCPAGVYEVVTQEDGNKRFQINAQNCVHCKTCDIKDPAQNITWVTPEGAGGPNYPNM

SEQ ID NO: 68127 - protein, 567 aa, Pseudomonas putida
MSKPTADNAPNAAAKGAPAVPANFLRPIIQADLDSGKHSSIVTRFPPEPNGYLHIGHAKSICVNFGLAKEFGGVCHLRFDDTNPAKEDQEYIDAIQSDVKWLGFEWGGDVRYASDYFDQLHDWAVELIKRGKAYVCDLTPEQAKEYRGNLKEPGKNSPFRERSVEENLDLFARMKAGEFKDGERVLRAKIDMASPNMNLRDPILYRIRHAHHHQTGDKWCIYPNYDFTHGQSDAIEGITHSICTLEFEGHRPLYDWFLDNLPVPAHPRQYEFSRLNLNYTITSKRKLKQLVDEKHVDAWDDPRMSTLSGFRRRGYTPASIRNFCEMIGTNRSDGVVDMSMLEFSIRDDLDRTAPRAMCVLRPLKVVITNYPEGQVEQLELPRHPKEDMGVRVLPFSRELYIDRDDFMEEPPKGYKRLEPAGEVRLRGSYVIRADEAIKDADGNIVELRCSYDPDTLGKNPEGRKVKGVIHWVPAEGSVECEVRLYDRLFRSPNPEKTEEGGSFLDNINPASLQVLSGCRAEPSLAQAQPEDRFQFEREGYFCADLKDSQPGRPVFNRTVTLRDSWGS

SEQ ID NO: 68128 - protein, 257 aa, Pseudomonas putida
  MISC_FEATURE (20)..(20): X=any amino acid
  MISC_FEATURE (21)..(21): X=any amino acid
  MISC_FEATURE (23)..(23): X=any amino acid
RSAAISSPHKTGACRSAMSXXFXWRSFAGHFVGALGSEAGITPNFDRLAQEGVLFRRFFANGTHTHQGMFASMACFPNLPGFEYLMQTPEGGHQFSGLAQLLSTRDFDDLYVYNGDFAWDNQRGFFSNQGMTRFIGRNDFVDPVVSDPTWGVADQDMFDRAAEELFKQDPKKPFYALLQTLSNHTPYALPGVLPVEPVTGQGSLDQHLTAMRYSDWALGRFFEKARKAPYFKDTLFVVVGDHGFGAQEQLTEMDLYR

SEQ ID NO: 68129 - protein, 357 aa, Pseudomonas putida
TFLPTLSPGSLSMFKKLRGMFSSDLSIDLGTANTLIYVRERGIVLNEPSVVAIRTHGNQKSVVAVGTEAKRMLGRTPGNIAAIRPMKDGVIADFSVCEKMLQYFINKVHENSFLQPSPRVLICVPCKSTQVERRAIRESALGAGAREVFLIEEPMAAAIGAGLPVEEARGSMVVDIGGGTTEIALISLNGVVYAESVRVGGDRFDEAIVTYVRRNYGSLIGESTAERIKQEIGTAYPGGEVREVDVRGRNLAEGVPRAFTLNSNEVLEALQESLATIVQAVKSALEQSPPELASDIAERGLVLTGGGALLRDLDKLLAQETGLPVIVAEDPLTCVARGGGRALEMMDKHAMDLLSSE

SEQ ID NO: 68130 - protein, 91 aa, Pseudomonas putida
MADFQALVRDTEKLLADTANLAGDQADELREQIHERLAQARETLQLTQDSVRERGQAALGSAEQYVQENPWRAIGIAAGVGLLIGLLANRR

SEQ ID NO: 68131 - protein, 319 aa, Pseudomonas putida
MGLFGAVQLAHAGEYDGSPEVAAFVGEMSRDYGFAPEQLMGVFREVQRKQSILDAISRPAERVKPWKDYRPMFITDARIARGVDFWRQHEAVLARAEQEYGVPAQYIVAIIGVETFFGRNTGNYRVIDALSTLGFDYPPRAEFFRKELREFLLLAREEQLDPLTLKGSYAGAMGLPQFMPSSFRNYAVDFDGDGHINIWNNPDDAIGSVASYFKRHGWVAGEGVVSRAWVEGERADEGLTTGIEPVKTVGELRTLGWSVHDSLRDDLPVTAFRLEGESGPEYWMGLKNFYAITRYNRSVMYAMAVHQLAEQLVQVRGVK

SEQ ID NO: 68132 - protein, 325 aa, Pseudomonas putida
MNAFTQIDELVMPLPLEPQGYTIAPSKQSPRLLELTFARETVEAFVQAVAQWPVQALEYKSFLRFRVGEILDELCQGTLRPVLLNTILDRATGGMLITPIGLDDVSQAEDMVKFTTACAHLIGRSNYDAMSGQFYARFVVVNSDNSDSYLRQPHRVMELHNDGTFVNQITDYVLMLKIDEKNMEGGNSLLLHLDDWEQCEAFFRHPLARREMRWTAPPSKKVAEDVFHSVFDTDAEGRPTMRYIDQFVQPENYEEGIWLNALSESLEGSGKKVSVPVGVGSFLLINNLFWLHGRDRFTPHEGLRRELMRQRGYVAFPKPLYQRGQ

SEQ ID NO: 68133 - protein, 235 aa, Pseudomonas putida
MAQSETVERILDAAEQLFAERGFAETSLRLITSKAGVNLAAVNYHFGSKKALIQAVFSRFLGPFCASLERELERRQAKPEHKPSLEELLEMLVEQALAVQPRSNNDLSIFMRLLGLAFSQSQGHLRRYLEDMYGKVFRRYMLLVNEAAPRIPPLELFWRVHFMLGAAAFSMSGIKALRAIAETDFGINTSIEQVMRLMVPFLAAGMRADSGVTDEAMATAQLRPRTKTGSATAKA

SEQ ID NO: 68134 - protein, 507 aa, Pseudomonas putida
MTVIKQDDLIQSVADALQFISYYHPVDFIQAMHEAYLREESPAARDSIAQILINSRMCATGHRPICQDTGIVTVFIRVGMDVRWDGATMSVDDMINEGVRRAYNLPENVLRASILADPAGARKNTKDNTPAVIHYSIVPGDKVEVDVAAKGGGSENKSKMAMLNPSDSIVDWVLKTVPTMGAGWCPPGMLGIGIGGTAEKAAVMAKEVLMESIDIHELKARGPQNRLEEIRLELFDKVNQLGIGAQGLGGLTTVLDVKIMDYPTHAASLPVCMIPNCAATRHAHFVLDGTGPAELEAPSLDAYPEIVWEAGPSARRVNLDDITPEEVASWKPGETILLNGKMLTGRDAAHKRMVEMLNRGEELPVDLKGRFIYYVGPVDPVGDEVVGPAGPTTATRMDKFTRQILEQTGLLGMIGKSERGPTAIEAIKDNKAVYLMAVGGAAYLVAQAIRKSKVLAFAELGMEAIYEFEVKDMPVTVAVDSNGESVHITGPALWQSKIAESLAVEVK

SEQ ID NO: 68135 - protein, 368 aa, Pseudomonas putida
MPVWLCLWPTARVCRCLLPLGGPLSVFNEGLPMTVSLQGSLMVDIAGKWLTAEDRQLLRQPEVAGLIIFARNIDNPRQVRELCASIRAIRPDLILAVDQEGGRVQRLRQGFVRLPAMRALADNDNAEYLAEQCGWLMATEVLAVGLDLSFAPVLDLDHQRSAVVGSRAFEGDPLLATRLAGAFIRGMNAAGMAACGKHFPGHGWAEADSHVAIPTDERSLEQLRQSDLVPFTRLSGQLAAVMPAHVIYPQVDNQPAGFSRRWLQDILRGELGFDGVIFSDDLSMAGAHVVGDAASRIEAALSAGCDMGLVCNDRAAAELALSAAQRMKVKPSPRIARMRGQGFARTDYRQQPRWLEALGALKEAQLVD

SEQ ID NO: 68136 - protein, 152 aa, Pseudomonas putida; identical to SEQ ID NO: 67498
  MISC_FEATURE (51)..(51): X=any amino acid
  MISC_FEATURE (115)..(115): X=any amino acid
  MISC_FEATURE (146)..(146): X=any amino acid

SEQ ID NO: 68137 - protein, 370 aa, Pseudomonas putida
MSRLNHTLRLGLKELTSLRHDSVLLLFLLYAFSVAIYMPAAGSVIGVHNASVAVVDEDHSLLSRKLSEALQPPEFQPAVPLPPQRLDQAMDSGQYTFVINVPVNFQSDLLAGRSPELQINVDATAMSQAFMGAGYIGRIFERELLDYSQRGNEQSPVLINPKALFNPNLEGGWFLAVIQIVNNITILAIILTGTALLREREHGTLDHLLVLPLTALEIMLAKIGSNALVVVICTWISLVVVVKGALGVPLSGSMGLFLAVTALYLFASTSLGIFLATLARSTPQFGLLAIPVIIPMLLLSGGSTPLDSMPQWLQWVMQGSPSTHFVSLSAAILFRDAGWAVVWPDILALTLIGLVFFSVALARFRRSLAS

SEQ ID NO: 68138 - protein, 134 aa, Pseudomonas putida; identical to SEQ ID NO: 67497
  MISC_FEATURE (20)..(20): X=any amino acid
  MISC_FEATURE (25)..(25): X=any amino acid
  MISC_FEATURE (77)..(77): X=any amino acid
  MISC_FEATURE (80)..(80): X=any amino acid
  MISC_FEATURE (86)..(86): X=any amino acid
  MISC_FEATURE (127)..(127): X=any amino acid
  MISC_FEATURE (129)..(129): X=any amino acid

SEQ ID NO: 68139 - protein, 222 aa, Pseudomonas putida
MGIEAAYPPFNNKDASGNVVGFDKDIGDALCAKMKVECSVVTSDWDGIIPALNAKKFDFLVSSLSITDERKQAVDFTNPYYSNKLQFIAPKNVDFKTDKESLKGKVIGTQRATLAGTYLEDNYPDVEIKLYDTQENAYLDLVSGRIDGILADKYVQYEWLKSKDGSNFEFKGEPVMDSDKIGIAVRKGDTKLRDDLNKALAEIKADGTYKKINDKYFPFSIE

SEQ ID NO: 68140 - protein, 299 aa, Pseudomonas putida
MKRQLEAYCAHLRNERQVSEHTSQGYRRDLEKVIAYCEEHGIADWQALQIQQLRQLIARLHHHGQSPRSLARLLSAVRGLYRYLNREGLCQHDPANGLSAPKGERRLPKVLDTDRALQLLDGGVDDDFIARRDQAILELFYSSGLRLSELTNLDLDHLDLAAGLVQVLGKGGKARVLPVGRKAREALQAWYRLRGIGNPRDRAVFITRQGNRISPRAVRLRVKVAGERELGQHLHPHMLRHSFASHVLESSQDLRAVQEMLGHADISTTQIYTHLDFQHLAAVYDSAHPRAKRSKGTDS

SEQ ID NO: 68141 - protein, 578 aa, Pseudomonas putida
MKDTIRQLIQQALTQLVTDGVLPEGLSPAIQVENARDKTHGDFASNIAMMLAKPAGMKPRDLAEKLINALPASADISKVEIAGPGFLNFFQNTDALANRLDAALADAHLGARKAGPAQKVVIDMSAPNLAKEMHVGHLRSTIIGDSVARVLEFLGDNVIRQNHVGDWGTQFGMLMAYLQENPITSDELSDLENFYRAAKKRFDESEEFATRARGLVVKLQAGDPECLALWTRFKDISLSHCQKTYELLNVKLTMADVMGESAYNDDLANVVADLKAKGLLVEDQGAQCVFLEEFKNSDGDPLPVIVQKADGGYLYATTDLAAVRYRSNVLKADRALYFVDQRQALHFNQVFEVARRAGFVGHPMQMEHMGFGTMNGADGRPFKTRDGGTVKLIDLLTEAKERAYALVKEKNPSLADDELRHIGEVVGIGAVKYADLSKHRTSDYSFNFELMLNFEGNTAPYLLYAYTRVAGVFRKLGKGFDEVDGKIVLQAAHEQDLAARLAQFGEILNNVAEKGTPHVLCSYLYDLAGLFSSFYENCPILAAETPSQQQSRLRLAALTGRTLKQGLELLGLETLERM

SEQ ID NO: 68142 - protein, 231 aa, Pseudomonas putida
MSIKLITFDLDDTLWDTAPVIATAEVVLRDWLEANAPTLGSVPVEHLFAIRERLVQAEPGLKHRISALRRRVLFHALEEVGYSEQHAQALANEGFEVFLHARHQVEIFPEVQPVLEILRHQYILGVVTNGNADVSRLGLADYFRFALCAEDLGIGKPDPAPFLEALRRGEVDAGAAVHIGDHPGDDIAGAQRAGLRAVWFNPQGKAWTGDQAPDAEIQRLSQLPDVLARWR

SEQ ID NO: 68143 - protein, 101 aa, Pseudomonas putida
MAKKSMKNRELKRQLTVAKFAKKRAELKATIVNLNASPEERFAAVVALQKQPRDASASRLRNRCRLTGRPHGVYRKFGLGRNMLRQAAMRGDVPGLVKASW

SEQ ID NO: 68144 - protein, 367 aa, Pseudomonas putida
MHFTIQREALLKPLQLVAGVVERRQTLPVLSNVLLVVQGQQLSLTGTDLEVELVGRVQLEEPAEPGEITVPARKLMDICKSLPNDALIDIKVDEQKLLVKAGRSRFTLSTLPANDFPTVEEGPGSLTCNLEQSKLRRLIERTSFAMAQQDVRYYLNGMLLEVSRNTLRAVSTDGHRLALCSMSAPIEQEDRHQVIVPRKGILELARLLTDPEGMVSIVLGQHHIRATTGEFTFTSKLVDGKFPDYERVLPKGGDKLVVGDRQALREAFSRTAILSNEKYRGIRLQLAAGQLKIQANNPEQEEAEEEISVDYEGSSLEIGFNVSYLLDVLGVMTTEQVRLILSDSNSSALLQEAGNDDSSYVVMPMRL

SEQ ID NO: 68145 - protein, 806 aa, Pseudomonas putida
MSENQTYDSSSIKVLKGLDAVRKRPGMYIGDTDDGSGLHHMVFEVVDNSIDEALAGHCDDITVIIHPDESISVRDNGRGIPVDVHKEEGVSAAEVIMTVLHAGGKFDDNSYKVSGGLHGVGVSVVNALSEKLVLTVRRSGKIWEQTYVHGVPQAPMAVVGDSETTGTHIHFKPSAETFKNIHFSWDILAKRIRELSFLNSGVGILLKDERSGKEEFFKYEGGLRAFVEYLNTNKTPVNSQVFHFNVQRDDGVGVEVALQWNDSFNENLLCFTNNIPQRDGGTHLVGFRSSLTRSLNSYIEQEGLAKKNKVATTGDDAREGLTAIISVKVPDPKFSSQTKDKLVSSEVKTAVEQEMNKYFADFLLENPNEAKAVVGKMIDAARAREAARKAREMTRRKGALDIAGLPGKLADCQEKDPALSELYLVEGDSAGGSAKQGRNRRTQAILPLKGKILNVEKARFDKMISSQEVGTLITALGCGIGREEYNIDKLRYHNIIIMTDADVDGSHIRTLLLTFFFRQLPELVERGYIYIAQPPLYKVKRGKQEQYIKDDEAMEEYMTQSALEDASLHLDESAPAVSGVQLEALVNEFRSVMKTLKRLSRLYPEELTEHFVYLPEVTLEQLGDHAVMQAWLAQFQARLNSSQKSGLAYNASLREDKERNVWLPEVEITSHGLASYITFNRDFFGSNDYRTVVNIGAKLSSLLGEGAYVQRGERRKAIVEFKEGLDWLMNETTKRHTIQRYKGLGEMNPDQLWETTMDPTVRRMLKVTIEDAIAADQIFNTLMGDAVEPRRDFIESNALSVSNLDF

SEQ ID NO: 68146 - protein, 139 aa, Pseudomonas putida
MRPFTIKHIDHLVLRVSDLPRSVAFYTELLGCTVSRVREDLGMVHLATGTAMIDLVTLDGPLGQPGGAAPGVEGRNLHHFCLRIEPFDEAALTAYLEAAGVKVEPAEKRYGAEGEGLSLYCYDPDGNQVELKGPVVPGG

SEQ ID NO: 68147 - protein, 176 aa, Pseudomonas putida
MNGWVRAAALVLVVASYWGAYQHGRSVERAVAGQASAQRDSGDRLAEVIGERGARQEEQRRAEAQEEARAHAQDERTIADAGAADADAAGLRLRSDATQLAATISCPGSDTAAVARGQAATRAAMVLSDLLARADARAGELATAYDRAKIAGDQCTMEYDYMSRRQSRNQSHPPVP

SEQ ID NO: 68148 - protein, 703 aa, Pseudomonas putida
MARTTPIELYRNIGIVAHVDAGKTTTTERILFYTGVNHKMGEVHDGAATMDWMAQEQERGITITSAATTAFWQGSTKQFAHKYRFNIIDTPGHVDFTIEVERSLRVLDGAVVVFSGADGVEPQSETVWRQANKYHVPRLAYINKMDRQGADFLRVVKQIDQRLGHHPVPIQLAIGSEENFMGQIDLVKMKAIYWNDADQGTSYREEEIPAELKALADEWRAHMIEAAAEANDELTMKFLDGEELSIEEIKAGLRQRTIANEIVPTILGSSFKNKGVPLMLDAVIDYLPAPSEIPAIRGTDPDDEEKHLERHADDKEPFSALAFKIATDPFVGTLTFARVYSGVLSSGNAVLNSVKGKKERIGRMVQMHANQRAEIKDVCAGDIAALIGMKDVTTGDTLCDMDKPIILERMDFPDPVISVAVEPKTKADQEKMGIALGKLAQEDPSFRVRTDEETGQTIISGMGELHLDIIVDRMRREFNVEANIGKPQVAYREKIRNTCEIEGRFVRQSGGRGQYGHCWIRFAPGDEGKEGLEFINEIVGGVVPREYIPAIQKGIEEQMKNGVLAGYPLINLKAAVFDGSYHDVDSNEMAYKIAASMATKQLSQKGGAVLLEPVMKVEVVTPEEYQGDILGDLSRRRGMIQDGDETPAGKVIRAEVPLGEMFGYATSMRSMTQGRASFSMEFTRYAEAPASIADGIVKKSRGE

SEQ ID NO: 68149 - protein, 165 aa, Pseudomonas putida
MNSTLIQTDRFALSETERSAIEHEMHHYEDPRAASIEALKIVQKERGWVPDGAIHAIGEVLGIPASDVEGVATFYSQIFRQPVGRHIIRVCDSMVCYIGGHESVVSQIQSELGIGLGQTTADGRFTLLPVCCLGNCDKAPALMIDDDTFGDVQPAGVSKLLEGYV

SEQ ID NO: 68150 - protein, 423 aa, Pseudomonas putida
MTISILGARVIDPNSGLDQVTDLHLDGGRIVAIGAAPAGFSASRTIQADGLVAAPGLVDLGVSLREPGYSRKGNIASETRAAVAGGVTSLCCPPQTKPVLDTSAVAELILDRAREAANSKVYPVGALTKGLEGEQLAELVALRDTGCVAFGNGLKEIPNNRTLARALEYAATFDLTVVFHSQDRDLAQGGLAHEGAMASFLGLPGIPESAETVALARNLLLVEQSGVRAHFSQITSARGARLIAQAQALGLPVTADVALYQLILTDESLREFSSLYHVQPPLRTAADRDGLREAVKSGVIQAISSHHQPHERDAKLAPFGATEPGISSVELLLPLAMTLVQDGLLDLPTLLARLSSGPAAALRLPAGELKVGGAADLVLFDPQASTVAGEQWFSRGENCPFIGHCLPGAVRYTLVDGHICHEA

SEQ ID NO: 68151 - protein, 256 aa, Pseudomonas putida
MNDQRKGDHAEPTTHFGYQDVPESQKAKKVAEVFHSVAAKYDLMNDVLSGGMHRLWKRFTIELSGVRSGNRVLDIAGGTGDLAAKFSRLVGPTGQVVLADINDSMLKVGRDRLLDRGVAGNIEFVQADAEKLPFPDNHFDCVTIAFGLRNVTHKDAAIRSMLRVLKPGGRLLILEFSKPTNKLMSKAYDAYSFAFMPLAGKLITNDAESYRYLAESIRMHPDQETLKSMMVEAGFDRVTYHNMTSGIVAVHRGIKP

SEQ ID NO: 68152 - protein, 494 aa, Pseudomonas putida
MPVVRNNTWSRRANGHEAGRLCGIFRFAPQARLVTTESTAFATLPLSTAMLANLEALGYASMTPIQAQSLPVILKGQDLIAQAKTGSGKTAAFGIGLLNPINPRYFGCQALVLCPTRELADQVAKELRRLARAEDNIKILTLCGGVSLGPQIASLEHGAHIIVGTPGRIQQHLDKGTLVLDGLNTLVLDEADRMLDMGFFDAIASIIGKTPSRRQTLLFSATYPAGIKQLAADFMRNPQQVKVESLHTDNQIEQRFIEIDPQQRLEAVTRVLGHYRPQSCVAFCFTKQQCEDVVAHLTAKGIVAQALHGDLEQRDRDQVLTMFANRSSSVLVATDVAARGLDIDGLDMVINVELARDAEIHVHRVGRTGRAGEKGVAVSLVAPAEGHRAQAIEALQNSPLRWDQLDSLKNKGGEPLLPVMTTLCIAAGRKDKLRPGDILGALTGDAGIPGKQVGKIAIFDFQAFVAVERALAKQAMQRLNSGKIKGRALKVRII

SEQ ID NO: 68153 - protein, 393 aa, Pseudomonas putida
MHSTDVIILGAGAAGLMCAQLSARSGRRVLLLDHANKPGKKILMSGGGRCNFTNLYTEPANFLSHNAHFCKSALARYTQWDFIELVCKHGVAYHEKKLGQLFCDNKASDILDMLLAECDEAGAEIRMHTSIEQIEKTESGYLLQTSGGQFACQSLVIATGGLSIPTLGATGFGYQVARQFGHTLLPTRAGLVPFTITEPQLKAMCTELSGTSLDCTASCNGTSFRENLLFTHRGLSGPAILQISSFWEAGDTVEINLLPDRDALSWLQQMQAERANAELKTVLGEVFTRKLANLLAEQWFESKPMKQYTPAELAQIAEKLANWQVVPAGTEGYRTAEVTLGGVDTREVSSKTMESLKSPGLYFIGEVLDVTGHLGGFNFQWAWASANAAAQFV

SEQ ID NO: 68154 - protein, 727 aa, Pseudomonas putida
MSSSSFRQSLRRLWGQDKFSYSIRVTIALTGSLALCWYQNEMALLIPLFLGIIASALAETDDSWQGRLSALAVTLVCFAIAALAVELLFPYPWIFVVALALAAFGLTMLGALGERYGAIASATLITAVYTMIGVDQRGGQVTDFWHEPLLLVAGAAWYGLLSVLWQALFSNQPVQQSLARLFFELGSYLKLKASLFEPVRTLDVEARRLELAQQNGKVVAALNAAKEIILHRVGNSQPNSKVSRYLKLYFLAQDIHERVSASHYPYNALTEAFFHSDVMFRCQRLLRKQGSSCQELARSIRLRQPFVLASGYPEALEDLNASLEHLRIQSNPAWRGLLRSLRALAANLATLDRLLSAASNPDSLADASDSSLLDRSPRSLKDVWTRLRTQLTPTSLLFRHALRLPLALSIGYGMVHLIHPTQGYWIILTTLFVCQPNYGATRRKLVQRIFGTAVGLTVGWALFDLFPNPVIQSLFAVVAGVVFFVNRTTRYTLATAAITLMVLFCFNQIGDGYGLFLPRLFDTLVGSLIAILAVFLFLPDWQGRRLNKALANTLACASVYLRQIMQQYAHGKRDDLAYRLARRNAHNADAALSTTLANMLMEPGHFRKEADVGFRFLVLSHTLLSYLSGLGAHRDTALPAEVQEQLIEGAGQSLASSLDEIANGLAARLPVAIHSDSEEALANALEQMPEDLDEHQRLVQTQLALICRQLGPLRTLAAHLIKENAPA

SEQ ID NO: 68155 - protein, 266 aa, Pseudomonas putida
MIKKYLSRLLVGVTALVAVTAAQAGAIDDAVKRGTLRVGMDPTYMPFQMTNKRGEIIGFEVDILKAMAKSMGVKFEAVSTAYDGIIPALLTDKFDMIGSGMTLTQERNLRLNFSEPFIVVGQTLLIRKELAGEIKSYKDLNNEKYRLTSKLGTTGEMVSKKLISKAKYHGYDNEQEAVMDVVNGKADAFVYDAPYNVVAVDKAGAGKLLFLDEPFTYEPLAFGLKKGDYDSINFINNFLHQIKHDGTYDRIHDKWFKNKDWLKEME

SEQ ID NO: 68156 - protein, 817 aa, Pseudomonas putida
MAANPAASSAEAVQASVGPRLTVGSAAELEEAEMLGVDGSGRLCLKIAPPIKRTKVVPEPWRTNVLIRMWRRMTGRPNAPQPPKRELPPARWRTVGSIRRYILLALMIGQTIVAGWYMKGILPYQGWSFVDFDEIVNQPLWDTVVQVWPYALQTSILILFGILFCWVSAGFWTALMGFLELLTGRDKYKISGSSAGNEPIAPEARTALVMPICNEDVPRVFAGLRATFESVAASGNLDRFDFFVLSDTNDTDIAVAEQQAWLDVCRETKGFGRIFYRRRRRRVKRKSGNLDDFCRRWGGEYKYMVVLDADSVMSGECLSSLVRLMEANPDAGIIQTGPKASGMDTLYARMQQFATRVYGPLFTAGLHFWQLGESHYWGHNAIIRMKPFIEHCALAPLPGKGAFAGAILSHDFVEAALMRRAGWGVWIAYDLPGSYEELPPNLLDELKRDRRWCHGNLMNFRLFLVKGMHPVHRAVFLTGVMSYLSAPLWFLFLVLSTALLATNTLMEPQYFIEPYQLYPLWPQWHPEKAVALFSTTIVLLFLPKLLSVILIWAKGAVEYGGRVKVTLSMLMEMLFSMLLAPVRMIFHTRFVLAAFLGWAATWNSPQRDDDSTPWGEAVRRHGPQTLLGIAWAALVAWLNPSFLWWLAPIVGSLVLSIPVSVISSRTRLGLAAKDEKLFLIPEEYATPQELLATDQYTHENRWHALHDGFVRAVVDPRQNALACAMATARHGQAAPIEALRAERVAKAIEVGPKGLDLNTRLALLSDPVALSRLHEQVWAEHNAAWIDVWRASINNDPHSPLLPLHPENAGQPSLVGA

SEQ ID NO: 68157 - protein, 510 aa, Pseudomonas putida
MTELTLKPGTLTLAQLRAIHAAPVRLQLDASAAPAIDASVACVEQIIAEDRTAYGINTGFGLLASTRIASHDLENLQRSLVLSHAAGIGAPLDDDLVRLIMVLKINSLSRGFSGIRRKVIDALIALVNAEVYPHIPLKGSVGASGDLAPLAHMSLVLLGEGKARYKGQWLPATEALAIAGLEPLTLAAKEGLALLNGTQASTAYALRGLFQAEDLYAAAIACGGLSVEAALGSRSPFDARVHEVRGQRGQIDTAACFRDLLGDSSEVSLSHKNCDKVQDPYSLRCQPQVMGACLTQLRQAAEVLGIEANAVSDNPLVFAAEGDVISGGNFHAEPVAMAADNLALAIAEIGSLSERRISLMMDKHMSQLPPFLVENGGVNSGFMIAQVTAAALASENKALSHPHSVDSLPTSANQEDHVSMAPAAGKRLWEMAENTRGVLAIEWLGACQGLDLRKGLKTSAKLEQARQALRSEVPHYDRDRFFAPDIEKAVDLLAKGSLTGLLPAGVLPSL

SEQ ID NO: 68158 - protein, 396 aa, Pseudomonas putida
MSEYSLFTSESVSEGHPDKIADQISDAVLDAIIAQDKYARVACETLVKTGVAIIAGEVTTSAWVDLEDLVRKVIIDIGYNSSDVGFDGATCAVMNIIGKQSVDIAQGVDRSKPEDQGAGDQGLMFGYASNETEVLMPAPICFSHRLVERQAEARKSGLLPWLRPDAKSQVTCRYENGKVVGIDAVVLSTQHNPEVSQKDLQEAVMELIVKHTLPAELLHKGTQYHINPTGNFIIGGPVGDCGLTGRKIIVDSYGGMARHGGGAFSGKDPSKVDRSAAYAGRYVAKNIVAAGLAERCEIQVSYAIGVAQPTSISINTFGTGKVSDDKIIQLVRECFDLRPYAITTMLDLLHPMYQETAAYGHFGRTPQQKTVGDDTFTTFTWERTDRAQSLRDAAGL

SEQ ID NO: 68159 - protein, 534 aa, Pseudomonas putida
MNLVTAHSLRPEPSLRHHILQGFALCMAAGSNGPAPTSIERQRLSCPAALLRLTRSNHAAKPGEVPMGLNDQWMQRDLKVLWHPCTQMKDHEQLPLIPIKRGEGVWLEDFEGKRYLDAVSSWWVNVFGHANPRINQRIKDQVDQLEHVILAGFSHQPVIELSERLVAMTPAGLDRVFYADNGSSCIEVALKMSFHYWQNIGKPDKKRFVTLTNSYHGETIAAMSVGDVPLFTETYKALLLDTLKVPSPDCYLRPEGMSWEEHSRNMFQAMEQTLAEHHASISAVIVEPLIQGAGGMRMYHPVYLKLLREACDRYDVHLIHDEIAVGFGRTGTMFACEQAGIRPDFLCLSKALTGGYLPLAACLTTDKVYQAFYDDYPTLRAFLHSHSYTGNPLACAAALATLDIFEQDNVIEANKALATRMATATAHLADHAHVAEIRQTGMALAIEMVQDKAGKLAYPWQERRGLKVFEHALTRGALLRPLGSVVYFLPPYVITPEQIDFLAEVASEGIDIATRDSVSVAVPANFHPDFRDPG

SEQ ID NO: 68160 - protein, 239 aa, Pseudomonas putida
MRLSRFFIDAPLSLGEDDLPEAQAHYIGRVLRMAPGDAVQLFDGSGQEYRGQLLEVGKKTVRVSLDQAFAGQADSPLHVHLGQGLSRGERMDWAIQKATELGANEITPIVSERCEVRLKDERADKRLAHWRQVAISACEQCGRSTLPVIHPPVTLAEWLSSTKADLKLVLHPVAEPLISHEKPATLAFVIGPEGGLSEAEVEQAKAAGFHAARLGPRVLRTETAPVVALSVAQQLWGDF

SEQ ID NO: 68161 - protein, 205 aa, Pseudomonas putida
MYYGERFNAWTHLVGAVLAAIGAIWLIVAAGLQGDPWKIVSFSIYGGTLLLLYSISTLYHSTRGRAKVIMRKLDHLSIYLLIAGSYTPFCLVSLRGPWGWSLFGVVWGLAIIGMLQEIKPRSEARILSIIIYAVMGWIVLVAVKPLLNSLGTAGFAWLAAGGVFYTVGIIFFAFDSRFRHWHGIWHLFVIAGSLMHFVAVSLYVR

SEQ ID NO: 68162 - protein, 686 aa, Pseudomonas putida
MNKPATPVTATTVSPRTRSIAQITVLFLILILSIILLFANFAYLNTQSNYDKQYIGHAGELRVLSQRIAKNATEAATGKALAFKLLSDARNDFERRWGYLRQGDKSTGLPPAPPAVRDEMESVRRDWENLRKNTDIILASEQTVLSLHQVAATLAETVPQLQVEYEKVVEILLQSGAPANQVAVAQRQLLLAERILGSVNTVLAGDDSAAQAADAFGRDAGRFGQVLEGMINGNATIQVTRVEDADARARLAEIAELFQFVAGSVDEILETSPELFRVREAAGNIFSLSQTLLDEASHLANGFENLAGGRTLDTVGGYVLGLLALASIILIGLVMVRTTNRQLRETAEKNERNQQAIMRLLDEIEELADGDLTVTVSVTEDFTGAIADSINYSVDQLRDLVATINHSAVQVAAAVQDTQNTARQLAKASEHQAAQISEASEAVGDMVESIDRVSAHAYESAKVAERSVAIANKGNEVVHNTINGMDNIREQIQDTAKRIKRLGESSQEIGDIVSLIDDIADQTNILALNAAIQASLAGEAGRGFAVVADEVQRLAERSSSATRQIEALVRTIQADTNEAVISMEQTTAEVVRGARLAQDAGVALAEIEGVSQNLADLIHSISDAAQLQTSSAGQISHTMAVIQQITAQTSAGSGATADSIRHLARMASEMRRSVSGFTLPPPTEPR

SEQ ID NO: 68163 - protein, 141 aa, Pseudomonas putida
MADLRLLLGFDYGSKQIGVAVGQVITGQARELCTLKAQNGVPDWAQVEKLIAEWKPDAIVVGLPLNMDGTPSEMSARAEKFARRLNGRFNLPVHTHDERLTTFEAKGERMARGGQRGSYRDNPVDAIAAALLLQGWLEANT

SEQ ID NO: 68164 - protein, 298 aa, Pseudomonas putida
MLTMLPELKIAQLRYFVLVAELKSFHAAARQAFRTQPAISLALRELEQKLGQALVEKGGGRVELTPYGEHCLPLFRGLIEHHDRIAREAMLFARHEIGQVSIATVPSVASRMLPGPLARFVAAHPNVQVSIQDGTAERVQQLLAQGQVDFGISSLWVDDDQLEFAPIVNDQVGVVCRSDHPLAQAGGRLHWAQLLGVPMIRNGTSQLLAGTEAEGLLADSRLFISNMISLIAMLEEGVGISTLPYLAFPQENDKLAFVPLEEPRVERHIGMLTRKGRSLSPVAGALMAFLQVQLAKAG

SEQ ID NO: 68165 - protein, 115 aa, Pseudomonas putida
MITPPDVFKSLSDETRARATLLIASLGELCVCELMCALNDSQPKISRHLAQLRSNGMLLDRRQGQWVYYRLNPELPSWVHEMLQVTLQANSQWLADNALRLKNMDGRPVRDSVCC

SEQ ID NO: 68166 - protein, 122 aa, Pseudomonas putida; identical to SEQ ID NO: 67499
  MISC_FEATURE (19)..(19): X=any amino acid

SEQ ID NO: 68167 - protein, 943 aa, Pseudomonas putida
KTYQPHAIETSWYNTWESENYFAPQGAGESYTIMIPPPNVTGSLHMGHGFNNAIMDALIRFRRMQGRDTLWQPGTDHAGIATQMLVERQLEAKGQNRHDLGREKFLEKVWEWKDQSGGNISRQIRRLGSSVDWSRERFTMDDGLSEAVKEAFVRLHEDGLIYRGKRLVNWDTKLHTAISDLEVENHDEKGHLWNLRYPLADGAKTAEGQDYLVVATTRPETLLGDAAVAVNPNDERYQALIGKFVELPLVGRRIPIIADDYCDPEFGTGCVKITPAHDFNDYEVGKRHNLPLLNIFDKNAFVLSSAQAFNLDGSVNEQVDTQLPAQYANLDRFVARKQIVADLDAQGLLVSIDDHALKVPKGDRSGTVIEPWLTDQWYVSTKPLAEPAIAAVEDGRIQFVPKQYENMYFSWMRDIQDWCISRQLWWGHRIPAWYDEAGQVYVGRNEEEVRAKHKLGADVVLRQDDDVLDTWFSSGLWTFSTLGWPEQTEFLKKFHSTDVLVTGFDIIFFWVARMIMLTMHLIKNEDGTPQVPFKTVYVHGLVRDGQGQKMSKSQGQRAGPAGHRRRHHPRRPAGKRTSGMMQPKLAEKIAKQTKAEFPEGIASYGTDALRFTFCSLASTGRDIKFDMGRVEGYRNFCNKIWNAARYVLDKGEDCGQNGEAYELSLADRWIISQLQRTEAEVTRQLEQFRFDLASQALYEFIWNQYCDWYLELSKPVLWDENAPVERARGTRRTLVRVLEVALRLAHPFMPFITEEIWQRIAPLAGIDGKTIMLQPWPVANEARIDAAAEGDIEWLKELMVGLRNIRAEMNIGPGKPLPLFLKNANADDQRRLQENEALLKKLAKVESFTVLGDADEAPLSATALVGDLQVLVPMAGLIDKDAELARLNKEIQRLQGEVQRVGGKLSNTAFVDKAPPAVIEKERAKLAESEQALANFTEQHARI

SEQ ID NO: 68168 - protein, 122 aa, Pseudomonas putida; identical to SEQ ID NO: 67499
  MISC_FEATURE (19)..(19): X=any amino acid

SEQ ID NO: 68169 - protein, 475 aa, Pseudomonas putida
MSEPGQKLRLGALIALVVGSMIGGGIFSLPQNMAARADVGAVLIGWGITAVGMLALAFVFQTLANRKPELDSGVYAYAKAGFGEYMGFSSAWGYWISAWLGNVGYFVLLFSTLGFYFPVFGEGNTPIAIGCASLLLWSVHFLVLRGIKEAAFINQVTTVAKVVPLLIFVVIAAFAFRADIFTRDIWGLSNPQFGSVLEQVRNMMLVTVFVFIGIEGASVYSGRAQRRSDVGKATVIGFLGVLALLVLVNVLSLGIMTQPELAGLQNPSLASVLEHIVGPWGALLISLGLAVSLLGALLSWALLCAEILYATARDKTMPRFLAKENANHVPANALWLTNCMIQGFLLITLFSAGTYTSLIYLASSMILVPYLWSAAYAVLLAMRAETYAGQPRLRRKDLLVALVALLYAVWLLYAGGLKYLLLSALLYAPGVILFARAKHEQGQTLFTAWEKLIFAAVLVGAALAAYALYSGLLSL

SEQ ID NO: 68170 - protein, 493 aa, Pseudomonas putida
MTLVRFQMCIDGQWRDAQSGKTFDSLNPATAQAWAQLPDADEADVELAVQAAQRAFDSKAWRSITATARGKLLRRLGDLIAENKEHLAQLESRDNGKLIRETRGQVGYLPEFFHYTAGLADKLEGGTLPLDKPDLFAYTVHEPIGVVAGIIPWNSPLYLTAIKLAPALAAGNTIVLKPSEHASATILELARLALEAGFPAGVVNVVTGYGPSTGAALTRHPLVRKIAFTGGAATARHVVRSSAENFAKLSLELGGKSPNIIFADADLDSAINGAVAGIYAASGQSCVAGSRLLVQDEIFDEFVERLIARAKRIRIGNPQDDASEMGPMATAQQLAVVEGLVAAAKAEGAKLHMGGKRADVEGDGWFYEPTLFECDSNAMTIMQEEVFGPVAAVIRFKTEEEALAMANDSQFGLAAGIWTRDLGRAHRLARDVRSGIIWVNTYRAVSAMAPIGGFKNSGYGRESGIDSVLAYTELKTVWINLSTAPMPDPFVMR

SEQ ID NO: 68171 - protein, 49 aa, Pseudomonas putida
MANEAIGNVKQGVGKVTDNEKLRAEGKAQELKGEAQQVKGNVKDAVKKP

SEQ ID NO: 68172 - protein, 450 aa, Pseudomonas putida; identical to SEQ ID NO: 67505

SEQ ID NO: 68173 - protein, 160 aa, Pseudomonas putida
MMSVSVCPCGSGNLLDACCGHYHAGTPAPDAQALMRSRYSAYVLGLVDYLVATTLPAQQAGLDRAAMADWSAQSTWLGLEVESAEVLGGQPEHSFVTFTARWHDQDGDHQHRERSAFVQHAGRWYFIDPTVGLKAGRNDPCPCASGHKFKKCCNNYLPKG

SEQ ID NO: 68174 - protein, 535 aa, Pseudomonas putida
MATLHTQINPRSAEFAVNSAAMLEQVQALRGLLAQVAQGGGPKAQERHTSRGKLLPRERIDRLLDPGSPFLEIGQLAAHEVYGEDVPAAGVIAGIGRVEGVECMIVANDATVKGGSYYPLTVKKHLRAQTIALQNRLPCIYLVDSGGANLPRQDEVFPDREHFGRIFFNQANMSAQGIPQIAVVMGSCTAGGAYVPAMADEAIMVRQQATIFLAGPPLVKAATGEVVSAEDLGGADVHCRTSGVADHYADNDEHALAIARRSVANLNWHKLGKLQRLAPVAPLYAADELYGVVPADAKQPFDVREVIARLVDGSVFDEFKALFGTTLVCGFAHLHGYPVAILANNGILFAEAAQKGAHFIELACQRGIPLLFLQNITGFMVGKKYEEGGIAKHGAKLVTAVACAQVPKFTVIIGGSFGAGNYGMCGRAYDPRFLWMWPNARIGVMGAEQAAGVLAQVKREQSERSGQPFSAEDEARLKQPILDQYERQGHPYYSSARLWDDGVIDPAQTRDVLGLALSAALNAPIEQSRFGIFRM

SEQ ID NO: 68175 - protein, 1530 aa, Pseudomonas putida
MAQTVHAARMGDAILHPSLAAEMISAVAEAVIYAAATAAVAAAISLAVVGTVATGGAAGVAIAAVAGVAVGAVSTLSVGEDQTVGDAISSFCDSLGNSVDSPDPYGKIESGSTNVLINSEPAARAAGITGPPGGGAADTEQEEPSILENVGSMAMAAVPYLVPFVGLGMAIRDIFNPPVTTPANPGSEPAEGDKISCSRHPPLPDTFIAQGSDKVFINGQPAARSGDKTTCDATIDVNENVSPNVRIGGGTATVRDIRNGKSKIAMFTGIIAGMLISRRFGRIKGCTLGNPVAVATGSKLQEGPEDIDFNLPGLLAIQWARRYDSRDMRSDGLLGMGWSVPYEVELARVPHPQGGTLWIYIDNDGNRLELGRLSAGDAFISAVDGLAFFQLEDGQTVVEDINEGLYRVFDTDPLNPKRSRLIRLGDRNLNCLDLLYDEQGRLKALYDKYGQTVVQLHYAARHPQRVSEVSRVFLKNGGTPTVERSELLVSYRYTDNGQLHEVLDATDQRVRRFTYTPEGYLNSHQLASGAVREYEWARFAIPETRPTPKRLDGTPYRLPPLLEPQPDHEWRVIRHWGSDGEEYRFEYNLEAGETLVTDNLGRRDHYYWGPLYEVYKHIDPQGNCWLAEVIAGQLIKRIDPQGGEWRYSYDDIGRLIETRDPLGRSEHIKYLRHWALPIQVTDTAGRTRQYGYDSHGNLLWQQDPLGRETQYQYDPEGRVTQVTDALEKSKYLSWNTCGQLLSYRDCSNAQTLYHYDAHGRLRESINARGEHTHFRYDARGYLVESERPDGRIDRYEIDVAGQLTRYIDPAQKTLQFRYDPSGRLVERTDAMGYSVKFRYDAYGRLLQLTNENDESYRFGWDELDRLVAQKDLDGSGRLYAYNVLDEVIRLTHVPSPDEQPPLSDNAPPTRTTAIRHDFERDAIGRLVSKRTEDGTTDYRYDAADNLLSITFTDNKGEKQQLDYTYDANGQLLSETNSAGLLQYRYDELGNLQTLVLPDQRELNHLYYGSGHLHQINLNGRVISDFERDAVHDEVLRTQGKLVTRTRYDTSGRLAGKAIHYRDAPAEVLPLLDKAYRYDASDNLIAEVLTQTQRRGMSNAANDENANLEQIIGRFLDLPHTGKTYSGHNRYGYDLNEQLQTVHQSRPNWQATQVEDFKYDKAGNLFDGPKLNGLIKHNRVLVYQDKRYRYDRFGRLCEKRIGSNWVQYFEYDAEQRLVCVEQYRSGERERVVFAYDPLGRRISKEVYQRDYPEPRRRVLFHWQGFRLLQEVQSGLASLYVYATVESYDPLARVDGKPGSEAIHYFHTTLVGQPEQLTDSDGNTIWRSDHHGWGKIINEWHSQQNGREQNLRNQGQYIDRETGLHFNIFRFYDPDIGRFTTTDPLGIEGGVNLYSYAPNIVNYSDPLGLCPENVKEYDITPYRPSNSPLENHHGILDIWAAQNVPSYGGKYPKGSPTIVLSSKNHAATKAVYREWLREKTGKPVGGKVDWSQISNREVMQLSERMFDVAGVPATSRTSYYRALNRYLHTGTF

SEQ ID NO: 68176 - protein, 467 aa, Pseudomonas putida
MYRRTADQAHRSARGEWRYSYDDIGRLIETRDPLGRSEHIKYLRHWALPIQVTDTAGRTRQYGYDSHGNLLWQQDPLGRETQYQYDPEGRVTQVTDALEKSKYLSWNTCGQLLSYRDCSNAQTLYHYDAHGRLRESINARGEHTHFRYDARGYLVESERPDGRIDRYEIDVAGQLTRYIDPAQKTLQFRYDPSGRLVERTDAMGYSVKFRYDAYGRLLQLTNENDESYRFGWDELDRLVAQKDLDGSGRLYAYNVLDEVTRLTHVPSPDEQPPLSDNAPPTRTAAIRHDFERDAIGRLVSKRTEDGTTDYRYDAADNLLSITFTDNKGEKQQLDYTYDANGQLLSETNSAGLLQYRYDPLGNLQTLVLPDQRELNHLYYGSGHLHQINLNGRVISDFERDAVHDEVLRTQGKLVTRTRYDTSGRLAGKAIHYRDAPAEVLPLLDEAYRYDASDNLIAEVLTQTQRRG

SEQ ID NO: 68177 - protein, 302 aa, Pseudomonas putida
MGYSVKFRYDAYGRLLQLTNENDESYRFGWDELDRLVAQKDLDSSGRLYAYNVLDEVIRLTHVPSPDEQPPLSDNAPPTRTAAIRHDFERDAIGRLVSKRTEDGTTDYRYDAADNLLSITFTDNQGKKQQLDYTYDPNGQLLSETNSAGLLQYRYDALGNLQTLVLPDQRELNHLYYGSGHLHQINLNGRVISDFERDAVHDEVLRTQGKLVTRTRYDTSGRLAGKAIHYRDAPAEVLPLLDKAYRYDASDNLIAEVLTQTQRRGMSNAANDENANLEKIIGRFLDLPHTGKTYSGHNVTDP

SEQ ID NO: 68178 - protein, 672 aa, Pseudomonas putida
MFGKLSLEAIPYHEPIVMVTLAMIALGGIAVVGLITYFRKWTYLWSEWLTTVDHKKIGVMYIIVAMVMLLRGFADAIMMRTQLAAATGGSEGYLPPEHYDQIFTAHGVIMIIFMAMPFFTGLMNLAVPLQIGARDVAFPFLNSLSFYLLLAGVLLVNISLGVGEFAKTGWVAYPPLAGIQYSPGVGVDYYIWALQLSGLGTTLTGVNFLVTVMKMRAPGMKLMDMPIFTWTCTWANVLIVASFPILTAALALLTVDRYLDFHIFTNELGGNPMMYVNLFWAWGHPEVYILILPAFGVFSEVTSTFSGKRLFGHHSMIYASGAIAILGFAVWLHHFFTMGAGASVNTFFGLATMLISIPTGVKLFNWLFTMYQGRVRFTAPMLWTLGFMVTFSIGGMTGVLLAVPGADFVLHNSLFVIAHFHNVIIGGAVFGYIAGFAFWFPKAFGFTLNEKWGKAAFWFWLSGFYVAFMPLYALGFMGMTRRLNHSDNPLWEPYLYVAVVGAVLILFGIACQLIQIVVSVRDRNQNLDVTGDPWGGRTLEWSTSSPPPFYNFAHMPEKVGLDCWHEAKEAGVAYKAPAKYEAIHMPSNTATGLFMGLFLTVFGFAFIWHIWWLVGASLVATIAVFVRHAARDDQGYMVPAEEVARIEGERMKALAKAGALPAGARVESFERV

SEQ ID NO: 68179 - protein, 402 aa, Pseudomonas putida
MANPGSPRRFARIDRLPPYVFNITAELKMAARRRGEDIIDLSMGNPDGATPPHIVEKLVQVAQREDTHGYSTSRGIPRLRRAISNWYKDRYEVDIDPESEAIVTIGSKEGLAHLMLATLDQGDTVLVPNPSYPIHIYGAVIAGAQVRSVPLVPGVDFFNELERAIRESIPKPKMMILGFPSNPTAQCVELDFFERVVALAKQYNVLVVHDLAYADIVYDGWKAPSIMQVPGAKDIAVEFFTLSKSYNMAGWRIGFMVGNPELVSALARIKSYHDYGTFTPLQVAAIAALEGDQQCVRDIAEQYRQRRNLLVKGLHELGWMVENPKASMYVWAKIPPEYAHLGSLEFSKKLLAETKVCVSPGIGFGDYGDDHVRFALIENQDRIRQAIRGIRQMFRADGLARK

SEQ ID NO: 68180 - protein, 425 aa, Pseudomonas putida
MAFLALGINHKTASVDVRERVAFTPEQLVDALQQLCRLTSSREAAILSTCNRSELYIEQDHLSADAVLQWLADYHRLSIDELRASAYVHEEHDAVKHMMRVASGLDSLVLGEPQILGQMKSAYAVAREAGTVGPLLGRLFQATFSAAKQVRTDTAIGENPVSVAFAAVSLAKQIFADLGRSQALLIGAGETITLVARHLHEQGVRRIVVANRTLERASILAEQFGAHAVLLADIPQELANSDIVISSTASQLPILGKGAVESALKQRRHKPIFMVDIAVPRDIETEVGELDDVYLYTVDDLHDVVAENLKSRQGAAQAAEELVSVGAEDFMLRLRELAAVDVLRAYRQQSERLRDEELQKALRLLANGGNPEDVLAQLARGLTNKLLHAPSVQLKKLSAEGRLDALAMAQELFALNEGSTDKSPQ

SEQ ID NO: 68181 - protein, 360 aa, Pseudomonas putida
MKASLLNKLEILQDRFEELTALLGDAEVISDQTRFRAYSREYAEVEPVYAAYKEWRKVQDDLEGAQALLKDSDPDLREMAVEEVREAKEQLLTLEAQLQRMLLPKDPNDGRNVFLEIRAGTGGDEAAIFSGDLFRMYSRYAEKRGWRLEILSENEGEHGGYKEIIARVEGENVYGKLKFESGAHRVQRVPETESQGRVHTSACTVAVLPEPDEQAAIEINPADLRVDTYRASGAGGQHVNKTDSAIRITHLPTGIVVECQEERSQHKNRARAMSWLSAKLNDMQTSAAQNALASERKLLVGSGDRSERIRTYNYPQGRVTDHRINLTLYSLDDILSGGVDAVIEPLLAEYQADQLAALGD

SEQ ID NO: 68182 - protein, 276 aa, Pseudomonas putida
MTVIASLLRNAQLPESPTERLDAELLLAAAIGKSRSYLHTWPERIVSSEDAETYAGYLKRRRGGEPVAYILGLQGFWKIDLEVAPHTLIPRPDTELLVETALELQPASPAKVLDLGTGTGAIALALASERPAWQVTAVDRVEEAAALAERNRQRLGLANARVRLSHWFDSLAAERFDLIVSNPPYIAAEDPHLVAGDVRFEPSSALVAGADGLDDLRVIAAQAPAHLLPGGWLLLEHGYDQAAAVRALLAEHGFIEVASRTDLGGHERITLGRLSC

SEQ ID NO: 68183 - protein, 251 aa, Pseudomonas putida
MLSDQELLRYSRQVLLSQIDIDGQLRLKQSKALIIGLGGLGSPVALYLAAAGVGELHLADFDTVDLTNLQRQVIHDSASVGMSKVDSALQRLQAINPEVSLVAHRQALDEDSLVAAVAAVDLVLDCSDNFSTREAVNAACVAAGKPLVSGAAIRLEGQLSVFDPRRDYSPCYHCLYGHGSEAELTCSEAGVIGPLVGLVGSLQALEAMKLLAGFGEPLVGRLLLIDALGTRIRELRVKRDPACTVCGKRDG

SEQ ID NO: 68184 - protein, 479 aa, Pseudomonas putida
MSVQTTTTRNASAHTFKQDMQTRHIVMLALGGVIGTGLFLTSGYTVNQAGPLGAVIAYILGAIMVYLVMMCLGELAVHMPEVGSFSSYATRYLGPGTGYMVAWMYWLTWTVAIGSEFTAAGILMVRWFPDTPVWMWSALFGAAVFISNIISVRSFAETEFWLSLVKVLAVIAFLVVGGGAILGGFEIQQAHSAGLGNFTREGLFPTGFWSIAMTLLAVAFAFSGTELIGIAAGETKDPEKNVPKAIRTTVLRLALFFIGTIFVLATLLPREQAGVIESPFVMVFAMIGIPYAADIMNFVIITALLSAANSGLYAASRMLWTLSDQGNMPRRYATLSRRGTPFNAIVLSMAGGMASLLSSVFAPDTIYLALVSISGLAVVVVWISIAASQIAFRRHYIASGGKLEDLKFRVRGYPFVPLGAIFCCVLACVGIAFDPAQRVALYFGLPFIAWCYLAYWLTCKYRSRRTAPLEIVAPGSEAA

SEQ ID NO: 68185 - protein, 265 aa, Pseudomonas putida
MAERSAPIGVMDSGVGGLSVLAEIQRLLPNETLLYVGDCGHIPYGEKSPDYIRERCRRIAGFFHEQGAKAMVLACNTATVAAVADLRELYPTWPLVGMEPAVKPAAAATRSGVVGVLATTGTLQSAKFAALLDRFANDVQVITQPCPGLVELIEAGDLVSPAVRQLLQGYVQPLLAAGCDTLILGCTHYPFLRPLLAGMVPDDVAIIDTGAAVARQLQRLLGANDLLAEGPAGAARFWTSADPEALRKILPVLWHKSDDVQSFAL

SEQ ID NO: 68186 - protein, 301 aa, Pseudomonas putida
MHILLTGGTGLIGKHLCQYWLGQGHRLTVWSRRPEQVAKICGSGVRGIARLEQLEADDHLDAVVNLAGAPIADRPWTAARRNVLWASRVTLTEQLLAWLGTREQRPEVLISGSAVGWYGDGGERELTEASPPVREDFASQLCIAWEETAQRSQAQGIRVVLVRTGLVLASDGGFLSRLRMPFKLGLGGPLGNGRQWMPWVHIDDQVALIDFLLQHKDASGPYNACAPEPVRNREFARRLGRALHRPALLPVPALLLKAGLGEMSTLLLGGQRARPVRLLEAGFTFRFNDLQSALDNLSSRL

SEQ ID NO: 68187 - protein, 1267 aa, Pseudomonas putida
MRSAPQAPATLLRGSIKGALALLALILLGLLLWQLFAQFNHTQAELRKQSLDASAELADHLSLNMALKAQQAVNVVQPYPDAPTPAALPSLLGTLRERLPALQSVAWLDNVGQLRADSLAGSPDRQSLDELLVLSQGRPYFFTNSADNHLLYLLLRQDAAQGSGYWLLRLSPDYYRELTLHLEGSGHPQWLLENSRSGEVLQRHAAADTSDEPLQSVMLAFIENSTWQLRGLFDAKLAQQKLLPALLGKCLLVLFCALLPVLALINMRRRQRALQEDRRRYQEIFEGTGVALCVLDLSSLPGQLDRYHLRNRAALKHSLALDPNLRRSLLLELKITEVNQVARQLLNIDCHEGAWQRLIDGTGDSRDSVGMQLIDALIEQRPLLELEVRLPTPQGTELHLWLMARLPLQRRDYQAVILSISDITSRKQVELSLLERESFWSDVVRTVPDQLYVQDVPSQRMIFSNRHLGQTLGYDRTELAQMGDRFWELLLHPEDAAHYQALRRQQRDNCHDQPLHCQLRFRHRDGSWRCYDIREQVLTRNAEGLVTRIIGVGKDVTVQIEASQSLRDSEQRYRMLAESISDVIFSTDNQLKLNYVSPSVQSVLGYQADWIFANGWQSIVANPAQLTGIYSLMERVSKAMGDPAQMAQLCSQLPTQLFLFDCLRADGRKIPIELRLVLVWDDDQRFEGVLGVGRDISQQRRAEKDLRMAATVFEHSTSAILITDPAGYIVQANEAFSRVSGYAVSEVLDQLPGMLTVDEQQEGHLRYVVKQLHQRGSWEGEVWLKRRDGDHYPAWVGITAVLDDEGDLASYVCFFTDISERKASEQRIHRLAYYDALTHLPNRTLFQDRLYNALQQAERQKAWVVLMFLDLDRFKPINDSLGHAAGDRMLKDMALRLLACVDDDDTVARMGGDEFTLLLQPRPTREMALNRAIHVAENILGSLVRPFVLENREFFVTASIGIALSPQDGSELSQLMKNADTAMYHAKERGKNNFQFYQAEMNASALERLELESDLRHAMEQNEFILYYQPQFSGDGKRLTGAEALLRWRHPTRGLVPPGDFIPVIEELGLVVDVGDWVLREASRQLKAWHKAKVRVPKVSVNISARQFSDGQLGTRIANILEESGLPPACLELELTESILMREVNEALQILASLKNLGLSIAVDDFGTGYSSLNYLKQFPIDVLKIDRTFVDGLPEGEQDAQIARAIIAMAHSLNLAVIAEGVETHEQLEFLREHGCDEVQGYLFGRPMPAHQFEAQFSNETLFMFH

SEQ ID NO: 68188 - protein, 548 aa, Pseudomonas putida
MHRLSKVVPPKREILKNISLSFFPGAKIGVLGLNGAGKSTLLRIMAGVDKEFDGEARPMPDINVGYLPQEPQLDPTKTVREVVEEAVSVIKDAQARLDEVYAAYAEPDADFDKLAAEQAKLEAILQAADGHNLERQLDVAADALRLPAWDARIEHLSGGEKRRVALCRLLLSAPDMLLLDEPTNHLDADSVAWLERFLHDFPGTVVAITHDRYFLDNVAGWILELDRGAGIPYEGNYSGWLEAKSERLAQESKQQSAHEKAMKEELEWVRKGAKARQSKSKARLQRFEEMQSQEFQKRSETNEIYIPAGPRLGDKVIEFKNVTKGYGDRVLIDNLSFSMPKGAIVGVIGGNGAGKSTLFRMLMGKEQPDSGSIEIGETVQLACVDQSREDLDGAKTVFQQISDGSDQIRIGNYEIPSRTYVGRFNFKGGDQQKFVKDLSGGERGRLHLALTLKEGGNVLLLDEPSNDLDVETLRSLEEALLDFPGAAIVISHDRWFLDRVATHILAYEDDSNVVFFEGNYTEYEADRKKRLGDAAAQPHRVRHKKLAQ

SEQ ID NO: 68189 - protein, 128 aa, Pseudomonas putida
MAYSEKVIDHYENPRNVGKMNAEDPDVGTGMVGAPACGDVMRLQIKVNEQGVIEDAKFKTYGCGSAIASSSLATEWMKGKTLDEAETIKNTQLAEELALPPVKIHCSVLAEDAIKAAVRDYKQKKGLI

SEQ ID NO: 68190 - protein, 812 aa, Pseudomonas putida
MPDPVAARLRLAPEALTRRFSPEQFAFTHTDDLEPFRGVLGQERAVEALQFGVAMPRPGYNVYVMGEPGTGRFSFVKRYLKAEGKRQQTPADWVYVNHFDDTREPRALELPSGSAAEFISDMGGLIDNLLSTFPAVFEHPSYQQKKGAIDRAFNQRYDRALDVIERASLEKDVALYRDASNVAFTPMADGKALDEAEFAQLPEEVREQFHEDIALLEERLNEELASLPQWKRESNNQLRQLNEETITLALQPLLAPLSEKYAENAAVCAYLQSVQLNLLRTLVEQLVDDSKSDAVARKLLEEQYAPSLVVGHHADGGAPVVFEPHPTYDNLFGRIEYSTDQGALYTSYRQLRPGALHRANGGFLILEAEKMLGEPFVWDALKRALQSRKLKMESPIGELGRVATVSLQPQVIPLNVKLVIIGSRQLYYALQDHDPDFQEMFRVLVDFDEDMPMVDENLEQFAQLLRTRTNEEGMAPLTSDAVARLATYSARLAENQSRLSARIGDLFQLVSEADFIRQLASDEMTDAGHIERALKAKATRTGRVSQRVLDDMLAGIILIDTEGAAIGKCNGLTVLEVGDSAFGMPARISATVYPGGSGIVDIEREVNLGQPIHSKGVMILTGYLGSRYAQEFPLAISASIALEQSYGYVDGDSASLGEACTLISALSRTPLKQCFAITGSINQFGEVQAVGGVNEKIEGFFRLCEARGLTGEQGVIIPRANVATLMLDERVLQAVENGMFHVYAVSQADEALSLLVGEEAGVLDDKGLFTEGSVNARVVERLREIAEMISEEDIEKAEKERLEEVIAQAKPA

SEQ ID NO: 68191 - protein, 322 aa, Pseudomonas putida
MQPQTFYRAVADDFSAVDEIIKKQLTSRVPLVSKIGDYITSAGGKRLRPLLVLLCGKALGREGDDLRLLAATIEFLHTATLLHDDVVDMSGMRRGRSTANALWGNAPSVLVGDFLYSRSFEMMVELGSMPVMQILSKATRVIAEGEVLQLSRVRDASTTEEVYMEVIRGKTAMLFEASTHSAAALAQATDEQREALRTFGDHLGVAFQLVDDLLDYKGDSQTLGKNVGDDLAEGKPTLPLIYTMREGTAEQAALVRQAIQKGGLEDLEQIRVAVEESGALKYTAELARDYVKRAIACLEVLPASEYRDALVELSEFAVARTH

SEQ ID NO: 68192 - protein, 85 aa, Pseudomonas putida
MAHKKAGGSTRNGRDSESKRLGVKMYGGQVIKPGNIIVRQRGTEFHAGYGVGMGKDHTLFAKIEGVIKFEKKGEFMRRYVSIVAA

SEQ ID NO: 68193 - protein, 1273 aa, Pseudomonas putida
MAMGRLNRVLVALTRWGLGICALLAVLVALYVSLGRELVPLVAEYRADVESKAEQALGLPVHVGALEGHWSGLAPVLRVRDLQLGEGTKALRLDDVMVVPDIWASLTAREVRLARIQLGGLQLILRENEQGAWNLEGLPKKDDAPLDPADLLQRLRQLGRIDVFDSLVTLHPWQRDPLTLTYVSAGLQAGAKRQALDLRATLPDGQPLALSLNSRMSAEAWRDGEVEAYVSLPQSDWAHWLPPRVLGQWHADTLRAGGEFWIGWGKGQLQRAVVRLNAPRLEGAYAGRKAANLNNLALGAWFQRREQGFDVVVDSLAMDLGKARWESHLQLQQRPGQNAADESWQLQADRLDLTPLTPLIDALAPLSDKVKDVVDGLKVTGALRNVRLEARPKAEGDQRLQFAANLEKVGFDAYHNAPAAGNVSGSISGDLGHGELRLDTDAFMLHLYPIFAKPWHYQKANARLTWTLDKDGFTLIAPYLKVLGEEGKIAGDFLIRLLFEEGREDYMDLRVGLTEGDGRYTAKYLPEVLSPALDEWLRSAIVKGAVDEGYFQYQGSLNHGASPQARSISLFFKVHDAALDFQPGWPQVQHVDGDVFIEDSGVRIKAQRGVLLDTKVSDVNVDIPHVDGDQHSHLYLDGDFDGSLGDGLKILKEAPIGTGEIFAGWEGEGPLKGKVKLDIPLAHGQRPKVQVDFATHDARLKVAPPSLELNRLKGDFSFDFDKGLSGKGISLQAFGKPVTAQITAEGQAGQMQTRINANGQVSLKTLTDWLQFKQALPASGDLPYQLQLSLGSRDNRLSVTSSLKGLAIDLPAPFGKAAADTRDSRFSMSLQGPERQFDAAYADLARFAYAAPAENLTQGRGELVLGTGDARVPASQGLRVRGRLETLDLAPWQEQAGRLAGDDPGGSARQNLQSVDLSIGQLKAFGMDLNQAVVRLARGGPAWDLRLDSKEVIGNARVPDAKGAPVVVRMQTLRLPAASAAEQQAEDGPDPLASFDPRKVPALDLSIDKLYRGDDLYGSAAIKLRPTPRGVTASDIDLDLKGLRIDGGGGWEGETGKTSSWYKGRLDGKNLADVLSAWGFAPTVTSRDFRLDVDGRWPGSPAAVGLKRFSGSMDAALRTGQFVEVEGSAQALRVFGLLNFNSIGRRLRLDFSDLFDKGLAYDRVKGLLVASSGVYVTREPITVTGPSSNFELDGTLDMVSDRVDADLQVSLPVTNNLPLAALIVGAPAVGGALFLVDRLIGDRVSRFASVHYRVEGPWKEPRITFVKPFEKSR

SEQ ID NO: 68194 - protein, 681 aa, Pseudomonas putida
MPAGYSRGQGIFRNGGGRHAQAVSPQVQACNPVARAVLERTHCHNKKVHGVASMKSANLFWRRAKLPLAVSLASTLASPAFAVSFNIGEIEGQFDSSLSIGASWSTANPNKNLIGVNNGGKGLSQTSDDGHLNFKKGETFSKIFKGIHDLELKYGDTGVFVRGKYWYDFELKDENREFKDISDSNRKEGAKSSGAELLDAFVYHNYSIGDQPGSVRFGKQVVSWGESTFIGGGINSINPIDVSAFRRPGAEIKEGLIPVNMFYISQSLTDNLSAEAFYQLEWDQTVVDNCGTFFSQPDIIADGCTDNLRVLNSSRTVPGAAQQFLATRGVNINEEGVMVRRGADRDARDSGQFGVAMRYMFEPLDTEFGAYFMNYHSRAPIFSATGAPPSVFAGLSALPAQLRALAPLIVAGNSEYFVEYPEDIRLYGLSFSTTLPTGTAWSGEVSYRPNAPVQLNTTDILFAGVRPIGGALSNASLLTGTPGQDLHGYRRKEITQFQTTLTHFFDQVMGASRMTVVGEVGVTHVGGLENAHDTRYGRDPVFGPGPLPSTGGADTCQALNGSTIAGAGAGASTANLNRKCENDGYTTSTSWGYRGRVIWDYNDVFAGINLKPSVAWSHDVSGYSPGPGANFEEGRKAVSLGLDAEYQNTYTASLSYTNFFDGKYSTVDDRDFVALSFGVNF

SEQ ID NO: 68195 - protein, 409 aa, Pseudomonas putida
MEADVLLDNGIIGSACAPSGASTGSREALELRDGDKSRYLGKGVLKAVANINGPIRDLLLGKDPSDQKALDRAMIELDGTENKAKLGANAILAVSLAAAKAAAQDQDLPLYAHIANLNGTPGQYSMPVPMMNIINGGEHADNNVDIQEFMVQPVGAKTFSDGLRMGTEIFHHLKAVLKARGLNTAVGDEGGFAPNLASNEDALGAIAEAVEKAGYKLGTDVTLALDCAASEFYEDGKYNLSGEGKSFDAEGFADYLKGLTERFPIISIEDGLDESDWAGWKILTDKIGEKVQLVGDDLFVTNTKILKEGIEKGIGNSILIKFNQIGSLTETLEAIQMAKAAGYTAVISHRSGETEDSTIADLAVGTAAGQIKTGSLCRSDRVSKYNQLLRIEEQLGAKAVYRGRAEFRG

SEQ ID NO: 68196 - protein, 421 aa, Pseudomonas putida
MDKLIITGGARLDGEIRISGAKNAALPILAATLLADGPVTVGNLPHLHDITTMIELFGRMGIEPVIDEKLSVEIDPRTIKTLVAPYELVKTMRASILVLGPMVARFGEAEVALPGGCAIGSRPVDLHIRGLEAMGAKIEVEGGYIKAKAPEGGLRGAHFFFDTVSVTGTENIMMAAALAKGRSVLQNAAREPEVVDLANFINAMGGNIQGAGTDTITIDGVERLDSANYRVMPDRIETGTYLVAAAVTGGRVKVKDTDPTILEAVLEKLKEAGADINTGEDWIELDMHGKRPKAVNLRTAPYPAFPTDMQAQFISLNAIAEGTGAVIETIFENRFMHVYEMHRMGAQIQVEGNTAIVTGVKALKGAPVMATDLRASASLVLSALVAEGDTLIDRIYHIDRGYECIEEKLQMLGAKIRRVPG

SEQ ID NO: 68197 - protein, 943 aa, Pseudomonas putida
MTDYKATLNLPDTAFPMKAGLPQREPQILQRWDSIGLYQKLREIGKDRPKFVLHDGPPYANGKIHIGHALNKILKDMIVRSKTLAGFDAPYVPGWDCHGLPIEHKVEVTHGKHLSADRTRELCREYAAEQIEGQKTEFIRLGVLGDWDNPYKTMNFANEAGEIRALAEMVKQGFVFKGLKPVNWCFDCGSALAEAEVEYADKKSQTIDVAFPVADEAKLAAAFGLASLAKPAAIVIWTTTPWTIPANQALNIHPEFKYALVDTGERLLVLAEELVESCLKRYNLEGSVVASAQGSALELINFRHPFYDRLSPIYLADYVELGAGTGVVHSSPAYGEDDFVTCKRYGMVNDDILTPVQSNGVYVDSLPFFGGQFIWKANPAIVEKLSEVGALMHTETISHSYMHCWRHKTPLIYRATAQWFVGMDKQPSTGEPLRERALKAIEDTKFVPAWGQARLHAMIANRPDWCISRQRNWGVPIPFFLHKQTGDLHPRTVELMEEVAKRVEQQGIEAWFKLDAAELLGAEADQYDKIADTLDVWFDSGTTHWHVLRGSHDIGHATGPRADLYLEGSDQHRGWFHSSLLTGCAIDNHAPYRELLTHGFTVDENGRKMSKSLGNTIEPEKVNNTLGADILRLWVSATDYSGEMAVSEQILQRSADAYRRIRNTARFLLSNLSGFDPARDLLAPEDMLALDRWAVDRTLLLQRELEEHYSEYRFWNVYSKVHNFCVQELGGFYLDIIKDRQYTTGANSVARRSCQTALYHISEALVRWIAPILAFTADEIWQYLPGERNESVMLNGWYQGLSELPEGTELDRAYWDRVMAVKASVNKELENQRTAKVIGGNLQAEVTLYADEGLSADLGKLGDELRFVLITSAASVVPFAQAPAEAVATEVEGLKLQVVKSGHTKCGRCWHFRADVGSHPEHPEICGRCVDNLTGSGEVRHYA

SEQ ID NO: 68198 - protein, 310 aa, Pseudomonas putida
MSQAIVVAALYKFVTLEDYVELREPLLKTMLDNNVKGTLLLAQEGINGTVSGTREGIDGLLAWLRSDPRLVDIDHKESYCDEQPFYRTKVKLKKEIVTLGVPGVDPNKAVGTYVEPKDWNALISDPEVLLIDTRNDYEVAIGTFKGAIDPKTETFREFPEYIKANFDPSKHKKVAMFCTGGIRCEKASSYMLGEGFESVYHLKGGILKYFEEVPQEESLWDGDCFVFDNRVTVRHDLSEGEYDQCHACRHPINAQERASEHYSPGVSCPHCWDSLSEKTRRSAIDRQKQIELAKARNLPHPIGYYYKAEA

SEQ ID NO: 68199 - protein, 950 aa, Pseudomonas putida
MLELANEQIAMGQKAADKAEALRLLADRLVADGLVAEGYLQGLQAREAQGSTFLGQGIAIPHGTPQTRDLVYATGVRLLQFPEGVDWGDGQMVYLAIGIAARSDEHLRLLQLLTRALGETDLAEALRRASSAEALLKLLQGAPQALALDAQLVGLNVPAEDFDELAWRGARLLQRADCVDSGFAAVLQQAEPLPLGEGLWWLHSERQVRQPGLAFITPQQPLRYRDQPLNGLFCLASLGAAHEALLERLCEVLIEGRGQVLYQATSSRAVLEVLGGEVPADWPSARVVLANPHGLHARPAKVLAQLAKGFEGEIRVRLVDSAQPAVSVKSLSKLLSLGARRGQALELVAEPSIAADALPVLLAAIEQGLGEEVEPLPQSVAPIADDVPEVLQAPAAGSRIQGVGAAPGIASGPAHVCVEREFDYPLRGESCALERQKLREALATVNGELQALVLRSDKAIGEIFVTHQEMLADPALTDDVEQRLAQGESAAAAWMAVIEAAARQQEALHDALLAERAADLRDIGRRVLAQLCGVQAQVEPEQPYVLVMTEVGPSDVARLDPNRVAGIVTAQGGATAHSAIVARALGIPAVVGAGASILLLESGTPLLLDGQRGVVSVAPPADELQRALAERDLREQRLQAAWANRFEPAITRDGHAVEVFANIGDSNGIAKVVEQGAEGVGLLRTELIFMAHPQAPDVATQEAEYRRVLDGLDGRPLVVRTLDVGGDKPLPYWPIAAEENPFLGVRGVRLTLQRPQVMEDQLRALLRAADQRPLRIMFPMVGQVHEWREARAMVERLRAEIPVADLQLGIMVEVPSAALLAAQLAREVDFFSIGTNDLTQYTLAIDRGHPSLSAQADGLHPAVLSLIDMTVRAAHAHGKWVGVCGELAADPQAVAVLLGLDVDELSVSARSIAEVKALVRQADHQTARALAREALQQDSAAAVRALVERY

SEQ ID NO: 68200 - protein, 235 aa, Pseudomonas putida
MRRIGASVIERVTQACVCASLLLAPAAATQAATEEDPWEAVNRPIFRFNDTLDTYALKPLAKGYQAVTPQFLEDGIHNIFRNLGDVTNLANNVLQLKPHAAGVDTARLIVNTTFGLGGFFDVGTKMGLQRNDEDFGQTLGYWGVPSGPYVVIPLLGPSTVRDGVAKYPDTYTKPYRYIDHVPTRNSIFALDLIDTRASLLSAEKLIQGDKYIFIRNAYLQNREFKVKDGEVEDDF

SEQ ID NO: 68201 - protein, 427 aa, Pseudomonas putida
MTDTRNGEDSGKLLYCSFCGKSQHEVRKLIAGPSVFICDECVDLCNDIIREEVQEAQAESSAHKLPSPKEISGILDQYVIGQERAKKVLAVAVYNHYKRLNQRDKKGDEVELGKSNILLIGPTGSGKTLLAETLARLLNVPFTIADATTLTEAGYVGEDVENIIQKLLQKCDYDVEKAQMGIVYIDEIDKISRKSDNPSITRDVSGEGVQQALLKLIEGTVASVPPQGGRKHPQQEFLQVDTRNILFICGGAFSGLEKVIQNRSTKGGIGFGAEVRSKEEGKKVGESLREVEPDDLVKFGLIPEFVGRLPVLATLDELDEAALMQILTEPKNALTKQYAKLFEMESVDLEFRSDALKAVARKALERKTGARGLRSILEGVLLDTMYEIPSKKDVSKVVIDESVIEGTSQPLMIYENSEPQAKAAPDA

SEQ ID NO: 68202 - protein, 254 aa, Pseudomonas putida
MSMIEVKGLTKRFKGQTVLNGIDLTVQPGEVVAIIGPSGSGKTTFLRCLNLLETPDAGQIQIGAISIDANRPLGGQQSAIRRLRQQAGFVFQNFNLFPHRTALENVIEGPVIVKKTPREQAIELGRRLLAKVGLAGKEDAYPRRLSGGQQQRVAIARALAMEPEVILFDEPTSALDPELVGEVLATIRGLAEEKRTMIIVTHEMSFARDVANRVIFFDKGVIVEQGEAKALFAAPKEERTRQFLRKFLGTAASE

SEQ ID NO: 68203 - protein, 647 aa, Pseudomonas putida
MFSFAFPPRLAMKTRSRLLAWLPAALLGPVLALCSTLALAESPAEAAKAQHLLDYIGADYPPTVQDGKVIDEGEYREQQEFSAVLADLVKGLPANTEQAALEQGVQALRQAIDQRQEGTAVAKQARQLGARLAVAYEISQAPVITPDPARGAALYAQNCSICHGDTGAGDGPAGVGLEPAPANLRDVSRLDQLSLFDLYNTLALGIDGTEMPSFADQLDDRQRWDVAAYIASFTAKPEAGKGDKTWNLADLARQTPAEVAANEGTAAVEAFRAQRAQPPQVKRGPAQLLEYTASTLEKSLAAYRAGDHDQAYDLSVAAYLEGFELVESSLDNIDTQARKDTEKSLMAYRQSLQDGLPVEQAEQRLADAKTKLEQAAKLLGSDGLSWTLSYISGLLILLREGLEAILVLAAILAFLRNTGQQSAVRSVNIGWGLALVAGFATWALAAYVIDVGGAQRELLEGCTALFAAVMVLWLGVWMHDRRHAAAWKDYIKSSLVSGGGRFGFAVLAFFSVYRELFEVILFYETLWLQAGPAGHQAVLAGGATALVLLVGLAWVILRGSAKLPLSLFFSINAALLCALSVVFAGHGVKALQEAGVLGTRPVAFFEFDWLGIHADAYSLSAQAVALLAIVFLYGRSWLAEKRSAAAN

SEQ ID NO: 68204 - protein, 287 aa, Pseudomonas putida
MLTLGRVVLTLLVVTFAAVLVWQMVVYYMFAPWTRDGHIRADVIQIAPDVSGLIQKVEVRDNQTVKRGDVLFTIDQDRFTLALRQAKATLGERQETLAQASREAQRNRKLGNLVAAEQLEESQSREARARSAVSEAQVAVDTAQLNLDRSVVRSPVDGYLNDRAPRNHEFVTAGRPVLSVVDSASYHVDGYFEETKLGGIHIGDAVDIRVMGDNTRLRGHVQSFAAGIEDRDRSSGANLLPNVNPAFSWVRLAQRIPVRIAFDEVPQDFRMIAGRTATVSIIEGQRP

SEQ ID NO: 68205 - protein, 214 aa, Pseudomonas putida
MWIDRLLEGLLDTLLMVGVSSLIALLVGVPMAVLLVTSDKGGIFEARLLNRVLGAFVNLFRSIPFLILMVALIPFTRLVVGTTYGVWAAVVPLTIAATPFFARIAEVSLREVDHGLVEAAQAMGCRRWHIVWHVLLPEALPGIVGGFTITLVTLINSSAMAGAIGAGGLGDIAYRYGYQRFDSQIMLTVIAMLVALVALIQLGGDRLAKGLNKR

SEQ ID NO: 68206 - protein, 505 aa, Pseudomonas putida
VYTDLSVDELVKEALQRGEGVLADTGALVVETGHRTGRSPADRFIVEEPSTQDAISWGPINRKFPADKFDALWARVEAFNNAQDHFVSYVHVGAAAEHYLPVKMTTQTAWQNLFGRCLFINPEQFNPAGRDQWQILNVANFVCEPERDGTNSDGCVIINFAQKKVLIAGMRYAGEMKKAMFSVQNFLLPAADVLPMHCAANIGEEGDVTLFFGLSGTGKTTLSADERYLIGDDEHGWGEGVVFNMEGGCYAKCIDLSEKNEPVIWKAIKHGAVLENVVLDANKHADYTDVSLTQNSRAAYPLEHVAKRSEANLGGEPNAVIFLTCDLTGVLPPVSILNNEQAAYHFLSGYTALVGSTEMGSGGGIKSTFSTCFGAPFFPRPAGEYAELLIKRINGFNSKVYLVNTGWTGGGYGVGKRFSIPTTRAVIAAIQSGALVGAETEHLDIINLDVPKAVPGVETELLNPRTNWADKAAYDEAAKGLAKLFIENFKKFEVSDAIKAAGPQL

SEQ ID NO: 68207 - protein, 299 aa, Pseudomonas putida
MSDLPDTDFTQRFIFDERDVRGEWVSLDDSYAAVLARHEYPQPVQVLLGELMAATALLVGAMKFDGLLILQARSAGPIPLLMVECSSEREIRGMARYEADQIPAGATLSQLMPDGHLTLTIDPVKGQRYQGTVDLDGANLSECFTNYFVQSQQLNTRFWLNAQGGKARGLLLQQLPRDRQPDDEEREDSWQHVVALAKTLKPEEWTEGNETLLHRLYHEDAVRLFDIQPLRFNCSCSRERSGNALVSLGEHDAKALVDECGGTVEIDCQFCNERYFFDASDVAQLFAGGGTDVASETRH

SEQ ID NO: 68208 - protein, 133 aa, Pseudomonas putida
MAQKAEDDDKVRLDKWLWAARFYKTRALAKAAIESGKVHCRGERCKPGKEPRVGDEFVLRTGFDERTVVVKALSVVRRGAPEAQALYEETEESVRRREQAAEMRKAGAMGVTTDGRPTKKQRRQIHQLHGSYD

SEQ ID NO: 68209 - protein, 480 aa, Pseudomonas putida
MQLKDAQLFRQQAYINGEWLDADNGQTIKVTNPATGEVIGTVPKMGTAETRRAIEAADKALPAWRALTAKERSAKLRRWFELMIENQDDLARLMTTEQGKPLAEAKGEIAYAASFIEWFAEEAKRIYGDTIPGHQPDKRLIVIKQPIGVTAAITPWNFPAAMITRKAGPALAAGCTMVLKPASQTPYSALALVELAHRAGIPAGVLSVVTGSAGEVGGELTGNSLVRKLSFTGSTEIGRQLMEECAKDIKKVSLELGGNAPFIVFDDADLDKAVEGAIISKYRNNGQTCVCANRIYVQDGVYDAFAEKLAAAVAKLKIGNGLEEGTTTGPLIDGKAVAKVQEHIEDAVSKGAKVLSGGKLIEGNFFEPTILVDVPKTAAVAKEETFGPLAPLFRFKDEAEVIAMSNDTEFGLASYFYARDMSRVFRVAEALEYGMVGINTGLISNEVAPFGGIKASGLGREGSKYGIEDYLEIKYLCISV

SEQ ID NO: 68210 - protein, 555 aa, Pseudomonas putida
MKHSLPSRYACLVLCLVFTFASLPLLAQHAWLWPVTLITALLSLVGLNDLRQSHHAVRRNYPILGNIRYLIETIRPEIRQYLIEGDDDKLPFSRSQRSLVYARAKNESAEKAFGTLNDAYKPGFEFISHSMLPVATPDPASFRIAIGGPQCRMPYSASIFNISAMSFGALSANAIAALNRGARMGRFAHDTGEGSISPYHREHGGDLIWEIGSGYFGCRTEDGRFDPQRFAEQARSAQVKMIEIKLSQGAKPGHGGILPGHKVSPEIAETRGVRAGEDCISPAAHSAFRTPVELLQFVAGLRELSGGKPVGFKFCLGHPWEFMGIAKAMLATGITPDFIVVDGKEGGTGAAPREFSDNMGVPMREGLMFVHNTLVGLNLRSSIRIGAAGKIVSAFDIASVLAIGADWVNSARGFMFAIGCIQSQSCHTNKCPTGVATQDPLRQRALVVPDKAERVASFHRNTLHALAEMLAAAGLEHPSELKPKHLARRVSPSEIGLFSDLHTFLKPGELLSGSIESEFYARMWRMARSDSFAPETVSPAPAQTVTVRRKETAPA

SEQ ID NO: 68211 - protein, 437 aa, Pseudomonas putida
MKTPLWFPQSFFARTLWLVLIVVLFSKALTLVYLLMNEDVLVDRQYSHGVALTLRAYWAADEENRDKIAEAAGLIRVTGSGVPEGEQHWPYSEIYQRQMQAELGDDTEVRLRIHAPPALWVNAPSLGPGWLKVPLYPHPLRGQKIWNVLGWFLAIGLLSTASAWIFVRQLNQPLKRLVFAARQLGQGRSVRLPISDTPSEMTEVYKAFNQMAEDVEQAGRERELMLAGVSHDLRTPLTRLRLSLSLLNSDNELSDDMVRDIEDMDAILDQFLAFIRDGRDEPVEEVDLADLVREVVAPYNQPEERVRLCLEPIPPFPLRRVSLKRMLGNLIGNALHHAGKGVEVAAYVSGDESAPYVVLSVLDRGTGIDESELETIFNPFIRGDRARGGKGTGLGLAIVKRIAAQHGGNVELRNRSGGGIEARVRLPLGLLLPRNAV

SEQ ID NO: 68212 - protein, 774 aa, Pseudomonas putida
MDSINSRIAEELGVRPQQVEAAVSLLDEGSTVPFIARYRKEVTGSLDDTQLRHLEERLRYLRELDERRASILSSIEEQGKLTPELAREIKLADTKTRLEDLYLPYKQKRRTKGQIALEAGLGELADGLFNDPTLAPESEAARFVNAEKGVADVKAALEGAKYILMERFAEDAALLDKLRSYLKQEAVLSARVVAGKEEEGAKFRDYFAHDELLRTAPSHRALAIFRGRNEGVLSVSLKVGEELPGTLHPCELMIGNHVGIENRSRPADKWLGEVVRWTWKVKLYTHLETDLFGELRDSAEGEAINVFAHNLHDLLLAAPAGPRATLGFDPGLRTGCKIAVVDATGKLLDHTTVYPHAPKNDWDRTISIMAALCAKHSVELIAIGNGTASRESDKLVTELVKKYPALKITKIMVSEAGASVYSASELAAREFPDLDVSIRGAVSIARRLQDPLAELVKIDPKSIGVGQYQHDVSQLKLARGLDAVVEDCVNAVGVDVNTASVALLTRISGLNATLAQNIVAHRDANGPFATRAALKKVSRLGEKTFEQAAGFLRVMNGDNPLDASAVHPEAYPLVQRIAADTDRDIRSLIGDSSFLKRLDPKKFTDETFGLPTVTDILQELDKPGRDPRPEFKTATFQDGVEDLKDLEPGMILEGVVTNVTNFGAFVDIGVHQDGLVHISALSEKFVKDPREAVKAGDVVKVKVMEVDIPRKRVGLSMRMSDTPGEKVEGNRGGNRGNGGNRQQQAPRQRETATAAPANNAMAALFANAKQLKKK

SEQ ID NO: 68213 - protein, 576 aa, Pseudomonas putida
MQLKKLTATTLLLAGIGLFTLPAQANLTQQQSAAIIKTFDGSDPSDFRQFLGKLKDSDQGKADNLEATVDAYLADKPLAAGQQDEINRLLGLYTRIKYGKAATETLRELVAIPTFNVEGTPQYENPEFLKIADKIKALADRFGLAFRNIDNRVYEISLGSGKEVIGIHAHADVVPVNPDNWKLADGTRLDPFKVTLVGDRMYGRGTEDDKNGIVVAMYALKVAKDENLPLARQFKLLIDTTEETSGDAIPYYFERNPTPDYNLALDGGYPVVIAEKGYGTVMASFTKRPASGKGAEIVNLTGGLATNQIPTTSVATLISDNPAQLVKHLQQAGARYVKQHGSDFSIDAKADGKQVLLTVTGVSAHSSEPESGINPVARMLDFINGLGQQVSLKHNHFTDAARYAAENWGLDYLGNKLGVAFKDPFMGPLTTSLTFVGVDEKGVKLAVNLRIPKGKPIATIKDELADKLGKWTRQSNTSVAFDFSLDEPMYRNPEGEWVKALLAVATENLGMKHEFGTSAGATSVHDLPNGVQFGLAMPEVKYTGHNDNEFKTVEQFMLDLQVVSEMVARIGQMPKL

SEQ ID NO: 68214 - protein, 361 aa, Pseudomonas putida
MSHWPDRRILNLLGIELPILQAPMAGATGSAMAIAVGQAGGLGALPCAMLSGEQVRAEIAAFRAGCPGRPLNLNFFCHQPPAPDAERDARWKQALEPYYSEVGADFTAPTPVSNRAPFDEQSCLLVEALRPEVVSFHFGLPQAELLQRVKASGAKVLSSATTVEEAAWLERNGCDAIIAMGYEAGGHRGMFLSDDITSQIGTFALVPQVADAVGVPVIAAGGIGDHRGLLAALALGASAVQIGTAYLFCPEAKVSPAHRQALDSAPASDTALTNLFTGRPARGINNRLMRELGPMSELAPRFPLAGGALMPLRAITDPQGKSDFSNLWSGQALRLGRHMPAGELTREIAGKALAVIGHQAF

SEQ ID NO: 68215 - protein, 252 aa, Pseudomonas putida
MRIRSPQLVITALASLLGFNTAWADEVQVAVAANFTAPVQAIAKDFEKDTGHKLIAAYGATGQFYAQIKNGAPFEVFLAADDSTPKKLEAERETVPGSRFTYAIGTLALWSAKEGYVDAKGEVLKKNEYKHLSIANPKAAPYGLAATQVLDGLKLTEATKGKIVEGQNITQAFQFVSTGNAELGFVALSQIYKDGKVTHGSAWIVPSNLHDPIRQDAVILNKGKDNAAAKALVEYLKGPKAAAVIKSYGYER

SEQ ID NO: 68216 - protein, 339 aa, Pseudomonas putida
RHGGSMKAAVVAPGRRVDVIEKSLRPLEHGEALLKMQCCGVCHTDLHVKNGDFGDKTGVVLGHEGIGVVQEVGPGVTSLKPGDRASVAWFYQGCGHCEYCNSGNETLCRDVKNSGYTVDGGMAEACIVKADYSVKVPDGLDSAAASSITCAGVTTYKAVKISNVRPGQWIAIYGLGGLGNLALQYAKNVFNAKVIAIDVNEEQLRFASEMGADLVVNPLNEDAAKVIQAKTGGAHAAVVTAVAKGAFNSAVDALRAGGRLVAVGLPSESMDLNIPRLVLDGIEVVGSLVGTRQDLQEAFQFAAEGKVVPKVTLRPIEDINQIFDEMLEGKIKGRMVIQF

SEQ ID NO: 68217 - protein, 98 aa, Pseudomonas putida
MKTLHVIAHSPFGDERLASCLRLLGAEDALLLCGDAVYALRSGSEPHGHLQAAGLAQRLFALDEDVQARAVGNDLAKAVDYAGFVELSLQYDKVNSWL

SEQ ID NO: 68218 - protein, 319 aa, Pseudomonas putida
MGLLIDGRWHDQWYENGKDGTFKRENAQRRNQLPAPEAGRYHLYVSLACPWAHRTLIFRALKGLEPLIDVSVVSWLMQDHGWTFDQQQGSSGDHLDALQYLHQRYTQDDPHYTGRVTVPVLWDKKEKRIVNNESAEIIRIFNSAFNELTGNTLDLYPASLRPTIEALNERIYPAVNNGVYRAGFATTQDAYEAAFEDVFNELDYLEALLGRNRYLAGEYLTEADVRLFTTLVRFDAVYHGHFKCNLRRLSDYHNLSNWLRELYQWPGVAGTVNMEHIQKHYYMSHKTINPNGIVPKGPLQDFGLPHDRERLAGKGIWQA

SEQ ID NO: 68219 - protein, 187 aa, Pseudomonas putida
MPIINSQVKPFNATAYHKGEFVQVSEADLKGKWSVVFFYPADFTFVCPTELGDLADNYAEFQKLGVEIYGVSTDTHFTHKAWHDTSDTIGKIEYPLIGDPTHVISRNFDVLIEEAGLADRGTFVINPEGQIKIVELNDGGVGRDAAELLRKVKAAQYVAAHPGEVCPAKWKEGEATLAPSLDLVGKI

SEQ ID NO: 68220 - protein, 72 aa, Pseudomonas putida; identical to SEQ ID NO: 66400

SEQ ID NO: 68221 - protein, 373 aa, Pseudomonas putida
MTGRSRSAKDVLRWHGAHITAARAIGHLQDNEGVMSNESINWDKLGFDYIKTDKRYLSVWRNGEWDKGTLTEDNVLHISEGSTALHYGQQCFEGLKAYRCKDGSINLFRPDQNAARMQRSCARLLMPHVPTDVFIEACKQVVKANEKFVPPHGKGALYLRPFVIGTGDNIGVRTAPEFIFSVFAIPVGSYFKGGMKPHNFQISSFDRAAPQGTGAAKVGGNYAASLQPGAEAKKANFADAIYLDPLTHTKIEEVGSANFFGITANNEFVTPKSASVLPGITRLSLMELAQSRLGMTVIEGDVEISKLDRFVEAGACGTAAVITPIGGIEYNGKLHVFHDLEKVGPVTQKLYNELTGIQSGDVEAPAGWIVKVA

SEQ ID NO: 68222 - protein, 318 aa, Pseudomonas putida
MPTELSTHGWPQPERQVRWAEAISDTYFPLSLEFAAGQPFDGHLQRWSTPSTPLSLSRLRSSQLGYSRSKAHIGQDHEAFYLVTVPHGSEVHFEQDGHQISCSPGGFIVERGDAPYRFHYGTQNDLWVLKLPERALKANLLGHKRYTRHCFDARQGLGRIFVEQLDLCARHFDTSPPAARHLLLEQASATLLLALQQDERVLGSEGSNLSTLHLTRVEQYVQQNLGDPELSPQTIAGACGLSLRYLHKLFAITPYTLNEWVRLQRLEAVHRQLRDPHCHLAIGELAFRWGFADQAQFTRAFRQQYGCTASEVRATRTH

SEQ ID NO: 68223 - protein, 469 aa, Pseudomonas putida
MKRYERFADDIAELIRSGVLGPGQRVPSVRYASQTHGVSPSTVFQAYYLLERRGLIRARPRSGYFVNAHVPRQFSEPQALQPVSESTDVDVSALVFSILDSIKDPNTIAFGSAFPSPELFPLQRLSRSLASASRSMDPRMVVTDLSPGNPQLRRQIALRYMVGGLMLPMEELLITNGALEALNLCLQAVTQPGDLVAIEAPAFYACLQVLERLKLKAVEIPVHPREGMDLGVLAQTLEMHPVKAVWCMTNFQNPVGASMPEAKKQAMVELLARHQVPLIEDDVYAELYYSQQAPKPAKAFDTQGLVMHCGSFAKSLAPGYRIGWVAAGRFAQKIERLKLMTSLCASMPAQAAIADYLQHGGYDRHLRKLRYALEGQQANMLAAIARHFPAQTRVSQPSGGYFLWLELPEQMDALKLFHMALAQGISIAPGPIFSPTRRFGNCIRLNYGSPWHDGAEQAMETLGRIIRSF

SEQ ID NO: 68224 - protein, 433 aa, Pseudomonas putida
MAKLALEQAIAPEWVDQVFEEHRQRQYSRELLFSTIIKLMSLVSLGLKPSLHAAARQLDDLPVSLAALYDKISRTEPALLRALVTGCAQRLAPTIHELGCSAMLPDWQVRVVDGSHLASTEKRLGALRQERGAARPGFSVVVYDPDLDQVIDLQPCEDAYASERVCVLPLLAEAKTNQVWIADRLYCTLPVMEACEQVKTSFVIRQQAKHPRLIQEGEWQAPMPVATGTVREQSIEVKGGHRWRRVELTLHSPNDSGDNSLMFWSNLPESISAQQIADFYRRRWSIEGMFQRLEAILESEIETLGSPRAALLGFTTAVLAYNVLALLKRSVEQAHRDALPENWEASIYHLAVQIRGGYEGMQIALPSEYMPVVPMENLAQRLLELARNIQPRQVAKSPRGPKVLKAKAWVQGTAVHAHVSTDRVIKAAKTKRP

SEQ ID NO: 68225 - protein, 385 aa, Pseudomonas putida
MSKMHKSYTAVVVGLGVVGSATLWRLAQQQQDVLGLEAGAPINLQGSSYGGSRIFRQAYWEGSDYLSLLAEADLGWRELQATSHRPLLHYSGGLFIGPIRSGVVSGSAASAKAGGIAHQRLTAAEVEARFSVFRADENMEAVFEQGAFTIAADDARLQMLNQAVAHGAQMRFGSHVQDITRVESEFLLRLSDGQSVLAQKVVLATGAGLAGSLIPDLSGLLRPRSVPIYWCAFKSGAEQLFANFPAFLYELEDGRLLYGTPQIDNAEPGIKIGFHNHQQSALDPRTQLEPASDAQIEEISACVSRVFPDLIARPYASRKCVYTMTPDEAFIIGESKELPSVFYVSACSGHGFKFAPALGSCLARALAGQSLALQVPAFSRERFSH

SEQ ID NO: 68226 - protein, 282 aa, Pseudomonas putida
MSIEKIAVIGAGTMGNGIAQVCAIAGYQVLLVDVSDAALERGVATLSKNLERQVSKGTLDADKAAAAKARIRTSTDYTQLSAAQLVIEAATENLQLKQRILQQVAANVAADCLIATNTSSLSVTQLAASIEHPERFIGVHFFNPVPMMALVEIIRGLQTSDTTYAQALMVTEKVGKTPITAGNRPGFVVNRILVPMINEAIFVRQEGLASAEDIDTGMRLGCNQPIGPLALADLIGLDTLLAIMEAFHEGFNDSKYRPAPLLKEMVAAGWLGRKSGRGFFTY

SEQ ID NO: 68227 - protein, 439 aa, Pseudomonas putida
MTLNNLEIDTLVVGAGQAGVAMSEHLSKLGVPHLVLERNRIAQAWRTGRWDSLVANGPAWHDRFPGLEFNLDADAFAGKDQVADYFEQYVRKYNLPVRTGIEVKRVVRNSDRPGFTIDTSEGVIRANRVVAATGPFQKPVIPAIAPKDSNLHQIHSAAYFNPEQLPEGAVLVVGAGSSGVQIAEELMRAGRQVYLSVGAHDRPPRAYRNRDFCWWLGVLGEWDAEIAKPGREHVTIAVSGARGGHTVDFRALAHQGMTLVGLTQSFENGVARFQDNLVENINRGDDNYLALLDAADAYIERNGLDLPEEPEARQRLADPECMRNPLQQLDLAKAGVSSIIWATGYGVDFSWLQVDTFDANGKPQHQRGVAREPGVYFLGLPWLSRRGSSFIWGVWHDAKHVAGHIATQRTYTAYRDREQRAADEQQTAKISNVSTLGAH

SEQ ID NO: 68228 - protein, 495 aa, Pseudomonas putida
MTVSFNSIPSDLRVPLFYAEVDNSQANSATGSLLRLIVGQVNDDADAPEIGKLTLVPSLSLAKTIGGVGSMLADMYETWRGIDLVGEVWCLPLKATGTKAAGKVTITGTATEGGQVNLYIGGQRVRATVASGASAAAVATALAAAVNAAGLGVSATAATGEVALTCRWSGLSGNDIQLELNRQGRSNGELTPAGLTVTVTAMTGGVGTPDVAEALAVLGDEPFEFICAPWADATSLDAWKGFMDDTSGRWSWARQLYGHVYSACRGTLGELVALGDTRNDQHVTVYGFEPECPDPVWRQAAGYASRTAVFISADPARPTQTGELNGITPAPSGDRFMLTERQSLLTHGIATGYSSGGVQRIERGITTYRQNALGQPDNSFLDSETLHQSAYIINFLKGRITSKYGRHKLADDGTRFGAGQAIVTPNVIRAELIAGYYVLETLGIAENADLFAKYLIVERSTTDPARVNVLYPPDLVNQLRVLALQYQPRLQYAAS

SEQ ID NO: 68229 - protein, 545 aa, Pseudomonas putida
MTLSPLAGKPAPASVLVDIPRLLTAYYTGRPDATVAAQRVAFGTSGHRGSSLELSFNEYHVLAISQAICLYRQEKGIDGPLFIGADTHALSAPATASALEVLAANGVQVMLSKDDEYTPTPAVSHAILCHNRGRTQGLADGIVITPSHNPPQSGGFKYNPPNGGPADSDVTKWIEGKANELLAANLAGVKRMDHAQALQAPTTHRHDYVSNYVADLENVIDFDVIRGAGLRLGVDPLGGAGVRYWSAIAKHYQLDLEVVNTEVDPTFRFMTVDWDGQIRMDPSSPYAMQGLIGLRERFDVAFACDPDHDRHGIVTPDGLLQPNNYLAVAIDYLFRHRPQWRSDAAVGKTVVSSGLIDRVTQRLGRDLYEVPVGFKFFAQGLFDGSLGFGGEESAGASFLRRDGSVWATDKDGLIPALLAAEMTARTGRNPSQAYADLTEALGKPFATRVEAKADARQKALLSKLAPEQVKSTELAGEPIVQILSHAPGNGQAIGGLKVMTANGWFAARPSGTEDIYKIYAESFIDEAHLQRLVEEAQVLVDEAIA

SEQ ID NO: 68230 - protein, 396 aa, Pseudomonas putida
MLGLFGTAIGAGTLFLPINAGLGGFWPLLILAVLAFPMTYFAHRGLTRFVLSGRDGSDITEVVKEHFGITAGASITVLYFFAIFPILLIYSVALTNTVSSFMEHQLHMQPPPRAILSFVLILGLLAIVRCGEQATVKVMSLLVYPFIVALALLGLYLVPHWTGGILDSATEVPPASAFLHTLWLAIPVMVFSFNHSPIISAFAVDQKRRYGAHADERSGQILRRAHLLMVVMVLFFVFSCVLTLSSAQLAEAKAQNLSILSYLANHFSNPTIAFAAPLIAFVAIAKSFLGHYIGASEGLKGIIAKTGARPGAKALDRVVAALMLVVCWIVATLNPSILGMIESLGGPILAVLLFLMPMYAIRRVPSMRKYSGAASNVFVVVVGLVALTSVVYGLVS

SEQ ID NO: 68231 - protein, 341 aa, Pseudomonas putida
MSAPSTSTVVRVPFTELQSLLQAIFQRHGCSEAVARVLAHNCASAQRDGAHSHGVFRMPGYVSTLASGWVDGQATPQVSDVAAGYVRVDAAGGFAQPALAAARELLVAKARSAGIAVLAIHNSHHFAALWPDVEPFAEEGLVALSVVNSMTCVVPHGARKPLFGTNPIAFAAPCAEHDPIVFDMATSAMAHGDVQIAARAGQQLPEGMGVDADGQPTTDPKAILEGGALLPFGGHKGSALSMMVELLAAALTGGHFSWEFDWSGHPGAKTPWTGQLIIVIDPGKAEGQRFAQRSRELVEHMQAVGLTRMPGERRYREREVAEEEGVAVTEQELKGLKELLG

SEQ ID NO: 68232 - protein, 374 aa, Pseudomonas putida
MTSPALKDPAKTRVIVGMSGGVDSSVSALLLIEQGYQVEGLFMKNWEEDDGTEYCTAREDLADAQAVCDRIGIKLHTANFAAEYWDNVFEHFLEEYKAGRTPNPDILCNREIKFKAFLDYALSLGADLIATGHYVRRRDTGALTELLKGLDPNKDQSYFLHAVGGQEIARTLFPVGELEKPEVRAIAEKHGLATAKKKDSTGICFIGERRFSDFLKQYLPAQPGDIETTEGEVIGRHHGLMYHTIGQRQGLGIGGLKDASDEPWYVLHKDLARNVLVVGQGNEHPWLFSRALLASEIFWVNPVDLGSPRQLTAKVRYRQSDQRCTLERTASGYRAVFDEPQRAVTPGQSVVFYDGEVCLGGGVIEAAEPWSPRA

SEQ ID NO: 68233 - protein, 567 aa, Pseudomonas putida
  MISC_FEATURE (23)..(23): X=any amino acid
TNVTSAGTWPTCRSFQTSGRCWXSPRLPASSKAVKRLLGEARELVIATDADREGEMIARELVEHCRYRGPVQRLWLSALDDASIRKALARLLPGHETFNLYHSALGRSRADWLIGMNMSRLFTLLGRQSGYQGVLPVGRVQTPTLRLVVDRDRSIANFVPVPFWAIDVQLEHAGQRFNAQWRAPEDACDDQGRCLKQSLAQQAAADIGHAGTARAVKVATERVREAAPLPFDLGTLQELCSKKFGLGAQETLDIAQALYETHKLITYPRSDCGYLPQSQHAEAPAILAALQRADASLAPLQPYLEPQRRSRAWNDAKVSAHHGIIPTAAASDPSRLPAKHKAVYTLIRARYLAQFLPNHEYDRTQADFDCAGHALRAVGKQIVEPGWRRALPEALTPAKGREAPPAQVLPALREGQDCNVHGLQLKDLWTQPPKPFTEGDLIKAMKNVAKLVDDPRLKQKLKETTGIGTEATRASIIQGLLDRGYLVKNGKALSATPAAFSLIDAVPRAIADPGTTAIWEQALDMVQSGEMPLEEFVARQSAWMGKLVERCSGMRMTISGPAAGAAP

SEQ ID NO: 68234 - protein, 751 aa, Pseudomonas putida
MSNESKCPFHQTAGGGTTNRDWWPDQLNLRILHQHSSKSSPDPDFDYAKAFKSLDFQALKKDLTALMTDSQDWWPADFGHYGPLFIRMAWHSAGTYRIGDGRGGAGSGQQRFAPLNSWPDNVSLDKARRLLWPIKQKYGNKISWADLIVLTGNVALESMGFKTFGFSGGRADVWEPDEDVYWGSEKVWLGGDTRYGKDQVKAQPPGQGDLVAEPAKHGEEQNRDLSAERNLENPLAAVQMGLIYVNPEGPEGNPDPVASGKDIRETFGRMAMNDEETVALIAGGHAFGKTHGAGPADNVGPEPEAAGLEMQGLGWHNTFGSGKGGDTITSGLEVTWTSTPTRWSNEYLNNLFDFEWELTKSPAGAHQWRPKDGKGAGTVPDAHDPGKRHAPSMLTSDLALRFDPIYEPIARHFKENPDQLADAFARAWYKLIHRDMGPLARYLGPEMPNEELLWQDPLPKADPSTISEQDIATLKSRILASGLSVGELVSTAWASASTFRGSDKRGGANGARLRLAPQKDWAANQGVDKVLAALEKIQGEFNSSGKKVSLADLIVLAGTAAVEKAAKDAGYSGSVGFRPGRVDASQEQTDVESFAVLEPLADGFRNFTKARYSVKAEKLLLDKAQLLTLTAPELTVLIGGLRVLGANHGGSKLGVFTDKPGTLSNDFFRNLLDMSVEWKPTSADNETFEGRDRKTGQVKWSGSRVDLVFGSHAQLRALSEVYASSDGGDKFVRDFVAAWQKVMELDRFDLK

SEQ ID NO: 68235 - protein, 96 aa, Pseudomonas putida
MKLHYLLLAALPCLPLSVSAAPSSEESITAPETHNRELNVGDKAPDQYKRDDQAIQDWKAKGLPEPEKESHWVRMGKHYVLVQITNGVVLAIQPAS

SEQ ID NO: 68236 - protein, 130 aa, Pseudomonas putida
MRLTLPSLALGLLLCQGAFAGDGTAAIGGGLGGVLGNVVGQQLGGKTGAAIGAGVGGAAGSAVGARKGNRTEAAIGGGLGSAGGSLLGGAVGGKTGSTVGAGLGGAAGGALGNHLGDNNRGSKKHHRHRH

SEQ ID NO: 68237 - protein, 373 aa, Pseudomonas putida
MAFNTIEELLEDYRQGKMVLLVDDEDRENEGDLLIAAERCDAQAINFMAREARGLICLTLTDDHCQRLGLEQMVPANGSVFSTAFTVSIEAATGVTTGISAADRARTVAAAMAPNARPEDLVQPGHIFPLRAREGGVLTRAGHTEAGCDLARLAGFSPASVIVEVLNDDGTMARRPDLEVFAARHGIKIGTIADLIHYRLSTEQTVKRIGERELPTVHGTFRLVTYEDRIEGGVHMAMVMGDIRREQPTLVRVHVIDPLRDLVGAEYAGPANWTLWAALQKVAEEGTGVVVILANHESSQALLERVPQLTHPVRPYQRGQSKVYSEVGTGAQILQDLGVGKLRHLGPPLKYAGLAGYELEVVQSIPFDPGMDG

SEQ ID NO: 68238 - protein, 449 aa, Pseudomonas putida
FDFDLFVIGAGSGGVRAARFAAGFGAKVAVAESRYLGGTCVNVGCVPKKLLVYGAHVADELEQAAGFGWTLEEGHFDWGTLIANKNREIERLNGIYRNLLVNSGVTLLQGHARLTGANEVEVDGQRYTAEHILIATGGWPQVPDIPGKELAITSNEAFYLKDLPRRVLVVGGGYIAVEFAGIFQGLGADTTLLYRGDLFLRGFDGSVRTHLKQELEKRGLDLQFNADIQRIDKLEDGRLKATLKDGRELVADCVFYATGRRPMLDNLGLENTGVELDERGYIRVDEQYQTTAPSILAIGDVIGRVQLTPVALAEGMAVARRLFKPEQYRPVDYQNIPTAVFSQPPIGTVGLTEEQALEAGHKVQVFESRFRAMKVTLTDIQEKTLMKLVVDAETDKVLGCHMVGPDAGEIIQGLGIALKAGATKQQFDETIGVHPTAAEEFVTMRTVTR

SEQ ID NO: 68239 - protein, 279 aa, Pseudomonas putida
MIKKCLFPAAGYGTRFLPATKAMPKEMLPVVNKPLIQYGVEEALDAGLNEISIVTGRGKRALEDHFDISYELENQIKGTDKEKYLVGIRRLLNECSFSYTRQTEMKGLGHAILTGRPLIGDEPFAVVLADDLCVNPEGDGVLTQMVKLYKQYRCSIVAIQEVDPQETNKYGVIAGEMIRDDIFRVTNMVEKPAPEDAPSNLAIIGRYILTPDIFDIIANTKPGKGGEIQITDALLQQAKDGCVIAYKFKGKRFDCGGAEGYIDATNFCFENYYKTGKAY

SEQ ID NO: 68240 - protein, 618 aa, Pseudomonas putida
MLTDVLSMLAPQNRRLFKLNILTQTANDEFLLEHFSGTEELSKLYEFDLALLSQQSDVKLKSLIGSQATVEIELSNGSFRHINGYVQRFSTQGSDGGYVRYAAVLGPWLWMLTCRFDTRIFQEKSVQAVVSEVFAGFGTLAKYEFRVSKPLKSHSYITQYRESDFNFVQRLLESEGLFYYFEHTADSHLMVITDDSSTLLPLPEQPQIRYHSASVTETADSITQWQSTRQLQSGQIAVRTFDYRQPRNFLPVTMQSLNQQGDVDRFEIYDFPGQYTHGSYEDGEAIVRNRIEALELMGKTFYGESNCRAMKPGYTFELTQHYLHDTGAAENRKFLLLSVEHRGSNNYMTGDQAGYVNRFVCVRKKIAYRPQLNTRKPLINGPQTAIVVGPPGEEIFTDELGRVKLQFHWDRQGQFNDQSSCWVRVAQSGASGGFGSIQIPRVGDEVVVVFLDGNPDRPLIMGSLYNSTNTPPWSLPANKTQSGFLTRSMKGDGGTANFFRFEDKAGAEQIIMHAERNMDTEIELDETHDVGNNRSITVGGTHTETVKKDTVVQVTEGSYTLQVDNQFIQVAAKQHIILQVGDSSITLTPEGIEIKGKVIVTTSTDTTQITGAAVRIND

SEQ ID NO: 68241 - protein, 173 aa, Pseudomonas putida
MASRRADPDFFAIRNFHRMDYELQEGGIALPAGFEDRTVNMFVLGASVPAPLSITISRDTLLPDEALQAYVDRQVKLLTSKLRGYTRMGNKAVTLSVTAPIAGIQIDAYYMNQGRPLYQRQAAFIISPGRALIFSTTAQADFSAQQNQDWDNLLASFTPRAPSETSAESGEQE

SEQ ID NO: 68242 - protein, 1385 aa, Pseudomonas putida
MFEAARFGDEISHTSALGGFLIGAALGIALVATVAIATFTCGFGVALLAGLAAGIGGSLLTAAGEAIGSMFSSPSGTITTASPNVFINSRKAARVEKSIGACDKHPGPVQIAEGSTNVFINSVAAARKGDKLTCGATISGGSDNVIIGGGTYRYLPVDDEVPEWLRTTVDVLMAIAGAAGGIAQLIKAGTQAGMKAVMPCALKFTAGFVAGEVASRYVVEPVARKAIGGLVGNPVDLTTGRKLIPDEIDFSLPGLMPIEWSRFYASDLTVDSVLGRGWVLPWEQSLRRQGAFIYLTDNQGREVPFVTLQPGQRIYNPHEQVYLVCTEGGHYILQTLDNLFFYFGEVPDTNTEVPLQRIENVLGHFLHFTRTPDGTLTDISATGGTRVHLHYDNPLGRLTDIKRVVNNEAVETLTQYRYDEHGQLSAVINRNGDTVRSFSYADGLMVTHSNALGLGCHYRWQTLGDKPRVVEHWTSDGEHYHFRYDLDSRTSWATDVLGRELEVQYNADHRVVASRDYGGERYAIELDEHGNMVGLTLPDGNRLQFKYDEFSRLLEETDPLGRKTQYEYHHLTTLVTQVSYPDGSTWRARFDDKGNLLAEFDALGQMTEYLNSDDGLPHTIIDATYKSKYLWWNTLAQVERYQDCSGKSTYYRYDERQHLVAVTDALNQTTTLARKPDGEVLRISHPDGTTESFTYNVYGQVLSHTDGKGQTTRLMRTARGLPSSRQDAKGQRVRYEYDKAMRLTALVNENNATYSFAYDASDRLSEEVRVDNLTRRFSYDVGGHLTRLDEIGYGENAERPERHTLFERDAIGRLIAKLNSDAQQRFTYDDGDRLLSIERQPTGIGKQLGITEEKLEYAYDLLGRLTKEISPDGTLGYEYDPLSNLTTLTLPDGRKVNHLYYGSGHLHQLNLDGQVISDMERDDLHREVYRTQGKLTSCFGYDAMGRKAWQFASTLPADKLSQVHNTGINTSLLVEHAYNPIHRRYQYDPAGELVRTLDKLRGEIKYEYEANGQLRSRDTGSLIGSEEFRYDPAANRLDFNARQFDKVKDNRIKQWRDQEYRYDPWGNLIEKRSGHSKLQHFSYDCENRLVRAETLVNGKLESQGEYRYDSLGRRIAKQAEINGEVEQKRFLWQGLRMLREETPGQSILYLYEPGSYAPLARVDQVEGEGQKVYYFHTDQIGTPLELTDSEGEIVWQATYRSWGTIETLSIKEVDQNLRFQGQYFDAETGLHYNTFRYYYSEVGRYVTQDPIGLDGGLNLYRYGQNPAGWIDPWGWECWSTARKNYWKAEAKAPTRAYSPTNLVRMAEGKAPKMTVEVISRKTDKISIREYALELHHNDIPQRVGGAGVHDSSNLLALTPWEHEAVDQFRHVGSDLIRVIKGVDVW

SEQ ID NO: 68243 - protein, 315 aa, Pseudomonas putida
MRVFSKAQIVAHFNPELAVSQLEEGFIAYSEGKVQVPPVQGFAFKGANGDCCVKSAYIEGSPTFTVKLSTGFYDNPSKGLPSNDGLMLVLSAHTGQPLALLQDQGWLTAMRTALAGRIAARLLAPSQVKAIGILGTGMQAQMQLEQLRAVTDCRQVIVWGRHERGLAAYTAFARELGFAVHSTQDAAEVAGAANLIVCTTPSRQALLHSDWVQPGTHITAVGADAPGKQELDPALVARADRIIVDAIAQCSQYGEVAHALGCGRIDANQLIELGTLLAGRAKGREHDSQITLADLTGVAVQDAQVASHALAALCT

SEQ ID NO: 68244 - protein, 247 aa, Pseudomonas putida
YRWETLSGKPRVVEHWTSDGEHYHFADSRTSWATDVLGRELEVQYNADHRVVASRDYGGERYAIELDEHGNMVGLTLPDGNRLQFKYDEFSRLLEETDPLGRKTTYEYHHLTTLVNQVSYPDGSTWRARYDDKGNLLAEFDALGQMTEYLNSDDGLPHTIIDATYKSKYLWWNTLAQVERYQDCSGKSTYYRYDERQHLVAVTDALNQTTTLERKPDGEVLRISHPDGTTETFTCSVYRVATSTTGP

SEQ ID NO: 68245 - protein, 127 aa, Pseudomonas putida
MYIGKAAQLSGTTVKSIRHYEEIGLLPPPQREGKYRIYSQQSVELLTFIKCAQQLGFKLKEMQAILQDHRGQELPWDLAMQAIDNKKQELMGQIQALQQVHDGLVEFELSLKDAQMQCQFEHLEKAR

SEQ ID NO: 68246 - protein, 336 aa, Pseudomonas putida
MTDDHRLAEFIREQASATRVVIQARKRLSGGAIQENWLLDLLIEGGPWAGVRRWVLRSDALSALPASLDREQEFAVLQVVYQAGVKVPRPLWLCRDVRVHGRVFFLMEYVPGSAAGRALSTGAGPQGRAQLATQLGANLARLHQVRPPCATLCFLSVPDSSPALATIDAYRRYLDTLADAYPVLEWGLRWCELHAPRSSTLCLLHRDYRTGNYLASEEGLEAVLDWEFTGWGDPCEDLGWFTARCWRFTRPDLEAGGIGQLEDFLRGYHEVSSLCIERSRLHYWQVMATLRWAVIALQQGQRHLSGEEPSLELALTARLLPELELDILHMTGAEAP

SEQ ID NO: 68247 - protein, 1042 aa, Pseudomonas putida
MSRFFIHRPNFAWVVALFISLAGLLVIPSLPVAQYPNVAPPQISITASYPGASAKVMVESVTSIIEQSLNGAKGLLYYESTNNSNGVAEVMVTFEPGTDPDMAQVDVQNRLKQAEARMPQAVLTQGLKVEQASSGFLLIYALTSTAGNRGDTTALADYAARNINNELLRVPGVGKLQFFASEAAMRVWVDPQKLVGYGLSIDDINSAIRGQNVQVPAGSFGSTPGASEQELTATLAVQGTLDTPEAFAGIVLRANPDGSSVRLGDVARMAIGSENYNLSARLNGHPAVAGAVQLAPGANAIQTATLVKERLAELSQFFPEGVEYSVPYDTSRFVDVAIEKVIHTLIEAMVLVFLVMFLFLQNVRYTLVPSIVVPVCLLGTLMIMKLLGFSVNMMTMFGMVLAIGILVDDAIVVVENVERLMAEEGLSPVEATIKAMGQVSGAIIGITLVLAAVFLPLAFMSGSVGVIYQQFSVSLAVSILFSGFLALTFTPALCATLLKPVPHGHHEKAGFFGAFNRGFARVTERYSLLNSELVARAGRWMLAYVGILVVLGYSYLRLPEAFVPAEDLGYSVVDVQLPPGASRVRTDHTAEALEKFLMSRDAVANSFIVSGFSFSGQGDNAALAFPTFKDWSQRDKAQSAEAETAAINAQFAANGDGAITAVMPPPIDGLGNSGGFALRLMDRGGLGREALLAARDQLLARANGNPVILYAMMEGLAEAPQLRLHIDREKARALGVSFEAINSTLATAFGSAVINDFTNAGRQQRVVVQAEQGERMTPESVLRLYAPNANGEQVPFSAFVTTQWEEGPVQLVRYNGYPSIRIAGDASPGHSTGQAMAEMERLVSELPPGIGYAWTGLSYQEKVSSGQAASLFALAILVVFLLLVALYESWAIPLTVMLIVPIGALGAVWAVTLTGMPNDVYFKVGLITIIGLAAKNAILIVEFAKELWEKGYSLCDAAIEAARLRFRPIVMTSMAFILGVVPLAIASGAGAASQRAIGTGVIGGMLSATLLGVVFVPVCFVWVLTLLKRKPSPVQQAVEEAE

SEQ ID NO: 68248 - protein, 1224 aa, Pseudomonas putida
MKRVIKFTSLGLLGGVASVGLVLGLLLGTQAGSRWVLGKVPGLEVADFQGRLAGSWQASRLTWADGGSTVEMQAPLLAWSPACLLRATLCIDQLQADRIDMAFAPSTEPTESAPLQLPTLRLPLAIELGEVKVGQLRLDGSDLLGDLHLAAHWTNSGIRIDSLRLLRDDLQLSLQGDLQPEGDWPVKLQAQLQLPAVDEKPWQLALTANGQLQKTLELAGTSSGYLDATLSGQLQALAEHLPATLHIRSEAFKPAGALPDTLQLNALELDAKGDLLHGYKLSGKARLPAEQSPIALLLSGLVDSKGARLDALDLTASDSQRVKLQATADWQQGLSADAQLDWQDFPWLRLYPMETPPEVTLKRFNTQVHYRDGNYQGTFTGDLDGPAGAFSIASPFEGDLTQVKLPQLALTAGQGKAAGSVAVRFADTLAWDVDLQLSALDPAYWLAELPGTLAGPLRSKGELKGDVLTLDAQLDLKGRLRGQPAMLKAETQGAGQNWTLGTLAIQLGDNRINGSGSLQQRLAGRIDLDLPRLGQLWPRLQGRVKGRLDVAGTLQAPQGTLTLQGQRLAQAENRLQQLDLDARLDNAQRGVVELKATGIHLGDTALGTLQANGKGDIRQQALTLALDGPQLKLDLGLDGQLNKGDWRGRLATGRIQAGGQEWQLQAPARLQRLASGQLDFGAHCWRSGQASLCGDDQRLAPEPRLRYHLKQFPLGSLAQWLPKDFAWQGLLNADINLDIPASGPKGTVVVDASGGTLRVRDKGRWIDFPYQALRLDSTLAPRRIDTRLAFRGERLGELNVNARLDPLGKNKPLSGDFRLAGLDLSVARPFVPMVERLAGQLNGSGRLSGTLLAPQVNGNLMLSGGEVSGAELPASLQDLSLQALIAGEQVQLNGNWRSGEAGRGQLSGNLTWGQALGMDVRLQGQQLPVAVEPYATLEVAPDLTLRLIDDKLAVTGKVQVPKGKITVRELPPSTVKVSDDTVIVGHQTEEGKPPMAMAMDIDVEVGRDKLSFSGFGLTANLLGHVHIGDNLDTRGELSLADGRYRAYGQRLTIRRARLLFAGPIDQPYLDIEAIRKVDDVIAGIRLSGSAEQPTTKVFSEPAMSQEQALSYLVLGRPLGNTGEDNNMLAEAALGLGLAGSAGITGSLASSLGIDDFQLDTEGSGNSTSVVASGNITEKLSLRYGVGVFEPANTIALRYKLSKKVYLEAASGLASSLDIFYKRDF

SEQ ID NO: 68249 - protein, 166 aa, Pseudomonas putida
MSSAFTIMPSPVGMLTLVARGNCLAAVLWEEERENRVRLGALHRDDQCPVLRETARQLGEYFDGKRQRFELALDFAGTEFQRQVWAALLAIPFGETRSYSDIARQLGNPRAVRAVGAANGRNPISIVAPCHRVIGASGSLTGFAGGLAAKQYLLALEGRQSLALDL

SEQ ID NO: 68250 - protein, 460 aa, Pseudomonas putida
MLTIYNTLSKTKEVFKPLDGNKVRMYVCGMTVYDYCHLGHGRSMVAFDLVTRWLRKSGYELTYVRNITDIDDKIINRANENGETFDALTARMIDAMHEDERRLNILPPDQEPRATDHIAGMHAMIQTLIDKGYAYAPGNGDVYYRVGKFVGYGKLSRKRIEDLRIGARIEVDEAKQDPLDFVLWKGVKPGEPSWESPWGPGRPGWHIECSVMSTCCLGESFDIHGGGSDLEFPHHENEIAQSEAATGKQYANAWMHCGMIRINGEKMSKSLNNFFTIRDVLEKYHPEVVRYLLVASHYRSAINYSEDSLRDAKGALERFYHALRGLPRVAAKGGEAFVERFSVAMNDDFGTPEACAVLFDLVREINRLRDSDVEAAAGLAGRLRELGDVLGVLQLEADDFLRAGAEGKVDAAEVEGLIQARLKARADKNWAESDRIRDQLTAMGVVLEDSKGTTTWRLAD

SEQ ID NO: 68251 - protein, 209 aa, Pseudomonas putida
MELTPREKDKLLLFTAALLAERRLARGLKLNYPEAVALISAAVLEGARDGRTVAELMSLGREVLTREQVMPGIAEMLHDVQVEATFPDGTKLVTVHDPISETAKERRMIPGEIQVAAGDIELNSGRETVSVSVANHGDRPVQVGSHYHFYEVNDALVFDRAPTLGFRLDIPAGTAVRFEPGQARTVQLVAYAGKREVYGFQGKVMGALE

SEQ ID NO: 68252 - protein, 567 aa, Pseudomonas putida
MSHISRQAYADMFGPTVGDRVRLADTALWVEVEKDFTIYGEEVKFGGGKVIRDGMGQGQMLAAEAMDLVLTNALIIDHWGIVKADIGIKHGRIAVIGKAGNPDVQPGVNVPVGPGTEVIAAEGKIVTAGGVDSHIHFICPQQVDEALNSGVTTFIGGGTGPATGTNATTCTPGPWYLARMLQAADSLPINIGLLGKGNASRPDALREQIAAGAVGLKLHEDWGSTPAAIDCCLGVAEEMDIQVAIHTDTLNESGCIEDTLAAIGDRTIHTFHTEGAGGGHAPDIIRAAGQANVLPSSTNPTLPYTINTVDEHLDMLMVCHHLDPSIAEDVAFAESRIRRETIAAEDILHDMGAFAMTSSDSQAMGRVGEVVLRTWQVAHQMKLRRGPLAPDTPYSDNFRVKRYIAKYTINPALTHGIGHEVGSVEVGKLADLVLWSPAFFAVKPALVLKGGMIVTAPMGDINGSIPTPQPVHYRPMFGALGAARHATRMTFLPQAAMDRGLAEELNLRSLIGVVNGCRRVRKPDMVHNTLQPLIEVDAQTYQVRADGELLVCEPASELPLAQRYFLF

SEQ ID NO: 68253 - protein, 324 aa, Pseudomonas putida
MSNQFPSVRPRRLRQNESLRTIFQETEFRLEDLILPIFVEEGIDDFVPITSMPGVNRIPEKLLAQEIERYARAGIKSVMTFGVSHHLDADGSDTWNENGLVARMSRICKDTVPEMVVMSDTCFCEYTSHGHCGVLHDHGVDNDATLANLGKQAVIAAAAGADFIAPSAAMDGQVQAIRSALDGAGFHDTAIMAYSTKFASSLYGPFREAGGTALKGDRKSYQMNPMNRREAVRESLLDEQEGADVLMVKPAGAYLDVIADIRAASRLPLAAYQVSGEYAMIKFGGLAGAIDEGRVVRESIGAIKRAGADLILTYFAMDLAREGI

SEQ ID NO: 68254 - protein, 224 aa, Pseudomonas putida
MNSDLALLRLLQLASPGLPVGGFTYSQGLEWAVEAGWVRGVDSFAGWQREQVHDTLACLDWPVLARLYHACQAKDAEAFGHWSRFLLANRETAELRLEEQQRGAALARLLDGWQLGQAPAWRASLELTQLGGMAWLAAHWAIPLRQLALGHGFAWLEGAVMAGVKLVPFGQQAAQTLLRDLGADLPAALDQALALGDDQLGGGLPLLAIASSRHETQYTRLFRS

SEQ ID NO: 68255 - protein, 207 aa, Pseudomonas putida
MQSYQQPLRVGVGGPVGSGKTALLEALCKAMRDHYQIAVVTNDIYTKEDQRILTEAGALEPERIVGVETGGCPHTAIREDASMNLAAVEALARKFGNLEVIFVESGGDNLSATFSPELADLTIYVIDVAEGEKIPRKGGPGITKSDFLVINKTDLAPYVGASLEVMERDTQRMRPQRPWTFSNLKKGEGLQAVIDFIVERGMLGVRG

SEQ ID NO: 68256 - protein, 442 aa, Pseudomonas putida
MKVTVFGTGYVGLTQAVCLAQVGHSVLCMDVDADRVASLSEGHCPIFEPGLAPLLEKNLACGRLRFTTDAAAAANYARLQFIAVGTPPQADGSADLKHVFAVVDSILEHADGPKVIVNKSTVPVGTVHRIKARIAQAVADTSRFQVISNPEFLKEGSAVDDCMRPQRIIIGGAEAAEVELLRELYLPFNRNREKFMVMDARSAELTKYAANCMLATKISFINEIANLAEHLGADIEMVRRGIGSDPRIGYDFIYAGCGFGGSCFPKDLQALRHSAEAEGFETQLLRAVESVNEQQKGRLFSKIQRHYPGGLRGKVFALWGLSFKPNTNDIREASSRVLLEALWAAGARVQAHDPQAMEEIRRHYGPRADLQLVPCKDDALRGADALVIVTEWQDYRVLNLDEVPQQLADRVVFDGRNLYEPEHMASAGLAYYGIGRGKIAPA

SEQ ID NO: 68257 - protein, 174 aa, Pseudomonas putida
MFDNIRADLRAHGGDWGAQGFWVLLVYRFGRWRYTLRPALLRKLCSLIYKVLFKFVQIITGIELPCEVVIGRNFVIDHFGGIVVSGYARFGDDCRIRNGVVVGLKNVDEPIAPVFGNNVDIGTGAKVLGSIRIGNNVIIGANAVVLVDVPDNSLAVGVPAIIKARHPAAVASVE

SEQ ID NO: 68258 - protein, 250 aa, Pseudomonas putida
MAQWQNRWKRVIDQLAVIADDAAVQHLLDRLATPDTATVLGFVNAHAMNLVVRDGGYSQALSAADVLLRDGAGMAILYRCLGLEPGLNMNGTDFIPRLMAAYRGRKVAFWGTRQPYLDQAVQRCKAEFGIVPVSVHDGFASLQTYLQLARVQQPELIVLGMGMPKQEAVAAALAATGGPCLIVCGGAILDFLGGKVSRAPEWLRRLGGEWLYRLLREPKRLFMRYVVGNPLFLLRTLLYRRAAVSARRAL

SEQ ID NO: 68259 - protein, 528 aa, Pseudomonas putida
MISTANITMQFGSKPLFENVSVKFNNGNRYGLIGANGCGKSTFMKILGGDLEPSAGQVMLEPNTRLGKLRQDQFAYEEFTVIDTVIMGHGQLWKVKAERDRIYSLPEMTEEDGMAVAELETEFAEMDGYTAESRAGELLLGLGIPLEQHFGPMSEVAPGWKLRVLLAQALFSDPDVLLLDEPTNHLDINTIRWLETILTARNSTMIIISHDRHFLNSVCTHMADLDYGELRLFPGNYDEYMTAATQSREQLLSDNAKKKAQIAELQTFVSRFSANASKAKQATSRAKQIDKIQLAEVKPSSRVSPFIRFEQAKKLHRQAVVVEKMAKAFDDKVLFKNFDITVEAGERVAIIGPNGIGKTTLLRTLVGEMTPDAGSVKWTDSAEVGYYAQDHAHDFEDDMTLFDWMGQWTSGEQVIRGTLGRMLFSNDEILKSVKVISGGEQGRMLFGKLILQKPNVLVMDEPTNHLDMESIEALNLALENYPGTLLFVSHDREFVSSLATRIIELSADGVVDFSGTYDDYLRSQGVLV

SEQ ID NO: 68260 - protein, 318 aa, Pseudomonas putida
MTFKPLRQLGLALLASALLPSLASAEQTLRIGYQKSSTLLTLLKARGTLEQRLQAEGIRVTWHEFPSGLPLLEALNLGNVDLSADVADTVPVFTQAAGAKLTYFAREAPSPTAQAILVPADSPLKTLADLKGKRVAVTKAAGSHYLLIQALAKAGLTFKDITPAYLIPADGRAAFENHKVDAWVTWDPYVASAQRQQNARILVDGSELASYQRYYLAGSDYAKAHPEVLQQVYLALREAGAWTKANPEAAARILGPLWGNLDSATVQQANARRSYDVQPVKLDNLAEQQRIADAFYREGLLPKAVDTSAVDVYQPPSN

SEQ ID NO: 68261 - protein, 154 aa, Pseudomonas putida
MTAILALSLAAAAPAMAASLKDIAPYPEAEKGFTRQVIHLPAQADESAYKLEILAGKTLQVDCNRQRLGGNLEAHTLEGWGYNYYRLDNVSGPASTLMACPDGKKTEAFVPVVGDGFLLRYNSKLPVVVYVPKDVEVRYRVWSASQDVQKAKVE

SEQ ID NO: 68262 - protein, 377 aa, Pseudomonas putida
MSSFAELLQQGASQAWLYFPSAILLGALHGLEPGHSKTMMAAFIVAIRGTVKQAVLLGLASTLSHTAVVWLVAMAGMYLGQNLNAETTEPYFQLASAAIIITIALWMLWRTWRGEQMWRFEEGDDLQHDYHHHDEMQRIDTGHGRIELSIFEEGVPPRWRLNILTGHAWSAAEMSLLTTRPDGLAQQFRFVDRGDYLESVDEIPEPHEFTARLSLGHAGHSHDYDLEFHEHGHGHGHDHAELEGLELSLEGYQDAHERAHANDIRKRFSNRNVTTGQIILFGLTGGLIPCPAAITVLLLCLQVKEVALGAVLVLCFSIGLAITLVTVGAAAAIGARQASNRWPWLGAVARRAPYLSSLLIIGVGIYVGVHGWIGLNA

SEQ ID NO: 68263 - protein, 365 aa, Pseudomonas putida
MFELDHDLAQDIVDRAMAILPCNVNVMDSQGLILGSGEPERINTRHEGAQLVLANGRIVELDTDAAKCLKGVQPGVNLPLMLDGRLMGVLGLTGDPQQVRTYGELVRMTAEMLLAQRNLQADQQWRRQRCDDLLALLLGGSGNSPRLLDEARQLGLKPQLPRIPCLFEITSGPPAEALAAWLMSRYPDSWCVSPARQSLLWCRPAGVALDELRLLERLQRHGWDIERLALGSAAQSLEQLRRGYRRVRDLLAYGREVLPSERLLSLQRYRLPALLWRHRNDDALDELLEPLQRIRAKDSSGQLLATLRAWCAHDGQSQSCADALGIHRNSLRYRLERIAELGEVDPLRLEGMLSLYLGLQLLPTD

SEQ ID NO: 68264 - protein, 406 aa, Pseudomonas putida
MVIGHGAELVRERLAADDLNFVMQDKQLGTGHAVAQALPALTADTVLVLYGDVPLIEVETLQRLLAKANDQQLGLLTVTLDDPTGYGRIVRDEQGKVTAIVEHKDANDAQKAIKEGNTGILALPAARLADWMGRLSNNNAQGEYYLTDVIAMAVADGLVVATEQPHDAMEVQGANDRRQLSELERHYQLREGRRLMAQGVTLRDPARFDVRGEVSVGRDVLIDINVILEGKVVIEDDVQIGPNCVIKNTTLRKGAVVKANSHLEGAVMGEGSDAGPFARLRPGSVLDAKAHVGNFVELKNAHLGEGAKAGHLTYLGDAEIGARTNIGAGTITCNYDGANKFKTVMGEDVFIGSNNSLVAPVEIKAGATTAAGSTITQAVEAGDLAVARARQRNISGWKRPEKIKKS

SEQ ID NO: 68265 - protein, 364 aa, Pseudomonas putida
MKNINKTLFQALLATLAWPAANAMAMPVDQTRCEFEQLTSANLKVHVRDLNTLYVPRDARIGTTIGTPELFEATLDQNNLALLCRTYGERINFNFQAARGVHPPLPAVDGRFLDAPVLRTNIPGIGAIVELLHPFLGGTDQFIPDSRPPRVPFTAYYEQTLLGPATLATFRHRITLVKTGDLPPGEHQLDGVLVTGHLDWGGFGKVLEYTLRAMVIQTQCDASADVSANPVDLGEWSVNDFTGPGFTTPPAAFQVRLSNCQVDPDPGNETLATIELDGINGSRPIGPADENVFSLTDDSAARGIGIQMLYNGVSMPLNKEIDLVPLTSDNVPLNFQARFFQTEPNSSLRTGLAKGALNFTIRYR

SEQ ID NO: 68266 - protein, 152 aa, Pseudomonas putida; identical to SEQ ID NO: 67498
  MISC_FEATURE (51)..(51): X=any amino acid
  MISC_FEATURE (115)..(115): X=any amino acid
  MISC_FEATURE (146)..(146): X=any amino acid

SEQ ID NO: 68267 - protein, 232 aa, Pseudomonas putida
MISSSTVVNSVVEKLRQALARGQWRTGDMLPGQRELAEQLGISRPSLREAVTVLETLGLVRSLPGKGVLVLDADAQPSGVETSAAASLADVLELRYTLEPFIVGLVAQSANSQDIGQLRLTLMDMREALEADDSEAGVKAYIAFHEALFALTTNPIFQSVVQQTGNALKQSADMLRNSPEHLAARLKENEAVVRAIRERSSAQASAQMRQHIVAEGLRMGIALNIPDEHPHP

SEQ ID NO: 68268 - protein, 408 aa, Pseudomonas putida
MKFVDEVSIRVKAGDGGNGCMSFRREKFIENGGPNGGDGGDGGSVYMIADENLNTLVDYRYTRHHEAQRGSNGGSTDCTGKKGEDLFLRVPVGTTVIDASTQEVIGDLVTPGQKLMVAQGGWHGLGNTRFKSSTNRAPRQTTPGKPGEQRDLKMEMKVLADVGLLGLPNAGKSTFIRSVSAAKPKVADYPFTTLVPNLGVVSVDRWKSFVIADIPGLIEGASEGAGLGIRFLKHLARTRVLLHLVDIAPLDESSPADAAEVIVNELTRFSPSLAERERWLVLNKADMVMDDERDERVQEVIDRLEWEGPVYVISAISKQGTDKLSHDLMRYLEDRADRLANDPAYAEELADLDQRIEDEARAQLQALDDARTLRRTGVKSVHDIGDDDGWDDDFEDDEDGPEIIYVRD

SEQ ID NO: 68269 - protein, 91 aa, Pseudomonas putida
MPRSLKKGPFIDLHLLKKVEVAVEKNDRKPVKTWSRRSMILPQMVGLTIAVHNGRQHVPVLVNEDMVGHKLGEFAGTRTYRGHVADKKAKR

SEQ ID NO: 68270 - protein, 211 aa, Pseudomonas putida
MLTIALSKGRILDDTLPLLAEAGIVPTENPDKSRKLIIPTTQDDVRLLIVRATDVPTYVEHGAADLGVAGKDVLMEYGGQGLYEPLDLQIAQCKLMTAGVVGAAEPKGRLRVATKFVNVAKRYYAEQGRQVDIIKLYGSMELAPLINLADKIIDVVDTGNTLRANGLEPQELIATISSRLVVNKASMKMQHARIQSLIDTLRAAVESRHRG

SEQ ID NO: 68271 - protein, 404 aa, Pseudomonas putida
MREIVLINITGEDRPGLTAAITGVLLQGGVSILDIGLAVMHGTLSFGILVDIPDNEVATALLQSVQAKAHELNLQARYTPISEADYQHWADGHGEARHIVTLLSRKITPEQLQRVSAVISQYGLTIERIERLSARVALDAEIDKGKAAVEISVRGVPSDAQALRADFFALAEELSVDIAFQKDDLFRRNRRLAVFDMDSTLIEAEVIDELAKAAGVGEQVAAITERAMRGELDFRASFKERMALLKGLDVGVLDEIGASLRLTEGAENLFAELKRLGYKTAILSGGFTYFARQVQARLGIDYVFANELEVVDGKVTGVAVEPIVDAQRKADLLKKLASDEGLQLEQTIAVGDGANDLPMLSLAGLGVAFRAKPLVRQSAKQAISTLGLDGVLYLLGLRDRDARG

SEQ ID NO: 68272 - protein, 326 aa, Pseudomonas putida
MSQMSFSDFEYAGKRKQTRRERFLAEMDQVVPWAGLLGLIEPFYPKAGGGRKPYPLETMLRIHLLQNWFSLSDPAMEEALYEITPMRQFAHLTLSAPIPEDTTIMNFRHLLEKHQLAPAILAVINGYLQEKGLSLRQGTIVDATIIHVPSSTKNKDGERDPEMHQTKKGNQYFFGMKAHISADVESGLVHHVHGTAANVADVTQVAELLHGEENAVYADAGYTGVEKREEHENRDVIWQIAARRSTYSKLNKRSLLYKAKRKIEYCKAQTRAKVEHPFRVIKRQFGYVKVRFRGLMKNTAQLTTLFALSNLWMARKRLMGLGELRI

SEQ ID NO: 68273 - protein, 84 aa, Pseudomonas putida
MSPVTIYTTPHCPYCLSAKRLLSSKGITPDEINVETSPLHLAEMMQRSQRRTVPQIFVGKVHVGGFDDLARLDRKGQLEALLHA

SEQ ID NO: 68274 - protein, 546 aa, Pseudomonas putida
MAAKDVKFGDSARKKMLVGVNVLADAVKATLGPKGRNVVLAKSFGAPTITKDGVSVAKEIELKDAFENMGAQLVKEVASKANDAAGDGTTTATVLAQAIVNEGLKAVAAGMNPMDLKRGIDKATAAVVAELKNLSKPCADSKAIAQVGTISANSDNSIGEIIAEAMEKVGKEGVITVEEGSGLENELSVVEGMQFDRGYLSPYFVNKPDTMVAELEGPLLLLVDKKISNIRELLPVLEAVAKAGRPLLIVAEDVEGEALATLVVNNMRGIVKVAAVKAPGFGDRRKAMLQDIAVLTGGQVISEEIGLSLETATLEHLGNAKRVILSKENTTIIDGAGADTEIEARVKQIRAQIEETSSDYDREKLQERLAKLAGGVAVIKVGAGTEVEMKEKKARVEDALHATRAAVEEGVVPGGGVALVRALAAIIDLKGDNEDQNVGIALLRRAVESPLRQITANAGDEPSVVADKVKQGSGNFGYNAATGEYGDMIEMGILDPAKVTRSALQAAASIGGLMITTEAMVADLPEDKPAAGMPDMGGMGGMGGMM

SEQ ID NO: 68275 - protein, 410 aa, Pseudomonas putida
MNEYAPLRLHVPEPTGRPGCQTDFSYLRLNDAGQARKPAIDVDAADTADLSYSLVRVLDEQGDAQGPWAEDIDPQILRQGMRAMLKTRIFDSRMVVAQRQKKMSFYMQSLGEEAIGSGQALALNRTDMCFPTYRQQSILMARDVSLVEMICQLLSNERDPLKGRQLPIMYSVREAGFFTISGNLATQFVQAVGWAMASAIKGDTKIASAWIGDGATAESDFHTALTFAHVYRAPVILNVVNNQWAISTFQAIAGGESTTFAGRGVGCGIASLRVDGNDFVAVYAASRWAAERARRGLGPSLIEWVTYRAGPHSTSDDPSKYRPADDWSHFPLGDPIARLKQHLIKIGHWSEEEHQAVTAELEAAVIAAQKEAEQYGTLANGHIPSAASMFEDVYKEMPDHLRRQRQELGV

SEQ ID NO: 68276 - protein, 166 aa, Pseudomonas putida
MISDESDRFNPRDPKPADAGKPSKSAKRREARKLATQALYQWHMAQHSLNEIEAQFRVDNDFTDVDGAYFREILHGVPAIKGEIDKALVPCMTIALEELDPVELAVLRLSTWELIKRVDVPYRVVINEGVELAKVFGATDGHKFVNGVLDKLAPALREAEVKANKR

SEQ ID NO: 68277 - protein, 532 aa, Pseudomonas putida
MEHILVRHEQAATHMADGYARATGKAGVVLVTSGPGATNAITGIATAYMDSIPMVILSGQVPSTMVGTDAFQETDMIGISRPIVKHSFMIKNPTEIPEVLKKAFYLAQSGRPGPVVVDIPKDMTNPAEKFEYVYPKKVKLRSYSPAVRGHSGQIRKAAEMLLAAKRPVVYSGGGVILGGGSEALTEIAKSLNLPVTNTLMGLGGFPGTDRQFLGMLGMHGSYTANMAMHHADVIFAVGARFDDRVVNGPAKFCPNAKIIHIDIDPASISKMIKADVPIVGPVDSVLSEMLGILKEIGEQPDKAALDAWWKQIDEWRGNGELFPYDKGDGNVIKPQKVIETLCEVTNGDAFVTSDVGQHQMFAAQYYRFNKPNRWINSGGLGTMGFGFPAAMGVKLNFPDQDVACVTGEGSIQMNIQELSTCMQYGLPVKIVNLNNGVLGMVRQWQDMAYNGRHSHSYVESLPDFIKLAEAYGHVGIRITSLKDLKPKLEEAFAMKDRLVFIDIAVDRSEHVYPMQIKDGSMRDMWLSKTERT

SEQ ID NO: 68278 - protein, 132 aa, Pseudomonas putida
MKKTPLLNVALSRVIAGMGHGDILVIGDAGLPVPPGVELIDLAITPGLPDFASVLRVVLSELQVERHVLAEEMQKVVPPALVEIERLKGKLGKREWLTHEDFKVLSRSARAVVRTGECQPYSNIALISGVTF

SEQ ID NO: 68279 - protein, 331 aa, Pseudomonas putida
MKTTPLNNQDAAPVRRSGTYFGLGTYLGLAGALLAMIVLFSFLSSHFWSYGTFSTLANQIPDLMVLAVGMTFVLIIGGIDLSVGSVLALAASTVSVAILGWGWGVLPSALLGMAVAALAGSITGGVTVAWRIPSFIVSLGVLEMARGLAYQFTDSRTAYIGDAYAWFSNPVAFGVSPAFIIALLVIVLAQLVLTRTVFGRYLIGIGTNEEAVRLAGIDPRPYKVLVFALMGLLAGLAALFQISRLEAADPNAGSGLELQVIAAVVIGGTSLMGGRGSVISTFFGVLIISVLAAGLAQIGASEPTKRIITGAVIVIAVVLDTYRSRRAGRRN

SEQ ID NO: 68280 - protein, 336 aa, Pseudomonas putida
MWLVFMAIVIGLLVLDLGVLHRHDREIEMRESLLLYSGYFSVGVLFGAGVWYQLGAQSALEFYTGFLVEQSLSMDNVFVMAMIFSYFAIPRRYQHRVLFWGILGVVFLRAIMIGVGAALVQNFAWVLYIFGAFLLFTGVKMALSKEDSRPDLANNPILKFVRRHMRVTDQIHGSHFFVRHTPAGHSKALRYATPLFLALVLIELADLVFAVDSVPAIFAITQDPFIVYTSNIFAILGLRSLYFALAALMHRFVYLKYALALVLIFIGCKIFYHGMVGKVPALLSLGVTFGLLLGGVVISLIKTRGQTLNKDDKTIEKAANDKKTTGQKKNDPQLRV

SEQ ID NO: 68281 - protein, 118 aa, Pseudomonas putida
MEIFKEFTFESAHRLPHVPEGHKCGRLHGHSFKVGLHLTGPLDPHTGWIRDFAEVKAIFKPIYDQLDHNYLNDIPGLENPTSEVIAKWIWDQVKPLMPELSKVRIHETCTSGCEYTGD

SEQ ID NO: 68282 - protein, 871 aa, Pseudomonas putida
  MISC_FEATURE (19)..(19): X=any amino acid
  MISC_FEATURE (29)..(29): X=any amino acid
  MISC_FEATURE (30)..(30): X=any amino acid
  MISC_FEATURE (33)..(33): X=any amino acid
PGWRPTKPRQRMGALNAGXASRTPFRDHXXGKXLCLKPTRKHIEERAALGIVPQPLNAEQTAGLVELLKNPPAGEEAFLVDLITNRVPPGVDEAAYVKAAFLSAVAKGEAKSPLIDRKHATELLGTMQGGYNIETLVALLDDAELGAIAAEQLKHTLLMFDAFHDVAEKAKAGNTHAKAVLESWAAGEWFTSRPAIADKYTLTVFKVPGETNTDDLSPAPDAWSRPDIPLHALAMLKMARDGIEPQQPGSVGPLAQIEAVKAKGFPVAYVGDVVGTGSSRKSATNSVLWFFGDDIPYVPNKRAGGFCFGTKIAPIFYNTMEDAGALPIEFDCTNLGMGDVIDVYPYKGEVRRHDSDELVTTFELKTEVLLDEVRAGGRIPLIVGRGLTEKARAELGLGASDLFKKPEQPADSGKGFTLAQKMVGRACGLPEGQGVRPGAYCEPKMTTVGSQDTTGPMTRDELKDLACLGFSADLVMQSFCHTAAYPKPIDVTTHHTLPDFIRTRGGVSLRPGDGIIHSWLNRMLMPDTVGTGGDSHTRFPIGISFPAGSGLVAFAAATGVMPLDMPESILVRFKGKLQPGITLRDLVHAIPYYAIQKGLLTVEKKGKKNAFSGRILEIEGLDDLTVEQAFELSDASAERSAAGCTIKLPEKAIAEYLQSNITLLRWMIGEGYGDARTLERRAQAMEAWLAKPELLSADADAEYAEIIEIDLADVKEPVLCAPNDPDDARLLSSVQGEKIDEVFIGSCMTNIGHFRAAGKLLEKVKGGIPTRLWLAPPTKMDAHQLTEEGYYGIYGKAGARMEMPGCSLCMGNQARVQTGSTVVSTSTRNFPNRLGDATNVYLASAELAAVASIIGKLPTVEEYMQYAKDID

SEQ ID NO: 68283 - protein, 299 aa, Pseudomonas putida
MKIALVLIFVFSIAYVHLRGRVRHKLTRQLGDHSSFLAPINSFLYLFSKHPAKPYLPVEAFPELKPLQDHWQEIREEGRQLLHVGEIKKSDNYDDVGFNSFFKTGWKRFYLKWYGESHPSAMALCPRTTELLQGIGTVKAAMFATLPPGAKLVRHRDPYAGSYRYHLGLDTPNDDGCYIDVDGEKYAWRDGEGVIFDETYIHYAANTTEHNRIILFCDVEPPLKYRWATAFNRWFSRNVMAAAAAPNDASDKTGGINRLFTRIYKIRERGKALKKRNRMRYYLEKWAVVAALVLVFIYI

SEQ ID NO: 68284 - protein, 225 aa, Pseudomonas putida
MKILLVLTSHEQLGNTGEKTGFWLEELAAPYYAFIDAGAQLTLASPNGGQPPLDPKSNEPDFQTDATRRFEIDSVATHALANTLKLSDLNGAEFDAVFYPGGHGPLWDLAEDAASIALIERSIAAGKPVAAVCHAPAVLRHVKGSDGQPLVAGKAVTGFSNSEEEAVGLTQVVPFLVEDMLKAQGGHYSKTADWQVHVITDGLLITGQNPASSEATAHALLNVLS

SEQ ID NO: 68285 - protein, 375 aa, Pseudomonas putida
MAEAKVLSGAGLRGQVAGQTALSTVGQAGAGLTYRGYDVRDLAAGAEFEEVAYLLLYGELPTQAELADYKRKLKGLRDLPQALKEVLERIPRDAHPMDVMRTGCSVLGTLEPELTFEAQRDKTDRLLALFPAVMCYWYRFTHHGVRIDCTTDEDTLGGHFLHLLHGKKPSELHVKVMNVSLILYAEHEFNASTFTARVCASTLSDLYSCVTAAIGSLRGPLHGGANEAAMELIERFQSPQEATAELLRMLERKDKIMGFGHAIYKESDPRNEVIKGWSKQLADEVGDKVLYPVSEAIDKTMWEQKRLFPNADFYHASAYHFMGIPTKLFTPIFVCSRLTGWAAHVFEQRANNRIIRPSAEYVGVEQRQFVPIEQR

SEQ ID NO: 68286 - protein, 542 aa, Pseudomonas putida
MLVFALLLVLTLFSVRLNVLFSFWYNGFYSALQGLDQAAFWYLLGVFAVLATIHVLRSLFTFYVSQAFSIKWRVWLTERLTHDWMQGDAYYRGQFLAEPVDNPDQRIELDVNAFVTNSVSLALGAVSALVSLVAFTGILWGLSAPLTVAGVEIPRAMVFAVYLYVIIATWVAFRLGRPLIRLNFLNEKLTANFRYALMRLRENAENIAFYQGAQVERGTLLGRFAALIVNVWALVYRNLKFSGFNLGVSQVAVVFPFILQAPRFFSGAIKLGDVMQTSQAFGQVQDSLSFFRESYDAFAQYRATLDRLTGFLDANQQASALPRVTTEDQAHALQITGLQVLRPDGHALIADLDLSLHAGQALLIKGPSGSGKTTLLRALAGLWPYAEGKVRRPTGHQALFLSQRPYLPLGDLRTVIAYPAASNPKDELLMQQALRQVNLAHLAERLDVSCDWSHILSVGEQQRLAFARVLFNRPQVVFLDESTSAMDEGLEHALYALLRSEMPSALLVSVGHRSTLAAFHTHRLEVDGHGGWSLLEQEAVLA

SEQ ID NO: 68287 - protein, 295 aa, Pseudomonas putida
MNTQPRSLAATLFPIGLLLIAMASIQSGASLAKSMFPIVGAQGTTTLRLIFASIIMLLILRPWRVRMTANTLRNVVIYGMALGGMNFLFYMALQTVPIGIAVALEFTGPLAVAIFSSRRAIDFLWIALAIAGLLLLLPAGHSGQALDPVGAAYALGAGVCWALYILFGQRAGAEHGIQSAALGVVVAALFVAPIGIAHAGSALLTPAVIPMAFAVAILSTALPYSLEMVALTRIPARTFGTLMSIEPAFGALSGLLFLGEVLTLTQWLAILAIITASVGTTLSMRKAPSPAIAAD

SEQ ID NO: 68288 - protein, 446 aa, Pseudomonas putida
MPTCTLHPLPYQPDPAAYFAHLRQAPGAILLDSARPGAERGRFDLLSAWPLQQLQAQPDEDGRVFLQRLRAGLAQLGHADLPNGVELPFAGGLIGYLSYDFGRRLEHLPSLAVDDLGLPDAQLGLYAWALVSDHLLGTSQLVFHPSLAGDERERLISLFQDTSATTGDFRLLAPMAGDLEPEQYKTAFDQVQRYIQAGDCYQINLTQRFRAPCQGDPWRAYQALRQACPTPFSGYQQLADGSTLLSFSPERFIRVSQGQVETRPIKGTRPRASDPAQDQRNAQELLHSPKDRSENLMIVDLLRNDLGRTCEIGSVKVPELFSLESYPNVHHLVSSITGQLASDKDALDLIGDSFPGGSITGAPKIRAMQIIDELEPARRALYCGSLLYVDVRGEMDSSIAIRSLLIKDGQVSCWGGGAVVADSQWQAEYEESIAKVRVLMQTLQGL

SEQ ID NO: 68289 - protein, 971 aa, Pseudomonas putida
MSLIVLLLLPFVGSCLAAVLPHNARNAESILAGLVALVGTVQVALLYPQVAHGGVIREEFLWLPSLGMNLVLRMDGFAWLFSLLVLGIGALVSLYARYYMSPQDPVPRFFAFFLAFMGAMLGLVISGNLIQLVFFWELTSLFSFLLIGYWHHRADARRGAYMALMVTGAGGLCLLVGALLLGHVVGSYDLDKVLAAGHIIRQHALYPVLLPLILIGALTKSAQFPFQFWLPHAMAAPTPVSAYLHSATMVKAGVFLLARLWPVLSGSEEWFWIVGGAGALTLLLGAFAAMFQNDLKGLLAYSTISHLGLITLLLGLNSPLAAVAAVFHILNHATFKASLFMAAGIIDHESGTRDIRRLSGLIRLVPYTATLAMVASASMAGVPLMNGFLSKEMFFAETVFISSTAWVEATLPVIATLAGTFSVAYALRFTVDVFFGPTAQDLPHTPHEPPRWMRAPVELLVLTCLVVGIFPTQSVGPLLAAAALPVVGGTLPEYSLAIWHGWNAPMIMSLVAMSGGIVLYLLLRKQLRLGRFPYPPVIERFNGKRLFEHGQVHLMLLARRIERVLTTRRLQSQLFMLVFAAFLAGLTPMLYSGLSWGDRPKIPGSGVFVALWLIAIACAIGAAYQAKYHRLAALIMVSVCGLMTCITFVWFSAPDLALTQLVVEVVTTVLILLGLRWLPRRIEGVSPLPGSLERARLRRLRDLLLAVLVGGGMAVLSYAMLTRPTPNDISSFYLSRALPQGGGTNVVNVMLVDFRGFDTLGEITVLVAVALTVFALLRRFRPPKESMQLPAQQRQLAPDVVTDLINPRHATDTALGFMMVPAALVRLLLPIALLVSMYLFMRGHNQPGGGFVAGLVMSVAFILQYMVAGTQWVEAQMSLRPLRWMGTGLLCATLTGVGAMLLGYPFLTTHTAHLHLPLLGDVHVASALFFDIGVYTVVVGSTLLILTALAHQSVRAYRPGNPAKTSQAGAA

SEQ ID NO: 68290 - protein, 217 aa, Pseudomonas putida
MLRFCATRMLGLMENPMRVWWLSAGLALYCLAQSAAAGTLLVVGDSISAGFGLDSRQGWVSLLQARLRDEGFDEKVVNASISGDTSAGGQARLPALLAAHKPSLVVLELGGNDGLRGQSPAQLQQNLASMIERSRQAGAKVLLLGMRLPPNYGVRYTTAFAKVYEQLAADKQVPLVPFFLEGVGGVPELMQADGIHPAQGAQQRLLENAWPAIKPLL

SEQ ID NO: 68291 - protein, 282 aa, Pseudomonas putida
MSQQAILAGLIGRGIQLSRTPALHEHEGDAQALRYLYRLIDADQLQLDDSALPGLLEAAQHTGFTGLNITYPFKQAILPLLDELSDEARGIGAVNTVVLKDGKRVGHNTDCLGFAEGLRRGLPDVARRQVVQMGAGGAGSAVAHALLGEGVERLVLFEVDATRAQALVDNLNTHFGAERAVLGTDLATALAEADGLVNTTPVGMAKLPGTPLPVELLHPRLWVAEIIYFPLETELLRAARALGCRTLDGSNMAVFQAVKAFELFSGRQADAARMQAHFASFT

SEQ ID NO: 68292 - protein, 118 aa, Pseudomonas putida
MARVKRGVIARKRHKKILKLAKGYYGARSRVFRVAKQAVIKAGQYAYRDRRQKKRQFRALWIARINAGARTNGLSYSRLIAGLKKASIEIDRKVLADLAVNEKAAFAAIVEKAKAVLA

SEQ ID NO: 68293 - protein, 183 aa, Pseudomonas putida
MTIKREMRNDKRAVPKAPINENISAREVRLIGADGEQVGIVSIDEALRIADEAKLDLVEISADAVPPVCKVMDYGKHLFEKKKQANEAKKNQKQIQIKEIKFRPGTEDGDYQVKLRNLVRFLTDGDKAKISLRFRGREMAHQELGMELLKRVEADLAEYGTVEQHPKMEGRQLMMVIAPKKKK

SEQ ID NO: 68294 - protein, 70 aa, Pseudomonas putida
MSNRQQGTVKWFNDEKGYGFITPAGGGDDLFVHFKAIESDGFKSLKEGQTVSFVAERGQKGMQAAQVRPE

SEQ ID NO: 68295 - protein, 212 aa, Pseudomonas putida
MLLSDDLAKVADEFDVLIDFTHPSVTLKNLAFCRKHGKAMIIGTTGFTVEEKQLLAEAGKDIPIVFAANFSVGVNLSLKLLDMAARVLGDDVDIEIIEAHHRHKVDAPSGTALRMGEVVANALGRDLQEVAVYGREGQTGARDRKTIGFATVRAGDVVGDHTVLFAAEGERLEITHKASSRMTFAKGAVRAALWLDGREPGLYDMQDVLELR

SEQ ID NO: 68296 - protein, 231 aa, Pseudomonas putida
MNETLRAQQYALARHLRDPQRHAPPPGVEARRLKVYRELFYGAIEGLLAGSFPVMRQALGEQRWHARVRDFYASYRCQTPLFTEIAETFVDYLQHVALDTPWQLELAHYEWVEAQLYLSDAEDPAHDPSGDLLAGEPLLSCVARVLAYRWPVERIGVDYQPTAAPASPSLLLVYRDARLQVRFARLAPMAYRLLVEQGTGRERLQALGGDVQQGLALLEAFREQGVIVGTV

SEQ ID NO: 68297 - protein, 450 aa, Pseudomonas putida; identical to SEQ ID NO: 67505

SEQ ID NO: 68298 - protein, 90 aa, Pseudomonas putida
MNKSELIDAIAASADIPKAVAGRALDAVIESVTGALKQGDDVVLVGFGTFSVKERAERTGRNPQTGKAIKIEAAKVPGFKAGKGLKDAVN

SEQ ID NO: 68299 - protein, 368 aa, Pseudomonas putida
MSNAPILLTPGPLTTSIRTRQAMLVDWGSWDRDFNQLTASVCEQLLAIIDGASSHHCVPLQGSGTFAVEAAIGTLVPRDGKVLVLINGAYGQRLAKICKVLGRTYSTFETAEDQPTTAADVDRLLAEDPAITHVALIHCETSTGILNPLPEIAQVIKRHGKRLIIDAMSSFGALPIDAREIPFEALIAASGKCLEGVPGMGFVFAEKSALAAAEGNAHSLAMDLHDQHAYMAKTGQWRFTPPTHVVAALHEALQQYNEEGGLPARHQRYADNCKTLLDGMAAIGLRSFLPAEIQAPIIVTFHAPTDARYQFKDFYERVKAKGFILYPGKLTQVETFRVGCIGVVGADGMQAAVNAVAEVLREMEVLDI

SEQ ID NO: 68300 - protein, 444 aa, Pseudomonas putida
MNPTAKPELLAPAGTLKTMRYAFAYGADAVYAGQPRYSLRVRNNEFDHANLALGIEEAHALGKRFYVVVNIAPHNAKLKTFLKDLAPVIEMAPDALIMSDPGLIMLVRQHFPQMPVHLSVQANTVNWASVQFWQQLGLSRVILSRELSLDEIEEIRQQVPGMELEVFVHGALCMAYSGRCLLSGYLNKRDANQGTCTNACRWKYDATPATENATGDIVRQVQPTLGLGAPTDQVFLLQESNRPGTEMPAFEDEHGTYIMNAKDLRAIQHVERLALMGVHSLKIEGRTKSHFYCARAVQSYRQAIDDAVAGRPFDRALMGNLESLAQRGYTEGFLRRHVHDEYQNYQRGNSVSERQQFVGELTGVRVDGLAEVKVKNRFAVGDHLELMTPRGNYHFDLHRLCNRQQHAIEVAPGDGHVVYLPIPEQVALDYGLLMRDLRIDEAAS

SEQ ID NO: 68301 - protein, 298 aa, Pseudomonas putida
MSKRLMPSTTALQCFEAAARHLSFTRAAQELHLTQSAVSKQVAQLEDMLSHSLFQRIRRRLHLTPAGALYLTEVNKILTQIDISSRYILSYGDETEVLRIATQPTFGARWLVPRLKGFGDRYPRIHLDVRNELEPFDLVQAKADVAFFFGQGTWPGATCIELFSEEVVPVCSPQLLASHRFDSAQALTEHRLLQCVSRPEAWHEWFLGLGLHSQNSYHGPRFDTFYLCIRAAISGCGIALIPRYLVAEELSEGKLVVAWDHPVASNGRHFIAHAEHAAEVPKIRAFVQWIRERVAEGD

SEQ ID NO: 68302 - protein, 1235 aa, Pseudomonas putida
MSDRSARLQALQNALKERILILDGGMGTMIQSYRLEEHDYRGTRFADWPSDVKGNNDLLLLSRPDVIAAIEKAYLDAGADILETNTFNATQISQADYGMESLVYELNVEGARIARQVADAKTLETPDKPRFVAGVLGPTSRTCSISPDVNDPGFRNVTFDELVENYIEATRGLIEGGADLILIETIFDTLNAKAAIFAVQQVFEDDNVELPIMISGTITDASGRTLSGQTTEAFWNSVRHAKPISVGLNCALGAKDLRPYLEELATKADTHVSAHPNAGLPNAFGEYDETPAEMAAVVEEFAASGFLNIIGGCCGTTPGHIQAIAEAVAKYKPREIPEIAKACRLSGLEPFTIDRQSLFVNVGERTNITGSAKFARLIREENYTEALEVALQQVEAGAQVIDINMDEGMLDSQAAMVRFLNLIAGEPDISRVPIMIDSSKWEVIEAGLKCIQGKGIVNSISMKEGVEQFKHHARLCKRYGAAVVVMAFDEVGQADTAARKKEICQRSYDILVNEVGFPPEDIIFDPNIFAVATGIEEHNNYAVDFIEACAYIRDHLPHALSSGGVSNVSFSFRGNNPVREAIHSVFLYHAIQNGLTMGIVNAGQLEIYDEIPAQLREKVEDVVLNRTPHGTDALLAIADDYKGGGATKEVENEEWRSLPVEKRLEHALVKGITAFIVEDTEACRQQCARPIEVIEGPLMNGMNVVGDLFGAGKMFLPQVVKSARVMKQAVAHLIPFIEAEKGDKPEAKGKILMATVKGDVHDIGKNIVGVVLGCNGYDIVDLGVMVPAEKILQTAREQKCDIIGLSGLITPSLDEMVHVAREMQRQGFELPLMIGGATTSKAHTAVKIEPKYSNDAVIYVTDASRAVGVATQLLSKELKPGFVEKTRLEYVDVRERTANRSARTERLSYAQAIAAKPQYDWAGYQPTAPSFTGVKVLEDIDLRTLAEYIDWTPFFISWDLAGKFPRILTDEVVGEAATALYKDAREMLDKLIDEKLISARAVFGFWPANQVDDDDIEVYGEDGQALATLHHLRQQTIKPDGKPNWSLADFVAPKDSGVTDYVGGFITTAGIGAEEVAKAYQDKGDDYSSIMVKALADRLAEACAEWLHEQVRKEHWGYARDEHLDNEALIKEQYSGIRPAPGYPACPDHTEKETLFRLLDGTAIGETGPSGVYLTEHFAMFPAAAVSGWYFAHPQAKYFAVGKVDKDQIERYSARKGQDISVSERWLAPNLGYDS

SEQ ID NO: 68303 - protein, 211 aa, Pseudomonas putida
MTIGVIGRKCGMTRIFTEEGVSIPVTVIEIEPNRVTQFKTEETDGYRAVQVTVGERRASRVTAAQAGHFAKANVAAGRGVWEFRLEEGDFQAGDLIKAELFTAGQLVDVTGQSKGKGFAGTIKRWNFRGQDNTHGNSVSHRVPGSIGQCQTPGRVFKGKKMSGHMGAERVTVQSLEVVRVDAERNLLLIKGAVPGATGGDVVVRPAVKARG

SEQ ID NO: 68304 - protein, 267 aa, Pseudomonas putida
MSVPSFGLGTFRLTGQTVIDSVKSALAVGYRVIDTAQIYKNEAEVGQAIAESGVPRSELFITTKIWVDNYAADKLIPSLRDSLQKLRTDYVDLLLIHWPAPGNGVELPEYMKALADAKQQGLARQIGVSNFNIELTRQAIAVVGKGEIATNQIELSPYLQNSKLTAFLKEQGITVTSYMTLAYGKVLKDPVLAQIAAKHKATVAQVALAWALQLGYAVIPSSTKRENLASNLLARGLTLDTDDMARIAKLERNGREVSPDGLAPTWD

SEQ ID NO: 68305 - protein, 385 aa, Pseudomonas putida
MLFALAIGAFGIGTTEFTPMGLLPVIAQGVEVSIPSAGMLITAYAIGVMVGAPIMTLLFSRFGKRAALMALMAIFTLGNLLSSLSPDYYTLLASRLVTSLNHGAFFGLGAVVAASVVPKEKQASAVATMFMGLTIANIGGVPAATWIGQQIGWRMAFAGTAVLGLLAMAALWYALPKGERGSVPHVRKELAVIARPSVLLAMATTVLGAGAMFTLYTYVAPVLAELTGASDGFVTLGLVLIGVGFTLGNSLGGRLADWSLDGAAKIFLAVLALIMLAMPLVLGSHIGAAIALLVWGMFTFAVVPPLQMRVMTAAIEAPGLASSINVGAFNLGNAVGAALGGAVISLNLGYAAVPMAGGVLAAAGLLLVWLGGRHKVAGKTAADMA

SEQ ID NO: 68306 - protein, 382 aa, Pseudomonas putida
MTVTLSPLQIDCDFDSGNIQVLDASNPAQVHLAIRPDTHSGHYQWFHFKVSGLTPGQVHRFSLDNASGSSYKNAWSGYNAVASYDQQRWFRVPSQFDGTALSFEVKAEQDQIWFAYFEPYPRARHNQLIERACQLPGVELLASGRSVQGRDIPLLRAGDGAEGKRKLWLIAQQHPGEHMAEWFMEGVIDRLQANDTVVEQLLAKADLYLIPNMNPDGAFLGHLRTNFKGKDLNRAWQDASVEFSPEVFFAQAQMKQYGVDAFIDVHGDEEIPHVFTAACEGNPGYTPRLAKLEEQFRSTLCSLTRDFQTVHGYTRDEPGQANTTLACNAVGMAHDCLSLTLEMPFKDHDDAPDAVTGWSGARSKALAGAVLETLASMVGDLR

SEQ ID NO: 68307 - protein, 280 aa, Pseudomonas putida
MPAKRPDRQPLERCIPKDGRPVHHPPVRSVIIHRKMLGHAVVPERHVILLPTPANAELRSRRMGEQQPQQRIAFQFAQFIDACSESFIDEQRLAPAHRMRAHHRVRQRRVVAPGSLPARQVLRRGAKALQRERLGEVVGSGQPVQHFTQRRRQGLEGRNAAGPKGIATVSRQLLGAEYRAQCRGRQKGHVGVPHGVVAHIGNRRVEHKHLWGVWHVGVNRVDVQVAEACGKARLLFRVDRLVAEEQHLVLEQCLFDGIALFCADIAADVHAADLGAECWA

SEQ ID NO: 68308 - protein, 324 aa, Pseudomonas putida
MQGSHHWIYMMSSALPDVSVTDLAPSLSPLQWVGMQGIDLPVRIQEPTYQRELHARADVQVDLPAPHVKGIHMSRLYRLLDAWGQAAAVSPASLFALLQEMIDSHQDCESRSARVRLDFDLLVRRPALVTEGLSGWKSYPVHVLATKVGGALNLSIEVRIGYSSTCPCSAALSRQLIEDGFLRTFKDQPLLEVSAVAQWLRSNASLATPHSQRSEARVRVTVPADAPDLGLLALIDHVEGALRTPVQTAVKRADEQAFAALNGQNLMFVEDAARRIQASLHGYRDSQVHVRHLESLHPHDASAWSAPQAAAPDQQESFATGNER

SEQ ID NO: 68309 - protein, 923 aa, Pseudomonas putida
MASKQCQVCGQPATTRVEAKVNGRHSIMLLCDDHYRQLVRQQKRTLSPLEALFGSRSGLFEEFMGSDLLRIGEDSASVATDADEVAEASSGEPGRAASGTPRRRSSGLASRISEHSEALLQEAAKRATEFGRSEVDTEHLLLALADSDVVKTILSQFKIKVDELKRQIEAEAKRGDKPFEGEVGVSPRVKDALSRAFVASNELGHAYVGPEHFLIGLAEEGEGLAANLLRRYGLMPQALRQCVSKVVGKGAEDGRAEAPTETPELDKYSRDLTRMARDGKLDPVIGRAQEIETTIEVLARRKKNNPVLIGEPGVGKTAIVEGLAQRMVAGEVPETLRDKRLVELNINSLVAGAKYRGEFEERVQKVLKEIAEHQGELILFIDEVHTIVGAGQGGGEGGLDVANVFKPMMARGELNLIGATTLNEYQKYIEQDAALERRFQPVVVPEPTVAQTIMILRGLRDTFEAHHKVSITEEAIIAAAELSDRYVSARFLPDKAIDLLDQAAARVKLSATARPVAVQEMESELHQLRREQDYAASRKQYDNAAQISKRVEATEAELKQRVEEWERERGSGSTEVKAEHVAQIVSRLTGIPVNELTVEEREKLLHLEQRLHERLVGQDEAVRAVADAVRLSRAGLREGSKPVATFLFLGSTGVGKTELAKALAETIYGDESALLRIDMSEYGERHSVARLVGAPPGYVGYDEGGQLTEKVRRKPYSVLLLDEIEKAHADVYNILLQVFDDGRLTDGKGRVVDFTNTIIIATSNLGSDIIQRRLKAPGAAGEEYEKTKVEVMEVLRGHFRPEFLNRIDEIIVFHALGKQEIRHIVGLQLERVARNAASQGVTLTFDETLVDHLAQVGYKPEFGARELKRLIRSELETALAREMLGGGIGKGDHAHVRWDDKAERVGFDRRQAAPAKELDSENA

SEQ ID NO: 68310 - protein, 263 aa, Pseudomonas putida
MTFQHILFSIEDGVAFLSLNRPEQLNSFNTAMHLEVREALRQVRQSSDARVLLLTAEGRGFCAGQDLSDRNVAPGAEMPDLGQSIDKFYNPLVRTLRDLPLPVICAVNGVAAGAGANIPLACDLVLAARSASFIQAFCKIGLVPDSGGTWLLPRLVGMARAKALAMLGERLGAEQAEQWGLIYRVVDDAALRDEALTLARHLAAQPTYGLTLIKRSLNASFDNGFEAQLELERDLQRLAGRSEDYREGVNAFMNKRTPAFKGR

SEQ ID NO: 68311 - protein, 505 aa, Pseudomonas putida
MAALASNVQVAVIGAGAMGAGIAQVAAQAGHPVKLYDNRPGAAAQAVTGIDRQLARLVDKGKLLAAERETINARLCPVDTLEALADAGLVIEAIVENLQVKQALFSQLETLCAADCILASNTSSLSITSLAAGLERPQHVVGMHFFNPAPLMALVEVVSGLATDPAVAACIYATAQAWGKQPVHARSTPGFIVNRVARPFYAESLRLLQEGAADCASLDALMRDSGGFRMGAFELTDLIGHDVNYAVTCSVFDAFYGDFRFQPSLVQKELVDAGHLGRKTGQGFYRYAEGVERPQPAELHSSACAEACVVEGNLGVMQPLVERLRQSGIAVTQRAGSGLIQVGDATLALSDGRLASQRAREDGLRNLVLLDLALDYSSATRIAISWSADTSDSARDQAVALLQRAGLKVTGVADLPGLVVLRTVAMLANEAADAVLQGVGSAADIDLAMRAGVNYPCGPLAWAANIGIAHTLRVLDNLQCSYGESRYRPSLLLRRCEAKGGTLHD

SEQ ID NO: 68312 - protein, 437 aa, Pseudomonas putida
MYHDADRALLDPMETASVDALRQHQLERLRWSLKHAYDNVPLYRQRFAEYGIHPDDLKCLEDLAKFPFTGKNDLRDNYPYGMFAVPQEEVVRLHASSGTTGKPTVVGYTQNDIDTWANVVARSIRAAGGRKGDKVHVSYGYGLFTGGLGAHYGAERLGCTVIPMSGGQTEKQVQLIRDFHPDIIMVTPSYMLNLADEIERQGIDPHDLKLRLGIFGAEPWTDELRRSIEQRMGINALDIYGLSEIMGPGVAMECIETKDGPTIWEDHFYPEIIDPATGEVLPDGQLGELVFTSLSKEALPMVRYRTRDLTRLLPGTARPMRRIGKITGRSDDMLIIRGVNVFPTQIEEQVLKIKQLSELYEIHLYRNGNLDSVQVHVELRAECQHLDEGQRKLVVGELSKQIKTYIGISTQVHLQPCGTLKRSEGKACHVFDRRLAS

SEQ ID NO: 68313 - protein, 279 aa, Pseudomonas putida
MRTLIAFCLLALCLPATADQRLFYQPLNRDASVTPAQWQQLWQATAAQGGKTLIVQWSAYGDSDFGGAQGWLANSLRTARAEGLQLVLGLYMDPAYYQRLDELDGEGLNSYWKAQLGRSLSQYQQLRQAWQLPVDGWYLPMELDDQHLRETERRDALYSQLQAFNRQLDKPLHISAFSTGKLTPRVNAVWLDQLAGLGLTVWWQDGAGTGRLPALVRQGYEQALPCRVGVVREAFRQVSAPEQAFRAEPAEPRVGSGCHAEAVFALRYRPWARGILPQQ

SEQ ID NO: 68314 - protein, 547 aa, Pseudomonas putida; identical to SEQ ID NO: 68106

SEQ ID NO: 68315 - protein, 455 aa, Pseudomonas putida
MLKPLSLSQLTTALKGQHIGGDATFTGVSIDSRSVSAGQLFVALAGPRFDGHDYLADVKAKGAVAALVEREVADVDLPQLQVADCRLALGQLGALNRAAFDKPVVAITGSSGKTTVKEMLASILRTRGLVHATRGNLNNDLGAPLTLLEIAPEHSAAVIELGASRIGEIRYTVGLTQPQVVIINNAGTAHVGEFGGPDKIVEAKGEILEGLGQGGIAILNLDDKAFDIWKARAGAHKVVSFARSNPKADFHASDIGRDARGCPSFTLHGAGETVAVQLNVLGEHNVSNALAAAAAAHAVGLSLSGIAAGLAAVQPVKGRTVAQIAPNGVRVIDDSYNANPTSMCAAIDILAGFSGRTVLVLGDIGELGQWAEEGHRQVGDYARGKVDALYAVGSNMTHAVKAFGANGRHFATQAELIDAVSAENASDTTILIKGSRSAAMENVVAALCGASGEKH

SEQ ID NO: 68316 - protein, 582 aa, Pseudomonas putida
MMKLEGALYPWRFRVVIGLLAIMVGAICWRIIDLQVVDRDFLKGQGDARSLRHIPIPAHRGLITDRNGEPLAVSTPVTTLWANPKEMQASKERWPQLAAALGQNPQQLIERLTQQANKEFIYLVRGLTPEQGQHVLDLKVPGVYGLEEFRRFYPAGDVTAHMVGFTDLDDHGREGVELAYEEWLAGVPGKRQVIKDRRGRLIKDIQVTKNAKAGKTLALSIDLRLQYLATRELRNAIAEQDAKAGSLVIMDVKTGEVLAMVNQPTYNPNNRRSMFPAAMRNRAIIDVFEPGSTVKPISMSAALQSGRWKPTDKVEVYPGSLQIGRYTIKDVSRSEGPILDLTGILINSSNVGMSKIAFDIGGEAIYRVMSQVGLGQYTGLGFPGERVGNLPNHREWRKAETATLSYGYGVSVTALQLVHAYAALANDGKMVPLSIIKVDKTPEAVQAIPKEVAETVQGMLQQVIEAPRGVFRAQVPFYHVAGKSGTARKATVGAKGYTENAYRSLFAGFGPMSDPRYAIVVVIDEPRKGGYFGGLVSAPVFSNVMSGTLRLMNVPPDNLPPPAPAPAVPSQVNAAAAKGGRG

SEQ ID NO: 68317 - protein, 294 aa, Pseudomonas putida
MCAVTDVAGASKSTVGTLYVVATPIGNLDDMSARALKVLADVALIAAEDTRHSIRLLQHFGIDTPLAACHEHNERDEGGRFLSKLLAGENVALVSDAGTPLISDPGYHLVRQARAAGVSVVPVPGACALIAALSAAGLPSDRFIFEGFLPAKQAGRRARLEQVREEPRTLIFYEAPHRILECLEDMEAVFGGDRPALLARELTKTFETLKGLPLAELRAFVAGDSNQQRGECVVLVGGWSAPEGEQAISAEAQRVLDLLLAELPLKRAAALAAEITGVRKNLLYQLALEKQKAE

SEQ ID NO: 68318 - protein, 207 aa, Pseudomonas putida
MGATNRLACYSDPADHYSHRVRLVLAEKGVSVQLIDVDPAHLPRKLAEVNPYGSVPTLVDRDLALYESTVVMEYLEERYPHPPLMPVYPVARGNSRLLMHRIQRDWCALADTVLDPRSSEAARTEARKALRESLTGVSPLFSEFACFMSDEQSLVDCCLLPILWRLPVLGIELPRQAKPLLDYMERQFAREPFQASLSSVEREMRKL

SEQ ID NO: 68319 - protein, 303 aa, Pseudomonas putida
MIKQRTLKNTIRATGVGLHSGEKVYLTLKPAPVDTGIVFRRADLDPVVEIPARAANVGETTMSTTLVNGDVKVDTVEHLLSAMAGLGIDNAYVELSASEVPIMDGSAGPFVFLIQSAGLEEQDAAKKFIRILREVTVEEGDKRATFLPFEGFKVSFEIDFDHPVLRNRTQSASVDFSSTSFVKEVSRARTFGFMRDIEYLRKHNLALGGSVENAIVVDEDGVLNEDGLRYEDEFVKHKILDAIGDLYLLGNSLIGEFKGFKSGHALNNQLLRKLIAETDAWEVVTFEDASTAPISYMRPVAAV

SEQ ID NO: 68320 - protein, 412 aa, Pseudomonas putida
MIVGLDIGTSKVVALVGEVGEDGTLEIVGIGTHPSRGLKKGVVVNIESTVQSIQRAVEEAQLMAGCRIHSAFVGVAGNHIRSLNSHGIVAIRDREVSLADLERVLDAAQAVAIPADQRVLHTLPQDYVIDNQEGVREPLGMSGVRLEAKVHVVTCAVNAAQNIEKCVRRCGLEIDDIILEQLASAYSVLTDDEKELGVCLVDIGGGTTDIAIFTEGAIRHTAVIPIAGDQVTNDIAMALRTPTQYAEEIKIRYACALAKLAGAGETIKVPSVGDRPPRELSRQALAEVVEPRYDELFTLIQAELRRSGYEDLVPAGIVLTGGTAKMEGAVELAEEIFHMPVRLGVPHSVRGLSDVVRNPIYSTGVGLLTYGLLKQSEDLALTGNSNSSSNSYGDEPKAPVLERFKKWVQGNF

SEQ ID NO: 68321 - protein, 482 aa, Pseudomonas putida
MVESQKAMPQPKMGRIRRIHFVGIGGVGMCGIAEVLLNLGYEVSGSDLKASPVTERLESFGAEIFVGHRAENAATADVLVVSSAINPANPEVATALERRIPVVPRAEMLAELMRYRHGVAVAGTHGKTTTTSLLASVFAAGGLDPTFVIGGRLTAAGTNAQLGTSRYLIAEADESDASFLHLQPMVAVVTNIDADHMATYEGDFNKLKKTFVEFLHNLPFYGLAVMCLDDPVVREILPQVKRPTVTYGFSEEADIRAINVRQQGMQTHFTVLRRDREPLEVSVNMPGNHNVLNALATIAIATDEGITDEAIVQGLSGFQGVGRRFQVYGELPVEGGSVMLVDDYGHHPTEVAAVIKAVRGGWPSRRLVIVYQPHRYSRTRDLYDDFVQVLGDANVLLLMEVYPAGEEPIPGADSRQLCHSIRQRGKLDPIYIERGAELAPLVKPLLRAGDILLCQGAGDVGGLAPQLMKSPLFAGAKQEKSK

SEQ ID NO: 68322 - protein, 375 aa, Pseudomonas putida
MRSTNSAKAILPRRPVMAAEGKNVLIMAGGTGGHVFPALACAREFQARGYSVHWLGTPRGIENELVPQAGLPLHLIQVSGLRGKGKLSLLKAPFTLVKAVLQARRIIRQLKPVCVLGFGGYVTGPGGVAARLCGVPLVIHEQNARAGTANRLLVPLSARVCEAFPNTFEASDKRRTTGNPVRPELFMDAQRTPLGERRARLLVLGGSLGAEPLNKLLPKALSEVPAALRPEVFHQAGKQHAPITAERYHEAGVAAQVEPFIKDMAQAYGWADLVVCRAGALTVSELAAAGLPSMLVPLPHAIDDHQTHNAQYLAREGAAFLMPQATTGAAQLAERLNEVLMQPEKLNVMAGTARRLAKPAATSTVVDICLEVAHG

SEQ ID NO: 68323 - protein, 449 aa, Pseudomonas putida
MTTRILTGITTTGTPHLGNYAGAIRPAIRASQQPGVDSFYFLADYHALIKCDDPLRIQRSRLEIAATWLAGGLDPDKVTFYRQSDIPEIPELTWLLTCVAAKGLLNRAHAYKASVDKNVENGEDPDAGVTMGLFSYPVLMAADILMFNANKVPVGRDQIQHVEMARDIGQRFNHLFGQGKDFFALPEAVIEESVATLPGLDGRKMSKSYDNTIPLFTSAKDMKDAISRIVTDSRAPGEAKDPDNAHLFTLYQAFSTPEQCAGFREELLQGLGWGDAKQRLFQLLDGQLAEKREYYHQLIARPADLEDILLAGAAKARKIATPFLEQLREAVGLRSFRSSVQATAEVKKKATKSARFVSFRDEDGSFRFRLLAADGEQLLLSRSFADGKSAGAVSKQLQQGGEADVRIEGLSFGLWLNGEQVADGPQFDNAEARDAAIQSLNEALAPQQD

SEQ ID NO: 68324 - protein, 145 aa, Pseudomonas putida
MELSLLVWLLPTLALVIGVAVGFIVARLLPNAAPSNTQRQLDDIQKRFDSYQNEVVTHFNSTAMLVKKLTQSYQDVQDHLAEGANSLALDDVTRQRLLAALHSDAPQGPRDRLTPPKDTAEVPRDYAPKAPNSPGMLDESYGLKR

SEQ ID NO: 68325 - protein, 315 aa, Pseudomonas putida
MDTLQNMRAFSCVAQLGSFTAAAAQLDTTTANVSRAVSNLEAHLQTRLLNRTTRRIALTEAGKRYLMRCEQILTYVEEAEAEASDAHARPAGQLKVHSMTGVGQHFVVDAIARYRETHPDVTFDLTMANRVPDLLDEGYDVSIVLATELPDSGFVSQRLGITYSIVCASPAYIAQHGVAHKPADLLKHACLRMVSPVIPLEKWLFDGPEGQEMVNITSSPFMVNTADAMKTAIRSGMGVGVLPIYSAIEGLRDGSLVRVLPEYRLQELNLYAIYPSRQYLDAKIKTWVEYLRNSLPEILAAHEADLKTHQVLIAN

SEQ ID NO: 68326 - protein, 218 aa, Pseudomonas putida
MTNPLILEPQKTADACVIWLHGLGADRYDFLPVAEFMQERLLSTRFIMPQAPTRPVTINGGYAMPSWYDIKAMTPARAIDEAQLEESAEQVVALIKAEQAKGIDLTRIFLAGFSQGGAVVLHTAYIKWQEALGGVIALSTYAPTFNDQHQLSACQQRTPALCLHGVHDSVVIPSMGRTAFEYLNTWGVAARWYEYPMEHEVVVEELNDIHDWLSKQLQ

SEQ ID NO: 68327 - protein, 920 aa, Pseudomonas putida
MKRLCVVPPQRQEHSNMTVKYRNTSSAKAERETRLSTRAAREARNGLAVTLANLDASEQGLTEHEAAKRLVRDGANQVAHDPQPHALVQLLKALNNPFIYVLLTLAGISFVTDYWLPVSAGEADDADLTKVIIIMTMVSLSSLLRFWQEYRSNKAADALKAMVRTTATVLRREQIGQAPRLREVPMDELVAGDIVQLSAGDMIPADIRLLEARDLFISQAVLTGEALPVEKYDTLGNVAQKSAAEHGAHQDNLLELPNICFMGTNVVSGRARAVVVATGRRTYFGSLAKAIAGSRSQTAFDRGVNSVSSLLIRFMLVMVPVVFMINGVVKGDWADAFLFALAVAVGLTPEMLPMIVSANLAKGAVAMARRKVVVKRLNAIQNLGSMDVLCTDKTGTLTQDRIILEHHVGFDGQTDKHILELAWLNSHHQSGIRNLMDQAVLHFAGQDHQFQAPYAYAKVDELPFDFIRRRLSVVVKNALGDHLLVSKGAVEEMLAIATHVQEGDKVVALDPCRRQQLMARVDAFNQDGFRVLVVATRQIPADEGKAQYHTEDERDLVIQGLLTFLDPPKETAGPAIAALRDMGVQVKVLTGDNPVVTSKVCREVGLAPGQPLLGQDIEGMDDTTLKLQVEERTVFAKLTPLQKSRVLKALQANGHTVGFLGDGINDAAALRDADVGISVDSGTDIAKESADIILLEKSLMVLEEGVLKGRETFGNIMKYLCMTASSNFGNVFSVLVASAFIPFLPMLAIHLLLQNLMYDFSQLSLPWDRMDKEFLSKPRKWDARNIGRFMLWIGPTSSIFDITTFALMWYVFAANSVEMQALFQSGWFIEGLLSQTLVVHMLRTRKVPFFQSTAALPVVLATGLVMALGIYIPFSPVGAMVGLVPLPWEYFPWLVATLLGYCVVAQAMKTLYIRRFGQWF

SEQ ID NO: 68328 - protein, 336 aa, Pseudomonas putida
MGRQHYQHLRNVPQAQLCAVADPGPQAEAFAAECGVPCFADHRQMLEQVRPEAVIVANPNTLHVATALDCVEAGVPVLVEKPVGVNLDEVRALVEASRRRGVPVLVGHHRRHNPLIAKAHQVINEGKLGRLINVTALWQLQKPDSYFETPWRREPGAGFLLTNLIHDLDLLRYLCGEVVQVQAFTRNDVRGFANEDSAAVLLQFANGALGSLTGSDAVAAPWSWELDAGESPVYPRQDGQPCYLLAGTQGALSIPQLKRWHYAEAGSGWHTPLLQSSESIPAGEALTLQLQHFVRVARGEQAPLIDAADGGRTLALIEAIRQAAQSGRACAPAHIG

SEQ ID NO: 68329 - protein, 406 aa, Pseudomonas putida
MFVTTLGVEHDHGAEDVHQQGDEHQYQCRVHQHFDLVRAGFREVQRQQRRQGVGRCEQGQGNGVGVADQHGQRHGFTECTAQAQHQRTEDAGSRRGHHHLEDGFPVGSTHAVGSLLGFHRYAGQRILGNRRDGRQDHDRQHQRRRQQAWATQGGAEKRDPAQLAVQPGGQRTNRRDDHIDAPQAVHHAGDGGEQLDDGAKHRGKLGRKEILGQENGHADAEETGDQQGDQGAVKRTPDRWQNTVLALVNVPDAAEQHVKTVLFNPRQCLAADFVDQREDQRQHQHHANARKRTEGAIDQKVFRRRWLARGVGVIRYGKRSVHWRVPGQGTNTPGMASCQYRERLGITGCWRTLYAPGRLPTAAAGCNPSSRRWSGLWSGCTRPFHAWPWLFPGCRCPCGKSSRYRK

SEQ ID NO: 68330 - protein, 528 aa, Pseudomonas putida
PSRYWARWPGLGGWNLYFFAKFLLVALGMLDFQALPNLLFAAFLLVPLPGKWLRIARQLLAVPIGIALFYQDTWLPPFSRLLAQPGVLDFSWDYLLELLGRFINWNLLGALAMLLVGYLYLRHWLRLSTLSLLGLAWLSVGGLPSLVAGQAPGVAARTAAEPAPATAAADNATLDSWLERFFASERERVTAFPAVSADEQPFDLLVINICSLAWDDLSAVGLRDNPLLSRMDVIFDQFNSATSYSGPAAIRVLRASCGQSSHAGLYQPAPEQCLLFQNLARLGFQSNTLLNHSGRFDNFIGDITQQRMPQPGMRNTDFPRALVGFDGSPIASDLDVLRRWWGQRKGTPDEHVSLFYNSISLHDGNRIVTADGGTRVADYATRANRLFGELGTFLDELEGSGRRVVVAIVPEHGAALHGDRMQLSGMREIPTPSITHVPVGLKFIGMGQPARNEPLRVTAATSYLALSELISRVYAGLGQQQVLDVPGLLTDLPTTEQVAETSGAQVLNYQGRAYMRLQGQPDWQPIPK

SEQ ID NO: 68331 - protein, 233 aa, Pseudomonas putida
  MISC_FEATURE (28)..(28): X=any amino acid
CRKRASWPNTSTAWLQPWSRLRPTMPSXPRALLAVQEQERTQLAQTLHDDLGQYLAGMRAQLCLLRMVAEQPEMVTQTVQALELNCERLQQGFRALVHNLYPVALHYMPLAEAFGLLVSQWQASQGIECRLRVGEHLPALPGPSRTHLYRLLQEALTNVARHAGASQVRVRLQRSPKGLRLFIRDNGCGAHQPQRPGVGLHSMAERARSLGGELRIFSRPGGGWALALNIPQE

SEQ ID NO: 68332 - protein, 372 aa, Pseudomonas putida
MMMRQMLVGLVALGLPVFANAGSVCPWPAWERFKAELVSVDGRVIDPSDERLITTSEGQSYALFFALVGNDRQTFAQLLRWTSNNLAEGDLARHLPAWLWGRDGQQQWQVLDANNASDADLWIAYSLLEAGRLWDQPAYTQLGQHLLWRIAAQTVRKLPGLGVMLLPGDYGFEDAQGTRLNPSYLPLQLLDRFSDVDPLWGELAANTRRLWLASSPKGFAPDWLLWTPAGKPAADTKHGNAGDYDAIRVYLWVGMLAEGAAQRRELVAHYAPMAALTQRQGLPPEHLDARSGEARGHGPAGFSAALLPLLAASPEHVAGLAAQRQRLREQPVEAKAYYSQVLALFGQGFDEARYRFDPHGRLLPAWSAPCSE

SEQ ID NO: 68333 - protein, 1144 aa, Pseudomonas putida
  MISC_FEATURE (636)..(636): X=any amino acid
RVDAGGNNLPGRCATQGIDEQRQWLLDQVRRGEALHRDDLVRDALGRLQLLEPRNPDVLLAALSLALREKNSSEAEQLSARISAVAPGSLQARQAARLLELQQPAPARRLQQARLLAVTGRNEEALAVYEQLFAGEPPSLELALDYWRVRGNLPGQRPEAIRQLQRLDQQYPGSAGLRQTLAGWLFAEKRDREALALLDQLARDPGARDAAAQREFDYLSGQAVSATSAAAWQAFLQRYPASPLLAQASETLQQQRKLLADPAWQAGQRGKALLDKGLNAEAETQLRRALRQYPGDASLHGALGYALMRQGRHEDAHAAFRAASAKEQDTYWISQWKDLESSSQYWALLKKAERALEVKDVRGARALYQQARQQRPKDEYALLGLADVSLAEGDVAAAERQYLQVRRMAPDNESAVRGLMRVYQAQSPGKAQAYLDSLPPRQQAQFASLRRSLELARLRQQGDEALQREDWSTASHVLGQASALAPDEPWLVYQLANSLRHQGRTGEADAAFARLVQHQPRDPATRYANGLFLESSDRDALALESLRAVPQATWSADMHALEQRVQRRMTLASAQQLQAQGRSAEATALLEAGLARGEGSPDDLMLLADWAAARGEHGKARSYYQRVLGRAAWAPXCTPWGDGKRRGRRNLQQARHMLGVKVPQFAADDGNAQRRLAAVWTALGEHDQAARLLDRIAAQQTRPDPLLRRDAARLVAQDDPQRALDLYAAAMADAQLLDRAAVAPRDDRALTLASREQDGDDWLARSLRSDVDALYRQRNTHVTLMHDYGWREDDGTPGTSELSTQSTLLHVDTPWQEGTAFARVERIGMDAGSFEPNDQGSYTPDFGSCQFVGQTADGKTLPACTGGSQTANGSLLALGWQGSRWAFDLGTTQGYAINNWLGGATVNGDLGQVGWSLTASRRPMSNSLLSFAGARDRPTGVRWGGVTANGATLGLSWDQGGDNGVWASLGHHWLYGENVADNQRTRAMAGFYHRVVEKADERVRVGVTLMHWRHDKDLGGYSLGQGGYYSPQRYSSVGVPVSYAWRNYDWSLLLEGSVSWSQAHSGSSRLYPDAHINRKVLANYGVDSNIDAMTEASDSSGLGYRLRGLFERRLSDQWVLGGGFDWQHSDDYAPSHGMLYLRYL

SEQ ID NO: 68334 - protein, 450 aa, Pseudomonas putida; identical to SEQ ID NO: 67505

SEQ ID NO: 68335 - protein, 166 aa, Pseudomonas putida
MSPWVGLAAAVVLVASHWGAYEHGRSVEQAQAGQVSAKRDSGDRLAEVIGERGARQQEHQRAQAQEEARVHGHEERSIASAGADGADAAGQRLRDEGAKLAAAVSCPGADTAAVARGQAATRAAMVLSDLLTRSVETNRELAKAYDQSRIAGEQCRREYDALLPSG

SEQ ID NO: 68336 - protein, 123 aa, Pseudomonas putida
MATINQLVRQPRKRSVEKSDVPALQNCPQRRGVCTRVYTTTPKKPNSALRKVCRVRLTNGFEVSSYIGGEGHNLQEHSVVLIRGGRVKDLPGVRYHTVRGSLDTSGVKGRNQGRSKYGTKRPK

SEQ ID NO: 68337 - protein, 122 aa, Pseudomonas putida; identical to SEQ ID NO: 67499
  MISC_FEATURE (19)..(19): X=any amino acid

SEQ ID NO: 68338 - protein, 137 aa, Pseudomonas putida
MVAHLIQFATDHYILVAIFLILLVLLLINEIRRGGQSLTNGQLTALVNAEKALVIDIRPAKEYSAGHIVGAVNIPQDKLANRMTELGKHKEKTLIVVDAMGQQSGTICRELLKAGYNAAKLSGGVSSWKADNLPLVK

SEQ ID NO: 68339 - protein, 444 aa, Pseudomonas putida
MTMLSIAGVIGAGLFVGSGHAIAAAGPAVLLAYAAAGTLVVLVMRMLGEMAVASPDTGSFSTYADRAIGRWAGFTIGWLYWWFWVLVIPLEANAAAAILHAWFPAVDLWAFSLIITLALTLTNLCSVKNYGEFEFWFALLKVLAIIGFIAVGCAALFGFVPSSQVSGTSHLFDTQGFMPNGLGAVLAAMLTTMFSFMGTEIVTIAAAESKDPGKQISRATNSVIWRICLFYLVSIFLVVALVPWNDPALAETGSYQTVLSRIGVPNAKLIVDIVVLIAVTSCLNSALYTSSRMLFSLSKRGDAPAIAQRTTKAATPHVAVLLSTAAAFLCVFANFVAPAQVFEFLLASSGAIALLVYLVIAVSQLRMRAQREARGEKITFKMWLFPGLTWATIAFIVAILVVMALREDHRAEIIATALLSIGVVAAGLLVHRKREAAGRAALDS

SEQ ID NO: 68340 - protein, 192 aa, Pseudomonas putida
MDKPMTDTREKILATAEKLIYENGIHATGMDLLVKTSGVARKSIYRYFANKDDVAAAALNARDIRWMTWFRSECEKAQTPEARILGIFDALKSWFESDGFRGCAFINTAGEVGNADDPVRQIAKLHKQKLLDYTLELTSELGVNDPTGLAKQLLLIIEGTITVAHVMGDHTALDSAREIAKVLLKDVQRASA

SEQ ID NO: 68341 - protein, 284 aa, Pseudomonas putida
MSLDNISCQKSFGGWHKRYRHHSKVLGCDMVFAVYLPPQAEQGEKLPVLYWLSGLTCTDENFMQKAGAQRLAAELGLIIVAPDTSPRGEQVPGDPDGAWDFGLGAGFYLNATQQPWAQHYRMHDYVVEELPALIEAHFPASGERSISGHSMGGHGALVCALRNPGRYRSVSAFSPISNPMDCPWGEKAFSRYLGEDRGRWREWDASVLLAETPAGQCPPLLVDQGDRDDFLEKQLKPEALEQAARKGGHAMTLRMQPGYDHSYYFIASFIEEHLRHHAVALGRV

SEQ ID NO: 68342 - protein, 584 aa, Pseudomonas putida
MPVRYCMAAALSLALSMAYAQEPVFDDNGTPMYEVNFVDTELGEFIDSVSRITGTTFIVDPRVKGKVTVRTVDLHDADAIYDIFLAQLRAQGYATVDLPNGSVKIVPDQAARLEPVPVEAGGQQGEGSDSVATRVFSVRNAASEQVLGILKPLIDPRVGVITPYPAAHQLVVTDWRSNLERIASLLRQLDRPQEVPGSGSTQVIYLRHANAGEVVKVLRGLSQEGAVPVEGAGEAEGKDRPVVPAAGGSGIRLEYEEGTNAVVMVGPDSELAAYRAIVEQLDIRRAQVVVEAIIAEVSDSSAQELGVQWLFADEKFGAGIVNFGSNGVNIASIAGAAASGDNEALGDLLSTTTGATAGIGHFGGGFNFAMLVNALKGKSGFNLLSTPTLLTLDNAEASILVGQEVPFVTGSVTQNNANPYQTIERKEVGVKLRIKPQINIDNSVRLDIVQEVSSIADTSSASDVITNKREIKTKVMVEDNGLVILGGLISDELSTSDQRVPLLGDIPYLGRLFRSDATRNTKQNLMVFIRPRILRDGPSLAGLSEDKYRTLQQTTPLQLPDLAEGTRLLQVFPASRARLEGGDW

SEQ ID NO: 68343 - protein, 525 aa, Pseudomonas putida
MALDIHAHRILILDFGSQYTQLIARRVREIGVYCELHPFDMDDEAIREFNPRGIILAGGPESVHEANSPRAPQAVFDLNVPVLGICYGMQTMAEQMGGKVEGSDLREFGYARVDVVGKSRLLDGIEDHVDDDGVLGLDVWMSHGDKVTQMPGNFNILASTPSCPIAGMYDDVRGYYGVQFHPEVTHTKQGGRILSRFVQDICGCEALWTASNIVEDAIAQVRAQVGSANVLLGLSGGVDSSVVAALLHRAIGDQLTCVFVDNGLLRLHEGDQVMAMFKENMGVKVIRADAEKQFLDNLEGEADPEKKRKIIGRTFIDVFDAEASKLENIQFLAQGTIYPDVIESAGAKSGKAHVIKSHHNVGGLPEEMNLKLVEPLRELFKDEVRKIGLELGLPYDMVYRHPFPGPGLGVRILGEVKKEYADILRRADHIFIEELRKADWYHKTSQAFVVFQPVKSVGVVGDGRRYAWVVALRAVETVDFMTARWAHLPYELLETVSGRIINEIDGISRVTYDVSSKPPATIEWE

SEQ ID NO: 68344 - protein, 134 aa, Pseudomonas putida; identical to SEQ ID NO: 67497
  MISC_FEATURE (20)..(20): X=any amino acid
  MISC_FEATURE (25)..(25): X=any amino acid
  MISC_FEATURE (77)..(77): X=any amino acid
  MISC_FEATURE (80)..(80): X=any amino acid
  MISC_FEATURE (86)..(86): X=any amino acid
  MISC_FEATURE (127)..(127): X=any amino acid
  MISC_FEATURE (129)..(129): X=any amino acid

SEQ ID NO: 68345 - protein, 67 aa, Pseudomonas putida
MSTIYKELVAYFGTQEVTAERLNVDQSTVSGWVRGKHGMSPVVAKRAERLTEGKFKKEALCPGFPWD

SEQ ID NO: 68346 - protein, 402 aa, Pseudomonas putida
MIGRASTAQKNRALQAAADALDAARAELTAANELDLAAGRASGLEPALLDRLALTPARIDGMITGLRQVASLPDPVGAIRDMSYRPSGIQVGKMRTPLGVIGIIYESRPNVTIDAASLCLKSGNATILRGGSEAIHSNRAIATCIQRGLAEAGLPAAVVQVVETTDREAVGALISMPEFVDVIVPRGGRGLIERISRDARVPVIKHLDGICHIYVSQHADLDKAWNVAFNAKTYRYGICGAMETLLVDQQVAERFLPEMARRFVEKGVELRGCERTQAIISAKPATEADWHTEYLDAILSIRVVDGLNQAIEHINHYGSHHTDSIISEHQGEARQFMAEVDSASVMLNTPTCFADGFEYGLGAEIGISTDKLHARGPVGLEGLTCEKYVVIGDGQLRGQGSC

SEQ ID NO: 68347 - protein, 812 aa, Pseudomonas putida
MPTQRLRPHALALVIRRSLRLAAPMAVGLAGLPAIAQAQQVQFNVPAQPLASALLAFGSQSNLQVLYSPQDVEGKRSSALTGAMEPAAALSRLLQGTGVSYQIQGNQVTIHTREGGAAVELGATNIDGKGLGQTTENTGSYTTGSMQTATKLPLTLRETPQAVTVITRQRMDDQSMRSLDDVVQATPGLRMSAARPANSEYFSRGFPINNLMFDGLPTTYNADWVAAADMAPYDRVEIVRGATGMMQGAGNPSAAINMVRKRPTKDFQGSVTGSAGSWDNYRGELDLSGPLNDNGSVRGRFVGAYNDKDSYQDYAGRERGLFYGITEFDLTDDTTLTVGASNQNDNNNINWGGLPVNRDGSHVGYSRSRNMGYDWSYQDIDNTTVFAEVDHRFDNDWRLHLAASKNWSDFAMQGAVFERTGSATNEGFRQRVFNQRRDYDQSTYDVYANGPFQLFDRQHELVVGASKREVKTSAHGGTVFIPVDSLFSVNPSGIDKPNVDDIYNLSEHVEQEGAYVTTRLNIADPLKVILGARLDWYDNKSVYSEINDGYYTNSDYKVTRNVTRYAGVIYDLDDHHSVYASYTDIFMPQSELARDRSIIRPIEGKNYEIGIKGEYFDGALNASAAIFQIDQENRAAEASNQEGCVDITCYEASGKVRTHGIDLELMGALTPNWQVGAGYTYSQTKYRKDADKNKEGTKFDTDLPEHLFKLSTTYTLPGELNQWRVGGNVYGQSSIFNKGSNSFGNYHIDQGAYAVVGLMVGYKVNKNLDTRLNLNNVFDKKYYQGIASNNSWSPYDVYGDPRNFTITAKYSF

SEQ ID NO: 68348 - protein, 591 aa, Pseudomonas putida
MMRSHYCGQLNESLDGQEVTLCGWVHRRRDHGGVIFLDIRDREGMAQVVFDPDRAETFAAADRVRSEYVVQITGKVRKRPEGAVNANMASGAIEILGYQLNVLNEAETPPFPLNEYSDVGEETRLRYRFIDLRRPEMADKLRLRSRITSSIRRFLDENGFLDVETPILTRATPEGARDYLVPSRTHAGSFFALPQSPQLFKQLLMVAGFDRYYQIAKCFRDEDLRADRQPEFTQIDIETSFLDESEIMGLTESMIRKLFKEVLDLEFGEFPHMTFEEAMRRYGSDKPDLRIPLELVDVADQLKDVDFKVFAGPANDPKCRVTALRLPGGASMPRSKIDEYTKFVGIYGAKGLAYIKVNERAKGVEGLQSPIVKNIPEANLNNILDRVGAVDGDIVFFGADKFKVVSEALGALRIRLGHDFELLTCEWAPMWVVDFPMFEENEDGSFTALHHPFTAPKCTPEELEANPATALSRAYDMVLNGTELGGGSIRIHRKEMQQAVFRLLGIEAEEQEEKFGFLLDALKFGAPPHGGLAFGLDRLVMLMTGAQSIREVIAFPKTQSAACVMTQAPGMVDAKALRELHIRLREQTKVE

SEQ ID NO: 68349 - protein, 156 aa, Pseudomonas putida
MPRRRVAAKREILDDPKYGSQILAKFMNHVMESGKKAVAERIVYGALDTVKARKNSDPLEIFEKALDAIAPLVEVKSRRVGGATYQVPVEVRPSRRNALAMRWLVDYARKRGEKSMALRLAGELLDAAEGKGAAVKKREDVHRMAEANKAFSHYRF

SEQ ID NO: 68350 - protein, 134 aa, Pseudomonas putida; identical to SEQ ID NO: 67497
  MISC_FEATURE (20)..(20): X=any amino acid
  MISC_FEATURE (25)..(25): X=any amino acid
  MISC_FEATURE (77)..(77): X=any amino acid
  MISC_FEATURE (80)..(80): X=any amino acid
  MISC_FEATURE (86)..(86): X=any amino acid
  MISC_FEATURE (127)..(127): X=any amino acid
  MISC_FEATURE (129)..(129): X=any amino acid

SEQ ID NO: 68351 - protein, 197 aa, Pseudomonas putida
MKQFIDFIPLLLFFIVYKLDPRPMEVAGHHFEFGGIYSATAMLIISSLVVYGALFLRQRKLEKGQWLTLIACLVFGGLTLTFHSETFLKWKAPVVNWLFALGFAGSHFIGDRVLIKRIMGHALTLPDAIWTRLNLAWIAFFLFCGAANLFVAFTFQDFWVDFKVFGSLGMTVIFLVAQGVYLSRHLHDDPSTSKPKD

SEQ ID NO: 68352 - protein, 134 aa, Pseudomonas putida; identical to SEQ ID NO: 67497
  MISC_FEATURE (20)..(20): X=any amino acid
  MISC_FEATURE (25)..(25): X=any amino acid
  MISC_FEATURE (77)..(77): X=any amino acid
  MISC_FEATURE (80)..(80): X=any amino acid
  MISC_FEATURE (86)..(86): X=any amino acid
  MISC_FEATURE (127)..(127): X=any amino acid
  MISC_FEATURE (129)..(129): X=any amino acid

SEQ ID NO: 68353 - protein, 279 aa, Pseudomonas putida
MSEDRSSNGQKSWLGKLTQAFAHEPKNRQELLELLREAHQNKLLDSEALTIVEGAIQVADLQVRDIMVPRSQMNSIKAGQSPREFLPAVIDAAHSRYPVIGESHDDVLGILLAKDLLPLILKENGDSFNIKDLLRPATFVPESKRLNVLLREFRANHNHMAIVIDEYGGVAGLVTIEDVLEQIVGDIEDEHDVEEDSYIKPLPSGDFLVKALTPIENFNEFFDSEFSDDEFDTVGGLVMSAFGHLPKRNETTEIGSYKFRILNADSRRIHLLRLTPITR

SEQ ID NO: 68354 - protein, 156 aa, Pseudomonas putida
MNINATLIGQSVAFLIFVLFCMKYVWPPVITALQERQKKIADGLDAANRAARDLELAQEKAGQQLREAKAQAAEIIEQSKKRAAQLVDEAREQARVEADRVKAQALAEIEQELNSAKDALRAQVGALAVGGAEKILGATIDQNAHAELVNKLAAEI

SEQ ID NO: 68355 - protein, 487 aa, Pseudomonas putida
MVPVIALVGRPNVGKSTMFNRLTKTRDAIVGDLSGLTRDRQYGDASWQGRSFILIDTGGITGDEVGMDEKMAEQSLMAIEEADYVLFLVDARAGMTAADQMIAEHLRKRNKAAILVANKIDNIDPDVARAEFSPMGMGNAIPVAGSQGRGINALMEAVLGHLPRDAEEEALEQDVAEGEEAVRIPGPSEKDGIKIAIIGRPNVGKSTLVNRMLGEERVVVYDEPGTTRDSIYIPFERDGEKYTFIDTAGVRKRGKIHEEVEKFSVVKTLQAIKDANVVIFVMDAREGVVDHDLNLLGFALEAGRAIVIALNKWDGMEPGERAYVKTELERRLFFVDFADIHFISALHGTGVGNLYKSVQAAFQSAVTRWPTSRLTQILEDAVSEHQPPMVNGRRIKLRYAHLGGANPPLIVIHGNQTDSIPKSYSRYLENTYRRVLKLVGTPIRIEYKGGENPYEGKKNTLTDRQVNKKRRLMSHHKKAEKKRRDKR

SEQ ID NO: 68356 - protein, 443 aa, Pseudomonas putida
MAKQGALSSLGKGGMSELWARLRFLFMAIIVYRIGAHIPVPGINPDRLADLFRQNEGTILSLFNMFSGGALERMSIFALGIMPYISASIIMQLMTAVSPQLEQLKKEGEAGRRKISQYTRYGTVILALVQAIGMSIGLANQGVAFSVGLGFHIVAVSTFVAGAMFMMWLGEQITERGVGNGISMLIFAGIVAGLPRAIGQSFESARTGDINIFALVAIGLLAVAIIGFVVFIERGQRRIAVHYAKRQQGRKVFAAQTSHLPLKVNMAGVIPAIFASSILLFPASLGAWFGQSEGMGWLQDISQSIAPGQPLNILLFSAGIIFFCFFYTALMFNPKDVAENLKKSGAFIPGIRPGEQSARYIDGVLTRLTMFGALYMMAVCLLPQFLVVAANVPFYLGGTSLLIVVVVVMDFMSQVQSHLVSHQYESLMKKANLKGYGGSGLLR

SEQ ID NO: 68357 - protein, 430 aa, Pseudomonas putida
MGKNVVVLGTQWGDEGKGKIVDLLTEHAAAVVRYQGGHNAGHTLVINGEKTVLHLIPSGILREGVQCLIGNGVVVAPDALMREITKLEEKGVPVRERLRISPAAPLILSYHVALDQAREKARGEAKIGTTGRGIGPAYEDKVARRGLRVGDLFHRERFAAKLGELLDYHNFQLVNYYKEPAIDFQQTLDECMAYAEQLKPMMLDVTAELHNLRRAGKDIMFEGAQGSLLDIDHGTYPYVTSSNTTAGGISTGSGVGPMYLDYILGITKAYTTRVGSGPFPTELFDETGATLAKRGHEFGSTTGRARRCGWFDAVILRRAIDVNSISGICLTKLDVLDGLETINICVGYKNENGAVIDAPSDADSYIGLEPVYEEMPGWSESTLGVKTLEELPQAARDYIKRIEELVGAPIDIISTGPDRNETIVLRHPFA

SEQ ID NO: 68358 - protein, 101 aa, Pseudomonas putida
MTIDVNEALKALANPMRLAILNWLKDPRTVFPEQEVDPETVGVCVSIIQERTGLSQSTTSLYLAALQRAQLVTSQRIGPWTYYKRHDGNIDAFFKALQERI

SEQ ID NO: 68359 - protein, 396 aa, Pseudomonas putida
MAALGFLVTAVGLPVITVVALAKVGGGMDALSSPIGKFFGGLLAAVCYLSVGPLFATPRTATVSFEVGVAPLTGESPLALFIYSLVYFIVVLAVSMYPGKLLDTVGRFLAPLKIIALAVLGIAAFALPAGSIGDAQPAYAAAAFSKGFSDGYLTMDTLGALVFGIVIVNAIRSRGVESPRLITRYAIIAGLIAGVGLALVYISLFRLGATSHDIAADATNGAAVLHAYVQHTFGSLGSGFLAVLIALACLVTAVGLTCACAEYFSQILPLSYRALVVILAGFSLLISNLGLTKLIMFSIPVLTAIYPPCIVVVGLSFVKDLWNSPTRILAPVMLVSLLFGMVDAIKGSSLAHVLPDFMAHLPLSDAGMAWLVPSVVTLVGAVACDRMLGKPREALA

SEQ ID NO: 68360 - protein, 152 aa, Pseudomonas putida; identical to SEQ ID NO: 67498
  MISC_FEATURE (51)..(51): X=any amino acid
  MISC_FEATURE (115)..(115): X=any amino acid
  MISC_FEATURE (146)..(146): X=any amino acid

SEQ ID NO: 68361 - protein, 399 aa, Pseudomonas putida
  MISC_FEATURE (23)..(23): X=any amino acid
  MISC_FEATURE (25)..(25): X=any amino acid
KPLSAATLCRRLTVPCRSRTWWXSXWKAFAGHSVGALGSPNNITPYFDKLAKEGLLFDRFFSNGTHTHQGMFATMACFPNLPGFEYLMQTPEGGHKLSGLPALLSARDYDDVYVYNGDFAWDNQSGFFGNQGMTTFIGRNDFVNPVFSDPTWGVSDQDMFDRGNEELAKHDGKKPIYALLQTLSNHTPYALPKDLPVEKVTGQGRLDEHLTAMRYSDWALGQFFEKARKEPYFKDTLFVIVGDHGFGNHQQVTELDLGRFNVPLLLIAPGIQEKFGAVNHTVGTQVDIVPTIMGRLGGKARHQCWGRDLLNLPEGDQGVGMIKPSGSEQIVGLVQGDRILIESKDMSPRMYRYQLGSEFKAELIESPDQPEMLKKLEAYIQTATKSLLDNTAGVVHGTP

SEQ ID NO: 68362 - protein, 450 aa, Pseudomonas putida; identical to SEQ ID NO: 67505

SEQ ID NO: 68363 - protein, 372 aa, Pseudomonas putida
MLSSLQARAAAEPDAPVRIGYLPITDATPLLVAHNNGLFEAEGIKAERPVLLRSWAQVIEAFISGQVNVIHLLSPMTVWARYGSKVPAKVVAWNHVGGSGLTVAPDISAVKQLGGKTVAIPFWYSIHNVVLQQLLNDNGLTPVSKPANAQLAANEVNLLVLPPSDMPPALASKRIAGYIVAEPFNALAENLKVGRVQRFTGDVWRNHACCVVFMHEHDLNNRPEWSQKVVNAIVKAQQWTRDHRTEAAALLSRAGPNKYTPHEPAVLTKVLAPAAEDRAGYIASGAIRHQQWDEKRIDFQPYPFPSYTEELVKRLKTTLIEGDNTFLSGLDPAYAARDLVDDRFVRNAIATVGGPSVFGIADNFERSEEFAV

SEQ ID NO: 68364 - protein, 512 aa, Pseudomonas putida
MNLLKSLAAVSSITMISRVLGFVRDTILARIFGAGVATDAFFIAFKLPNLLRRIFAEGAFSQAFVPILAEYKTQQGEEATRTFIAYVSGLLTLVLALVTAIGILAAPWVVWATAPGFVDSTEKYALTTDLLRVTFPYIFLISLSSLAGAILNTWNRFSVPAFTPTLLNVAMIAFAVLLTPYFNPPIMALAWGVLAGGLAQLLYQLPALKKIGMLVLPRLNLKDAGVWRVLKQMLPAILGVSVSQISLIINTIFASFLVAGSVSWMYYADRLMELPSGVLGVALGTILLPTLAKTYANKDREEYSRILDWGLRLCFLLVLPCTLALAILAEPLTVALFQYGKFSAFDAAMTQRALIAYSVGLLAIILIKVLAPGFYAQQNIRTPVKIAVFTLVCTQLFNLALVGPLAHAGLALAISLGACLNAGLLFWKLRSQQLFEPQPGWAVFLLKLVLAVTLMSAVLLAGMHYMPAWEQGIMLERFLRLGALILAGVVTYFGCLYLCGFRPRHFARKALH

SEQ ID NO: 68365 - protein, 363 aa, Pseudomonas putida
MTASIVAHLKLARDDFTLDVNLHLPGRGISALFGHSGSGKTSCLRCLAGLERAASAYIEVNGEVWEDSTRGYFQAPHLRPVGYVFQEASLFPHLSVRGNLTFGWRRVAPAERKVSLDQACQLLGIGHLLDRRPATLSGGEAQRVGIARALLSSPRLLLMDEPLAALDSPRKREILPFLERLHDELDIPLIYVSHAQDEVARLADHLVLLEQGRAIASGPIGETLARLDLSLAQGDDAGVVFEGRVVGHDPHYGLLDLRLPGSSGPLLRITHAAQVMGSTLRVKVQARDVSLALAADSASSILNRLPVRVRESCPAANPAHVLVSLDAGGNALLARITRFSADQLGLHTGQILFAQIKSVALLG

SEQ ID NO: 68366 - protein, 404 aa, Pseudomonas putida
MIFGIFKPYPSPLISGRGIDLDFPMLAGCLALLGLGLVMITSASSEVAAVQSGNPLYHMFRHLVYVFLGLVACGATMLVPIATWQRMGFMMLLGAFGLLVLVLVPGIGREVNGSMRWIGFSFFNVQPSEIAKVFVVIYLAGYLVRRQTEVRETWMGFFKPFIVLLPMAALLLMEPDFGATVVMMGAAAAMLFLGGVGLFRFSLMVVLAVLAVFVLVQAQPYRMARLITFTDPWADQFGSGYQLTQALIAFGRGEWLGVGLGNSVQKQFYLPEAHTDFVFSVLAEELGVVGSLLTVALFVFVTVRALYIGLWAEKAKQFFAAYMAFGLAFLWIGQFLINIGVNVGLLPTKGLTLPFLSYGGSSLVICCACVGLLLRIEWESRTHLGSEEHEFSESDFAEETSHGR

SEQ ID NO: 68367 - protein, 287 aa, Proteus mirabilis
MSTKYPIVLVHGLAGFNEIVGFPYFYGIADALRQDGHQVFTASLSAFNSNEVRGKQLWQFVQTLLQETQAKKVNFIGHSQGPLACRYVAANYPDSVASVTSINGVNHGSEIADLYRRIMRKDSIPEYIVEKVLNAFGTIISTFSGHRGDPQDAIAALESLTTEQVTEFNNKYPQALPKIPGGEGDEIVNGVHYYCFGSYIQGLIAGEKGNLLDPTHAAMRVLNTFFTEKQNDGLVGRSSMRLGKLIKDDYAQDHIDMVNQVAGLVGYNEDIVAIYTQHAKYLASKQL

SEQ ID NO: 68368 - protein, 109 aa, Proteus mirabilis
PDHKHTLIALTSIYGIGKTRSQAICEATGIAENVKISELSEEQIDKLRDEVAKYVVEGDLRREVTLSIKRLMDLGTYRGLRHRRGLPVRGQRTKTNARTRKGPRKPIKK

SEQ ID NO: 68369 - protein, 532 aa, Proteus mirabilis
MLISNNITMQFGSKPLFENISVKFGGGNRYGLIGANGSGKSTFMKILGGDLAPTSGNVFLDPNERLGKLKQDQFAYEEFTVLDTVIMGHAELWEIKQERERIYSLPEMSEEEGLRVADLEVKFGEMDGYTVESRAGELLLNVGIPLEQHNGPMSEVAPGWKLRVLLAQALFADPDILLLDEPTNNLDIDTIRWLEQTLNERNSTMIIISHDRHFLNMVCTHMADLDYGGLTVHPGNYDEYMLAATQARERLLADNAKKKAQISELQSFVSRFSANASKSRQATSRAKQIEKIQLTEVKASSRQNPFIRFEQEKKLFRNALEVENIAKGYEANTPLFKDVNMMLEVGEKVAILGTNGVGKSTMIKTLVGELTPDNGRVKWSENATIGYYAQDHATDFEVDMTVFDWMSLWMKPEDDEQSVRSVLGRLLFSQDDIKKSVKVLSGGEKGRILFGKLMMQKPNVLIMDEPTNHLDMESIESLNMALELYQGTLIFVSHDREFVSSLANRIIEITPEKVTNFQGTYDEFLAKKGIDG

SEQ ID NO: 68370 - protein, 310 aa, Proteus mirabilis
MTDFAMVFPGQGSQAIGMLAELAEHYPIVTETFAQASDVLGYSLWDLVQNGPEEELNKTWKTQPALLAASVAIWRVWQEKQGKMPQMMAGHSLGEYSALVCAGVIDFAAAIKLVELRGQLMQEAVPAGTGAMYAIIGLDNDAIAKACEDAAQGQVVSPVNFNSPGQVVIAGNKEAVERAGALCKEAGAKRALPLAVSVPSHCALMKPAADKLAVALQEIEFKQPEIQVVNNVDVKAQTDANAIRDALVRQLYNPVRWTETVEFIAGKGITQLLEIGPGKVLTGLTKRISKEMNAAAVNDIASLDAALGND

SEQ ID NO: 68371 - protein, 326 aa, Proteus mirabilis
MPCGEFSLIKQYFTSQPVKRKDVSTGIGDDCAILTVPEKQQVAISTDTLVSGIHFLPTISPEDLAYKALAVNISDLAAVGADPAWASLALTLPKVDNDWLEAFSRSLFALAEYYSIQLIGGDTTKGPLSLTITIQGLVPQGMALLRSGAKIGDWIYVTGFLGDSAAGLAVLQNRLQPSQPESRDYFITRHLRPQPRLLQGQALRSLASAAIDISDGLISDLNHILTASGCGARINLDALHYSAAMKSQVSKEQAEVWALSGGEDYELCFTVPEINRGALDIALAHTGADFHCIGQIMPIAEGIRYLREGKEVHPNLKGFDHFDDNK

SEQ ID NO: 68372 - protein, 278 aa, Proteus mirabilis
MLRRFKKAQGNSFMRHSYLLERSRDEILQGQVTIHTEGEMVGQINGLSVLDYPGYPDLIGEPTRITCVAHIGDGELVDIERKAELGGNIHAKGMMIMQAYLNSELRLDQPQPFSASVVFEQSYGEVDGDSASLAELCALISTLSQHPIDQQIAVTGAVDQFGQVQPIGGVNQKIEGFFDICQQRGLTGSQGVIIPLANVRHLVLNDSVIQAVKENKFHIWPVVHVAEAITLLTHQPYYEEQCENPQSNEHLLAVIHDRITQANNQDRPKLPWFLRLFR

SEQ ID NO: 68373 - protein, 121 aa, Proteus mirabilis
MSISKDDILNAVAEMSVMDVVELITMMEEKFGVSAAAAVAVAAGPAEAAEEKTEFDVILKGIGGNKVAVIKAVRGATGLGLKEAKDLVESAPAALKEGVSKDDAEALKKALEEAGAEVEVK

SEQ ID NO: 68374 - protein, 445 aa, Proteus mirabilis
MLKKQPLITVYFNKVDYCFYRKSLLFIVYFIACLALIKLFANLTLPLYAILLGTIMKAFFPLFALATGAFAIGATEFTPMGLLPNIANGLSISIATAGGLITGYAVGVMIGAPIMTLSLGKLTKRHALGLLLLLFIAGNLLAAQADSYWSLMIARLITSLNHGAFFGIGSVVAASLVEKHKQASAVAAMFMGLTIANLVGVPLVTWIGQQYGWRLAFILISGLGFITLIGLLMFLPVMPKGNKPNIKYELGVLTRLPVVLALLTTVFGASALFALYTYIAPFLTNTVHISESHVAVVLVIIGLGFTIGNYLGGKLSSYGIEKTLILFFILLIGSMSVLPLVSHNVYLAVATIFIWSIASFALVPALQIKTMQIAHDAPALVSSVNIGAFNLGNAIGAIIGGIALKYSYNIVPLTAALVGVIGLLLVYSQIKIKKSFSSECCVNSL

SEQ ID NO: 68375 - protein, 466 aa, Proteus mirabilis
MSFTRSVLALAVMAVSFTSHAAKQADLMIVDGTVLTMDAQNQVIEQGTVVVKENKIIAVGGPELTQEYQANKVLDVDGDIVMPGLINTHTHASMTVFRSLADDVPDRLHRYIFPLENKMVSRDMVRVGANLANVEMVKGGVTTYVDMYYFEDEVAKTVDKMGNRAILGESVINFPVADAQTPEEGIQYAVNFINEYKDHPRIIPAFAPHAPYTNTTENLQKIAKLSVELDAPVMIHLAETDREKEEIAKRTDGKSPVQYMADIGALNNKVIAAHAIMVDEQDIDLLKKYDVGVTHNISANTKSAKGVSPVVAMLEKGVRVGLGTDGPMSSNTLTTMNELNLVGKIHKLENKDRAAMPPLTVVEMATIGSAKALHMEDKLGSLESGKLADIIVVDTKAPNMVPMYSPYAALVYGANGSNVRHTIVDGKILMEDRQLLTVDEQAIISEAQNFANKVRQTVVDSGEVVK

SEQ ID NO: 68376 - protein, 64 aa, Proteus mirabilis
MSTIDERVKKIIVEQLGVKEEEVVNSASFVDDLGADSLDTVELVMALEEEFDIEIPDEEAEKIT

SEQ ID NO: 68377 - protein, 244 aa, Proteus mirabilis
MGFDGKIALVTGASRGIGRAIAEKLIACGATVIGTATSEHGAKAISEYLGNKGKGFVLNVTETDSIEKFLADVRAEFGEIDILVNNAGITRDNLLMRMKDDEWQDIIDTNLSSVFRLSKAVMRAMMKKRYGRIITIGSVVGTMGNAGQANYAAANAGVIGFSKSLAREVASRGITVNVVAPGFIETDMTRALTEDQRAGILSQVPANRLGDAKEIASAVAFLASDEAGYITGETLHVNGGMYMV

SEQ ID NO: 68378 - protein, 259 aa, Proteus mirabilis
MSKQQIGVVGMAVMGRNLALNIESRGYTVSIYNRSSDKTNEVIAENPGKKLVPNYSIEEFVDSLEKPRRILLMVKAGEATDKTIAALTPHLDKGDILIDGGNTFFKDTIRRNRELSAQGFNFIGTGVSGGEEGALKGPSIMPGGQKEAYELVAPILEKIAAVADGEPCVTYIGADGAGHYVKMVHNGIEYGDMQLIAEAYSVLKHSLGLTNEELADTFTEWNKGELNSYLIEITADIFRKKDEEGNYLVDVILDEAGNK

SEQ ID NO: 68379 - protein, 136 aa, Proteus mirabilis
MLQPKRTKFRKVHKGRNRGLAIGTDVSFGTYGLKAVGRGRLTARQIEAARRAMTRAVKRQGKIWIRVFPDKPITEKPLEVRMGKGKGNVEYWVALIQPGKVLYEMDGVPEEVAREAFQLAAAKLPIKTTFVTKTVM

SEQ ID NO: 68380 - protein, 214 aa, Proteus mirabilis
MFAVTYFVVFVERGQRRIVVNYAKRQQGRRIYAAQSTHLPLKVNMAGVIPAIFASSIILFPGTITSWFGDGTGWGWLTTISLNLQPGQPIYVLLYAAAIIFFCFFYTALVFNPRETADNLKKSGAFVPGIRPGEQTAKYIDKVMTRLTLIGALYITFICLIPEFMRDAMKVPFYFGGTSLLIVVVVIMDFMAQVQTLLMSSQYESALKKANLKG

SEQ ID NO: 68381 - protein, 112 aa, Proteus mirabilis
MDYGKFLYEKSKTLKEQKKKQKVIQVKEVKFRPGTDEGDYQVKLRNLIRFLEDGDKAKVTLRFRGREMAHQQIGMEMLNRIREDLDELASVESFPNKIEGRQMIMVLAPKKK

SEQ ID NO: 68382 - protein, 583 aa, Proteus mirabilis
RTNYCGQLNSAHVGQKVTLCGWVNRRRDLGGLIFIDMRDREGIVQVFFDPEQKEAFSQASELRNEFCIQVTGTVRARPDSQVNKNMATGEIELAAESLSIFNRSEALPLDSNQTNTEERRLTYRYLDLRRPEMSQRLKTRAKITSFVRRFMDGEGFLDVETPMLTKATPEGARDYLVPSRVHKGKFYALPQSPQLFKQLLMMSGFDRYYQIVKCFRDEDLRADRQPEFTQIDVETSFMTAEQVREVMERMIHALWLDILNVDLGAFPVMTFAEAMRRYGSDKPDLRNPMELIDIADLVKNVEFSVFAQAANDEKCRVIALRVPGGASLTRKNIDEYTQFVSIYGAKGLAWMKVNEKAKGIEGVQSPIAKFLTNDVVNSILATTNATDGDLIFFGAGRQGTMSDAMGALRLKVGRDLELTDLTHGNQLWVIDFPMFEEDEDTGSLSAMHHPFTSPKDLTPAELTAHPVGAVAIAYDMVINGYEVGGGSVRIHRNEMQQAVFSILGITPDEQREKFGFLLDALKFGTPPHAGLAFGLDRLVMLLTGTDNIRDVIAFPKTTAAACLMTNAPSFANEDALKELAIQV

SEQ ID NO: 68383 - protein, 109 aa, Proteus mirabilis
MFGKGGLGNLMKQAQQMQEKMQQMQEEIANLEVTGESGAGLVKITINGAHNCRRVEIDPSLLEDDKEMLEDLIAAAFNDAARRIEETQKEKMASVSNGMQLPPGFKMPF

SEQ ID NO: 68384 - protein, 217 aa, Proteus mirabilis
MSEGMIYLLISGIWETLVMTFVSGFFGFVIGLPLGVLLYVTRPEQIMANSPAYKVISALVNIFRAIPFIILLVWMIPFTRMVVGTSIGLQAAIVPLTVGAAPFIARMVENTLLEIPHGLIEASRAMGATPMQIIKKVLLPESLPGLINAATITLITLVGYSAMGGAVGAGGLGQIGYQYGYVGYNATVMNTVIVLLVILVFIIQFIGDRLVKLTTHK

SEQ ID NO: 68385 - protein, 268 aa, Proteus mirabilis
MSIKLIVIDLDGTLLNEQHEITPEVHQAIQHAKNSGVHIVLASGRSFNGISPYLKALNLDTSDNFCISNNGSQIHQAENGEIITEDLLNFEDYLYFEDLSREIGVHFHVLSDNKIYTTNRHISHFTCREAFLTWTPLYYRPLSEMQRDMRFSKFMIVGTPTVLDNAMQYLPANIYQQYSILRSAPYFIEILNTDVNKGNAVQKIAEHLKITPEKIMCIGDQDNDLAMLQYAGLGVAMGNAPEEIKKVAKFITLSNKEHGVAVAINKFI

SEQ ID NO: 68386 - protein, 277 aa, Proteus mirabilis
RTSGSPTGVIYRRTDLNPPVDFPADAKSVRDTMLCTCLVNEDDVRISTVEHLNAALAGLGIDNIVIEVDAPEIPIMDGSAAPFVFLLLDAGIEELRTAKKFIRIKETVRVEDGDKWAEMRPYNGFKLDFTIDFNHPAIDASTQRYKLDFSAESFMSQISRARTFGFMRDIEYLQSKGLCLGGSFDCAIVVDDYRVLNDDGLRFEDEFVRHKMLDAIGDLFMCGYNIIGEFTAFKSGHALNNKLLQAVLAKESAWEFVTFEDEAKMPVAFKAPSTVFA

SEQ ID NO: 68387 - protein, 257 aa, Proteus mirabilis
MNNSNFRPLLMSLLLLVGVAAPVAAIAQAPISNIGSGSTDERLAQLERISNAHSQLLTQLQQQLADSQRDIDMLRGQIQENQYQLNQVVERQRNIYQQLDSLNGGNSAPTTDEASTGGNVPSTSDTSTSSSSTGDEKADYNAAIDIVLNSKDYDKAIVALNNFIKSYPKSSYQSNAQFWLGQMYYLKGNKDQAASTFAIVVKNYPKSQKASEAFYKIGLIMQEKGQKDNAKAIYQQVVKQYPNSAGAKLAQKQLAAL

SEQ ID NO: 68388 - protein, 103 aa, Proteus mirabilis; identical to SEQ ID NO: 55649

SEQ ID NO: 68389 - protein, 245 aa, Proteus mirabilis
MDTNSIPKYSIRGHNIWGFKDMAHFLDYLYQGAQIKSGSLIAINAEKILTAETDKGLNQLLDEADYLYADGISVVRGIRRKYPDAQVSRIAGADLWEALMERAGKEGTPVFLVGGKPQVLAQTESKLKAQWNVNIVGSQDGYFTPQDRDALFERIKASGAKIVTIAMGSPKQELFIRACRQVHPDALYMGVGGTYDVFTGHVKRAPKAWQNLGLEWLYRLLSQPSRIKRQFKLLKFVGYYYSNKL

SEQ ID NO: 68390 - protein, 207 aa, Proteus mirabilis
MELTLLEQLNLAVFSLMNATPSASPLEINVAIFIAKYLVYLFPLSLAFYWLWGNEKHIDQQRTLACKAGVALIIALSISWFIGMIAPHDRPFAANIGYNFLEHEATPSFPSNHGTFVFTIALAYLFWHNSKRIGMLMLILGLAIAWARIYLGVHWPIDMVGAFIVALLSCALSQILWSQGGKKLQKAIHQLYQLCFAYPIRKGWTKA

SEQ ID NO: 68391 - protein, 271 aa, Proteus mirabilis
MSLKFKSLAVVSALVGALALAGCGEKEKDPNHIRVGVISGSEQQVAEVAKQVAKDKYGLNVELVTFNDFVMPNESLSRGDIDINAFQHKPYLDQQIKDRNYKITAVGNTFIYPIAGYSKKITDLADLPDGAQVAIPNDPTNLGRSLLLLEKVGLVKLKEGVGLLPTKLDIIENPKNIQLVELEAPQLPRSLDDQKIYLAVINTTYASQVNLTPAKDGIFVEDKDSPYVNIIVAREDNKDDENVKKFIQSYQTDEVDSAANKIFNGGAVKGW

SEQ ID NO: 68392 - protein, 155 aa, Proteus mirabilis
MQLNIPTWLTLFRVALIPFFVLVFYLPFKDAPLICAIIFMVAAATDWFDGFLARRWKQTTRFGAFLDPVADKVMVATALVLITEHYHVWWITLPAATMIAREIIISSLREWMAELGKRNSVAVSWIGKVKTTAQMGALVVLLWRPTIEAEWFGFV

SEQ ID NO: 68393 - protein, 376 aa, Proteus mirabilis
MKRNILAVVIPALMFAGAANAAEMYNKDGNKVDIYGKVDVRHYFADKDSGEDGDASRARIGFKGETQINKDLIGFGRFEYEVKTNNTEGSKGNDKTRLAFAGLKFADFGSLDYGRNYGVIYDTNAWTDVLPLWGGDSMAQTDVYMTGRTTGVLTYRNTDMFGYVDGLSFALQYQGKNNENTNNTRGTYDPKDPASSKADAKSNGDGFGFSTAYNLGWGVTLGGGYSSSARTAPQQHASLAGGERAEAWNVGGKFEANNVYLAAMYGETRNMTYFGEDKDIANKTQNIELTAQYDFADLGIKPSLAYVQSKGKDLGVAQGNDQDLVKYISVGSFYKFNKNMTAVVDYKINLLDDNDFTKTYGVATDNVVGLGLTYQF

SEQ ID NO: 68394 - protein, 190 aa, Proteus mirabilis
MQREALLDHVLIQLEQHGLAATLPELLQGFDITESELQPFWPDKDALIFDCLRHHGQQIDIWQRQVMLDDTLTTEQKLLARYDQLAMRLEKNRFPGCLFVAACSAYPDEHSQIHQLSQRQKQSSFEYSRMLLRKLDLEDSELVAKQMELILEGCLSRLMVNRRADDITTAKLLAQDILKIAQCRKNGALS

SEQ ID NO: 68395 - protein, 400 aa, Proteus mirabilis
MYNSVSFFIGLRYMRGRAVDKFGRFVSWLSALGIMLGVAALITVTSVMNGFERSLQNSILAYIPQAVITTPNGQLPKQDSTAQMLLKREDVINVVPLVEGDVVLQSKDNIGVGVMLGIDKAHDEPLTQFIRYGDFSLLKPGEYGVILGSGLAKQLKTKEGDSIRLIVPGVSQLTPMGRVPSQRLFTVKGIFQSGGDADASQLLVNQQDAARLMRYQPGNITGWRLFFSTPLNIEKYSAEPLPAGLSWKDWRERKGEFFQAVKMEKNMMGLLLSLIIAVAAFNIITSLSLLVMEKQGEVAILQTMGLKRSQIMSIFMLQGAGAGILGAIAGGLLGALLSSQLNVIMPAVGLIPHGVELPATLEWSRVFMIGFAAIVISLLSTLYPSWRAATIQPAEALRYE

SEQ ID NO: 68396 - protein, 317 aa, Proteus mirabilis
MYTKILGTGSYLPVQVRTNADLEKMVDTSDEWIVTRTGIHERRIATEEETVAKMGASAAENALEMADIDRQEIGLIIVATTSGSHAFPSAACQIQHALGIADCIAFDVAAACSGFVYALSIADQFIKAGTVKQALVIGADRLSHALDPNDRGTIILFGDAAGAVVVGASEESGIISTHLHSDGRFGELLALPYQDRENQDLPAYVTMAGNEVFKVAVRELAHIVDETLEANHIDKSELDWLVPHQANLRIISATAKKLDMTMDKVVVTLDRHGNTSAASVPTALDEAVRDNRIQRGQLILLEAFGGGFTWGSALIRF

SEQ ID NO: 68397 - protein, 225 aa, Proteus mirabilis
MFTPPAAPENESVLLARAQALAGYTFGELAAFAQLPIPENLKRDKGWVGMLLEYYLGASAGSKPEQDFSHIGVELKTIPIDRFGMPLETTFVCVAALTGNSGITWENSHVKRKLSKVLWVPVEGEREIPLAQRRVASPLLWSPNHLEEELLRHDWEELMDMIVLGKVESITARHGQVLQIRPKAANSKALTEAIGENGQRIMTLPRGFYLKKNFTAPLIARYFQL

SEQ ID NO: 68398 - protein, 265 aa, Proteus mirabilis
MVINMKLNALLNYQIHQPETATINNLPIVLIHGLFGDLNNLGVLGRDLRQDHTVIQIDVRNHGHSPHSESMHYHDMAQDVLALLDSLNIAKAIVIGHSMGGKIAMAMTALAPLRLERIVVIDMSPVAYNVRRHDKIFAALEAVTKAHVTQRTEAIAIMRPFIEEDGVIQFLLKSFKKGEWLFNLPAIKQAYPDIIGWQEVPAWHHPVLFIRGGLSPYILDEYRNNIARQFPQATAFVVANTGHWVHSEKPETVIKAIRRFLAKTV

SEQ ID NO: 68399 - protein, 325 aa, Proteus mirabilis
LFSALGLFSAFAANAQQTKPTLTVYTYDSFTADWGPGPAIKKAFEQQCDCELKLVALSDGVSLLNRLRMEGSKSKADIILGLDNNLIHAAKQTGLFAPSNIDTQNWELPEKWTDDTFVPYDYGYFAFIYDKNRITHPPKSMDELLNSQQPWKILYQDPRTSTPGLGLMLWMQSLYPNNTAEQWQKLANKTLTVTKGWSESYGLFLKGEGDFVLSYTSSPGYHILADKKDNYAAAIFDEGHYLQVEVAAKLKSSKQPELAQQFMQFMLTPAFQETIPTTNWMYPVIDMPLPEVYSVMPKPQKSLQFDADVVAKERQTWTRNWQSAV

SEQ ID NO: 68400 - protein, 156 aa, Proteus mirabilis
MNVIKGVVAAPNARVAIAIARFNNFINDSLLEGAVDALERIGQVSSENITVVWVPGAYELPLTVKALAESDKYDAVIALGTVIRGGTAHFEYVAGECSSGLSHVAMQSEIPVTFGVLTTESIEQAIERAGTKAGNKGAEAAMTALEMINVLKAIKG

SEQ ID NO: 68401 - protein, 389 aa, Proteus mirabilis
SWKRNLYIVWFGCFLTGAGFSLIMPFLPLYVEELGIKDHESLNLWTGVAFSITFLFSAIAAPFWGKLSDRKGRKLMLLRSALGMAIVMVLIGFAQKIWQLLILRALLGVLGGFVPNANALIATQVPVKKSGWALGTLSTGAVSGALIGPLIGGILADLYGLRPVFFITAAVLFICFIVTLFFVSENFTPVSKKDALSTQQIFSSLKNKRLVICLFFTTMIIQVATGSVTPILTLYIRDLAGSISNLAFISGVIASVPGIAALISAPRFGKLGDRIGPDKVLIFTLGLSIFMLIPMALVSNYWELGALRFLLGAVNAAMLTAVQTLILYNITPAIAGRIFSYNQALRDVGNVTGPLMGAFVAANYGFRAVFYFTAAVVFFNLIYSWISFR

SEQ ID NO: 68402 - protein, 518 aa, Proteus mirabilis
KKQGGSRFLRTVEWLGNALPHPVILFIILIAILLVSSAVGEYFGVKVQDPRPEGAKGRAEDGYIHIISLLDADGIRRILANIVTNFTGFAPLGTVLVALLGVGIAERAGLLSAVMRLVVMKAPRKMTTLAIVFAGIMSNTAAELGYVVLIPLSAIIFHSLGRHPLAGIAAAFAGVSGGYSANLLLGTIDPLLSGITQQAARIIDPSYIVGAEANWYFMFVSTFLITFLGYIITEKIVEPQLGPYNGNELDDEETDLKNAAQVTPLEKKALWAATGTFIVMAIILAFTVVPENGILRNQETGLIGNSPFLKSIVVFIFLFFAIPGIVYGWIAKTMRSDKDIVDAMANSMSTLGLYLVIIFFAAQFVAFFGWTNIGQVIAVKGAALLNSIDMPSGLLFLGFILICAFINLMIGSASAQWAVTAPIFVPMLMLAGYAPETIQAAYRIGDSVTNIITPMMSYFGLILAVATKYKKDTGIGTMISMMLPYSIIFLIGWSLLFYLWVFVFHLPVGPGSPIYYSP

SEQ ID NO: 68403 - protein, 156 aa, Proteus mirabilis
MPRRRVIGQRKILPDPKFGSELLAKFVNILMVDGKKSTAESIVYNALETLAQRSGKTELEAFEIALDNVRPTVEVKSRRVGGSTYQVPVEVRPVRRNALAMRWIVEAARKRGDKSMALRLANELSDAAENKGAAVKKREDVHRMADANKAFAHYRW

SEQ ID NO: 68404 - protein, 745 aa, Proteus mirabilis
  MISC_FEATURE (33)..(33): X=any amino acid
PYGRCKQGVRTLPLVIREVVATLFRTAMLSFTXIERPREEEKMARQTPIARYRNIGISAHIDAGKTTTSERILFYTGVNHKIGETHEGSATMDWMEQEQERGITITSAATTAFWSGMAKQFEPHRVNIIDTPGHVDFTIEVERSMRVLDGAVMVYCAVGGVQPQSETVWRQANKYHVPRIAFVNKMDRMGANFLRVVEQIKTRLAANPVPLQIPVGAEEDFTGVVDLIKMKAIRWNEEDQGVTFEYEDIPADLQDLAEEWHNNLIESAAEASEDLMDKYLGGEELSEAEIKSALRKRVLDNEIILVTCGSAFKNKGVQAMLDAVIEYLPAPTDVPAIKGILPDGKDTPAERHSSDEEPFSALAFKIATDPFVGNLTFFRVYSGVVNSGDTVLNPVKDKKERFGRIVQMHANKREEIKEVRAGDIAAAIGLKDVTTGDTLCAIDAPIILERMEFPEPVISVAIEPKTKADQEKMGIALNRLAQEDPSFRVSSDEESGQTIIAGMGELHLDVLVDRMRREFKVEANVGKPQVAYRETIREEITDVEGKHAKQSGGRGQYGHVVIDLSPLPSGGEENYVFVNDIVGGVIPKEFIPAVDKGIQEQLKSGPLAGYPVVDIKARLHFGSYHDVDSSEIAFKIAASMAFKEGFMKAKPILLEPIMKVEIETPEDYMGDVIGDLNRRRGMVEGMDDLPTGKIIRAQVPLAEMFGYATDLRSQTQGRASYSMEFLKYNEAPSNVAQAIIEARKA

SEQ ID NO: 68405 - protein, 897 aa, Proteus mirabilis
MRTLTQLKPNTLTRLYALFLLFMAISLFLYAYSYFDTWLESKKNAINNTTNKFASQVEDYRYHANQLFQLSNKINDPTLFLPLKINPVKLRSDVYWLEGRDQTVDAIVFGKSNEQTFQLAGYFANALEIIWGVRNNYSSLYYLNGKGNDLILITTHSILKPELRYKESYLTLTAENKRSELLMQSTALDEKESLSPIRKMPTENIYYYTYRTMFNVPGQLTSVIAFDLPINNFLPAELSPQYLRLLPTGQQSVYDKNNIEVSTDGTSLIFSQPIAGIPYSLSYEYPLKSIFNEIVYKNIWLLISLLIFISISVFGHIYIRNKYVFPYISMTRNLRIKEEMTNDIISNLPIGLLVYNFSSNHKIISNSHAEKLLPHIDLSKIRQMAIEHNGLIQTAIDNEIYEIRTSSNSNIDNTALFIFLNKDNEALINKKLQLAQQEYEKNTIARRKILSNMSLELIRPIKDINEMVYQFKDLLPNDTHQQLLSLLLEKTNYISEWIENITLINKLENQEWKIHQDEFELSTLVESILITASPFMIRKGLTLYFHNNIKPSLLLFNDGPALSKIILSLINYAISTTNYGKITVNLNLEKNNDKEEIVIDIIDSGSGLTAQDLANIKYPFLGQAMGDKYYSNSGIIFYLCHLLCNKIQGTLTITSQESIGSHFRIVLPYQHIDTEERSFDILLEGITAKLAIKNPEIEKIICQQLDKYGATYFDKNKENLYSEYDIILRDTPDNNPESATVLLVSSITGFEKIARNLIKCNYNFGDPLIEAITYLIEENEQLSLETTQTSIRNENNNLDHHEVILNNYRKKLNDSDYKELFINTVPIDVEKLHLEATNKDFHSLAQTAHRLKGVFAMLDLEYLRENCEYLEDDIKNHNELEIKERINQLDKWIRQLL

SEQ ID NO: 68406 - protein, 218 aa, Proteus mirabilis
MNNLNIIIADDHPIVLFGIRKSLEQIEWVNVVGEFEDSTSLINNLSKLNADALITDLSMPGDKYGDGITLIKYIKRHYPNLSIIVLTMNNNPAILSAVLDLEIEGIVLKQGAPADLPKALAALQKGKKFMPESVAKLLEKVNANGYGDKRLSPKESEVLRLFAEGFLVTEIAKKLNRSIKTISSQKKSAMMKLGVDNDIALLNYLSSVTIDKEINGES

SEQ ID NO: 68407 - protein, 125 aa, Proteus mirabilis
MSILDEWAERHIEKALKNGELSSLPGEGKPLVLDDNSHVPESLRASYHLLKNAGFLPPEMQDRKDALSLAEILSSLSETGIKDEQLQKKLTLLELKLQQAGMDTQFLHTDYATQLTEKLATHKHK

SEQ ID NO: 68408 - protein, 454 aa, Proteus mirabilis
MVSVFDIFKIGIGPSSSHTVGPMKAGKEFVDLLAEKNLLSSVSRVVVDVYGSLSLTGKGHATDIAIIMGLAGNLPDTVDIDAIAPFIKQVENTGRLMLANGAQEVDFPAVGGMNFHKSNLPLHENGMTISAYNGEQLLLKKTYYSIGGGFIVDEEHFGQPEENKVEVPYPYQYAADLRRHCKETGLSLSALVMQNELALRSKEEISAHFAAVWEVMKSGIERGVNTEGLLPGPLRVPRRASALRRMLVTEDKTTTDPMTVVDWINMFALAVNEENAAGGRVVTAPTNGACGIIPAVLSYYDKFIRPVNENSYTRFFLVAGVIGSLYKMNASISGAEVGCQGEVGVACSMAAGALTELLGGSPEQVCIAAEIAMEHNLGLTCDPVAGQVQVPCIERNAIAAVQAVNSARMALRRVSDPRICLDKVIETMYETGKDINSKYRETSQGGLAIKVSCD

SEQ ID NO: 68409 - protein, 225 aa, Proteus mirabilis
MAVIVPVITVDGPSGAGKGTLCQALAKAFGWHLLDSGAIYRVLALAALHHHVDITSEDALVPLAANLDVRFIPNENGLSVILEGEDVSTEIRTETVGNTASQAATFPRVREALLRRQRAFRTAPGLIADGRDMGTIVFPDAQVKIFLDASAQERARRRMLQLQEKGFNVNFERLLSEIKERDYRDRNRAVAPLVAAKDALILDSTSLSIDEVIEKSLAYAKKICN

SEQ ID NO: 68410 - protein, 132 aa, Proteus mirabilis
MRDMQEVLSRWGAWSANEGNSIDYSSIAAGFKGLIPSSRRSREQCSDDDGLKINKAVLHLKVNNSYLFQLVIMYYVKNYPLRSMASKLGISHNEVAKRLQTAEGFIEGCLSVDNVKLDMDKIIRKHSIYSLV

SEQ ID NO: 68411 - protein, 408 aa, Proteus mirabilis
MSHNNTETQIGNIDLVKQLNSAIVYRLIDQHGPISRIQIAEQSQLAPASVTKITRQLLERGLIKEVDQQASTGGRRAISIVVEHRRFNTVSVRLGRNDATVALYDLSGKALVEQHYPLEQSTQQEVETLLINAIDDFIKQNQRRINELISISIILPGLVDPNKGIVHYMPHMKVNNWALVDNLEKHFDLPCYAGHDIRSLALAENYFGATRDCEDSILVRIHRGAGAGVIINNKILLNQRGNLGEIGHIQIDPLGERCHCGNFGCLETIASNSAIEAKVRYQLEQGYPSQHLSATQCQIQDICDAAVKNDPLAVETIKQVGLHLGKAIAIAINLFNPQKVVLAGEVTEAAEILLPSIQSCINTQVLKEFREALPVVISELDHRSAIGAFALTKRAMLNGELLQYLFDK

SEQ ID NO: 68412 - protein, 394 aa, Proteus mirabilis
MSKEKFERSKPHVNVGTIGHVDHGKTTLTAAITTVLAKTYGGAARAFDQIDNAPEEKARGITISTSHVEYDTPTRHYAHVDCPGHADYVKNMITGAAQMDGAILVVAATDGPMPQTREHILLGRQVGVPYIIVFLNKCDMVDDEELLELVEMEVRELLSQYDFPGDDTPVIRGSALKALEGEAEWEAKIVELAEALDSYIPEPERAIDKPFLLPIEDVFSISGRGTVVTGRVERGIIKVGDEVEIVGIKETAKTTCTGVEMFRKLLDEGRAGENVGVLLRGTKREEIERGQVLAKPGSINPHNKFESEVYILSKDEGGRHTPFFKGYRPQFYFRTTDVTGTIELPEGVEMVMPGDNVNMIVELIHPIAMDEGLRFAIREGGRTVGAGVVAKVLG

SEQ ID NO: 68413 - protein, 92 aa, Proteus mirabilis
MPRSLKKGPFIDLHLLKKVEKAVESGDKKPVKTWSRRSTIFPNMIGLTIAVHNGRQHVPVYVSDEMVGHKLGEFAPTRTYRGHAADKKAKKK

SEQ ID NO: 68414 - protein, 274 aa, Proteus mirabilis
MAIVKCKPTSPGRRHVVKVVNPELHKGKPYAPLLEKNSKSGGRNNNGRITTRHIGGGHKQAYRIVDFKRNKDGIPATVERLEYDPNRSANIALVLYADGERRYILAPKGLKAGDKVQSGVDAAIKTGNTLPMRNIPVGSTVHNVEMKPGKGGQLARSAGTYVQIVARDGAYVTIRLRSGEMRKIPSDCRATIGEVGNSEHMLRVLGKAGASRWRGIRPTVRGTAMNPVDHPHGGGEGRNFGKHPVTPWGVQTKGKKTRKNKRTEHFIVHRRTKK

SEQ ID NO: 68415 - protein, 100 aa, Proteus mirabilis
MIREERLLKVLRAPHVSEKASIAMEKSNTIVLKVAKDATKAEIKAAVQKLFEVEVESVNTLLMKGKVKRHGQRIGRRSDWKKAYVTLKEGQNLDFVGGAE

SEQ ID NO: 68416 - protein, 279 aa, Proteus mirabilis
MESQLELSVDQQHTVRILQITDTHLFANVDDTLLGINTYRSYHAVLDAIKQQGLSIDLIVATGDLVQDQSFAAYQHFADGIARLPSPCVWLPGNHDYQPAMIDALNQAGILSAKQVLIGEHWQLLLLDSQIQGVPHGELSDCQLDWLTRCLESHKERDTVILLHHHPMPSGCTWLDQHSLRNSHQLAERVKDHPQIKMMLCGHIHQEMDEMWNGIRLLATPSTCIQFRPHCTNFSLDTVSPGWRYLELSLSAQGKRNIDTQVHRLAGKDFCPDLDADGY

SEQ ID NO: 68417 - protein, 232 aa, Proteus mirabilis
MHKILLVDDDRELTSLLKELLEMEGFNVVLATDGEQALKLLDASIDLLLLDIMMPRKNGIETLKELRQNFQTPVIMLTARGSDLDRVLGLELGADDYLPKPFNDRELVARIRAILRRSNWSEQKQTDGNTSPILQVDKLQLNPGRQEASFDNEPLELTGTEFTLLYLLAQHLGQVVSREHLSQEVLGKRLTPFDRAIDMHISNLRRKLPERTDGQPWFKTLRGRGYLMVSIT

SEQ ID NO: 68418 - protein, 188 aa, Proteus mirabilis
MRKVAMVALASMFLVAPTVVMAETSNTNNQPAGQQQYNDNYHCGYGYGMHDGRDNRGHRGQRGHMMGNNNFGESRMFNGITLTEQQRTQMRDLMRQHHQDRFNNSDFRQRHENMHKLITADKFDEAAVRAQIQDMDKQAIERRVEMAKVHNQMYQLLTPEQKAQLEKNYQQRVSSVSQQNQQTQEKAN

SEQ ID NO: 68419 - protein, 467 aa, Proteus mirabilis
MAGRIPRSFINDLLARTDIIDLIDARVPLKKQGKNHSACCPFHNEKTPSFTVNSDKQFYHCFGCGAHGNAIDFLMNYDRLDFVETIEELAAMHGLEVPYESGTGSSPIERHIRQNLYQVMEKLNQYYKSSLNTPDAQEARNYLAHRGLSEEVITRFSIGFVPTGWDNILKRFGQNPDNQALLLEAGMVITNDKGRTYDRFRQRVMFPIRDRRGRVIAFGGRVLGDDLPKYLNSPETEIFHKGRQLYGLYEAQQTHPNPAKLLVVEGYMDVVALAQFGIDYAVASLGTSTTAEHIQLLFRTTDNVICCYDGDRAGRDAAWRALETALPFLNDGRSLRFMFLPEGDDPDSLVRREGKEAFEKRMEQAHSLSEFLFDSLVPQVDLSTQEGNGKLYSLARPLIDQIPSETLRLYLLRELGNLTGNPDIEQMDRLFGRNTLHHETSYQTTKLRTTPMRILIGLLIQNPEFCQ

SEQ ID NO: 68420 - protein, 915 aa, Proteus mirabilis
MANNSVVTEEVPTTMPLTENKPIETNEASIVSQKTAADNSDHSASLFTPSATSTDSNSASLTQTAAGVASVATAAIVSHGAQVKQGLGPELPRPNPVRLPTRRELYGIRIPSQREAELRRREEALQQDHEDDLADIQEQANFEQSLRQQFLEQQRERYGEDTSATQNVEPTITMSSATSSSQSTYDEYDESDNQPFIDTHTFSAQETEEESDEYEQHLAEQFKQQLQERYGEDVLQDEDDEVLPSVTTGSSETSASAQGYHPHIQHSFAAQSTPVTQQTDNSTLYPNSDAFLQVSPRDDEEEEYTPTIELQENLDALGSLSPVDDLLDEEPAEPVFTPMVTPAEPVSSVSSVGQTPIEPQAQMAQHFAQQQQQQQQQQQQQQQQQQQQQQQQQQQQQQQQQQQSLIHPLLMRNDRPLQKPTTPMPSLDLLTSPPMDDEPVDMFELERIGKLIEARLNDYRVKAKVVGISPGPVITRFELELAPGVKAARISNLSRDLARSLSTTAVRIVEVIPGKPYVGLELPNKKRQTVYMRELLDSDAFRDSRSPLTVVLGKDIGGQPVVANLAKMPHLLVAGTTGSGKSVGVNAMIISILYKAKPEDVRFIMIDPKMLELSVYEGIPHLLTEVVTDMKDAASALRWSVAEMERRYKLMSALGVRNLAGYNEKIKEAEAMGRPIPDPLWKPSDSMAPELPMLEKEPYIVVIVDEFADLMMTAGKKVEELIARLAQKARAAGIHLVLATQRPSVDIITGLIKANIPSRIAFTVSSKIDSRTILDQGGAESLLGMGDMLYAPNGYMPERVHGAFVSDDEVHAVATDWKARGRPQYIEAITKCGEEGEGGNGGGYDDGEELDPLFDQAVEFVVEKQRVSISGVQRQFRIGYNRAARIVEQMEMQGIVSAPNHNNTRDVLSPPPAEM

SEQ ID NO: 68421 - protein, 417 aa, Proteus mirabilis
MESKVVVPANGAKITLDAKGKLVVPNNPVIPYIEGDGIGIDVTPAMLKVVDAAVEKAYGNERKIEWMEVYTGEKSTQIYGKDVWLPEETLDLIREYRVSIKGPLTTPVGGGIRSLNVALRQQLDLYVCLRPVRYYKGTPSPVKHPELTDMVIFRENSEDIYAGIEWKAGSAEADKVIKFLQDEMGVTKIRFPQDCGIGIKPCSEEGTKRLVRAAIEYAIDNDRDSVTLVHKGNIMKFTEGAFKDWGYELAREEFGGELLDGGPWVKIKNPKSGKDIIVKDVIADAFLQQILLRPAEYDVIACMNLNGDYISDALAAQVGGIGIAPGANIGDECALFEATHGTAPKYAGQDKVNPGSIILSAEMMLRHMGWTEAADLIIKGMEGAIEAKTVTYDFERLMDGAKLLKCSEFGDAIIKHM

SEQ ID NO: 68422 - protein, 569 aa, Proteus mirabilis
MNKTKTTRFSLLHYWHGLGAWNFYFLLKFVLLWYGYLKFDAFSNLLFLAFLLFPLPKTFWHKLRNWIAIPIGVMLFYHDTWLPSFSTVLEQGGQLKNFSFSYLIELAVNFINLKMIGVAFILLVGYLFIEQWVRVSVFIIAGVVWLNISGFTHFSGAMVSAVSANSFTQQTNTSIDQPQPQNTEILSTAQTRAPNNNVLSSPYPPQKQPANNKVLDEWLAQFYRYENKRSTPAPVQLSSYAQPFDILIINICSLSTADAAAVGLQQHPIWGNFDVLFNRFNSVASYSGPASLRLLRASCGQTQHADLYDPADMQCLLMDNLAALGFEKKLVLDHNGEFGHYLQEIRELGNLNVPLQDQNGLSHQITAFDGSKIYNDKETLERWLKAREKSDEKRTVTFVNLVSLHDGNRFVGENTTADYGKRASALLDNLNAFINTLDKRGRKVMVVIVPEHGAALQGDITQMSGLRDIPSQSITTVPVGIRFTGLKNQRLPHTPMMIDKPSSYLALSDFILRNVNGDIFNQSTIDWNALTRELPQTATVSENQNTIVVDYQGKSYIKLNEGEWIDYPD

SEQ ID NO: 68423 - protein, 320 aa, Proteus mirabilis
MSWIEKILNKSNITSSRKANIPEGVWTKCDSCGQVLYRAELERNLEVCPKCDHHMRISARRRLETFLDTGSTTELGSELEPKDILKFRDSKKYKDRIAAAQKQTHEKDALVVMKGTLKEMPVVAASFEFAFMGGSMASVVGARFVRAVEQALEDNCPLICFSASGGARMQEALMSLMQMAKTSAALAKMQERGLPYISVMTDPTMGGVSASLAMLGDINVAEPKALIGFAGPRVIEQTVREKLPAGFQRSEFLLEKGAIDMIVRRPEMRDELAELLAKLTQYDLAKDEDELLGEEMIADDIESSDNEPEINIETNKKEDV

SEQ ID NO: 68424 - protein, 212 aa, Proteus mirabilis
MASKFQNRLVGAVVLVAVGVIFLPTLFDGDKKYNEDQFASIPLVPKPGDEQDIESIAPIEQTTTPSTPSEGASEAMISEAVTGVEQPQVSTPEVSEPQVAPSTPVVEPPKVVNPPVEPPTTPPPAVSETTAPKGEAWVVQLGALKNAAKVEEIIAKMHLSGYPVYTVPARPVSGKVTRIYIGPNASKAELQAMLPRLKELTGLQGEVRAYKP

SEQ ID NO: 68425 - protein, 70 aa, Proteus mirabilis
MSNTMTGTVKWFNDDKGFGFITPKDGSKDVFVHYSAIQSDDFKSLMEGQEVSFTMENGMKGPAAGNVVAL

SEQ ID NO: 68426 - protein, 508 aa, Proteus mirabilis
MRKNMSQQQQGAEQAPDLNNELQTRREKLSALRDNGNAFPNDFRRDAMSDELHQKYDAMSAEELDAANVEVAIAGRMMTRRIMGKASFATLQDMGGRIQLYVSRDDLPEGVYNEQFKKWDLGDILGGRGRVFKTKTGELSIHCTELRLLTKALRPLPDKFHGLADQETRYRQRYLDLISNENSRNTFKIRSKIMSAIRQFMVNKGFMEVETPMMQTIPGGASARPFITHHNALDIDMYLRIAPELYLKRLVVGGFDRVFEINRNFRNEGVSPRHNPEFTMMELYMAYADYRDLIELTEELFRTLTQDVLGSTIVKYGDEEFDFGKPFEKLTMKEAICKYRPETNMADLDDMDKAVAIAQSIGIKIEKSWGLGRVQCEIFEEVAESHLIQPTFIIEYPAEVSPLARRNDDNPFITDRFEFFIGGREIGNGFSELNDAQDQAERFEEQVRQKEAGDDEAMFFDHDYITALEHGLPPTAGLGIGIDRMVMLFTNSHTIRDVILFPAMRPGK

SEQ ID NO: 68427 - protein, 320 aa, Proteus mirabilis
MWNEPEKAQALGKERSSLEAIVETIDQLEQGLEDVSGLLDLAVEADDEETFNEAVAELEGLNKKLEQLEFRRMFSGEYDSADCYLDLQAGSGGTEAQDWASMLMRMYLRWAESRGFKTEIIEESDGDVAGLKSATIKIIGEYAYGWLRTETGVHRLVRKSPFDSGGRRHTSFSSAFVYPEVDDNIDIEINPADLRIDVYRASGAGGQHVNKTESAVRITHVPTGLVTQCQNDRSQHKNKDQAMKQMKAKLYELEMQKKNADKQVMEDNKSDIGWGSQIRSYVLDDSRIKDLRTGVETRNTQAVLDGDLDKFIEASLKAGL

SEQ ID NO: 68428 - protein, 463 aa, Proteus mirabilis
MLTKKRKLLLSALAMSVGLSLSTLPATSMAALPSVMPSGEQLPSLAPMLEKVLPAVVSVHVSGTRVQSQQVPEEFKFFFGPNFPSQQQSIRPFEGLGSGVIIDAEKGYVLTNNHVVDGADKIQLQINDGREFDAKLIGSDPQTDIALLQIEKPNNLTAIKMTDSDKLRVGDFAVAVGNPFGLGQTATSGIISALGRSGLNLEGLENFIQTDASINRGNSGGALVNLNGELIGINTAILAPGGGNIGIGFAIPSNMARDLSQQLITHGEVKRGILGIRGTEMNADLAKSFKIDAQRGAFVSEVLADSSAAKAGIKPGDVLISIDGKRINSFAELRAKVGTTPPGKEILIGLIRQGKPMDVKVTLEKQSADATRADNFSPALQGATLSNYVNKQVKAVAVDSVEKGSAAAASGLQKGDLIIGINNMPIGSLGDLRKTIDAKPPVLALNIKRGNEEIYLLLRNSSR

SEQ ID NO: 68429 - protein, 134 aa, Proteus mirabilis
MVWVYALIGLVVGLIIGALAMRYGNKTMRQQDAIKAELDTKKEELDTYRNELVSHFARSAELLDNMAKDYRQLYQHMAKSSNELMPDMPVQDNPFNYRLSESEAANDQSPIKMPPRDYSEGASGLFRPTDKKDD

SEQ ID NO: 68430 - protein, 142 aa, Proteus mirabilis
MKTFTAKPETVKRDWYVVDADGKTLGRLATEIARRLRGKHKAEYTPHVDTGDYIIVLNAEKVAVTGHKRTDKVYYRHTGHVGGIKQATFEEMIARSPERVIEIAVKGMLPKGPLGRAMYRKLKVYAGAEHNHAAQQPQVLDI

SEQ ID NO: 68431 - protein, 130 aa, Proteus mirabilis
MADNQYYGTGRRKSSSARVFIKPGSGNIVINKRSLEVYFGRETARMVVRQPLELVDMLGKLDLYITVKGGGISGQAGAIRHGITRALMEYDETLRSDLRKAGFVTRDARSVERKKVGLRKARRRPQFSKR

SEQ ID NO: 68432 - protein, 536 aa, Proteus mirabilis
MTFYLFWNSPQMTANIHNHRILILDFGSQYTQLIARRIREIGVYCELWAWDVTEEQIREFNPNGIILSGGPESTTEDNSPRAPEYVFNAGVPVLGICYGMQTMSMQLGGDVEVSGEREFGYSQVEIRETCELFRDIQDSVSEDGKPLLDVWMSHGDKVTAIPADFVTIASTETCPFAIMANEEKRFYGVQFHPEVTHTHQGLAILKRFVLDICGCDALWTSAAIIEDTVARLKQQIGDDHVILALSGGVDSSVTALLLNRAIGKRLTCVFVDNGLLRLNEAEQVMAMFKGKFDLNIIHVEAEDRFLTALKGENDPEKKRKIIGHTFIEIFDEEAVKLPQVKWLAQGTIYPDVIESAASATGKAHVIKSHHNVGGLPEDMKLGLVEPLKELFKDEVRKIGLELGLPYDMLYRHPFPGPGLGVRVLGEIKKEYCDLLRRADAIFIEELHKADLYNKVSQAFTVFLPVRSVGVMGDGRKYDWVVSLRAVETVDFMTAHWAHLPYDFLGRVSNRIINEVNGISRVVYDISGKPPATIEWE

SEQ ID NO: 68433 - protein, 481 aa, Proteus mirabilis
MQTEVIVPLVGYLLLVFLLSAYAYRKREKGQFLNEYFLGNRSMGGFVLAMTITATYVSASSFIGGPGAAYKYGIGWVLLSMIQLPAIWLSLGVLGKKFAILARRYNAVTLNDMLYARYQSRFLVWFASLSLLVAFVGAMTVQFIGGARLLETAAGIPYEFGLLIFGISIALYTAIGGFRASVLNDALQGLVMLLGTFILLFAIIYKAGGLDIAIQKLNAIDPALTSPHGADGILTGPFMASFWVLVCFGVIGLPHTAVRCISYKDSKAMHRGIIIGTIVMALLMFGMHFAGALGRAIIPDLTVPDQVIPTLMVDVLPPFAAGIFLAAPMAAIMSTINAQLLQSSATLVKDLYLNLAPHAINNEKRIARLSSLSTLILGILLLFAAWNPPSMIIWLNLLAFGGLQAVFLWPLVLGLYWNKANRYGAIAGMITGATLYATLATFNIQIAGFHPIIPALLLSLVAFLVANRFGEQTLPQSAPLQ

SEQ ID NO: 68434 - protein, 448 aa, Proteus mirabilis
MLEKILIANRGEIALRILRACKELGIKAVAVHSTADRDLKHVLLADETICIGPAASAKSYLNIPAIITAAEISGAATIHPGYGFLSENADFAEQVERSGFIFIGPKAETIRLMGDKVSAIEAMKKAGVPCVPGSDGPLGNDTAKNIEIAKRIGYPVIIKASGGGGGRGMRVVRSEKDLAQAISMTRAEAKAAFSNDMVYMEKYLENPRHVEIQVMADGQGNAIYLAERDCSMQRRHQKVVEEAPAPGITPEIRKNIGERCANACIEIGYRGAGTFEFLYENGEFYFIEMNTRIQVEHPVTEMITGVDLIKEQLRIASGLPLSVTQDQIHVHGHAIECRINAEDPKTFLPSPGTITRFHSPGGFGVRWESHIYAGYTVPPHYDSMIGKLITYGETREIAISRMKNALAELIIDGIKTNIELHQFIMNDEQFQKGGTNIHYLEKRLGLTE

SEQ ID NO: 68435 - protein, 218 aa, Proteus mirabilis
MSANALGMIIFAYLCGSISSAILICRLARLPDPRKFGSGNPGATNVLRIGGKLAAASVLICDVLKGMIPVWLAYYLNVPPFYLGIVAIAACLGHIYPVFFHFKGGKGVATAFGSIAAIGWDLSGLIAGTWLLTVLLSGYSSLGAIISALLAPFYVWWFKPEFTYPVALLSCLVLYRHHDNIQRLWRGQESRIWHKLKKKTEKTDKEIIQEAKEQEKED

SEQ ID NO: 68436 - protein, 407 aa, Proteus mirabilis
MKIYLVGGAVRDQLLNLPVKDRDWVVVGATPETLLQQGYQQVGKDFPVFLHPDTHEEYALARTERKSGSGYTGFTCYAAPDVTLEDDLQRRDLTINAIAYSAKGEYIDPYHGIDDIHAKLLRHVSDAFSEDPLRVLRVARFAARFAPLGFTIAPETMSLMQEMTNSGELNALTAERVWKETEKALHSQAPQVYFEILHQCGALKILFPEINALFGVPAPKKWHPEIDTGIHTMMVLAMASRLTDDIAVRFSALCHDLGKGVTPVENWPHHHGHGPAGVPLVEALCQRYRIPNQIRDLAKLAAKYHDHLHRIEKMRPSKIIRLFDAIDAWRKPERIDQLAIISEADARGRQGAENLPYPQGIFFRQAFKIANQVDVKSIVSRGLKGSAIREALTKQREVAIIEWKSRL

SEQ ID NO: 68437 - protein, 129 aa, Proteus mirabilis
MLKLNKIHHVAIICSDYTISKHFYCQILGLTLLNEKYREEIQSWKAELALGTVYQIELFSFPDAPARLSYPEARGLRHVAFAVDDLDGSVAYLQQNNIQCEPIRIDPSSQKRFTFFQDPDGLPLELYSI

SEQ ID NO: 68438 - protein, 340 aa, Proteus mirabilis
MRVLGIETSCDETGIAIYDDKAGLLANQLYSQIKLHADYGGVVPELASRDHIRKTVPLIQAALKEANLTAKDIDAVAYTAGPGLVGALLVGATIGRSLAFAWDVPAIPVHHMEGHLLAPMLEEKTPDFPFVALLVSGGHTQLISVTGIGEYTLLGESIDDAAGEAFDKTAKLLGLDYPGGPVLSKMAQQGVEGRFVFPRPMTDRPGLDFSFSGLKTFAANTIRQNDDSEQTRADIARAFEDAVVDTLAIKCRRALEQTGFKRLVMAGGVSANRTLRAKMAMIMEQLGGEVFYARPELCTDNGAMIALAGMIRFKGGTEGPLGVTVRPRWPLAELPALADK

SEQ ID NO: 68439 - protein, 327 aa, Proteus mirabilis
MDNNSLKNASLFDNDPVLYAAWLYYQDGLSQSEVANIMSVSRVTVVKYLHLAREKGFVNISLDSSVFSTIDYSIRIKAKFNLNNVLILPDEEKNKSQQTSNMNRERLAKAGAMYLSQIISNDDILGVAWGRTIHKLGHYLPTKTLENVTVLQMIGAVAPQPDFTTAESAALIANKFSGCSINLHVPAVVSNARLAMELQAEPIIRRNFSALNQCNKALFVVGNTQDDNPLITTGVLTTNEMAQYRDLGAVGVICGRFYDAQGNPLLSDIDLRIMGISLAQLRQIPQRIFIAGGVENVAATIGAIKGGYATDIVIDEVTALALLELSI

SEQ ID NO: 68440 - protein, 182 aa, Proteus mirabilis
MKIKTLSIRFILGLSVSIGLTSAAFAIPDNLYFHGILVDEPCTIKPGDETVVLDFGNIPDKNLYAYKRTPSKLFQLRLSECDLSIGKSVKITFKGEENQAMAGEGFLAISPGSQASGIAVGLESENGNALPINKETDKMSLTAGDTILNFYAFIQGEPDAIANKSIKRGPFSAIATFYLNYD

SEQ ID NO: 68441 - protein, 252 aa, Proteus mirabilis
MMLLKRSCIVATTLLMGMAFTHQAVAAIALDRTRVIFNGAEKSISLNVSNQNKDLPYLAQGWMENENGERIESPLIVLPPIQRIEPGDKSQIKVQSLPDIAKLPQDRESVFYFNLREIPPRSNKPNVLQIALQTRIKLFYRPASIYASQTDLTNPWQEQITLTKKGDRFEVNNPTPYYVTLVDGLTSLKGKSLDGFEPLMIAPKSSGTINLSASMFGASPVLSYINDYGGRPQMKFTCSGNQCKVTETAAGN

SEQ ID NO: 68442 - protein, 576 aa, Proteus mirabilis
MNIQAFLSEKISMAMSAAGAPADSEPLVRQSAKVQFGDYQANGVMGAAKKMGIPPRQLAEKILEHLDITDIADKVEIAGPGFINIFLSPVWVAQQAEFALADEHLNITKVTPETIVIDYSSPNVAKQMHVGHLRSTIIGDASARTLSFLGHNVIRANHLGDWGTQFGMLIAYLEKKQNENAADMALADLEEFYREAKKCYDEDEVFAERARNYVVRLQGGDEYCRTMWRKLVDITMQQNQLTYQRLNVTLTEDDIMGESLYNPMLPGIVADLKAKGLAVESEGATVVFLDEYKNKEGEPMGVIIQKKDGGYLYTTTDIACAKYRHEQLHANRVLYYIDSRQHQHLMQAWTIVRKAGYIPDSMSLEHHMFGMMLGKDGRPFKTRSGGTVRLTDLLDEAHERALTLIREKNPDMDEEELNNIARVVGIGAVKYADLSKNRTTDYIFDWDLMLSFEGNTAPYMQYAYTRVASIFKRAEIDESALTQPISLTQPHEKQLALRLVQFDETITQVAREGTPHVMCAYLYDLAQSFSGFYENCPILSAEDDNVRQSRLKLARLTARTLKQGLETLGIETVDRM

SEQ ID NO: 68443 - protein, 547 aa, Proteus mirabilis
MAIHSRAGQHTRQSDLINVAQLTAQYYSLKPQANQNAHRVKFGTSGHRGSAKRHSFNEAHILAIAQAIAEVRANNGVTGPCYVGKDTHALSEPAFISVLEVLAANKVNVIIQENNGYTPTPSVSFSILTYNQGHQDIADGIVITPSHNPPEDGGIKYNPSNGGPADTDLTSVIEKRANELLENNLSGVKRLSYDDALASGYIHEQDLIMPYVKALGDVVDMKAIKKAGLKLGVDPLGGSGIEYWKRIGEYYELDLELVNDQVDQTFRFMTLDHDGVIRMDCSSPWAMEGLLQLRDKFDLAFANDPDYDRHGIVTPSGLMNPNHYLAAAINYLFRHRPQWSNEVKVGKTLVSSAMIDRVVADLGRELVEVPVGFKWFVQGLFSGEFGFGGEESAGASFLRFNGKPWSTDKDGIILCLLAAEIKAVTGKDPQQHYNELAQRFGSPSYNRIQASATHEQKALLSRLSPEMVTANTLAGDPITARLTHASGNGAAIGGLKVMTDYGWFAARPSGTEEAYKIYCESFRGSEHRELIEKEAIEIVNNVFASKQ

SEQ ID NO: 68444 - protein, 190 aa, Proteus mirabilis
IKKLSSNLEYTMAKLHDYYKDEVVQKLMSQFGYHSVMQVPRVEKITLNMGVGEAIADKKLLDNAAADLAAISGQKPLITKARKSVAGFKIRQGYPIGCKVTLRGERMWEFFERLISIAVPRIRDFRGLSAKSFDGRGNYSMGVREQIIFPEIDYDKVDRVRGLDITITTTAKSDDEGRALLAAFNFPFRK

SEQ ID NO: 68445 - protein, 101 aa, Proteus mirabilis
MAKKSMKARDVKRANLAEKFFAKRAELKAIVSDVNVSDEDRWNAVLKLQTLPRDSSPSRQRNRCRQTGRPHGFLRKFGLSRIKVREAAMRGEIPGLRKASW

SEQ ID NO: 68446 - protein, 130 aa, Proteus mirabilis
MSMQDPIADMLTRIRNGQAANKVAVTMPSSKLKVAIANVLKEEGYIEDFKIEGDTKPELEITLKYFQGKAVVESIQRVSRPSLRIYKRKDELPQVMAGLGIAVVSTSKGVMTDRAARQAGLGGEIICYVA

SEQ ID NO: 68447 - protein, 177 aa, Proteus mirabilis
MSRVAKAPVVIPAGVEVKLNGQVITIKGKNGELTRTIHNAVEIQHADNQLTFAPRDGYADAWAQAGTTRSLLNAMVVGVTEGFTKKLQLVGVGYRASVKGNTVNLSVGYSHPVEHQLPAGITAECPTQTEILLKGADKQVIGQVAAELRAYRRPEPYKGKGIRYADEVVRIKEAKKK

SEQ ID NO: 68448 - protein, 117 aa, Proteus mirabilis
MDKKAARIRRATRARRKLQELGATRLVVHRTPRHIYAQVIAPNGSETLVAASTTEKAIIEQLKNTGNKEAAAVVGKIVAERALEKGIKSVSFDRSGFQYHGRVQALADAAREAGLQF

SEQ ID NO: 68449 - protein, 166 aa, Proteus mirabilis
MAHIEKQAGELQEKLIAVNRVSKTVKGGRIFSFTALTVVGDGNGRVGFGYGKAREVPAAIQKAMEKARRNMKTVALNNGTLFHPIKGTHTGSRVFMQPAHEGTGIIAGGAMRAVLEVAGVRNVLAKTYGSTNPINVVRATLDALDSMKSPEMVAAKRGKSVEEILG

SEQ ID NO: 68450 - protein, 61 aa, Proteus mirabilis
MTMAKTIKITQTRSLIGRLPKHKATMAGLGLRRIGHTVEREDTPAVRGMINLVSYMVKVEE

SEQ ID NO: 68451 - protein, 159 aa, Proteus mirabilis
MLAKLLDQQKGTIIEMFNMFSGGALSRASIFALGIMPYISASIIIQLLSVVNPRLAEIKKEGEAGRRKISQYTRYGTLVLAIFQSIGIATGLPNMPGMQGLVINPGLPFYITAVVSLVTGTMFLMWLGEQITERGIGNGISTIIFAGIVAGLPPAIGQT

SEQ ID NO: 68452 - protein, 144 aa, Proteus mirabilis
MTKTVLVPIDFTELGLLDKVVTHLKALAMADKLNIHFLSVIPSYESFVGFAFGNQDRLANDKQRIEIALSTLNDSLSHIEIPNSTSQSYISVGNPRDRILETAKKIQADLIVIGSRNPGMKTYLLGSTASSVVSYAESSVLVVR

SEQ ID NO: 68453 - protein, 618 aa, Proteus mirabilis
MEQNPQSQLKLLVTKGKEQGYLTYAEVNDHLPEDIVDSDQIEDIIQMINDMGIQVMEEAPDADDLMLAENSNDTDDDAVEAAAQVLSSVESEIGRTTDPVRMYMREMGTVELLTREGEIDIAKRIEDGINQVQCSVAEYPEAITYLLEQYDRVEAGEARLSDLITAFIDPNAEEVAESDDVNLGKDDDEIDNSADDEDEDEDEDSDTDSDSDDDNSIDPELARQKFTELREQYEKTRQSIKAKGRNHKDTELEILQLSEIFKQFRLVPKQFDYLVNNMREMMDRVRAQERHIMRLCVDQVKMPKKNFITLFTGNETNDTWFTAARAMNKPWSEKLAGIEEEVQRSLQKLQQIEVETGLTIEQVKDINRRMSIGEAKARRAKKEMVEANLRLVISIAKKYTNRGLQFLDLIQEGNIGLMKAVDKFEYRRGYKFSTYATWWIRQAITRSIADQARTIRIPVHMIETINKLNRISRQMLQEMGREPSPEELAERMLMPEDKIRKVLKIAKEPISMETPIGDDEDSHLGDFIEDTTLELPLDSATSESLRSATHEVLGGLTLREAKVLRMRFGIDMNTDHTLEEVGKQFDVTRERIRQIEAKALRKLRHPSRSEVLRSFLDE

SEQ ID NO: 68454 - protein, 347 aa, Proteus mirabilis
MKKWSSVLAASVMALSIGTASADDGKTIYFYNWTEYVPPGLLEQFTKETGIKVIYSTYESNESMYTKLKTYKDGAYDLVVPSTYFISKMSHEGMLQKIDKSKLSNFDNLDPSLLHKSFDPQNDYSIPYIWGATAIGINSDEVDVSSITSWADLWKPEYKDSLLLTDDAREVFQMALLKLGYSGNTTDPKQIEEAYKELQKLMPNVLAFNSDNPANPYMQGEVNLGMIWNGSAFIAREAGAPIELVWPKEGGIFWMDSLAIPANAKNVEGAHKLIDFLLRPEVAAKVAENIGYPTPNLAAQKLLPKAITKDSSLYPSEEIISKGEWQNDVGEATVLYESYYQKLKAGR

SEQ ID NO: 68455 - protein, 456 aa, Proteus mirabilis
MELSSLTAISPIDGRYGSKTSSLRTIFSEFGLLKFRVQVEVRWLQKLASCTDIKEVPAFEQNAIDYLDAIVANFNEDDATRIKTIERTTNHDVKAVEYFLKEKVAAIPALQQVSEFIHFACTSEDINNLSHAIMLETARQEVLLPAWRELIDTISKMAQAYRDLPLLSRTHGQPATPSTVGKEFANVAYRMERQYRQLTQVEILGKINGAVGNYNAHLAAYPEVDWHQFSEEFVTSLGITWNPYTTQIEPHDYIAELFDCISRFNTILIDFDRDIWGYIALNHFKQKTIAGEIGSSTMPHKVNPIDFENSEGNLGLANAVMGHLSSKLPVSRWQRDLTDSTVLRNLGVGIGYALIAYQSTMKGLNKLEVNESHLREELDSNWEVLAEPIQTVMRRYGIEKPYEKLKELTRGKRITAQDMIVFIDGLALPEQEKARLKAMTPESYIGFASQLVDKLD

SEQ ID NO: 68456 - protein, 367 aa, Proteus mirabilis
MSDNSQKKVIVGMSGGVDSSVSAYLLKEQGYQVVGLFMKNWEEDDDTEYCSASADLADAQAVCDKLGIELHTINFAAEYWDNVFEHFLSEYKAGRTPNPDILCNKEIKFKAFLEYAAEDLGADYIATGHYVRRRDIDGKSQLLRGVDNNKDQSYFLYTLSHQQIAQSLFPVGEMEKPEVRKIAEKLDLATAKKKDSTGICFIGERKFTDFLSRYLPAKPGPIVTVDGETIGEHQGLMYHTLGQRKGLGIGGTKEGSEDPWYVVDKDVANNILIVAQGHEHPRLMSVGLIAQQLHWVAREPITEAFRCTVKTRYRQADIPCTVTPLDEDKIEVRFDYPVAAVTPGQSAVFYQDEVCLGGGIIETRIQE

SEQ ID NO: 68457 - protein, 557 aa, Proteus mirabilis
MTESFAQLFEESLKTIETRPGAIVRGVVVAIDKDVVLVDAGLKSESAIPVEQFKNAQGELEIQVGDEIDVALDAVEDGFGETVLSREKAKRHEAWLMLEKAYEENETVVGIINGKVKGGFTVELNGIRAFLPGSLVDVRPVRDTTHLENKELEFKVIKLDQKRNNVVVSRRAVIESENSAERDQLLENLQEGMEVKGIVKNLTDYGAFVDLGGVDGLLHITDMAWKRVKHPSEIVNVGDEITVKVLKFDRERTRVSLGLKQLGEDPWVAIAKRYPEGTKLTGRVTNLTDYGCFVEIEEGVEGLVHVSEMDWTNKNIHPSKVVNVGDVVEVMVLDIDEERRRISLGLKQCKANPWQQFAETHNKNDRVEGKIKSITDFGIFIGLDGGIDGLVHLSDISWNVAGEEAVREYKKGDEIAAVVLQVDAERERISLGVKQLSEDPFNNYLSAHKKGAIVSGKVTAVDAKGATVELADGVEGYLRASEASRDRVEDATLVLNVGDAVEAKYTGVDRKNRVINLSVRAKDEADEKDAIASVNNKEEAGFSNNAMAEAFKAAKGE

SEQ ID NO: 68458 - protein, 79 aa, Proteus mirabilis
MDQISATTAIKKACNYVGGQSEMAKRLGISPPTVNQWINGTRKIPARRCPEIEKVTSGVVRCEELRPDVDWSYLRGTQQ

SEQ ID NO: 68459 - protein, 649 aa, Proteus mirabilis
MSDMAKNLILWLVIAVVLMSLFQSFGPSDSNSRKVDYSTFINELTNNQLREVSISGYDINVTKTDNSKYSTYMPMRDDNLLTTLMNRNVKVTGEPIEGQSLLTQIFVSWFPMLLLIGLWIFFMRQMQGGGGKGAMSFGKSKARMLTEDQIKTTFADVAGCDEAKEEVSELVEYLRDPGRFQKLGGKIPKGILMVGPPGTGKTLLAKAIAGEAKVPFFTISGSDFVEMFVGVGASRVRDMFEQAKKAAPCIIFIDEIDAVGRQRGAGLGGGHDEREQTLNQMLVEMDGFEGNEGIIVIAATNRPDVLDPALLRPGRFDRQVVVGLPDVRGREQILKVHMRRVPLSPDVDPAILARGTPGFSGADLANLVNEAALFAARGNKRVVSMVEFEKAKDKIMMGAERRSMVMTEEQKASTAYHEAGHAIIGRLVPEHDPVHKVTIIPRGRALGVTFFLPEGDQISASRQKLESQISTLYGGRLAEEIIYGPEHVSTGASNDIKVATNIARNMVTQWGFSEKLGPLLYADEDGEVFLGRSVAKAQHMSDETARTIDEEIKAIIDRNYTRARQILMDNLDILHSMKDALMTYETIDAPQIDDLMNRREVRPPAGWEGNNGNSGANTATAQPTQTHVTNEPNNKSGSESDTPSDNNTH

SEQ ID NO: 68460 - protein, 276 aa, Proteus mirabilis
MKLIARGRELNLSSPQVMGILNVTPDSFSDGGTHNSLNDAINHAAKLIAEGASIIDIGGESTRPGASDVSVDEELHRVIPVVEAIQQRFDVWISVDTSKAQVITESAQAGASIINDIRSLTEPGALQAAAKTGLPVCIMHMQGLPKTMQHSPQYKNVMIEVDAFLAENIQRCIDAGIEKNQIILDPGFGFGKNLAHNYQLLAHLSDFHHFGLPILAGMSRKSMVGQLLNVPPQERVAGSVAGAVIAAMQGAQIIRVHDVKETVDAMKVVQATLSAK

SEQ ID NO: 68461 - protein, 445 aa, Proteus mirabilis
MSERKYFGTDGIRGKVGDSPITPDFVLKLGWAAGKVLARHGSRKIIIGKDTRISGYMLESALEAGLAAAGLSASFTGPMPTPAVAYLTRTFRAEAGIVISASHNPYYDNGIKFFSIDGTKLPDEVEEAIEAEMEKPITCVESAELGRANRIVDAAGRYIEFCKGTFPNENNLNGLKVVVDCAHGATYHIAPNVFRELGAEVITIGCEPTGININDECGATDVRMLQKRVLEEGADVGLAFDGDGDRIIMVDHRGLKVDGDQILYIIAREALRQGQLRGGAVGTLMSNMGLEIALKQLGIPFVRAKVGDRYVLEKLQEKGWRLGAENSGHIILLDKTTTGDGIVAGLQVLSAMVRNHMSLHDLCSGMKLLPQILVNVRFTGNHDPLQSTEVQQVAKEVEAELGGKGRVLLRKSGTEPLIRVMVEGENEEQVTAMANRIADAVKHVG

SEQ ID NO: 68462 - protein, 708 aa, Proteus mirabilis
  MISC_FEATURE (375)..(375): X=any amino acid
VSRTIMLVPTDTRVGLTSVSLGVIRSMEQKGVRLSVFKPIAQPRVKGALDQTTAIIRSHSTIQSAEPLNMDYVESLLSSNKKDVLMEEIVARYHENTADAEVVLIEGLVPMRKHPFAQSLNYEIAKTLGAEIVFVTALGNNTAEQLKERIEFARAEFGGVKNQNITGVIVNKLNAPVDDQGRTRPDLSEIFDDSSKAIISNVDLNTIEKNSPLPLLGCIPWNFDLIATRATDMAKHLNATIINKGDIETRRIKSVTFCARSIPHMLEHFRPGSLLVTSADRPDVLVSACLAAMNGVEIGAILLTGGYQIDAPIKQLCERAFETGLPIFMVNSNTWQTSLNLQSFSLEVPADDHERIEKIQNYVANISITNGLIHXQQTLNVLIVYHPPAFRYQLTELARKAKKRIVLPEGDEPRTVKAASICAERGIATCVLLGDPEEIRRVAAAQGVELGTGIELINPKEVREIYVPRLVELRKNKGMTEVVAREQLEDNVVLGTLMLEKGVVDGLVSGAVHTTANTIRPPLQLIKTAPGSSLVSSVFFMLLPEQVYVYGDCAINPDPTAEQLAEIAIQSADSAKAFGIDPRVAMISYSTGNSGAGSDVEKVREATRLAQEKRPDLIIDGPLQYDAAVMADVAKSKAPNSPVAGKATVFIFPDLNTGNTTYKAVQRSADLVSIGPMLQGMRKPVNDLSRGALVDDIVYTVALTAIQA

SEQ ID NO: 68463 - protein, 341 aa, Proteus mirabilis
MATIKDVAKRAGVSTTTVSHVINKTRFVAENTRAAVWAAIKELNYSPSAVARSLKVNHTKSIGLLATSSEAPYFAEVIEAVENSCYSKGYTLILCNSHNNLDKQKAYLAMLAQKRVDGLLVMCSEYPDHLLSLLEGYRNIPMVVMDWGKARGDFTDTIIDNAFHGGYIAGRYLIERGHRDIGIIPGPLERNTGGGRLQGFLKAMEEAKITVKEEWIVQGDFEPESGYKAMTQMLNQKQRPTAVFCGGDVMAMGAICAADELGLRVPADISIVGYDNIRNARYFTPALTTVHQPKERLGQMAFSMLLDRIVNKREDAQTIEVHPRLVERRSVADGPFIDYRR

SEQ ID NO: 68464 - protein, 237 aa, Proteus mirabilis
MIKKISRQKASQQILDQIKQNIYDGTYPIGEKLPSENVLADAFGVSRVPIREALGVLEASGIITSRQGGGRRVIDHSILSKYEPIVMEIACPQEIESLLEMREVIEHEAAAIAALRRTPEELLTIEQAHQAFILATQKNNNIGHQEDYQFHRAIMVASHNPFFVRILDNLHELYLGVLMYSLSQNKGRIAETERVIAEHEAIVEAIRQQDSDETSHKMRLHLANVRGKLKRLQQEKN

SEQ ID NO: 68465 - protein, 500 aa, Proteus mirabilis
VIGVCMNKTISEHVDVALIGAGIMSATLGTLLKELEPNLKVAMFERLNDCGQESSNSWNNAGTGHAANCELNYTPPNPDGTVNISKALEVNTEFDLSRQLWSYLVTKGKIADPRDFIHACPHMSFVWGADNVKFLHQRIAQMSANHCYENMQYSEDKQQIEDWAPLIMEGRDPNQQLAVTRVATGTDVDYGALTHLLVKQLSQQDNFELHYKHDVIDIKRNETGGWNIEVKDLTTHDKYLITAKYVFVGAGGRAIDLLQKSGIPEGKGYGGFPVSGIWLRCDEDKISSRHHAKVYGKADVGSPPMSVPHLDTRIIAGKRSLLFGPYAGFSSKFLKHGSYLDLFESIRPSNIEPMLDVAKDNWSLTEYLIGQVLQTSAHQFEMLKQFYPQAQHEDWQEAVAGQRVQIIKPAAKHHGVLEFGTELISSADKSFSVLLGASPGASTAAFIAINIIKSCFKQQLENEGWEDRLKTIIPTYGIDLKIDADACRNIRASTAKILKL

SEQ ID NO: 68466 - protein, 625 aa, Proteus mirabilis
MNVKEIIRHEPFGTLLGYAPGGVAIYSSDYSSIDKEDYAANDSFRSYIGNEYMGHKWQCVEFARRFLYLHYGVVFTDVGMAYEIFSLRFLRRTIDDDILPLQAFANGSKQPPTVGALLIWQEGGEFKVTGHVAVITEVLEDKIRIAEQNVIHTRLPRGQQWTRELPLKVSDNGYFIEDTFDNTTLLGWMIQTEPNAYSLPQPKVAPELLAIHEAKLANKGQFAGKWLDESDPLEKAYVLAQHGHTINQDSYEYFTISESAEHELIRASNEMHLMYLHATEKVLKDDNLLRLFAIPEVLWPRIRLSWQNRRHQMITGRLDFCMDERGIKVYEYNADSASCHTEAGLIIEKWAKQGGIKAGYNPGERLLDALSDAWKHSDAKPFVHILQDDDNEEDYHARFMQQALTKAGYSSKILRGLKELHWNSRGQLIDGDKRIVECVWKTWAWETALDQLREESEQQSLIPIRIGDPAGEVRLVDVLLRPEITVFEPLWTLIPSNKAILPILWQLFPDNPYLLDTEFTLTPRLSQSGYAVKPIAGRCGSNIGLVDHQENVLGETSGQFEHQENIYQELWCLPKVSNRYIQVCTFTVDGHYGGCCIRSDPTLVIKKDSDIEPLIVLEDKHFLAD

SEQ ID NO: 68467 - protein, 944 aa, Proteus mirabilis
MDKIEVRGARTHNLKNINLVIPRDKLIVITGLSGSGKSSLAFDTLYAEGQRRYVESLSAYARQFLSLMEKPDVDHIEGLSPAISIEQKSTSHNPRSTVGTITEIHDYLRLLFARVGEPRCPDHDIPLAAQTVSQMVDNVLAQPEGKRLMLLAPIVKERKGEHVKLLNNLAAQGYIRARIDGEVCDLSDPPTLELQKKHTIEVVIDRFKVRDDLAQRLAESFETALELSGGTAVISDMDDSSAEDIVFSANFACPICGYSMSELEPRLFSFNNPAGACPTCDGLGVQQFFDPDLVIQNREISLAGGAIKGWDRRNFYYFQMLRSLGEHYHFDVEAPFDSLPDKIQKVILSGSGKENIEFKYTNDRGDVVVRHHPFEGVLNNMERRYRETESSAVREELAKYISNRPCASCGGTRLRREARHVYVENTTLPEIADYSIGHAMSFFQNLKLSGQRAKIAEKVLKEIGDRLKFLVNVGLNYLTLSRSAETLSGGEAQRIRLASQIGAGLVGVMYVLDEPSIGLHQRDNDRLLETLIHLRDLGNTVIVVEHDEDAIRAADHIIDIGPGAGVHGGEIVAQGTLEDIVNNPNSLTGKFLSGERRIAIPEKRVPVDREKMLTILGAKGNNLKNVNLKIPVGLFTCITGVSGSGKSTLINDTLFPIAQRQLNGATNSVPAPYLDVEGLEHFDKVIDINQSPIGRTPRSNPATYTGVFTPIRELFAGVPESRTRGYTPGRFSFNVKGGRCEACQGDGVLKVEMHFLPDVYVPCDQCKGQRYNRETLEIKYKGKNIHEALDMTIEEAREFFDAVPALARKLQTLIDVGLSYIRLGQSATTLSGGEAQRVKLAKELSKRGTGQTLYILDEPTTGLHFADIELLLDVLHQLRDQGNTIVVIEHNLDVIKTADWIVDLGPEGGSGGGQILISGTPEQVADFEGSHTARFLKPILERGY

SEQ ID NO: 68468 - protein, 500 aa, Proteus mirabilis
MSYTKRLSLICAICLGTFMATLDISIVNVALPTIQNDINANMATLQWIVDAYALCLSACILSSGPLSDRFGRKKVWLWGVIIFTLGSLICAIAQQHEILILGRIIQGIAAAALIPGALSLITHAFPVDIERIRIIGIWSSVSALSLIIGPILGGALVHASGWASIFLINIPIGAITVLLGWYGLSESADPEDVALDPLGQLTSILGLGLLTYGFIEAGSVGWSDYRTVFALIVGLIFITLFVIVEKRIERPLLPLSLFKDRSFFQYNLSSFTLGFATYSNVFFIAFFLQKAQGWSALETGLRMAPEFIAMALFSMLFGRFSRYISVRKLMIFGFLLIAISSCLLATLATNSSYTITGSYLFILGAGMGLATPAIGVLVMKSVAPSRSGMASATMNALRQTGMTMGIALLGTLMIQQAINYMMIQSQALGIVAEPINIITLVTENKTASLDNQLVALLPEAFNSGFAYAMLTAGLSCFITLFIMLFPCKEKQGALSQQIAD

SEQ ID NO: 68469 - protein, 320 aa, Proteus mirabilis
MSIIHLEFEKPIVELDEKIDALLAFKQSQDETTAVDIDEEIAKLRQKSLSLTRSIFSDLGDWEIVQLARHPMRPYTLDYIKAIFTDFQELAGDRAYADDKAIVAGLARLDRKPVMIIGQQKGRDTKEKVKRNFGMPSPEGYRKALRLMKMAERFHLPVIIFIDSAGAYPGVGAEERGQSEAIARNILEMSRLKTPIICTITGEGFSGGALAIGVGDRVNMLQYSTYAAISPEGCASILWKNADKAPIAAQTMGMTAPKLQALGIIDSIIPEPLGGAHRHYQQAAEFVKKQLLADLTELNSYSKEELLEKRYQKLMSYGYC

SEQ ID NO: 68470 - protein, 205 aa, Proteus mirabilis
MTQPPVFQQRDQIRKAIRQKRRQLTVAQQQDAAHKLSERVLHHPKVKQAKTIALFLSFDGEIDTAPLITHLWDLNKQVCLPVLHPFHRHHLLFLRYAPTTQLVKNRFNIFEPPLNVNNIIPISDIDIIFTPLVAFDESGQRLGMGGGFYDRTLENWQRQSFYPMGLAHTCQQVHSLPSADWDIPLPEIITPDKVWRFDERLIQRN

SEQ ID NO: 68471 - protein, 871 aa, Proteus mirabilis
MVRSFKTVCLEKREKRKKHAIRPVAILIYLIVTGASSLSNSALANSDIEFNADILDLKDKQNIDLSDFSRAGYIMPGRYEFVVRINNNELPDIYNINYVVPADDPKGSEPCLPPELVRQLGLKPEWLDKIRFNDNQTCLDTSSIPGMTINASLGSGNLLLTIPQAYLEYSAPNWDPPSRWDDGISGILFDYNVNANVTDPAKGKQRQQVTGLGTLGANLGAWRFRADWQASYQHTTGIPQSTENSWKWNQYYLYRAIPQWEARFVMGETYSRSDIFDSFRFTGVHLATDDNMLPPNLRGYAPEVTGVAKTNAKVTISQQGRVIYETQVAPGPFRIQDINDAVSGKLDVRVEEQDGSVQEFQMDTASIPYLTRPGRVQYKFSAGKPSNIDHNTEGPVFGMGEFSWGVSNGWSLYGGSIVAGDYNALSAGIGRDLMAFGALSFDATHSWAKIPRDDKRYNGGSYRLSYSKRFEAINSQVTFAGYRFSERDFMTMDQYLERRYRDGNADNNKELYTIMFSKQFPDWGLSTYLNYSHQTYWNKPTNDNYNLSLAKSADIGRFKNINFSLSAFRNKFNGTNDNGVYMNVSMPWGDRATISYNTVINKSGNSHNVSYYDRIDDNSSYRVGAGVSSNGKPSADAYFMHYADAALVTASASHINGEYTSATLSLQGGATLTPKGGALHRVSRTGSTRLLIDTDGIANIPVKNFGAISHTNMFGKAVLPDINDYYRSSASIDLNRLPENVEALRSIQQLTLTEGAIGYRRFDVIEGQKAMAVIRLKDGTFPPFGASVTTEKGRELGIINDGGNVYLTGINTGDVLSVRWSGKEQCKVLIPTLVENMQISSLLLTCSDDGTATSTFNQREVSLPKTKFLSR

SEQ ID NO: 68472 - protein, 515 aa, Proteus mirabilis
MKKLFTNKILQCLILLIFVLLLHISLGYTLRPFYVLTFTAFLLCLSGYFKRTYFIFIILLMIVGAIYLPIGLKYGSPNINSIISIFYTNTHESLEFILSVSPISLAFSCLLILFGLLSLKVNLLIGKKLSLFTVSIFILTSVTWPVKALITHDDYSFEAKLPIIRFFSDIKKHYDTVIIENNWINTELNKKDSWLPINNSKYKNYILIIGESARKDFMQSYGFPIQNTPFLEKSPVIQFDDYISSAPSTFFSLPPSLTLKNHKTGDMELQNNIITLAKKAGIYTYWFSNQGSMIGSDSIISTIGKRADVYHFLSKGDYHNNGRSTDDDLLPDIKAALSTNSHKTNLIVVHLIGSHSQACARTQGQYDEFFQSTEVSCYVQSIKNTDKLLEKIVSMSNATGNSWSLLYFSDHGLSYEHKGESYTKLIHNDQFKQNFEVPLFILSSDSHEKYHITARRNGRYFMTLFSEWIGIQDPKISNHCHMMSNDICTDQDTVINFQKEEIDYNSLPEDKIIYQ

SEQ ID NO: 68473 - protein, 325 aa, Proteus mirabilis
MVNGIKRIGVLTSGGDAPGMNAAIRGVVRAALSEGLEVYGIFDGYMGLYENRMKKLDRFSVSDMINRGGTFLGSARFPEFREDNVRAVAIENMKQNELDALVVIGGDGSYLGAKKLTEAGFPCIGLPGTIDNDVAGTDYTIGYFTALETAVEAIDRLRDTSTSHKRISIVEVMGRYCGDLTLSAAIAGGCEFVVLPESELPFDRDELLAEIKAGIERGKRHAIVAITEHVCDVHELARFIEAETKHETRATVLGHIQRGGSPVAYDRILASRMGAYSVQLLLEGYGGRCVGIQNEKLVHHDIIDAVMNMKRVFKADWYETAKKLY

SEQ ID NO: 68474 - protein, 419 aa, Proteus mirabilis
MDERQYKQIIQKTINTLNETGSMEAVCFLTELHVKGRNNYWKVRQAVETAKDCLYTFDQLKSNKTELRRPLRKMVFNVPTRRELPSGERAIAHGLAIASGIKACKDLANMPPNICNAAYLASQARQLADSSANVSTRVIGEEQMKELNMNAYLAVGQGSQNESLMSIIEYKGNQDPESRPIVLVGKGLTFDSGGISIKPADGMDEMKYDMCGAATVYGVMRVVAELQLPINVIGVLAGCENMPGGKAYRPGDILTTMSGQTVEVLNTDAEGRLVLCDTLTYVERFEPELVIDIATLTGACMVALGHHYSGLMSNHNPLAHELMNASEQAGDRAWRLPLGEEFYEQIESNFADLANTGGRLRGAITAGCFLARFASKYNWAHLDIAGTAWRSGKAKGATGRPVSLLSQFLLNRAGLNSDE

SEQ ID NO: 68475 - protein, 149 aa, Proteus mirabilis
MKNATFYLMEHPSIHQDLQAHEWLACQLAAEHWRLGKRVLLVCDSQPQAELLDEALWAREPHQFVPHNLAGEGPRYGAPVELCWPGKRGNAPRDLLINLQSQFADFATAFHEVIDFVPIDEQLKQLARERYKIYRSVGFTLTMATPPTY

SEQ ID NO: 68476 - protein, 454 aa, Proteus mirabilis
MHSTDTIVAQATPPGRGGVGILRVSGPKAAVVAQTILGKVPKPRYADYLPFRNEDNSVLDQGIALFFPNPNSFTGEDVLELQGHGGPIILDLLLKRILQIPGIRIAKPGEFSERAFLNDKLDLAQAEAIADLIDASSEQAARSAINSLQGAFSSHINEMVESLTNLRIYVEAAIDFPDEEIDFLSDGVIEGKLNTVISQLDDVRAQARQGSLLREGMKVVIAGRPNAGKSSLLNALAGREAAIVTDIAGTTRDVLREHIHIDGMPLHIIDTAGLREASDEVERIGIERAWQEIEQADRVLFMVDSTTTEATTPEEIWPEFMARLPSTLPVTVIRNKSDLTGEPAEITSQGDYPMIRLSARDGMGIELLRSHLKEAMGFNSNTEGGFLARRRHLQALNTAAEHLQQGYQQLVYAKSGELLAEELRLAQQALSEITGEFTSDDLLGRIFSSFCIGK

SEQ ID NO: 68477 - protein, 50 aa, Proteus mirabilis
MGWTEAADLIIKGMEGAIEAKTVTYDFERLMKGAKLLKCSEFGDAIIKHM

SEQ ID NO: 68478 - protein, 708 aa, Proteus mirabilis
MSTDEANNTPKPRLILDEPVLSHSSGIMISAAEQRARIQRHVELLDMLEQGLLKTGLVFTCQVAGLADDTFQVTQFDLNEGLSELFTLTIQVVSTQSDIDFSYYLGGASSLTVRRNGKKIRTVQGLLSSAEQSNTDGIKTWYQLEIRPEMWVMTLNQDSRIFQHKTVPEILKHLLDEAHIKYDNRLYQPELHQPRHYVTQKRESAYDFWCRLAFEEGINFWFEEGPKLFYSDNHLGMTAGITLTYNPQSETDITDSTATKWRYIERLCSDVRIDKDYNQIRPSYPLSQQTTGKNHQQHPIFESYGRFQEDAQGQPFNQLRYEQSQNHRQTGYAQTNCFALMPGKIFTLTNHPCTRMNECWQVVSVTHHGVQPLGDNSEGQGTQLSNHVTFIPSMQEWRPPFHYKPLADGDELATVVGPDGEEIYTNEQGAVKVYFHWDRRGTPDHSGSCWLRVAQGWSGNGFGFIAIPRVGQEVIVSYLNGDIDRPIITGCTYNGRNTPPLDLPKEKTKTTFRSKTHKGTGFNELRFEDAGGREEVYLHAQNDLNIHVQHDSHWHTEHDVRQRIDNQRVTEIAGDEHFILKGTQKSLIEGNVSLQIKGAKHCKVNDALIAESGKKTHFKSGGKIILEAVSEITLKVGSSFIRLTPNAIFTSGNLDIGSSGPGIGQDPNIQLPDGVTPFEQPLFAIKKYCVLTANEAGSLLIKPAKDEN

SEQ ID NO: 68479 - protein, 165 aa, Proteus mirabilis
MANGSVNKVILIGNLGRDPEIRYLLSGGAVANLAVATSEKWRDKQTGENREKTEWHRVVLFGKLADIASGYLCKGSQVYIEGQLQTREWDDNGVKRYTTEIAVKVGGSMQMLGGASKSVGSQPAQQNQPPAQPQAKSNQPPMDFDDDIPFAPIGLMHPRHLINVL

SEQ ID NO: 68480 - protein, 472 aa, Proteus mirabilis
MSKIKTRFAPSPTGYLHVGGARTALYSWLFSRHNKGEFVLRIEDTDLERSTQPAIDAIMDGMNWLNLNWDEGPYYQTKRFDRYNQVIDQMLAAGTAYRCYCSKERLEKLREDQMAKGEKPRYDGCCRHGDHNHTPDEPHVVRFLNPQEGSVIFDDKIRGPIEFSNQELDDLIIRRTDGSPTYNFCVVIDDWDMEITHVIRGEDHINNTPRQINILKALGAPVPEYAHVSMILGDDGKKLSKRYNAVSVMQYRDDGYLPEALLNYLVRLGWSHGDQEIFSIDEMIKDFTLEAISKSASAFNTDKLLWLNHHYINTLPAEQVAVHLDWHIKQQNIDTSNGPSLVELIKLLGERCKTLKEMAESCHYFYVDFDSFEETAAKKHLRPVARQPLEVVRDKLSAITDWTAENVHKAIQETAEELEVGMGKVGMPLRVAVTGAGQSPALDVTVHAIGKARSIARINKALDFITDRENQA

SEQ ID NO: 68481 - protein, 97 aa, Proteus mirabilis
VSKEKFERSKPHVNVGTIGHVDHGKTTLTAAITTVLAKTYGGAARAFDQIDNAPEEKARGITISTSHVEYDTPTRQYAHVDCPGHADYVKNMITGAA

SEQ ID NO: 68482 - protein, 185 aa, Proteus mirabilis
MKFNKIALTVLLATSAISLNAMADNSNTGVIKFSGTVVNTPCNIDQESLEQDVKFGQLSRKSLESGQAAEKEFSIKFTNCNFDEFSKDASGNPVPVKTMNMVFTGQNYADAGKTLLATSTGNTNNLGIAIDGFEFGKPTDVLSRIVNKIGDNTLTFKALAKVVDPSKDVVEGTFSAISNFRITYE

SEQ ID NO: 68483 - protein, 213 aa, Proteus mirabilis
MKKLSALILAAATLAPSISFAHQAGDFLFRAGTATVRPNTGSDTILGGHFDANNNTQLGLTFGYMVTDNIGVELLAATPFEHKVSLTGVGEIAKVKHLPPTLMAQYYFGGAEDKLRPYLGAGLNFTTFFDEKFNNNPAVGQLGLNDLDLKNSWGFAAQAGLDYNLDKNWMLNASVWWMNIETDVKFKDGDGNHYKVDTRLDPFVFMFGVGYRF

SEQ ID NO: 68484 - protein, 217 aa, Proteus mirabilis
MKNGWLKQLLDFAPLLVFFIFYKWQDIFYASGALIVATWISVGLTWLIFHKVEKAPLITAIVVTIFGTLTIAFHSDVFIKWKVTAIYAIFALVLIAMQLFTPKTLMERMLGKELAMPATNWKKLNIAWVLFFLACALGNLYVAFSLSQETWVNFKVFGLTILTLIFTVISVVYIWNNRLPEEETKEESTESHTSETSDNGTTSTSKVLHKDVTSKSE

SEQ ID NO: 68485 - protein, 143 aa, Proteus mirabilis
MTEQQSLPNGELVLRTLAMPADTNANGDIFGGWIMSQMDIGGAILAKEIALGRVVTVSVTGITFLKPVAVGDVVCCYARCLKTGNSSITVNIEVWVKKVATEPVGQRYRATEAVFTYVAVDENNSARRLPEGKTNFTLASTME

SEQ ID NO: 68486 - protein, 246 aa, Proteus mirabilis
MKKILFAALLTSITLSATAADKETIRFATEATYPPFEMIDANNQIVGFDVDLANAMCEKINAECTFTNQSFDSLIPSLKFRRFDALMAGIDITPERQKQVDFTDSYYDNSAVFITVTGKISDVASLKGKQIGVQNGTTHQKFINEQHKEMKTVPYDSYQNAVLDLKNGRIEAIFGDTAVVNEWLKKNPELGIVGDGDKVTDPNYFGTGLAIAVRKGNADLQDKLNKALSEVKADGTYDVIYKKWFE

SEQ ID NO: 68487 - protein, 234 aa, Proteus mirabilis
MNEITTLAGATVTTVTLAISALIIGLVLAMLFTAWESAKWKAFAFLGTCWVTLIRGLPEMLVVLFVYYGTLQGVMMLMDGIELGPFTLQFDFGDTESLPFYCGVIALSLLYASYASQTLRGALKAVPTGQWEAGQALGMGKITIFFRFIMPQMWRHALPGLGNQWLVLLKDTALVSLISVNDLMLQTQSIANRTQEPFTWYSIVALIYLAITLVSQYILKWLEMRTTRFERSAS

SEQ ID NO: 68488 - protein, 529 aa, Proteus mirabilis
MSNPIFQQEVARRRTFAIISHPDAGKTTITEKVLLFGQAIQRAGTVKGRGSNQHAKSDWMEMEKQRGISITTSVMQFPYADCLVNLLDTPGHEDFSEDTYRTLTAVDCCLMVIDSSKGVEDRTRKLMEVTRLRDTPILTFMNKLDRDIRDPMELMDEVETELKIACSPVTWPIGCGKLFKGVYHILRDETYLYQTGQGHTIQNSRVIKGLDNPELDEAIGDDLAVQLRDELELVLGASHEFDHEAFLAGELTPVFFGTALGNFGVNHMLDGLVKWAPAPMPRQTDMREVTAAEETFTGFVFKIQANMDPKHRDRVAFLRVVSGMYDKGMKLHQVRTKKDVVISDALTFMAGDRSHVEHAYPGDIIGLHNHGTIQIGDTFTQGEMLKFTGIPNFAPELFRRIRLRDPLKQKQLLKGLVQLSEEGAVQVFRPLANNDLIVGAVGVLQFDVVVARLKGEYNVEAIYESVNVSTARWVECSNEKKLEEFKRKNEQHLALDGGDNLTYIAPTMVNLNLTRERYPDIEFHQTREH

SEQ ID NO: 68489 - protein, 239 aa, Proteus mirabilis
MKVNFYATCLGDVLKADSARDTVLLLEKLGCEVLFQERQGCCGQPALNSGYVNDAKPAMKSLIETLEVNDYPIISPAGSCTYAIKGYPSYLADEPQWAQRAQGVADRLIDLTSFIVNTLGVVDVGARLAGKAVYHPSCSLTRKLGVVSEPLTLLKHVEGLEMLPFANSETCCGFGGTFSVKMSEISGEMVTEKVKHIMEVSPDYVIGADTSCLINIQGRLSREKRPVKVLHIAQVLMSQ

SEQ ID NO: 68490 - protein, 632 aa, Proteus mirabilis
MAKEKKGFFSWLGFGRNKEENTAQEKEQQRLEAERAEQARLAEEEAQRQAQLEAEQARQEAQRAEAERLAAERAEQARLAEEEAQRQAQLEAEQARQEAQRAEAEKLAAERAEQARLAEEEAQRQAQQEAEQARQEAQRAEAERLAAERAEQARLAEEEAQRQAQQEAEQARQEAQRAEAERLAAERAEQARLAEEEAQRQAQLEAEQARQEAQRAEAEKLAAERAEQARLAEEEAQRQAQLEAEQARQEAQRAEAERLAAERAEQTRLAEEEAQRQAQLEAEQARQEAEAEEKARIAQAQAEAEDIVALREEVLVDKPVEQERPKKEGFFSRLKKGLLKTRQNLGSGFMGLFRGKKIDDELFEELEEQLLIADVGMDTTSKIINSLTQHASRKDLKDAESLYGKLREEMGDILNKVDKPLNIEGKKPFVILMVGVNGVGKTTTIGKLARQYQAEGKSVMLAAGDTFRAAAVEQLQVWGERNHIPVIAQHTGADPASVIFDAIQSAQAKGVDVLIADTAGRLQNKSHLMEELKKIVRVMKKLDEEAPHEVMLTLDASTGQNAVSQAKLFNETVGLTGLTLTKLDGTAKGGVIFSIADQFGIPIRYIGVGEGIEDLRPFKADDFIEALFAREE

SEQ ID NO: 68491 - protein, 102 aa, Proteus mirabilis
MYAVFQSGGKQHRVSEGQTIRLEKLEVATGETIEFDTVMMVADGDNIQIGAPILEGVKVKAEVVAHGRGEKVKIVKFRRRKHSRKQQGHRQWFTDVKITGIA

SEQ ID NO: 68492 - protein, 85 aa, Proteus mirabilis
MAHKKAGGSTRNGRDSEAKRLGVKRFGGEAVLAGSIIVRQRGTKFHAGTNVGCGRDHTLFALADGKVKFEVKGPNNRKFISIEAE

SEQ ID NO: 68493 - protein, 389 aa, Proteus mirabilis
MKFVDEAKILIVAGDGGNGCVSFRREKYIPKGGPDGGDGGDGGDVYMVADENLNTLIDYRFTKSYRAERGENGQSRDCTGKRGQDITINVPVGTRARDLATGEIIADLTVHGQKQMVAKGGFHGLGNTRFKSSVNRAPRQRTMGTPGESREVLLELMLLADVGMLGMPNAGKSTFIRAVSAAKPKVADYPFTTLVPSLGVVRMDSHQSFVVADIPGLIEGAADGAGLGIQFLKHLERCRVLLHLIDIDPIDGSDPVENAKIIISELEKYSDKLAQKPRWLVFNKVDLLDADEAKQKAQAIVEALGWEGDYYMIAAINQEGVKKLCWDIMEFLKVTPREQDIATALAAEEKVDFMWDDYHKEQLENPDLEDDDEDWDEEDDDGVEFIYQR

SEQ ID NO: 68494 - protein, 480 aa, Proteus mirabilis
MRLLPIFRGIFYTLSLLSFSTLAIPVEKYIELLPDGTQVGLITQTVGASSPNLTYNDNQLSLPASTQKVVTALAALLQLGGDYQFTTTMETEGKIKNNQLEGDLIFRFSGDPTLTRQQLRAMVAVLKQSGVTKITGNLLIDTSAFSSHDKAPGWVWNDMTQCFSAPPSAAIVDKNCFSVLLQSGQKEGDIATIRKASFYPVTVLSEVETYEKGSTRTRFCELDVTVRDLNTYVITGCIPKREEAMPLMFSIQDGAHWAGILLKEELQRADIELDGYVKRRSQPKAPVTVLAQTQSKPLHTLLTTMLKESDNMIADAVFRTIGREYYGVAGTWRSGADATRAILKQKAGIDLANTIMVDGSGLSRHNLIAPATMMQVLQYVGQHDSELNFISMLPLAGHDGTLQYRGGFTEAGVNGKVSAKTGSLKGVYNLAGFMTTANGQKVAFVQFISAYSPPTQNRNAGRAYLVRFETNLYKDIYNNK

SEQ ID NO: 68495 - protein, 153 aa, Proteus mirabilis
MTINNSNNLTGNEPANDETYMRRAIELAALGRFTTSPNPNVGCVIVKEGKIIGEGYHHHAGGPHAEVNALNMAGENAKGATVYVTLEPCSHFGKTPPCADALINAGVKRVVAAMQDPNPQVAGRGLHKLVAAGIDVSHGVLMQEAEKLNIGFF

SEQ ID NO: 68496 - protein, 380 aa, Proteus mirabilis
MKYELDKTDGHARRGRLKFERGVVETPAFMPVGTYGTVKGMTPEEVAATGAQILLGNTFHLWLRPGQEIMKLHGDLHDFMQWKGPILTDSGGFQVFSLGAMRKIKEEGVHFRNPINGEKIFLSPEKSMEIQYDLGSDIVMIFDECTPYPSDWDYAKNSMEMSLRWAKRSRQRFDELNNKNALFGIIQGGVYEDLRDISVKGLVEIGFDGYAVGGLAVGEPKEDMHRILEHVCPQIPADKPRYLMGVGKPEDLVEGVRRGIDMFDCVMPTRNARNGHLFVTNGVIKIRNAKHRSDTSTLDEHCDCYTCKNYSRAYLHHLDRCNEILGARLNTIHNLRYYQRLMAEIRQAIDESRFEDFVHEFYERIGKPVPPLNSSASKCD

SEQ ID NO: 68497 - protein, 342 aa, Proteus mirabilis
MTTSVEKKAQKPIVFSGAQPSGELTIGNYMGALRQWVQMQDDYDCIYCIVDQHAITVRQDPTELRKRTLDTLALYLACGIDPEKSTIFVQSHVPQHAQLGWALNCYTYFGELSRMTQFKDKSARHAENINAGLFDYPVLMAADILLYQTNQVPVGIDQKQHLELSRDIAQRFNAIYGDIFTVPDPFIPKGGARVMALQDPAKKMSKSDDNRNNVIALLEDPKAAAKKIKRAVTDSEEPPRVAYDLENKAGVSNLLDILAGVTGKTIPELEAEFEGKMYGHLKGAVAEAVSDMLTNIQERFNTFRNDEALLNKIMKEGADKAKTRAQTTLDKVYEAIGFIAHP

SEQ ID NO: 68498 - protein, 117 aa, Proteus mirabilis
MSNIIKQIEQEQMKQDVPSFRPGDNVEVKVWVVEGSKKRLQAFEGVVIAIRNRGLHSAFTVRKISNGEGVERVFQTHSPVVDSITVKRRGAVRKAKLYYLRERSGKAARIKERLNAK

SEQ ID NO: 68499 - protein, 250 aa, Proteus mirabilis
MWIGVISLFPEMFRAITEYGVTGRAVKHGLLNVECWDPRDFTYDRHHTVDDRPYGGGPGMLMMVQPLREAIHQAKAAAGDGAKVIYLSPQGRKLDQQGVCELATNEKLILVCGRYEGIDERVIQTEIDEEWSVGDYVLSGGELPAMIMIDAVARFVPGVLGHAASAKEDSFAEGLLDHPHYTRPEVLDGMAVPAVLLSGNHAHINRWRMKQSLGRTWLRRPELLESLALTDEQRVLLAEFQQEHLQRTAE

SEQ ID NO: 68500 - protein, 96 aa, Proteus mirabilis
FRAFYMTPDAIPRWGLVVLLTNEDVMVTIRLARGGAKKRPFYQVVVTDSRNARDGRFIERVGFYNPLATGNAEELRLDVDRVEHWVAQGATVSERV

SEQ ID NO: 68501 - protein, 468 aa, Proteus mirabilis
MEKSKKIKWAMPDAFIIIFGIVILAAIATYLIPAGSYQRETVNGLNRVVPNSFNYVAQNPASLMDVFYAIPVGLKQSASIIFLIFMIGGAIAIYDRTRAIDSGINALIVKTKGNYQALIITVAFIFGMLSSLGLAANAVIAFIPIGIALSRSMKLDAITGVAVVYLGYYAGNAVGVLDPTILGTAQTLAEVPLFSGVIFRVVLFAILIVVTIAYIVWYARRIANDPTTSYMYGIAKDDPDYEQPHTQSLDSTFSLRQKLSLVVFIAFIGLFLYGAFEYKWGIEHLSAIFIMMSIVVAAMFKIAPNDYIKTFMKGAQSLVYGALVVGIARAVIVILDEGRVLDSIVQATLVPLQQTSHFWGAQLLYFFNLLFNLLVTSGTGQASIVMPIMVPILDILDLTRQTGVLILKLGDGFTNIITPTSGVLMAVLAVGKVPWTRWVKFVFPILMIWVVIGMAAIGIATAISYGPV

SEQ ID NO: 68502 - protein, 292 aa, Proteus mirabilis
LNDFNSWSGIHLALYLSNYVPYYVSETMPVISISIVAVCAYLLSLVFILPSLLRKEQNGYRGLALLFAVIALVTHAISLKFLIFRPHSGQNLSLTNLGAVVSLMVCVIMTIVASRGRAWFLLPIVYCFSIVNLIIAALMPGEFVTHLESSTSLFIHIGLALLSYATLLIAALYALQLSWLDYQLKNKKLKFSPQMPPLMSIERKMFHITQVGVVLLTLTLCTGLLYMDNIFGKENIHKSIFSIIAWFVYIILLWGHFREGWRGKKVVIFNLIGAIILTLAFFGNRLLQELML

SEQ ID NO: 68503 - protein, 453 aa, Proteus mirabilis
MFENLSDRLSRTLRNISGRGRLTEENIKDTLREVRMALLEADVALPVVREFIARVKESAVGHEVNKSLTPGQEFVKIVQNELVNAMGEVNNDLDLSAQPPAVVLMAGLQGAGKTTSVAKLGKFLKEKKKKKVLVVSADVYRPAAIKQLETLAETVGVDFFPSTVQENPVTIASNALKHAQLQFYDVLLVDTAGRLHVDEGMMEEIQLLHKAINPVETLFVVDAMTGQDAANTAKAFNEALPLTGVVLTKVDGDARGGAALSIRHITGKPIKFLGVGEKTEALEPFHPDRIASRILGMGDVLSLIEDIESKVDRAQAEKLATKLKKGDGFDLNDFLDQLKQMKNMGGMASMLSKMPGMSQVPDAVKSQMDDSILVKMEAIISSMTKKERQKPEIIKGSRKRRIAMGSGTQVQDVNRLLKQFDDMQRMMKKMKKGGLAKMMRGMKGMMPPGFPGR

SEQ ID NO: 68504 - protein, 405 aa, Proteus mirabilis
MINQRINRATYDQVMLPIYSPADFIPVKGQGSRVWDQQGKSYIDFAGGIAVLALGHAHPLLNKALQEQSEKLWHVSNVFTNEPALCLAQKLIQHTFAERVFFANSGAEANEAALKLARHYAITRHNPYKTKIIAFHHAFHGRTFFTVSVGGQPKYADGFGPKPADIIHVPFNSLDAVKAVIDSHTCAVILEPIQGEGGVTPATAEFMHGLRTLCDKHQALLILDEVQTGMGRTGKLFAYMHYDIQPDIITSAKALGSGFPLSAMLTTEDIASVMGVGTHGTTYGGNPLACAVGNAAFDLINTQAVLEGVSERHRWIVDELQAINQTYAVFSQIRGQGLLIGAQLAPLYAGKAKELLALASKHGLMILNAGADVIRFTPSLIITLEELQEGMNALRKALDEFVKAE

SEQ ID NO: 68505 - protein, 1166 aa, Proteus mirabilis
MCWELTTTKSSHYTLMSSEYRYQLPVKQGDTRQLGQLTGAACALECAEIIKRHAGLVVLVTRDMQNALRLQDEIHQFCDYPVETLSDWETLPYDSFSPHQEIISNRLSTLYRIPSLLKGILILPVNTLMQKVCPTDYLASHALIMSKGEQLSRDNLRKTFDEAGYRHVEQVLEHGEYATRGALLDLFPMGSEFPYRIDFFDDEIDSLRTFDVDTQRTLTEVEQIKLLPAHEFPTDPNAIELFRSQWRERFEVRRDPEHIYQQVSKQVLPAGIEYWQPLFFSQPLSNLFAYFPQNTLIVTQDLQDCADKFWQDINQRYESRRVDPMRPLLPPDDIWLNVETLNQQLKQWPRIQLKTQALPEKAGYTNLGYQPLPDLSVNAQSKSPLDNLRRFQEQFSGSIVFSVESEGRRETVQELLSRIKIAPKQIIELADAKEKGCYFIIGSAEHGFIDNYRQLALICESDMLGERVHRRRQDNRRTINTDTLIRNLAELSPGQPVVHLQHGVGRYQGMTTLEAGGVKAEYLILSYAGDDKLYVPVSSLHLISRYSGGADENAPLHKLGGDAWTRARQKAAEKVRDVAAELLDVYAQRAVKSGFAFKLDKEQYHTFRQSFPFETTPDQEMAINAVLSDMCQAIAMDRLVCGDVGFGKTEVAMRAAFLAISNNKQVAILVPTTLLAQQHFENFRDRFANWPVNIEMISRFRSAKEQQQITEKLAEGTIDIVIGTHKLLQPGIQWKDLGLLIVDEEHRFGVRHKERIKAMRANVDILTLTATPIPRTLNMAMSGMRDLSIIATPPARRLSVKTFVREYDDLVVREAILRETLRGGQVYYLYNDVENIEKARDRLAQLVPEARIGIGHGQMRERELERVMNDFHHQRFNVLLCTTIIETGIDIPSANTIIIERADHFGLAQLHQLRGRVGRSHHQAYAYLLTPHPKAMTKDAHKRLEAIASLEDLGAGFALATHDLEIRGAGELLGEEQSGQMNTVGFSLYMELLESAVEALKEGREPSLEDLTNQQTEIELRMPVLLPDDYIPDVNVRLSFYKRIASAKDLNELNDLRAELIDRFGTLPDAGRNLLRNAAIRLSAMSLGISRIEAHDKGGFIEFGEKNNVDPTYLIGLLQEQPSVFRLDGPTKLKFMISLTDREKRLTFIDDMLTAFSEHKINALSV

SEQ ID NO: 68506 - protein, 213 aa, Proteus mirabilis
MAVAANKRSVMTLFSGPTDIFSHQVRIVLAEKGVSVEIEQVEAGNLPQDLIDLNPYQSVPTLVDRELTLYDSRIIMEYLDERFPHPPLMPVYPVARGSSRLMMHRIEQDWYSLMNVIEKGNDQQANAARKQLAEELLAVSPVFKEYPYFMSEEFSLVDCYLAPLLWRLPVLGVDLSGAGAKDVQIYMQRVFERDSFLASLTEAEREMRLPSRG

SEQ ID NO: 68507 - protein, 102 aa, Proteus mirabilis
FQVGEIAKKTGLTIRTLHHYEEIGLLQPTARTDAGYRLYDMKSIERLTQIQMLRQIGVKLKDIGHILNGHSAEIACLIEERISQLTTQMQQIAKLRYQLEHV

SEQ ID NO: 68508 - protein, 1125 aa, Proteus mirabilis
MFHIYHSNQLSLLKSLMVHFMQNRPLSSPFEQEVILVQSPGMSQWLQIQLAESLGIAANIRYPLPATFIWEMFTRVLSGIPKESAFSKDAMTWKLMALLPNYLDDPAFKPLRHYLKDDEDKRKLHQLAGRVADLFDQYLVYRPDWLSAWENDQLIDGLSDNQYWQKTLWLALQRYTEDLAQPKWHRANLYQQFISTLNDAPVGALAHCFPSRIFICGISALPQVYLQALQAIGRHTEIYLLFTNPCRYYWGDIQDPKFLARLNSRKPRHYQQLHELPWFKDEQNASTLFNEEGEQNVGNPLLASWGKLGKDNLYFLSELEYSDVLDAFVDIPRDNLLHQLQADILDLEDFSQIGQTLEDYQSSEKKRIIANDDRSLTFHASHSPQREVEVLQDQLLHLLEQDADLLPRDIIVMVADIDSYTPYIQAVFGNAPAERYIPFAISDRKARQVHPVLQAFITLLELPQSRFTAEQVLALLEVPALAAHFAIFENELKLLRRWVEESGIRWGLDDENVASFLLPVTGKNTWEFGLLRMLLGYAMDSEAGPWQGVLPYDESSGLVAELAGHLADFLYTLSEWRTRLSETRNLEEWLDIGQQLVDAFFDTDEETELVLALITQQWQKVIKNGLEAHYQHEIPLVLIRDELTVRFDDEKISQRFLAGSLNFCTLMPMRSIPFKAVCLLGMNDGVYPRNIQPLGFDLMAEKRRRGDRKRRDDDRYLFLEALSSAEKYLYISYIGKSIRDDRECNPSVLIKELQDYIGQNFRLREDASLNVDDSAQRIISHLLTQHSRVPFAPENFKTDALYRSYAAEWLPAASGKGTAHQAFSTPLNKKIEKVSLDELSRFYRHPVRAFFQQSLKTNFVIEETELPEEEPFVINALQRYLLNQWLLKALIEGTSTEALYERIKAAGKLPASAFGQIYWEQQIETLQPLAEKVRSERLATHSVTIEYQFNTIPLIGRLNEVQADGLLRWRPATLTANDLLQLWIEHLVYCLSGGTGESRFYGRKESQWCLSPVSADIAYSTLERLIQDYQTGMNTPLALFANSGWAWLQACFDKKTQTFLFDDEEIQNKAELVLTQYLTDSYNREGEMNDIYIQRVFHQLDAPFLEAVKQTTLAIFKPIIPFIKK

SEQ ID NO: 68509 - protein, 283 aa, Proteus mirabilis
MKQYLALCQRIIDEGEWIDNKRTGTRCLTVINADLEYDVANNQFPLITTRKSFYKAAIAELLGYLRGYDNAAQFRAIGCNTWNANANENSAWLNNPHRKGEDDMGRVYGVQGRQWQRPDGSHFDQLRKVVDNLTNGIDDRGEIVTFYNPGETALGCLRPCMHTHTFSLLGDRLYLTSYQRSCDVPLGLNFNQIQCFVLLALVAQITGHKPGKAFHKIVNAHIYENQLPLMRDVQLKREPLPLPKLHINPNIKTLDDIETWVTTDDFSVEGYQCHEAIKYPFTV

SEQ ID NO: 68510 - protein, 564 aa, Proteus mirabilis
MIRIFKAGLFAAAGALIINAGVDAFMISLLKPLLDEGFGKASNDVLKWMPLAVIGLIVLRGISNFISSYCLSWVSGKVVMNMRRRLFSHIMGMPVSFFDQQSTGTLLSRITYDSEQVASSSSGALITVVREGAYIIGLFGLMFYYSWQLSLILIVIAPIVAVVIRMVSTRFRTISKRIQNSMGQVTTSAEQMLKGHKEVLIFNGQEVENKRFNHVSNHIRRQGMRMVVASSISDPIIQLIASFALAFVLYAASFPEIMDTLTAGTITVVFSSMVALMRPLKSLTNVNAQFQRGMAACQTLFAILDMEQEKDTGTLELKKPTGDIEFRNVTFQYITKDTPALKNLSFTIPEGKTVALVGRSGSGKSTIANLLTRFYDVNEGEILINGHDIRDYTLRSLRNQVALVSQNVHLFNETVANNIVYACEDQYTREDIEKAAKMAHAMDFIQKLDNGLDTEIGENGVLLSGGQRQRIAIARALLRDAPILILDEATSALDTESERAIQAALDELQKNRTSLVIAHRLSTIEKADEILVIEDGEIVERGAHLDLIERKGVYAQLHRMQFGK

SEQ ID NO: 68511 - protein, 278 aa, Proteus mirabilis
MKTSFNHIERDNSDITHNHKNTHSSCNCTQEIITSLNHYINKHPECTIYQNSLMSSLIAGVYDSDVTIADLLKHGDFGLGTFNHLDGELVAFDSNVFQLRSDGSAREARPDQGSPFAVMTFFKPDITHQFSAPVSQQQVHNIINQYVPSDNLFCAIKIEGEFELVKTRTVPRQEPPYVPMLEAIENQPIFTFHDEMGIIAGFRSPQFTQGLNVAGFHEHYINHQREGGGHVLDYQLKKGTLQIGVISRFTIDLPHQSTFLEANLMPDDLHQAIEQAEN

SEQ ID NO: 68512 - protein, 559 aa, Proteus mirabilis
MNSHHWNCGADLVVKQLEQHGVKQVFGIPGAKIDRVFDSLVDSTIKTIVVRHEANAAFMAGAVGRLTGKAGVAIATSGPGCSNLATGIATATSEGDPLVALGGSVKSTDRLKLVHQSMDTVTMFNPITKFCAEVDSSQSISETLANAFRHAESGRPGSAFLTFPMDILNNEVDSPLLTPKSKPNLGAASDSAIQEAISLLLQAKNPVILIGLQASDPENALALQNFLDIFPVPIVGTYQSAGAIAHRHFPLFAGRIGLFNNQPGDELLAHADLVITLGYSPIEYEPSLWNSHNANIIHIDEIQAEIDLAYCPALELTGNIKLTLDKLTQQLTHQPNSKLQLSNQSQGILEKIRQQREILQQNSYFRQGTPIHPLTIIHEMQDIIDNDVTLCIDMGSFHIWLARYLYSFRARQMLISNGQQTMGVALPWGIGASFVRPCDKIISVSGDGGFMQSSMELETAVRLNTNILHIIWVDNAYNMVEMQEEVKYGRPSGVKFGPIDFKRYAESFGAKGFSVECASQLRETLRKAIAVDGPAVLAIPVDYRDNDKLMKHINYNLII

SEQ ID NO: 68513 - protein, 183 aa, Proteus mirabilis
MKLTKLAIATVFAASVVPFSSMADNTGTINFLGSVVNTPCNIEQSSLKQTVDFGQLSRKALESGKAAEADFDIKFTGCDFANFGKDTEGKPVAVKSMELVFTGQTYADKDNTLLATSTGNTNNLGILIDGFEFGKATDVLPRIANQTGDNTLTFKALAKAVDTTKDVAEGKFSAISNFRITYQ

SEQ ID NO: 68514 - protein, 337 aa, Proteus mirabilis
MSSLSPASEVILRHLDHFADRHVLIAGDLQDTLASQIQAKSVRAYTNQYHQWLPLLKSMGDNAFFGLAADQSFVKYCDTLIYFWPKNKNEATFQLRSLCASLSVDTEIFIVGENRSGVKSATELMNGIAKLKKIDSARRCSLFFGSLTYQTLFDRNNWWQTYRYDDLTVMALPGVFSQTALDEGSRLLLSTFDDAMVGDLLDMACGCGVIATVLGKKNPMLKLTLCDVNAAAISSSIATLNVNELEGRVIASNVYSAVEETYDWIVSNPPFHDGLGTSYQAAEDIIRLAPNFLKKGGKLRIVANAFLPYQDILDHVFGSHEVLASTGKFKVYQATKK

SEQ ID NO: 68515 - protein, 105 aa, Proteus mirabilis
MAEWNGEYISPYAEHGKKSEQVKKITVSIPLKVLKILTDERTRRQVNNLKHATNSELLCEAFLHAFTGQPLPNDEDLRKERNDEIPEEAKEIMRQRGVDPETWEY

SEQ ID NO: 68516 - protein, 273 aa, Proteus mirabilis
MSLEELTRVWDHIKSEARALADCEPMLASFFHATLLKHENLGSALSYMLANKLATQTMPAIAVREIVEEAYRHDSSMIESAACDLSAVRLRDPAVDKYSTPLLYLKGFHALQAYRIAHWLWQQNRQALAIYLQNQISVTFGVDIHPAARIGHGIMLDHATGIVIGETAVVENDVSILQSVTLGGTGKTGGDRHPKVREGVMIGAGAKILGNIEIGRGAKIGAGSVVLHEVPAHTTVAGVPARIVGRPDSEKPSFDMDQHFNGVVPGFECGDGI

SEQ ID NO: 68517 - protein, 337 aa, Proteus mirabilis
MNASMTVIGAGSYGTALAITLARNGHDVVLWGHDPKHVAALEQARCNQAFLPDVSFPDSLYMEASLQKAIEASRNILVVIPSHVFGEVLQQIKPFLRQDARVVWATKGLEAHTGRLLQDVAREVLGNEIPLAVLSGPTFAKELAAGLPTAIAVASTDNLFLEQLQQLFHCGKSFRVYKNPDFIGVQLGGAVKNVIAIGAGMSDGMGFGANARTALITRGLAEMSRLGKALGADAATFMGMAGLGDLVLTCTDNQSRNRRFGMMLGQGFGVDTAQEKIGQVVEGYRNTKEVRALAEQVGVEMPITEQIYQILYQHKDVKEAALALLGRATKDEIDSSL

SEQ ID NO: 68518 - protein, 420 aa, Proteus mirabilis
MDKFRVQGPTCLSGEVTISGAKNAALPILFAAILAEEPVELTNVPKLKDIDTTIKLLNRLGTKVERNGSVFVDARHINEFCAPYELVKTMRASIWALGPLVARFGRGQVSLPGGCAIGARPVDLHITGLEQLGAEITLDEGYVKARVDGRLKGAHIVMDKVSVGATITIMTAAVLAEGKTIIENAAREPEIEDTANFLNTLGAKISGAGTDSITIEGVERLGGGTYQILPDRIETGTFLVAAAVSRGRVVCRNAKPDTLDAVLAKLREAGADIETGEDWISLDMHGKRPKAVTLRTAPHPGFPTDMQAQFSLLNLVADGAGMITETIFENRFMHIPELIRMGAHAEIESNTVLCHGVDKLSGAQVMATDLRASASLVLAGCIAEGTTIVDRIYHIDRGYENIEAKLQGLGAKIERLHSND

SEQ ID NO: 68519 - protein, 192 aa, Proteus mirabilis
MKGKRVVIVHGYTASPKDNWFPWLKEELGSLGYDVSIPMMPEPNHPNPNEWQQKLADENIILDKDTILVGHSLGCITLLRFLSEQACEDITIGGYILVAGFNSEQKTLPELNSHIYNNLNYSKLIKISDKRVSLISSNDWIVSPDSSKKLASQLQTQIVIEEDAGHFLDKEGYIKLPVMLDIFKYMLNEHKL

SEQ ID NO: 68520 - protein, 238 aa, Proteus mirabilis
MNILIVDDEPLARENLRCLLEEEKDIHIIGECSNAIEAIGEIHRKKPDVVFLDIQMPRITGLEMVSMLDPEHRPYIVFLTAFEEYAIQAFEEHAFDYLLKPLEQERLAKTLSRLRQGNKQNIDLLSPPEERLKCIPCTGHSRIWLMPIDEAVFATSRLSGVYVTNNQGQEGFTELTLRTLETRTPLVRCHRQYLVNMDYVNEIVFGDNGQAELILHNNKQIPVSRRYLKPLKEAIGLI

SEQ ID NO: 68521 - protein, 567 aa, Proteus mirabilis
MYEFDLILLLLQQMCVYLIIAWFLSKTPLFTPLLQVTIKLPHKLMCYVIFSIFCIMGTYFGLHINDSIANTRAIGSVLGGLLGGPYVGFLVGFTGGLHRYSLGGMTALSCMVSTIAEGLIGGLVHRYYVKHGQMHRIFNPWTAATVTFFAEIIQMSIILLLARPFDEALSLVKNIAAPMIVANTIGAAMFIRILQDRRAIFEKYTSAFSAQALKIAVCTEGILRKGFNQDNSTRVAKVIYQELKVSAVAITDRDKLLAFIGIGADHHLPGTPISSEQSKQAINNNEVVYADGNETPYRCTLSPNCKLGSTLVIPLRGENNRVIGTIKLYEAKNRLFSSINRTLGEGIASLLSAQILAGQYERNKQSLLESEIKLLHAQVNPHFLFNALNTLQAVIRRDSDQAKQLVQFLSAFFRKNLKRPEAIVTLSDEIEHVTAYLQIEKARFQESLQIDIQIPEHLATARLPAFSLQPMVENAIKHGTSQLLGIGKITIRAHQEDHLIVIEISDNAGLYHSQGASHQLGLGMRLVDKRLKLRYGDLYGVLVECQPDNYTKIKICLPLEKNMDNAA

SEQ ID NO: 68522 - protein, 660 aa, Proteus mirabilis
MKAIVFAYHDIGCVGLKALEKAGFDIQAVFTHTDDPNENHFFSSVARVSAEMGLTVFAPENVNHPLWIERIREMKPDVIFSFYYRHMLSDEILNLAPKGAFNLHGSLLPKYRGRAPINWAIVNGETETGVTLHKMTAKADAGDIVAQEKVTIEDTDTSLILHEKVREAAAKLMAHTLPHIASGNYSTTAQDESQATYYGRRCADDGLIDWNADAKTVHNLVRAVTEPYPGAFTFLGERKMIIWRARPVADNQGKRPGTVISTEPLVIACAKGAIEVITGQSENGLYVQGSRLATEMGIVTDVRVGPKATAQVKRRQRVLILGVNGFIGNHLTERLLKDGNYDIYGMDIGSSAIERFIGNPRFHFIEGDVSIHTEWIEYHIKKCDVILPLVAIATPIEYTRNPLRVFELDFEENLKIVRYCVKYNKRIIFPSTSEVYGMCDDKEFDEDNSRLIVGPINKQRWIYSVSKQLLDRVIWAYGAKEGLKFTLFRPFNWMGPRLDNLNSARIGSSRAITQLILNLVEGSPIKLVDGGEQKRCFTDINDGIEALFRIIENRDNKCDGQIINIGNPTNEASIRELAEMLLDCFEKHELRGHFPPFAGFKKIESSSYYGKGYQDVEHRKPSIKNAERLLDWKPTIETRQTVEETLDFFLRGAVEELGNK

SEQ ID NO: 68523 - protein, 363 aa, Proteus mirabilis
MVINNKINETIGVSVTKPLYESYLQAKNEKKASYARDLATYLNVSEAELTHARVGHDAKRLHGDVRDILTALATVGKVKAITRNEIAVHEHLGEYTNARFNDHAGLILNPRALDLRFFFSHWASIFALTEETARGIRHSIQFFDLHGDSLHKVYTTDNTHMDAWNTLIDTYLSPENPVLEITPAKSFTDAPVTTALAQQLEQQWRSMTDVHQFFKILQENNLSRQQAFKAVSDDLAYQVDNSALKTLLALAKEVQNEIMIFVGNRGCVQIFTGKIDRLVPHQFENSEQVWINIFNPAFTLHLIESEIVESWITRKPTQDGFVTSLELFDSKGQQIAQLYGQRTEGTKEQQQWREQLNALAKIA

SEQ ID NO: 68524 - protein, 249 aa, Proteus mirabilis
MLAIIRGIIVILYTIIVVTFGMIYCMFSPRNPKHVMTYGRLFGKLSHVFGIKLVERFPKEAKSYGPSIYIGNHQNNFDMVTMSNAVQPNTVTVGKKSLVFIPFFGQLYWITGNILIDRGNRSKAHSTITQVAEQIKAKKISVWMFPEGTRSRGRGLLPFKTGAFHAAMQAGVPIVPVCVSTTQGKIKLNRWNNGYVIVEMLPPIDVSKYNKDQVRELAEDCRQIMKAKIEELDKEVEEMNKRDFAGKLN

SEQ ID NO: 68525 - protein, 70 aa, Proteus mirabilis
MSNTMTGTVKWFNDDKGFGFITPKDGSKDVFVHFSAIQSDSFKSLKEGQEVSFSIENGAKGPAAANVIGL

SEQ ID NO: 68526 - protein, 453 aa, Proteus mirabilis
MNRKNLFTRTALAAIVGTLSSYASAAGFQLNEYSTSALGRAFSGEGVIADDASVGSRNPAALTMFDRPEFSVGAIHINPSVDIKGKSPLSGASTNAGDIAPSALVPNIHFVAPINDKWAIGASGTTNFGLATDFKKDYPAGLIGGKTDLETMNLNLSAGYRVNKQFSVGLGLNALYADAEITRHVGEAGKLLGGTLSQHPDTNYQGLGRYLSSLSPSDRFAQLKGDAWGFGWNAGLLYEFDEDNRISFTYRSKVKVKFKDGDYQSDIRSLPALEGMGVIGTNGDTIKGKLDLNLPEIWEFAAYHRVAPKWAVHYNLAYTSWSEFKELRATRKSDGQQLFNKEEGFRDAWRIALGTTYYHDDNWTFRTGIAFDDSPVPADKRSISIPDQDRFWLSAGATYAFNKDMSVDVGLAYMHGKKVTIKEKLSESLPLPAYEFESSGKAWLYGMNFNYRF

SEQ ID NO: 68527 - protein, 225 aa, Proteus mirabilis
MKKIFAFIIFLFPLIAYSNGVSLGATRIIYNSNIKQTNLVVTNSDKENSFLIQSWVSDNQGNKNNDFIVTPPLYILDANKENALRIMYTGEPLPADRESLFWMNVKAIPSLDEKLANENTLQIAIQSRIKLFYRPSGLSAYTEKYANEVTFSYKNGELIAHNPTPYHITMVNLAAADSQLPSSIMINPFSQLTLGKVNQNANTISFQTINDYGAQTPVLKKEIVH

SEQ ID NO: 68528 - protein, 843 aa, Proteus mirabilis
MVNKNTNKDIVYFLFPSVIALSLTLSFSSYSANRFNPAFLADSPDAVTDLSYFEAGNRIKPGDYLLDIVFNHEYLRSENIHFISQDNHVIPCLNRDYYQSLGINIKLFADFEKFSANECIDIEKIIPDSVVNYDIEKQALNIQVPQAALDLKARGYIPPEKWDNGITAGILNYTFSGANSWGNSHNNSYYLNLRSGINIGAWRLRDYSTWNSSNGKNQWNHINTYLQRNIVSLRSQLQIGDSYTSSTLFDSVNFRGISLESDDTMLPDSQRGFAPVVRGIAKGNAKVVIRQNGYVIYQTFVSPGAFEIRDLYPTSNSGDLYVTIEENDGSKHSYVVPYSAVPILQREGQKQFVIQAGEIRQNNQHKKPRFIQGHLIYGLPYDTTVYGGALATKDYQSYALGAGKNMGTLGAFSTDITFAHSQLPNNSTSDGYSLRFLYAKSLNQFGTNFQLLGYRYSTSGFYTLDETLNTRMSGYLYEDNQKKPLSYFNLHNRKKGSLQINLSQQLGDYGSIFMMTNWQNYWGTNEKNVLVQTGYNGNIKGLSYNVIYSYNRMMNSGQRDQTLSVGLSIPLQLLMPTSYQSINSTYLTYNYSHNNNGYSTHNAGIAGTLLEDNTLNYSVQQGYSNQGGNYTGSAALGYQSRYGNLNASYNYHQDAQQINYSLAGGMLLHSGGLTLSQPLSANAILVDARNTADVPIDNATGVYTDWRGFAVIPYATAYRQNRVALDTTALPDNVEIEQNIKQVIPTQGAVIKVQFDAKKGYRLLLTLQHQGRPLPFGAIATDKQNHLSGIVGDDGLLYLSGVPDSGKLEIRWGHNASQYCQVNYQLPASQLDEPFVKMTQECQ

SEQ ID NO: 68529 - protein, 433 aa, Proteus mirabilis
MSKIVKVLGREIIDSRGNPTVEAEVHLEGGFVGMAAAPSGASTGSREALELRDGDKSRFLGKGVLKAVEAVNGPIAKALLGQDAKDQANIDKIMIDLDGTENKSNFGANAILAVSLANAKAAAAAKGMPLYEHISDLNGTHGQYSMPLPMMNIINGGEHADNNVDIQEFMIQPVGAPTLKEAVRMGSEIFHHLAKVLKAKGMNTAVGDEGGYAPNLESNAAALAAIKEAVEAAGYVLGKDVTLAMDCAASEFYNNETGNYELKGEGKTFTSQEFTHYLEELTKQYPIVSIEDGLNESDWDGFAYQTKVLGDKIQLVGDDLFVTNTKILKEGIDKGIANSILIKFNQIGSLTETLAAIKMAKDAGYTAIISHRSGETEDATIADLAVGTAAGQIKTGSMSRSDRVAKYNQLIRIEEALGSKAPFNGLKEVKGQA

SEQ ID NO: 68530 - protein, 265 aa, Proteus mirabilis
MSENREILRLLAIMAQLRDPQTGCEWDRVQTFDTIAPYTLEETYEVLDAIARKDFSALKEELGDLLYQVVFYARMAQEQQLFDFNDVCEAISNKLERRHPHIFATENENNLATEKHRWEKIKAQEREAKAQYSLLDDIPATLPALMKAEKIQKRCASVGFDWHELSPVLDKVYEEIDEVMAEVKKAPRDDQRIEDELGDLLFSVVNLSRHLKQKPEQALNRACRKFEQRFRFVEKMLTEQGINIENASLEEMEIGWQKAKEKEIE

SEQ ID NO: 68531 - protein, 154 aa, Proteus mirabilis
MNYHQYYPVDVVNGPGTRCTLFVAGCVHQCRGCYNKSTWSLTSGKPFTQEVEDQIIADLQDTRIKRQGLSLSGGDPLHPQNLSAILKLVKRVKTQCPEKDIWVWTGYLLADLTPEQQEVVSYINVLIDGKFVQELYDPALLWRGSSNQVIHKLK

SEQ ID NO: 68532 - protein, 81 aa, Proteus mirabilis
MRVEILFNKQSNVTDSLFPLLEHELRKKIIPIYPDMQFRIAFSSMNTIQVTGVKDEAKHEHIMELIQSVWEDDSWLQTNDD

SEQ ID NO: 68533 - protein, 159 aa, Proteus mirabilis
MNKVILSLVAAMSLSACAQAVDSLEKVAPYPKAKENQIRHVIELEQKENEGNYQVELIVGKEMMVDCNRQWFGAELDKKDLEGWGYDYYIVSDLNGPMSTMMGCLDNTKKPAFVQANMGQAAFIRYNSKLPIVVYAPKDVDVKYRVWSTSDEVKDSTKK

SEQ ID NO: 68534 - protein, 145 aa, Proteus mirabilis
MYKKILVPIDILEDELSQELITHIEQIAQVGKPEIHFLTVIPNAELFFGIEFAAIPEKFKDSSERTRLAFIALQDMIKDAKIPDEQIVCNVGVGNAKDEILEYARQIDADLIAIASHRPNVSSYLLGSTASSIVRHAKMSVLVIR

SEQ ID NO: 68535 - protein, 360 aa, Proteus mirabilis
MKPSIVAKLEALQERYEEIQALLAEADVIASQERFRALSKEYAQLTDVTSCYRQWRKVQDDMEAAEMMLDDPEMKEMAQEELKEAQSVNEELEQQLQVLLLPKDPDDEFNCFLEIRAGTGGDEAALFAGDLFRMYSRYAEARRWRIEVMNANEGEHGGYKEIIAKVIGDGAYGVLKFESGGHRVQRVPETESQGRIHTSACTVAVLPEVPEAELPEISPSDLRIDTFRSSGAGGQHVNTTDSAIRITHIPTGIVVECQDERSQHKNKAKAMSVLGARIRAAEVQKRQEAEASERRNLLGSGDRSDRIRTYNFPQGRVTDHRINLTLYRLDEVMEGKLDALIQPIVTEYQADQLSALSEQD

SEQ ID NO: 68536 - protein, 284 aa, Proteus mirabilis
MQHKVVSIGDIKVANNLPFVLFGGMNVLESRDLAMRICEHYVTVTQKLDIPYVFKASFDKANRSSIHSYRGPGLDEGMKIFQELKETFGVKIITDVHEPSQAQPVSEVVDVIQLPAFLARQTDLVEAMAKTGAVINVKKPQFVSPGQMGNIVEKFKEGGNDQVILCDRGSNFGYDNLVVDMLGFHVMMQASEGAPVIFDVTHSLQCRDPFGAASGGRRGQVAELARAGMAVGLAGLFLEAHPDPDHARCDGPSALPLAKLEPFLAQIKAIDSLVKSFPELDTSK

SEQ ID NO: 68537 - protein, 331 aa, Proteus mirabilis
MTIKVGINGCGRIGRIVVRAAQERSDIEIVGINDLLDAEYMAYMLKYDSTHGRFNGTVEVKDGHLVVNGKTIRVTSERDPANLKWNEIGVDVVAEATGLFLTDETARKHIQAGAKKVVLTGPSKDSTPMFVMGVNHKSYAGQDIVSNASCTTNCLAPLAKVINDKFGIVEGLMTTVHATTATQRTVDGPSMKDWRGGRGASQNIIPSSTGAAKAVGKVIPELNGKLTGMSFRVPTPNVSVVDLTARLEKPATYAQICEAIKEAAEGELKGVLGYTEDAVVSTDFNGEVLTSVFDAKAGIALNDNFVKLVSWYDNEVGYSNKVLDLISHISK

SEQ ID NO: 68538 - protein, 482 aa, Proteus mirabilis
MKITDNPYFREQGYIDGIWCDAKSKDTVEVIDPATNQPIGTVPNMATEEAKAAVDAAAKALPTWRALTAHQRSTLLQRWFQLIQDNKRQLAELMTFEQGKPVAEAEGEITYAASFIEWFAEQGKRTNGEIIPSPSSDKRLMVIKQGIGVCAAITPWNFPAAMITRKAAPALAAGCTMVIKPANETPYTALALAELAAQAGIPAGVINIVTGDAVKIGEVFTSDNRVRKLSFTGSTGVGRLLMRQCADSVKKVSLELGGNAPFIVFNDADIEKAVAGAMGAKFRNAGQTCVCANRFYIHKDVYQQFSERFVAEVKKLKVGNGFTEGVTIGPLINHKAVEKSQSLLADTLQRGATLLCGGEKDKAGENFFQPTVVGNVPADSHILEEEIFGPVAPLVIFDNEEEVVHLANNTIYGLAAYFYSEDPQRIWRVAENLEYGMVGINTGLISNEVAPFGGIKQSGLGREGSEHGIEDYMEMKYLCQGL

SEQ ID NO: 68539 - protein, 402 aa, Proteus mirabilis
MKRLQAFKFQLRPNGQQEREMRRFAGACRFVFNRALARQNENHEAGNKYIPYTKMASWLIEWKSDTETQWLKEAPSQPLQQSLKDLERAYKNFFQKRTAFPRFKKHGKNDAFRYPQGVKLDQSNSRISLPKLGWMRYRNSREVVGEVRNVTVSQSCGKWYVSIQTEYEATEPPHESTSIVGLDAGVTKLATLSDGTVYPPVSSFKVNQRKLARLQRKLSRKIKFSANWQKQKRKIQRLHSHIANIRKDYLHKVTSEISKNHAMIVIEDLKVSNMSKSAKGTTERPGRNVKAKSGLNRSILEQGWYEMRRQLEYKQLWRGGQVLAIPPAYTSQKCACCGHTAKENRQSQSQFECLECGYTANADINGARNILAAGHAVLACGGRVQSDRPSKQEPAEVIQTSV

SEQ ID NO: 68540 - protein, 329 aa, Proteus mirabilis
MAAKDVKFGIDARNKMLRGVNVLADAVKVTLGPKGRNVVLDKSFGAPVITKDGVSVAREIELEDKFENMGAQMVKEVASKANDAAGDGTTTATVLAQAIIAEGLKAVAAGMNPMDLKRGIDKAVVGAVEELKKLSVPCSDTKAIAQVGTISANSDETVGTLIAQAMEKVGKEGVITVEEGTGLEDELDVVEGMQFDRGYLSPYFINKPETGTAELENPFILLVDKKVSNIRELLPVLEGVAKANKPLLIIAEDVEGEALATLVVNNMRGIVKVAAVKAPGFGDRRKAMLQDIAILTNGTVISEEIGMELEKATLEDLGQAKRVVINKDT

SEQ ID NO: 68541 - protein, 296 aa, Proteus mirabilis
MKLKKIATLLSVVALSATISANALAKESIALVISTLNNPFFVTMKDSAQKEADKLGYDLVVLDSMDNPAKELANVQDLTVKGTRLMLINPTDSDAVGNAVLMANKAKIPVVTLDRVANKGEVVSHVASDNRLGGKMAGDYIAEKVGNDAKVIQLEGIAGTSASRERGEGFKQAVDAHKLNILASQPADFDRTKGLNVMQNLLTANPSVQAVFAQNDEMALGALRALQTAGRTDVLVVGFDGTNDGIKAVNRGVLGATIAQRPDQIGIIGIQTADKILKGEKVDPTIPVELELVTQK

SEQ ID NO: 68542 - protein, 321 aa, Proteus mirabilis
MSTKSIPASKRWFSKAWLLEQKSLIALLLLIVVVSTLSPNFFTLNNIFNILQQTSVNAIMAVGMTLVILTSGIDLSVGSLLALTGAVAASMVGADVNALVAVVGALALGAAIGGVTGVIIAKGKVQAFIATLVMMLLLRGVTRVYTDGSPINTGFSDNADLFSWFGIGRPFGIPTPIWLMMIVFLSAWYVLHHTRLGRYIYALGGNEAATRLSGISVDKIKIIVYALCGLLAALASVIEVARLSSAQPMAGNGYELDAIAAVVLGGTSLAGGKGRIMGTLIGALILGFLNNALNLLGISSNYQMIVKAVVILLAVLVDNKK

SEQ ID NO: 68543 - protein, 187 aa, Proteus mirabilis
MSLINTPIKPFKNMAFKDGQFVEVTEKDVEGKWSIFFFYPADFTFVCPTELGDLADHYEEFQKMGVEIYSVSTDTHFTHKAWHSSSETIGKIKYGMIGDPTGALTRNFENMREAEGLADRGTFVVDPQGIIQAIEITAEGIGRDAADLLRKVKAAQYVASHPGEVCPAKWKEGDATLAPSLDLVGKI

SEQ ID NO: 68544 - protein, 336 aa, Proteus mirabilis
MGEGWNIALVGATGAVGEAILELLQERDFPIGELTAIASEDSIGKTIRVKGKSVAVQGIHNIEWADIQLAFFAAPVEISAQYAQLAADSGCIVIDCSGLFAMEWDVPLVVPGVNTSMLAEYRNRNIIAIADSMVSQLLRAIYPLTEAAGLTRLNVTNLMSVSRFGKQAVDELAGQSARLLNGVPPELGRFNKQLAFNILPLLVDNEGSIQEERQMVDQIRKILQDDGLPISVTTLQAPVFYGHAQSVQLETSRPMGSEEARETLQEHDSLNISDENDFPTQVTDASGNVSLNLGCLRNDYGVPEALQFWSVADNVRFGGALMAVEVAEKLVQEQFY

SEQ ID NO: 68545 - protein, 375 aa, Proteus mirabilis
MKILVDENMPYAQQLFCQLGEVKAVPGRPLPIEELDDTDALMVRSITKVNASLLAGKPVKFVGTATAGFDHVDTAWLEQQKIAFSSAPGCNAIAVVEYVFSALMVFAEQEGFQLTDKTVGIVGVGNVGGRLAKRLRALGVNVLLCDPPRADRGDDEQFHSLETLLKQADILTFHTPLNKSGRYNSYHLINESNLDILPEGRILINASRGEVIDNAALLSALNQGKKLRVVLDVWEPEPDLSLELLNKVDIATPHIAGYTLEGKARGTTQVYEAYCDFIGQPQHVELSTLLPKPLISTISVQGELTQTLLKQLIHLVYDVRRDDAPLRKVAGIKGEFDKLRKFYPVRREWSSLQVVCDNPTTASLLNAIGFNATHK

SEQ ID NO: 68546 - protein, 306 aa, Proteus mirabilis
MKSIIFPLLAVLIWSINAVVNKAATSVIDPAAISFYRWFLAFLLMTPFLLVPVWHHRKTVKQYWWKLFILGALGMGLYQSLAYYAAYYVTATFMGILNSLIPLLTVIISIFVLRVVPTVGIALGTILSISGLVWLVSHGDPSQLLSQGLGRGELMMFIASTAYAFYGVLTKRWSIPLPNWQSLYVQIGFGVLLLIPNFLTAESIALTKDNVGLVIFAGVGASILAPYLWILGVMKLGANTTSIFMNLIPLFTAMIAVAVLGEEMHSYHFIGGGVILLGIFLVQKLRAPLNFRRQSVTKKADCQQEM

SEQ ID NO: 68547 - protein, 378 aa, Proteus mirabilis
MQYVDEFRDPELAKALLAQIRETISQWPHPITRPLQIMEVCGGHTHAIFKFGLDRLLPQEIEFVHGPGCPVCVLPMGRIDACLEIAARPEVIFCTFGDAMRVPGRHGSMLDARRRGSDIRIVYSPLDSLKIAQDNPDKQVVFFGLGFETTMPSTAMTLQQAKLRGLKNFSLFCQHITIVPTLRCLLEQEDVRIDGFIAPGHVSMVIGCTPYQPLCDEFEKPFVVTGFEPLDLLQAILMVVKQLKAKAENADYVLSIENQYSRIVPNEGNKLAQKALKDVFMLKESSEWRGLGEIPMSGIQLTPAYAEFDAERRFTPAPQQVADNPQSRCGDVLTGRCKPSDCPLFGKSCTPETALGALMVSSEGACAAYYQYRREGNI

SEQ ID NO: 68548 - protein, 375 aa, Proteus mirabilis
MLMPLAIDMYLPSLPTIARDFGVPGGQVQMTLSSYIFGFAIGQMVYGPMADSLGRKPVILGGVIVFALASSACALSDSIDMLIGMRFLHGFAAAAASVVINALMRDMFSRDEFSRSMSFVALVMTIAPLLAPLLGAWVMNWFSWHAIFWSIAIAAIIAAALIALYIPETLPKQHRQRFSLRVTFSQFISLFRARRVLCYILASGFSFAGMFSFLSAGPFVYIELHGIPFDQFGLYFGFNIIFLIVMTSINGRYVRRFGALNMLRFGLTVQFLMGIFLILVVALNLHFYFLVVGVAMYVGGIAMITSNAMAVILEDYPHMAGTVSSLAGTIRFGVGALVGTAIAMLPAKTEWPMVSSMAFCVICAMSFLLLARRYK

SEQ ID NO: 68549 - protein, 234 aa, Proteus mirabilis
MRLDKFLSQQLGISRNLVARELRAGLVTIDGEMVKTGATKITPEQEVAYDGNVLTQILGPRYFMLNKPIGYVCSTDDPVNPTILYFIDEPLAHKLHAAGRLDIDTTGLVLLTDNGQWSHRITAPKHHCEKTYVVTLEQPIATDVAEKFKTGVQLNGEKELTKPATLEVITPTEVKLTISEGKYHQVKRMFAAVGNHVVALHRERIGDITLDDALAPGEYRPLTEEEINSIHLPK

SEQ ID NO: 68550 - protein, 589 aa, Proteus mirabilis
MVMAFTLRPYQLDAVNATITYFRQHKTPALIVLPTGAGKSLVIAELAKRARGRVLVLAHVKELVEQNHSKYEAYGLSADIYAAGLQQKESRGKVVFGSVQSVARNLSQFEHAFSLLIIDECHRISLSEDSQYQQVIKQLQTINPQLRILGLTATPYRLPTGWIYQYHYHGMVKGDDNCFFRDCIYELPLRYMISHHFLVPPTRLDMPILQYDFSQVRTSQNGIFNQEDLNREIKKQQRITPHIVSQIIEYGEQRRGVMIFAATVEHATEIFTLLPQGQAALVSAETPSSERDALISQFKQQQLRYMVNVAVLTTGFDAPHVDLIAILRPTESVSLYQQIVGRGLRLFAGKTECLILDYAGNPHDLYLPEVGSKKPNPNSKPVQVFCPLCQFANTFWGIVDADGDIIEHYGRRCQGWELDEQGQKKQCDYRFRFKLCPHCNEENDIAARRCVHCNEILVDPDDMLKAALKLKGALILRCGGMQLLSGQDEKGEWLKINYYDEEGTSVSERFRLKTPAQRKVFELKFLHEHQRAPGVPFVWHNAQDIINQFDLLRYPDFIVAQKNKKDGFWQIRNKLFDYHGRFRKADTLY

SEQ ID NO: 68551 - protein, 94 aa, Proteus mirabilis
MLTINATVRKEQGKGASRRLRVANRFPAIVYGGNEEPIAIDLDHNEVINQEHKSEFYADFVNLVIDGKATKVKVKAVQRHEYKPKITHIDFLRA

SEQ ID NO: 68552 - protein, 221 aa, Proteus mirabilis
GDGNMLGAARVLSRYNIKVIGVNRGNLGFLTDLDPDNALQQLTNVLAGHYREEKRFLLEARVCAEGQRTRIGTAINEVVLHPGKVAHMIEFEVYIDDRFAFSQRSDGLIITTPTGSTAYSLSAGGPILTPNLDAIALVPMFPHTLSSRPLVISSDSQIRLKFSQTNIDYEVSCDSQLVLPIKEGDEVIIKRSRQKLNLVHPTDYNYFNTLSSKLGWSKKMF

SEQ ID NO: 68553 - protein, 257 aa, Proteus mirabilis
MGKWSANYIVEKINAFAPSADRPFVLGLPTGGTPLATYKALIELHRAGKVSFQHVVTFNMDEYVGIPADHPQSYRTFMYENFFNHIDIKDENINLLNGNATDPQAECARYEAKIKSYGKINLFMGGVGNDGHIAFNEPASSLSSRTRMKTLTEDTRLANSRFFDNDINKVPKYALTVGVGTLLDAEELMILATGINKAQAVQVATEGAVNHLWTISCVQLHPKAILVCDDPATMELRVKTLRYFQQIEAQERQQYQD

SEQ ID NO: 68554 - protein, 681 aa, Proteus mirabilis
MNILSYLQKIGRALMVPVATLPAAAILMGIGYWIDPVGWGNDNALAALLIKSGAAIIDNMSVLFAIGVAYGMSKDKDGAAALTGFVGFLVVTTLCSPAAVSMIKGLPLAEVPVAFGKINNQFVGILVGVLSAELYNRFSSVELPRALSFFSGRRLVPILTSFLMIIVAFILMYIWPVIYGGLVSFGESIKDMGALGAGIYAFFNRLLIPVGLHHALNSVFWFDVAGINDIPNFLAGQQAIDAGLATVGVTGRYQAGFFPVMMFGLPGAALAIYHCARKEHKAKVAGIMMAGAFAAFFTGITEPLEFSFMFVAPVLYVIHAFLMAISVYIAASMEWISGFGFSAGLVDMFLSSRNPLAVKWYMLIVQGIAFFFIYYGIFRFTITKFNLKTPGREDEVAGDETADGYDEDIKAVPTNSKEAVQQEARQYIAAVGGSDNLTGIDACITRLRLNVKDASVVNDAYAKHLGASGVIRLNKQSVQVIVGTRAEIVASAMRDVLAQGPVAAYAGRHTDNAVSTEKTSEKQTNNDAKVILEMVAPFDGEVVALKDVPDEAFSSGVVGDGLAIKPTSNIVMAPAAGTVVKIFDTNHAFCIETDNGVEIIVHMGIDTVALGGKGFKRLVEEGTEVKLGQPILELDLEYLNTNAKSMISPVIISNIDDFDKVSDIASGQVTANNTIIYKVLK

SEQ ID NO: 68555 - protein, 292 aa, Proteus mirabilis
MDTNLSTRLNKYISESGICSRREADRYIEQGLVLINGKRAGIGDRVTAGDEVKVNGRLIEAQDNSELVLIALNKPVGIVSTTDEGEKDNIVDYVNHSTRIFPIGRLDKDSQGLIFLTNHGDLVNKILRAGNSHEKEYLVTVDKPITDEFIRGMGAGVPILGQKTKKCKVKKEAAMVFRITLVQGLNRQIRRMCEYFGYEVTKLERIRIMNVSLAGLPVGEWRDLTDDELIKLFDAIEASSSEAPKQKQNKPKKQISSNAKALGIHIPKTKTKETENNTRKRFAQPGRKKKKR

SEQ ID NO: 68556 - protein, 469 aa, Proteus mirabilis
MGKTLYQKIYDAHVVREVANETPIIYIDRHLVHEVTSPQAFDGLRTKGRAVRQPNKTFATMDHNVSTQTKDINACGDMARIQMQELMKNCQEFGVTLYDLNHPYQGIVHVMGPEQGLTLPGMTIVCGDSHTATHGAFGALAFGIGTSEVEHVLATQTLKQSRAKTLKIEVQGKTANGITAKDIVLAIIGKLGSAGGTGYIIEFTGEAIEALSMEGRMTLCNMAIEMGAKAGLVAPDETTFAYLKGRQFAPQAPLWDEAVAYWKTLKSDEDAIFDATVTINAAEIAPQVTWGTNPGQVIAIDQIVPRLNSFNDPVERASAEKALAYMGLTEGVNLTDITIDKVFIGSCTNSRIEDLRAAAKIAKGHKVASHVQAIVVPGSGPVKAQAEAEGLDKIFIEAGFEWRLPGCSMCLAMNNDRLNPGERCASTSNRNFEGRQGRGGRTHLVSPAMAAAAAIHGHFADIRTFATVS

SEQ ID NO: 68557 - protein, 441 aa, Proteus mirabilis
MELKNCPLINEIKRQIGSHTHILVGFSGGVDSTVLLHGLVCLRDKYQLPLELTAIYVHHGLNSKADDWLTHCEHFCHNWQVSFISERVQVNGKEGGIEQGAREARYQAYRQYLQPNQVLVTAQHQDDQAETFLLALKRGSGPAGLSSMPAKMPFEQGYLLRPLLNITREQIEAYAHEHGLLWIEDDSNQDDRYDRNFLRLHVMPLLTQRWPHFSQAVTRSAALCGEQEALLDELLDVELQQLIDEHQSLDINLLSRCSEIKRNALLRRWFAKCNKSMPSRSQLSRLWQEVALAKADAEPRLRFFQDEVRRYQQRLYLVPVMEELTDRVIEWSLSQPLILPNQLGILAVSRDSGKTICRAPLADEKVTVRFGLTASSLRIVGRDLARSSKKIWQELNIAPWQRTRIPLIYYNDTLIAAVNTFVTLEGNATTEQSITIEWQAS

SEQ ID NO: 68558 - protein, 571 aa, Proteus mirabilis
MRTSHYLLSTLKETPADAEIVSHQLMLRAGMIRKLASGLYDWMPTGVRVLRKIEKIVREEMDNAGSLEISMPVVQPADLWQESGRWEQYGPELLRFTDRGERPFVLGPTHEEVVTDIVRNEITSYKQLPLNLYQIQTKFRDEVRPRFGVMRSREFIMKDAYSFHISQESLQETYDRMYQAYSNIFTRIGLDFRPVLADTGSIGGSASHEFQVLADSGEDDIVFSTASDYAANIELAEAVMPATPRSPATEELRLVDTPNAKTIAELVEQFNLPIEKTVKTLIVHATEESGHKLVALLVRGDHELNEIKAEKCSIVASPLVFATEEEIRQAVNAGPGSLGPINLPLPIIIDRAVSVMSDFGAGANIDGKHYFGINWERDLPLAEMADIRNVVEGDPSPDGKGTLLIKRGIEVGHIFQLGKKYSEALKATVQNEEGHNQVVTMGCYGIGITRIVAAAIEQNHDARGIIWPDAIAPFQVAILPMNMHRSYRVKEVAEKLYADLRAQGIDVLFDDRKERPGVMFADMELIGVPHTIVIGDRNLDNEQVEYKARRSDDKSLVNVNDVVAFIKEQLV

SEQ ID NO: 68559 - protein, 235 aa, Proteus mirabilis
MNSYQITSIGHIISPYKEKFAVPRQPGLVQDGVGQLILHTPYNHPDAVRGLEQFSHLWLLFIFHQTAQQGWHPLVRPPRLGGNSKLGVFATRSTFRPNAIGMSLVELKDIIIEKQSVILQLGSLDLIDGTPIIDIKPYLPYAESIADATAGFAQYAPHEEMEILFSEDATQQLQYYSHQYPHLMRFITQVLQQDPRPAYKKSEQSDRVYAVHLLDFNIRWQVNGQQTLVLSIEPR

SEQ ID NO: 68560 - protein, 306 aa, Proteus mirabilis
MKNCTLGNETDNSLISNAFGFLRFPLNFQPYSSDADWVITGVPFDMATSGRAGTRHGPGAIRQISTNLAWEGHRWPWHFDMRERLKVVDCGDLVFNFGDAQDMSDKLQAHTEKLLAAGKRCLTFGGDHFVTLPLLRAHAKHFGKMALVHFDAHTDTYANGSKFDHGTMFYHAPNEGLIDPQHSVQIGIRTEHDTNNGFTVLDAAQVNDRGVDDLVAQIKEIVGSLPVYLTFDIDCLDPAFAPGTGTPVVGGLTTDKALKMLRALQPLNIVGMDLVEVSPAYDQSDITALAGATIALDMLYLQAAKK

SEQ ID NO: 68561 - protein, 384 aa, Proteus mirabilis
MTTHLFTSESVSEGHPDKIADQISDAVLDAILEQDPKARVACETYVKTGMGDGRRRNYHQSLVDIEEITRKTVREIGYTSSDMGFDANSCAVISAIGKQSPDINQGVDRADPLEQGAGDQGLMFGYATNETDVLMPAPITYAHRLVQRQAQVRKNGTLPWLRPDAKSQITFQYDNNNIVGIDAVVLSTQHAEDISQKDLHEAVMEEIIKPILPTEWLNEQTKYFINPTGRFVIGGPMGDCGLTGRKIIVDTYGGMARHGGGAFSGKDPSKVDRSAAYAARYVAKNIVAAGLADRCEIQVSYAIGVAEPTSIMVETFGTEKIPTSQLILLVREFFDLRPYGLIQMLDLLHPIYQKTAAYGHFGRAEFPWEATDKAEILREAAGLK

SEQ ID NO: 68562 - protein, 352 aa, Proteus mirabilis
MNIYCIKLNINSIIGYLSMNPFYQRSFLRLLDFSSAEIQQLLALSLELKQAKKSGHEQQYLTGKNIALIFEKDSTRTRCAFEVAAFDQGANVTYLGGGSQIGHKESIKDTARVLGRMYDGIQYRGYGQKTVEMLAKYADVPVWNGLTDEFHPTQLLADLLTITEHQTKPLSETIFAYLGDARNNMGNTLLEAAALTGMDLRLVAPKACWPQAELVAECQNIAQQNGGKITLTENVAEGVKNADFLYTDVWVSMGEPKEVWKERITLLKPYQVNMDVIKLTGNPDVKFLHCLPAFHDEETTMGQALAEEFGLYGGFEVTNEVFESKHSIVFDEAENRLHTIKAVMVATLANPF

SEQ ID NO: 68563 - protein, 949 aa, Proteus mirabilis
MWHSSHINEPQNNDEQIMVQIAENPFILVDGSSYLYRAYHAFPPLTNSKGEPTGAMYGVLNMLRSLIIQYKPSHVAVVFDAKGKTFRDELYEEYKSNRPPMPDDLREQIEPLHEMVQAMGLPLLSITGVEADDVIGTLALKAASDGRNVLISTGDKDMAQLVTPNITLINTMTNVILGPDEVKEKYGVPPELIIDFLALMGDSSDNIPGVPGVGEKTALGLLQGLGSLEDIYQQLDKIATLSFRGAKTLGAKMVEHEKVAKLSYQLATIKTDVALDKTFDDLVVNEPNLDKLLEMFTRYEFKRWISDLQNGGWLAQRSSRKAPVPYSAEVATPKEQPAADNFPVISQENYESILTHESLMRWVEVLKKAPAFAFDTETDSLNNIDARLIGLSFAVEPGKAAYIPLRHDYLDAPEQLPVDEVLTALKPILEDKTILKIGQNLKFDRGIMENEGIELNGIYFDTMLESYVLNSVSSRHDMDTLAEKHLNHKTTTFEEIAGKGKGQLTFNQIEVEQATLYAAEDADITLLLHQALYPQIEAIAPLKHVYHDIEMPLVPVLSRMERKGVLIDAQVLAMQSQEITQRLAEIEKETFALAGQEFNLSSPKQLQEILFEKLNLPIIKKTPKGAPSTNEEVLEALAHSHELPRLILEHRGLAKLKSTYTDKLPLMVNSKTKRVHTSYHQAVTATGRLSSRDPNLQNIPVRNEEGRRIRQAFIARDGFKIVAADYSQIELRIMAHLSQDKGLLDAFAQGKDIHRATASEVFGIPLDEVTAEQRRSAKAINFGLIYGMSAFGLSQQIGVERKEAQRYMDLYFERYPGVLDYMERTRKQASQQGYVETLDGRRLYLPEINSKNAIRRKASEREAINAPMQGTAADIIKKAMIAVDNWICHECPDDVHMIMQVHDELVFEVRESYLEKANAMIHKLMESSMELAIPLKVEVGVGNNWDEAH

SEQ ID NO: 68564 - protein, 274 aa, Proteus mirabilis
MQALQSIIDNAFEQRAEITPDNVEPQVRDAINNVIAQLDSGKLRVAEKINGQWVTHQWLKKAVLLSFRISHNQVIDGSESRYFDKVPMKFANYDQARFEKEGFRVVPPAAVRQGAYIARNTVLMPSYVNIGAYVDEGSMVDTWATVGSCAQIGKNVHLSGGVGIGGVLEPLQANPTIIEDNCFIGARSEIVEGVIVEEGSVISMGVYIGQSTKIYDRETGEIHYGRVPAGSVVVSGNLPSKDGRYSLYCAVIVKKVDAKTRGKVGINELLRTID

SEQ ID NO: 68565 - protein, 156 aa, Proteus mirabilis
MDIRKIKKLIELVEESGISELEISEGEESVRISRNSGVQGQMAPQQYFAAPAAPQPALAAAVAPVAPETPAATATQEISGHVVRSPMVGTFYRSPSPEAKVFVEVGQQVNVGDTLCIVEAMKMMNQIESDKAGVVKSILCQDGDTIEFDDPLFVIE

SEQ ID NO: 68566 - protein, 347 aa, Proteus mirabilis
MFKKFRGMFSNDLSIDLGTANTLIYVKGQGIVLDEPSVVAIRQDRAGTSKSVAAVGHEAKQMLGRTPGNIAAIRPMKDGVIADFYVTEKMLQHFIKQVHNNSFMRPSPRVLVCVPVGATQVERRAIRESALSAGAREVFLIEEPMSAAIGAGLPVSEATGSMVVDIGGGTTEVAVISLNGVVYSSSVRIGGDRFDEAIINYVRRNYGSLIGEATAERIKHDIGSAYPSDELNEIEVRGRNLAEGVPRSFTLNSNEILEALQEPLTGIVSAVMVALEQCPPELASDISERGMVLTGGGALLRNLDRLLMEETGIPVIVAEDPLTCVARGGGKALEMIDMHGGDLFSED

SEQ ID NO: 68567 - protein, 272 aa, Proteus mirabilis
MNNRVHQGHFARKRFGQNFLTDSYIIESIVESIYPQPGEAVIEIGPGLGALTEPVGERMDKMTVVEIDRDLAARLEVHPTLKDKLTIIQQDAMTIDFAQLAKERQQPLRVFGNLPYNISTPLMFHLFSFADAISDMTFMLQKEVVNRLVASHGSKTYGRLSVMAQYHCQVIPIIEVPPSSFKPAPKVDSAVVRLIPYKEKPYPVTDIAMLSRITSQAFNQRRKTLRNSLGGLLTAEDMLALDIDPTARAENISVEQYCKVANWLSSQQQHAE

SEQ ID NO: 68568 - protein, 57 aa, Proteus mirabilis
  MISC_FEATURE (11)..(11): X=any amino acid
MTSSHHGPYEXGYTRATMADTKRSDLARASGTHKVCRSPDWSLQLDSMKSESLVIVD

SEQ ID NO: 68569 - protein, 319 aa, Proteus mirabilis
MSLNFLDFEQPIAELEAKIDSLTAVSQHDEKIDINIDEEVARLREKSLELTRKIFSDLGAWQVAQLARHPLRPYTLDYINRVFTDFQELAGDRAYADDKAIVGGIARLDGRPVMIIGHQKGRETKEKIRRNFGMPAPEGYRKALRLMEMAQRFKLPIITFIDTPGAYPGVGAEERGQSEAIARNLREMSRFGVPIICTVIGEGGSGGALAIGVGDKVNMLQYSTYSVISPEGCASILWKSADKAPLAAEAMGITANRLKELKLIDTVIPEPLGGAHRHYDEMAASLKAQLKADLAQLDEFDTEELTNRRYQRLMEYGYC

SEQ ID NO: 68570 - protein, 1144 aa, Proteus mirabilis
MIDGLAKTGPLVKKVASLGMPAFAITDFTNLCGLVKFYGAAHGAGIKPIVGADVYLETELLGDEYAHLTILARDNVGYQNLTLLISEAYKHGYGAAGPVIKQEWLTTYKEGLLLLSGGRMGDVGKFLLRGNRALVEQCLEYYQTHFPDSYYLELIRTGRPDEESYLHEAVALASEKGLPVVATNDVRFLDSDDFDAHEIRVAIHDGFTLSDPKRPKHYSPQQYMRTEEEMCELFADIPEALENSVEIAKRCNVTIRLGEYFLPQFPTGDMSTEDFLIKKSKEGLEERLAFLFPDPQEREKRRPEYDERLEIELKVINQMGFPGYFLIVMEFIQWSKDNGVPVGPGRGSGAGSLVAYSLKITDLDPLEFDLLFERFLNPERVSMPDFDVDFCMEKRDRVIDHVADMYGRDAVSQIITFGTMAAKAVIRDVGRVLGHPYGFVDRISKLVPPDPGMTLEKAFAAEPQLPEIYEADEEVKSLIDMARKLEGVTRNAGKHAGGVVISPTKITDFAPLYCDPEGNNPVTQFDKNDVEYAGLVKFDFLGLRTLTIINWALEMINARRAKKSLEPVDISAISLTDQRSFDMLQRSETTAVFQLESRGMKDLIKRLRPDCFEDMIALVALFRPGPLQSGMVDNFIDRKHGVEEISYPDVKWQHESLQPVLEPTYGVILYQEQVMQIAQVLAGYTLGGADMLRRAMGKKKPEEMAKQRSVFEAGAIKNGVDGELAMKIFDLVEKFAGYGFNKSHSAAYALVSYQTLWLKAHYPAEFMAAVMTADMDNTEKVVGLVDECWRMGLKVLPPDINSGLYHFHVNDEGEIVYGIGAIKGVGEGPIEAIVEARQQGGHFKDIFDLCARTETKKLNRRVMEKLIMSGAFDKLGPHRAALMSSLEDALKAADQHAKAEAIGQSDMFGVLAEAPEQVERSYANVPKWPDQVVLEGERETLGLYLTGHPITRYLKEIERYAAGTRLKDLVPTPRGQMVKVAGLVLASKVFTTKRGNRIGICTLDDRSGRLEIMLFSDALDKYQHLLEQDRILIATGQVSFDDFNGGLKMTVRELMDINEAREKYARGLAISLSDRQINEQLLNRLRGVLEPHRSGTIPVHLYFQKHDACARLRFGATWRVTPTDMLLTDLRTLLGNEQVELEFD

SEQ ID NO: 68571 - protein, 196 aa, Proteus mirabilis
MEFVYPKANLIAGVDEVGRGPLVGAVVTAAVILDPANPIQGLMDSKKLTEKKRNALYDEIKEKALCWAIGRAEPEEIDKLNILWATMKAMERAVAGLSITPDMVLVDGNRCPNLPMASQAVIKGDSLVQEISAASILAKVTRDREMEQLDKLYPDYGFAKHKGYPTAFHMEKLASLGATPYHRKSFAPVKRALNLV

SEQ ID NO: 68572 - protein, 390 aa, Proteus mirabilis
MTLSGQSSIKQRPLVIGLVAGETSGDILGAGLIRALKQMHPNIRFVGVAGPLMQAEGCEAWYEMEELAVMGVVEVLERLPRLLKIRKDLTQRFTQLKPDVFVGIDAPDFNITLEGRLKQKGLKTIHYVSPSVWAWRQKRVFKIGKATDLVLAFLPFEKAFYDKYQVPCRFIGHTMADAIALHPDKKAAREHLGIDQEAICLALLPGSRHSEVEMLSADFIKTAQRLKQQIPALHIVVPLVNAKRRAQFEQIHQSVAPKLEIQLLDGQAREAMTASDATLLASGTAALECMLTKCPMVVGYRMKPFTFWLAKKLVKTPYVSLPNLLAGREIIKELLQEECTPEALAEQLLPLLTDAEKAQHLKEIFLQLHSAIRCRADEQAANAVLELAGQ

SEQ ID NO: 68573 - protein, 172 aa, Proteus mirabilis
  MISC_FEATURE (3)..(3): X=any amino acid
  MISC_FEATURE (12)..(12): X=any amino acid
PFXVTAGRVISXLDSVLLDRKSIAMSDNHTLQIEEILDLLPHRYPFLLVDRVLDFEEGKFLRAVKNVSFNEPFFQGHFPGKPIFPGVLILEAMAQATGILAFKSVGKLEPGELYYFAAIDGARFKRPVLPGDQMVLEVEFIKERRGVARFKGVAKVDGEIACELEMMCARRR

SEQ ID NO: 68574 - protein, 342 aa, Proteus mirabilis
MFSIRLADLAQQLNAQLHGDGDITIAGLASMGLANGEQITFLSDSRYREKLSECQAAAVVLTEADLPFCPVAALVVKNPYLAYAQMAQIMDTTPAPAQDIHPSAVIAADAKLGNNVSIGANAVIESGVELGNNVVIGAGCFIGKKAHIGDNSRLWANVSIYHEVIIGKDCLVQSGTVIGSDGFGYANERGNWIKIPQLGSVIIGDRVEIGACTTIDRGALDNTVIGNGVIIDNQCQIAHNVIIGDNTAVAGGVIMAGSLKIGRYCMIGGASVINGHMEICDKVTVTGMGMVMRPITEPGVYSSGIPLQPNKAWRKTAALVLRIDEMQKRLKSLERQVENSDK

SEQ ID NO: 68575 - protein, 161 aa, Proteus mirabilis
MNISLIAALAADRIIGMEKAMPWTLPGDLAWFKKNTLNKPVIMGRVTYESIGRPLPNRLNIVLSSQPGNDDNVVWVKSVEEALQAAENNDEIMVIGGGKVYEQFLPMANKLYLTHIDAEVIGDTTFPDYEPDEWDSTFMEYHEADENNSHNYCFEILKRRK

SEQ ID NO: 68576 - protein, 133 aa, Proteus mirabilis
MKTGYLWAIASALLVTVAQLLLKLGMSELPDLQLEKQWFDLHWLWANIIPISVVFVGLIGYVLSMVCWLLTLRTIPLNKAYPLISLSYVFVYILAVVLPWFQETLSWSKTIGIIFIMLGVWLISQKTEQTTSH

SEQ ID NO: 68577 - protein, 445 aa, Proteus mirabilis
MAHRLTSRDILALGFMTFALFVGAGNIIFPPMVGLQSGEFVWTAAIGFLLTGVGLPVLTVVALAKVGGGIEALSTPIGKSMGLLLAIVAYLAVGPLFATPRTATVSFKVGIAPLVGDSDIALLIYSVIYFLIVIGISLYPGKLLDSVGHILAPIKILALAVLGLAALFWPAGTPIPATQAYQDMAFTQGFINGYLTMDTLGAMVFGIVIVNAARSRGIDNSSLLTRYTMWAGIIAGVLLTAIYLSLFKLGSASGSIIPEAKDGADILHAYVQHTFGNFGSFFLALLIFLACMVTAVGLTCACAEFFSRYLPISYRTLVLILAVFSAVVSNLGLSKLIAFSIPVLVMIYPPCIVIILMSFTLRFWHNPSRIIAPAMAISLFFGIFDAIKASDHLKHLLPDWAAKLPLSEQGLAWLIPVLVTIVICAIYDKVAGSQHKKVIHSGINK

SEQ ID NO: 68578 - protein, 430 aa, Proteus mirabilis
MLERLSWKALVWGLFLFCLPAFVLSLFIGHLPWLLVVSLLSALIWHAYNLMKLSKWLWLDRSVLPPEGKGGWEPIFYGIRQTQQRNRKRRRELGDLIKRFRSGAESLPDAVVMITNEGNIFWCNSLAQHLLGFRWPDDNGQNIFNLLRYPDFLHYFTVADFSRPLTIALNNGAIVEFRVMPYADDQRLMVARDVTEKNKLENSRRDFFANVSHELRTPLTVIQGYLEMMEENTAENPAEHKVIKTMQEQAKRMDLLVQQLLQLSRIESAPHIDLNTVVDMPALLSVLEHDAHSLSQEQQNIIFDIDHKWAVRGNEEQLRSAVSNLVYNAINHTPEGTTIRVSWKKVPQGMLFSVSDNGPGISAEHLTRLTERFYRVDKARSRHTGGTGLGLAIVKKSLQHHHSILNIESKVGVGSTFSFIMPQTLLTEKK

SEQ ID NO: 68579 - protein, 410 aa, Proteus mirabilis
MRIIHTSDWHLGQYFFTKTRAQEHQQFLDWLLAQIREQQVDAVIVAGDIFDTGSPPSYARELYNRFVVAIRDTQCQLIILGGNHDSVATLNESKSLLACLNTTVIANVHTETPQAPIILYQKNHTPGALLCAIPYLRPRDMINSKSGQSGADKQGALKEAIADYYQHQYQAALDLRKQLNVNIPIIATGHLTTIGASVSDSVREIYIGTLEAFNATLFPPFDYIALGHIHRPQRVNKSGHIRYSGSPIPLSFDESAQQKSVCLIDFEQDKLAEMTLLPIPEFQLLRTLSGSLQEIATQLEKLATQYNEMDTTIWLDIEVSTQDYLSDIQTRIQELTQSPLFEVIVLRRARKQRQALMQNEKETLTELTVYDVFERRLAQHQFETEEDKIRLTTLFKQAVEMAEQEDNNAR

SEQ ID NO: 68580 - protein, 1241 aa, Proteus mirabilis
MKILSLRFKNINSLKGEWKINFDQEPFVSNGLFAITGPTGAGKTTLLDAISLALYHRTPRLDKVTQSQNELMTRHTAECLAEVEFEVKGVAYRAFWEQRRANYKEEGNLQAPQAELAKINRLGGEDKVLANKISQVKEKIISITGLDFDRFTKSMLLSQGQFAAFLNADDKSRAELLEELTGTDIYRHISQTIFKHWREEEQALNTLKQQAQMMALLDATTRQELLTQQANIQAQITRLQKEQQEYQVAKQWQEKALEIQQQQQSAQAGLNEAQQALIIAQPDIQRLEKNEPAEKIRPLYDEKNRRLTEQNYLATQLTSLKTEKQAIEQQSLPINKKLADFHEQLKTHHEKKQHTLQLIREKVLPLDNQLVLLQQEISTNNQHKHKLEKICAEYLQHSQLAEKKLITTQQQVNQLNNDLTQHAYHAQLAENLPLWQHYFQQYNEISNQYLANQKRETAEQEKVISLEKALQQATQTLATQQEQLNLQQQQLQSYQTQLEARQKADKPDEIKPRLQQINLQKNALAKIINLHTQLQRNGKEQQHYQTTLSENQQKIATLTQTIAENDLALKEKAQHLKDLNDNYLLLQKVAEYEQERARLLKDKPCPLCGSTQHPYVETYHDIKPDETKLRLEALQQQVHSLTITLAEQRTQLVNYGSQNSTLSDNIAQLTQENSVLTQQWQTLAQAHHLPLVDDADNLLTLEQSLNQQELILTEKLDSYQQLEAQTHQKNTHFLNAKEQFNQQQQSVKQQQNDLDYLQKTIKTYQQQSEHLHQQQQQLAQHIQSAIEKQGYTLPEFEQFTPWLAARQQEHQQYQSQLKELQLLQQSLREQQVTQNEKKRYLAEKQAELEALLAKLSQQQHQQTQWQDQRQALFGSQSVEQVRSELDKHSQFLQTQIEQYTQEKNQLENRLNQLIGQYQENEKALQRAITQAQQATEHYQHALKESLFADENDFLASLLSVEERTRLQEQQKQRLDKLLQEKTRLETQEKAYQQHLLQQPLLSTQCTAEQCNIHLDDLAKQHKALQETLFSLQIQLRQDDEKRIEQQTLLAQIAKQQAHYDDWSYLNELVGSASGDKFSRFAQGLTLDHLIYLANRRLEKLHGRYFLQRKTTGSLELQIADTWQADALRDTRTLSGGESFLVSLSLALALSDLVSNKTQIESLFLDEGFGTLDPDTLDIALDALDSLNASGKIIGVISHVEAMKERIPVQIKVKKAGGLGISQLAPEFRYGNKSNENQSVKD

SEQ ID NO: 68581 - protein, 155 aa, Proteus mirabilis
MNNDTKMNISDVLTLACTHNNVHCTSKKRALEIISENAAQALNLPETLIFEALLTREKVGTTGIGGGLAIPHGRIESDETEKVVGVFLHLSEPIAFDAIDNQPVDLLFALLVPATQCKEHLHTLSLIAKQLADKNLCRRLRSAQSDEELYQIITE

SEQ ID NO: 68582 - protein, 284 aa, Proteus mirabilis
MVLMIVSGRSGSGKSVALRALEDMGFYCVDNLPVDLLPELAKTLAERDAAAAAVSIDVRNMPESPEIFEKALESLPAEYSPQLLFLDADRNTLIRRYSDTRRLHPLSTKNLSLEMAIDTESDLLEPLRSRADLIIDTSEMSVHELAEMLRTRLLGKRERELTMVFESFGFKHGIPIDADYVFDVRFLPNPHWDPKLRPMTGLDRPVAAFLDRHTEVHNFIYQTRSYLELWLPMLETNNRSYLTVAIGCTGGKHRSVYVAEQLADYFRSRGKNVQSRHRTLEKRK

SEQ ID NO: 68583 - protein, 186 aa, Proteus mirabilis
MAKQPEEWHYLNPEFDNTPLEEEEEEEIIWVSKSEIKRDAEALKKLGTELVELSAQELERVPLDEKLLASIKLAQKVQREARRRQIQYIGKLLRNVDEEPIRQALDKLKNRHNQQILVLHKLEDLRTRLIDGGNEVIEEVVALYPMADRQQLRTLIRNAKKEKEANKPPKSFRLLFQYLKDLSESA

SEQ ID NO: 68584 - protein, 244 aa, Proteus mirabilis
MKVKAMVLASMLALGAPSIALAGAVPEGPHITTSGNATIKATPDMATLNIQVSEKAKDAAQAKKQVDERVAKYFAFLKENGVTKEDIDAANIRTQPNYEYDKKAERSVINGYTATRTVDVKIKKLDQLNTLLDGALAAGLNEINNVEFGVNDPEQYKAKAREVAIKNAIQQASSVAKGFGADLGAVYSVSYRAPEATPYPIARMKMDAMALSAPSPEAVKETYQQQSIEFKDYVDVVFELKTAK

SEQ ID NO: 68585 - protein, 299 aa, Proteus mirabilis
MKRPDYRALQALDAVIRERGFERAAQKLCITQSAVSQRIKQLENLFGQPLLVRTVPPQPTEQGQKLLALLHQVEMLEEQWLGDENSGSTPLLLSLAVNADSLATWLLPALHPVLTQLPIRLNIQVEDETRTQERLRRGEVVGAISIQPQALPSCLVDQLGALDYLFVASPDFAQRYFANGVTKSSLLKAPAVAFDHLDDMHQAFLQQNFGLSPGSVPCHIVNSSEAFVQLAKQGSTCCMIPHLQIADELKSGELIDLTPGLCQRRMLYWHRFAPESRTMRKVTDALLDYGRKVLKQDEE

SEQ ID NO: 68586 - protein, 344 aa, Proteus mirabilis
MGYLLNNMNNQYDDPLNQLRHKQQISDKLKLTLLVLVLFVLIVISLSAGEIWLFPNKWLTEEASLFIWQIRLPRILAVMMVGASLAIAGAIMQAIFENPLAEPGLLGVSSGAGVCVVLLIVFQLGTAYWLISSAAILGALGITCLLMFFSQIKKLSNAQLLLIGVALGVLASAVMTWLVYFSSALDLRQLMYWLMGSFSGIDWRHQILFWALLPIITLLIWQADILNYLSLGSFEAKKLGISVIIWRNWFILTVGLLIGFSVALAGAISFVGLIVPHLLRLSGITHYKTLLPGCALTGASLLIFADLISRLMLNGAEVPIGVITATLGAPLFIWLLATKQMERL

SEQ ID NO: 68587 - protein, 795 aa, Proteus mirabilis
MKFSELWLREWVNPAISSEELSEQLTMAGLEVDGVEPVAGDFHGVVVGEVVECGQHPNADKLRVTKVNVGGERLLDIVCGAPNCRQGLKVAVATVGAVLPGNFKIKAAKLRGEPSEGMLCSFSELAISENHEGIIELPADAPIGTDIREYLKLNDNAIEISITPNRADCLGIMGVARDIAVINKMTCQIPDMSPIAATSSATFPVRVEAPQACPRYLGRVFTNVNVKANTPLWMQEKLRRGGIRSIDPIVDITNFVLLEMGQPLHAFDLDHVDGAVVVRMGKEGEKLTLLDGNEITLKDDVLVIADEKQALGMAGIFGGESSGVNEATKNVFLECAFFSPLAITGRARRYGLHTDASHRFERGVDSALQYQAIERATKLLLEICGGEVGEIIDVTNDSYLPHVAPIKLTRAKLDRLLGHVIDDEQVVDSLTRLGFGVTVENDGWLATVPSWRFDVEIEEDLIEEVARIYGYNNIPDVPLRADLIMTDHREADLPLKRVKTMLVDNGFQEAITYSFVDPKIQSLLHPNEEALILPNPISADMSAMRLSLLTGLLTTVVYNQNRQQARVRLFEAGLRFVPDNQAEYGIRQELMLAGVIAGNRYEEHWTLEKQTVDFFDLKGNIESILELTGQLDEITFKPANHSALHPGQSAEIYLRNEYIGCIGVVHPELERKLDLNGRTVVFEIRWDAIANRNLPQAKAVSRFPSNRRDIAVVVPNDVAAEDILAECKKVGGNQIVGINLFDVYCGKGVAEGYKSLAISLILQDIEHTLEEDEIAATVNTCVAALKQRFQASLRD

SEQ ID NO: 68588 - protein, 327 aa, Proteus mirabilis
MPHLAELVAQAKAAIEEAQDVAALDSVRVEYLGKKGHLTLQMSTLRDLPAEERPAAGAVINQAKQEVQQALNARKEQMESALLNERLAAEKIDVSLPGRRIENGGLHPVTRTIERIETFFGELGFSVESGPEIEDDYHNFDALNIPAHHPARADHDTFWFDAKRLLRTQTSGVQIRTMQNKQPPIRIIAPGRVYRNDYDQTHTPMFHQVEGLIVDKDISFTNLKGTLHDFLKNFFEEDMEIRFRPSYFPFTEPSAEVDVMGKNGKWLEVLGCGMVHPNVLRNVGIDPEVYSGFAFGMGMERLTMLRYGVTDLRSFFENDLRFLKQFK

SEQ ID NO: 68589 - protein, 118 aa, Proteus mirabilis
MARAKRGVIARARHKKILKQAKGYYGARSRVYRVAFQAVIKAGQYAYRDRRQKKRQFRQLWIARINAAARQNGMSYSRFINGLRKASIEIDRKILADIAVFDKAAFAALVEKAKGALA

SEQ ID NO: 68590 - protein, 286 aa, Proteus mirabilis
MNELPASLDEATGWFVANQELFIQYAVNIVAAFLILFIGLFVAKMVSKGVARILTLRHIDATVVTFLSVLVRYTVIAFTLIAVLGRLGVQTASVIAVLGAAGLAVGLALQGSLSNFAAGVLIVIFRPIRAGEYVMIGAVEGTVRDVQIFSTTLRSADDRIIVIPNSKIISSEVINLSREPNRRTQIIVGVAYDADIDKVKKVLGDVVAQDKRIQHNQGVTIRLHEMAPSSLNFVVRVWTTNDDAWPVYWDLMENFKRALDANNIGIPFPQMDVYMHQAQNTVMKAE

SEQ ID NO: 68591 - protein, 865 aa, Proteus mirabilis
MLEEYRKHVAERAAEGVVPKPLDATQTAALVELLKSPPKGEEEFLLDLIVNRVPPGVDEAAYVKAGFLTALAKGETTSPLITPEKAVELLGTMQGGYNIHALIEALDNDKLAPIAAKALSHTLLMFDSFYDVEEKAKAGNVYAKQIMQSWADGEWFTERPELAEKITVTVFKVTGETNTDDLSPAPDAWSRPDIPLHALAMLKNAREGIEPDQPGSVGPIKQIEALNKKGFPLAYVGDVVGTGSSRKSATNSVLWFMGDDIPYVPNKRGGGVVLGGKIAPIFFNTMEDAGALPIEVDVSKLNMGDVIDIYPYKGEIRNHETNELLETFALKTEVLIDEVRAGGRIPLIIGRGLTSKARSALGLPPSTLFRHAKAVEQSDRGFSLAQKMVGRACGRDGIRPGEYCEPKMTSVGSQDTTGPMTRDELKDLACLGFSADLVMQSFCHTAAYPKPVDVTTHHTLPDFIMNRGGVSLRPGDGIIHSWLNRMLLPDTVGTGGDSHTRFPIGISFPAGSGLVAFAAATGVMPLDMPESVLVRFKGKMQPGVTLRDLVHAIPLYAIKKGLLTVEKKGKKNIFSGRILEIEGLPELKVEQAFELADASAERSAAGCTIKLDKAPIIEYLQSNIVLLKWMIAEGYGDRRTLERRITAMENWLADPQLLEADADAEYAAVIEIDLNEIKEPILCAPNDPDDARLLSEVANSKIDEVFIGSCMTNIGHFRAAGKLLDQHKGQLPTRLWVAPPTKMDAAQLTEEGYYSVFGKSGARIEVPGCSLCMGNQARVADGATVVSTSTRNFPNRLGTGANVYLASAELAAVASLLGRLPEPQEYLDFINKVDETAEDTYRYLNFDQLEQYTDKATQVIFQTTV

SEQ ID NO: 68592 - protein, 875 aa, Proteus mirabilis
MSKSTAEIRQAFLDFFHTKGHQIVPSSSLVPNNDPTLLFTNAGMNQFKDVFLGLDNRPYSRATTAQRCVRAGGKHNDLENVGYTARHHTFFEMLGNFSFGDYFKHDAINFAWELLTGKEWFNLPKERLWVTVYATDDEAYDIWNKEVGVPAERIIRIGDNKGAPFASDNFWQMGDTGPCGPCTEIFYDHGDHIWGGPPGTPEEDGDRYIEIWNIVFMQFNRKSDGTMDPLPKPSVDTGMGLERITAVLQHVNSNYDIDLFRALIKSVAEVTNATDLANKSLRVIADHIRSCSFLVCDGVIPSNEGRGYVLRRIIRRAVRHGYMLGAKDTFFYKLVAPLIDVMAEAGKELKNQQEIVEKVLKTEEEQFARTLERGLQLLDEELEKLTGDTLAGETAFRLYDTYGFPLDLTADVCRERNIKVDEEGFELAMEEQRKRARESSGFGTDYNELIKVDSRSDFSGYDHNEQQGTINAIFHNGQTVTELKAGEEGIIFLDKTAFYAESGGQVGDKGLLIGKDSQFEVTDTQKYGKAIGHIGKVISGSFIVNHKINAVIDVARRDAIRLNHSATHLLHAALRQVLGTHVTQKGSLVNDKYLRFDFSHFEAVKPEQLREIEDIVNAQIRLNSPVVTELMDLEDAKQKGAMALFGEKYEERVRVLTMGDFSTELCGGTHAARTGDIGLFRIMSESGTAAGIRRIEAITGATAIESVHEQSDLISLVAHALKSDGSNLVEKIKTVQEKYRSLEKELQQLKDQQAAQESSSLGSQAKNVKGIKLLVRELNNVEPKMLRTMVDDLKNQLGSAIIVLSTISDGKVSLIVGVTKDLTAKIKAGELISFVAQQIGGKGGGRPDMAQAGGTDVEALPAALASVDEWVESHL

SEQ ID NO: 68593 - protein, 355 aa, Proteus mirabilis
MAIDENKQKALAAALGQIEKQFGKGSIMRLGEDRSMNVETISTGSLSLDVALGAGGLPRGRIVEIYGPESSGKTTLTLQVIASAQREGKICAFIDAEHALDPIYAQKLGVDIDNLLCSQPDTGEQALEICDALSRSGAVDVIVVDSVAALTPKAEIEGEIGDSHVGLAARMMSQAMRKLAGNLKNSNTLLIFINQIRMKIGVMFGNPETTTGGNALKFYASVRLDIRRIGSVKNGDEVIGSETRVKVVKNKVAAPFKQAEFQIMYGEGINTYGELIDLGVKHKLVEKAGAWYSYNGEKIGQGKANATNYLKEHPEMYNELNTKLREMLLNHAGEFTSAADFAGEESDSDADDTKE

SEQ ID NO: 68594 - protein, 263 aa, Proteus mirabilis
MNAYIDNTLKFKNIIFSNHILLLIRKDCEISITKDNVKYQIDNDSIVFIKKNSALDIILGKNKMPEFIFLSHEVMMEVLKITINNKKEEVTQDNNKDSFIKQANHEDILFFNRLKNKFNDEVITNNKTSLSQILKIAYLLLNFDIPNLILKSKPELTSVKVKDIIISDLQHSWSLKEISSKLFISESSLRKKLEAEKTNFMTLLTTVRMAHAMNLLATTNLTIGQISSLSGYKNTSYFIKKFKKYYKSSPKKLKCLNYRDKII

SEQ ID NO: 68595 - protein, 183 aa, Proteus mirabilis
MKLNKLAMFAIASMAFSATVAQAASGDGTITFTGKVIDAPCGIATESANQAIDFGQISKSLLEKDGISQVKQIPIKLVNCDLTKAGSDTGAAGSYKGVKVTFNGNTITGATEELATTGNTGTAIVISGTTTGSLVKFNEAGELQALGNNDNTLMYTAWAKKATNGTIAEGEFNATTNFTLAYE

SEQ ID NO: 68596 - protein, 363 aa, Proteus mirabilis
MGFKCGIVGLPNVGKSTLFNALTKAGIEAANFPFCTIEPNTGVVPMPDPRLDKLAEIVKPQRVLPTTMEFVDIAGLVKGASKGEGLGNQFLTNIRETEAIGHVVRCFENDNIVHVAGKVDPAEDIETINTELALSDLDTCERAMHRNQKKAKGGDKVAKAEMEVLEKCLPHLEKAGMLRALDLSDEEKAIIRYLSFLTLKPTMYIANVNEDGFDNNPYLDTVRKIAEAEGSVVVPVCAAIEADIAELDDEEREEFMQDLGIEEPGLNRVIRAGYALLDLQTYFTAGVKEVRAWTIPVGATAPQAAGKIHTDFEKGFIRAQTISYNDFITYGGEQGAKEAGKMRAEGKDYIVQDGDVMNFLFNV

SEQ ID NO: 68597 - protein, 315 aa, Proteus mirabilis
MPDMKLFAGNATPELAQRVANRLYTSLGDAAVGRFSDGEVSVQINENVRGGDVFIIQSTCAPTNDNLMELVVMVDALRRASAGRITAVIPYFGYARQDRRVRSARVPITAKVVADFLSSVGVDRVLTCDLHAEQIQGFFDVPVDNVFGSPILLEDMLQKELDNPIVVSPDIGGVVRARAIAKLLNDTDMAIIDKRRPRANVSQVMHIIGDVANRDCILVDDMIDTGGTLCKAAEALKERGAKRVFAYATHPIFSGNAVENIRSSVIDEVVVCDTIPLSAEIKALNKVRSLTLSGMLAEAIRRISNEESISAMFEH

SEQ ID NO: 68598 - protein, 420 aa, Proteus mirabilis
MTLLALGINHKTAPVALREKVSFSPDTMGDALNNLLQQPAVRGGVVLSTCNRTELYLSLEDKENSHEQLISWLCQYHQIEPHELKNSVYWHQDNQAVSHLMRVASGLDSLVLGEPQILGQVKKAFADSQNYHSLSSELERLFQKSFSVAKRVRTETQIGANAVSVAFAACTLARQIFESLSSLTILLVGAGETIELVARHLREHQVKKIIIANRTKERAQRLANEVDAEVITLSDIDESLSQADIVISSTASPLPIIGKGMVERALKKRRNQPMLLVDIAVPRDIEQDIEKLSNVYLYSVDDLEAIIQHNREQRQAAAIEAEHIVQQESGQFMDWLRAQGAVGAIREYRDSAEMLRAEMAEKAIALIQNGADAEKVIQQLSHQLMNRLIHTPTKSLQQAASDGDIERLNLLRESLGITHN

SEQ ID NO: 68599 - protein, 261 aa, Proteus mirabilis
MFLVDSHCHLDSLDYEKLHKNIDDVVEKAQQRDVKYMLAVATTLPGFKNMRELIGKRDNVAFSCGIHPLNLDEGHDVAELARLAAEADVVALGETGLDYYYQQENASLQREIFREHIRIGRQVNKPVIVHTRSAREDTLTILKEEKVQDCGGVLHCFTEDKETAMALLDLGMYISFSGIVTFRNAEQIREAARIVPLDRILVETDSPYLAPVPHRGKENQPAYVRDVAEYMAVLKGVSIEELAQQTTRNFATLFQIPNLAD

SEQ ID NO: 68600 - protein, 331 aa, Proteus mirabilis
MAISASFNFQGLSPNSIWDALINIGFYPDSGLTELNSYENRVFQFMDEHKQRYVVKFYRPQRWSYSQIKEEHEFVLALKEAQVSVAAPIEVKGETVHLSNEGFYFALFPSIGGRAYETDNLFQLEEVGRTLGRIHQIGRKKSYQYRPTLSVADYLVAPKLEFEQSDLVPTQLKSQFIDAIDKIIHEVSPKLSDSTWKKLRLHGDCHPGNILWRDEVVMVDFDESRMGSAIQDFWMLLSGSKQDQLIQLDTLLESYNEYQDFDVRELSLIEPLRAMRMVHYLARVLKRRKDPAFPRTFVWFQEQDFWFKQLALFKGQVEQLNEPPLQLSPMY

SEQ ID NO: 68601 - protein, 454 aa, Proteus mirabilis
MANKIEHLDTLASEIEKQAGGFSNIATLTHCMTRIRLILKDSSLFNTEALKQVEGVKGVVFNGEQHQVIVGMGTAAKVYSIMNKRMQKNTDNSEETPASTPVKKGFSIRRMLNTLAAIFVPTIPALIGCGLIMGLINIIRLVAPGLVDQFPELFKLFKLIGSTVFAYLSIMIGINTAKELGASTSIGAVMAGLLAMPGLADITLFGEKLQPNSGGIFAVLMVVVFSSKLELWFRSIVKESLDLILTPFVTILVSALVAIMVFQPIGHYLNQLLAQGVSLSLLNHGGGAVVTGAALGGSFLFLLLTGLHQGLIPIHTEILNTFGLNYLFPILAMGGMGQVGSCFWVYLRTKNQRLKKTLMGALPVGIFGVGEPLLFGVSLPLGKPFIAGCIGGAAGGALMAYFQVGIIIPFGTAGLSLIPLVGDGQIIKFLIAVLGAWVVGFIASILIGFTDPEK

SEQ ID NO: 68602 - protein, 222 aa, Proteus mirabilis
MRPLANYIDHTLLAADTTEAQIKQLCAEAVEHGFFSVCINTSYIPLARTCLTGSDVKVCCVIDFPFGAGLTATKAFEAAEAIRQGAQEVDMVINIGMLKSGRFDFVKQDIAAVKAACGNTTLKVILETCLLTDDEVRLVCEMCCEVGVDFVKTSTGYSTMGATEHHVALMRQTVGDKMGVKASGGVRDRQTALKMIKAGATRIGASASVAIVTDSDAPESNY

SEQ ID NO: 68603 - protein, 438 aa, Proteus mirabilis
MSYFDKIEQIQYEGTTSDNPLAFRYYNPDEIILGKRMEDHLRFAACYWHNFCWNGSDMFGIGTFDRPWQTPGEALEQAKRKADVAFEFFHKLNVPFYCFHDVDVISEGNSINEYITNMAAITEVLAQKQQETGVKLLWGTANCFTHPRYGAGAATNPDPEVFAWAATQVCEAMKATKTLGGENYVLWGGREGYETLLNTDLRQEREQIGRFMQMVVEHKHKIGFQGTLLIEPKPQEPTKHQYDYDTATVYGFLKQFGLEKEVKVNIEANHATLAGHSFHHEIATAIALGILGSVDANRGDPQLGWDTDQFPNSVEENALVMYEILKSGGFTTGGLNFDAKVRRQSNDKYDLFYGHISGMDTMAMALRIAARMIQDGGLDKFIAQRYAGWSAELGQNILQGKLSLEEVAKYAQSNTLAPRLQSGRQEMLESLVNRYIFG

SEQ ID NO: 68604 - protein, 484 aa, Proteus mirabilis
MYLGLDLGTSSVKAIIMNEQGDVVASHSIPLTLSRPHPQWSEQDPQAWWQATDEAIKQLSRTQPMEQIQAIGLSGQMHGAVLLDAQQNILRPAILWNDGRSVKQCLRLAKQYPQFKEITGNLVMPGFTAPKLQWVAENEAEIFCQIAHVLLPKDFLRWKMSGNFASDMSDAAGTLWLDMQKRDWSDELLAATGLSRCQMPTLFEGNQITGYLLPEIAKKWQMKQVPIIAGGGDNAAGAIGVGVYQPGQGMLSLGTSGVYFVVSEKFLQNSDNAVHSFCHALPQTWHLMSVILSAASCLDWVCQLTGISDVGAMFKEIEQHAHSDSSLLFLPYLSGERTPYNNADAKGVFWGLTHQHQRADLCRAVLEGVSFALRQGIEVADKAGQHADNITLIGGGARSEYWRQLLADITGKTLDYRQGGDVGPALGAARLAQLAINPAHLSQIILSQPKLETRHVPNLEKHKAYQDKYNAFKKLYTLIETMKI

SEQ ID NO: 68605 - protein, 450 aa, Proteus mirabilis
MFIGFDYGTSNCSVAIMKEGKPTLLPLEGENVYIPSTLCAPTRESVSEHLFRHLNIKPTNSIGEQLLRKSIAFNRDEDIELVPEDIVFGQAALSLYLKDPHDVYYVKSPKSFLGASGLHEIQISFFEDLVCAMMANIKQQAEKSTQATITDAMIGKPINFNGLGGEAANKQAERILINAAKRAGFKQVLFEFEPVAAGLEYESTLTKDQTVLVVDIGGGTTDCSLIQMGPSYRGKTDRASTLLAHSGQRVGGNDLDIYLAFKQLMPLFGMTGLTSSGIKLPLKQFWDPIAINNVEAQKDFYSQQNLAALNQLRRDAQEPEKIKRLIEVYNETLGYGIVRKAEEAKMALSDCHTYLASIALLSETLETNITRQQMVEAIGSPKDKMIDLVNDAVQQGGVVPDVVFMTGGSARSPILCQAIEQQLPNVPIVKGNDFGSVTAGLARWGEVCFK

SEQ ID NO: 68606 - protein, 724 aa, Proteus mirabilis
MFNLFNGARRFIYNSHFLYYIRIIIALTGTTLFPWALGQEPKYTIPLTLGVVAAALTDLDDRLVGRLRNLVITLCCFLLASTSIGLLYPYPILFFCGLAISTWGFILLGALGQRYATIAFGALLIAIYTMLGMPIFPEWHEQPIWLLLGAVWYNLLTLIGHLLFPIRPVQDSLTRYYQQLSAYLEAKAALFDPDIEGDQQQLLYNLALANNQLIEAMSQTKLTLLSRLKGDRGQRSSRFTLHYYFVAQDIHERASSSHIQYQLLSDRLRHSDVLFRFQRLLSMQARACEQVAQSILWHKKYQHNPHFERAITHLENALNNVKNSTSDPQIIAPLYNLLQNLQGIDALLKSISTEQYQISHDQKEETQLSDEGLTGWRDIVLRIKGHLTPKSALFRHAVRMSLVLCIGYVIIQFFDLHRGYWILLTSLFVCQPNYNATRRRLTLRVSGTIIGILIGFPILYFVPSIEGQLVLIVVTGTLFFAFRTVQYAHATLFITLLVLLSFNLLGEGYDVALPRIIDTLIGCAIAWFAVSFIWPDWKFRQLPLLIQKTMTNNCYYLDAILIQYYQGRDNSVNYRIARRNAHSSDGELASLISNMSSEPKSFQTSQEEAFKLLCLNHTLLSYISALGVHRCKIEDEAVLTLLNDTVCYIDSALRRKKPQDNDFIQSHDQLIARVNAQPSSDNARIQLVLTQIRLLLDLLPQIVNCIELIEQTEWQNDKDKLATA

SEQ ID NO: 68607 - protein, 2358 aa, Proteus mirabilis
MTTLNNVPSPRPSSITRKVAWLNIFIQLAFPIVTTMPTQTFANENNFKKHNISDINQQNTYQVKAGDTPESIAKKFNIKLFKLIEANPQHVSLTGELKINDGTILNIPNEYLLKKKWLNNQDEAIPSTEGEELAKIIVDNSFLLNKDIDVTQYAISQISSKSNQKIEQWLNQFGHARVSLSADKNLTLKNSSAELLIPLYEQKEKLIFAQTNYHRKDLRSQFNYGIGYRYFTEKFMVGINGFYDHDLTHHHNRLGIGAEIWRDYFKLSSNHYHRLSSWRASNNILDYSERPANGWDIRTEGYFPAYPQLGTKLIFEQYYGKEVGLFGKDKRDKNPHTYTLGINYTPIPLVTLNAERRIGLHDRADNNLNINLSYRIGESLASQLNPDNVKAIRTLAGSRYDFVNRNNDMILEYKKETLVFLSMVDSINGYAKEERDLQVQVKTKYPLANIEWSASKLNAQGGQIKHHGGTHYTVILPQYQIGAIEKNSYIISAVAIDTHGNRSAPVQTTVIVDKSLINTRNSLFSPKQSQLFANGEATQKLILSIVDNDNLPVDIDSKEITLQQQSDTEKGNSRISTFSRLAAGKYQLTVTAGSIPEKLTLTPVFRDNTFNSATVTLIADNQTAHIAKGNLTVTKDNAPADGKSQNKIKVRVTDSNHNPLAHYPVNFTASNGANVISSRKTDEQGEIIASVTNTQVGSSQIGVQVKGITYSTEVHFSVDNDSAYIPQQNFTIIPPLSLADGKTEKNISLQVVDKQNNPIPATHVTLSADNQAQLKQTILTTDEQGKATTTMISKVAGTVTVRAKINDKMTHATTQFIANQAKGVIVSITPSSTTHVADGQTPVILTALVQDQFGEPLPHAQISWETEHDKSIVKIEHTTMTNEQGITTNKLTSTQALSVRVTARINNNAFTAEPITFIANGQQALISELLVNKNQIVADKQDPAELTAIVTDKLGNQLPDTIVNWQGSAGTQFAQQQTKTDAQGIAKNTLTTSQSGITTITARLNNGQHAQTNLVAVADLKSATLTLTTLNNKQSAIADNQDSITVVANLTDAYHNPLKNIPVYWQSSINHIDETTTQTDEKGRTQVVISGTKAQPTTITAYLSNKEKKSIQVTFVAGAPVQQNSYLTIEPQSIIADGNAFAVGKIDLRDKFDNPVIGRSNDIALIGDNSTIQFSKITETANGNYQAHIRGTKAGLSQITATIDSITVTQSLGFLTDNKTVKIHSVKVMAPYTVTANGKDKVIIQAQITDKHNNPVSKGVTVGWISDLGKLAAPLSMTNKQGIAEITLSSTQAGKAKVTAVLNNQQSVNADHIVTFTEGDISASLSTVAIFPDTIVAGANKATVTITLKDKEGNLLPNLANKITLTPQTNLQTTITPFKEKQKGIYQAQVSALKTGKTSLSAHVAPLAIKQSVSLTVLPNNTTAKVKNFTISNMQPHAGESITYKAYLVDNHDNPVGMGVPVAWSTNEGSQLETPLTFTDDNGVAIVGLSRRSVGVAKVSAILATGTYIADDVHFLTGHIDETMSELSLNPSQIIANGKDKALLTFVIKDKNGNIIPNQQVSGFSKNPTIKFSQAQQISPGRYEIEITGTQSGTAQIGVMVNGTHFKKQKILQLNADVTTWKIRAVEVDRTTITAGDKGVNYQATVVDANNNVLPNVIVSWKLLGSADDYHYSTYTNDKGIATNRVTSHVAGRLKMSAYLDSNNYKSTQDITVIPAEIDIHKSTFNSHRRSINADNKDSTLLSVKLMDKYDNTIDGKNVEIKTISGKPNFSDNPLKSVGNGEYQTNVTANTMSDIILTAQAETITIAEPLTIKVAIPKSEITFEKPIQQEIYKSTVIDALSYKGVPQNMQVIWSSSDPTVASIDTTSGQISMKKAGTTIITLQTLGNEQYPSAKNSYPLVIEKAPPKLKVISPHTIQSIWNDGITHQIAAEFDNPEAKNIPIHFSSSDTLVATIDSKGNLTAIKPGKTKIVIQSDATDKFLADSQTVDYQQEKAALSYYFKKNYIVLTTDSAADKLLMAQSPTPDVPVEANATWYSSQPNIVEITPDGIIKNLNIGQTTLTLEVKNNNYFQDHEQSYNVIIQASPRIKINSFEFLSAGESKSNTHLDDLTWQPLYTSDDQFIVKWSSSDTPKAINFELFDENGTSIALEERQNYAPKYNIHAPVKIQVPKQYLTSPKQLTLEVTTFDSNNQPYVDPKKYKINIDYFPANNAYKIISLDYNSKFIYTDTGTLASSCQNGWSTTTTHLILTPRLVFKGEPKKLLYPIYITTELYDVTLNPSDKLIGHINEKLTYPDKIIFSEHSKKIAEISPTSAHYALDEECRINDSGHGTLKANITIGNRSSYLKKEFHWDGQIGGYF

SEQ ID NO: 68608 - protein, 262 aa, Proteus mirabilis
MGFMTGKRILITGVASKLSIAYGIAKAMHDQGAELAFTYQNEKLKPRVEEFAASLNSNIVLECDVSKDESIDAMYAELAKVWPKYDGFVHSIGFAPADQLDGDYVNAVTREGFKIAHDISAYSFVAMAKASRAMLNPNSALLTLTYLGAERAIPNYNVMGLAKASLEANVRYMANAMGPEGIRVNGISAGPIRTLAASGIKDFRKMLNHCESVTPLRRTVTTEDVGNTAAFLCSDLSGGITGEIIHVDGGFSIAAMNELELK

SEQ ID NO: 68609 - protein, 322 aa, Proteus mirabilis
MTDTNKKKLTINDIAKLCGVGKSTVSRVLNQDPMVNEETRKKVNSIIEKYKFTPSKSARAMRGYSNRSFGIIVTRLDSYAENQAVSAILPILYQNNIDPIILESQFSQAKVEENLKMLAHQKIDGVILFAFSGINAANLASWKQKMVVIARPLEGFVSICHDDERAVNALMHYFHRDKHYQHISFIGIQINDETTGLLRYQTYLQYCQQHQLISQAQLGELNYQSGYLLAKQALASKPQAILCATDSLAFGVQKYLAEQKIDHIEVACIGRNDLLTFLFPQTKFYRLGFRESGQEAANILIQMLEKNIPAQKIIISSHDLNP

SEQ ID NO: 68610 - protein, 905 aa, Proteus mirabilis
MNYISVILSDTDITIKYLSEKSHYSFNTTNSHYLDWLNMAKAINHKFKSAQGGLIYSTSNKLDSDIIKTIDNKVINLSNFFTEIFNKPFIYINKAQLEHHHNLEEKMVTVANNFAWSIEYSGLETGKDEYCQESLLTTANGYIGLRGTLPEMTISDEHYPATYIAGLYNQASSQIENHQVINEDFVNAPNGQFISLKIGKGEYLHPKQLITHHLTRHLDLKTGVFTSQWRVETPEGQQLDIHCTKFANMADMSHYAILYTFKPLNFSGEITVITRLEGNTYNYGVQRYRSLNPHHYHVLQTGANKQHAFILAQTDQSKIGIGLSSTISGDFFANEDIVCHVSDTLVEQTITFNAQQNTTYQLEKCVAVTTSTAYPDSWQDVVNWEQQPLHSQLINSQKAWQTLWDSADISISGDLMTQKLLRLHTFHLLSSASPFSNQQHQLDVSVTARGLHGEAYRGHIFWDEIFILPFYIMHFPETARQLLLYRYHRLPAARLAARAEGFQGAMFPWQSGHDGSEQTQTLHLNPLSGQWDADHSCRQRHVSLAIAYNVWLYWLNTHDHQFMEQYGLELLNDITLFWLDQCQWDEGDQRFHIDGVMGPDEFHEKYADSLEGGLKDNAYTNLMVIWLFNQIEMFINNDRFSKKLQQLNSQSSVFNKIQEVKNRIAINIDAHEIIEQFSGYFQLKDLDWESYRKKYGNIYRMDRILRKENKSADDYKVAKQADTLMLFNNLDKQTVHSLITSLGYSVSKHFAEKNLHYYLERTSHGSTLSRIVHAYLAEQIQLHDLSWQLYQDALYSDYNDIQGGTTAEGIHTGVMAATLNTTIMAYAGVDIRQDMLTITPSLPQQWQKLSFKLLHRSTLYQINLTHKEISILSDKPSTILINHQTHKLTANTLLVLNLNGDTQND

SEQ ID NO: 68611 - protein, 332 aa, Proteus mirabilis
MSQSARITLLLLLFSVAVVIAITSGKYSLTVNELWTVVSSKLTGHIEESRTATVFWQIRLPRVLAAILIGGGLAIAGAAYQGMFRNPLVSPDILGVSSGAGVGAVLGIFLGHSMLSIQLFAFVGGLITVALVYFIAKLAKQQDPVLSLVLVGIAISALCGSAISLMKILADPYTQLPSITFWLLGGLSTITAPDLLSVAPLMLLGFIPLILLRWRMNILSLSDEEARSLGLNVEITRLIFILSATLITASAVSIAGIIGWLGLIVPHIARLLVGANFGYQLPISLLVGATMLLITDTLARTIANIELPLGILTSAIGAPFFLMLLLKTRRDR

SEQ ID NO: 68612 - protein, 708 aa, Proteus mirabilis
MYLFESLNQIVQKYLPPEQVEQLKKAFIVARDAHEGQTRSSGEPYITHPVAVACILADMRLDHQTLMAALLHDVIEDTPATFKDIETLFGSTVADLVEGVSKLDKLKFRDKKEAQAENFRKMIMAMVKDIRVILIKLADRTHNMRTLGSLRPDKRRRIARETLEIYSPLAHRLGIHHIKTELEELGFEALHPNRYRVIKEVVKAARGNRKEMINKILSEIEGRLTEASIQCKVNGREKHLYSIYRKMLLKEQRFHSIMDIYAFRVIVKDVDTCYRVLGQMHSLYKPRPGRVKDYIAIPKANGYQSLHTSLIGPHGVPVEVQIRTEDMDQMAEMGVAAHWAYKEQGEQPGTTAQVRAQRWMQSLLELQQSAGSSFEFIENVKSDLFPDEIYVFTPEGRIVELPTGATPVDFAYAVHTDIGHACVGARVDRQPYPLSQSLRTGQTVEIITAPGARPNAAWLNFVVSSRARSKIRQLLKNLKREDSINLGRRLLNHALGHHKVADIPLENIERELKRMKLHSMDDIMAEIGLGNAMSVVVARNLLIDNQQQEEHTHLSITNDETPKLPIKGADGVLISFAKCCRPIPGDPIVAHISPGKGLVIHHESCRNIRGYQKEPEKFMPVEWDKDIDGDFITEIKVDMINHQGALANLTAAINDANSSIQSMNTEEKDGRVYCAFIRLTAKDRIQLANIMRKLRIMPDVLRVSRNKN

SEQ ID NO: 68613 - protein, 115 aa, Proteus mirabilis
MAVIPKNYAKLESGYREKALKLYPWVCGRCAREFVYSNLRELTVHHIDHDHTNNPEDGSNWELLCLYCHDHEHSKYTEAEEYGSTVVAGEDAQDDVGQATYNPFADLKAMLNKKK

SEQ ID NO: 68614 - protein, 1296 aa, Proteus mirabilis
MEILRGSPALSAFRINKLLTLCQENQLPVRGIYAEFIHFVKVDGQLSEDEQAKLSKLLHYGPSLTEHELVGEMRIVVPRPGTISPWSTKATDIAHNCGLTQVVRIERGIAYYIDSDTMDEEQWQLLYGFIYDRMMETIFTDYQQVNALFAEQTPTPLKTIDVLAHGKDALVAANIEMGLALADDEVDYLVDVFKRLQRNPTDVELYMFAQANSEHCRHKIFNADWIIDGKAQDKSLFKMIKNTFEQTPDYVLSAYKDNAAVMEGSVAGRFYPDTEKGHYRYHQEPVHILMKVETHNHPTAISPWPGAATGSGGEIRDEGATGRGAKPKAGLVGFSVSNLRIPGFEQPWEEDFGRPERIVSALDIMTEGPLGGAAFNNEFGRPALLGYFRTYEEQVNSHNGVEIRGYHKPIMLAGGIGNIREDHVQKGEISVGAKLIVLGGPSMNIGLGGGAASSMTSGQSDADLDFASVQRDNPEMERRCQEVIDRCWQLGDDNPILFIHDVGAGGLSNAMPELVNDGGRGGHFELRNVLNDEPGMSPLEIWCNESQERYVLAVSPEKMPLFDALCQRERAPYAVIGEATQERELVLNDTHFDNKPIDMPLDILLGKAPKMLRDVTSHQTAGEYLDRKDIDLKEAVYRVLHLPAVAEKTFLITIGDRSVTGMVARDQMVGPWQIPVANCAVTTATLDSYYGEAMSIGERAPIALLDFAASARMAVGEALTNMAGCDVQSLNRIKLSANWMAAAGHPGEDAGLYDAVKAIGEELCPQLGITIPVGKDSMSMKTRWQDEQGKTKEVISPLSLVITAFSRVEDVRKTVTPELSTQEGNRLYLIDLGNGHNALGATALAQVYRQLGQKAADLRDVEQLKQFFNVIQQLVSDGKLLAYHDRSDGGLFVTLAEMAFAGHCGLNVDISAYDEDILAGLFNEELGAVFQIKGEHQESVETLFTEHGLADCLHYLGQATPSDDIIIQSRETEVYHEKRSTLRVWWAETTWQMQRLRDNPECADEEHRAKQDSHDPGLNVHLTFDPAEDIAAPYIATGSRPRIAVLREQGVNSHVEMAAAFDRAGFDAIDVHMSDLHTAQRSLSDFDVLVACGGFSYGDVLGAGEGWAKSILFNHRLRDEFAQFFARQDTLSLGVCNGCQMMSTLAELIPGADLWPRFVRNRSERFEARFSLVKVTDSPSLLLQGMAGSQMPIAVSHGEGFAEFRDAAQLAQLEAQNLVGLRFVDHYGQPTEQYPLNPNGSVKGITAVTTTDGRSTIMMPHPERVFRTVSHSWHPENWGEDSPWMRLFRNARKQFD

SEQ ID NO: 68615 - protein, 791 aa, Proteus mirabilis
MQILMPKQSGKLGRRLYLAFIFSSLLTLLIGGVIFFMWGKLATQINASVGDSLPMLTTSYNMERYSTNLQMLLKEREQTQRKSVSEQQKQQIYQLLDNLREFPIEQQSQRTFYNQLVDDLSNLIEQQDILLDKRRELENRLAQLLGQLAWMHDAVGEDIKPLLNEIEWHVSQMLNEKNVQENSLQLLLESTLLQELFTTENELISLVEEIAHQRYSRDIDVAFHYISVKIDEIIALNQKLKSYPSTIAHRQVLQEIIAITRFDGDIYQTLIDDVETEKKLKALTPKLNEKLSQFDNAVRSNVLATSEALNKLNDNTRQLMATGKIVIILIVVASLLLSIIVMKILIDRRLISRLNKLSDDLAHVAKGHLTEPVLIEGQDEIGLLSRRLRRFWRQMKEVEATNALNLINNTDASLITCHHDGRMETVNPSAATLLGIGHEQSNKPLWLLFSGEANTILRAQFSPTSPLYLFGQSESIVSMVKQGKPHFLQFNIREYPHKDEHKYIVTITDITRQELSRLELKHLVALKTQDLQEKNQQLNEEIVRREQAQKHLIQTQEELVQAAKMAVVGQAMTSLAHELNQPLSAINTYLYSVKLTLQMEKYDQLPDPIERIEKLCARMNRIITALRNFSKKSSSEVSYVSAPLQGLVESAMVLVESRSKREQCTIINNIPSELNICADPTQIEQVLVNLFVNAMDAVAGMGESQISVDLLSDEAKYQRVGITDSGKGFNADVLPKLFTPFTTTKDVGLGLGLSICRSIMQRFGYEIYLASALNGGAMVVLEFTHDTVTAV

SEQ ID NO: 68616 - protein, 548 aa, Proteus mirabilis
MKNVNPTHTLAWKALEDHFAVMKDTEMKTLFSQDPSRFNTFSRTFSDQILVDFSKNRITQETLDKLQALAKECDVAGAIKSMFSGEKINCTEDRAVLHTALRNRSNTPVMVDGKDVMPEVNAVLHKMKVFSERVISGEWKGYTGKAITDVVNIGIGGSDLGPYMVTEALRPYKNHLTMHFVSNVDGTHIAETLKKCDPETTLFLIASKTFTTQETMTNAHSARDWFLSAAKESAFVAKHFVALSTNSAEVEKFGIDTANMFEFWDWVGGRYSLWSAIGLSIVLSIGYDNFEQLLSGAHAMDNHFRTTEAENNIPMILALIGIWYNNFFGTETEAILPYDQYMHRFAAYFQQGNMESNGKYIDRDGNKVSYQTGPIIWGEPGTNGQHAFYQLIHQGTKLIPCDFIAPAISHNPLSDHHAKLMSNFFAQTEALAFGKTREQVDAEFASAGKDPATMGYVAPFKVFEGNRPTNSILLKEITPYSLGALIAMYEHKIFVQGVIFNIFTFDQWGVELGKQLANRILPELKGKESVNSHDSSTNNLINRYKAWR

SEQ ID NO: 68617 - protein, 123 aa, Proteus mirabilis
MANQNKGLTRIIKAGGYSYQGLRAAWINEAAFRQEAIVTLIAIILAFFIDVSVLERILLIGSVVLVVILELVNSAIEAVVDRIGTERHELSGRAKDMGSAAVLVAIILGLFTWGTILWHHFFA

SEQ ID NO: 68618 - protein, 174 aa, Proteus mirabilis
MASRGVNKVILIGNLGQDPEIRYMPSGGAVANLTLATSESWRDKQTGEMKEKTEWHRVVIFGKLAEIAGEYLRKGSQVYIEGQLQTRKWQDQSGQDRYSTEVVVNIGGTMQMLGGRGGQDNAPSQGQGGWGQPQQPQASQQFSGGAPSRPAQQPAAAPAPSNEPPMDFDDDIPF

SEQ ID NO: 68619 - protein, 414 aa, Proteus mirabilis
QLSRFGQKFARHSGISRLMQDLNEGIRTPEAVMLGGGNPAHIPEMDSYFHQLLQEMVNNGSLSDAVCNYDGPQGKDAMLNALAICLKEKLGWNISAKNIALTNGSQSAFFYLFNLLGGQSAEGKKRKILFPIAPEYIGYADAGLEEDLFVANKPTIEMLPDGQFKYHVDFEHLTIGDDISAICVSRPTNPTGNVITDDEVKKLDALAKKHDIPLIIDNAYGVPFPGIIFSQATPHWNDNTILCMSLSKLGLPGARCGIIIANEELITAITNVNGIISLAPGGIGPAMALEMLKRDDLMRLSQEIIRSFYHQRVLETIDIIRRYLPKERCLIHKPEGAIFLWLWFKDLPISSEELYRRLKKRGVLMVPGHYFFPGLEESWQHAHQCMRMNYVPEPALIEKGIKILSEEIERAYRQ

SEQ ID NO: 68620 - protein, 301 aa, Proteus mirabilis
MQKFDTKTFQGLILTLQDYWARQGCTIVQPLDMEVGAGTSHPMTCLRALGPEPIAAAYVQPSRRPTDGRYGENPNRLQHYYQFQVIIKPSPDNIQELYLGSLRELGLDPTIHDIRFVEDNWENPTLGAWGLGWEVWLNGMEVTQFTYFQQVGGLECKPVTGEITYGLERLAMYIQGVDSVYDLVWCDGPLGKTTYGDIYHQNEVEQSTYNFEYADVDFLFSCFEQYEKEARELLELEKPLPLPAYERILKAGHTFNLLDARKAISVTERQRYILRIRTLTKAVAEAYYASREALGFPMCKK

SEQ ID NO: 68621 - protein, 690 aa, Proteus mirabilis
MTTETFLVEIGTEELPPKALRSLAESFATHFTAELDNANITHGDVSWFAAPRRLAIKVANMAKSQADRIVEKRGPAIAQAFDAEGKPTKAAEGWARGNGITVDQAERLSTDKGEWLFYRAEVKGEAVNQLLAGMVSNALAKLPIPKLMRWGDKETHFVRPVHTVTLLLGDTLIDGEILGVQSDRIIRGHRFMGEAEFTIDNADQYPEILYERGKVIADYENRKSIILHDARLAAEKLGGVADLSDSLVEEVTSLVEWPVVLTAKFEEKFLEVPAEALVYTMKGDQKYFPVYDKQGALLPHFIFVSNIESSDPQQIISGNEKVVRPRLADAEFFFKTDRKQRLEDNLPRLETVLFQKDLGSLRDKTDRIQALAGFIAEKMGADVNKATRAGLLSKCDLMTNMVFEFTDTQGVMGMHYARHDGEDEEVAVALKEQYQPRFAGDALPSNPVASAVAIAEKMDTLAGIFGIGQHPKGDKDPFALRRAALGVLRIIVEQDLPLDIEELTQEAARLYGDKLTNKNVVSDVVEFMLGRFRAWYQELGYSIDTIQAVLARRPTQPADFNARVKAVTYFRTLEEAAALAEANKRVSNILAKSADVKLNDKVLASVLKAPEEVQLAANLSVLQDKLAPLFAERKYQEALVELASLRDVVNNFFDKVMVMDKDEEIRVNRLTMLHELRELFLKVADISVLQ

SEQ ID NO: 68622 - protein, 96 aa, Proteus mirabilis
MGMKSVNKTQLIDKIAANADITKAAAGRVVDAMVASITESLQKGDDVALVGFGTFTVRDRAARTGRNPQTGKEIQIAAAKVPAFRAGKGLKDAVNQ

SEQ ID NO: 68623 - protein, 784 aa, Proteus mirabilis
MNPERPERIEIPVLPLRDVVVYPHMVIPLFVGREKSIHCLEAAMNDNKQIMLVAQKDASTDEPGVNDLFSVGTVASVLQMLKLPDGTVKVLVEGIRRAKITTLSDNGEYFQAKAEYLDTPVVDEREQEVLNRTAINQFEGYIKLNKKIPPEVLASLHAIEESAKLADTIASHMPLKLKDKQAVLEMSDVTERLEYLMAMMESEIDLLQVEKRIRNRVKKQMEKSQREYYLNEQMKAIQKELGEMDDAPDEMESLKRKIEAAKMPKEAREKTEAELQKLKMMSPMSAEATVVRSYIDWMVQVPWNSRSKVKKDLVKAQEVLDTDHYGLERVKERILEYLAVQSRVSKIKGPILCLVGPPGVGKTSLGQSIAKATGRKYVRMALGGVRDEAEIRGHRRTYIGSMPGKLIQKMAKVGVKNPLFLLDEIDKMSSDMRGDPASALLEVLDPEQNIAFNDHYLEVDYDLSDVMFVATSNSMNIPAPLLDRMEVIRLSGYTEDEKLNIAKQHLLPKQIERNALKENELTIHDSAIMGIIRYYTREAGVRSLEREISKLCRKAVKQLLMDSTIKHIEIDENNLKDYLGVRKVDYGRADTENRIGMVTGLAWTEVGGDLLTIETASVPGKGKLTFTGSLGEVMQESIQAAMTVVRARADKLGINGDFYEKRDIHVHVPEGATPKDGPSAGIAMCTALVSSLTGNPVRSDVAMTGEITLRGQVLPIGGLKEKLLAAHRGGIKTVLIPDENKRDLEEIPENIVADLDIHPVKTIEEVLTLALEKSPFGIEVVTNK

SEQ ID NO: 68624 - protein, 423 aa, Proteus mirabilis
MTDKRKDSSGKLLYCSFCGKSQHEVKKLIAGPSVYICDECVDLCVDIIREEIKELAPHHERSELPTPHEIRKHLDDYVIGQELAKKVLAVAVYNHYKRLRNGDKADGVELGKSNILLIGPTGSGKTLLAETLARYLDVPFTMADATTLTEAGYVGEDVENIIQKLLQKCDYDVQKAQRGIVYIDEIDKITRKSENPSITRDVSGEGVQQALLKLVEGTVASVPPQGGRKHPQQEFLQVDTSKILFICGGAFAGLDKVVAQRLNTHSGIGFGAEVKSQNEKASEGELLAQVEPEDLIKFGLIPEFIGRLPVVATLGELNEDALIQILQEPKNALTKQYQALFKLEGVDLEFRKDALTAIAKKAMSRKTGARGLRSIVEAALLDTMYDLPSFENAEKVVIDENVINGKSEPLIIYSQPENQASGE

SEQ ID NO: 68625 - protein, 1267 aa, Proteus mirabilis
MKRLSKSLLLITLFCLIIFAVVLSGFRYFLPRLDNYRPEIETYLSKQFNSPVTMTQVKGEWQNFGPDIQITGLYIDNNSVEVSAEQITFSFDVWRSLLHFQLYFRELTFEQLAVNYKKPIFTGQNGDITFTEPDDISSIFLKQFDRFKLVDSRFVFLSPSGDTSTLHIPELMWLNQKNRHRAQGEVTLDTPINHYGGLKVRLDLYTKKQGALDKGQVFVTADEVDISPWLSQWVKSNSGLGEAKASLSNWIEISNGRITGSQLQIHQGEMDWRNEGRTHVLKVEDLILRMRRQENGWLADIPYTRKITMDGDEWPDGYLAVLYQPKEKQQDEAWRIRAKNIELERLSALLPLFSFLTPDVVRQWQYRQFSGMVDSFALDLAPDDFKRSAIDISWQNVAWKRWQEIPSVAHFNGHLKGTLQQGALNFALNNSEIDTAGLFKAPLNIEKGTGTVYWQHQGDSLSLWSQGIDIKATSAWVAGDFRYQKQGEHQQLSILSGVNVTDAGETWRYLPEKYVGKDLTQYLSDAIIAGNVKNGTFIFHGDPRDFPFEQHNGWFQVYAPVKQATFKYDSEWPALFDLNVNLNFKNNGLWMSSDNVQVGKATAKNLTAIIEDYNKDKIVIDADIEATGDDLKEYFLASQMATIGHTLEILKVAGKINGSLHLDIPFDGEQVVASGQVNLNNNDVTLAFMDTTLEGVTGQFRYHNDKLESDTLTANWFGQPLTFSFAGGDQRDAYQVGVDLKGQWDIAKIKGLPNDIQHKLSGFLPWHGAVSVNIPETADVNYQVDLTGQVNALQSQLAAPSTDDFKNTSPIVISAKGNSEKLNVSADAQDQWSLNSEWALGEPLRLLQGNLVSSSLTLPQLNDQSRLTIALQGLQGDKWLPTLMAFSSLAPSENAIRFPTNIHISLPELNFAGQQWIAPQTEIMRADDSVKLSFSGSELRGDLFVPNTAQPWQVNITYLYFNGASPTEENKSLKMANVPDAKKAVQFSLKDIPAINFACQECWVNGLLLGNIEGAIQPRDGALLLTAGKLKNSSGELSVSGVWSEDSLGNSITKLAGKLTAPEVDEMAAYFGYIIPIVQSPLTADFSLQWHNTPWNFDLKTLNGEVNASLGKGRIEKVDVGQAGKLLRLVSFDALLRKLQFDFRDTFSDNFEYDSIKGDLTIKQGVLNAKSVAVDGVIADIAIKGQVDLLARKMDLQVVVTPEISATVGVATAFAINPIAGAAVFAASKVLGPLWSKISVIRYHVTGTVEQPKIDEVLRQLKEDQAL

SEQ ID NO: 68626 - protein, 567 aa, Proteus mirabilis
MSQRITIDPITRIEGHLRVDCEIDNGKVVKAWSSGTMWRGMEEILKGSDPRDAWIIVQRICGVCTTVHAIASVRAVEDALGMDIPVNAQYIRNLILASHIIHDHIVHFYQLSAMDWVDITAALQADPEKASAMLKGVSQWQLNSAEEFRKVQKKIQDLVDSGQLGIFANGYWGHSAMKLPPEVNLIAVAHYLQALECQRDANRIVAVLGGKTPHIQNLAVGGVANPINLDAPNVLNLERLMYVKHFIDNLGDFIEQVYKVDTAIFAAYYPEWLKIGKGANYYLSVPELPINGNNTEFLLSGGYMKGVDFSTYRPIKDWKDQNLKDGIEESGKHAWYEDDEPLKPWEGLTRPKYTGWDENNKYSWVKSPTFYGKPVEVGTLAWLVCGLAGKHEGTVKHYNEVNQIYTKLTGQTLVTEQLESTWGRIIGRTVHACVLQDSLNFLWQSLVDNIGRGDTASFIKPEFEPGKEYRGVGFEEASRGMLSHWIVFKDGKITNYQAVVPSTWNAGPRNFNDEPGPYELSLVGTPVADPNKPLEVVRTIHSFDPCMACAVHMVDLTGKELSKVKVL

SEQ ID NO: 68627 - protein, 446 aa, Proteus mirabilis
MNRSGSLSSFLEEVEKYNAHQPEYHQAVREVFTTLWPFLEKNPQYREQSLLERLVEPERIIQFRVCWLDDKGQVQVNRAWRVQFNSAIGPYKGGMRFHPSVNLSILKFLGFEQTFKNALTTLPMGGAKGGSDFNPKGRSHAEVMRFCQALMTELYRHLGADTDVPAGDIGVGAREVGFMAGMMKKLSNSNECVFTGKGLSFGGSLIRPEATGYGLVYFTNAMLKRHGMSLDGMRVAVSGAGNVAQFTIEKCLELGAKVVTASDSGGTVVDEAGFTTEKLARLTEIKNNYGRIEEYAKEFGLTYLEGQQPWAVAVDIALPCATQNELDLDAAKVLIKNGVKAVAEGANMPTTIAATDAFIEAGVLFAPGKAANAGGVATSGLEMAQNAARLSWKAEKVDARLHHIMLDIHHACVNYGGEGKQTNYIQGANIAGFVKVADAMLAQGVL

SEQ ID NO: 68628 - protein, 511 aa, Proteus mirabilis
MNLLKSLAAVSSMTMFSRVLGFIRDAIIARIFGAGMATDAFFVAFKLPNLLRRIFAEGAFSQAFVPILAEYKSQQGEEATRTFIAYVSGMLTLILAIVTVIGIVAAPWVIYITAPGFADSADKFQLTTDLLKITFPYILLISLASLTGSILNTWNRFSVPAFAPTLLNVSMIFFALVVAPYCDPPIMALAWAVLAGGILQLGYQLPHLKKIGMLVLPRISFKNSGVWRVIKLMGPAILGVSVSQISLIINTIFASFLVSGSVSWMYYADRLMELPTGVLGVALGTILLPSLSKSFASGNTQEYQKLMDWGLKLCFLLALPCTLGLALLSGPLTISLFQYGNFNGHDALMTQQALVAYCIGLMGLIIIKILAPGFYSRQDIKTPVKIAIATLILTQLMNLAFVGSLKHVGLALSIGLAACFNAGMLFWQIRKQDIYQPLAGWPIFLLKLAIALAVMSAVLVGMLWVMPDWQQGNMLMRILRLLLVVVAGAASYFVTLYAVGFRPKHFSLRAL

SEQ ID NO: 68629 - protein, 647 aa, Proteus mirabilis
MFQDNPLLAQLKQQLHAQTPRVEGLVKGTDKGFGFLEVDGQKSYFIPPPQMKKVMHGDRIIAAVHTNNDKESAEPEELVEPFLTRFVGRVQKKEGDNRLWIIPDHPLLKDAIPCRPVKSLTHPFADQDWAVAEMRRHPLKGDKHFQAELTDFITDKDDHFAPWWVTLMRHQLERNAPEVDSETLTLHDDLPREDLTALSFVTIDSASTEDMDDALYIRKEENGQLSLYIAIADPTAYIQPNSELDTIAAQRALTNYLPGFNIPMLPRELSDNLCSLRPNEKRPALVCQVGIMEDGALTDEIHFYSAWVESKAKLVYDNISDWLEGEETQWAPENEIVHEQVMLLKEMSEKRHVWREQHALVFKERPDYRFILDDSGNVLDIVAEKRRTANRIVEEAMITANICAAKVLSRNLGFGIYNVHTGFDPLYIDQVSQTLKEHGIETNADELLTLEGFCRLRRELDNQPNQFLDSRIRRFQNFAEIKTEPGPHFGLGLEAYATWTSPIRKYSDILNHRLLKAIISKSAAEKPQDEDCVRIAERRRANRMAERDVGDWLYARFLKPFAGTESTFNAEIIDITRGGIRVRLVENGAIAFIPAPFLHAVRDEIQCSQETGSVIIKGETAYKLNDIIPVRIEDVKLETRNIVARPI

SEQ ID NO: 68630 - protein, 215 aa, Proteus mirabilis
MNRSSNSAFAPTEKKLGLYPVVDSIEWVERLLKIGVTTIQLRIKDKQPKDVEQDIITAIKLGRKYNARLFINDYWELAIKHHAYGVHLGQEDLDIADLDAIKQSGLCLGISTHNDTELQRAKRLLPSYIALGHIFPTTTKDMPSKPQGLRALKHQVEQTHDFPTVAIGGISLEKVSDVVATGVGGVALVSAITKASDWQQVTLKLLELVEGKPSC

SEQ ID NO: 68631 - protein, 249 aa, Proteus mirabilis
MLNDNDFMRYSRQVMLEDIGLEGQTKIQQARVLIIGLGGLGSPASLYLAGAGVGELILVDDDNLHVSNLQRQILYRTQDIPDAKSDIAKQALLALNPDIKITTYKQRVNDDFLSTLLQNIDLVLDCTDNMSTRQAINRICVKQQIPLISGSAVGFSGQLIVFEPPFIHGCYHCLYPDNKEPQRNCQTAGILGPVVGVIGTLQALEAIKLLAGLPSTLSGKLRLFDGRKQNWSTLRLTPSKNCPVCRGLA

SEQ ID NO: 68632 - protein, 151 aa, Proteus mirabilis
MQEGQKRKTSSMSILAIAGVEPYQEKPGEEYMNEAQLAHFKLILESWRNQLRDEVNRTVTHMQDEAANFPDPVDRAAQEEEFSLELRNRDRERKLIKKIEKTLKKVEDDDFGFCESCGVEIGIRRLEARPTADLCIDCKTLAEIREKQMAG

SEQ ID NO: 68633 - protein, 809 aa, Proteus mirabilis
MHLLPIFEVAGSVVTALKQCPQVLLHAPTGAGKSTALPLYLLQQNIFDGKIILLEPRRIAAKSIAYRLASQLNEEVGKTVGYRMRAESKVSQQTRLEVITEGVLTRMLQQDPELAGVSLVILDEFHERSLQADLALALLLDVQSGLRDDLRLLVMSATLDNQKLTSLLPDAPMISSEGRSYPVSRHYYPIQSHLPFEQEVATMARRLLTQETGSLLVFLPGSAEIIRVAQLLADKVDKHTLIFPLYGALSLAQQQQAIEPVEKGYRKVVLATNIAETSLTIEGIRLVLDSTIEKRAQFDLKSGVTSLLRQRISQASQTQRAGRAGRLEAGICWHLISQEQAERGATHQVPEILSSDLSSLWLSILQWGCRDINQLSWLDTPTPAAINAAKTLLQRLGAIDNQGGLTSRGVRMAQWGIDPRLAAILDYASEKSEHHLATAARLCAILEQPPRDREINLEWLIQQKNHQWSQREKQLLQQCKGQCRPELLASLLSVGFADRIAKNRDNQGRFRLANGQGAMMDNTQPMSQSPWILAPLLLQNAHYADVRILLALPIDINEVSSIFPELIQDNTTVEWDEKRGTLLAWQQRQLGQLTVSQMPLDKPNKAQMQTALLNWLRKQGLSALPLSEESKQLFIRLALAQKWCPEANLPVLNEAVLLDSLELWLQPELGDTQSLKALLQMDINGIIKNQLTWHEQQLLQELFPTHYIAPTGTKVMIKYDLDNPPIIAIRIQEVYGEKQSPIVAKGQLPVVMELLSPAMRPIQKTQDLATFWAGSYTQVQKEMKGRYPKHLWPDSPATTAPTRRVKKWS

SEQ ID NO: 68634 - protein, 750 aa, Proteus mirabilis
WLFVKIAIVVAVLVGIYGVYLYSQIKERLDGNVWELPAAVYGRTVNLEPGMNYSQKEMVSLLEGMQYRHVNKITRPGEFVVKNGTIEMLRRPFDFPDGREEQILAKLTFEQNSLVSITNMNNQRQFGFFRLDPKLITMMQSANGEQRLFLARDKFPQLLVDTLIATEDRRFYEHDGISIYSIGRAVLANFTAGRAVQGGSTLTQQLVKNLFLTNERTLKRKLNEAYMAIIMDASYSKDRILELYLNEVFLGQSGDEQIRGFPLASLYYFGRPVDELSLDQQALLVGMVKGASAYNPWRNPKAALERRNVVLKLLQTQQIIDQELYDVLSARPLGVKPRSEAVTPQPAFMQLVRQELQTKLGDQVKDLSGTKIFTTLDPVSQDAAEKAVETGVADLRKTRKINDLEGAMVVVDRLSGEVRALVGGSQPQYAGFNRAMSARRSIGSLAKPATYLTALSEPERFRLNTWLADEPISVPIPGGKPWQPRNYDRGYKGRLMLVDALATSRNVPTVNLGLEVGLDQVIKTWIKLGASAENLEKVPAMLLGALNLTPMEVAQTFQTIGSLGNRAKLSALRSVINQDGTVLYQSYPQAETTVSPQAAYMTLFGMQQVVNSGTAARALKPKFGQYNLAGKTGTTNDLRDSWFAGIDGKEVTIAWMGRDNNGPTNLTGSTGALILYRHYLENQTPLTLNPPVPEDIAQMSINAEGNFVCYGGGVRTLPVWTADPDSLCTPLSQESDGDDSAAPKWLRDLF

SEQ ID NO: 68635 - protein, 586 aa, Proteus mirabilis
MPHSTPLITTIVGGLALAYILGMIAQRLKISPLVGYLAAGVLAGPFTPGFVADTSLAPELAEIGVILLMFGVGLHFSLKDLMAVKAIAIPGAIAQITVATLLGLGLSTFFGWGLFSGIVFGLCLSTASTVVLLRALEERGLIDSQRGQIAIGWLIVEDLAMVLALVLLPAIANMLESSDQTSISQLLINLGITIGKVVAFILIMMIVGRKLIPWILAKTAATGSRELFTLCVLALALGIAYAAVTLFDASFALGAFFAGMVLNESDLSHRAAQDTLPLRDAFAVLFFVSVGMLFDPMVLIEHPLGILATLAIIIIGKSLAALVLVRMFGHSRRTALTISASLAQIGEFAFILAGMGVALNVLEPDARNLVLAGALVSIMLNPVLFSLLDRYLAKTETKEEQEQLQQEEMEEEMPVPVDICGHAIIVGYGRAGSMLAEKLQPQAIPLVIIENSRNKFAELKEKGLNAVLGNAMTKESLALARVDCAKSLLLTIPNGYEAADIAETARKMNPDLNIIVRAHFDDIIVRANYDEEASFILEKGANHVIIDEDQTASAMAEMLIQEVEFGCAIDDTPEEGQQIIAPNAAQ

SEQ ID NO: 68636 - protein, 418 aa, Proteus mirabilis
MDFFRFLMSDVLSEPAILVGLIALIGLIAQKKPATECIKGTVKTIMGFVILGAGAGLVINSLGDFSTIFQHAFGIQGVVPNNEAIVSIAQKSFGKEMALIMFFAMLINILIARLTPWKYIFLTGHHTLFMSMMVAVILATAGLEGAVLVAVGSLVVGVSMVFFPAIAHPYMKKITGSDDVALGHFSTISYVVSGFIGSKFGNKAHSTEEMNVPKSLLFLRDTPVAIAFTMGIIFIITCLFAGDTFVREVSGGKNWFMFSLMQSITFAAGVYIILQGVRMVIAEIVPAFKGISDKLVPNAKPALDCPVVFPYAPNAVLVGFLSSFAAGVIGMFILYALDWTVIIPGVVPHFFVGATAGVFGNATGGRRGAILGAFAQGLLITFLPVFLLPVLGDIGIANTTFSDADFGVIGILLGIIVR

SEQ ID NO: 68637 - protein, 147 aa, Proteus mirabilis
MLKTLLTPDVVQVIPQVKDWREAIKIACQPLIDKGCIEPRYVDAIYKSHEQIGPYYVLGPGIAMPHARPEEGVNQLSLALTIIEKGVEFGADENDPVKLLIVLAATDNDSHINAIVKLAELFDNQDDIDTLLQAKSKAEVLAVINHY

SEQ ID NO: 68638 - protein, 301 aa, Proteus mirabilis
MNILITGGTGLIGRALICQLALDKHNITVLSRSPQKVYSHFCNEMACWTHLDDKENLNQFDAVINLAGEPIADKRWTPEQKQTLVNSRCKLTQKLVDLIKASDSPPSVLISGSAVGFYGDQGENNVTEETPPKDEFTHQLCAKWENIALDAQTPLTRVCLLRTGIVLSTKGGALPKMSPPFKLGLGGKLGNGKQYMPWIHIDDMVNAIVFLLNNNNTQGAFNLTAPHPVQNKAFTTTLAHVLKRPAFMTVPATVLKLMMGESATLVLGGQQAFPKKLLDAGFSFRYPQLEGALEDIIRHKK

SEQ ID NO: 68639 - protein, 297 aa, Proteus mirabilis
HWFFRLFDWHGSVLSKIIFRLCLNIAMSIIAILGLSWYELLVIHLTVAPFSLLGIAIAIFLGFRNNASYSRLVEARTLWGNMLITHRNILRNIKALLPEDKQFNRDFSNLLIAFSWSLKHELRKTNPMVDLYRLLPRPLFDEIMNSPYPTNRILLHIGLKIGELRDNKVISDVIFQSINKDINNLSDVLGGCERISNTPVPFAYTLILQRTVYLFCALLPFALVADLHYMTPFVSVFISYTFLSWDSLAEELEDPFGVSANDLPLNAICNTIERNLLEMQDITPLPIKVKPDQYYNL

SEQ ID NO: 68640 - protein, 300 aa, Proteus mirabilis
MLDPLVRDLLTAINHYDLCITEFIRVVDSLLPPKAFYRLCPELHTQSRTQSGTLVRVQLLGQNPQWLAENAFRAVSLGSWGVDLNCGCPSKTVNGNGGGASLLKQPETIYQATKAMRGAVPADLPVSVKVRLGWDCSSYCHEIADAVEQGGATEITIHGRTKEDGYRADKINWQAIGEIRQKLTIPVIANGEIWCREDAISCLKITGCDAIMIGRGAMHTPNLSNVIKGIEEKMPWSQVIQLLKRYIRLEKQGDTTYYHASRIKQWLGYLRKEYQDADALFSQIRTLKTSPEIAKIIEAL

SEQ ID NO: 68641 - protein, 1075 aa, Proteus mirabilis
MAKRTDIKTILILGAGPIVIGQACEFDYSGAQACKALREEGYRVVLVNSNPATIMTDPEMADATYIEPIHWQVVRKIIEKERPDAILPTMGGQTALNCALELERQGVLAEFGVTMIGATADAIDKAEDRQRFDKAMKKIGLDTARSGIAHTMDEAFAVAEQVGFPCIIRPSFTMGGTGGGIAYNREEFEEICTRGLDLSPTNELLIDESLIGWKEYEMEVVRDKNDNCIIVCSIENFDAMGIHTGDSITVAPAQTLTDKEYQIMRNASMAVLREIGVETGGSNVQFAVDPKTGRLIVIEMNPRVSRSSALASKATGFPIAKVAAKLAVGYTLDELMNDITGGRTPASFEPSIDYVVTKIPRFNFEKFAGTNDRLTTQMKSVGEVMAIGRTQQESMQKALRGLEVGATGFDPKVNLDDPEALTKIRRELKEAGSDRIWYIADAFRAGMSVDGVFNLTNIDRWFLVRIEEIVRLEEQVAQLGLAGLNADFLRQLKRKGFADARLANILNVKEQVIRQLREQYQLHPVYKRVDTCAAEFATDTAYMYSTYEEECESDPNQDKPKVMVLGGGPNRIGQGIEFDYCCVHAALALREDGYETIMVNCNPETVSTDYDTSDRLYFEPVTLEDVLEIVRIEKPQGVIVQYGGQTPLKLARALEAEGVPVIGTSPDAIDKAEDRERFQKAVDKLGLKQPENATVTTLEEAVDKAKSIGYPLVVRPSYVLGGRAMEIVYDEIDLRRYFQTAVSVSNDAPVLLDRFLDDAIEVDVDAICDGQQVVIGGIMEHIEQAGVHSGDSACSLPAYTLSQDIQDIMRKQVRELAFELGVKGLMNVQFAVKGNDVYLIEVNPRAARTVPFVSKATGVPLAKVAARVMIGQSLEQQGVTKEVIPPYYSVKEVVLPFNKFSGVDPILGPEMRSTGEVMGVGATFAQAFAKAMLGSNSTMKKKGRALLSVREGDKKRVVDLATKLLKNGFELDATHGTAIVLGEAGINPRLVNKVHEGRPHIQDRIKNGEYDYIVNTTAGRQAIEDSKLIRRSALQYKVHYDTTLNGGFATTLSLSADPTIDVISVQEMHAKIKKS

SEQ ID NO: 68642 - protein, 387 aa, Proteus mirabilis
MIKSAILVLEDGTEFHGRSIGAEGAAIGEVVFNTSMTGYQEILTDPSYSQQIVTLTYPHIGNTGVNSSDEESATIHAQGLIIRDLPLVMSNYRAEESLADYLKRHQIVAIADIDTRKLTRLLREKGAQNGCIIAGTHLDAKQALEKAKAFPGLKGMDLAKTVTVKQPYQWTQGSWTLKGELPATQSPQDLPLHVVAYDFGVKRNILRMLVDRGCRVTVVPAQTSAQEVLALSPDGIFLSNGPGDPEPCDYAIDAIQTFLTTDIPVFGICLGHQLLALASGAKTVKMKFGHHGGNHPVKDLDNNSVMITAQNHGFAVDEVSLPDCLRVTHKSLFDGSLQGIHRTDKAAFSFQGHPEASPGPHDAAPLFDHFIELIEQYRQNLQSVTNK

SEQ ID NO: 68643 - protein, 273 aa, Proteus mirabilis
MSATELRLAVVGAGGRMGRQLIQAINQQQGVVLGAAFERTNSSLIGADAGELAGIGHIGITVTDNLLAQVGQFDILIDFTRPEGTLSHLAFCVEHHKGMIIGTTGFDEEGKKAINCAAQTIPIVFAANFSVGVNLVLKLLEKAAKVMGSYSDIEIVEAHHRHKVDAPSGTALAMGESIAETLGRDLKDCAVYQRVGHTGERDPRSIGFATIRAGDIVGEHTAIFADIGERVEISHKASSRMTFANGAVKSAIWLSERKSGLYNMKDVLSLEEL

SEQ ID NO: 68644 - protein, 936 aa, Proteus mirabilis
MSDYKNTLNLPETGFPMRGDLAKREPEMLSRWYKEGLYQAIRQAKSGKKTFILHDGPPYANGNIHIGHSVNKILKDIIIKSKGLSGFDSPYIPGWDCHGLPIELKVEQIVGKPGEKVSAAQFREECRKYAYEQIEAQKKDFIRLGVLGDWDKPYLTMDYKTEANTIRALARIIANGHLLKGAKPVHWCTACGSSLAEAEVEYYDKTSPSIDVRFRAVDSNAVAAKFGVVTDKPISLVIWTTTPWTLPANRAIALNGEFNYALVSFDDECVILAADLVEHVMKRIGVTDWAVLGECKGSDLELLRFNHPFMGFDVPAILGDHVTLDAGTGAVHTAPGHGPDDFVIGQKYGLEVANPVGPNGCYLPNTYPTLDGVFVFKANDVIVELLKEKGALLHHEAMQHSYPCCWRHKTPVIFRATPQWFIGMDKNGLRQQSLKEIKGVKWIPDWGQARIESMVENRPDWCISRQRTWGTPMSLFVHKETQEPHPRTLELMEEVAKRVEVSGIQAWWDLDIRELLGDEADDYMKTPDTLDVWFDSGSTHSTVVDARPEFHGNSADLYLEGSDQHRGWFMSSLMISTAIKGKAPYREVLTHGFTVDGQGRKMSKSIGNTVSPQDVMNKLGADILRLWVASTDYTGEIAVSDEILKRSADTYRRIRNTARFFLANLNGFDPAKHQVKPEEMVILDRWAVGRAKAAQEDILKHYENYDFHNVIQRLMQFCSVEMGSFYLDIIKDRQYTAKSDSVARRSCQTALYHIIEALVRWMAPIMSFTADEIWAQLPGERAKFVFTQEWYTDLFGLEASETLNDEYWAELLAVRSEVNKVLEQARTDKQLRGSLEAAVTLYADKALAEKLNALGNELRFVLLTSQATVADIHDAPENALASDMAGLKIVLSKAQGEKCPRCWHYATDIGQVAEHADLCGRCVTNVAGNGEERKFA

SEQ ID NO: 68645 - protein, 176 aa, Proteus mirabilis
MTTIVSVRRNGQVVIGGDGQATMGNTVMKGNVRKVRRLYNDKVIAGFAGGTADAFTLFELFERKLELHQGHLTKAAVELAKDWRTDRMLRKLEALLAVADETTSLIITGNGDVVQPENDLIAIGSGGPYAQAAARAMLENTDLSAREIAEKALNIAGDICIYTNHNVNFEEISSKE

SEQ ID NO: 68646 - protein, 763 aa, Proteus mirabilis
MNHSLLVTKRDGHKERIDLDKIHRVITWAAEGLENVSVSQVELRSQIQFYDGIKTADIHETLVKAAADLISGETPDYQYLAARLAVFNLRKKAYGQFEPPALYDHVKHLVELGKYDRHLLEDYTKEEFEQMDKFIVHQRDMNFSYAAVKQLEGKYFVQNRITGDIYESAQFLYVLVAACLFSRYPKETRMDYIERFYNAVSTFKISLPTPIMAGVRTPTRQFSSCVLIECDDSLDSINATSSAIVKYVSQRAGIGINAGRIRALGSAIRNGEAFHTGCIPFYKHFQTAVKSCSQGGVRGGAATLFYPLWHLEVESLLVLKNNRGVEDNRVRHLDYGVQLNKLMYERLIKGQDITLFSPSDVPGLYDAFFADQDEFERLYVQYEKDKSIRQKQVKAVELFSLMMQERASTGRIYIQNVDHCNTHSPFDPAIAPIRQSNLCLEIALPTKPLNDIKDPNGEIALCTLSAFNLGAIENLDDLEELARLAVRALDALLDYQDYPILAAKQGAMGRRTLGIGVINFAYYLAKHGVRYSDGSANNLTHRAFEAIQYYLLKASNELAKEQGACPWFNETTYAEGILPIDTYKKSLDVLTNEPLHYDWESLRKEIKQYGLRNSTLSALMPSETSSQISNATNGIEPPRGYISIKASKDGILRQVVPEYERLKGAYELLWQMPSIEGYLQLVGIMQKFVDQAISANTNYDPTRFPSGKVPMNQLLKDLLLAYKYGVKTLYYHNTRDGAEDVQGDLEEVVETADSDCEGGACKI

SEQ ID NO: 68647 - protein, 877 aa, Proteus mirabilis
MSDIAREITPVNIEEELKSSYLDYAMSVIVGRALPDVRDGLKPVHRRVLFAMNVLGNDWNKPYKKSARVVGDVIGKYHPHGDSAVYETIVRLAQPFSMRYMLVDGQGNFGSVDGDSAAAMRYTEVRMAKIAHELLADLEKETVDFVPNYDGTENIPAVMPTRIPNLLVNGSSGIAVGMATNIPPHNLGEVIDGCLAYVDNEDITIEELMEYITGPDFPTAAIINGRRGILDAYRTGRGKIYIRAQADIETDEKTGRETIIVTEIPYQVNKARLIEKIAELVKDKRIEGISGLRDESDKDGMRIVVEIKRDAVGEVVLNHLFSQTQMQVSFGINMVALHQGQPKLLNLKEIIAAFIRHRREVVTRRTIFELRKARDRAHILEALAVALANIDPVIELIRQAPTPAEAKAALIAQPWDLGSVSAMLERAGDSNVARPEWLEPQFGVHDGKYYLTEQQAQAILDLRLQKLTGLEHEKLLDEYRELLLQIAELLHILRSPERLMDVIREELTAIKTQYNDPRRTEITENTADINIEDLINEENVVVTLSHQGYVKYQPLTDYEAQRRGGKGKSAARIKEEDFIDRLLVANTHDTILCFSSRGRLYWMKVYQLPEASRGARGRPIINLLPLEQDERITAILPVREYEEGKFVFMATASGTVKKTPLQDFSRPRSAGIIAVNLNDGDELIGVDLTDGSNEAMLFSADGKVVRFAEECVRPMGRTATGVRGMKLVDDDKVVSLIIPRGEGDILTVTENGYGKRTVQSEYPTKNRATQGVISIKVSERNGKVVGAIQVEETDQIMMITNAGTLVRTRVSEVSIVGRNTQGVTLIRTTEDELVVGLQRVEDEDDALDDDEVDEMISDNISDVPESEPTDDADSEEE

SEQ ID NO: 68648 - protein, 332 aa, Proteus mirabilis
MSNDLTGTEKSAVMLLTLGEDRAAEVFKHLTTREVQQLSIAMSSMRQISNQQLIDVMASFEEDAVQYAALNVNANDYLRSVLVKALGEERANNLLDEISETRETTTGIETLNFMEPQMAADIIRDEHPQIIATILVHLKRGQAADILALFDEKLRNDVMLRIATFGGVQPSALAELTEVLNNLLDGQNLKRSKMGGVRTAAEIINLMKSQQEENVITAVRDYDGELAQKIIDEMFLFENLIDIDNRSIQRILQEVESESLVVALKGCDQELRDHFLNNMSQRAAEIMRDDLASRGPVRMSQVEAEQKAILLIVRRLAESGEVVLHGGDDTYV

SEQ ID NO: 68649 - protein, 382 aa, Proteus mirabilis
MAEDSDLEKTEEPTPHKREKAKKDGQIVRSKELSSVLMILGGVSLLWMSGRFITRELYAMLTEGFTFNHHIIGNENLLIPRFASLMKQAVFALSPVFLGLVLVAIGGSAVLGGINFSSKSIKFDPKKWNPISGLKRIFSMNALAELFKAILKSLFVGLAATVFLWHNWNDILHLITLPPLSALANAMQLLIFAVYIAVFMLIPMVAFDIIFQIRSHLKKLRMTRQEIKDEFKQQEGDPQLKARIRQQQHEMSRRRMMADVPKADVIVTNPTHYAVALQYNDKMVAPKVLAKGAGAIALKIKEIGAEHRIPLLEAPPLARALYRHSEIGQAIPATLYAAVAEVLAWVYQLRRWKTEGGLKPKQPMNLPVPPALDFAGEDNRHG

SEQ ID NO: 68650 - protein, 218 aa, Proteus mirabilis
MSGDPIMPKDNVEITSDIISRIGQLTRMLRDSLRELGLDKAIAEAAEAIPDARERLDYVAQMTAQAAERTLNCVEAAQPKQDELSSHATKLTERWDQWFEHPEDLKDVRSLVTDTRNYLRDIPESAAFTNSQLLEIMMAQDFQDLTGQVIKRMMSVVQEIEKQLVMVLMENLPPEQLEKSNAKKETDSLLNGPQVNKNNAGVIKNQDQVDDLLESLGF

SEQ ID NO: 68651 - protein, 129 aa, Proteus mirabilis
MASKDLRFLVVDDFSTMRRIVRNLLKELGFMNVEEAEDGADALAKLQSSAYDFVITDWNMPNMDGLELLKNIRSDAGLATLPVLMVTAEAKKENIIAAAQSGASGYVVKPFTAAILEEKLNKIFEKLGI

SEQ ID NO: 68652 - protein, 166 aa, Proteus mirabilis
MAAEHFEKLSGETVGQGFLIFTLGNEEYGIDILKVQEIRGYDQVTRIANAPSFIKGVTNLRGVIVPIVDLRIKFSQENVTYNDNTVVIVVNLLNRIVGIVVDGVSDVLTLKPEQICPAPEFAVTMSTEYLTGLGTLDERMLILVDIEKLLNSEEMELVDSATIMAK

SEQ ID NO: 68653 - protein, 454 aa, Proteus mirabilis
MTAISGAKPIIRSAETHPLTWRLRDDRQPVWLDEYRAKNGYKAAEKALKSMAPDEVTSEVKDAGLKGRGGAGFSTGLKWSLMPKDESMNIRYILCNADEMEPGTYKDRLLMEELPHLLIEGMIIGAHALKAYRGYIFLRGEYIEAAKHLRHAIEEAKAAGFLGKNIFGSGIDFELFVHTGAGRYICGEETALINSLEGRRANPRSKPPFPATSGAWGKPTCVNNVETLCNVPAIIEHGKDWYIGLSAGKSPDAGTKLMGFSGRVKYPGLWELPFGTTAREILEDYAGGMRDGLKLKAWQPGGAGTDFLTEDHLDLPMDFGTIAKAGSRLGTALAMAVDNEINMVSLTRNLEEFFARESCGWCTPCRDGLPWSVEILRAIEKGQGRPGDIETLEHLCRSLSPGHTFCAHAPGAVEPLQSAIKYFREEFEAGIIQEDYTNANLIRGIQPNLLKSRW

SEQ ID NO: 68654 - protein, 394 aa, Proteus mirabilis
MFSKKSRSTTALLFSSLILTIGRGATLPFMAIYLSRQYKLPVDDIGIAMSISLTTGIVFSLAFGMLADKFEKKRYMVFSIITFIIAFSAIPMVNSTILVVIFFSIINCSYLVFSTVLKAYFSETLSISAKPKIFSLNYTFINIGWTVGPPIGTLLLMYGTQLPFWLAAISASIPLFMIQCFVQRSVVDHSTEENSVKWDPKIMLKDKALGWFVLSTFFGTLTFGTFASCISQYLLVVYDAKLAESAIAVILPVNAAIVVSLQYIVGKQVVAERLRKLMTLGTLFFILGLAGFMLAGDNLIFWAMAIAIFTFGELIYAPGEYMMIDNIAPLGMKASYFSAQSLGWLGAALNPLASGYILTTLPPISLFAILMGIAVLAWLCMLQGMNYSEKRIAA

SEQ ID NO: 68655 - protein, 873 aa, Proteus mirabilis
MSFSTGINSLSGIKINNVKLFIFILALLFSVDSKSEEEFYYNPYFLSDNPESVADLSSFEKGLEVPEGNYLVDIYLNDIFLKTQYINFIENKGQLSPCITKAELKSWNVNLNLITDEQNKDKNNVEQKNELDEHCQSLTSLIAQATANFDVGSQKLNLTIPQVYLVNQSRGFIPPELWDDGIVAGFITYILNGSKTRNDGSPDTHFTHLNLQSGINLGPWRLRDNSIYSYDSINKSSWKHLNTYIERGINKLYSRLIIGDSYTQSEVFDSINFRGFQLSSDEVMLPDSQRGFAPIIRGVARTNAEVTIQQNGYVIYRNSFPPGPFVIDDLYSTSNSGDLEVTITESDGSTQTFTVPYSSVPLLQREGHTKYSVTVGSYRSGNDEQERPYFLQGSVIHGLPAGWTIYGGTQLSKNYQAASIGVGKNIGRFGALSFDITEARSILPDDSTHRGQSIRILYNKSINELGTRVQLAGYKYATSGFYTLAETTYKKMRGNYIQTEDGVVEVSGLPQSYYDLIYNKRQRIQLNITQKIGDQSTLYIIGTNQRYWNSKKQDNQLQIGLNTIIKGINLGLNYSLSKTSWNDSKDQMLVFNTSIPFSNFMRSDNDSIWQNASLSTNSSHNMKKRFNNTIGLNGTLLEDKNLSYNIQTGYSHEEESDSTGYASLSYNGSYMNSNIGYNYTDTSHQINYGMSGSILAHSGGITLSQPIYQTAVLVKVPEVKNIKLENNSGITTDSNGYAVLPYVSEYKENRIALDTNSFSNNIEIDNAVKSVVPTRGAISAITFEPSVGIKAITTLTHKGKPVPFGAIVDSGNNTGIVADEGKVYLTGLSPSGQLKVNWGSKKEQQCLVNYTLPPQDPDKLYVEYSAECHPIKE

SEQ ID NO: 68656 - protein, 232 aa, Proteus mirabilis
MNSILTFSKIKLLFLMLLTLCVINQAYAAVSLGATRVIYFAGEKQVKLPVINNDEKRYLIQSWIENSEGKKDNSFVITPPLFSMQGKKENTLRIIDATNNKLPKDRETLFWLSVKSIPAVEKSLANENMLQLAIISKIKFFYRPKDLTISPDENYKKLQFKRNNDTLIIKNPTPYFITMTELELGGKKLENTMVPPFEDKSISIPTSAYGKLSFQTINDYGAITPKTIVDVR

SEQ ID NO: 68657 - protein, 188 aa, Proteus mirabilis
MKLNYLKLFVISALSVGSVFAVSAEDPVGNGPVTVNGGEIFFKGELVNAACAVDSSSDGQIVKLGQVRTAKLAKAGDFSENTNFTIQLNDCDSKVASTAKVAFTGVSAAGQDDVLAVSSSSAGGAKNVGIQILDSKSAPMSFDGAGFGNATKLHDGKNIIPFQARYYALGATEPGIANANATFAVQYE

SEQ ID NO: 68658 - protein, 525 aa, Proteus mirabilis
MKPLFTVIPTLLLTLACVFPAFANQSNNILDYASTKDIRDINPHLYSGEMAAQNMVFEPLVLNTDKGVAPYLAQRWEISPDGKSYTFFLRQDVTFSDGEPFNAQAVKLNIEAVLDNYQRHAWLELVRQIDSVEVIDQYTVKLNLKNPYYPTLTELGLTRPFRFISPKSFINGKTKTGVSHYIGTGPWVLTEHKKDQYAEFKVNPHYWGQKPALTGVMWRVIPDRQTMLLSLQKGDIQLIFGADGDMLDMDSFDALMASDKFKTQMSAPIASRAIVLNSSRPITSSQKVRQALEYAVDKEGIAQGILAGSEKVADTLMARSVPYCDFDSPTYIYQPEKAASLLEEEGWLLPAGKTVREKQGKPLQLLLSYNVNNAVEKEIAELLQDDFKKIGVALTVLGEEKQAFLDRQKSGDFDLQYSLSWGTPYDPASFVSSFRIPAHADYQGQKGLANKAQLDAMIGELLITPDEHRRQALYQRLFTSLAEQAVYIPLTYSRTKAIYRSELENVGFNPSQYEIPFEKMRFKAE

SEQ ID NO: 68659 - protein, 287 aa, Proteus mirabilis
MLKYRVITALILIPIVIAALFLLPPAGFGLVIIAISGLAGWEWAQFIGWHSQGKRIATGVGFAALLVLMQASLPDFDHLLDTAMIKNSLWAGLFWWVAAILLVVSYPNSANMWKNSVLLKLLFGILTIVPFYCGMMALRMLGYSTNSYTGAWWLLYVMLLVWAADSGAYAFGRLMGKHKMAPKVSPGKTLEGLVGGLITAGVVSWLFTRFAPITEVPNHLLLISGIVVIVSVFGDLAESMFKRVSGIKDSSQLIPGHGGVLDRIDSLTAAIPVFAGLVFLVSSGFQM

SEQ ID NO: 68660 - protein, 185 aa, Proteus mirabilis
MINEIKKDAQERMDKSVEALKSQINKVRTGRASPNLLDGIVVEYYGAPTPLNQVANVVAEDGRTLAITVFDRTLAPAVEKAIMASDLGLNPSSAGAIIRVPLPPLTEERRKDLIKVVRGDAEQGRVSIRNIRRDANDKIKALLKDKEISEDDERRSQDEIQKLTDMFIKKIDEALTLKEAELMEF

SEQ ID NO: 68661 - protein, 425 aa, Proteus mirabilis
MTPDDIAFDLRHIWHPYTSMSNPLPAYPIVSAKGVELTLANGKQLIDGMSSWWAAIHGYNHPELNTAVTEQLAAMSHVMFGGITHPPAVALCRKLLAITPAPLECIFLADSGSVAIEVAIKMALQYWQAKGEKRQRIVALKRGYHGDTFGAMSVCDPDNSMHSLYKGYLPNHLFVEAPKTGFYQPWDATDIDALRTTLAQHHQHIAAVMLEPIVQGAGGMRIYHPEYLTQARALCDEFNVLLIADEIATGFGRTGKLFACEHAGISPDIMCVGKALTGGYMTLSATLTTRHIADTISQGDAGCFMHGPTYMGNPLACAVANASLSLLEQGHWVNQVAQIEDQLKTELLPLKQAKSVKDVRVLGAIGVVEMVEPVNMAKLQKYFVDEGVWIRPFGQLIYIMPPYIISPEKLTKLTQAIEKAVNLTN

SEQ ID NO: 68662 - protein, 458 aa, Proteus mirabilis
MKIIILGAGQVGGTLAENLVGENNDITVVDTDATRLRQLQDKFDLRVVNGHGSHPRVLREAGAEDADMLVAVTNSDETNMIACQVAYTLFNTPNKVARIRASEFVREADKLFLPEAIPIDYLISPEHLVIDYIYKLIQYPGALQVVNFAEGQVSIVAVKAYYGGSLVGNALSTLRDHMPHIDTRVAAIFRQDRPIRPQGSTIIEAGDEVFFVVASQHIRAVMSELQRLEKPYKRIMIVGGGNVGAGLAARLEKDYSVKLIEHNQQRATELAELLHDTIVFYGDASDQELLAEEHIEQIDVFIALTNDDEANIMSAMLAKRMGAKKAMVLIQRSAYVDLVQGGVIDIAISPQQATISALLGHVRKADIVSVSSLRRGVAEAIEAIAHGDENTSKVVGRRIQDIKLPPGTIIGAIVRNEDVIIANASHSIEQGDHVIMFITDKKYVPEVEKLFQPSPFFL

SEQ ID NO: 68663 - protein, 128 aa, Proteus mirabilis
MRHRKSGRQLNRNSSHRQAMFRNMAGSLVRHEIIKTTLPKAKELRRVVEPLITLAKTDSVANRRLAFARTRDNEVVAKLFTVLGPRFASRAGGYTRILKCGFRAGDNAPMAYIELVDRADSETEAAAE

SEQ ID NO: 68664 - protein, 329 aa, Proteus mirabilis
MQGSVTEFLKPRLVDIEQVSSTHAKVTLEPLERGFGHTLGNALRRILLSSMPGCAVTEVEIDGVLHEYSTKEGVQEDILEILLNLKGLAVKVHGKDEVILTLSKSGIGPVIAADIIHDGDVEIVKPQHVICHLTDENASINMRIKVQRGRGYVPASARIHSEEDERPIGRLLVDACYSPVERIAYTVEAARVEQRTDLDKLVIEMETNGTIDPEESIRRAATILAEQLEAFVDLRDVRQPEVKEEKPEFDPILLRPVDDLELTVRSANCLKAEAIHYIGDLVQRTEVELLKTPNLGKKSLTEIKDVLASRGLSLGMRLENWPPASIADE

SEQ ID NO: 68665 - protein, 471 aa, Proteus mirabilis
MTRYEQLAAQIRQQIEDNIWQSGDRLPSLRDTVKQSGLSLMTVLQSYQLLESQGWITARPQSGYYVAHRNTGFAQVTASKGLHMSENVEISASIFNVLQACKDPNIIPFGSAFPDPSLFIQPKLSRALASAARHLAPQSSVINLPPGNEKLRRNIAQRYALQGIHVSPDDIVITAGAMESLSFSLQAVTEPGDWVVIESPAFYGALQAIERLRLKAIAIKTDPVTGICLDELEKVVEQYDIKACWLMSHCQNPLGGTMPDENKIRLVEILAAKQITLIEDDVYGELYNSPKAPMPVKGFDKSNSVLHCASFSKCLAPGFRVGWVAAGKHATKIQQLQMMSTVSASMPTQQAIADYLSQGGYDGHLRRLRLLLEQRRYRMLQAIQTHLPKDVKVNIPVGGYFLWLEFEPSFDANSLYHFALERGVSIAPGAMFSTSSQFNHAFRLNSSFQWNGQTEKGMQIIGEGCRKLRRK

SEQ ID NO: 68666 - protein, 325 aa, Proteus mirabilis
MRKILHYIVLALGLFIITLNVSAQAPENFTKAKQLAREHIYYDQNQNNQGTLYCGCHWEWVGKSGGRVNLASCGYQVRAQATRASRIEWEHIVPAWVFGHQRQCWQNGGRANCVKNDPIFGKIEADLHNLAPSIGEVNGDRSNFSFGQLSSQAPYQYGQCRSRVDFASRTFEPRNEVKGQVARVYFYLHDRYNLSMSRQQQQLFMAWDKAYPPTPWERERDNRIANIVGHHNPFVTGQMKWQLGHKNSGAGLTATYRPTTDKIGMPKAPTVSQDEQIKGNLNSKIYHFSHCTGYRTMSDKNAVYFKTENEATKAGYRLANNCKAL

SEQ ID NO: 68667 - protein, 396 aa, Proteus mirabilis
MRKLNPYFGEFGGQYVPEILIPALDQLEQAFIDAQNDPSFQQEFQDLLKNYAGRPTALTLCRNLTQGTRTRLYLKREDLLHGGAHKTNQVLGQALLAKRMGKTEIIAETGAGQHGVATALACALLNMKCRIYMGAKDVERQSPNVFRMRLMGAEVIPVHSGSSTLKDACNEALRDWSGCYERAHYLLGTAAGPHPYPTIVREFQRMIGDEAKAQILAREGRLPDAVIACIGGGSNAIGLFASFIPETSVQLIGVEPAGKGIETGEHGAPLKHGKLGIYFGMKSPIMQTEEGQIEESYSISAGLDFPSVGPQHAHLNSIGRADYVSVTDDEAIEAFKTLSRREGIIPALESSHALAYALKLIAQNPDKEQLLIVNLSGRGDKDIFTVNDILAARGEI

SEQ ID NO: 68668 - protein, 457 aa, Proteus mirabilis
MTVLNAIVKDKAEYLVARKAQQPLSTFIDKIAPSTRSFYQALTRSHPVFILECKKASPSKGIIRSDFDPVAIAKIYQPYAAAISVLTDEKYFQGSFDYLRQVSDAVHQPVLCKDFIIDEYQIYLARFYQADAILLMLSVLNDEQYRALSAVAHQLNMGVLTEVSTEEERQRAIELKAKVIGINNRNLRDLSIDLSRTEQLSQGLPQEAIVISESGIHTHQQVKTLSQYANGFLVGSALMSQENIAQAVRALILGKHKVCGLTRTQDVKAAYQVGAYYGGLIFAEKSPRRVTLSQAQLLITQAPLAFVGVFQNQSIELICDYAKQLNLSAVQLHGAEDAQFIAQLREKIAPQYEIWQALNMAYHHDIQHIAQVNKYVLDNGTGGTGRTFDWQTIPPTLRHKALLAGGLNSDNCLDALNTGCLGLDFNSGVESSAGIKDPQRLSQVFTQLQQSKFSQNF

SEQ ID NO: 68669 - protein, 332 aa, Proteus mirabilis
MDTIFNKLFAGQQLSLEESQTLFSAIIRGELTESQLAAVLISMKMRGEHPQEIAGAARALLDNASPFPRPDYLFCDIVGTGGDGANSINISTASAFVAAEIGLKVAKHGNRSVSSRSGSSDLLAAFGIPLDKSANDARQLLDEIGLCFLFAPLYHSGFRFAAPVRQQLRTRTLFNVLGPLINPARPPLALIGVYSPELLMPIADTLNVLGYKRAAVVHSGGMDEVSLHAPTQVAELHNGEITRYQLTPSDFGLRPCAISDLEGGTPEVNRQLLANLLQGQGKRAHTESVAANVALLMRLHGQEDLKANTEVAMHAIYSGKTINRVNALAARG

SEQ ID NO: 68670 - protein, 286 aa, Proteus mirabilis
MTELLSDLRVIYDLHSHTTASDGELSPDELIDRAIEKQITVLAITDHDTTAAIQPAKNYIAEKSLPLTLISGVEISTLWENIEIHIVGLQIDIEHQAMTTCLAKQSQCRETRAKMIGERLAKAGIAGAWEGASALAKGGQVTRGHFARFLVNEGHVASVNKVFKRYLAKGKTGYVPPQWCSIGDAVTAIHQAGGVAVLAHPGRYGLSSKWLKRLVLYFKQQGGDAIEVAQCQQPPQEREQHAALAQAYDLKASLGSDFHRPCSWIELGRNLWLPANVEPVWTLWQG

SEQ ID NO: 68671 - protein, 675 aa, Proteus mirabilis
MSHVANKLLVTCALPYANGSIHLGHILEHIQADIWVRYQRMRGKEVHFICADDAHGTPIMLKAQQLGITPEAMIEEMSKEHQQDFAGFNISYDNYHSTHSEENRQLSTKIYLALKKNGHIKSKTISQLYDEEKGMFLPDRFVKGTCPKCKAPDQYGDNCEVCGSTYSPTELINPRSVVSGSTPVMRETEHYFFDLPAFSNMLQEWIRSGALQEQVANKMQEWFDSGLQQWDITRDAPYFGFEIPDAPGKYFYVWLDAPIGYMGSFLNLCEKRGDLSFDEFWNKESKTDLYHFIGKDIVYFHSLFWPAVLEGSEYRKPTNLFVHGYVTVNGAKMSKSRGTFITARAYLDHFDADCLRYYYAAKLSSRIDDIDLNLEDFVQRVNSDIVNKVVNLASRTAGFISKRFDGKLAASLDDAKLYQHFVDMQESIAQCFENREFGKAIREIMALADEANRYIDEKAPWVVAKQEGKEAELQAICTMGINLFRVLMTYLKPILPSLTERSEAFLQTELTWNALSQPLLNHEITKFKALFNRIEMDKANAMVEASKSTIAPVKEITGPLADAPIQETIKFDDFAKIDMRIAEIKQADFVDGSDKLLKLILDLGGETRQVFSGIRSAYPDPKVLEGRLTVMVANLAPRKMRFGISEGMVMAAGPGGEDIFLLSPDSGAKPGHQVK

SEQ ID NO: 68672 - protein, 643 aa, Proteus mirabilis
MKRFLTTLAILLVVILAGLTTLVLLINPNDFRGYLVERVEKQSGYKLTLQDDMRWHVWPKLSIISGKMSLTAPGAEQPLITADNMRLDVELWPLLSHQLEVKEVMLKGAVVRQTPESKAIPKITPPSVANEDSTRPIIEPKTNRWQLNIAKVRISDSLIIWQTKGGEQLNLRDINLLLKTDDKKQINLEMSTKINRDRRELMLNVVANADMSGYPYQISGNIAQLDYALSGIGLPAQGISGNLTSDFNIKNDSINVIALNNLNMTANESQLQGSITAELAKKNRYQVELTGDTLNLNTLLPELAQPNSSETASLTLANTPSRSFSFFSHAQAAPSPNATIMARPVITSATIENKAYDLTHWGDIEFSLNLALNKLLYKELEINNVKLTALNNPKSLNIDRLEGQILNGDFSLPTVISTSIVPAHISMNVTMNNIPLQPLLRVFDQPENFSGLISAKGHLEGAGYNRNAFLNSWQGTLDTSLSEFKMLGLNIPQVIQQSIAQTTDQVVYPEDIENYTKADSVIALFKLAPKGRVTLNQLDAQASAYQISGQGQLDLQRHNLDVMLMVNIKKGWGKENEFIRQLAKIDIPLRLYGNWNAIQYEFNVEKLLRDQLQQKAKQAIDNWLNKQDDSPEVKALNQLLKKI

SEQ ID NO: 68673 - protein, 308 aa, Proteus mirabilis
MTKQADYIWFNGEMVPWAEAKVHVMSHALHYGTSVFEGVRCYDSHKGPVVFRHREHMQRLHDSAKIYRMPVAQSVDELMEACRETLRKNQLVSAYIRPLVFIGDVGMGVNPPEGYKTDIIIAAFPWGAYLGEEALDKGIDAMVSSWHRAAPNTIPTAAKAGGNYLSSLLVGSEARRHGYQEGIALDVHGYLSEGAGENLFEVKDGVIFTPPFTSSALPGITRDAIIKLAKDLGYEIREQVLSRESLYLADEVFMSGTAAEITPVRSVDGIQVGIGRCGPVTKAIQKAFFGLFTGETEDKYGWLDPVNP

SEQ ID NO: 68674 - protein, 495 aa, Proteus mirabilis
MFTIPQIGEDVMEKKKLTTAAGAPVVDNNNVITAGPRGPMLLQDVWFLEKLAHFDREVIPERRMHAKGSGAFGTFTVTHDITKYTRAKIFSEVGKKTEMFARFSTVAGERGAADAERDIRGFALKFYTEEGNWDMVGNNTPVFYLRDPLKFPDLNHIVKRDPRTNMRNMAYKWDFFSHLPESLHQLTIDMSDRGLPLSYRFVHGFGSHTYSFINKDNERFWVKFHFRCQQGIKNLMDDEAEALVGKDRESSQRDLFEAIERGDYPRWKLQIQIMPEKEASTVPYNPFDLTKVWPHADYPLMDVGYFELNRNPDNYFSDVEQAAFSPANIVPGISFSPDKMLQGRLFSYGDAHRYRLGVNHHQIPVNAPKCPFHNYHRDGAMRVDGNSGNGITYEPNSGGVFQEQPDFKEPPLSIEGAADHWNHREDEDYFSQPRALYELLSDDEHQRMFARIAGELSQASKETQQRQIDLFTKVHPEYGAGVEKAIKVLEGKDAK

SEQ ID NO: 68675 - protein, 557 aa, Proteus mirabilis
MYLERVEIAGFRGLNRLSLPLDMNTVLVGENAWGKTSLLDALTLSLGIETYQYAFTAEDFHRLPNEPENSKKNLQIILTFTESRPGRHRSYRFRKLAPVWIANGDARKHIYYRISAELDEQQNVKTFRYFLDKEGKQIRLANGQTKAIIAEIVRLYPVLRLQDARFIPNLTTEVIDSHNEPHREAFNNKMSELTKALINNPDNLSDEDLREGLDAMQQLLGHYFADHGALLFKSHLKHRKVSEPHIRGWHALENINKILAKPNQRNIRLIILGMFSSILQSRGSVELDPYARPIVIVENPETRLHPIMLSVAWGLLNLFSLQRITTTNSGELLSLAPLQSVCRLVRDTDKVAAYRLGDKQLHAEEERRISFHIRYNRPSALFARCWLLVEGETEIWLMNELARQCNYFFESEGIKVIEFAQCGLKPLLKYATYMGIEWHTLVDGDEAGKKYAATVKEFAAKRNDAERDRLTRLPALDMEHYLYKEGFRNVYHEVAGVPDNEKWPVRRVIIKAIQRSSKPDLALTVANNAAQRGIDAIPTLLKVMFSRVAWLARGKAN

SEQ ID NO: 68676 - protein, 72 aa, Proteus mirabilis
MAKEDNIEMQGTVLDTLPNTMFRVELENGHVVTAHISGKMRKNYIRILTGDKVTVELTPYDLSKGRIIFRSR

SEQ ID NO: 68677 - protein, 245 aa, Proteus mirabilis
MDVNFYVTCIGDALKSQMARDSVLLLEKLGCQVHFLEKQGCCGQPAINSGYIKDAIPAMKNLIKTFEVNDYPIISPAGSCSFAIKSYAKYLVNEPDWAIRAEKIANRMFDLTSFIVNQLNIVDVGASLKGKAVYHPSCSLFRKMGVKEEPLTLLRHVKGLELLPFDNMETCCGFGGTFSVKMAEISGEMVKEKVHHIMDVHPDYLIGADVSCLLNIGGRLEREGRPVKVMHIAQVLMSNEEELCH

SEQ ID NO: 68678 - protein, 730 aa, Proteus mirabilis
MLSKDPKSTPIDPVSVLKDEAINQVKNRVQSKVNETLSTPTQKVAGMASAEASLTQSASASANRVTAHPLIHGGGFTGGQTFAENQALQAAHGALLDALGMDSLESGLVFTCTIGGLPDDTFQITEFNLTEGLSSLFSLSISAVSALPFIDFQRHLGLASSLTVKRDGVLIRKVNGILAGAVQGNTDGVKTWYHFDIRPEMWVMTLNQDSRIFQHQSVPTILKTLLDEAHVKADCQFYREDLHPERLYTTQKRESAFDFWCRLAFEEGINFWFEEEQLFYSDEHMGMTAGIHLTYNPQADTDISDSTAMTWQYGEYLCVDETIHKDNNFVRPSYPLSHENKIEQGGQHSVFESYGRFQLDDEGRPLTQVRFEQLRNGSKVGQATTNCFALMPGKIFTLSQHPHQPMNDRWQVISVSHHGVQPLADNSGGEGTQLSNSVSFIPGTQEWRPPYRYKPTADGDEVATVVGPPGEEIYVNEYGAVKVHFHWDRRGSADHSASCWVRVAMGWSGNGYGFSAVPRIGTQVLVSYLNGDIDRPIVTGCTYDGRNAPPIKFPENKTQTTFRSQTHKGEGFNELRFEDAGGKQEVFLHAQKDMNTVVQNDKGTTVGANHTETVMQNQKISVHGTQTTAVQADQKNIVFGKQHSIVDGEVLIASAQGIRLISGNSALQLNPDGTITLVCNNFDFYGHGSGRIGTGELLDLNMDGAGPGNLKMEPDTSTIAQAKDQFFPKK

SEQ ID NO: 68679 - protein, 510 aa, Proteus mirabilis
MTTETNKSNSEKKYIVALDQGTTSSRAVVIDHDANIVSISQREFTQIYPKPGWVEHDPMEIWATQSATLIEVLAKEDIPSDHVAGIGITNQRETTIVWEKETGKPIYNAIVWQCRRTADFCTRLKDQEGVEEYIRQNTGLMVDPYFSGTKLKWILDNVEGARERAEKGELLFGTVDTWLVWKMTQGRVHVTDYTNASRTMLFNIHSLDWDQKILDLLNIPRNMLPKVVPSSEVYGQTNIGGKGGTRIPIAGMAGDQQAALYGQLCVQSGMAKNTYGTGCFLLMNTGKEAVRSNHGLLTTICCGPRGEVNYALEGAVFVGGASIQWLRDELKLIDEATDSEYFATKVNDTNGVYVVPAFTGLGAPYWDPYARGAIFGLTRGANRNHIIRATLESIAYQTRDVLDAMQADSGARLQALRVDGGAVANNFLMQFQSDILGTRVERPVVRESTALGAAFLAGLAVGFWSDLEEVKNKAEIDKEFRPGIETTERNYRYNGWKKAVARAQEWEDRG

SEQ ID NO: 68680 - protein, 344 aa, Proteus mirabilis
MHENTPTDKTLKNKQTQGIQGNYPLNRFSVAPMLDWTDRHCRYFFRQLTKNTLLYTEMVTTGAIIHGKGDYLKYSNEEHPISLQLGGSDPQALAQCAKLAQERGYDEINLNVGCPSDRVQNGRFGACLMGEAQLVADCVKAMRDVVDIPVTVKTRIGIDNQDSYQFLCDFIDTVSRDNNCDTFIIHARKAWLSGLSPKENREVPPLDYPRVYQLKRDFSHLTMAINGGIKSLEEAQEHLKYMDGVMVGREAYQNPSILAHVDHVLFDNQLPVTNAVAAVKAMYPYIEKELSQGTYLGHITRHMLGIFQGIPGARQWRRHLSENAHKQGADLTVLENALKFVTEK

SEQ ID NO: 68681 - protein, 327 aa, Proteus mirabilis
MAKRIQFAAHGNADVLELTSFTPAPLGDNEVQVANKAIGINYIDTYVRSGLYPVEHFPSGLGTEAAGVVIKTGAHVTSLKEGDRVVYAQSPLGAYSDTHNVPENKVARLPDNISFEQAAASFLKGLTVYYLFNETYKLRAGETFLFHAAAGGVGLIASQWAKAIGAKMIGTAGSDEKVAKAKAAGAWKVINYQTESIVERVLALTNNQKVPVVYDSVGKATWLDSLHCLQRRGLMVSFGNASGAVTGVDLGILNKLGSLYVTRPSISGYITTREELDAASEALFTLIGRGKIDVSVPDNQKFALADAKAAHRYLESRQSQGSSLLIP

SEQ ID NO: 68682 - protein, 451 aa, Proteus mirabilis
MEGLKLPPHSLEAEQSVLGGLMIDNERWDNVSERVTADDFYSRPHRTIFAQMQRLLELGKPIDLITLSEALEQNAELESVGGFAYLAELSKNTPSAANINAYADIVRERAVVRDMIKVANEIADAGFDPQGRTSEDLLDFAESRVFQIAETRANKDEGPKAIDAILEETVEKIEQLYQKPHDGVTGVSSGYQDLDKKTAGLQKSDLIIVAARPSMGKTTFAMNLCENAAMTEEKPVLIFSLEMPGNQIMMRMLASLSRVDQTRIRTGQLDDEDWARISSTMGILLEKRNMYIDDSSGLTPTEVRSRARRIYREHGGLSLIMIDYLQLMRVPSLSENRTLEIAEISRSLKALAKELQVPVVALSQLNRSLEQRADKRPVNSDLRESGSIEQDADLIMFIYRDEVYHENSDLKGVAEIIIGKQRNGPIGTVRLTFNGQWSRFDNYAGPAYDDE

SEQ ID NO: 68683 - protein, 363 aa, Proteus mirabilis
MKAATAVIDRRALRHNFQHVRDYAPHSHLIAVVKANAYGHGLLETAYTLMDDADCFGVARIGEALTLRSGGIVKPILLLEGFFDAVDLPILVVNHIETVVHSEEQLEALENADLEEPVKVWMKLDTGMHRLGVRPEEAEAFYQRLCACKNVQQPVNLVSHFSRADEPDIPEVTQNQIQLFQTFIQDKAGDKSIAASAGILFWPQVHYQWVRPGIITYGISPTGDNRTGKDFGLTPAMTLKTSLIAVRKHKAGEPVGYGGTWVSEKDTYLGVIAIGYGDGYPRSAPSGTPVWINGRKVPIVGRVSMDMISVDLGSELIDRVGDEAILWGDVLPVEEIAKYSGISAYELITKLTSRVIMEYLDEQ

SEQ ID NO: 68684 - protein, 260 aa, Proteus mirabilis
MTKFDFHVFNIKINSLSFYKVQTMNEQNFLANYNRRDFLSPLITVDSVLFTYHEGQLKVLLVERANHPEKGKWGLPGGFVDETQDNCLEDTVLRKLKEKTGVIPPYIEQLCSVGNNQRDVRGWSVTVCYTALIAHQACKAHIDSVDHVMWLPIDEVAQKNLAFDHNELIAQARERLKQKSLYSIVPGFALPEVFTLPELQHVHEILIGKEIQKKSFRRRIEQADLLIDTGEKRAEKGRPASLYRLKKSSADYRFIRNLEF

SEQ ID NO: 68685 - protein, 341 aa, Proteus mirabilis
MVSTHIGFPTETVIVFVVLAIGAIFIDLFMHRADKPITLKNAVFWSIFWVVVAMAFAGFLYVHHGAEVASLFVTGYALEKVLSVDNLFVMMAIFSWFAVPDRFRHRILYWGIIGAIVFRAIFVAIGTGLLSLGPYVEIVFALIVAWTAVMMLRSGNDSEEIEDYSQHLAYRLVKRFFPIWPKITGHAFLLTQKEVDAELAKPENKDITIGRGTKAALYATPLMLCVAVVELSDVMFAFDSVPAIIAVSREPLIVYSAMMFAILGLRTLYFVLEALKQYLIHLEKAVIALLFFIAVKLGLNATDHIWQHGYSISATTSLFVVLGVLALGILASFVFPEKKNK

SEQ ID NO: 68686 - protein, 838 aa, Proteus mirabilis
MNRKKIVSFKINLLVFSVLSTLNMATVVQADPSAHIVVQQQQKNSSVDILNIAAAINGYSSNSLTSFDVSEAGLILNNSPDGADTQLSGHIDGNSNLSSGAAKEITLEVNAKKAITLNGPVEVAGTKARVILSNPAGIICSSCNFLSADRVVLTTGKVNTQNDTVDSYKVEKGNITVKGNATFDKSAQQIDLIARNVSIESPLDASGINVNVITGANEVKAQDNTVVAQKPTGVASKYSLQIVKNAGVRSSSLKFIGTEANSPLKNNGNVETAGGGIELIHSGALDNNKGNFLSEGDIYFAFDKGVTNSTGEIQSTKTISIETKEAKVDNISGGNISADGNVIINSGEFKNNASYIASKDKLDIQTNGKPITNTATVGEGVGISATNGIKINSGLFNNKEGQINSKSVIDINTNLKDFNNIDAYIDASGDISINSGAMNNTHSRLRSVTRVEIDTNGKALKNTGMTADTASDDSLGILSGLDGMTVNIAGLNNDQGIIATDGDMNFTNKGDITNKWGHIKSGGYLTFSSDKIKNLYGGLASKTGANVTFSQTLDNNFGVFYLEGDSVTISAPYINNNKGVIKGDAIYFKTDKFNNTSGFVITEQKLEIDTPELTNNSSLDFKTEMGFYLGQPDQKGGLISKGEMKLSGNKLVSNKGRIVTENGDMELKFTSVDNTSGTIASHKNASVVTSTFTNSQGTLFGQDKLTLQTDTLKNNSTGSVESNTLKGVIASSGDTEVTVNRDFENNGVISGVEHLRVNINGKYTNASNSIMSGKNSFELGVTGNIINRGILNSIKDTTISGENITNEKSGIIVGRESITIDNKGTFTNKGKVVGPLNK

SEQ ID NO: 68687 - protein, 160 aa, Proteus mirabilis
MRIGHGYDVHKFGGEGPIIIGGVRIPYEQGLLAHSDGDVVLHAVTDAILGAVAMGDIGTLFPDTDPAYKGADSRVLLREAFSRVMAKGYRIGNLDVTIIAQAPKMLPHTPQMRVNIAEDLHCHVDDINVKATTTEKLGFVGRKEGIACEAVVLLIKESLS

SEQ ID NO: 68688 - protein, 555 aa, Proteus mirabilis
MAQYVYSMLRVGKVVPPKRHILKNISLSFFPGAKIGVLGLNGAGKSTLLRIMAGIDTDIEGKARPQPGLKIGYLPQEPKLNPQQTVREAVEEAVSEVKNALNRLDEVYAAYADPDADFDQLAKEQGQLEAIIQSHDGHNLDNQLERAAEALRLPDWDAKIEHLSGGERRRVAICRLLLEKPDMLLLDEPTNHLDAESVAWLERFLHDYEGTVVAITHDRYFLDNVAGWILELDRGEGIPWEGNYSSWLEQKDARLEQEAATEAARHKSIQKELEWIRQNPKGRQAKGKARLARFEELNSVDYQKRNETSELFIPPGPRLGDKVLEVSHLTKSYGDRVLIDDLSFSIPKGAIVGIIGPNGAGKSTLFRMISGQEQPDSGTVTLGETVKLASVDQFRDSMDDSKTVWEEVSGGQDIMRIGNFEIPSRAYVGRFNFKGVDQGKRVGELSGGERGRLHLAKLLQVGGNMLLLDEPTNDLDVETLRALENALLEFPGCAMVISHDRWFLDRIATHIIDYQDEGKVEFFEGNFTEYEEYKKRTLGNEAIQPRRMKYKRITK

SEQ ID NO: 68689 - protein, 466 aa, Proteus mirabilis
MIVAPVVDVLQGRIAVGEDVTVRGWVRTRRDSKAGISFLTVYDGSCFNPVQAIINNNLPNYQDEVLHLTTGCSVEVTGKIVESPGQGQNFEIHATKVVVVGMVDDPETYPMAAKRHSVEYLREVAHLRPRTNLIGAVARVRHTLAQALHRFFDEQGFFWVSTPLITAADTEGAGEMFRVSTLDMNNLPRTDKGEVDFSEDFFGREAFLTVSGQLNGETYASALSKVYTFGPTFRAENSNTSRHLAEFWMVEPEVAFADLNDIAGLAEKMLKYAFSAVLAERRDDMEFFAQRVDKEAITRLEHFIASDFAQIDYTDAITVLENCGQKFENPVYWGVDLSSEHERYLAEKHFKAPVVVKNYPKDIKAFYMRMNEDGKTVAAMDVLAPGIGEIIGGSQREERLEMFDKRLAEMGMNKEDYWWYRDLRRYGTVPHSGFGLGFERLVAYVTGVTNIREVIPFPRTPRNVDF

SEQ ID NO: 68690 - protein, 404 aa, Proteus mirabilis
MILDATPIITSLLDTDAYKLHMQQAVYHHYSDIPVVAEFRCRSDERLGEYATTLRHQVDMMADLSLTNEEFGYLQSLPFFKNDYLQWFKHFRFKPEQVHIATTADNQLTIKITGPWREVILWEVPLLALVSEIVHRARSPQITADDAVIQLRKLIDIFYRDAAEQQIDLADFKLMDFGTRRRFSYDVQRAIVDELKNHFPYLIGTSNYHFAERMQLAPVGTQAHEWFQAHQQISPELANSQRAALQSWLDEYPDQLGIALTDCITMDAFLRDFDMPFASRYQGLRHDSGDPIEWGEKAIAHYEKLGIDPMSKVLVFSDSLDFQKALVLYKHFHKRIRLIFGIGTRLTCNIPNITPLNIVIKLVECNGKPVAKLSDSPGKTICEDDEFVDKLRKAFDVPLVRQAC

SEQ ID NO: 68691 - protein, 871 aa, Proteus mirabilis
MTQQRIAKYRKDYRAPDYTITDLHLDFILDKEKTQVTAISQCKRLETTVTSLVLDGEDLTLKSIFVNDVAWTHYKEENGKLIIDQLPEQFTLKIVNEINPSANTALEGLYVSGDALCTQCEAEGFRHITYYLDRPDVLARYTTTITADKKQYPYLLSNGNRVAQGDLEDGRHWVTWEDPHPKPSYLFALVAGDFDVLRDTFNTKSGREVALELFVDKGSLDRADWAMTSLKNAMKWDESRFNLEYDLDIYMIVAVDFFNMGAMENKGLNVFNSKYVLAKSETATDKDYLGIESVIGHEYFHNWTGNRITCRDWFQLSLKEGLTVFRDQEFSSDLGSRSVNRINNVRVMRTAQFAEDASPMAHPIRPDSVIEMNNFYTLTVYEKGAEVIRMIHTLLGEEKFQAGMQMYIHRHDGSAATCDDFVQAMEDASNVDLTLFRRWYSQSGTPVLTVRDSYDAQKQQYTLTVSQMTPPTADQAEKQVLHIPLDIELYNQQGEVIPLRSQGQPVSNVLNVVREEQQFIFDDVAQQPIPSLLREFSAPVKLDYPFTDEQLSFLMKHARNAFSRWDAAQSLLGRYIKENVSRVQKGQPLILPEMVIDAFRAVLLDKDIDPALAALILTLPTDVEAGEAFAIIDPIAIHQALGFIRKTLATEMADEFSAVYHSMHIGAYRVDHGDIAKRDLRNVCLGYLAVENQQTGNQLVEAQYHNSDNMTDALAALNAAVMAQLPCKEALLQEFDDKWHQDGLVMDKWFSLQAMSPATDVLQTVRSLLSHRSFTLANPNRTRALIGAFVNNNPVAFHAEDGSGYLLLTEILTDLNSRNPQVASRLIEPFIRLKRYDANRQEKMRAELLKLKALDNLSGDLYEKITKALAD

SEQ ID NO: 68692 - protein, 643 aa, Proteus mirabilis
MPLISLTGAYLAFSDAPLLDNTDLFIDENERVCLVGRNGAGKSTLLRVLAKEQPLDDGQVVYEQDLVTARLQQDPPRDIEGTIFDFVAQGVAEDAQYITEYHRVSKVIETDPSEKNLNRLAQLQEVLDNRNLWLLDSRIAEVLEKLGLNGEAELSSLSGGWLRKAALGRALVSAPKVLFLDEPTNHLDIETILWLEKFLKDFQGSIVFISHDRSFIRNMATRIIDLDRGKLSSWPGNYDKYLESKEEALRVEEQQNAEFDRKLAQEEAWIRQGIKARRTRNEGRVRALKALRVERSERREVLGSARMQVEEATRSGKIVFELEDVNYSIGTRRLVRDFSAKVQRGDKIALVGPNGCGKTTLLKLMLGDLKADSGRIHCGTKLEVAYFDQHRATLDPDKTVMDNLAEGKQEVMVNGRPRHVLGYLQDFLFPPKRAMTPVRALSGGERNRLLLARLFLKPSNLLILDEPTNDLDVETLELLEELVDAYQGTVLLVSHDREFVDNSVTECWIFEGDGVINSYVGGYYDAQQQRAQSVSLKNEANKSRNAPEKTEKETKPKQNAKKATRSNNKLSYHLIRELEQLPAKLERLEEELGCLQEEVAAADFFTRPHEETEKVLKALADKENELETAFDRWQELEMMQNGE

SEQ ID NO: 68693 - protein, 307 aa, Proteus mirabilis
MSNATLCTDAFRQKLHSAHQRVDEALNQALQTLPFSDMPLSQAMRYGALLGGKRLRPFLVYAVGEMFNVPVANLDVPAAAIECIHAYSLIHDDLPAMDNDDLRRGKPTCHIEFGEANAILAGDALQTLAFEILAKNAMPDVAIADRVAMIAELATASGLAGMCGGQALDLDAEDKSIDLVALEKIHLHKTGALIRAAVRLGALSAGQKGHDVLPALDKYAHSIGLAFQVQDDILDVIGSTEETGKRQGSDQEAGKSTYPALLGLAQAQKKAQELYNEALDALAFLEQYEYDTSTLKQLANFIVERKN

SEQ ID NO: 68694 - protein, 487 aa, Proteus mirabilis
MSQSAINNDTAAAINPYSQKVAHLRQQILNIFLEDDRFVETVLGEASESDRLSHHELHEKITTVRELLQDLHAADIADILEALPYDERLALWHLVDNNERGAVLVEASVAVWDSLIKDMTDRELLRSVASLHVDEQAYIAEHLPRDTMRRLLTYLEPSLRNRIREVLQYPKDSVGQMMDFEFVTVRGNVTLKTVQRYLRQRGSIPEATDKIFVIDNANHLLGELPLTTVLTQSPDKRVSDVMKTDTVSFMPEEKGEDAAGAFERYDLISAAVVDSNGLLMGRLTVEDIVDNMHEESDTNIRRMGGLSPEEDVFAPVGQAVKTRWTWLAINLCTAFVASRVIGVFEHTISQLVALATLMPIVAGIGGNTGNQTITMIVRALALHQIQTGSFSFLILRELGVALINGIVWGGIMGVVTYFLYGDVAMGAVMTMAMVLNLLMAALMGVLIPMTMIKLGKDPAIGSSVMITAITDTGGFFIFLGLATIFLV

SEQ ID NO: 68695 - protein, 107 aa, Proteus mirabilis
MTQRVQPDLLEAMKLAANEASSMLKTLGNGDRLLLLCQLSQGEKSVSELEESLGIRQPTLSQQLTVLRNEGLVNTRRDGKRIFYSIADEKVLVLLNTLYQLYCPIAG

SEQ ID NO: 68696 - protein, 899 aa, Proteus mirabilis
QQYHLTPALSTASAGSVSYNTLSIRALKQQLRQQPDNADIIGTLGRAYSRANQRAPAIYYLSQALTLSPKHDDSDLWRTLLQSNQYWHLLAKADEALLNQEYSAAKHYFTQVRQLSPYKSEAYIGLGDIELAQHQLEQAERYYQQALQYQPNDAATLHSLTKLYRQQSHQKAAQFMANLTSQQYKNLAQDYGYIISGIQQDLAADDEQQQHYLSAIEKRKAIAKAYPDEVWNIYRLADDLLITQQPQLAEDYFNQLNQRRPNDPSRRYAYALYLNKTGRAQQALNTLKTIPLSQRSESMNALDSQLRFGQIMAHAQSLREHNQQQQAVEYLFTHIPPEQKIESYLLLAQWAEEDDQLNQALNYYHTVLNLAPNNETALLGATEISLAQHQIDQARYYLAQIEQLSPEKFNHYSLRRLANAEKTTGNIDKAKHYFIYLARQVDKEPDSADGLILRDIGRFYRDSQQVQSAHHYYQQAMLKEGITHTLPKNNIEYTTLMRNNPNDNWLSRSVRDDASTLYRQQEWRFTLEHDYWGSNGSEGYSKLRAHTTMLQLDHPIYHGRFFWRTDFVHLNSGTLGTAPYDAKFGSCYRTGCFPLKQKAFGVSPAIGWENEQWQWDLGTTPLGFNVTDWVGKIAYNDSFYHLGWSVDLHRRPVNSSLLAFAGQRDSWTNQVWGGVRKTGLRLSGSYDLGGKDGYWGEISFDRLTGKNVKNNSSVKAMGGYYYKLINENDRRISVGLNSMLWHYNKDLSGYTLGQGGYYSPQQYLSFSLPVNYRQRTENWSWEVSGSLSWSYSKTDDSRRYPLQNLVSSDKFNSDPIKEIFKHERNIIDKGDSGHGFGYTARALIEHRITPHWFIGAAIDIQQAKNYTPSHALMYLRYSFDGWNGDLDLPPNPLIPYADF

SEQ ID NO: 68697 - protein, 86 aa, Proteus mirabilis
MANIKSAKKRAVQSEKRRQHNASRRSMMRTYIKKVYAAVASGDKEAAQKAFNDMQPIVDRQATKGLIHKNKAARHKANLQAQIKAM

SEQ ID NO: 68698 - protein, 296 aa, Proteus mirabilis
MLSARHSAKLQVFYPVLLLLLSMLSIQSGASLAKSLFPVIGAPAVTALRLFLGTLILFFIFKPWRLSFSRSAIMPLFLYGLSLGAMNYLFYLALETIPLGIAVALEFTGPLAVAMFSSRRAIDFLWIILVIAGLGLLLPIGDNIHGLDPLGILYALGAGVGWALYIVFGQRAGKGYGARPVSIGSLIAAFIFFPIGMLQSSPELVFSWSILPIGLAIAILSTAFPYTLEMIALTRLPAKTFGTLMSLEPCMGAFIGIIFLHEHLTLIQWVALAFIVLASIGSTATMKRKTKIEKVE

SEQ ID NO: 68699 - protein, 192 aa, Proteus mirabilis
MNKIKSIAVYCGSSLGASPIYKQQAILFAKELVKRNITLVYGGASVGIMGTLADTVLQEGGKVIGVIPTLLEGREISHKNLTELHVVETMHQRKSKMIELADGFVALPGGFGTLEEFSEVFTWSQIGLHQKPLGIFNINDFYQPLLAMIDKMVDEKFLHEKYRHMAIVEQSPIQLLDKFESYIAPSIKTYDK

SEQ ID NO: 68700 - protein, 413 aa, Proteus mirabilis
MSQCQVSGLLSLDEALEKLLEKPVAITDTLSIPLHKAAGYILSEHITSPLNVPPFDNSAMDGYGVRYTDLNTQSPLPIAGKAFAGVPFEGELPQGQCVRIMTGAMIPAGVDTVIMQEETQVTDNGILFPHPAKLGQNIRRIGEDIKQNDIVLAAGTKLSTAQLPLIASLGIANINVYRKLKVAVFSTGDELQTIGQPLKAGQIYDTNRFAVRLMLEKLDCDVLDLGVIPDSPEKLRETFKTADAQADLVISSGGVSVGEADYTKQILDEIGEIGFWKLAIKPGKPFAFGRLHNAWFCGLPGNPVSATVTFYQLVQPLIARLSGFSQWRSPQRFHAKTCSPLKKSAGRLDFQRGIASINENGEWQVTTSGHQGSHVYSSFSVANCFIVLERERGKVAAGETVTIELFNPLLKSE

SEQ ID NO: 68701 - protein, 383 aa, Proteus mirabilis
MEQSSRQRIDALDALRGIAILGILLLNISGFALLRVASFNPMHSGEATFADKLTWMGLNLFTQGKFLFIFALLFGGTLYLLSQRSVAWNVSRLIILALIGIIHTLLLWEGDILFPYSICGLFVLFFIKALPIKRQFILGLVLYLFGAIILAFLFYYYRDFVEIVWYSSDYSAMIETNWKTGSYINSIYWRLDELSDFIFNLVRQYSWFLIGAMLMGAALMASGWLQRRYSQSHYGLIAVCFLVISLLFQGTLVITDYYLDWHYMWSAVVAQPITMVIQIIQSLGYIALLYWAWPYIQHSFIAYALRCVGKMALTTYLLQSIIGTTLFQRMGLFNQFTLLQLMLFVMAIWVINIIFAVTWLRYFSQGPIEWLWRHSSTGLAKRF

SEQ ID NO: 68702 - protein, 149 aa, Proteus mirabilis
MQIILLDKVANLGSLGDQVNVKSGYARNYLIPQGKAVSATKKNIEFFEARRAELEAKLAETLAAAEARAAKITALGSVTISSKAGDEGKLFGSIGTRDIADAVTAAGVEICKSEVRLPNGVLRTTGDHEVHFQVHSDVFAELNVIIVAE

SEQ ID NO: 68703 - protein, 75 aa, Proteus mirabilis; identical to SEQ ID NO: 42796

SEQ ID NO: 68704 - protein, 290 aa, Proteus mirabilis
MSILIDKNTKVICQGFTGSQGTFHSEQAIAYGTQMVGGVTPGKGGTTHLGLPVFNTVREAVEATGATATVIYVPAPFCKDSILEAIDAGIKLIITITEGIPTLDMLTVKVKLDEAGVRMIGPNCPGVITPGECKIGIMPGHIHLPGKVGIVSRSGTLTYEAVKQTTDVGLGQSTCVGIGGDPIPGSNFIDILKLFQEDPQTEAIVMIGEIGGTAEEEAAAYIKDHVTKPVVGYIAGVTAPKGKRMGHAGAIIAGGKGTADEKFAALEAAGVKTVRSLADIGDAVKSLLNK

SEQ ID NO: 68705 - protein, 427 aa, Proteus mirabilis
MADNKAKLTIGETSVDLDVLSPTLGSKVIDIRTLGSKGYYTYDPGFTSTASCESKITYIDGNNGILLHRGFPIGQLATESTYLEVCYILLYGEAPTQEQYDKFKTTVTRHTMIHEQITRLFHGFRRDSHPMAVLCGVTGALAAFYHDALDVSNPVHRDITAYRLLSKMPTVAAMCYKYSIGQPFVYPRNDLSYAGNFLHMMFATPCEEYVVNPVLERAMDRIFILHADHEQNASTSTVRTAGSSGANPFACIAAGIASLWGPAHGGANEACLRMLEEIKTVEHIPEFIKRAKDKNDSFRLMGFGHRVYKNYDPRATVMRETCHEVLKELNLNDSLLEVAMELERIALNDPYFIEKKLYPNVDFYSGIILKALGIPSNMFTVIFAIARTIGWIAHWNEMHEDGLKIARPRQLYTGYNERKFHSELKNK

SEQ ID NO: 68706 - protein, 588 aa, Proteus mirabilis
MNLPVREFDAVVIGAGGAGMRAALQISQMGLSCALISKVFPTRSHTVSAQGGITVALGNTHEDNWEWHMYDTVKGSDYIGDQDAIEYMCKTGPEAILELEHMGLPFSRLDDGRIYQRPFGGQSKNFGGEQAARTAAAADRTGHALLHTLYQQNLKNHTTIFSEWYSLDLVKNQDGDVVGCTAICIETGEVVYFKANATILATGGAGRIYQSTTNAHINTGDGVGMAVRAGVPLQDMEMWQFHPTGIAGAGVLVTEGCRGEGGYLLNKDGERFMERYAPNAKDLAGRDVVARSIMIEIREGRGCDGPWGPHAKLKLDHLGKEVLESRLPGILDLSRTFAHVDPVKEPIPVIPTCHYMMGGIPTKVTGQAIRMNEKGEDEVIPGLFAVGEIACVSVHGANRLGGNSLLDLVVFGRSAGVHLKESLMEQGTMRDASDSDVEAALTRLHRWENNRSGEDPVEIRKALQSCMQHNFSVFREGDAMAKGLEELKVIRERLQNARLDDNSSEFNTQRIECLELDNLMETAYATAVSANFRTESRGAHSRFDFPDRDDENWLCHTLYQPQTETMTRRKVNMQPKLREAFPPKVRTY

SEQ ID NO: 68707 - protein, 934 aa, Proteus mirabilis
MQNGAMKDWLDSTFLAGENQSYIEEIYEDYLTDPNSVDESWREIFQQLPVSQGAEQSHSQTRDYFRRLAKESTRYHTSVSDPAMDSKQVKVLQLINAFRFRGHQNANLDPLGLWKRESVPDLDPAFHNLTKEDFEETFNVGSFAIGKETMKLGDIYEALKRIYCGSIGAEYMHITNTEEKRWIQQRLESVNVADQFTKEEKIRFLAELTAAEGLERYLGAKFPGAKRFSLEGGDALIPMLKDLIRHAGKQDTREVVLGMAHRGRLNVLVNILGKKPADLFDEFAGIHKEHLGTGDVKYHQGFSSDFATEGAQVHLALAFNPSHLEIVSPVVIGSVRARRDRLDEARSNMVLPITIHGDAAVTGQGVVQETLNMSQARGYEVGGTVRIVINNQVGFTTSNPKDARSTEYCTDIVKMVQAPIFHVNADDPEAVAFVTRLALDFRNTFKRDVMIDLVCYRRHGHNEADEPNATQPLMYQKIKKHPTPRKIYADKLVEQGLIEANDVTELVNLYRDALDRGDCVVEEYRPMGLHSYTWEPYLNHEWNEEYPHKVEKSRLQDLARRVSTVPSEIAMQSRVEKIYADRAVMAEGEKLLDWGAAETLAYATLVDQGITIRLSGEDAGRGTFFHRHAVIHNQTNGSVYVPLANIHNAQGQFNVWDSVLTEEAVLAFEYGYATTEPRGLTIWEAQFGDFANVAQVVIDQFISSGEQKWGRMCGLVMLLPHGYEGQGPEHSSARLERYLQLCAEQNMQVCVPSTPAQVYHMLRRQALRGMRRPLIVMSPKSLLRHPLAVSSLDELADGKFLPVIGELDELNPADVKRVVMCSGKVYYDLLEQRRANGQTDVAIIRIEQLYPFPHDDMAQILAPYAHVKDFIWCQEEPLNQGAWYCSQHNFRDAIPTGATLRYAGRPASASPAVGYTSVHQEQQKALVEDALKVE

SEQ ID NO: 68708 - protein, 357 aa, Proteus mirabilis
MRVSDFRFDLPESLIAHYPHPQRSGCRLLSLEGKTGNLSHGVFTDVLDKLNAGDLLVFNNTRVIPARIYGRKASGGKIEVLVERMLDEHRVLAHVRASKSPKEGASLILGEDESVQATMIARHDTLFEIRFDDERDVLTILNSIGHMPLPPYIDRPDERSDKELYQTVYNERPGAVAAPTAGLHFDEPLLEALRNKGVEMAFVTLHVGAGTFQPVRVDNIEEHTMHSEYAEVPQEVVDAVLACKARGNRVIAVGTTSVRSLESAAKAAKDALIAPFFDDTQIFIYPGYQYQIIDALITNFHLPESTLIMLVSAFAGYKNTMNAYNVAVEQKYRFFSYGDAMFITRNPLAINEKVGEE

SEQ ID NO: 68709 - protein, 586 aa, Proteus mirabilis
MITIKKTHLLLLTTLFSPALYAAYEPAVEAQQGMVVSSQHLASQVGKDILQKGGNAIDAAVAVGYAQAVVNACCGNIGGGGFMTIHLADGTNTFINFRETAPTAASKNMYLDKDGNLIKEASLYGYLASGVPGTVKGLDAALEKYGTLSRQEVMAPAIKLAREGYILTRADTDVLDTTTERFKQDPESAKIFLKPDGTPWQPGDRLIQTDLANTLELIANQGADAFYQGEIPKKVEQASKQHNGLLTKEDFANFTITETPPITCTYRGYEFISAPPPSSGGVTICQTLNILEGYNLKSMGFNSAEYVHTLTEAMRHAYMDRNTFLGDPQFINNPTEKLLSKAYAAELRQQITPNKATPSEKVQPGIAPHESPETTHYSVIDKDGNAVSTTYTINGRFGAVVIAPGTGFFLNNEMDDFTTKVGEKNLYGLVQGERNSIAPLKRPLSSMSPTIVTKDGKPFLVLGSPGGSRIISITLQTALNIIEFGMSPQEAVNSPRIHHQWLPDEVYYEQRGLSKDTLEKLSAMGYKMVEQTPWGAAELIMVGLPGEQGVIPASSGNDSAVSGAIREGYLYGSNDVRRPAGKAVGY

SEQ ID NO: 68710 - protein, 463 aa, Proteus mirabilis
MALSQHPEKMKKGVIENWHPEDKAFWEKTGQKIASRNLWISVPCLLLSFCVWMLFSAVAVNLNKVGFNFTTDQLFMLTALPSVSGALLRVPYSFVIPIFGGRRWTAISTVFLIIPCLWLGFAVQDLTTSYSTFIVISLLCGFAGANFASSMANISFFFPKAHQGGALGLNGGLGNLGVSVMQLIAPLVVSVGVFAMFSGPGVVQPDGSRLWLENAAWIWVPFLLIFTFAAWFGMNDLAANKASLSQQLPVLKRGHLWLLSILYLCSFGSFIGFSAGFAMLSKTQFPDIVILHYAFFGPLLGALARPVGGALSDKFGGIKVTLINFIIMAIFSVLLFLTLPENGAGGSFIAFYGVFMVLFLTAGLGSGSTFQMIAVVFRKITIDRMKAQGASDEAAQKEAVTESAAALGFISAIGAIGGFFIPKAFGTSLAMTGSPAGAMKIFVLFYIACVLITWLVYGRKHNK

SEQ ID NO: 68711 - protein, 609 aa, Proteus mirabilis
MKMHNIQWHYRFSIINQIAILMLLFTLFGVVGMAISNHIILSVQGNAHAINKSGSLRMQSYRLLSALPLDDKHRDYLQELENDLDSKELRQVLSTSSLQSQYVQLTHYWKETLKPTLSAAKQPNDAKQEVIFFVSQLDTLVSSIDQLTEQKIRLVAYTQLIFTALTLLLLFGSVWHFRRRLLLPWQQLMSMANSIGHGDFSTRFRPRPHHDEIATLGIALNTMSEELSTLYSELEQRVIEKTHDLQQKNKVLSYLYHSSQQLHSQAPLCARLRQILAELQHIIPDSYLQIRLYEDNQHTLFNEISLAPSSRPEYCPTPDCERCNEDANITTPLNNRLLHWELTDQIHRYGLFVMQLPENSVLTDEQNNLMLLLTKQISAMLAMEQQNEQQQQLLLMDERSAIARELHDSIAQSLSCLKMQVSYLQMQSETLPDNCQKLLKEMREELNVAYRQLRELLTTFRLKLTEPGLLAALENTINEFNQRLGFAIHFDYQLPAKCVNSHQSIHVVQIVREALNNILQHANANWAEVALTLNNGIVELQINDNGEGITPNPEKINHYGLIIMRERANSLNGSYSIRVRKEGGTQVFVTFPLITTHKDPIEKGANHNE

SEQ ID NO: 68712 - protein, 253 aa, Proteus mirabilis
IKAVDLNSDLGESFGQWRMGNDAAVLEIVSSANIACGFHAGSPEGILKTLKAAKQHQVAIGAHVAYPDLVGFGRRNMDIASHELTADVIYQIGALQGLAKAVGMKVTYVKPHGALYNTIAHDKRQALAVIEAILAIDPQLILVALAGSPLITLAKEKGLRVVAEAFADRAYHADGTLVSRKQEGAVLHDPQLVAQRMLKLVQKGGVESIEGTFTAIQADSICVHGDSPDAVNLAKSVKEILITHGIAIKPFTS

SEQ ID NO: 68713 - protein, 421 aa, Proteus mirabilis
MKNKTLFKSLLTIPVNLHKRTTLKWLGGSLLLASMGANAIEKSKCSPTLRYQRAINYLGKHQAGVITPEQKHASFIALDLTVTTPEEVEKIFRTLTQRIAFLTQYHELKESHNPHLPPAGSGILGSQLYPDELTITVALGDSFFDNRFGFQAHKPKRLEAMKPFPNDRLDPKWCGGDLLLQLCANSQESIIYALRDILKYLSGQVHARWKIDGFLPARDIDNQQTPINLFGFKDGTGNAPATDTHLMDDLVWITDKQNEPQWCLGGSYQAVRLIRFALEFWDRTPLEDQENNFGRHRATGAPIGMKQEMDSPEFAQDPHGDRILFDSHMRRAEPRTPERYSAKLRRRSYSYSLGLTPSGQLDMGLVFVSFQNNLKKGFIDTQKRLNGEPLERYIKPFGGGYYFVLPGVTQASDILAKGLFT

SEQ ID NO: 68714 - protein, 382 aa, Proteus mirabilis
MRRFAGACRFVFNRALARQNENHEAGNKYIPYTKMASWLIEWKSDTETQWLKEAPSQPLQQSLKDLERAYKNFFQQRTAFPRFKKRGKNDAFRYPQGVKLDQSNSRISLPKLGWMRYRNSREVVGEVRNVTVSQSCGKWYVSIQTEYEATEPQHGSTSIVGLDAGVTKLATLSDGTVYPPVSSFKVNQRKLARLQRKLSRKIKFSANWQKQKRKIQRLHSHIANIRKDSLHKVTSEISKNHAMIVIEDLKVSNMSKSAKGTTERPGRNVKAKSGLNRAILEQGWYEMRRQFEYKQLWRGGQVLAIPPAYTSQKCACCGHTAKENRQSQSQFECLECGYTANADINGARNILAAGHAVLACGGRVQSDRPSKQEPAEVIQTSV

SEQ ID NO: 68715 - protein, 409 aa, Proteus mirabilis
MAVASETAKEPTVLSRRKLLCIAGMGWTFDAMDVGLLAFLLTALKEDWGLTAAQLGWIGSINSIGMAVGAFVFGIMADRKGRKPVFILTLLLFSLGCGLTALASSLMVVLILRFFIGMGLGGELPVASTLVSESVKAHERGRIVVLLESFWAVGWLIAALIAYFIIPDYGWRMAMLLSALPAVYALYLRSKLPEPSSTQSLLQNRLSLRQSMALIWSPQYRRSTLMLWVLWFCVVFSYYGIFLWLPSVAMLKGFSLIKSFQYVLIMTLAQLPGYFTAAWFIERYGRKFVLITYLAGTAISAYYFSVADSTTTLLVFGMLLSFFNLGAWGALYAYTPEQYPDGIRATGAGTATAIGRIGGILGPLMVGYLVQYQFDISTIFLIFSLSIVIAILAVMLLGKETKNRPLNSI

SEQ ID NO: 68716 - protein, 274 aa, Proteus mirabilis
MPELPEVETSRRGIEPHLVGNILHYAIVRNSKLRWPVSEKIKTLLDEPILSVKRRAKYLLIELNQGWIIVHLGMSGSVRILPEEQPEEKHDHIDLVFRDGKVLRYTDPRRFGAWLWCEDLATSSVLAHLGPEPLSAQFNAQYLYQQSKNKKIAIKPWLMDNKLVVGVGNIYANEALFSSGIMPDRKASSLTEQECDVLVNAIKTVLTRSIEQGGTTLKDFLQSDGKPGYFAQELFVYGRKDKACLICGHTIESIKQGQRSTFFCRHCQHGEITD

SEQ ID NO: 68717 - protein, 392 aa, Proteus mirabilis
MMKIAYLDPYPVPDLRVASLQILQNVDAFARAGAQVTLVTPKGQYRDSDILGRDIHNNARLIALRDIRRKWYFPFNSQKLFSLQIARWLKQHPVDALFTRNLKLACYLAENHADIPLFFESHEIFAQSFAESHSFETKKNRLKYHKLLKMEKLVYSRATAVFVLTSLLRDDIISQYQVTTPITIVPDGVDLYAADSNKDSHRDITATTNNVTEVLYLGSLHKWKGIPTMMRAMKYLDNARLNIAGGTAEQIKGLQLLAKEMDVKEKVNFLGFIDPKQRFQAIAQHDICVLPLTLTSIGSRYTSPLKLFEYMAMRKPVVISDFPSIRDVVDEKAVSFADSGDAQSFAQQIKLLREEPQRTSEKINHARSLVENYYNWDKRAETILHTINKLIS

SEQ ID NO: 68718 - protein, 266 aa, Proteus mirabilis
MGISASMNEPTDNTIIGEAPSSYHTKKGGSDDIKGNFLTLLITQMQNQDPTNPMQNNELTSQLAQISTVEGIETLNKTVNTIVGQIDQSQALRATSLVNHMVMIAGNEISVDKINNGENAGSDTDTDKDTDTTPDTKLGKLRASTDATDNENIFSSAFGFESFSPIDTLTVNITDSSGAKVRTIEMNSKILPDVYHFFWDCTDDDGNKVPTGKYQFTVNATFNDAQVPVKTLKSAIVNSVSMKEGKPHLDVGLGVIVSLDEIRKVF

SEQ ID NO: 68719 - protein, 307 aa, Proteus mirabilis
MSQLETELKLSAIPAAIPQIIQRILTLPYQHTPPHKLTNLYFETSDNQMRNWDMGLRIRGIDSHYEMTIKTAGKVVAGLHQRPEYNVTLNEPTLDLTRFPAEIWPDKTDLTALQAQLKVLFHTDFHREIWLVDYLESQIEVVLDKGTIRTAQYELPIEEFELELKKGQVADVIALATFLGEQGGLRLASRSKAARGYYLAKDKPALSLSVVNLAPNDTIAEQLTKWLAAIQALEEAIFANPTPPTLTMPAMLALFSDWCKKQPQLPESMQQALDNLSLLSFTRATDYYHVLWLNFKLSAMAWLLAIA

SEQ ID NO: 68720 - protein, 474 aa, Proteus mirabilis
MKVTLPDFNKANVLVVGDVMLDRYWYGPTSRISPEAPVPVVKVDTIEERPGGAANVAMNIASLGANSRLVGLTGIDEAAKALSNTLSQVNVRCDFVSIATHPTITKLRVLSRNQQLIRLDFEEGFSNVSPEPIYERIQQALPSMGALILSDYAKGALSHVQQMIQLAKKAGVPVLIDPKGSDFERYRGATLLTPNMSEFEQVVGVCHTDDELVEKGTQLVKDLALDALLITRSERGMSLLQANEAPLHLPTQAQEVYDVTGAGDTVIGVLATALAAGKPLAEACFLANAAAGVVVGKLGTSTVSPIELENAIRGRADNGFGIMEESQLKQAVALARQRGERIVMTNGCFDILHAGHVSYLANARKLGDRLIVAVNSDASTKRLKGESRPVNPLEQRMTVLGALGAVDWVVAFEEDTPQRLIASVLPDILVKGGDYKPEDIAGSKEVWAAGGEVKVLNFEDGISTTNIINAIKKK

SEQ ID NO: 68721 - protein, 217 aa, Proteus mirabilis
MNQTLLSEFGSPLERVERALEALRAGKGVMVLDDENRENEGDMVFVAETMTTEQMAMSIRHGSGIVCVCITEERRQQLDLPMMVENNTSHFHTAFTVTIEAAQGVTTGVSAADRLTTVHAAAADNAKPSDLNRPGHVFPLRAQPGGVLTRGGHTEASIDLATLAGFKPVAVLCELTNDDGTMARAPEVVTFAKQHDMPVLTIEDLVAYRLREEKKAG

SEQ ID NO: 68722 - protein, 205 aa, Proteus mirabilis
MQEYNQPLRIGVGGPVGSGKTALLEVLCKAMRDSYQIAVVTNDIYTQEDAKILTRAQALDADRIIGVETGGCPHTAIREDASMNLAAVEELAMRHKNLDIVFVESGGDNLSATFSPELADLTIYVIDVAEGEKIPRKGGPGITHSDLLVINKIDLAPYVGASLEVMEADTAKMRPVKPYVFTNLKEKVGLETIIDFIIDKGMLRR

SEQ ID NO: 68723 - protein, 367 aa, Proteus mirabilis
MKLIIEREQLLKPLQQVSGPLGGRPTVPILGNVLLKVTENTLSLTGTDLEMEMMARVSLSQSHEIGATTVPARKFFDIWRGLPEGAEISVELDGDRLLVRSGRSRFSLSTLPASDFPNLDDWQSEVEFTLPQATLKRLIESTQFSMAHQDVRYYLNGMLFETENTELRTVATDGHRLAVCAMDIGQSLPGHSVIVPRKGVIELMRLLDGSGESLLQLQIGSNNLRAHVGDFIFTSKLVDGRFPDYRRVLPKNPTKTVIAGCDILKQAFSRAAILSNEKFRGVRINLTNGQLKITANNPEQEEAEEIVDVQYQGEEMEIGFNVSYLLDVLNTLKCEEVKLLLTDAVSSVQVENVASAAAAYVVMPMRL

SEQ ID NO: 68724 - protein, 804 aa, Proteus mirabilis
MSNTYDSSSIKVLKGLDAVRKRPGMYIGDTDDGTGLHHMVFEVVDNAIDEALAGYCDEIIVTIHSDNSVSVRDDGRGIPTGIHEEEGVSAAEVIMTVLHAGGKFDDNSYKVSGGLHGVGVSVVNALSEKLELTIHRDGKIHQQIYRSGVPDDRLKVIGETDKSGTFVRFWPSLDTFKGETEFQYDILAKRLRELSFLNSGVSIRLIDKRDNREDHFHYEGGIKAFVEYLSRNKTPIHQNVFYFSTEKDGIGVEVAMLWNDGFQENVYCFTNNIPQRDGGTHLVGFRTAMTRTLNNYMDKEGFNKKSKISATGDDAREGLIAVISVKVPDPKFSSQTKDKLVSSEVKTAVETLMNEKLVEYLLENPTDAKIVVGKIIDAARAREAARKAREMTRRKGALDLGGLPGKLADCSERDPAFSELYLVEGDSAGGSAKQGRNRKTQAILPLKGKILNVEKARFDKMLASQEVATLITALGCGIGRDEYNPDKLRYHSIIIMTDADVDGSHIRTLLLTFFYRQMPEIIERGHIFIAQPPLYKVKKGKQEQYIKDDDAMDEYLMSIALDGAALYVSEHAPAMHGAQLEKLVVDYHAAHKIIRRMERLYPLSMLNSLVYHSTLTEDDLSDKAKVEEWMSGLVNRLNNAEEQSSTYSYTITQNEENRLFEPVLRIRTYGIDTDYKLDYDFIHSSEYQRITNLGDIIGNLIEEGAYIERGERRQAISSFEEALEWLTKESRRGLAVQRYKGLGEMNPEQLWETTMNPDTRRMMQVTVKDAIATDELFTTLMGDAVEPRRAFIEENALKAENIDI

SEQ ID NO: 68725 - protein, 299 aa, Proteus mirabilis
MLDKARLRIAMQKSGRLSDDSRALLARCGIKINLNQQRLIAYAENMPIDILRVRDDDIPGLVMDGVVDLGIIGENVLEEELLKRRAQGENPSYITLRRLDFGACRLSLATPVDFDYQGVECLNNTRIATSYPNLLKRYLDQKGITFKSCLLNGSVEVAPRAGLADSICDLVSTGATLEANGLKEVEVIYRSKACLIQRDGEMDATKQALIDRLMTRIQGVIQARESKYIMLHAPSDCLEDVIALLPGAERPTILPLAGDQNRVAMHMVSSETLFWETMEKLKALGASSILVLPIEKMME

SEQ ID NO: 68726 - protein, 273 aa, Proteus mirabilis
MKRITIVGLGWLGLPLANALREAGYQVKGTKTTEDGVEAARMSGVDCCLMNLTPAIDCDRDDFDYLMETDVLIITLPPSAAGGGYDYVEGIQTLVDSAMSRHVTRVIYISSTSVYGNQSGVITEEVDIRPETQSAKMIAEVENWLHRLPLTTVDILRLAGLVGPGRHAGRFLSGKKQVKGAHQSVNLVHLDDVIFAIEQLLAQNEGGRLYNLCAPIHPKKKDFYSRVAAQLDLTPPEFALEDKPPAREIDGQEICRDLGFHYHYPDPDKMPMS

SEQ ID NO: 68727 - protein, 248 aa, Proteus mirabilis
MLDIKNLHVSVEGNEILKGLDLQVRAGEVHAIMGPNGSGKSTLSATLAGREEYEVDEGSVTFKNKDLLELEPEERAGEGIFMAFQYPVEIPGVSNQFFLQSSVNAVREYRGQEPLDRFDFEDFIEDKIKLLDMPQDLLTRSVNVGFSGGEKKRNDILQMAALEPELCILDETDSGLDIDALKIVANGVNSLRDGKRAFIVVTHYQRILDYIKPDYVHVLYQGKIIKSGDFSLAQKLEEQGYGWLIDPQ

SEQ ID NO: 68728 - protein, 370 aa, Proteus mirabilis
MEKPQIHTDIPKILFTVLFISFFIIGSFWILNPFIVGFIWAGMIVVATWPLLIILEKRVKYRWLSTMIMMILILLIFVIPIILLISSVIDNSAPLIELAKSPSDIQPPQLLWLKEIPMVGNTLYETWHSILVSGGNALMAKIQPYIGQAANWFFAQALNIGRFALHLVVMLLFSGLLFLQGENVVAWLRHFAVRLAGQRGDAAILLASMSIRAVALGVVLTALIQAVIGGIGLGISGVPYATVLTVLMFICCLAQLGPLFVLVPSILWLFWTGDTTWGIVMIIWGGIVATMDGVLRPFLIKMGADLPMVLILTGVIGGILTLGMIGLFIGPVVLAVAHSLLNAWINEVPKPDPDLTETVEFMNKNFIEKE

SEQ ID NO: 68729 - protein, 288 aa, Proteus mirabilis
MILSLNSINCDNNELVDRTVFFISDGTAITAEVLGHAVLSQFPLKMKSYTLPFVSSVERAEEIKNKINEIYKKSGAKPLVFYSIISPDVKRIINSSEGFCQDIVQSLVLPLEKEIGVQALPQLNKTHGLTEKNLSKYDARIAAIEYTLSHDDGISLRNLDQAQVILIGVSRCGKTPTSLYLAMQFGIQAANYPFTADDMDFLKLPPELKEYQHKLFGLTIAPERLAAIRSERRENSRYASIRQCRIELAEVEALFRKNNIPYLNTTNYSVEEISTKVIDSMGLARRMF

SEQ ID NO: 68730 - protein, 153 aa, Proteus mirabilis
MKYGKLYAVIAMVGIIVGGYWVINWQANRINLLVETNKELTEALEEQKSINTDYQARIMRLNQLDIQYTQELANAKNEISRLRDISERHPERVYIKAECPKSKTTPSTSLAYATIARPTDTALRNYWLLRERIAESEQMILGLQDYIRVECVN

SEQ ID NO: 68731 - protein, 455 aa, Proteus mirabilis
MQKENKLSRGLSGRHIRFMALGSAIGTGLFYGSAAAIEKAGPAVLLAYLIGGAAVFMVMRALGEMAVHHPVAGSFSQYASHYMGPLAGFLTGWNYVFEMLIVCLADVTAFGFYMKLWFPDVDQWIWVLGIVCFIGALNLCHVKIFGEMEFWLSIVKVTAIIAMIIGGVAIMIYGFGQQTEHPIGISNLWEFGGFMPNGIEGIIASLAIVMFAFGGIEVIGITASEAKDPEKTIPKAINAVPFRILLFYVLTIFILMCIFPWQQIGHNGSPFVQIFSNLGINSAANILNLVVITAAISAINSDIFGAGRMMYGMAQEGQAPKSFMKLTRNGVPWMTVLVMSVVLLLGVVLNYLIPEKIFVLIASIATFATVWVWLMILLSQVAMRRQMSAEEAKKLKFPVPFWPIAPAITIIFMAFVIAILGYFESTRMALIVGLVWVAILTVGYYIGIKPRITQK

SEQ ID NO: 68732 - protein, 121 aa, Proteus mirabilis
MMITTIFKDFQFEAAHHLPHVPKGHKCGRLHGHSFLVRLEITGEVDAQSGWLIDFADVKAAFKPTLDRLDHYYLNDIEGLENPTSEVLAKWIWQQVKPSLPLLSAVMVKETCTAGCIYRGE

SEQ ID NO: 68733 - protein, 575 aa, Proteus mirabilis
MISGILASPGIAFGQALLLKEEPIIISQRKIQSDEVDTQIERFKDGRNKSAQQLEIIKARAEKNLGADKAEIFEGHIMLLEDEELEQEIISLIKSDKKTAEAAVQSVIEDQATALEALDDEYLKERAADVRDIGKRLMRNILEMPIIDLSAISEKVILVATDLTPSETAQLSLDNVLGFITDLGGRTSHTSIMARSLEIPAIVGTSNATETIKKEDYLVLDAINNKIIINPSDEELEALKAIKEEYLHEKEELAKLKDLPAITLDGHQVEVCANIGTVRDVAGAERNGAEGVGLYRTEFLFMDRDSLPTEEEQFQAYKAVAEAVGSPAVIIRTMDIGGDKDLPYMNLPKEENPFLGWRAIRICLDRKEILHPQLRAILRASAFGKLRIMFPMIISVEEIRALKAELEILKSQLREENKPFDESIEVGVMVETPAAAVMARHMAKEVDFFSIGTNDLTQYTLAVDRGNELISHLYNPMSPAVLNLIKQVIDASHAEGKWTGMCGELAGDERATMLLLGMGLDEFSMSAISIPRIKKIIRNANFDDAKALAEQALAQPTAKELMDLVETFTKEKTLC

SEQ ID NO: 68734 - protein, 85 aa, Proteus mirabilis
MYQQEVTITAPNGLHTRPAAQLVKEAKTFSSDISLISGGKSASAKSLFKLQTLGLTQGTVVTISAEGEDEKQAVEHLVKLMAELE

SEQ ID NO: 68735 - protein, 317 aa, Proteus mirabilis
MSKIFEDNSQTIGHTPLVRLKHFGNGNILAKVESRNPSFSVKCRIGANMIWDAEKKGILKPGVELVEPTSGNTGIALAYVAAARGYKLTLTMPDTMSIERRKLLKALGANLVLTEGAKGMKGAIDKANEIRDSDPSRYLLLQQFSNPANPEIHEKTTGPEIWNDTDGKVDVVIAGVGTGGTITGIGRYLKNTQGKAVTMVAVEPKDSPVISQALAGEEIKPGPHKIQGIGAGFIPENLELSLLDRVIQITNEEAFETARDVMTKEGILAGISSGAAIAAAVKLAKEPEFANKEIVVILPSSGERYLSTPLFADISDS

SEQ ID NO: 68736 - protein, 350 aa, Proteus mirabilis
MQQNLRLILIVVGAILIIALLLHGLWIGRKERSKLFRNRPVKRQKQNYQSDENDDEPQYTEANHQMSSLTSTQEAQSVPPIKSEPTLAPQSSVADKDPLMSGTPAQGHSNDTSLQREPSLGVFDVIEQNNDSAPQQKQPIPEVEVNHADVKEGDISETKLADVEPIPESSNSVASDEIHTTDTDRPLDAETSSDVKQAEQALSGSEEPKAEEELVLVLNVSAHHGQMLDGEVLMQSIIQAGFQFGAMNIFHRHLNPTGNGPVLFSLANMVKPGTFNIDTMAELTTPGVSMFMMVPSYGDANQNFKLMLQAAQRIASDVGGVVLDEERKLLTPQKIELYKSRIRRTLDLHQ

SEQ ID NO: 68737 - protein, 675 aa, Proteus mirabilis
MNQNIQQQIDELRVTLRHHEYLYHVMDAPEIPDAEYDRLMNKLKALEAEHPELITPDSPTQRVGALPLTAFEQVRHEIPMLSLDNAFDETTYLAFDKRLRERLKNNEEITFCCELKLDGLAVSLLYENGRLVQAATRGDGTTGENITENVRTIKAIPLRLYGDNIPARIEIRGEVFMTEKGFEHLNEEARRTGGKVFANPRNAAAGSLRQLDPRITAKRPLTFFCYGVGVLEGGELPTSHYARLQQFKKWGLPVSDAIKLCTGTKAVLDFYHHVAEIRPNLGFDIDGVVIKVDDIALQEELGFVSRAPRWAIAYKFQAQEQMTVIKDVEFQVGRTGAITPVARLDPVQVAGVIVSNATLHNADEIERLGLRIGDTVVIRRAGDVIPQVVSVIEEKRPENAQEIVFPTQCPICQSDIERIEGEAVARCTGGLICAAQRKEALKHFVSRRAMDVDGMGDKIIDQLVEKEYVKTPADLFRLDEKILSGLERMGEKSAKKLLNALEKAKSTTFARFIYALGIREVGEATANGLTAHFVSLEALREANIEALKAVPDVGDIVAKHVVNFFQEEHNKNVIDQLVNDIGITWPAPVVATHEAGDNPFAGKTVVLTGSLSQLTRDEAKDRLVALGAKVSGSVSKKTDMVIAGEAAGSKLAKANELGITVIDEDEMIRLLDQSK

SEQ ID NO: 68738 - protein, 621 aa, Proteus mirabilis
MSIEIKVPDIGADEVEVTEVMVKVGDRIEEEQSLITVEGDKASMEVPSPQAGIVKEIKIAVGDKVETGSLIMIFDTEEGAQAPAQEAAPAPSAAAPAASELKEVHVPDIGGDEVEVTEVMVNVGDTISEEQSLITVEGDKASMEVPAPFAGVVKEIKIAVGDKVSTGSLIMVFEVAGSAPAPSASAPAPAASAPAASAIKDVNVPDIGGDEVEVTEVMVKVGDTIAEEQSLITVEGDKASMEVPAPFAGVVKEIKIAVGDKVKTGSLIMTFEVAGAAPAAQAPAAPAASTSAAPSAPAKAPASAPAAKEEFVENEAYVHATPVIRRLAREFGVNLAKVKGTGRKGRILREDVQSYVKELIKRAESAPANAGGGLPGMLPWPKVDFSKFGEIEEVELSRIQKISGANLSRNWVMIPHVNLFDEADITEVEEFRKQQNKEAEKKKLDVKITPLVFVMKAAAKALADMPRFNSSISEDGQKLILKKYINIGIAVDTPNGLVVPVFKDVNKKGILELSYELAEVSKKARAGKLTASDMQGGCFTISSLGGIGTTGFAPIVNAPEVAIMGLSRSSMKPVWNGKEFVPRLMLPMSLSFDHRVIDGADGARFITLINQYMSDLRRLVM

SEQ ID NO: 68739 - protein, 475 aa, Proteus mirabilis
MSTEIKAQVVVLGAGPAGYSAAFRCADLGLDTVLVERHSTLGGVCLNVGCIPSKALLHVAKVIEEAKALSEHGVVFDAPKTDIDKIRIWKDKVISQLTGGLAGMAKGRKVNVVNGEARFTGSHTLSVEGSEGTTTITFENAIVAAGSRPIELPFIPHEDPRVWDSTDALQLKTVPERLLVMGGGIIGLEMGTVYHALGSQIDVVEMFDQVIPAADKDVVKVFTKRISKKFNLMLETKVTAVEAKEDGIYVTMEGKKAPAEPQRYDAVLVAIGRVPNGKLLDAGKAGIEVDDRGFIHVDKQMRTNVPHIFAIGDIVGQPMLAHKGVHEGHVAAEVISGKKHYFDPKVIPSIAYTEPEVAWVGMTEKEAKEKGVSYEVATFPWAASGRAIASDCADGMTKLIFDKETNRVIGGAIVGSNGGELLGEIGLAIEMGCDAEDIALTIHAHPTLYESIGMAAEVFEGSITDLPNPKAKKKK

SEQ ID NO: 68740 - protein, 68 aa, Proteus mirabilis
MFGNLGQAGKYLGQAARMLIGIPDYDNYVQHMKDNHPDKPVMTYNEFFRERQEARYGGGDGKGGFRCC

SEQ ID NO: 68741 - protein, 406 aa, Proteus mirabilis
SLIMNIVDRFISYTKVNTTTNRENGAAGIMPSSEGQRVLALQLVEELKALGVEDIKIRDTAIVTATLPSNLDYEVPTVAFFGHLDTSAEQTNDTKAQILPYKGGDLCLNKELEIFLRQSEFPELENYIGDDIIVTDGTSLLGADDKAAIASIMDMLQYFKQHPEVKHGTVKIGFVPDEEQGLRGAKAFDVTEFGADFAYTLDCCGIGELVYENWNAGDVEITFIGTSAHPMSVKGKLKNSLLMAHKFIAMLPGGEAPEYTESREGYYWVKQLAGNSARTVLKMDVRDFTEACYAHRMAFLKQLSEQCEALWGEGTVVCKQADRYANVFNSLQGENRYPIDIAIDAYKANGITPRPIPMRGGYDGAALSQKGLPCPNIFTGAHNFHSIYEYLPVKSLYAASDVLKSV

SEQ ID NO: 68742 - protein, 415 aa, Proteus mirabilis
MSHSEHNQTRRRLIKGIGALLLLSVSPVGLAATSSVVAVRVWPASTYTRVTIESSRPLKYRQFALSAPDRIVVDLEGIQLNSVLKGMASQVQTNDPYLKLIRVGQNTPTTVRLVFEIKTPVQPQMFTLKPVAEFKNRLVLDFYPSHAATSEDDPLLALLREYNEGDLQQAVPEQTDTRKPGRAGRDRPIIIMIDPGHGGEDPGAMGKYKTREKDVVLQIARRLRALIDKDAKMKAYMTRNEDVFIPLKVRVAKARKMQADLFVSIHADAFTNRSARGSSVFALSKTGATSNTARYLAQTQNEADLIGGVSRSGDRYVDHAMLDLVQTATINDSLKFGSEVLKLLGGVNKLHKNKVDQAGFAVLKAPEIPSILVETAFISNIEEERKVKTAKFQAQVAESIFQGIKAYFAMVGDLA

SEQ ID NO: 68743 - protein, 638 aa, Proteus mirabilis
MIKLLEQAIAQNLLRPLDLRFAQMLVADENPILLFIFAYLSAQTGAGHVCLPLNIIQQDKLFDGRHTELSQAIWQKMAQPSAKEILAELNQSECVNQGHSDLPSPIILDNGLLYLQRMWRYEEQIAQFFRQEQRVVDIDENQLTNVLNQLFPSVKTHAETNWQKVAAAVAITSPISIISGGPGTGKTTTVAKILAAFVMLTANEKPIIQLAAPTGKAAARLTESLGKALAQLALSEEELKWMPDQAQTIHRLLGAQPESQQVRYHRDNPLQLDILVIDEASMVDLPMMARLIEALPEHCHVIFLGDKDQLASVEAGAVLGDICRFADQGFSQRRFEQIDRLTQGELQKDPASMTTSTKPVSVVSDSLCLLRKSYRFGSHSGIGQLAFAVNQGQVRSAMTLLKKATVTQESTEREKHTDPQDIEFISLDTDESYMKMLQDVAKAYHHYLSLVAQKAAPETILHSFNQYRLLCALREGPFGVTGLNERIEMLLHRQRLIRRPINSYQREYIGRPIMIQRNDSTLGLFNGDIGIMLNSDEGEMKAFFQLPDGTLKAIQPSRLPQHETAYVMTVHKSQGSEFTHTALVLPTQFSPIVSRELLYTAITRAKQKLSLYSSEYMVKMAIQTRIQRRSGLVEKLRY

SEQ ID NO: 68744 - protein, 1212 aa, Proteus mirabilis
MSEVIQAQVLDPYTLPLYQRRLIEASAGTGKTYTIGLLYLRLLLGLGGESAFHRPLSVEEILVVTFTEAATDELRARIRQNIHQLRLACIRHQVENDNNAYQILLDQIPNKMVAAQWLLEAERQMDEAAIYTIHGFCQRMLATNAFESGVLFEQVLIQDEYELKKRVCADFWRRHCYPLSYDVAYAVSEIWSGPEQLLYEIQPYLQGECPEIQGIDFDAKKETVEQRHQAVIEAIDKVKALWRHHCNEIADWITSSGVDKRSYSSRFLPKWIDEITAWATPLETKSYQLPDCLSRFSQATLHEKTTKGAAPEHALFAEIELLCQQSLTLRDVIIANAIPEIRQGIENEKMRRGELGFDDLLTRLDKALQREGGEALADAIRQRYPVAMIDEFQDTDPQQYRIFDTIYGEHTESGLLFIGDPKQAIYAFRGADIFTYIRARQQTDHHYTLNTNWRSAPGMVSAVNKLFLRSKTPFLFDHIPFIEVNSAEKNQHMKFIYQQKTVAPLNFWLAEGESLSTGNYEQLMASQCAMQIRDWLSASDNQQAWLIEQDNKSAVTSADIVVLVRSRREALLIRDALDLLSIQSVFLSNRESVFETNEAKDLLWLLQAVVTPEKERVLRASLASALFGFNAQQIDELNQDEQRWNRYVEQFADYFVLWQKRGVLPMLRKVMIENQIAENLLASQAGERRLTDIMHIGELLQETSLQLDSEHALIRWLAQQISRPDAQAESQQMRLESDKNLVQICTIHKSKGLEYPIVCLPFACNYQEQKGALYHDRDEFYAKLDIFNQPDSVRLADEERLAEDLRLLYVALTRAKFCCYVGVAPLVKGNKRKSGLTDLHKNALGYLLQHGEEGNSELLHQSINQLLDDNIKVITLGDTSTHRYQSPHTTDIALDAAIFKRKINDNWRITSYSGLTAQHSARGYLFDSADLDALVQSIAPGLDTDAKGEKTAQHSDELSIHHFPRGAVAGTFLHSLLEELDFSQPIDESWMQEQLIAQGFEEKWTPLLVAWMETLFHTPLNAQGLCLADIPKEHQLDELQFYLPIEKEMSAAQLTALTRQYDPLSAQCPALNFQQVQGMLKGFIDLVFCWEGKYYVVDYKSNWLGESSEDYTQEAMSNAMRDHRYDLQYQLYTLALHRFLQQRLPDYDYQRHFGGICYLFLRGIDADYPGNGVYTYLPEEKFVEALDALFKGEALEVNGSKVNALGENNSND

SEQ ID NO: 68745 - protein, 305 aa, Proteus mirabilis
MKKWLTLLGASLLGMSSHLTYAHEYLLPTDGSRIIGENVSYTVPDDKRSLETIAAQYQVGLLNMMEANPGIDPLLPEAGKTLQIPLQMILPDTVRKGIVINLAELRLYYYPKEGGTVDVYPIGIGQLGRETPEMVTSVSQLIKDPTWTPTANIRKNYAAKGITLPAVVPAGPDNPMGAYALRLAHSRGEYLIHGTNADFGIGLRVSSGCIRLRPDDIETLFNVVPKGSRVQVINKPIKFTETADGKQFIEVHQPLSQNEDDDPQTMPLTFTKQFTAWYESGKVDKAKVDAEIIRRSGIPVDVTAY

SEQ ID NO: 68746 - protein, 218 aa, Proteus mirabilis
MFTGIVQGKGRVIAIEDKGDFRTHIIELPSELVNNLETGASIANNGCCLTVTKIDGNKISFDLVKETLRLTNLGELTVGSEVNIERAAKYGDEIGGHVMSGHIVTTAEIAKIITSENNLQIWFRIFDQTLMKYILHKGFIGIDGISLTIGDVVNNRFCVHLIPETRDRTTLGRKRLGDKVNIELDPQTQAIVDTVERVMAQQALTVKLQATHEEENEK

SEQ ID NO: 68747 - protein, 470 aa, Proteus mirabilis
MKKTKIVCTIGPKTESEEKLTQLLDAGMNVMRLNFSHGDYEEHGNRIKNLRNVCAKTGKKAAILLDTKGPEIRTIKLEGGNDVSLVAGQTFTFTTDTSVVGNKDRVAVTYDGFARDLTVGNTVLVDDGLIGMKVIKVTDTEVVCEVLNNGDLGENKGVNLPGVSIGLPALAEKDKQDLIFGCEQGVDFVAASFIRKRSDVEEMRAHLKAHGGENIMIISKIENQEGLNNFDEILEASDGIMVARGDLGVEIPVEEVIFAQKMMIEKCNAARKVVITATQMLDSMIKNPRPTRAEAGDVANAILDGTDAVMLSGESAKGKYPVEAVTIMATICDRTDRIMKSRLESYQLGAKLRVTEAVCRGAVEMAEKLDAPLIVVATYGGKSARSIRKYFPTAPILALTNNEETARQLLLVKGVTTQLVNKIASTDDFYRIGKDAALSSGLAHAGDRVVMVTGALVDSGTTNTSSVHVL

SEQ ID NO: 68748 - protein, 502 aa, Proteus mirabilis
SSASKQLTLLGFFAITASMVMAVYEYPTFATSGFSLVFFLLLGGLLWFIPVALCAAEMATVEGWQEGGVFAWVSNTLGERWGFAAISFGYLQIAIGFIPMLYFVLGALSYILDWPELNTDPLTKTIAALVILWGLALTQFGGTKYTATIAKLGFFAGILLPAIILVLLAISYLVSGAPLAIEISSKTFFPDFTQIGTLVVFVAFILSYMGVEASATHVNEMKNPGRDYPLAMFLLMIVAICLSSIGGLSVAAVIPHNEINLSAGVVETFSVLVSHFSSGLAWAVKIIAALLLLGVLAEIASWIVGPSRGMFVAAQQGILPPTLAKVNKNGVPVALVITQLIITTIAIVVLTNTGGGGNMSFLIALALTVVIYLCSYFMLFIGYMHLVCKQADKKRAFNIPGGKGVKLLVAVVGLIVSILAFVVSFFPPSSLPGGSSDTTYVSLLVVSFIIIFALPFIIYACSRKGNKANVSMIHIKSHNAPKGHFFIHPRARSTHYLVPIDK

SEQ ID NO: 68749 - protein, 350 aa, Proteus mirabilis
MIENNRHPFACTTLAITDKKKRVYHGRTMEFSSDEPTSILAYYPQGHTFQQNAPDGTPGLKYSVKYPFMAITAPINLSGTKDVLEGVNSQGLSFSLNMLPNSKLDDLDPQYYASSVPIAAIGEWALGQYATVKELKEIIPQTHFWSQKLLLLRNLPSPFHYAFYDKTGDCIVVEVSDGKLHIYDNPTYCMTNGPIFPWHLTNLNNYTHLSNINVSSSTLGRIKINQPDSGIALATLPSSDTSVDRFIRAVYYSTYYHKVSDPDKQLIELAHIMNRFDRPKDATIDPLLGNDTLTKLHTSEFSVWTALTDLERGIFFFRGYNNLNFQKFTLESFKNESSAVFIKVNLEEAL

SEQ ID NO: 68750 - protein, 1043 aa, Proteus mirabilis
MSEKIPATGGGPSRLFILRPVATTLFMVAILLAGIVGYRMLPVSALPEVDYPTIQVVTLYPGANPEVMTSAVTAPLERQFGQMSGLKQMSSQSSGGASVITLMFQLTLPLDVAEQEVQAAINAATNLLPTDLPYPPIYSKVNPADPPVLTLAVTSSVLPMTQLQDMVETRISQKISQVNGVGLVSLAGGQRPAVRVKLNAQAAASYGLDSETIRVAINNANVNSAKGSLDGPTRSVTLSANDQMKSLDDYRKLIVSYKNGAPIRLADIATIEQAPENNQLGAWANNQQAIIINVQRQPGVNVIETTDNIRNLLPDLVSNLPKSVNVEILTDRTTTIRASVKDVQFELGLAIALVVMVIYLFLRNGVATLIPSIAVPLSLVGTFAVMYFCGFSVNNLTLMALTIATGFVVDDAIVVIENISRYLERGDKPLTAALKGAGEIGFTIISLTFSLIAVLIPLLFMGDIVGRLFREFAITLAVAILISAVVSLTLTPMMCARLLKPESQIKHNRFEMACERFFEKMIAVYAVWLKRVLNHQWITLGVALSTLALTVLLYLFIPKGFFPLQDNGLLQGTIETSQSISYQAMVEKQQQVVEKLIDDPAVENIASFVGIDGSNATLNTGRLQITLKPLDQRDSRIDEIIPRLQARVASIAGITLYLQPTQDLTIDTQVSRTQYQFTLQATSLDELAYWVPKLSQALQESPELTDISSDWQADGMMAYINVDRDSASRLGISMSAIDNALYNAFGQRLISTIYTQANQYRVVLEQNMHNSEGLQALSAVHLTGKEGAMVPLLSIASVEQRLAPLSINHQEQFPATTFSFNVAKDASLEAAVNAVKQAEEQIAMPKDITTQFQGATLAFESALSSTLWLIIAAIVAMYIVLGVLYESFIHPITILSTLPTAGVGALLALMAAGNELDIIAIIGIILLIGIVKKNAIMMIDFALAAEREQGLSPYEAIYQACLLRFRPILMTTMAALLGALPLMLSTGVGAELRQPLGVCMVGGLIMSQILTLFTTPVIYLLFDKLSLYLNRHKRVEHDNGAVS

SEQ ID NO: 68751 - protein, 1027 aa, Proteus mirabilis
MKLFALFIQRPVATTLLSLAISLCGALGFMLLPVAPLPQVDYPVINIYASLPGASPETMASSVATPLERSLGRIAGIDEMTSSSALGSTSITLVFDLNKDINTAARDVQAALNASQSLLPSGMPSRPRYYKSNPSDAPIMILTLTSETQNTGELYDLASTRLAQKISQIEGVSEVSVGGGSLPAVRVALNPDALFNQNVSLDDVRKAISQSNVRRPQGFIHNDENRWQIQTNDELSKAQDYRPIIVHYNQDAIVRLSDVAQVTDSVQNARAAGMSGGEPAILLVIRREAGANIIETVNRIRDELPELRELLPASVNLKVAQDRTPTIRASLAEVERALAIAVALVILVVFLFLRSGRATLIPAVAVPVSLIGTFSAMYLCGFSLNNLSLMALTVATGFVVDDAIVVLENISRHIENGLKPKQAALKGVSEVGFTVLSMSISLVAVFIPLLLMDGLVGRLFKEFAITLTTAIGISLFVSLTLTPMMCAHLLKGIKPKAQSHLRGFGKLIFRLQQGYSVTLQAALRHKRWIMAIFITTLGLNAYLYISAPKTFFPDQDTGRLMGFVRADQSISFQSMKEKMTRFMQEINADKDVDSVTGFTGGGRINSGFMFISLNPLSERTDSANQVINRLRIKLANEPGATLFLMPVQDVRAGGRQANASYQFTLLADDLSELRKWEPLIRKALGELPELVDVNSDKEDKGAEMALTYDRDTMSQLGINVSDANNLLNNAFGQRQISTIYAPLNQYKVVMEVSEQYTQDVSALDKMYVMNTQGERIPLSAFASWYPANAPLSVNHQGLSAASTIAFNVPEGYTLSDAINAIERTMTELGVPNTVRGTFAGTAQIFQETIKSQLILILAAIVTVYIVLGVLYESYIHPLTILSTLPSAGVGALLALRLFDTPFSLIALIGIMLLIGIVKKNAIIMVDFAITAQREGKLSAQEAIIQASLLRFRPIIMTTLAALFGALPLMLSSGDGAELRQPLGITIVGGLLMSQLLTLYTTPIIYLFFDGVRQRWQQRRHNKKEANA

SEQ ID NO: 68752 - protein, 459 aa, Proteus mirabilis
MFTPELLSPAGSLKNMRYAFAYGADAVYAGQPRYSLRVRNNEFNHENLAKGIQEAHELGKRFYVVVNIAPHNAKLKTFIRDLKPVIDMGPDALIMSDPGLIMMVREAFPDMDIHLSVQANAVNWATVKFWRQMGLTRVILSRELSIDEIAEIRKQVPDMELEVFVHGALCMAYSGRCLLSGYINKRDPNQGTCTNACRWEYKVEEGKEDEVGNIVEKYQPIPVKNVEPTLGVGAPTDKVFLIEEAKRPGEYMTAFEDEHGTYIMNSKDLRAIEHVEQLTKMGVHSLKIEGRTKSFYYCARTAQMYRRAIDDAVAGKPFDPTLLTTLEGLAHRGYTEGFLRRHTHDAYQTYEYGYSVSDTQQFVGEFTGKRVNGLAEVDVKNKFILGDSLELMTPTGNIQFTLDALFNKKQQPTDVAPGNGHVVYLPVPDDVDLNFALLIRNLPGTTTRQPHKIDAVEVK

SEQ ID NO: 68753 - protein, 297 aa, Proteus mirabilis
MGQISLLIINGKNSGNEALRQAVYQQRKEGNDIQVRVTWESSDIQRFVQEALHIQAQTIIAAGGDGTINNVASELVRLAPSLPPALGIIPLGTANDFATSAQIPLEMDKALSLAIKGRAVPVDIINVNKTHYFINMASGGFGTKITTETPEALKSALGGAAYFINGLLRIDTLKADQCTVEAENFHWKGEALIIGIGNGRQAGGGQQLCPEALINDNKLNITLVEARELLPSLLTSLFDRKKNDKIIERESDWVTISAAHEMVFNLDGEPLLGDKFEFIVLPEAIHCRLPPQCDLLS

SEQ ID NO: 68754 - protein, 349 aa, Proteus mirabilis
MTDIVSLLGADANSLLEHRCQTIPSENLYLPGSDFVDRVMIDNNRPNTVLRSMQTLFNHGRLAGTGYLSILPVDQGVEHSAAASFAANPLYFDPKNIVELAIEAGCNCVASTYGVLASVSRRYAHKIPFLVKLNHNETLSYPTQYDQTLYASVEQAFEMGAVAVGATIYFGSPESRRQIEEISMAFERAHELGMVTVLWAYLRNPAFKKDGVDYHASADLTGQANHLASTIGADIVKQKMAENNGGFKAIGFGHTDERVYTKLTSENPIDLVRYQLANCYMGRAGLINSGGASGNNDLADAVRTAVINKRAGGMGLILGRKAFKKSMKDGVALINAVQDVYLDKSVTIA

SEQ ID NO: 68755 - protein, 93 aa, Proteus mirabilis
MTIDIENKARINWACRRGMRELDISIMPFFENEYDTLSDDDKRLFVRLLECADPDLFNWLMNHGRPDDEDLYYMVKLIQERNRIRMAEIVNKY

SEQ ID NO: 68756 - protein, 135 aa, Proteus mirabilis
MTLWKSHLTVSWFTQLFSTSVYVIFEIALLLYPWPPGFIYIWVPLLLLLILGWYFSQKNINKRKGDLVLLNGNRIQWKYHEWQIAKQPWISRFGAKITLDSILNNKQITLWVAFDSMPENEWRNFSQLLMQYPDI

SEQ ID NO: 68757 - protein, 313 aa, Proteus mirabilis
MTQTKLSTQTTTDNNQEDNDVIIEQFLDSIWLEQGLSANTLSAYRLDLQALSQWLVTQKLNWLSVTTLDLHAFLATRLDEGYKATSAARLLSTLRRFFQYLYREKLRQDDPSALLSTPKLPKRLPKDLSEQQVENLLSAPCIDEPIELRDKAMLEVLYACGLRVSELVGLSLSDISLRQGVLRVIGKGDKERLVPLGEEAIYWLEQYLQYGRPALMQGKTDDIVFPSLRGQKMTRQTFWHRIKHYAVIAGIDSEKLSPHVLRHAFATHLLNHGADLRVVQMLLGHSDLSTTQIYTHVATERLKVLHQQHHPRG

SEQ ID NO: 68758 - protein, 235 aa, Proteus mirabilis
MKKKLLWLPILFSMVSMPVFADNAAIKAQLAKMQIKAESIQPTPIVGLNAVLSDKGIFYITDDGKYLTAGPIYNINGEEPVSIANQVIMKKIDSLKNEMIVYKAANEKYVITVFTDISCPYCQKLHQEVLELNKQGVTVRYLAFPRNGVKNNVVSQQMNAVWCSGFPKKSLDSAFKGDKIIAIDDCKKININEHFKLGTMMGIQGTPAIVLPDASIYGGYISATNLLELLNKKEK

SEQ ID NO: 68759 - protein, 411 aa, Proteus mirabilis
MKSFDVVIAGGGMVGLALACGLHGCGLRIAIIENHPVTTHFHPQDDFALRVSAINTASELLLKKLGVWENLTALRTAPYQGMEVWDQDSFGRIAFSAQQEGLSHLGTIIENHLIREVLWQKVTSHSDITCYSPAQIERIVWGENEAFISLNDGEMLTARLVVGADGANSWLRKNADIPLTFWDYEHHALVATIRTEQPHDNVARQVFHGEGILAFLPLADPHTCSIVWSLPSSLAEDYKSADKTRFERTLGVTFDMCLGQCELVSERMTIPLTGRYARQFAAPRLALLGDAAHTIHPLAGQGVNLGFMDVAELIGEIRRLKAEGKDFGEYLYLRRFERRRKHAAAVMLATMQGFRELFEGNNPIKKWVRDIGLSLADSLPGVKPKLLEQAMGLSDLPEWLKHKNSVSAEKI

SEQ ID NO: 68760 - protein, 364 aa, Proteus mirabilis
MAKQTPLYDEHVACGARMVDFHGWMMPLHYGSQIDEHHNVRQDAGMFDVSHMTIVDLHGPQVKDFLRYLLANDVAKLTEKGKALYTGMLNASGGVIDDLIVYYFDETFYRLVVNSATREKDLAWITEHAKDYVVDIQVRDDLALIAVQGPHAQEKVQRLLSESHRQIVAAMKPFYGVQLDDLFVATTGYTGEAGYEIAMPKEQAVDYWQKLLAVGVKPAGLGARDTLRLEAGMDLYGQEMDETINPLEANMGWTIAWLPEDRQFIGREALEKLRATGTDKLVGLVMREKGVLRAGSAVHFTDDLGELREGVITSGTFSPTLGFSIALARVPAGIKDSAIVLLRNREIPVEVVKPGFVRSGKALV

SEQ ID NO: 68761 - protein, 328 aa, Proteus mirabilis
MTQNSTQTKRPHAAINLPLTLISLDDWSLITATGADSEKYLQGQLTADIAALPTTEHTLAAHCEAKGKMWSTLRIFHQQAGFAYILRKNVAEKQLTELKKYAVFSKVTFTENTDAVLLGLAGQGAAQALAEFFPEIPRKANEVVNHQNSYLLQLPLPTERFLIVTDEETAKKLATTLPAETSDSDQWLALDIEAGYPIIDTPNIEQFLPQATNLQALPLSICFKKGCYTGQEMVSRAKFRGANKRAMYLLSGGAAQLPDIGGSVEWQLGEDKWRKTGTVLSAVRMADNTIIAEVVMNNDMDADSVFRVQGDTTSRLTIKPLPYSLEDE

SEQ ID NO: 68762 - protein, 325 aa, Proteus mirabilis
MSNEQSIQRLRRLRQSENLRALFQETTLSKNDLALPIFVEEGLEDYQPIKSMPGVVRIPEKRLAYEIERIAKAGIKTVMTFGVSHHLDETGSDAWKSDGLVSRMSRICKDAVPEMIVMSDTCFCEYTSHGHCGVLHGEHVDNDETIHNLGLQAVAAAQAGADFIAPSAAMDGQVAAIRAALDKAGFTDTGIVSYSTKFASALYGPFRDAAGSRLIGDRKTYQMNPMNRREAIRESLIDEQEGADMLMVKPAGAYLDIIRDVRERTLLPLAAYQISGEYAQIKFAALAGAIDEDRVVMETLGSIKRAGADLILSYFALDLAERNLL

SEQ ID NO: 68763 - protein, 555 aa, Proteus mirabilis
MVYDYIIIGAGSAGNVLATRLTEDPDVTVLLLEAGGPDYRFDFRTQMPAALAYPLQGRRYNWAYETEPEPHMNNRRMECGRGKGLGGSSLINGMCYIRGNAMDFDEWAKLPGLEDWNYLNCLPYFRKAETRDIGANDYHGDSGPVSVTTPKKGNNVLFHAMVEAGVQAGYPRTDDLNGYQQEGFGPMDRTVTPHGRRASTARGYLDQAKSRKNLTIETHATTDIIEFEGKKASGVRYFKGTNTTPQHVKARKEILLCAGAIASPQILQRSGVGPEDVLNEFDISPVHVLPGVGQNLQDHLEMYLQYECKQPVSLYPALKWYNQPKIGAEWLFKGTGIGASNQFEAGGFIRSSEKFAWPNIQFHFLPVAINYNGSNAVEVHGFQAHVGSMRSPSRGRIKITSRDPHQHPSILFNYMSTEQDWQEFRAAIRITREIMAQPALDPYRGEEISPGKDIQTDEQLDAFVRERAETAFHPCGSCKMGNDEMAVVDGAGRVHGIESLRVIDASIMPNIITGNLNATTIMIAEKMADKIKGIKPLPASQADYYVAGHSPARRN

SEQ ID NO: 68764 - protein, 375 aa, Proteus mirabilis
MWHTVQNIFNLGIKELRSLSRDKAMLALIVFAFTVSIYSSATVTPGSLHHAPIAVADQDKSQLSARIVNSFYMPYFLPPADITPEQIDGLLDRGTYTFALDIPPNFQRDLLAGRKPEIQVNIDATRMSQAFLGNSYIQNIVMGEAKTFLAKERTNDPLPVDLEVRMSFNPNLTQSWFGSVMAIINNITMLSIVLTGAALIREREHGTIEHLLVMPVTPFEIMLSKIWSMGLVVLLASAMSLVLVVKSLLHVPIEGSVLLFMCGVALSLFATTSIGIFLGTMARSMPQFGLLMIMVLLPLNMLSGGMTSRESMPQFVQDVMQTMPTTHFVSLAQAILYRGADFSIVWPQFIVLIIIGSVFFALALLRFRKTISAMA

SEQ ID NO: 68765 - protein, 900 aa, Proteus mirabilis
MEQAPQWQRPSPDDLLALTRAPHRGRLKIFFGACAGVGKTYAMLQEAQRLHQQGIDVLAGVVETHQRQETAQQLEGLPLLPPLKLHYRGRKLSAFNLDAALARHPAVILMDELAFSNPHKCRHPKRWQDVEELLDAGIDVLTTINVQHIESLNDIVGSITGIRVQETIPDYIFDNADEVVMVDLPPDDLQQRLNEGKVYLAGQAERAIEHFFRKGNLIALRELALRRMADRVDSQVKEFRDSQGGTPVWHTTDSLMVCLGAHGRNDKLVRTAARYAAAFGCQWHAIYVETPKLHQIGEHKRRAILHSLKLAQHLGARTAILSDNQAEKAVIRYAREHNLGKVIIGQRPYQKWQWLKRWVRMRFAERLARYAPDLHVISVALNEEEPRYKTKTFVPQNDKWRQNLKGYLTAIGLCLAITLFSRTFLLALDKANLVTLYLLGVVLIALFFGRRPSIFAALINVISFDLFFVQPHFSLAVLDMQYLVTFSVMLIVGLVVGNLTAGMRYQTRVARYREQRTRHLFEMTRELSRALTLEEVVRTSYHFLSSAFDAKVCLLMPNHHGELTPYNAEGMGQLPIDSGIARWCWDKDQIAGAGTDTLPSVPYQLHPISASQQVLAILAIEPNNLRQVLIPEQQQLLQTFNGLIANALERLQQAEMAEQSRINIEREQLRNALLAALSHDLKTPLTVLFGQSEILLLDLSAEGSAHTEQVSQIRQQILTTSRLVNNLLDMARIQSGGIQVNLQWHLLQEIAGSAVRSLSYLLDKHPLQIDIPADLLLYCDSLLIERVLTNLLENAVKYTASQTKLGIKATVEEDQIHVEVWDEGAGIPTEQLQLIFNKFSRAVKESAIPGVGLGLAICSAIIHLHEGKIWAENNKKGGASFHFVLPLKSLPNIDEIEIKQ

SEQ ID NO: 68766 - protein, 685 aa, Proteus mirabilis
MKKTPLFNRKTMMSAFLDAIKKCTPQAQWHNPVMFIVYVGALLTTGIWFAVLLGYLPPDNHFTFQVMFWLWITLLFANFAESLAESRSKAQAASLRGAKQQSKAVRLQHADLHAPQEIIDSLLLHKGDIVLVNAGEVIPCDGEVIEGGASVDESAITGESAPVIRESGGDFSSVTGGTRVLSDWLIIRCSAEAGNSFLDRMIGMVEGAKRRKTPNEIALTILLTALTLIFLFACTTLYPFSVFAVQFQEHGEVISVVTLIALLVCLIPTTIGGLLSSIGVAGMSRMLDANVIATSGRAVEAAGDVDVLLLDKTGTITLGNRQASRFIPLSGITEKQLADAAQLSSLADETPEGRSIVILAKQRFNLRERDLTSMGASFVPFSAMTRMSGVNIGERIIRKGSVDAIRRHIEVSHSHFPEEVNTIVEQVARAGATPLVVVENQNILGVVELKDIVKGGIKERFAQLRQMGIKTVMITGDNHLTAAAIAAESGVDDFLAQATPEAKLALIRQYQSEGRLVAMTGDGTNDAPALAQADVAVAMNSGTQAAKEAGNMVDLDSNPTKLIEVVHIGKQMLMTRGALTTFSIANDIAKYFAIIPAAFAVTYPQLNMLNIMGLHSPASAMLSAVIFNALIIVFLIPLALKGVHYRPVSAHSLLRRNLSLYGISGLIVPFLGIKLIDMILAIIGL

SEQ ID NO: 68767 - protein, 574 aa, Proteus mirabilis
MSKQTVATYIAKVLHNAGVKRIWGVTGDSLNGLSDSLRKMGTIEWMGTRHEEVAAFAAGAEAAINGELAVCAGSCGPGNLHLINGLFDCHRNHVPVLAIAAHIPSAEIGSNYFQETHPQELFRECSHYCELVSNPDQIPQILAIAMRTAILKKGVAVVVLPGDVALKPAPEDAHENWYPLQSPLIMPNRFEIEKLSEALNNAKNITLMCGAGCAQAHDEVVKLAQTLKAPVVHALRGKEYLEWNNPCSVGMTGLIGFSSGYHAMENADTLVLLGTQFPYRAFYPAKANIIQIDLNPSSIGSHCHVDMAFVGDVKATLNALQPRLKEKTDTAHLDASLKHYAKARKDLDALAQPSERELIHPQYLARRLSELANDDAVFTCDVGTPTVWAARYVKMNGKRRLIGSFNHGSMANAMAQAIGIQALDRKRQVVAMCGDGGFTMLMGDFISLAQMNLPVKVVIFNNSVLGFVAMEMKAGGYLTDGTDLHNPDFAAIANAAGIKGIRVEKGEDLDEALKTAFEHDGPVIVDVVTAKQELSMPPEIKFEQAKGFSLYMMKAIINGRGDEIVQLAKTNWLR

SEQ ID NO: 68768 - protein, 460 aa, Proteus mirabilis
MALWGGRFSQQADQRFKQFNDSLRFDYRLAQQDIFGSVAWSKALVTVGVLSQDEQAQLEQALYELSEEVTANPHSILQSDAEDIHSWVESKLIAKVGDLGKKLHTGRSRNDQVATDLKLWCKEEVAHLRQAIIELQKALVVTAEQNQHAVMPGYTHLQRAQPVTFAHWCLAYKEMLARDESRLADALTRLDVSPLGSGALAGTAYDIDREQLAQWLGFASATNNSLDSVSDRDHVLELLSAAAIGMVHLSRFAEDLIFFNSGEAGFIELSDKVTSGSSLMPQKKNPDALELIRGKCGRVQGALTAMMMTLKGLPLAYNKDMQEDKEGLFDAVDTWSDCLHMATLVLDGLQVRRPRCEEAAKQGYANATELADYLVAKGVPFRQAHHIVGEVVVSAIEQGKALEELALSELQKFSSKITVEVYEILSLQSCLDKRLAKGGVSQQQVSYAITEAKKQLNMDE

SEQ ID NO: 68769 - protein, 916 aa, Proteus mirabilis
MTDETVKSLAEEIQTPVERLVQQFADAGIKKTVSDSVSQKEKETLLAWLNRDKESTSQPEKLTLQRKVRSTLSVPGTGGKNKSVAIEVRKKRTYVNRDAVEKAQAAEQAQREAEEKARREAEEKAQREAQEKAQREAEEKAKREAEEAKKKAEEKAKREAEEAKREAAELAKREAAEKDKVKQNEKPKADKADQEKARRIAEQAELKRKTEEAQRRKAEEEARIAAEKARRLAEENAEKWTSDTSSETEGTDYHVTTSRYARDAEDESDAEVEGGRGRGRAAKAPRPKKNNRHSEKADREEARAAGRSNKKGKGRKNSTLQQGFNKPAAAVNRDVVIGETISVADLANKMAVKGSEVIKTMMKMGAMATINQVLDQETAQLVAEEMGHKVILRRENELEEQVMNDRDTSDEMAVSRAPVVTIMGHVDHGKTSLLDYIRSTKVASGEAGGITQHIGAYHVKTDKGEITFLDTPGHAAFTSMRARGAQVTDIVVLVVAADDGVMPQTIEAIQHAKAANVPVVVAVNKIDKPEADPDRVKTELSQYGILPEDWGGETQFIHVSAKQGLGIDELLDAILLQAEVLELKAVKEGMASGVVIESYLDKGRGPVATILVREGTLNKGDIVLCGFEYGRIRAMRNELGKEVQSAGPSMPVEILGLSNVPSAGDEATVVRDEKKAREVALYRQGKFREVKLARQQKSKLENMFANMEEGKVSELNIVLKTDVQGTCEAITDALVKLSTDEVKLKIIGSGVGGITETDATLAAASDAIILGFNVRADASARRIIEQESVDLRYYSVIYSLIDEIKSAMSGMLEPEYKQEIMGLAEVRDVFKSPKFGAIAGCMVVEGNIKRNNPIRVLRDNVVIYEGELESLRRFKDDVNEVRNGMECGIGVKNYNDVRVGDMIEVFQVIEIKRSID

SEQ ID NO: 68770 - protein, 415 aa, Proteus mirabilis
MNKWGKLCFLILGGGTIFKLSSMKDVFYVPMQQDWGLSNTQIGFGFTIYAIIQTIGLFSSLYIADRFSKKILLPAGLIGVGLCGAYLSTLPPFTGYLIAFGAMAFFGEVVYWPVLLKSVRLLGNKEEQGRMFGFLEAGRGVVDVLVASGALYIFVLFGEGKTGMQAGLIYYTLATIIVGIITYFIVDNDDKKETSSASEANRQVLEGIKNVVKCPNLWLASMSIFFVYSAYCGLTYFIPFLKDIYALPIALIGAYGIINQYALKMIGGPLGGFLADKVAKSPTIYLKWTFLLSAIAMAIFIMLPHDSMNVYLGMTATLGFGAIIFSQRAIFFAPMDEIGTPRQYAGSAMAFGCIIGYMPSMFAYALYGSLLDNFEGIQGYNYVFSIMVTFSLLGFICATILAKRIKMINNTLNIA

SEQ ID NO: 68771 - protein, 502 aa, Proteus mirabilis
MNKEILAVVEAVSNEKSLPREKIFEALETALATATKKKYEQEIDVRVCIDRKTGDFDTFRRWLVVEEVTQPTREITLEAAKYEEPEIELGGFIEDQIESVTFDRITTQTAKQVIVQKVREAERAMVVDQFREQLGEIITGVVKKVNRDNITLDLGNNAEAVILREDMLPRENFRPGDRVRGVLYDVRTETRGAQLFVTRSRPEMLIELFRIEVPEIGEEIIEIKAAARDPGSRAKIAVKTNDKRIDPVGACVGMRGARVQAVSSELGGERIDIVLWDDNPAQFVINAMAPADVASIVVDEDKCTMDVAVESSNLAQAIGRNGQNVRLAAQLLKKHRGDDKWELNVMTADELNAKHQAEANAAIEIFTKHLDIDEDFATVLVEEGFSTLEELVYVPIDELLAIDGLDEETVEALRERAKAALTTIELAQKESLGDNQPAEDLLALEGMERSLAFDLAARGICTLEDLAEQGIDDLTDIDGLNSERAGELIMAARNICWFGNDA

SEQ ID NO: 68772 - protein, 611 aa, Proteus mirabilis
MTTETDMTFADLGLSAPILTALNDLGYEKPSPIQQQCIPFLLDGNDVLGMAQTGSGKTAAFSLPLLHNLDESLKAPQILVLAPTRELAVQVAEAIEDFSKHLPKVNVVALYGGQRYDVQLRALRQGPQVVVGTPGRLLDHLNRGTLDLSKLKGLVLDEADEMLRMGFIEDVENILSKIPAEHQTALFSATMPEAIRRITRRFMNDPKEVRIQSSVTTRPDISQSYWMTYGARKNEALIRFLEAEDFDAAIIFVRTKNATLEVAETLERNGYNSAALNGDMNQSLREQTLERLKNGRLDILIATDVAARGLDVDRISLVVNYDIPMDSESYVHRIGRTGRAGRAGRAILFVDNRERRLLRNIERTMKMSIPEVELPNAELISQRRQEKFAQQIAQQLETSNLDQYRALLPKLAPQGEEALDMETLAAVLLKMAQGERALILPPDPVRRPRREFNDRDDRRNDRERSPRRERRDAGEMDLYRIEVGRDDGVEVRHIVGAIANEGDISSRYIGNIKLYGSHSTIELPKGMPGDLLSHFTRTRIMNKPLNMQLVGDAQPYRERRNSSRRDGQPQGGRRFSKGDQPPRRGNGERGNFRGRGNNENAPRRRSSSHNQ

SEQ ID NO: 68773 - protein, 709 aa, Proteus mirabilis
MLNPTVRKFQYGQHTVTLETGMMARQATAAVMVDMDGTAVFVTVVAKKKVKEGQDFFPLTVNYQERSYAAGRIPGSFFRREGRPGEGETLIARLIDRPLRPLFPEGFLNEIQVVATVVSVNPQVNPDIVAMIGASAALSLSGVPFNGPIGGARVGFIDGQYVLNPTVDELKISKLDLVVAGTAGAVLMVESEADLLSEEQMLGAVVFGHEQQQVVIENINALVAEVGKEKWDWAPEPINQSLHDRIAQLAQTRIGDAYRITEKQERYEQIDAIRDEVISTLLAEDESLDEGEIIEIFSGLEKKIVRARVLAGEPRIDGREKDMVRALDIRTGLLPRTHGSALFTRGETQALVTATLGTARDAQTIDDIMGEHTDTFLLHYNFPPYSVGETGMMGSPKRREIGHGRLAKRGVLAVMPTIEEFPYTVRVVSEITESNGSSSMASVCGASLALMDAGVPIKESVAGIAMGLVKEGENFVVLSDILGDEDHLGDMDFKVAGSRNGVSALQMDIKIEGITREIMQVALNQAKSARLHILGVMESAISQPRAEISEFAPRIHTIKINADKIKDVIGKGGSVIRALTEETGTTIEIEDDGTVKIAATSGEQAKQAIARIEEITAEVEVGRIYNGKVTRIVDFGAFVAIGGGKEGLVHISQIADKRVEKVSDYLTMGQEVPVKVLEIDRQGRIRLSMKEAQATQQEAAETSSEDPAN

SEQ ID NO: 68774 - protein, 89 aa, Proteus mirabilis
MSLSTEAKAKIVAEFGRDANDTGSSEVQIALLTAEINHLQGHFSEHKKDHHSRRGLLRKVSSRRNLLDYLKRKDVARYTALIERLGLRR

SEQ ID NO: 68775 - protein, 318 aa, Proteus mirabilis
MGRRRKGREINGVLLLDKPQDISSNDALQKVRRMFNASKAGHTGALDPLATGMLPICLGEATKFSQFLLDSDKRYRVIAKLGERTDTSDAHGQVIQQRPVQFNQQALDAALESFRGETLQIPSMYSALKHQGKPLYEYARQGIEVEREARPITVYELQFIRWEDDELELEIHCSKGTYIRTIIDDLGEKLNCGAHVIFLRRLEVADYPKERMVTLEQLRAIIDDAQQQDESPFPALDALLLPMDTAVAHFPVVHLTAIMAGYLKLGQPVRVNHTLDEGEWVRVTEGDEKKFIGLAIIKDGLVAPKRLVVDYHALNNPE

SEQ ID NO: 68776 - protein, 1223 aa, Proteus mirabilis
MITQQLTQALAKRILVLDGAMGTMIQQYQLAEEDYRGERFAHWQCDVKGNNDLLVLTQPQIITEIHNAYFEAGADIVETNTFNATSIAMADYQMEGLCAELNEEAAKLARACADKWSALTPDKPRYVAGVLGPTNRTASISPDVNDPAFRNISFDTLVMAYREAICGLIKGGVDLIMVETIFDTLNAKAAIFAIKCEFDNLNIELPVMISGTITDASGRTLTGQTTEAFYHSLRHADALSFGLNCALGPKELRQYIQTLSQISETYVSAHPNAGLPNAFGGYDLDANEMAEQIKEWAQAGFLNIVGGCCGTTPAHIQAIAQAVDGIAPRTLPVIKKACRLSGLEPLVIDDNSLFVNVGERTNVTGSAKFKRLIKEGNYQEALDVARQQVENGAQIIDINMDEGMLDAIEAMTRFLNLIAGEPDIAKVPIMIDSSKWQVIEEGLKCIQGKGIVNSISMKEGEALFIEHAKLVRKYGAAVVVMAFDEIGQADTRERKIEICRRAYHLLTEKAGFPPEDIIFDPNIFAVATGIAEHNNYAVDFIEVCADIKSQLPYALISGGVSNVSFSFRGNDPVREAIHSVFLYYAVKNGMDMGIVNAGQLAIYDSLPDELRNAVEDVILNRHAESTDNLLALAERYRGTKSEEQHSTLAQWRQWEVEKRLEYALVKGITEFIIEDTEACRQQASSPIEVIEGPLMNGMNTVGDLFGEGKMFLPQVVKSARVMKQAVAYLEPYIQATKKAGSSAGKVLLATVKGDVHDIGKNIVGVVLQCNNYEIIDLGVMVPCDKILQTAIDEHVDIIGLSGLITPSLDEMVNVAKEMERRGFSLPLMIGGATTSKAHTAVKIEPNYSHPTVYVQNASRTVGVVAALLSATQKADFVAKTRREYEVVRQQYARKKPRTPPVSLAKARANALQLDWQHYTPPKPNQLGVQQVTANIETLREYIDWTPFFMTWSLAGKYPRILEDEVVGEEVRRVFADANAMLDKLSREKLLTPKGIVGLFPANRLGDDIIIYQDETRQHELLRCCHLRQQTEKKEYPNYCLADFIAPVDSGLADYFGAFAVTGGLEEDALANGYDNAHDDYNKIMVKALSDRLAEAFAEYLHQQVRTKIWGYSPDEALSNDELIREKYQGTRPAPGYPACPEHTEKAKIWQLLNVENRIGMKLTDAYAMWPGASVSGWYFSHPESKYFAVAQIQKDQVEDYAKRRGMSVSEVERWLAPNLGYEP

SEQ ID NO: 68777 - protein, 278 aa, Proteus mirabilis
MTVSPTNKKARKPKTPATQSTAQGGPVQSLSRGLTLLEYISESPGGIALTDLAFQAGLPNSTTHRLLTTLQQHGFVRQVGDLGLWVVGTHAFIVGSSFLQTRNLLVMVHPILRQLMEDSGETVNLAILDQVEFDAVIVDQVQCNALMRMSAPIGGKLPMHASGAGKAFLSTLPENKLLPLLQKKGLMAYTPYTKTLPSALKENLEQARKQGFSFDDEEHALGLRCIGACIYDEHHQPFAAISLSGPVSRMTDSRITELGALVIKAAKQISREYGGVKS

SEQ ID NO: 68778 - protein, 435 aa, Proteus mirabilis
MSMSRSEQIAQLEKEWEQPRWKGIKRPYSAEDVIKLRGSVNPEHTLARRGAQRLWSSLNGKSKKGYVNALGALTGGQALQQAKAGLEAIYLSGWQVAADANTAASMYPDQSLYPVDSVPNVVQRINNTFRRADQIQWSNGIGPQHKDYIDFFLPIVADAEAGFGGVLNAFELMKAMIEAGAAGVHFEDQLAAVKKCGHMGGKVLVPTQEAVQKLVAARLAADVSDVPTLLVARTDADAADLLTSDCDPYDSSFLTGERTAEGFFCTHAGIDQAISRGLAYAPYADLVWCETSTPDLKMAAKFAEAIHDKYPGKMLAYNCSPSFNWKKNLDDSTIAHFQDELSAMGYKFQFITLAGIHSMWFNMFDLAHDYAKGEGMKHYVEKVQEKEFAALSKGYTFSSHQQEVGTGYFDKVTTIIQGGMSSVTALTGSTEEQQF

SEQ ID NO: 68779 - protein, 334 aa, Proteus mirabilis
MTMPTALCPNRMQVHSIHQETPEVWTLNLINHDFYRYKPGQFALVSINNSDETMRAYTLSSSPGLSPFVSLTVRRIDNGVGSTWLTSQVKPGDYLWLSDAQGEFTCADREGTRYLMLAAGCGVTPIMSMTRWLLNNQPKADITVIFNIREQSQFIFEKEWLELANAYPYNLNFIMMPKLPDDKGIFSGRISQEKLAALVPDIASRTVMCCGPNSYMEDTARFAKNLGVCAENIFMERFGDEPMCVDEAQQLTMTIRHPLKQINVPVGMTLLTAMEENSVPVLAACRAGVCGSCKTRIVKGDYEVTSTSTLTADEIAQGYVLACSCRLTGDVELA

SEQ ID NO: 68780 - protein, 370 aa, Proteus mirabilis
MSFLLILNSLFIIYSILLSRGVYLDWEIHGFADWLKSLGILKLLDIPKVMLASALILLSFFMYMGARIAWCVSLILLVTIVFLDVAVYHQAGTQAYTSLALAIVLVISRRAFPHHSLTSAGFVAFICTISLLCFSMLGSLYIGDEFKPHITTLMDAFYFSIVCMTTLGFGDIVPISSNARMFTLTVVILGITVFTTSIVYVMGFLARGTRDIVKKRIAKMHDHFIIIGSSMLAAQLEKGLREQGKPVIAICSDKKQAMYDKEANIIEGDPTNVKTLQTANIRQASWVATLSESDAENTFILLTIQECPDLQAKLITIINKDENREKISRLRPDMLLSLASLGKEIMMKVLCGESINSSDVTDLLINKYLK

SEQ ID NO: 68781 - protein, 457 aa, Proteus mirabilis
MLNSLLIVLLLCAISAFFSLSEISLAASRRIKLKQLVDEGNINAARVLKMQETPGMFFTVVQIGLNAVAILAGIVGESAFSPALKDLFSRFLEAPLAQQLGSVCSFIIVTSMFILLADLTPKRIGMIKPEVIALKIVNPMRFCLALFRPLVWLFNGMADLIFKLFKIPMVRNEDITSDDIFAIVEAGAVAGVLRKQEHELIENVFELESRTVPSAMTPREDVVYFDREETEEDIKHKIATQPHSKFLVCEGDIDHIIGYVDSKELLNRVINGQSLNLKEGVHIRKALIIPDTLTLSDMLESFKTSGEDFAIILNEYAMVMGVITLNDVMTTLMGDLIGPGQEEQIVSRDEHSWLVEGGTPIDDVMRALDIDDFPDSSNYETIAGFMMFRLRKIPKRTDYVKFAGYKFEVVDIDNYKIDQLLVTKIDDIPPVKPVLQEAIPAPQTTAEVPFEHEEHKA

SEQ ID NO: 68782 - protein, 1273 aa, Proteus mirabilis
MMKWLKRITLTLLIIILLVLGALAWILGTQSGLHFAINSAARWVPSLTINSVNGGWQDLRLTGVEYQMPGVDVNVGELSLGLNLSCLKDKQLCVEALGTRDVIVNVDTSALPPAQETPPSEPLTELNAPLPIYLNSLSLANTRVQIDDMALSLNEFTTAAQWEGRQITLKPTVINDLLVALPKTPEDGSVAAMAQDVKEVAATTPQAEPKTPQEQEQALADTIKTIFAKPLLAQLPEIIIPVDINVEGIEGKQLQVSGDTPVTINQLSFQANTQGQQVNLTRLSIDAPEGKVSLNGQITLDKQWPVNLDMQAMLREMAGLEEFKDQQATLSLQGAILDELKLALSLTGTVTANLDAQAELAKAHLPLKLTLESQKVRWPLTGDVQYQLNDTRLRLNGQTDNYDLSLRSNIEGQEIPPAKLTLDAKGNEEKIALTRLRLAALQGHADITGVADWSKAISWNALLTISGINTAKQYPDMPAKLDGRIATTGSLYGGSWQLRVPEITLDGNLKNNLIKARGNAYGNDSGQWNIPQLTLILGKNNLDIAGHLGDQWALDANINAPGLNGLVPGLAGVIKGKVNVRGDINKPKIIADINAQGIKWQDQLSVGSVVVKGDIQSDDVISGKLAITARQLKQADLIIRQLTLDAAGTEKQHKLTLKMDGEPVSGGLTLAGSFDKEKQQWQGTLNNTAFDTPVGEWRLNKAMALNLLAEKQQVTIGSHCWVNPNAQLCVPKEITVGESGSAAITLTRFDLAMIKPFLPPETALRGVFTGDATATWNAKGGLPKASVNLKGQGVGVKQNVDGTVLPIDFDAVTLNAGINNGKATLQWLISIAGNGDFKGHVNVADLEKTRQLSGTVDIDNLTLDLIKPFLGKGEIAQGSVGAQLRLGGNAQSPLLFGQFGINQLKVVGHWIPFDITKGNVDIRFNGATSDLSGRIETPEGYLNLTGNADWRKLDEWRAVVAANGNKLRVSLPPMVRIDVNPDLVFEANPHLLKLDGRIDIPWARIVVQELPESAVSASSDEVMLDKELQPIAPKQTSIPIQSNLAINIGDDVTLDAFGLKARLTGALKVAQSKQGLGLNGQVDIPRGEFKAYGQDLQVRKGQILFSGPVDQPYLNIEAIRNPDNTADNVIAGVKVTGLADKPKVEIFSEPAKTQQEALSYLLRGEGLASGDSDSAQMTAMLIGLGVGQSGQLVGRIGETFGISDLALDTQGVGDSSQVVVSGKITDDLQVKYGMGIFDSLATLTLRYRLMPRLYLQAVSGMNQAIDLLYQFEF

SEQ ID NO: 68783 - protein, 341 aa, Proteus mirabilis
MKALSKLKAQPGIWMTDVPVPELGHNDVMIKIRKTAICGTDVHIYNWDEWSQKTIPVPMVVGHEYIGEIVAIGQEVKGFNIGDRVSGEGHITCGHCRNCRGGRTHLCRNTIGVGVNRPGCFAEYLVIPAFNAFKIPDNIPDELAAIFDPFGNAVHTALSFDLVGEDVLVSGAGPIGIMAAAICKHVGARHVVITDVNEYRLDLAKKMGVTRAVNVSKENLTDVMKELGMTEGFDVGLEMSGAPPAFRTMLSTMNHGGRIALLGIPPSDMAIDWGQVIFKGLFIKGIYGREMFETWYKMAALIQSGLDLSPIITHQFPIDEFQKGFDIMCSGQSGKVILDWQ

SEQ ID NO: 68784 - protein, 399 aa, Proteus mirabilis
MSTHSFYQQINQQLEQTRQDGLFKNERIITSSQSADIAVADGSHVINFCANNYLGLANHPQLIAAAKAGMDSHGFGMASVRFICGTQDLHKTLEKNIAEFLGMEDAILYSSCFDANGGLFETLMGSEDAIISDALNHASIIDGVRLCKAKRYRYANNDMVALRAQLEQAKADNARHIMIATDGVFSMDGVIADLKSICDLADEYGALVMVDDSHAVGFVGAQGRGTHEYCDVLDRVDIITGTLGKALGGASGGYTAARKEVVEWLRQRSRPYLFSNSLAPAIVSASIAVLDMLKSGDDLRARLWRNAALFREKMTAAGFTLAGADHAIIPVMLGDAKLAQQFAARLLDEGIYVTGFFYPVVPQGQARIRTQMSAAHTPEQIERAVAAFIKIGKQLNVIA

SEQ ID NO: 68785 - protein, 342 aa, Proteus mirabilis
MKLIIRSQLVNCAISYRNNMGKRMFKKSLSPLFLLLSSLVIAGCDNAQDTSTTQSTEKQTLTIEHAQGTTEIPAHPQKVVVMNMETLDIVDALGVPVVGLPQTNVHLPKFLEKYTNENEYINEGGLFEPNYEKLSTTAPDLILTGSRARDAYAKLSEIAPSISMDIDSTRFIDSLTERTTTLGQIFGKEEQAKKLLADFNSKIDTVKAKTPDAGKAMVVLVSGGKISAYGPGSRFGFIYDVLGFEPAYTFDSPGSHGNIVNSELLLKLNPDWMFVIDRDAAIGREDSQPAKQVLDNALVRKVNAWNKDQIIYLDASSIYISGGIQTYSRLMDTINQALDQKK

SEQ ID NO: 68786 - protein, 320 aa, Proteus mirabilis
MKTFHLSLGIGLIAILSMISLFIGAGDITPASLFTDPDMRDIFFISRVPRTLSLLLAGGAISVAGLIMQLLTQNRFVEPSLAGTTQSASLGLLVVMLLFPAAGIFTKMMVATVFALLGTVLFMLLLQRIALKTALIVPLVGIMLSAVIGALTIFLAVYFDLLQSLDAWTSGDFSSVLQGRYELLWLVGALALMACWVADSFTVAGMGREFSINVGLNYRKVMIIGLSIIALISGVVVSVVGALPFLGLIVPNLVSLVMGDNIRKTIPWVCLSGGAIVLLCDVIGRLIRYPFEIPASVILGAVGAVIFLFLLLKQQRYAKS

SEQ ID NO: 68787 - protein, 251 aa, Proteus mirabilis
MIEISKISKRYQDTTVLDNITTTIQRGGITSIIGPNGAGKSTLLSVIGRLLMPESGMVSVNGMDVAATESDVLAKNLSILRQENQFVSRLTVEELVGFGRYPYSKGRLTLEDKKVIDESLDFLNLTEFRHRYLDELSGGQRQRTYVAMVLCQDTEYVMLDEPLNNLDMKHAVIMMKLLRKAADELGKTIIIVIHDINFASVYSDYILAMRNGQLYYHGSPKEIMKSDIIEDIFDTPVDVKELDDKLIAMYY

SEQ ID NO: 68788 - protein, 290 aa, Proteus mirabilis
TSKGTLYGIVAIFLWSTIVGLIRNISEYFGAVGGAALIYTTGTLFLILILGVPKLSLFPKRYLAWGALLFVSYEICLSLALGFASDRAQAIELGMVNYLWPSFTLALAVFLNKQRFSILLIVGLLCSFSGLVWVVSGDNPLTIESLMENICRNPLSYILAFIGAVLWAFYSNVTRLISGGHNGIVPFFFLTALALWGQYIFSAPIEWVVNVKSISLLLITGAAIGLANAAWTAGMISGNVTLLATLSYFTPVISTAFSSLLLSTALSFSFWQGVMMVTGGSLICWLATRQ

SEQ ID NO: 68789 - protein, 263 aa, Proteus mirabilis
MKPVTLSTLNRYKQEKKKFATITAYDASFARLFANEGIPAMLIGDSLGMTLQGHDSTLPVTVEQIAYHTRCVRAGAPNAFLIADMPFMSYSTPEQACLNAAILMQAGANMVKIEGGSWLIPTVKMLTERAVPVCIHLGLTPQSVNVFGGYKVQGREEAAAEQLKQDAMALEAAGAQLAVLECVPVSVAKTITGSLNIPVIGIGAGNVTDGQILVMHDLLGLTPNAPKFSKNFLQEAGSLPEAVRLYVQQVEQKLFPQEQHSFN

SEQ ID NO: 68790 - protein, 165 aa, Proteus mirabilis
MSKQQQRVYIILGSNLNSPEQQVKSAIKAISEIPNTTLIAQSPWYRTRPMGPQDQPDYLNMAVAVDTTLAPEELLDHTQAIELAHGRERKAGNRWGPRTLDLDIMLFGDQVIQTERLTVPHYGLKVREFMLYPLADLAPELCFPDDGERLADRLALVPKNGMEKW

SEQ ID NO: 68791 - protein, 446 aa, Proteus mirabilis
MTVIPRDQHPISRKDISDNALKVLYRLNNSGFQAYLVGGGVRDLLLGKKPKDFDIATNATPEEVRRLFRNSRLVGRRFRLAHIMFGPEVIEVATFRGSHEDHETSDRNQSQQAQSGMLLRDNIFGSIEEDAIRRDFTLNSLYYGVDDFAVRDYVGGLADLKSGTIRLIGSPETRYREDPVRMLRAIRFASKLDMRIAPETAEPISQLAPLLRNIPSARLFEESLKLLQTGHGYKTYRLMRHFQLLEPLFPLVASRITEQQDTPMERMIEQVLKNTDYRISKEMRVNPAFLFAAMLWYPLVEHAEKLAQESGLSYYDAFSMAMNDILDEQCRTIAIPKRITTTMRDIWQLQQRLPKRQGRRANKLLEHPKFRAAFDLLELRANVQRNPDLEALAAWWADFQISNNTQQRSMVSELGPGPVRKRTRPRKRPRHPNAKNNAPRQENKHE

SEQ ID NO: 68792 - protein, 668 aa, Proteus mirabilis
MAFILMPSWSLDYGLFDSTADELLTSYGWSNLNISLLWFLLPSILLIRPLHPVGRENRIRHYFDASFAFFCAFITIVTATMEGRGLGYSVIVLFISLGMIAKHALTRLEWLGGDSFVIGSLITVVALIGVFIIFPSVAIFIPMFQDSAGNFAPFEFITILSQAHIVQVMINSILLSIAVGIGCTFFGLILAIYTSRIAVRSAIIGRVFSILPIVTPPFVVGLGVTLMMGRSGYITEFLATYAGLENTNWLYGFTGIWLAQVLAFTPMSFMILDGAIKTIHPSLEEASYTLRANRYQTFFHVFMPLLKPALANAFLIVIVQSLADFSNPLVLGGNFDVIATQIYFYITGSQLDYQAASTLGASLLVFSLLVFCIQYMWIGKRSYVTVSGKSYRGDVQPLPTSLVTFVTSVLGIWVIFNILLYGSIFYGSFTVNWGVDYTLTFDNFIKLFGQGMSDGAWPSLLDTLLYAGIAAPITAILGLLIAYIVVRQDFKGKKSIEFTTMLCFAVPGTVAGVSYILAFNDSPFYLTGTAAIVIISMTMRNVPVGIRAGIAGLGQIDKSLDEASLSLRANSMRTILYVLLPLLRPAILSALIYSFVRAITTVSAIVFLVTPETRVATAYILNRVEDGEYGVAIAYGSILIIVMLAIIFLFDYLIGEARVSRSKAKNAQ

SEQ ID NO: 68793 - protein, 480 aa, Proteus mirabilis
MSRRLRRTKIVTTLGPATDRDNNLEKIITAGANVVRLNFSHGSAEDHLARANRTREIAARLGRHVAILGDLQGPKIRVSTFKEGKVFLNVGDKFLLDANLEKGEGDQTKVGIDYKGLPADVVPGDILLLDDGRVQLKVLKVEGLKVFTEVTVGGPLSNNKGINKLGGGLSAEALTEKDKQDIITAAKIGVDYLAVSFPRTGEDLNYARRLARDAGCECQIVAKVERAEAVANDEIIDEIILASDVVMVARGDLGVEIGDPELVGVQKKLIRRARQLNRVVITATQMMESMITNPMPTRAEVMDVANAVLDGTDAVMLSAETAAGQYPAETVAAMAQVCLGAEKMPAANVSKHRLDMVFDNAEEAIAMSTMYAANHMKGVNAIIAMTESGRTARMMSRISTGLPIFSMSRHEKTLNQTALYRGVTPVYCSTHTDGIAAANEAIMRLCEKGFLVSGDLVLVTQGDQMGTIGSTNTCRILTVE

SEQ ID NO: 68794 - protein, 491 aa, Proteus mirabilis
MAAISTAQACDLVIFGTKGDLARRKLIPSLYQLEKAGYIHPDTRIIGVGRADWDVAAYTNVAHEALQTFLKEEINPEIWQRLSARLDFCNLDVNETDHFIELAKHLKQDKLPAIYYFAMPPSTFSAMCKGLGHAKLNKEPNRVVMEKPLGTDLASSVSINDSVAKYFKESQIYRIDHYLGKETVLNLLALRFANSLFVNNWDNKTIDHVQITVAEEVGIEGRWGYFDQAGQMRDMVQNHLLQILTMIAMSPPADLTADSIRQEKVKVLRSLRRIDMTNVREKTVRGQYTAGFVQGKKVPGYLDEEGANKASNTETFVAIRADIDNWRWAGVPFYLRTGKRMPSKCSEVVVYFKKPALNIFSETYQELPQNKLTIRLQPDEGIDIEVLNKAPGLDHKHRLQTTKLDLSFSETFNQTHLADAYERLLLEAMRGIQALFVRRDEVEEAWKWVDSIINAWECDNELPKPYQAGTWGPVASVAMITRDGRSWNEIE

SEQ ID NO: 68795 - protein, 648 aa, Proteus mirabilis
  MISC_FEATURE (603)..(603): X=any amino acid
  MISC_FEATURE (604)..(604): X=any amino acid
RLGQRRLLLLAGSYTWQREQLRAIQQQCKGDWLILSSEMSEAIKPEHAHQLLGREYLHAVFDANHAFNADALAMLTGTLKAGSWLILCLPDIVQWQHYIDNDSQRWNDAQGVISTPHFMAWLAKITLADKQVIIWQASQPLVLPEIKNTGQQWGVASGMPTIQQQQLLAHLLQAKSGVWSITAPRGRGKSALAGMLIEQWPGSVTVCAPARNSIEVLLSHTHKTIEFYSPDNLLALCHTEHLCRDWLIIDEAATIPIAQLIALCQHFPRVLMTTTVQGYEGTGRGFILKLGDSIPTLQNYQLTVPIRWAQDDPLENWLNQLLLLDEPSFHHANQSGEVVITSCQHFDSEQRANFYQLLTSAHYRTTPLDLRRLFDGQKQHYWSAFIHRHLVGAVWCIEEGGLAKALAQDVWRGIRRPRGNLVAQSLVTYGLSIEAMCLTSLRISRIAVLPAYRRQKVAAKLVADIAKQCQKQNIDYLSVSFGYTDALANFWQQCGFYLVRLGVHKEASSGCYTAMAIYPISAQGQQLLQVAQQALALQSDYITQQTGISLATALPSASEADHWLMMAGFAFAHRSILTVYQSVGYFLQGDRSTLPVISGIFYXXAICRGLCKTIFVSGKKALVTTLRRQCQQLMAEKDEQLAQAYQHW

SEQ ID NO: 68796 - protein, 397 aa, Proteus mirabilis
MSLQDTSFESCIKCTVCTTYCPVAKVNPLYPGPKQAGPDGERLRLKDPMLYDEALKYCTNCKRCEVACPSDVKIGDIISRAKLNYNPKTPKIRDAILSHTDLMGTLSTPMAPIVNTITGLKPVRKILDKALKIDHRRELPKYSFGTFRTWMKKQVEEQARFKDQVAFFHGCYANYNHPQLGKDLVKVFNKMDIGVQLLKREKCCGVALIANGFVKQAKKQATVNLESLTEKIVENNIPVVATSSTCTFTIRDEYEHILDIDTSKVRENIELATRYIYRLLEEGRELPLKHTPLKVVYHTPCHMEKMGWAAYSIDLIKRIPGVEVIVLDSQCCGIAGTYGFKSENYDVAQGIGAGLFRQIEESGCDLVITDCETCKWQIEMSTTKKCEHPISLLARAL

SEQ ID NO: 68797 - protein, 539 aa, Proteus mirabilis
MNVKGLTPKDLEQYGIHDISEVIYNPSYDLLFEEETKPGLTGYEKGTLTSLGAIAVDTGIFTGRSPKDKYIVRDDVTRDTVWWADQGKGKNDNKPLSPQVWADLKSLVTEQLSGKRLFVVDAFCGANADTRLKVRFITEVAWQAHFVKNMFIRPTQEELENFTPDFIVMNGAKCTNPNWKAQGLNSENFVAFNLTERIQLIGGTWYGGEMKKGMFSMMNYFLPLKGIASMHCSANVGESGDVAIFFGLSGTGKTTLSTDPKRKLIGDDEHGWDDDGVFNFEGGCYAKTIHLSKEAEPDIYGAIKRDALLENVVVLADGSVDFDDGSKTENTRVSYPIYHIDNIVKPVSKAGHAKKVIFLTADAFGVLPPVARLTPEQTQYHFLSGFTAKLAGTERGVTEPTPTFSACFGAAFLSLHPTQYAQVLVKRMQACGAQAYLVNTGWNGTGKRISIKDTRAIIDAILNGDIDKAETQTLPVFNLAIPTALPGVNSEILDPRDTYADKAQWDVKADDLADRFVKNFDKYTDTPVGQALTKVGPKR

SEQ ID NO: 68798 - protein, 294 aa, Proteus mirabilis
MSKKDALSRFLFEKSAVRGELVTVTETYQSILENHHYPEPVQHLLGDLLVATSLLTATLKFDGDITVQLQGDGPVRLVVINGNNEQQMRGVARFSDDVKAGSSLKEMMGNGFMVITITPKKGERYQGIVALDGETIEACIDNYFNQSEQLPTRVFIRTGLQDGKAAGAGMLLQALPASAEHSADETAEHFELLTQLTHTIKAQELFTLDTKEILHRLYHEEDVTLYDPQPIAFHCTCSRKRCEDTLVTLSKEDVAHLLQEQGKIDMECEYCGAHYIFTEEDINNINKLSSSNLH

SEQ ID NO: 68799 - protein, 844 aa, Proteus mirabilis
MKFLKYFFIFVFACIILGAASIYGMYKYVEPQLPDVATLKDVRLQTPMQVFSADGELMAQYGEKRRLPLTLQEMPPQLINAFIATEDTRFREHHGIDPIGISRAVVVALTSGQASQGASTITQQLARNFFLTPEKKLMRKIKEAFLAIRIEKELTKDEILALYLNKIYLGNRAYGVGAAAYVYFGKSVHDLSLSEMAVIAGLPKAPSTLNPLYSYDRALKRRNLVLQRMLEENYITREEYDSAKAEPIVAKYHAPQIDFSAPYLTEMVRMEMYQRYGENAYTDGYKIYTTVIRKDQLAAEQALRNNVIDYDMRHGYRGAQEVLWHAGQTPWDDKAINDKLKGIQTYGPLIPAVVLSADAKEAQVVLKNGDKITLDLKAVRWARKFISDTAQGATPSKVDAVVHAGEQIWVRQNSENDWLLAQLPEVNAAFVALDPLNGGIIALVGGFDFELSKFNRVSQSLRQVGSNIKPFLYAAALDKGLTLSTLLNDLPISRWDAGAGTDWRPKNSPPTYAGPIRLRQGLGQSKNVVMVRAMRAMGVDYAADYLLRFGFPNQNIDRTESLALGSPSFTPMQMARGFAVMANGGYLIEPYFIQRIENADGEVIFTAEPKVACPECTDIPVIYGDTTRSIALSDDYMENVAQSQQAQPAETAPDIELEQAPLAETVKESPYAPHVISTPLAFLMHDALRTNLVGEPGWSGTGWRALRDLKRQDIGGKTGTTNSSKDAWFSGYGANIVATAWIGFDDSSRNLGRTAATGGEAGAKTAQPIWNDFMKVALEGVPVQMMPMPKGVVAVQIDRNTGKLAGDGPSMKEYFIEGTQPTEKAKSEVGTRIFEDNGESNELF

SEQ ID NO: 68800 - protein, 457 aa, Proteus mirabilis
MTNASEAILSNLSLDFSQNEFQPLAARMRPETLEQYIGQKHLLAEGKPLPRAIKAGQLHSMILWGPPGTGKTTLAEIIGRYAQADIERLSAVTSGIKEIRAAIDIAHQNRNAGRRTILFVDEVHRFNKSQQDAFLPHIEDGTITFIGATTENPSFELNSALLSRARVYLLRSLTETDIEQVLQQALDDTERGLGGRNIILPDNTRKMIAELVNGDARRSLNLLEMMADMAEVDSQGKRTLTAELLKEISGERSARFDNKGDRFYDLISALHKSVRGSAPDAALYWYARIITAGGDPLYVARRLLAIASEDVGNADPRAMQVAIAAWDCFTRVGPAEGERAIAQAIVYLACAPKSNAVYTAYKAALADAKSKPDYDVPAHLRNAPTQLMKEMGLGAEYRYAHDEPNAYAAGEVYFPAEMAQTRYYHPVNRGLEIKLAEKLDWLSQQDQNSVTKRYRKL

SEQ ID NO: 68801 - protein, 362 aa, Proteus mirabilis
MSQVYNFSAGPAMLPAEVLRRAELELCNWHGLGRSVMEISHRSKEFLEVAHQAEQDLRDLLNVPENYKILFCHGGARGHFAALPLNLLGEKTTADYIDGGYWAKSAADEAEKYCSPNIIKIKTEIDGKIAVKPMKEWQLSDNAAYVHYCPNETIDGIAIHEEPDFDDKKIVIADYSSAILSQPLDVSRFGMIYAGAQKNIGPAGLTLVIIREDLLGKARKETPSVFDYTVLAENDSMFNTPPTFAWYLSGMVFKWLKEQGGLQEIAKRNYEKATLLYSAIDNSDFYINRIATENRSLMNVPFQMSSPALDAVFLKEAEEQGLVALKGHRVSGGMRASIYNAMPFAGVQALVDFMADFERRHA

SEQ ID NO: 68802 - protein, 429 aa, Proteus mirabilis
MLDPNLLRNELDAVAEKLARRGFTLDVEKIRQQEERRKVLQVETESLQAERNSRSKSIGAAKARGEDIEPLRQEVNQLGEKLEAAKAELDKLQADIRDYALTLPNLPHDSVPNGKDDSENVEVFRWGEPKTYDFELKDHVTLGELTDGLDFPSAVKITGSRFVVMKGQIARLHRAIAQFMLNLHTEQHGYQEMYVPYLVNHATLYGTGQLPKFSGDLFHTKPLEEESESQYALIPTAEVPVTNMVRDVILEEDELPLRMTAHTPCFRSEAGSYGRDTRGLIRMHQFDKVELVQIVHPEKSMDALEELTGHAEKVLQLLNLPYRKVVLCTGDMGFGARKTYDLEVWVPAQNTYREISSCSNCWDFQARRMQARFRAKGDKKTQLVHTLNGSGLAVGRTLVAIMENYQTADGRIEIPEVLRPYMNGLEYIG

SEQ ID NO: 68803 - protein, 495 aa, Proteus mirabilis
MADPNLSDLLGALGIQAPSLTLKDMTLDSRKAASGDLFVAIKGHETDGRRYIPQAIAQGVCAVLAEAEGIATHGEIRESHGIPVIYIENLNCQLSKLAGIFYHQPADKLKLIGVTGTNGKTTTTQLLAQWAQGLGEVSAVMGTVGNGLLDHIVPAMNTTGSAVDIQLELQQLVNQGATFTAMEVSSHGLVQGRVSALPFVASVFTNLSRDHLDYHGDMANYEQAKWLLFSTHHSGEKIINADDAVGHKWLTHLPDAVAVTMADKLPENWQGRYVQATQINYHDAGATIHFNSSWGEGEIESPLMGAFNVSNLLCALATLLALEYPLDAVIKASSALTPVCGRMEVFSADNRPTVIVDYAHTPDALEKALQAARLHCTGKLWCIFGCGGDRDKGKRPLMGAVAEQFADKVVITDDNPRSEEPQAIIQDILSGLMDPGRALAIEGRAEAVTNVVMQASPADMILVAGKGHEDYQIVGTRRLDYSDRLTVARLLGVIA

SEQ ID NO: 68804 - protein, 187 aa, Proteus mirabilis
MFEPMELTNDAVIKVIGVGGGGGNAVEHMVRERIEGVDFFAVNTDAQALRKTAVGQTIQIGNAITKGLGAGANPEVGRNAAEEDREALRAALEGADMVFIAAGMGGGTGTGAAPVVAEVAKELGILTVAVVTKPFNFEGKKRMAFAEQGITELSKHVDSLITIPNDKLLKVLGCGISVLDAFGSGND

SEQ ID NO: 68805 - protein, 598 aa, Proteus mirabilis
MKFSRSAKAKTKTKSNAKLRKPEEKTGFVSWRFALLCGGIGIALAALLIRVAYLQIINPDPLIREGDLRSLRVQKVPTARGMISDRMGRPLAVSVPVYAIWADPKVVLEANPDMTDSRWLALADALKLPVNQISQKISATPSARFIYLARQVNPEISDYISKLKIKGINMRQESKRYYPSGEVTAHIIGVTNIDGDGIEGVEKSFNQWLTGAPGERVVRKDGFNRVIENIAQTDSQAAHNLMLSIDERLQSVVYRELTNAVIENKAESGTAVLVDVNTGEVLAMANSPSYNPNNLAGTPKDAMRNRAITDIFEPGSTVKPMVVMSALNNNIIKENTVINTVPYRISGHQIKDVALYRELSITGILQKSSNVGVSRLALAMPASELVDVYSRFGLGKPTNLGLVGESSGIFPIKKQRWSDLERATFSFGYGLMVTPLQLARVYATIGSFGIYRPLSITKVDPPVPGTRVFPEKVMRTVVHMMESVALPGGGGVRAAIKGYRVAIKTGTAKKVGPDGKYINAYISYAAGVAPASRPRFALVVIINEPKAGKYYGGAVSAPVFGTIMGAVLRTMNVEPDALTPDDKSEIVINKKEDTSGRS

SEQ ID NO: 68806 - protein, 418 aa, Proteus mirabilis
MIKATDRKLVVGLEIGTAKVATLVGEILPDGVVNIIGVGSCPSRGMDKGGVNDLESVVKCVQRAVDQAELMADCQISSVYLALSGKHISCQNEIGMVPISEEEVTQDDVDSVVHTAKSVKVKDEHRVLHVIPQEYAIDYQEGIKNPVGLSGVRMQAKVHLITCHNDMAKNIVKAVERCGLKVDQLIFAGLASSFAVLTEDERELGVCVVDMGGGTMDIAIYTGGALRHTRVIPYAGNVVTSDIAYAFGTPPNDAEAIKVRHGCALGSLVGKDENVEVPSVGGRPPRSLQRQTLAEVIEPRYTELLNLVNEEILSVQEQLRQQGIKHHLAAGIVLTGGAAQIDGLVECAQRVFHTQVRIGKPLNITGLTDYAQDPFYSTAVGLLHYGKESHFGEETETEKRSAVSGWLKKLTGWLKREF

SEQ ID NO: 68807 - protein, 262 aa, Proteus mirabilis
MSQAALNNKEIKEKRHSDRPSNGSYLSGLIFFLCVIATIIWGGIQVVNWMKDANRLPISKLVLTGERHYTTNDDVRQAILSLGQPGTFMTQDVNIIQQQIERMPWIRQVTVRKQWPDELKIHLVEYVPFTRWNDTHFLDREGRIFSLPTRLETQGNYPLLYGPQGSEKMVLAGYLAMRDQLLASNLKLKAASMSARQGWQLVLDNDVRLELGRKDTEKRIARFIELYPILQQQTDKRVDYVDLRYDSGGAVGWAPLLLDVNE

SEQ ID NO: 68808 - protein, 315 aa, Proteus mirabilis
MTTNNFSHTSVLLDEAVNGLNIKPSGIYIDGTFGRGGHSRLILSQLGEQGRLIAIDRDPQAIAVANEIDDPRFSIIHGPFSNIEHYINELGLSGKVDGVLLDLGVSSPQLDDPERGFSFMRDGPLDMRMDPTTGQSAAQWLMNAEEDDITWVLKTFGEERFAKRIARAIVARNKTEEPLTRTKQLADLISEASPVKERHKHPATRSFQAIRIYINSELDEIEKALKGAVSILAPAGRLSVISFHSLEDRLVKRFIRDESKGPVVPAGIPLTEEQIKALGSARLSSIHKMKPTGVEVEENPRARSSVLRVAQRIEE

SEQ ID NO: 68809 - protein, 487 aa, Proteus mirabilis
MNTQQLAKLRSFVPEMRKVRHIHFVGIGGAGMGGIAEVLANEGYAISGSDLAPNVVTQQLVALGATIYFNHRPENIRDASVVVVSTAISADNPEIIAAREARIPVIRRAEMLAELMRYRHGVAIAGTHGKTTTTAMISNIYAQAGLDPTFVNGGLVKSAGTHARLGCSRYLIAEADESDASFLHLQPMVAVVTNIEADHMDTYHGNFDNLKETFITFLHNLPFYGRAVMCIDDDVIRSIIPKVGRYITTYGFSEDADVRITHYEQKGAQGFFTISREDMPDLDVVLNAPGRHNALNATAAVAVATEEGIADEHILAALLNFQGTGRRFDFLGNFSLEHVNGQEGEVMLVDDYGHHPTEVDATIKAARAGWPDKRLVMLFQPHRYTRTRDLYEDFATVLNQVDILLLTDVYAAGEAPIPGADSRSLCRTIRQRGKLDPIWVSDVENISSILAGVLTDNDLVLVQGAGNIGKIARRLAETKLQPSLSED

SEQ ID NO: 68810 - protein, 152 aa, Proteus mirabilis
MFRGATLVNLDSKGRITVPSRYRTTLNEASEGQMVCTIDLNQPCLLLYTLPEWEKIELKLAALSSMNPAERRVQRLLLGHASECQMDSAGRLLLASTLRQHAGLTKEVMLVGQFNKFELWDEQVWYQQIKEDILAEQTSQEPLSTRLLDLSL

SEQ ID NO: 68811 - protein, 360 aa, Proteus mirabilis
MSERKRRLMVMAGGTGGHVFPGLAVAHYLQSQGWDIRWLGTADRMEAQLVPKHGIEIEYIRISGLRGKGVKALIAAPIRIIKAIFQARRIMKRYQPDAVLGMGGYVSGPGGVAAWSCGIPVVLHEQNGIAGLTNRWLSKIAKRVLQAFPGAFANAPVVGNPVRDDVLALEAPAERLKGREGAVRVLVIGGSQGARILNHTMPVVAGLLGERVTIWHQAGKGSESDTKLRYQNELSKNSVKSEYKVTEFIDDIAQAYQWADVVVCRSGALTVSEIAAAGLPAIFVPFQHKDRQQYWNALPLENAGAARIIEQNDLTPEAIADTLENWDRHQLMLMAEKAQSVAITDATERVANVIIEVAKK

SEQ ID NO: 68812 - protein, 397 aa, Proteus mirabilis
MSVYAMRRLKQWLVGSYQTDNSAFVPYDRTLLWFTFGLAVVGFVMVTSASMPVGQRLAEDPFLFAKRDGIYMIVALCLALVTMRVPMAVWQRYSSLMLFGSILLLLVVLAVGSSVNGASRWIAFGPLRIQPAELSKLALFCYLSSYLVRKVEEVRNNFWGFCKPMGVMLILAVLLLLQPDLGTVVVLFVTTLALLFLAGAKIWQFLAIIGTGIAAVVMLIIVEPYRVRRITSFLEPWEDPFGSGYQLTQSLMAFGRGDLLGQGLGNSVQKLEYLPEAHTDFIFSILAEELGYIGVVLVLLMVFFIAFRAMQIGRRALLLDQRFSGFLACSIGIWFTFQTLVNVGAAAGMLPTKGLTLPLISYGGSSLIIMSTAIVMLLRIDYESRLAQAQAFVRSPK

SEQ ID NO: 68813 - protein, 436 aa, Proteus mirabilis
MANYQGKKVVIVGLGITGLSCVDFFIRQGVTPKVIDTRQHPAGLDKLPADVEYHTGSFHQVWLNDADLIVSSPGIALSTPELVEARDHGVEIVGDIELFCREAKAPIVAITGSNGKSTVTTLVGEMAKADGIPVGVGGNIGVPALTLLTQPYDLYVLELSSFQLETTYSLTAAAATVLNISEDHMNRYPLGLEQYREAKLRIYDNAKTCVYNADDVLTLPLAGKDARCVSFGIGQGDYQLDNTNRYLNVNGENILATSQMFLSGQHNYTNALAALALADAVGISRKASLAVLNTYHGLAHRFQLVYSHNGVRWINDSKATNVGSTEAALRGLEVEGTLHLLLGGDGKSADFSALLPYLSGDNIRLYCFGQDGQALANLRPQVSQLTATMEEAMRLLAPTVQTGDMVLLSPACASLDQFKSFEQRGDEFARLAQELG

SEQ ID NO: 68814 - protein, 360 aa, Proteus mirabilis
MLVWLAEYLVKYHTFFNVFSYLTFRAIVGLLTALIIALWMGPHLIAWLQKMQIGQVVRNEGPESHFSKRGTPTMGGIMILFSIAVSTLLWARLDNPYVWCVLLVLIGYGIIGFIDDYRKVVRKDTRGLIARWKYFWQSVLALAVAFSMYAIGKDTPATQLVVPFFKDVMPQLGMLYILLAYFVIVGTSNAVNLTDGLDGLAIMPTVFVAAGFALVAWATGNVNFASYLKIPYLMHAGELVIVCTAIVGAGLGFLWFNTYPAQVFMGDVGSLALGGALGTIAVLLRQEFLLVIMGGVFVVETLSVILQVGSFKLRGQRIFRMAPIHHHYELKGWPEPRVIVRFWIISLMLVLIGLATLKVR

SEQ ID NO: 68815 - protein, 460 aa, Proteus mirabilis
MIALSLETIAQVTQGVLSTITQSQANQLMIKSISTDSRKIDDACLFIALAGDRFDAHDFIADVKQKGAVAVLVNRKIDVECPQIIVKDTRLAMGHIAAYIRSLSNAKIVALTGSSGKTSVKEMTASILRHCGETLYTHGNLNNDIGVPLTLFRLTPEHRFAVIELGANHIGEIAYTVDMVKPDSALVNNLFSAHIEGFGSLQGIAQAKGEIFTGLKEQGTAIINQQSNDVALWQQHFNSRQTQWSFSLSADIQADFYPTNIVVNQLTTDFTLHTPEGGVAITLPLPGRHNIANALAASALALSVGATLTDIQQGLAVLKAVPGRLYPVELTTGKIVLDDTYNANDGSMMAGLQVLSQLPGYKIFVAGDMAELGEDSEKCHRDVGRFAHQVGIDRVLTVGHYSQFISQENKGGEHFSFKADLLTQLIPLLQQHDVVSVLVKGSRSSAMEDIVNALKECFEC

SEQ ID NO: 68816 - protein, 220 aa, Proteus mirabilis
MEIYLDTADIEEVRKLSQVLPIAGVTTNPSIIAQSAQPIETLLPELKAAMGGKGRVFAQVIARDIDTMIEEALRIGNIADNTVIKIPVTEAGLVAIKQLKQKNMLVLGTAIYSVSQGLMAALAGADYIAPYVHRMDRQGSDGVRVVRELQTLISMHNLPTKILAASFKTPRQVVDCLLSGASAVTLPIELAYSIIRSPVVDDAINKFTDDWSLAFNRQSL

SEQ ID NO: 68817 - protein, 643 aa, Proteus mirabilis
MIVFSSLQIRRGVRVLLDNASATINPGQKIGLVGKNGCGKTTLLSLLKGDLQAEAGNVTFPSTWSMAWVNQETPALDVPAIDYVIDGDREYRELERRLQQANDNNDGHAIALIHGQLDAINAWTIQSRAATLLNGLGFSQQQLTEPVKSFSGGWRMRLNLAQALICRSDLLLLDEPTNHLDLDAVIWLEKWLKSYNGTLILISHDRDFLDPIVDKILHIEQEKIFEYSGNYSSFEMQRATKLAQQQALFENQQAKIAHLQSFIDRFKAKATKAKQAQSRVKMLERMERVAPAHSDNPFQFSFRQPESLPNPLLSMEKVSAGYGDKIILNNIKLNLIPGSRIGLLGRNGAGKSTLIKLLAGELAPLQGKVALSKGIKLGYFAQHQLEYLRADESALQHLTRLAPQETEQKLRDYLGGFGFHGDKVTDACGQFSGGEKARLVLSLLVWQRPNLLLMDEPTNHLDLDMRQALTQALISFEGAIVVVSHDRHLLRSTTDDLYLVHDSQVEPFEGDLDDYQQWLVDQNRQETQANKTQPDQETTNASNLTAQDKKEQKRKEAEFRQQTQPLRKKLTTLESKMDKLSQELTAIETELSDSQIYEAKNKATLTDCLNRQSITKSALEEVEMAWMELQEKLEEMTNAFESQ

SEQ ID NO: 68818 - protein, 342 aa, Proteus mirabilis
MSIRQLSRLTHRLGILLTLSVMLMISPMTQATETQAGWQQFKARYITPEGRVIDSANQNISHSEGQGYGMLMAVMSDDRQTFVQLWHWTAMSLYRGDLGLFKWRYEPENNQHTPDPNNATDGDILIAWALLKAGEKWHDESYLSASDSIQHAILEHTLVKTENYSVLLPGINGFKTPEEIIINPSYFIFPAWKDFYRVSHDSRWKNLINDSQSLLRKMRFGKYKLPSDWVSLYPDGHLAPSEKWPARFSFDAIRIPLYLAWAQDKLALQPFVNYWQQFDRDKTPAWISIDGKERADYNLTPGMMAVRDLTMKTAIENVDLTKDTDYYSSALHLLAAFAQNNN

SEQ ID NO: 68819 - protein, 306 aa, Proteus mirabilis
MSIRIVPKEQLGKEPSEKSISFIPPVLFPNLKNLYQRRAERFQALAKDNPFADYLEFAAEIALAQEKALHDNPLELDLTPLLSQQTGIAPLDKKTFKRSKHWHALLASIIAELQSVVPESAKIALENLSKASETELEEMATALLNDEYSKVSADKSVFIWAALSLYWAQLAANIPGKAKTEYGENRQFCPVCNSMPVSSMVQIGTTQGLRYLHCNLCETEWHVVRIKCTNCELTGKLNYWSLDSENAPVKAESCGDCGSYLKILYQEKDANVDAVADDLASLILDAKMEEEGFARSSINPLLFPNE

SEQ ID NO: 68820 - protein, 218 aa, Proteus mirabilis
MMKKKGDKILRHTASERINHWVVVIVFLFTAISGLGFFFPSLNWFMNILGTPQLSRLLHPFVGSAMAILFIFMFFRYLKYNFIDKDDLVWAKNIHKVLKNEEAGDIGHYNLGQKGIYWALSISLILLTVSGIIIWRPYFAEYFSIPVIRIALLVHSFAAILLIITVIVHAYAAFWVKGSIRSMVEGWVTRGWAKKHHPRWYREVLEEEKKEAEKQSQK

SEQ ID NO: 68821 - protein, 175 aa, Proteus mirabilis
MESSFTPTEELLNTRATQQKSLNKDIPYQEILLTRLSMHVQSKLLESRNNMLKSQGINETLFMALMILDTTENRSIQPSELSAALGSSRTNATRIADELEKQGWIERRESHNDRRCLHLHLTDAGEEFLNSLLPPQHECLKKIWSVLDEGEQKQLETLMRKLLLQLDTLADNQQE

SEQ ID NO: 68822 - protein, 399 aa, Proteus mirabilis
MAIKLEVKNLYKIFGEHPKRAFELLGSGMNKDQIFDKTGLTVGVQNANLAIEEGEIFVIMGLSGSGKSTLVRLLNRLIDPTKGEVLIDGENITTMSDKDLRQVRRKKISMVFQSFALMPHMNVLDNTAFGMELAGISKEERYEKAMAALEQVNLSSHAQSWPDELSGGMRQRIGLARALANDPDILLMDEAFSALDPLIRTEMQDELLSLQGDKQRTIVFISHDLDEAMRIGDRIAIMQGGVVVQIGTPDEILNNPANDYVRTFFRGVDISHVFSAKDIAKRRPETLLHIAPGFGPRSALKVLEDEDRNFGYLIERGRKFAGIVSVTSLEEALKAKQPIGSAILTEPCAINGDTPLNELISTVAQSPCAIPVIDEKNRYIGLISKGMLLQALDKETPNE

SEQ ID NO: 68823 - protein, 322 aa, Proteus mirabilis
MSASYLSRVNAINWNRIEDEKDLEVWNRLTMNFWLPEKIPLSNDIPSWNTLTQAEKQLTIRVFTGLTLLDTIQNTVGAPTLMPDAQTPHEEAVLSNICFMEAVHARSYSSIFSTLCLTTDVDDAYRWSEENTYLQKKSDIILRYYQDSDPLKKKIASVFLESFLFYSGFYLPMYWSSRGKLTNTADLIRLIIRDEAVHGYYIGYKFQNQLLNKSSLEKQDIKDFSFSLLLDLYDNEVKYTEDLYDSVGWTEDVKKFLHYNANKALMNLGYEALFPDEITNVSPAILSSLSPDANENHDFFSGSGSSYVIGKTINTEDDDWDF

SEQ ID NO: 68824 - protein, 708 aa, Proteus mirabilis
MTHSIEQLDYHALNAMLNLYDEQGNIQFDKDKLATHHFFRQHVNQNTVFFHDLKEKLDFLVQQHYYEAQVLEQYDFPFIKQLFKHAYSKKFRFQSFLGAFKYYTSYTLKTFDGERYLERYEDRVCMVALTLAQGNTKLATHLVDEIISGRFQPATPTFLNCGKKQRGELVSCFLLRIEDNMESIGRAVNSALQLSKRGGGVAFLLTNLREAGAPIKRIENQSSGVVPVMKMLEDAFSYANQLGARQGAGAVYLHAHHPDIYHFLDTKRENADEKIRIKTLSLGVVIPDITFELAKRNEDMYLFSPYDVERVYGVPMSEISISEKYTEMVNNAEIRKKKIKARAFFQTLAEIQFESGYPYIMFEDTVNRANPIAGRINMSNLCSEILQVNSASEYNPDLSYRQIGHDISCNLGSMNIAMAMDSPDFAHTVNVAIRALTSVAQMTKIESVPSIEKGNQASHAIGLGQMNLHGYLAREGIYYGSEEGLDFTNIYFYTVTYYALLASNQLAIETKQRFKGFEQSKYATGEYFDKYLSKQWLPKTQKVHQLFSQSNIHIPTQEDWQKLKLSIMTHGIYNQNLQAIPPTGSISYINHSTSSIHPIVAPIEIRKEGKIGRVYYPAPFMTNENRHFYQDAYEIGAEKIIDTYAQASQHIDQGLSLTLFFSDEATTRDVNKAQIYAWRKGIKTLYYIRIRQTALAGTEIKGCVSCAL

SEQ ID NO: 68825 - protein, 209 aa, Proteus mirabilis
  MISC_FEATURE (75)..(75): X=any amino acid
MSVILYTKPNCVQCSATERALQQQKIPFTAVDLTQDTQALAKIVSMGYRQVPVVVNGDEHWSGFCPDKIRQIARXRSQLMQSTAPLIYFSSRSENCHRFVQKLNLQATRIKEDEPLQATQPFVLLCPTYGGGGVKGAVPKAVIQFLNIPENRQLIRGVIASGNTNFGSAYGLAGDIIAQKCQVPFLYRFELLGTPEDVKRVKTGLSTFW

SEQ ID NO: 68826 - protein, 344 aa, Proteus mirabilis
MNEPISLQSFNTFGLKANARHIETAKNTDELCRYWQNAQDQKLPILILGGGSNVLFIEDFNGTVIRNCISGIEITEDEQQWHIHVGAGENWHNLIKSLIEKHIYGLENLALIPGNVGSAPIQNIGAYGKELKDVCAYVDIVELSTGKVTRLTNEECQFGYRDSIFKHHYQQGYAIIAVGLVLNKHWEPILTYGDLAKLSPETVTPQIVFDSVCGMRTSKLPDPALTGNAGSFFKNPIVDIKLAQRLKSKYPFCPQYVQHNGVKLAAGWLIDQCGLKGYQSGGAAVHTKQALVLINKEGKASGRDIVNLASYIRQKVFERFGVQLEPEVRFIGRHGEINAVDAIS

SEQ ID NO: 68827 - protein, 426 aa, Proteus mirabilis
MHPLEKIVQQHKSGKQNGIYSVCSAHPLVIEAALLQALDDDSFLLIEATSNQVDQFGGYTGMTPADFYQYVIEKAENVGFPVEKLILGGDHLGPNRWQHLNAEEAMANADVLIAHYVAAGFKKIHLDCSMSCADDPIPLTDEIVASRAARLAVIAENTAKKTFGFSDIVYVVGTEVPVPGGAAEELDTVEVTSPDAARKTLACHRQAFYDAGVGECWTRVIGLVVQPGVEFDHTGIIDYQSEKAQALSQVVNDYSHLVFEAHSTDYQTNQAYQQLVHDHFAILKVGPALTFAMREGLYALCAIEETLFPLEKCSRLREKMEQLMCREPNFWQKYYHGDERQLAFARVYSFSDRIRYYWPDAEINTAIDTLMDNLSVKPIPLPLLSQYLPYQFTQFREGKIAGTPESFVIAKIRDVLSVYADACNVH

SEQ ID NO: 68828 - protein, 389 aa, Proteus mirabilis
MNQRYAILADRTFTPEGIRYLCYVHVNGENIESITTQAPTDCPVIRLKGKSLLPGFVDIHIHGREGADVMDATQQGLQTIADALVKTGVVAWVATTVTAPMEDIRHALLQVREFVSKPQATGALLLGSFLEGPYFTERHRGSHPVKYLKAPTICELETLLDSAGGSLLRVAVAPEAEGAMNAIDWLVSRGIKPSVAHTAATYEQASRAFSHGADCGVHLYNGMTGLHHREPGCCGAVLYHSVLAELIADGIHVHPVMMQLAYRMKGYQQIALITDCMRAGGLADGDYTLGAQTVTVTNGQAKTADGSLAGSTCSLDSALRNMVQLAHIPEWEAVQMASAIPAEYLGIGDKLGYIKAGQQASFAVVDECFHLTDTFIRGNHIYSVSGDNA

SEQ ID NO: 68829 - protein, 284 aa, Proteus mirabilis
MYLVSTRNMLNKAQHENYAVPAFNIHNLETIQVVMETAAEMASPVILAGTPSTFAYAGSDYLISICQQAAEQYRIPVALHLDHHENIPDICNKVISGVRSAMIDASHFPFEENIRLVKEVVNFCHYWDCTVEAELGRLGGQEDDLIVDAKDALFTDPDSAVQFIKATGIDSLAVAIGTAHGMYKHEPHLDFDRLHAIRQKTEIPLVLHGASGIPDTDVRHCIDLGICKVNVATELKIAFSNAIKQYFLDNPDASDPRHYLVPGKAAMKAVVADKIRVCKSDGKL

SEQ ID NO: 68830 - protein, 536 aa, Proteus mirabilis
MTLPFVKKSILAGIIATSCLSLPISAHAGGTPEKPNVLLIVMDDLGTGQLDFVLDTLDVDALAQRPTPPRYKGDINKMIEAARIAMPNVSDMAENGAKMTNAFVAHPVCGPSRAGIFTGRSPASFGTYSNDDAILGIPQDIKLLPSLFQENGYATASIGKWHNAKVIRKPKINENKQTRDYHDNMISTPEAGYAPHERGFDYAFSYYASGVALWNSPAFWRNGVNVPAPGYTTHLLTDETLKFIDEHKDKPFFINLSYSVPHIPLEQASPAKYMDKFDTGNVEADKYFAALNAADEGIGQIIAKLKENGELENTLIFFLSDNGAVNESPMPMNAMDRGFKGQMFNGGVRVPFIAYQPGTIPAGTKSDAMISALDILPTALQVADIQIPDSLQVEGKNIMPLLKGETTRSPHAYLYWAGPGTKHYSEENQEFWHGYHQWITYQRQTPPVNPNLEKLSKGAWAVRDGEWALYFYDDGKNQPQLFNDNTDPGESIDLAKQNPQKVAELKNAYYQWIKDKPKPVIWGQDHYQILVDSAKP

SEQ ID NO: 68831 - protein, 806 aa, Proteus mirabilis
MAIKKNELYSSLWASCDELRGGMDASQYKDYVLTMLFMKYVSDKYKGDPYGMIVIPQGASFDDMVALKGDKEIGDKINKIISALAEENDLKSVIDVADFNDEDKLGKGKEMIDRLSKLIGIFEGLDLSSNRADGDDLLGDAYEYLMRHFATESGKSKGQFYTPSEVSRILSKVIGINKNTLQDATVYDPTCGSGSLLLKASDEAPRGLSIFGQEMDNATSALARMNMILHNNATAKIWKGNTISDPQWKEANGQLKTFDFAVANPPFSNKNWTNGINPKEDEFDRFRWGIPPEKNGDYTFLLHIIKSLKSTGKGAIILPHGVLFRGNAEARIRENLIKQGYIKGIIGLPANLFYGTGIPACIIVIDKEHAQARESIFMVDASKGFIKDGNKNRLRSQDIYKIVEVFTKQLEQPHFSRMVPLSEIVANDYNLNIPRYIDSSEPEDLHDLSAHLQGGIPNRDIDALERYWQIFPSIRAALFKPAREGYSEALVKASEVKNTILNHDEFKQFATNSLQHYHVWAHASNLAEISVGDQPKALIAEISESLLQSYSQTPLLSKYDIYQILMDYWSDTMQDDVYVLVQDGWSTGKVLRELEVKKGEKLRETPDLVIGKTKYKAELIPPALIVARYFADEQTKIDTLQSKLDSASQELETYLEENSGDDGLLNEALNDKDKVTKATVTARLKIATDPDEKSALKQAQKLFDNEANAKKALKKAQDALDLAVFKQYPKLSIDEIKNLIVDDKWLATLQSNIEAEIERVTQQLANRVKELEERYNEPLPAITKSVENLSEKVAGHLKAMGLEWEL

SEQ ID NO: 68832 - protein, 664 aa, Proteus mirabilis
MTTRKTLANAIRFLSMDAVQKAKSGHPGAPMGMADIAEVLWRDFLNHNPTNPHWADRDRFVLSNGHASMLIYSLLHLSGYQVSLDDLKNFRQLHSKTPGHPEYGYTPGVETTTGPLGQGIANAVGFAIAERTLAAQFNRPGHDIVDHYTYAFMGDGCMMEGISHEVCSLAGTLQLGKLIAFYDDNGISIDGKVHGWFTDNTAERFEAYGWHVISGIDGHDAASIKAAIETAQQITDKPSLLICKTTIGFGSPHKAGTADSHGSPLGDAEIAETRKALGWEYGPFEIPQEIYKEWDAKEAGKAKEAAWDAKFAEYAAQFPELAAEFKRRMSGELPANWEKESTAFIEQLQHNPASIASRKASQNTLEAFGKVLPEFMGGSADLAPSNLTMWSGSKALNEDKAGNYIHYGVREFGMSAIMNGIALHGGFVPYGATFLMFMEYARNAVRMAALMKIRSIFVYTHDSIGLGEDGPTHQPVEQMASLRVTPNMSTWRPCDQVESAVAWKYAVERKDGPTALIFSRQNLAQQPRTPEQLANIEKGGYILKDCDGTPELIFIATGSEVELAVNAYDQLTAEGRKVRVVSMPATDAFDKQDADYREAVLPAAVKARVAIEAGIADYWFKYVGLDGVIVGMHSFGESAPANELFAEFGFTVENVVTQAKTLLK

SEQ ID NO: 68833 - protein, 238 aa, Proteus mirabilis
MHFYRTLMPIAAMTFDLDDTLYDNVPVMNKTEEETLAFIRQYDERFHHFTEHDVDAYKQPLLENNPDIFHDITQWRWLAAKNMLLDYGYSETKAQQGADEIMAHFAYWRSRINVPNNTHHVLTQLAEKIPLIAITNGNANPLSCGLGQYFTHILKAGPDGRSKPYPDMFDKAASLLKLPHQNILHVGDHLVTDVEGAVKSGLQACWINLDNRSLFTEGETRVMPHIEITELAKLVELI

SEQ ID NO: 68834 - protein, 718 aa, Proteus mirabilis
MDVSYLLEGLNDKQREAVAAPRVNMLVLAGAGSGKTRVLVHRIAWLLSVEQASPFSIMAVTFTNKAAAEMRHRIEDLIGTSQGGMWIGTFHSLAHRLLRAHYLDAGLPQDFQIIDSDDQYRLIRRIVKSMALDDKQWPPRQGMWYINGKKDEGLRPQHIQTYGNPVETTWLKVYQAYQEACDRAGLVDFAELLLRAHELWLNKPQILEHYQHRFTNILVDEFQDTNRIQYAWIRMLAGQTGKVMIVGDDDQSIYGWRGAQVENIQNFLNEFPGAETIRLEQNYRSTSNILKAANALIANNSDRLGKNLWTEGAEGEPISLYCAFNDLDEARYVVGRIKRWHEEGGALADCAILYRSNAQSRIMEEALLQANMPYRIYGGQRFFERQEIKDALSYMRLTANRHDDASFERVVNTPTRGIGDRTLDVVRQVARDNQITLWESALQVIEHKMLAGRAIAAIARFLELIETLANETADMPLHVQTDRIIRDSGLKAMYEQEKGEKAQARIENLEELVTATRQFSYQDEDEDLMPLQAFLSHAALESGEGQADAYQDAVQLMTLHSAKGLEFSQVFIVGVEEGMFPSQMSLDEGGRLEEERRLAYVGVTRAMKKLTLTYAENRRLYGKEVSHRPSRFIGELPKECVEEVRLRATVSRPVNHHRLGTPIVSNDTGYSLGQRVKHPKFGEGTIINIEGSGEHCRLQIAFNGEGIKWLVAAFARLE

SEQ ID NO: 68835 - protein, 313 aa, Proteus mirabilis
MSKSTIRIATRQSPLAMWQALYVKEQLQIAHPSLVVELVPMVTKGDIILDTPLAKVGGKGLFVKELELALLSSRADIAVHSMKDVPIDFPEGLGLVTICEREDPRDAFVSNHYDSLEQLPAGSVVGTSSLRRQCQLKALRPDLIIRDLRGNVGTRLSKLDNGDYDAIILAVAGLKRLKLTERIRSSLSAEQSLPAVGQGAVGIECRLDDHDTQALLAALNHADTATCVKAERAMNTRLEGGCQVPIGSYAIWQNGKIWLRALVGSPDGETILRGERLVSPEDAEQAGISLAEELLDKGAREILTAVYQGNTAI

SEQ ID NO: 68836 - protein, 307 aa, Proteus mirabilis
MSQIIDVPETLSLAIDSFLSYIEVERRLSPVTVENYQRQLMTIAQMMVAIKINQWSLLESQHVRMLLAKSHRSGLQPASLALRFSALRSFLDWQVSQGMLAVNPAKGVRTPKSGRHLPKNMDVDEVSQLMNIDLKDPLSVRDRTMLEVMYGAGLRLSELTNLNINDIDLQEGEVRVLGKGSKERKVPLGRKAVEWLQHWFAMRELYSPEDTAVFISTKSGKRLSVRSVQKRFELWGVKQGLSSHVNPHKLRHSFATHLLESSGDLRAVQELLGHANLSTTQVYTHLDFQHLAKVYDAAHPRAKREKS

SEQ ID NO: 68837 - protein, 777 aa, Proteus mirabilis
MNESLSRIIAQELSVKPQQVLSAITLLDEGNTVPFVARYRKEVTGGLDDTQLRQLETRLSYLRELNDRRQTILKSIEEQGKLTEELRSSINETQSKTELEDLYLPYKPKRRTRGQIAIENGLEPLADLLWNEPQHTPEDAASAYINPEKGIDDSKAALDGARYILMERFAEDAGLLAKVRQYLWKNAHLVSKVVDGKEAEGAKFSDYFDTHEPIAHVPSHRALAMFRGRNEGILQLSLNPDPQFEEAPKESYGEQLITEHLGLRLNNQPADSWRKAVVSWTWRIKVLMHLETELMGQLREKAEDEAINVFARNLKDLLMAAPAGMRATMGLDPGLRTGVKVAVVDSTGKLIATDTIYPHTGQADKAAASVAALCIKHNVELVAIGNGTASRETERFFADTVKRYPEVKAQKVIVSEAGASVYSASELAAKEFPDLDVSLRGAVSIARRLQDPLAELVKIDPKSIGVGQYQHDVSQTLLAKKLDTVVEDCVNGVGVDLNTASVPLLTRVAGLSQSIAQNIIAWRDENGRFVDRKQLLKVARLGPKAFEQCAGFLRIRDGKNPLDASTVHPEAYPIVENILQSIHQKIDQVMGNSALLSQINAREFVTEQFGLPTINDILKELAKPGRDPRPEFKTATFAEGVETMNDLVSGMILEGTVTNVTNFGAFVDIGVHQDGLVHISSLSDRFVEDPHTVVKTGDIVKVKVLEVDLPRKRIALTMRLDEVAADSDHKRQSVTKDNASKHSRGQKPTRNRQSNTGNNAGNSAMSDALAAAFGKKR

SEQ ID NO: 68838 - protein, 353 aa, Proteus mirabilis
MGVFNMETADLPDNTLILDSLIHSVLVINQEFIICYANHAALQLLAQSRRKLFETPFSALFSYSSFDEQLMRETLANGQSFTDNEVILVINNQSHTMSLSAQPISEQHILLELAPMDSQRRLSQEQIQQAQQMAARELVRGLAHEIKNPLGGLRGAAQLLAKSLPDPALTEYTQVIIEQADRLRALVDRLLGPQHPGTKTFQSIHHVVERVAQLITLECPENVTLLKDYDPSLPELSHYPDQIEQVLLNITRNALQAVEKTGGTIILRTRTAFQVTLQGERHRLVARIDVIDTGAGIPPHLQDTLFYPMVSGREGGNGLGLSIARSLVDQHAGKIEFTSWPGNTEFSIYLPIK

SEQ ID NO: 68839 - protein, 469 aa, Proteus mirabilis
MSLEHVLSMIEEHKVRYIDLRFTDTRGKEQHITIPAHQVNDDFFEEGKMFDGSSIGGWKGINESDMVLMPDATTAMLDPFFQDPTLIIRCDVLEPGTMQGYDRDPRSISKRAEDYLKSSGIADTVLFGPEPEFFLFDDIRFKNDISGASYAINDIEAAWNTNTQYEEGNKGHRPMVKGGYFPLPPVDSSQDIRSTMCNIMEEMGLVVEAHHHEVATAGQNEVATRFNTMTKKADETQIYKYVVQNVANVFGKTATFMPKPLVGDNGSGMHCHMSLSKNGVNLFAGDKYGGLSEMALYYIGGIIKHARALNAFTNPTTNSYKRLVPGFEAPVMLAYSARNRSASIRIPVVASMKARRIEVRFPDPLANPYLAFAAQLMAGLDGIINKIHPGDAMDKNLYDLPPEEAKEIPTVAGSLEEALNALDNDREFLTRGGVFTDDALDAYLELLRTDVQRVRMAPHPLEFEMYYSA

SEQ ID NO: 68840 - protein, 620 aa, Proteus mirabilis
MYNNTLISTMPEANFVIENLRNIAIIAHVDHGKTTIVDKLLQQSGTFGERETVAERVMDSNDLERERGITILAKNTAIKWNDYRINIVDTPGHADFGGEVERVMSMVDSVLLLVDAMDGPMPQTRFVTQKAFANNLKPIVVINKVDRPGARPDWVVDQVFDLFVNLGATDEQLDFPIIYASALNGIAGTDYNDMADDMTPLYEAIVKYVEPPKVDLEGTFQMQISQLDYNNYLGVIGIGRIKRGKVKPNQQVTIIDSEGNTRNGKVGKVLGHLGLERIDVDVAEAGDIIAITGLGELNISDTICEVGAVEALPALAVDEPTVSMYFCVNTSPFCGREGKFVTSRQILDRLKKELVHNVALRVEETEDPDAFRVSGRGELHLSVLIENMRREGYELAVSRPKVIFREIDGRKQEPFEQVTIDIEEQHQGDVMQAMGERKGEMRDMQPDGKGRVRLDYIIPSRGLIGFRTEFMTMTSGTGLLYATFSHYDDVRPGEIGRRNNGVMISNGQGKAVAYALYSLQDRGKLFVTHGAEVYEGQVIGIHTRSNDLTVNCLTGKKLTNMRASGTDEATTLTPHIKQTLEQALEFIDDDELVEVTPQSIRLRKRHLSENDRRRAYRSKD

SEQ ID NO: 68841 - protein, 249 aa, Proteus mirabilis
MDFTVIADNWQYLLFGAYPDGPLEGAALTIFISVIAGIVSIILGTLGGIALAMLRGVWVNLFAAFLGFFRAIPVIMLIFWLYFLLPVVLGMEIPEITTVICALALITSSYIAHGVKAGILAIGKGQWQAGLSLGFNRWQTLWYIVLPQALRMMVPSFINQWIALIKDTSLAYVVGVGELSFLATQVNNRSMVYPMEVFLFVAFIYFVLCFSLELIANRVGKLFTTQKEKRSFWQYVIPNKKPSLSEKII

SEQ ID NO: 68842 - protein, 258 aa, Proteus mirabilis
MTMANDNAGNKIQVRDLNFYYGKFHALKNISLDIAKNKVTAFIGPSGCGKSTLLRTFNKMYELYGEQRAEGEILLDGNNILTDKQDIALLRAKVGMVFQKPTPFPMSIYDNIAFGVRLFEKLSRAEMDERVQWALTKAALWNETKDKLHQSGYSLSGGQQQRLCIARGIAIRPEVLLLDEPCSALDPISTGRIEELISELKSEYTVVIVTHNMQQAARCSDYTAFMYLGELIEFSDTDTLFTRPAKKQTEDYITGRYG

SEQ ID NO: 68843 - protein, 319 aa, Proteus mirabilis
MAEHTTVIKAPSKRGDVIFSALVRLAALITLLLLAGIIVSLIFASWPSIQQFGLSFLWTKEWDPPAQEFGALVPIYGTVVTSIIALIIAVPVSFGIALFLTELAPNWLKRPLGIAIELLAAIPSIVYGMWGLFIFAPLFATYFQEPVGNVLSSVPIVGELFSGPAFGIGILAAGVILAIMIIPYIASVMRDVFEQTPVMMKESAYGIGCTTWEVIWNIVLPYTRNGVIGGVMLGLGRALGETMAVTFIIGNTYQLDSASLFMPGNSITSALANEFAEAETGLHTAALMELGLILFVITFIVLAISKFMTLRLSKNEGAR

SEQ ID NO: 68844 - protein, 446 aa, Proteus mirabilis
MRRLRLSPHNKLTRSLFLVISLLFFSLIASYVVVQHLIVGPSLQQFNKVLAYEIRTLVPEELILVDGTPLKISPALRNKIYNELGISFFDKDAALKAGLEWAREDLELSQQMTDYLNSDTTIWLENTLEYPILWINTQLSPTLWIRVPLTELGQNFLLPVYRQAIIFIIIVVAFFWLYNRFQNRPLHEVEYAARRIGKGVIPPPIPESGTAEMRSIIRAFNQMSSDIRSLDNDRTLVMAGVSHDLRTPLTRIRLATEMMSPEDSYLADSINKDIEDCDAIIGQFLDYMRTGKEMSLELCDMNGLLREVICAESNSGKVSEEHLYPYPINITANPIAVKRALTNMIVNATRYGHGWISITSNQNEEYAWFQVEDDGPGIAKEDRQRLFQPFVQGEQARSSTGAGLGLSIIRRIMDAHGGFVELGDSTKGGLLIRANFPLKVQEDEDD

SEQ ID NO: 68845 - protein, 363 aa, Proteus mirabilis
MDILKMSTNVFYVFLFSFAFLFVARKVAKKIGLVDKPNYRKRHHGLIPLVGGISVYFGIVFAFYVSDIYIPHKELYLICAGILVFIGALDDRYDISVKIRATIQALVGIAMMVFGGLKLESLGHAFGPWDMHLGPFGYIVTLFAVWAAINAFNMVDGIDGLLGGLSCVSFGALGILLYQSGSSALAFWCFSFIAAILPYIMLNLGVCGKKFKVFMGDAGSTLIGFTIIWLLISSTQVDPHPINAVTALWIIAIPLMDMVAIMYRRLRKGMSPFSPDRQHIHHLIMRAGFTPRQAFVLITLAAAVLAAIGIIGENLSFVPEWVMLALFLLAFVMYGYCIKRAWRVARFIKRYKRRLRKATQLKH

SEQ ID NO: 68846 - protein, 419 aa, Proteus mirabilis
MNLTELKNTPVSELIALGENMGLENLARMRKQDIIFSILKQHAKSGEDIFGDGVLEILQDGFGFLRSSDSSYLAGPDDIYVSPSQIRRFNLRTGDTIAGKIRPPKEGERYFALLKVNEVNFDKPENARSKILFENLTPLHANNRLRMERGNGSTEDLTARVLDLAAPIGRGQRGLIVAPPKAGKTMLLQNIAANIAHNYPDCVLMVLLIDERPEEVTEMQRLVKGEVIASTFDEPASRHVQVAEMVIEKAKRLVEHKKDVIILLDSITRLARAYNTVVPSSGKVLTGGVDANALHRPKRFFGAARNVEEGGSLTIIATALVDTGSKMDEVIYEEFKGTGNMELHLSRKIAEKRVFPAIDYNRSGTRKEELLTSQDELQKMWILRKIIHPMGEIDAMEFLINKLAMTKTNEEFFDFMKRS

SEQ ID NO: 68847 - protein, 111 aa, Proteus mirabilis
PQWLKIESVIFHTLDQLCPDYHGGFWSFCTLSNQGAYLYPDLSEEHMLLINSHNRHESQVSPQVMGIVVCLLVSSVWSFKTEREVMCERFYQLQDFASQHPEAEAIFYLID

SEQ ID NO: 68848 - protein, 673 aa, Proteus mirabilis
MRLNPGQQKAVEYVSGPCLVLAGAGSGKTRVITNKIAYLIRQCRYSAKQIAAVTFTNKAAREMKERVAQTLGKQEAKGLMISTFHTLGLEIIKREYKALGIKSNFSLFDDQDQSALLKELTVDLLEEDKDLLSQLKSQISNWKNDMLTPEQVIGRAQSQQDHTFAECFRRYEQHLLSCNVLDFDDLISKPTLLLRTNEEVRARWQQRIRYLLVDEYQDTNTSQYELVKWLVGERARFTVVGDDDQSIYSWRGARPQNLVLLQKDFPQLNVIKLEQNYRSSGRILKSANILIENNPHVFEKRLFSELGYGDELRVLTANNEEHEAERVAGELIAHHFINKTNYKDYAILYRGNHQSRIFEKYLMQNRIPYRISGETSFFSREEIKDILAYLRVITNPDDDAAFLRIVNKPRREIGPMTIQKLGEWAKVRDKSLFNACFDLGLSQTLTGRGLSALQAFSQWMARIVQQSEREPLLAVRDLLHEMDYESWLYETSSSAKAAEMRMKNINQLFSWMSEMLEGDELHEPMTLSQVVNRFTLRDMMERGETDEELDQVQLMTLHASKGLEFPHVFLVGMEEGILPHQSSIDEDNVEEERRLAYVGITRAQKTLTFTLCKERRQYGELIRPEPSRFLYELPQDDLHWDTNKKKVLSAQEKQEKGQKGVAGLKAMLARHKP

SEQ ID NO: 68849 - protein, 410 aa, Proteus mirabilis
MDQNIIDNMKHLQAFKFQLRPNGQQEREMRRFAGACRFVFNRALARQNEEHEAGNKYIPYTKMASWLIEWKSDTETQWLKEAPSQPLQQSLKDLERAYKNFFQKRTAFPRFKKRGKNDAFRYPQGVKLDQSNSRISLPKLGWMRYRNSREVVGEVRNVTVSQSCGKWYVSIQTEYEATEPQHESTSIVGLDAGVTKLATLSDGTVYPPVSSFKVNQRKLARLQRKLSRKIKFSANWQKQKRKIQRLHSHIANIRKDSLHKVTSEISKNHAMIVIEDLKVSNMSKSAKGTTERHGRNVKAKSGLNRAILEQGWYEMRRQFEYKQLWRGGQVLAIPPAYTSQKCACCGHTAKENRPSQSQFECLECGYTANADINGARNILAAGHAVLACGGRVQSYRPSKQEPAEVIQTSV

SEQ ID NO: 68850 - protein, 352 aa, Proteus mirabilis
MNSENNVSRQGFSPDNELDIRGLCCALWSGKRWIIGFALLFALIALGASYLMQPKWSAIAMTERPTVNNLGSYYSQSQFLRNLDTQINPSVTVSQLSIPDEAYQEFVTQISAFDTRREFWLQTDYYKQRKENDAQADAALLDELINNIQFTPADEKKLVNDQLKLIAETANDSSLLLNEYIAFANKRAAEHLNEEVIAAWATRTQSMKALVKRQEMAAQAAYQRQINLLKQSIKVAEKQGISQKQTSIAIDELPDSKLFLLGVPLLQSQLETLMATGPDFDSDYDQNTAMLSTLAVGAKLQDNFQTYRFLRTPEDPVKRDSPRRAFMMVLWGAIGVLVGAGVALVRRSSLKK

SEQ ID NO: 68851 - protein, 507 aa, Proteus mirabilis
MNNFSLLNRQWVRTLLAVFFGASGTLAFSPFDFWPAALISLSGLLLIITQRTTRQGAWLGFAWGFGLFGSGVNWVYVSIADFGGMPFAINIFLVILLALYLSLYTALFAGLLNKFFPKPTVWRFVFAAPAVWQLTEFLRGWVLSGFPWLQFGYSQIDGPLKGIAPIFGVTMITFLLTIISGLIAVAIYRKSLYSAVIGAILLLLPISFKSYQWYQPLTDETQEIALVQGNIAQSLKWQPGTLESTLNTYLTLSRPFIGKANLIIWPESAIPDVEIQQQGFLAQLDKQLRAQDTHLMTGIIDARPTLEGYRFYNSVITLGEHYAYQYPATDRYNKHHLVPFGEYVPLESLLRPLAPFFNLPMSSLSQGEYIQPQLTVNDAKITAAICYEIILGEQVRANFKPDTRFLLTISNDAWFGNSIGPWQHFQMARMRSLELGRPLLRSTNNGITAFIAANGDVIAQLPQFEAGALAEKMTPTTGSTPYYKMGSYPVWILAGVFLILAFIKRRS

SEQ ID NO: 68852 - protein, 321 aa, Proteus mirabilis
MSKPIQMERGVKYRDADKMALIPVKTIVTEREELLRKPEWMKIKLPADSSKIQGIKAAMRKNGLHSVCEEASCPNLAECFNHGTATFMILGAICTRRCPFCDVAHGRPNAPDPQEPIKLAQTIKDMGLRYVVITSVDRDDLRDGGAQHFADCITAIREKNPNIRIETLVPDFRGRMDKALEILTDTPPDVFNHNLENVPRVYRQVRPGANYQWSLTLLERFKQAHPNIPTKSGLMVGLGETNEEIIDVMRDLRKHGVTMLTLGQYLQPSRHHLPVQRYVSPDEFEYMKEQALAMGFTHAACGPFVRSSYHADLQAQGIEVK

SEQ ID NO: 68853 - protein, 251 aa, Proteus mirabilis
MKENYYYLEQTSEIASNKNVLLQADWQRFCQLLCYEGIEIKQNNDEKRQNKAVICRVKMKGEYSSTLFMQILGEGELQLTLEQFSQPSGLEHFLTQFFALIDYQQQVNAKLSKKALIQFHSRYKYLLMAYSQVAYRELGRYMANIPNSLPLLQFAEQYQKALMKALSIPATREGHTNALMHMAGYFKRALSAEQKQLLTQEILSYRQGKTSLSAPLSRLKNYLAFYPDNYLLSQRYFSPYPAVFDDLRAQF

SEQ ID NO: 68854 - protein, 297 aa, Proteus mirabilis
MRMRKLALSLMILGAAGAVQAEELTGTLKKINDNDIIIVGHRESSVPFSYYDNQQKVVGYSQDYSNLIVEAVKEKLGKPNLQVRLIPITSQNRIPLLQNGTFDFECGSTTNNLARQQQADFSNTIFIVGTRLLAKKDSGIKDFADLAGKNVVVTSGTTSEMLLNKLNDEKKMNMRIISAKDHGDSFRTLESGRAVAFMMDDALLAGERAKAKKPALWEIVGTPQSEEAYGCMLRKGDTQFKSLIDETIANAQKSGAAEKSFNRWFNAPIPPKNLNLEFTISDEMKALFASPNDKALN

SEQ ID NO: 68855 - protein, 156 aa, Proteus mirabilis
MKLQLIAVGTKMPDWIQTGFMDYLNRFPKDMPLELIEIPAGKRGKNADIKRILEKEGEQMLAAVGKGNRIVTLDIPGARWDTPKLAEQLDRWKLDGRNVSLLIGGPEGLAPACKAAAEQSWSLSPLTMPHPLVRVVVAESLYRAWSITTNHPYHRE

SEQ ID NO: 68856 - protein, 860 aa, Proteus mirabilis
MQEQYRPEDIEQTIQEHWEKNNTFKVTEDNNKEKYYCLSMLPYPSGRLHMGHVRNYTIGDVISRYQRMLGKNVLQPIGWDAFGLPAEGAAVKNNTAPAPWTYENINYMKGQLKKLGFGYDWDREVTTCTPEYYRWEQWFFTKLYEKGLVYKKTSAVNWCPHDLTVLANEQVIDGCCWRCDTPVERKEIPQWFIKITDYAEELLNDLDTLDEWPEQVKTMQRNWIGRSEGVEITFDVADSDDTMTVYTTRPDTFMGVTYVAVAAGHPLAQKAAQNNREIQHFIDECRNMKMAEAEMATMEKKGIATGLYAIHPLTQEKVAIWVANFVLMEYGTGAVMAVPGHDERDWEFATKYGLPIKAVIADAEGNQPDLSTGALTEKNSLINSGEFSGLDNQAGFNAIADKLTAMGVGERKVNYRLRDWGVSRQRYWGAPIPMATLEDGTVVPVPDDQLPVILPEDVKMDGITSPIKADPEWAKTTINGQPALRETDTFDTFMESSWYYARYTCPDYDKGMLDPKAANYWLPVDWYIGGIEHAIMHLMYFRFFHKLMRDAGLVNSDEPAKRLLCQGMVLADAFYYTGEDGARHWVSPAEAIVERDEKNRIIKATDSAGHELTYAGMSKMSKSKNNGIDPQTMVERYGADTVRLFMMFAAPPELTLEWQESSVEGANRFLRRLWRLVHEHTEKGTTQSLDLATLTTEQKDLRRDLHKTIAKVSDDVGRRLAFNTAIAAIMELMNKLTRAPQETEQDRALMQEALEAVVRMLSPIIPHACFVMWQALGGKEDIDVAPWPVADEEAMVDDTKLIIVQVNGKVRGRITVPANSEKDYVQEMATKEYSVAKYLENVTVRKVIYVPGKLLNIVVG

SEQ ID NO: 68857 - protein, 394 aa, Proteus mirabilis
MRNVKNDFDAVIAGGGMIGAAVAIGLAQEGLRVAMVERQSPAPFDASSHPDIRISAISCASVSLLKQLGAWQHVLAMRSAPYLTLETWEEDNAHVIFDAKSLGLPELGYMVENRILQLALWQEAERYSNITLLCPNSLSNMKYLDNKWQVTLADGQEITTQLVVGADGANSQVRQMAGIGSNGWQYRQSCMLITVKTQLPPEKGTWQRFYPSGPRAYLPLFDNWACLVWYDSPQRIRKLQTMSMAQLEKEIEHAFPERLGKVTPIAAGSFPLTRQHASRYVDNGVILVGDAAHTINPLAGQGVNLGYRDVDCLLNLVAQAKQHFEPWHSMALLKKYQRRRMPDNMLMQAGMDLFYHAFSHQLPGLKLARNIGLLAAQHAGKAKEAALRYALGIK

SEQ ID NO: 68858 - protein, 293 aa, Proteus mirabilis
MSDDQSSSNDNPGPKKGFLTLLNQLFHGEPKNRDDLMELIRDSEQKELIDPDTRDMLEGVMDIAEQRVRDIMIPRSQIVTLKRNQTLDECLDVIIDSAHSRFPVISEDKDHIEGLLMAKDLLPFMRTGAEPFSIDKVLRSAVVVPESKRVDRLLKEFRSQRYHMAIVIDEFGGVSGLVTIEDILELIVGEIEDEYDDEDDIDIRPLSRHTYSVRALTQIEDFNEAFGTHFSDEEVDTIGGLVMQAFGHLPARGETITIDNYQFKVVMADSRKIIQVYVHIPDDAPVPELGNDV

SEQ ID NO: 68859 - protein, 773 aa, Proteus mirabilis
MKLGYKRLIAASVIFLLVTPLLLWIADKIWPLPDPEPQIATIVTAEDGTPLWRFADKEGIWRYHVTLSDVSPEYLQALIAYEDRWFYQHPGVNPIAILRAAWQDLSSGKIVSGGSTLSMQVARLIDPHSRTLGGKLKQLWRTLQLEWYYSKDEILEIYLNRAPFGGTLEGIGAASWAYLGKSPADLSAGEATLMAVLPQAPSRLRPDRYPERAQAARDKVLDRLAEYQIWPKEKVAEIKQEQVLLAPRQTPQLAPLLARRMYNEQKAPVITTTIDINLQRQLEELAKQWKYQLADKTSLAILVVDHTDMSVKGYVGSADFNDNQRFGHVDMISAWRSPGSTLKPFIYGLALDEGLIHAESLLQDVPRRFEDYRPGNFDTGFNGAVSASEALSRSLNLPAVQLIEAYGAKKFAAKLRHNHLEMRFPYGSEPNLALILGGTATRMDQLVATFSALARHGKTAPLRFTPEQTINDRMLMSPGAAWIIRRILAGEARPRPDSAISAVVPLAWKTGTSYGYRDAWSIGVNARYTIGVWVGRPDGTPVAGQFGFATAVPIMNQVNNLLTSYFYQNKQRPPVDPRPNSVSAAAICWPTGKALPKEDSNCRVSRRSWILDNTIPPTLLNESQEGILGINEKVWIDKEGKRTGPNCPGAQLKDIALWPIALDAWLPEKERRAKRLPPISLTCPPIKEDMIPLYISGIRKGDLLRPLPGETQLEITVSTQGGSGMQWWFLNGEQIGKTENGATFSYLLEKRGKYQLSVLDLSGQTDMVNFSFR

SEQ ID NO: 68860 - protein, 141 aa, Proteus mirabilis
MDVSEQFEVQEIVAVEGSSLQLSVLEPQPEKLTQALSEFFGQHKPIRRAFIVNALEQGDDESFYLIGLEITGEENIIAQILPQAAEAAFEHLEEGQSLDFCFVNKDEQGVSHFMTHHVTPFYQRKLGGFLRKGIPIVNLNT

SEQ ID NO: 68861 - protein, 128 aa, Proteus mirabilis
MAYSDKVIDHYENPRNVGSFDNNDPTVGSGMVGAPACGDVMKLQIKVDDNGVIEDARFKTYGCGSAIASSSLVTEWMKGKTLDEAEAIKNTAIAEELELPPVKIHCSILAEDAIKAAIADYKSKRQGK

SEQ ID NO: 68862 - protein, 496 aa, Proteus mirabilis
MIPVIALVGRPNVGKSTLFNRLTRTRDALVADFPGLTRDRKYGRAELDGEEFIIIDTGGIDGAEEGVETHMASQSLQAIQEADIVLFLVDARAGLMPADQGIAKHLRGVEKKTYLVANKTDGIDIDTALADFYSLGLGEIFPIAASHGRGVSQLIEQALLPIVGKVVEEEKELTEEEENAAYWAALEAEQKEQEEEEEEDDFDPTTLPVKLAIVGRPNVGKSTLTNRMLGEERVVVYDMPGTTRDSIYIPMERDGKEYILIDTAGVRKRGKVKETVEKFSVIKTLQAIEDCNVALLVIDAREGISDQDLSLLGYILNSGRSLVIAVNKWDGMTQEDREQVKDMLDLKLGFVDFARVHFISALHGSGVGNLFESIQEAYTCATRRVGTSMLTRIMKMAEDDHQPPLIRGRRVKMKYAHAGGYNPPVVVIHGNQVSDLPDSYKRYLMNYFRRTLQVMGTPIRIQFKEGENPYADKKNKLTASQIRKRKRLMAHLKKSK

SEQ ID NO: 68863 - protein, 390 aa, Proteus mirabilis
MQLRKTLLIGLLASALLAGCSSEQDNVTMSPLPEVQSQFTPYVVWDKSVGNGIGKYYSHLSPAWDGSVVYVADRHGVVKALELETGKEIWSQDLSTKKGFFSSNESALLSGGLTVSGTRVFVGTEKAKVYALNTDDGSIDWETDVAGEAISKPVVSDGLVLIHTSNGMLQGLDLLTGEVSWTVNLDTPSLSVRGESAPAVAYGAAIVGADNGRVSAVVLSQGQLVWQQNISQVKGSTEISRLNDVDITPIIDENTVYAMAYNGNLVSLDMRSGQIIWKRDLGSVNDMVLLGDNLYLVDQNDRVLAVRKSDGVTLWTQEDLLHRNLTAPAIVDGYLVVGDAEGYLHWIDTSTGKFIAQNKVNSSGLLSRPQAVQDKLMIQARDGKLYLYRR

SEQ ID NO: 68864 - protein, 549 aa, Proteus mirabilis
MEIFFTILILILVVSVSGVITKVIPFRIPLPLIQIVIGALLAWPQFGLHVTFDPELFLVLLIPPLLFVDGWKTPTREFIQNGREIFILVLVLVMVTVVGIGYLIYWIMPSIPLISAFALAAVLSPTDAVALSSIVGKGRIPKRIMGVLEGEALMNDASGLVALKFAVAVAMGTMIFTVGGATFEFFKVAIGGLLAGIAVTLVYSKSLRLMSRWSGDDPATQIVFMLLLPFASYLIAEHIGFSGILAAVAAGMTISKSGVIRNAPLAMRLRADSVWSMLEFVFNGLVFIMLGLQLPVIWTSSVIQADLDPEVEVWMLFAAVFVIYFALLILRFTWLWLMKKISHLFMKKHPLDFATYTTRELWLSSFAGVRGAITLAGALSIPLFLTDGSTFPGRYQIIFIAAGVILLSILVGIISLPFLLKGIKATDKEADKNEVRYAKKVMAEVAIVSLNKMEERLAASTEEQLDAEEINEVASRVAGYLRRRTADQDEMMHNMLVEDLERRFRLTALRAERGELYHLRATRKISNETLQLLLHELDLMEALLVEKDS

SEQ ID NO: 68865 - protein, 251 aa, Proteus mirabilis
MTQQSKETTDFGFQTVDKDEKQTMVAKVFHSVASKYDLMNDLMSFGIHRVWKRYTIEASGVRRNQRVLDLAGGTGDLTAKFSRLVGENGEVVLADINDSMLKMGREKLRDHGIVGNVSYVQANAEELPFPDDYFDCITISFGLRNVTDKAKALRSMFRVLKPGGRLLVLEFSKPVLDPLSKIYDAYSFHILPRIGQVIVNDADSYRYLTESIRMHPDQETLKGMMEEAGFDQVSYTNMTGGIVALHKGFKF

SEQ ID NO: 68866 - protein, 726 aa, Proteus mirabilis
MLYQSENIQADWVKQGIVELVFNASGSINKLDTKTVAMLSEALTVLENTSDLKGVILRSEKPAFIVGADITEFLSLFDAPVEELTQWLHFANHIFNRLEDLPVPTVSAINGYALGGGCECVLATDFRIASPDLRIGLPETKLGIMPGFGGSVRLPRLIGVDNALEIITAGKDINAETALKNGLIQAIVPVDKLKESAISLIEQAIDGKFDWQAARQPKTVALRLTELEHKMSFAVAKGMVMKVAGPHYPAPMTAVNTIEKAAFLDRKAALELETENFVKLTRTDVAKALVGIFLNDQYVKGITKKRHASLPKQAAVLGAGIMGGGIAYQSALKGIPVTMKDINANSLELGMTEALSLLQKRQEKGRMSAVDMAKTLASIHPTLNYASVADAQIVVEAVVENPKVKASVLAETEALLADHAVLASNTSTIPISLLAKSLTRPENFCGMHFFNPVHRMPLVEIIKGEKTSEETINRIVSYASKMGKTPIIVNDCPGFFVNRVLFPYFAGFSLLLRDGADFIAVDKVMEKAFGWPMGPAYLLDVVGIDTANHAQAVMAQGFPDRMGSIDKDVIALLYQQQRYGQKNNHGFYDYTIDKRGKKQKQVDNDIHSLIEHHVGKKQEFNQDTIIARMMIPMINEVIRCLDEGIIASPAEADIALVYGLGFPPFRGGVFRYLDTIGLAQFVANAEQYSELGPLYQIPESLKQKALRNETYYPKPAKVDVNIRELA

SEQ ID NO: 68867 - protein, 209 aa, Proteus mirabilis
MIGLVGKKVGMTRIFTEDGVSIPVTVIEIENNRVTQVKDLEKDGYRAIQVTTGSKKANRVLKPEAGHFAKAGVEAGRLLREFRLNEGEEYTVGQSISVEIFADVKKVDVTGTSKGKGFAGTVKRWNFRTQDATHGNSLSHRVPGSIGQNQTPGRVFKGKKMAGQLGNEQVTVQSLEVVRVDAERNLLLVKGAVPGATGSDLIVKPAVKA

SEQ ID NO: 68868 - protein, 47 aa, Proteus mirabilis
MRRTFQPSVLKRNRNHGFRARMATKNGRQVLARRRAKGRARLTVSSK

SEQ ID NO: 68869 - protein, 119 aa, Proteus mirabilis
MVKLAFPRELRLLTPKHFNFVFQQPQRASSPEVTILGRQNELGHPRIGLTIAKKNVKRAHERNRIKRLAREYFRLHQHQLPAMDFVVLVRKGVAELDNHQLTEVLGKLWRRHCRLAQKS

SEQ ID NO: 68870 - protein, 165 aa, Proteus mirabilis
MALNLQDKQAIVAEVSEVAKGALSAVVADSRGVTVDKMTELRKACREAGVTVRVVRNTLLRRAVEGTSYEVLKDAFVGPTLIAFSSEHPGAAARLFKDFAKGNPAFEIKAAAFEGEFIPGSNIDRLATLPTYEEAIARLMSTMKEAAAGKLVRTLAALRDQKEAA

SEQ ID NO: 68871 - protein, 217 aa, Proteus mirabilis
MTKLATLSDGTVYPPVSSFKVNQRKLARLQRKLSRKIKFSANWQKQKRKIQRLHSHIANIRKDSLHKVTSEISKNHAMIVIEDLKVSNMSKSAKGTTERHGRNVKAKSGLNRAILEQGWYEMRRQLEYKQLWRGGQVLAIPPAYTSQKCACCGHTAKENRPSQSQFECLECGYTANADINGARNILAAGHAVLACGGRVQSYRPSKQEPAEVIQTSV

SEQ ID NO: 68872 - protein, 207 aa, Proteus mirabilis
IGVGPSNANSISDHLAVLRPHVWSMIGHCGGLRESQLLGDYVLAHAYLRDDHILDAVLPPDIPIPNIAEVQRALYDATKAISGKPGHEIKQRLRTGTVVTTDDRNWELRFSATSRRFSLSRAVAVDMESATIAAQGYRFRVPYGTLLCVSDKPLHGEIKLPGQANHFYEGAVSEHLQIGIHAIELLKDEEDKLHSRKLRTFNEPPFR

SEQ ID NO: 68873 - protein, 172 aa, Proteus mirabilis
MSAYEKMSEKELDQLANYIVSIVQNGASIKDESEIPDGFMEGIYSFAYDFYQKGKLDEAEAIFKFLCLYDFYNVDYIMGLAAVNQLKKQYQAAIDLYALAYLNAKNDYRPVFYAGQCNLSIGEKEKAKYCFHQVAQNINDQTIKEKANSYLELLKDIPLVVLNKEEEKEEKE

SEQ ID NO: 68874 - protein, 326 aa, Proteus mirabilis
VSLSLWQHCLARLQDELPATEFSMWIRPLQAELSDNTLALYAPNRFVLDWVREKYINNINALLVDFCGSDVPSLRFEVGNKPVSARTTESVPKTVTHPAVNSTPTNSQPVRPSWDNQPQSQLPELNYRSNVNPKHKFDNFVEGKSNQLARAAARQVADNPGGAYNPLFLYGGTGLGKTHLLHAVGNSIMERKANAKVVYMHSERFVQDMVKALQNNAIEDFKRYYRSVDALLIDDIQFFANKERSQEEFFHTFNALLEGNQQIILTSDRYPKEINGVEDRLKSRFGWGLTVAIEPPELERRVAILNEKADENHIQLTDEVAFFIGK

SEQ ID NO: 68875 - protein, 222 aa, Proteus mirabilis
MNRIVFVFALIISSLTCFKAYSAFTLNGTRFIYDEGRKNIAIEVKNNSDKTYGGQVWIDNLNGNEVFFIPAPNLFKITGGEKQLIRLLYVNDILPKDRESLFWLNIQEIPPISSADDSNVLAVALNTQVKLIYRPKILAEKREDAEKSLTYSGSVLKNPTPYYFALTQVSVNNNPLVLSKDIEQSISLFPPFSEVNVQRPLLGKVTVEAIDDYGARRVIELN

SEQ ID NO: 68876 - protein, 233 aa, Proteus mirabilis
MGQKVHPNGIRLGIVKPWNSTWYAGTNEFADNLDSDFKVRQYLTKELAKASVSRIVIERPAKSIRVTIHTARPGIVIGKKGEDVEKLRKNVADIAGVPAQINIAEVRKPELDAKLVADSITSQLERRVMFRRAMKRAVQNAMRLGAKGIKVEVSGRLGGAEIARTEWYREGRVPLHTLRADIDYNTSEAHTTYGVLGVKVWIFKGEILGGMAAVEQAEKPAAQPKKQQRKGRK

SEQ ID NO: 68877 - protein, 110 aa, Proteus mirabilis
METIAIHRHARSSAQKVRLVADLIRGKKVSQALETLTYTNKKAAGLVKKVLESAIANAEHNDGADIDDLKVAKIFVDEGPSMKRIMPRAKGRADRILKRTSHITVVVSDR

SEQ ID NO: 68878 - protein, 281 aa, Proteus mirabilis
MKFVGAHVSAAGGVDQAVLRAHEIKATAFALFTKNQRQWKAAPLSTESIDKFKKNCEIYGYGPAQILPHDSYLINLGHPEEEALEKSRAAFLDEMQRCEQLGIELLNFHPGSHLKKIDVDKCLQRIAESINITLDKTQNVTAVIENTAGQGTNLGYRFEHLAAIIDGVEDKSRVGVCIDTCHTFAAGYDLRTVEDCEKTFAEFDNIVGFQYLKAMHLNDAKSELASRVDRHHSLGQGNIGKVPFTYIMQDTRFDGIPLILETINPDIWPEEIAWLKSQQTQ

SEQ ID NO: 68879 - protein, 500 aa, Proteus mirabilis
FDIVELSRLQFALTAMYHFLFVPLTLGMAFMLAIMETIYVLSGKQVYKDMTKFWGKLFGINFALGVATGLTMEFQFGTNWSYFSHYVGDIFGAPLAIEGLMAFFLESTFVGLFFFGWDRLGKKQHLMVTWLVAFGSNFSALWILVANGWMQNPVAADFNFETMRMEMLSFADLVLNPVAQVKFVHTVAAGYCTGAFFVLGISSYYLLKGRDIGFAKRSFAVAATFGIAAVLSVIVLGDESGYEMGDVQKTKLAAIEGEWHTEPAPASFNLIAFPNQEKMENTFALQIPYVMGIIATRSFDTPVLGLHDLMSQHEVRIRNGMKAYDLLTELRSGNTDPAVRAAFNESKKDLGYGLLLKRYTENVSDATEEQIKSAVKDSIPNVAPLFWSFRIMVAAGFLMLLVVAISFWTVLSNRIGNYKWLLRAALFSIPLPWIAVEAGWFVAEYGRQPWAIGEILPTAVATSSLTQADILVSMGLICGLYTLFLVAEMFLMFKFGRLGP

SEQ ID NO: 68880 - protein, 538 aa, Proteus mirabilis
MDSQRNLLFIALLFVSFLIWQQWEGDKVSQNTTTTTQVSQQADMPSSDSLAVTGNSNEQAKLITVKTDVLDLRINTQGGTIDEADLLAYPAELNSKTPFRLLETTPQFLYQAQSGLIGPDGPDQKSRPVYSATQQEFILGENQDELRVPMTFVNEEGVKFVKTFILKKGQYDIGIEYKVENPTDKTLTMNFYGQLKQSVKLPEHRDTGSSNFALHTYRGAAYSSDETNYKKYSFGDIEDKNLSITTNNGWIAMLQQYFATAWIPAKDSQNNNFYSITLDNKSIALIGYKSAPITVAPNSTQDITSTLWVGPEIQSEMSAIAPHLDLSVDYGWLWFISQPLFKLLKFLHSFIGNWGFSIIMITFIVRGIMYPLTKAQYTSMAKMRLLQPKLAALRERIGDDKQRMSQEMMALYKQEKVNPLGGCLPLIIQMPIFLALYYMLMGSVELRHAPFILWIQDLSAQDPYYILPLLMGVTMFIIQKLSPTAVTGSGCQQKIMTFMPVVFTVFFLWFPSGLVLYYIVSNLVTIIQQQLIYRGLEK

SEQ ID NO: 68881 - protein, 79 aa, Proteus mirabilis
MENLSMDLLYMAAAIMMGLAAIGAAIGIGILGGKFLEGAARQPDLIPLLRTQFFIVMGLVDAIPMIAVGLGLYVMFAVA

SEQ ID NO: 68882 - protein, 488 aa, Proteus mirabilis
LNMHKKQRSPFSLRTRFLLATSAIILALTLSYGLVAIVGSIVSFDKTTFMLMRSQSNLYYSLAQWKDGQLQIEFPTNLNNNNTSLVVIFDEKGNVLWTPTDLPQVIPNSIAPKWRNKEGLFEISVNVKTTRFMLQQLPQYRAYLKKLNEYSSNDTLTHSVVINHYPAADNMPYLSIAVIDPIPQSLQNVSRVWDWFLYILLANFLLVIPLILLAGPYLSLRPIKSIIEQISALEKGTRDNLDENPPKELKGLVYNLNILLRNERNRYSKYRTSLSDLTHSLKTPLAVLQSTLRALRAGKQMSIEQAEPIMQSQIERISQQVGYYLHRASLHGDHDITTRKLHSLSGLLDNLCSALNKVYQSKGVDITLNVSPEMMWLGEKNDFMEVMGNVLDNACKYCLEFVEINVSHDDNCVIITVDDDGPGVSPEKRELIFQRGTRADTLRPGQGLGLSIAVDIIEQYNGDITITDSPLGGARLIVTFAEQQLTTE

SEQ ID NO: 68883 - protein, 184 aa, Proteus mirabilis
MKAIFLTALFVLTSLVTGCDQIRQFDVSEKVINDYLSQKSGLQKHIGEDGVVSADITLSDLAIQIGRTEPGKVSFSGSASLKIDSLFGKTGANVNLTLSGQPFYQAELGAIYIKSMKIDSYKVSPEKMEPVVMALKPYLDTTIATYFDNQPVYVLNPEKNSAEAAAFKLAKGIEVKPGKFVIQL

SEQ ID NO: 68884 - protein, 124 aa, Proteus mirabilis
MRISARRRLETFLDTGSTTELGSELEPKDILKFRDSKKYKDRIAAAQKQTHEKDALVVMKGTLKEMPVVAASFEFAFMGGSMASVVQQQYRHGSLIVQLLADLSLPEYTSSFHLYRLQYQIQNC

SEQ ID NO: 68885 - protein, 496 aa, Proteus mirabilis
MLHLFTDLEFHTGLMLVLALIFVLFYEAINGFHDTANAVATVIYTRAMRAQFAVVMAGVFNFLGVLLGGLSVAYAIVHLLPTDLLLNVSSAHGLAMVFSLLLAAIIWNLGTWYFGIPASSSHTLIGAIIGIGLTNAIVTDSSIVDALNIPKMISIFLSLILSPIIGLVIAGAMIFLLRRYWSGTKKRRRIHLTPAEREKKDGKRKPPFWTRTALILSAVGVSFSHGANDGQKGIGLIMLVLIGVAPAGFVVNMNASGYDITKTHDAVVHLQQYYEKHQPALQHAIENTPVVSAQADPNDTDFHCNSARTPIVLNQTEQMLSGISSYDELSADQRAQMRRLLMCIADTATEVAKLPETSAQDARFLKTLSRDLLNTVEYAPIWIIISVALALSIGTMVGWKRVAVTIGEKIGKKGMTYAQGVSAQVTAAVSIGVASYTGMPVSTTQVLSSAVAGTMIVDGGGVQTKTVKNIALAWILTLPVSIALSGVLYWISLSLL

SEQ ID NO: 68886 - protein, 38 aa, Proteus mirabilis
MKVRASVKKMCRNCKIVRRHGHVRVICSVDPKHKQRQG

SEQ ID NO: 68887 - protein, 300 aa, Proteus mirabilis
MLSGLLIILLPLFIGYFIKLNNRPLLQLANRLLSAMVYVILFLMGVSLAMLDNIGENLFSILAYASVFFICTFGANLLFLWLLDKKDPWHVPAHKQAKPPSRIKMVLESLQLCGVVVVGFFVGLTGWSIFGYASQASQGALIFLLWLVGLQLRNSGMSPKQILINRRGTTIAIVMAISALAGGALAAYLLGLPTKMGLAIASGYGWYSLSGIVLTDAFGPVIGSTAFFNDLMRELAAIMLIPIIVNRYRNTALGICGSTSMDFTLPVLQRSGGVAIVPAAIVHGFVLSLVTPILMAFFTS

SEQ ID NO: 68888 - protein, 434 aa, Proteus mirabilis
SIMDTTKAGSIAQGNTQSDYKTWRKSDTVWMLGLYGTAIGAGVLFLPINAGIGGLIPLLIMLVLAFPMTFFAHRGMCRFVLSGKNPGEDITEVVEEHFGKTAGVLITLLYFFAIYPILLVYSVAITNTVESFIVHQMHMTAPPRAILSLVLIVGIMCIIRFGEQAIVKAMSVLVFPFVAILMVLALYLIPEWNGAILDTLSFDHASTSGMSQGLLVTLWLAIPVMVFSFNHSPIISAFAVAKREEYGDNAEKKCSRILAYAHIMMVITVMFFVFSCVFSLTPENLAEAKEQNISILSYLANHFEAPVIAYIAPFIAFVAITKSFLGHYLGAREGFNGLIIKGMRGIGKNVEKDRLNKITALFMLVTTWIVATLNPSILGMIETLGGPIIAMLLFLMPMYAIRKVPAMKKYQGHISNVFVVIMGLIAISAVFYTL

SEQ ID NO: 68889 - protein, 411 aa, Proteus mirabilis
MNNNKKTKKRFSLIIILLIVIAGAIAYWQYSSNNSAPPVSKDTPTANTPNRSTAGSRRPPMPPVQVATSAQEDVPQFLTALGTVKAVNSVTVTSRVEGQLMALHFTEGQQVNQGDLLAEIDPRPFEVQLAQAKGQLAKDQATLANARLDLARYQKLAKTHLVSQQELDNQAALVKQSEASISIDKAAINNAQLQLTYSKITAPISGRVGLKQVDVGNYISGGSSTPIVVINQMDPVDVLFTLPEQDLSQVILARKNNPTLPVIALDRNNKIELAQGALFSVDNQIDATTGTIKLKARFPQQESTLFPNQFVNIRLYVTTLEKAVVIPNAALQMGNEGHFVWVVDEENKVSKLAVEVASQNADKVVIASGLSANQRVVTDGVDRLTQGAKVEIVTPLAPKAKTTDPVVAEKA

SEQ ID NO: 68890 - protein, 78 aa, Proteus mirabilis
MSLIPNHSYKILSYSPQISPAYRQKLLSLGMLPGAIFNVIRIAPLGDPIQIETHRVSLILRKKDLALINLSEIAHNEK

SEQ ID NO: 68891 - protein, 399 aa, Proteus mirabilis
MERLEQGPIALYCGFDPTADSLHLGHLVPLLCLKRFQLAGHKPVALVGGATGLIGDPSFKATERKLNTQDTVHEWVEKIRKQVSPFLDFDRGENSAELANNYDWFGQMDVLTFLRDIGKHFSVNQMINKEAVKQRLNRDDVGISFTEFAYNLLQAYDFASLNKNLGVELQIGGSDQWGNITSGIDLTRRFNQKQVFGMTVPLITKSDGTKFGKTEGGAVWLDPKKTSPYKFYQFWINTADADVYRFLKFFTFMSIEEINALEEEDKNSGQAPRAQRVLAEQVTRLVHGEEGLTAAKRITDSLFSGAIADLTQADLEQLAQDGMPTIELEKGNDLQQALVNAELVPSRGQARTMIGSNAVSINGKKQDNPEYVFEEKDFLFGHYSILRRGKKHYCLVIWK

SEQ ID NO: 68892 - protein, 721 aa, Proteus mirabilis
MKNKNLLFLSAAVLSAIYGSAVAADCDSTLTICETVNINNGDTAQINKDVNVSQGDGVVFNGSSTEYKAQAITKNITVTGNGANAIKINQGATFSSNINLNGANVTSENGTAILVEGNFPKRGTGVYIRDGAIIRGKTAAIDFSTLKTGFRSDVNGEIHGDILGNNHVDTKINFAYQGGAQNALFDGYKITGVPLIENHGNLTIQGKDKTIQWEGNFMNKENSQLIFRLDDNTNTDETILHVTGDVTFKKGSQAKLDFKGTSVDNIINKDIVLIASDSAIKDEAGITVTDANAIAPDISPLLEKTDSWLETTPPNISGGVSGNQLIARYGISYEGGDNFISAAERGNVTENGLAAAKFIIPTVLNEFNNTRSQISDEALSLLVAAGNNDNNIAALSNDLAPIADGSDIQAGLIMVEDMRNNIAHRYLRYDNQLPIEEREIGWNSWANILYGYGTQSQQGGINGYNTYRTGIQIGTDYEINQDALIGVSLAYNYAKADAKQRNASKEISHFEFMPYAGWYSDTLFLNGNLNIGYYTVDSERDIGGNTGWQGNTKAKGDYSGVQLGYQINAGTYLDFDFIHIKPMLTYQYQWLNIDSWEETGSTLSMRTYGQRYAVNQLGGSVALWNDYQTSYGKLTPSLNLRYIKDIAGNNDINQRHSLTYFNTGGSTFDIKGNTVGGDIISAELGANLDITQSLNLGTTMGYQRYDKFNEGRIGFTVSQRF

SEQ ID NO: 68893 - protein, 223 aa, Proteus mirabilis
MVSFLRTKSAVLLSIVIFPIFFLLSGCFSFGLMLSTKNDNRYHRSHWKGDSITALSLAKDSNGTSGWVFIGDHFDYLLIRGGDNAVNILRDPLIHHDKLSVENPVEFIIDNQKKQFNGKIKINYNWVTQTDKEAALTYGFICKTDINTCSLKIDNLLGTVHQKNKEQKNEYLLPFNHPFNVEFYQYKENLIGASTPRILLPVTLALDIVTSPLQLLMIPILSK

SEQ ID NO: 68894 - protein, 120 aa, Proteus mirabilis
EQTMLNVADNSGARRVMCIKVLGGSHRRYADVGDIIKITIKEAIPRGKVKKGDVLKAVVVRTKKGVRRPDGSVIRFDSNACVLLNNNSEQVIGTRIFGPVTRELRNEKFMKIISLAPEVL

SEQ ID NO: 68895 - protein, 887 aa, Proteus mirabilis
MSVTNVTELNDLVARVKKAQLEFANFSQEKVDAIFRAAALAAADARIPLAKLAVEESGMGIVEDKVIKNHFASEYIYNAYKDEKTCGILSEDLTYGTITIAEPIGIICGIVPTTNPTSTAIFKALISLKTRNGIIFSPHPRAKLATNRAAEIVLNAAIAAGAPKDIIGWIDEPSVALSNALMHHDDINLILATGGPGMVKAAYSSGKPAIGVGAGNTPVVIDDSADIKRAVASILMSKTFDNGVICASEQSVIVVDSIYKQVRERFATHGGYMLTGKELKAVQDIILKDGNLNAAIVGQPAVKIAEMAGIEVPVNTKILIGEVKETTDAEPFAHEKLSPLLAMYHAQNFEDAVHKAEKLVEMGGIGHTSCLYTDQDNCPEHVAYFGDKMKTSRILINTPASQGGIGDLYNFKLAPSLTLGCGSWGGNSISENVGPKHLINTKTVAKRAENMLWHKLPKSIYFRRGCLPIALEEIATDGKKRAFIVTDSFLFNNGYVDEVTNVLKKFGVETEVFFEVEADPTLSVVRKGAEQMNSFKPDVIIALGGGSPMDAAKIMWVMYEHPETHFEELALRFMDIRKRIYKFPKMGVKAQMVAITTTSGTGSEVTPFAVVTDDETGQKYPLADYALTPDMAIVDANLVMNMPKSLCAFGGLDAVTHALEAYVSVLANEYSDGQALQALKLLKEYLPASYHEGAKNPVARERVHNAATIAGIAFANAFLGVCHSMAHKLGSEFHIPHGLANALLISNVIRYNANDNPTKQTAFSQYDRPQARRRYAEIADHLELSAPGDRTAAKIEKLLAWLEEMKSSLGIPASIREAGVQESDFLAKVDKLSEDAFDDQCTGANPRYPLISELKQLLLDSYYGREFNEHPVAEVKEAKPAKKSSKK

SEQ ID NO: 68896 - protein, 462 aa, Proteus mirabilis
MTLPINNNIFTVSRLNKTVRQLLEMEMGRIWISAEISNFTQPASGHWYFTLKDTHAQIRAAMFRGQNTKVTFRPQHGQQVLVRATITLYEPRGDYQLIVESMQPAGDGLLQQQFELLKQKLSAEGLFDALHKKPLPTPAKQIGVITSSTGAALHDILNILRRRDPSLPIIIYPTAVQGAEAPMQIVHAIELANRRKECDVLIVGRGGGSLEDLWAFNDERVARAIFASDIPIVSAVGHETDVTIADFIADLRAPTPSAAAELISRNKLELLRQLQSQQQRLEMAMDYYLAKKLRALTQLHHRLQQQHPHLRLARQQNVLATTKQRLVTSFQRLLQTKQNQHTQLQKRLNYQEPSPQIQALLRQQQQLIYRMRESISQQLARQREQFAISCSRLESVNPLATLSRGYSISEVASGDVLKNTKQVKKGDTLKTRVEDGWITSEVINTQKISVKRKPAPKRKSSI

SEQ ID NO: 68897 - protein, 65 aa, Proteus mirabilis
TRVSYPIYHIDNIVKPVSKAGHAKKVIFLTADAFGVLPPVARLTPEQTQYHFLSGFTAKLAGTEV

SEQ ID NO: 68898 - protein, 181 aa, Proteus mirabilis
MTDSPKKRWYVIQAFSGFEGRVAQSLREHIKLNEMEDSFGEVMVPTEEVVEIRSGQRRKSERKFFPGYVLVQMVMNDATWHLVRNVPRVMGFIGGTSDRPAPISDKEVDAIMNRLQQVGDKPRPKTLFEPGEMVRVSDGPFADFNGVVEEVDYEKSRLKVSVSIFGRATPVELDFSQVEKG

SEQ ID NO: 68899 - protein, 301 aa, Proteus mirabilis
ILPQEWRTLANFSQHPIGTGPYQVMSNDQHKLQIKAFDRYFGLRALLDNIDIWVVPELKDKMVCSTLHLTDDDTHNNSLESRKEEGCYFLLYDSRSTQCQQPEIREWLSSVLTPVNMLAHCAPSYQRHWSPAYGLLLHWHHSKLIPPHTKPASLTKLTITLYKEHHEYSTIAELIKKILSDYDIELSIQVLDYEQWYYGDAKSDIWLATVNFYKPLEFSIFAALYELPLFHQCMGERYEDALALWRQKVLPLEEWCRQLTQNNWLFPLFHHLLELQGQRTIRGVKMNTFGWFDFKSAWFIP

SEQ ID NO: 68900 - protein, 46 aa, Proteus mirabilis
GYTRATMASTKRSDLARASGTHKVCRSPDWSLQLDSMKSESLVIVD

SEQ ID NO: 68901 - protein, 104 aa, Proteus mirabilis
VKPAARRRARECAVQAIYSWQLSGNDIADVELEFLSEQDTQGVDIAYFRELLVGVAINAARLDKAMEPYLSRQLEELGQVEKAILRLAMFELSFRETFPYKVAI

SEQ ID NO: 68902 - protein, 57 aa, Proteus mirabilis; identical to SEQ ID NO: 68568
  MISC_FEATURE (11)..(11): X=any amino acid

SEQ ID NO: 68903 - protein, 144 aa, Proteus mirabilis
MRLNTLSPAEGAKHAPKRVGRGIGSGLGKTGGRGHKGQKSRSGGGVRRGFEGGQMPLYRRLPKFGFTSRKSFVTAEIRLSDLAYVEGDVIDLNALKAANVVGPQIEFAKLILSGEVNRAVTIRGLRVTKGARAAIESAGGKIEE

SEQ ID NO: 68904 - protein, 97 aa, Proteus mirabilis
MAKEQTDRTTLDLFANERRPGRPKTNPLSRDEQLRINKRNQLRRDRVNGLRRVELKLNEDAVNALNELASAKNVSRSELIEEILLEQLAQTYALKKH

SEQ ID NO: 68905 - protein, 71 aa, Proteus mirabilis
MPVIKVRENEPFDVALRRFRRSCERAGALAEVRRREFYEKPTTERKRAKASAVKRHAKKLARENARRTRLY

SEQ ID NO: 68906 - protein, 201 aa, Proteus mirabilis
  MISC_FEATURE (84)..(84): X=any amino acid
MELVMKDAQGALTVSETTFGRDFNEALVHQVVVAYAAGARQGTRAQKTRAEVSGSGKKPWRQKGTGRARSGSIKSPIWRSGGGXFAAKPQDHSQKVNKKMYRGALKSILSELVRQDRLIVVEKFSVEAPKTKLLAQKLKDMALEDVLIVTAEVDENLYLAARNLYKVDVRDAATIDPVSLIAFDKVVMTADAVKQVEEMLA

SEQ ID NO: 68907 - protein, 322 aa, Proteus mirabilis
  MISC_FEATURE (276)..(276): X=any amino acid
  MISC_FEATURE (283)..(283): X=any amino acid
MNLESIIKLTSADMAAVNDAILYQLNSDVSLINQLGYYIISGGGKRIRPMIAVLTGRALDYQGDKHISVAALIEFIHTATLLHDDVVDESDMRRGKQTANAVFGNAASVLVGDFIYTRSFQMMTDLDSMRVLKLMSSATNVIAEGEVLQLMNCNDPDITEDDYMQVIYSKTARLFEAASHCVTILCGATPEQEKAFQDYGRYLGTAFQLIDDLLDYDADNTQLGKNTGDDLDEGKPTLPLLHAMHHGNETESQLIRQAIEKGNGRHLLDTGVINDXNRCGLTXKYRQKAEEEADKAIEAFRIIPDSSYKDALIGLAHVAVER

SEQ ID NO: 68908 - protein, 177 aa, Proteus mirabilis
  MISC_FEATURE (129)..(129): X=any amino acid
FGWVGMRLVSEHSSAAPHTTVYHAYNDQSYTPLARIECTDNPLNPQRGIYYTHSSLSGLPEALTNSEGEIVWQGQYSAWGHLQRQTRPTSTFNREQNLRFQGQYFDKDKFVGNKFEQRLRWPVGRVSGXYEYTGLHYNTFRYYNVGCFTQQDPIGWAGGLNLYAYAPNPLTWVDPWG

SEQ ID NO: 68909 - protein, 200 aa, Proteus mirabilis
MKILIIDECYFTRNGIRHFFLKKNVRHEIIDMSSIEEANHYINNSMPDIIFIDLTKYCREVAHCQHLHIFFSLTQECSIILYNDANYPDKDRPIALTNNCFILAKRVLPWVLERTSTLTSRCQVFFPTYKHSLCSIFSIQEQKIINYWMGELPNYQIAKKLKISNSTVYSHKRHITEKINVKNRIELFFIYNILKYIYEK

SEQ ID NO: 68910 - protein, 446 aa, Proteus mirabilis
MPTIAHANTNELSIEQRLARLEERTLAAEKRAELAEQRAAKLENALKQNQALNNNLSQTSETITAPPSSLIETNTGYGKLKLYGDVEFNTDIASKKGQLTSINMRSGKEKDYGDYDKWGINGRILIGLDGERLLDNKNYAGFTVQPLANIDGKVSLDDAAFYFGKKERWQFKLGRYEAYDMFPLNQDTFVEYSGNTANDTYSDGFGYIYMIKEGRGRSNSGGSMMFNSQYNNWYFETNLLIEDGTSIFANKEYHGNKLYNNKNVIYFRPVIAWNNNNFKVAVALEKNIINNAYGYDDKKTGEFRDQSKRNGYGLTLGWSNLQQNPENGVTINWNTAYLDANDENDFTTGTNILWRKLQLGYIYAHNNIKSYTINNDDDNNNDIIFGPGKYNIHTLYSSYELPNILDMDNFKIYLGAYYSVLNGKDIEIENSDKDRYGVRARFKYFF

SEQ ID NO: 68911 - protein, 178 aa, Proteus mirabilis
MLKKTTLALFVATFFLSTNALALSDNTITFQGEVSDETCSVSINGNQAKPVVILPTVSAKELKDSGDTAGQVTFDIGLSGCTGNTDKPTKISTVFVGNQVTSNGNLGNTGNATNVEIQLLDTAQKVINLTGGFKGEGDLQLKPGETQASATYTAQYYATGAASAGTVEATLQYAVSYL

SEQ ID NO: 68912 - protein, 65 aa, Proteus mirabilis
MPKIKTVRGAAKRFKKTAGGGFKRKHANLRHILTKKSTKRKRHLRPKGMISKGDLGLVVACLPYA

SEQ ID NO: 68913 - protein, 109 aa, Proteus mirabilis
  MISC_FEATURE (91)..(91): X=any amino acid
  MISC_FEATURE (96)..(96): X=any amino acid
MATINQLVRKSRSSKVVKSNVPALEACPQKRGVCTRVYTTTPKKPNSALRKVCRVRLTNGFEVSSYIGGEGHNLQEHSVILIRGCRGLKDXQGVRXQHVRGSAWTCSGV

SEQ ID NO: 68914 - protein, 1253 aa, Proteus mirabilis
MNSVGCTLVSEIASTAVGSMVVASVTQAFNSVRHPVHAATGAKVLNGEDDTDFIIDGVYPLVWSRIYQSRNTGENRLGCGWAMPFDVFLTIDDTGKGLENENIYYHDMSGRRLALGKIALGQKVFYQDEGFTVYRTTNNLFLVESAEGDYQFFEANPHKINTLRLMKSADRHNNALHYRYANDGELVQIHDDAYLTDIRLHYDEITQRLQSVTRHQGQEEKTLVTYTYDAQQRLVQVTNADKRVTRRFGWDDESGLMAMHQYATGVSSHYRWQRFDAFTIEDNEPEWRVVEHWLKDGKRCLEHTELTYDLAQRTLTTVETGGETTFRRWNEQQQIIEYTNALNETWWFEWDTSRLLTKAIAPDGSEWGYTYDERGNLTQSTDPEQQSTCYDWDKDFAFPTAQTLPNGAAWHWEYNEHGDIRRVIDPLGHITRLAWDDQGLCLGQVDAKGNETQYRYNARGQLIEQRDCSGYPTTLTYDDWGQLRSLTNAQNETTTYTFSEAGLLLTECLPDGTENRYDYDATGQLVGITDAGERHILLRRNRRGQVIARRDPAGHWLHFHYDTFGRMQALENEQGEQYRFGYDALHRLTDEHDLIGQQKHYQYDVMGNVTQIKTTPGPCVDTPIPLSPQVTTFGYDKVGRLLFRENADYRTEYLYQPLSVTLRRVPMAIWHEAERTGTTTRVEYQDALTFTYDKVGQLVREASARGDYQHHYDVLGNITRTELPHQRAFEYLYYGSGHLQQTQWRDNAQLTVLAEYQRDRLHRETLRTSGALDNETGYDCRGRITHQVARQMNASQFVTPVIDRRYRWDKRNQLIERSVSYGQTGEVFTVGHWYYHSYQYDPLGQLTAHLGSVQTEHFLYDAAANLLTRPHTEAPHNQVQGSDKFDYRYDGFGRMVSRYEKGSSSGQRYHYDSDHRIIAVDIDQGPLGYQRAEYRYDILGRRIEKRLWKASAIANTVTYHQHEPDEVYSFGWVGMRLVSEHSSAAPHTTVYHAYNDQSYTPLARIECTDNPLNPQRAIYYTHSSLSGLPEALTNSEGEIVWQGQYSAWGHLQRQTRPTSTFNREQNLRFQGQYFDKETGLHYNTFRYYAPDLGRFTQQDPIGLVGGINLYVYAPNPLTWVDPWGWSCFNSSKRFDKRNNITSRFINLLTGKTPSDVEHYLKNKGWTVTYPQSATPAKTQHVVFVKTTKSGEVYHLDYNPAGKTHGSDYWKVIKPNDPIEKVYGRIGHGNFSHYDKIKNSPVYIDGVLMNPWSK

SEQ ID NO: 68915 - protein, 241 aa, Proteus mirabilis
MALLKAENLAKAYKGRTVVGDVSLNVNSGEIVGLLGPNGAGKTTTFYMVVGIVARDAGSITIDDEDITLLPLHERARKGIGYLPQEASIFRRLSVYDNIMGILEIRHDLTAEQRKDRAEELLEEFNVSHLRNSLGQSLSGGERRRVEIARALAANPKFILLDEPFAGVDPISVLDIKKIIQHLRDYGLGVLITDHNVRETLDVCERAYIVSQGHLIAHGSPEEILANEQVKRVYLGEGFRL

SEQ ID NO: 68916 - protein, 136 aa, Proteus mirabilis
EHINTKEAAQYVLEGNEFLGATITAQHLMFNRNHMLVGGVKPHLYCLPILKRNVHQEALRQAVASGHSRFFLGTDHPAAFPNLQHRKESSCGCAGVFNAPTALAAYASVFKELNALSHFEAFCSLNGPRFYGLPVN

SEQ ID NO: 68917 - protein, 68 aa, Proteus mirabilis
MKKPVVVPTERMVKHPLYGKFNPRTTKLHVHDENNECGMGDVVEIRQTRPISKTKSWALVRVVEKAVL

SEQ ID NO: 68918 - protein, 39 aa, Proteus mirabilis
MAAKIRREDEVIVLTGKDQGKRGKVKQVLSSGKVIVEGI

SEQ ID NO: 68919 - protein, 115 aa, Proteus mirabilis
MSKPEYPFEKRLEVVNHYFTTDDGYRIISARFGVPRAQVRTWVALYEKHGEKGLIPKPKGVSADPELRIKVVKAVIEQHMSPNQAAAHFMLAGSGSVATWLKVYEERGEAGLRAL

SEQ ID NO: 68920 - protein, 577 aa, Proteus mirabilis
MVTIEPTLRRRVAKATALPESLDPLLRQIYANRGITSETQLERSLKGLLHYQDLNGIDVAISLLVEALKLQSRIVIVGDFDADGATSTALAIKALRQMGFQQVSYHIPNRFDDGYGLSPQVVHDVAKKGVDLIITVDNGISSFEGVDVAHEYGIRVLVTDHHLPGHSLPQADAIINPNLADCAFLSKSLAGVGVTFYLMTALRAELEKQGWFTAQGLARPNMADYLDLVALGTVADVVPLDENNRIFVYEGLRRIRAGRCCAGIKALTEVSRKTLSQLVSSDLGFALGPRLNAAGRLDDMSVGVALLLTNDIGVAREIANELDGLNQTRREIEAGMQEEASTIFRQFITTQDDLPNGLAIYHPQWHQGVVGILASRIKEKLHRPVIAFAPSGDGLLKGSGRSIHGVHLRDALERLNTLNPGLMVKFGGHAMAAGLSLEEDKFPLFQRHFSALMAELVSAEQLQGVILTDGELSDSQLSLPIAEMLREAGPWGQAFPEPLFDGKFTLLQQRIVGSKHLKMMLQPINSHVMIDAIAFNVDVNIWPDNSIKTVELAYRLDVNEFRGQRNAQLLVEHIWPC

SEQ ID NO: 68921 - protein, 4620 aa, Proteus mirabilis
MMSKILKDLEFTFTGKRYGTDGNDDIDAIGFGGIIYAGKGHDTITVGTLAVTAYTGDGHDFVRGGSAYLKIIDENGDLDVRGLNAWGEIEKSGHGDLKYVGASAAIKINHTGYEYGNINYSGAAIANIITRKGAISNINYQGAGGYNQIWHETNTGNMTFKGGGGYNKLVRTWFNSYQNSKGNINFEGLGGGNGIFSRVETGDIKFTGGGLENVLIREGKSGDIFMYGAGANNRLTRISRNTDTYKETSGNIYFSGGGGYNHIYSNIAQGNITFYGAGAYNEIIRTTQVHPHNDLLVEYTKAENIFLTSAYMLNLDLDKSINFLTSDNKQNFESGKPVEVKAIKSLREPNTYLFKTPGPRDTNLFISDYGRRDYTFNKVKIYNDPETGKLQYDSELWRITPDSGDIRNIRFDKKNFEDTYNLSVVNNCWNTLEKQEIIESPRFTKINADSHYQLSNLKVFQHINTEQIQRKSLETIKLGVAQELFKDDNSAECSGDINFTGGGAGNVIKSDVTQGDINFTGGGIANVIKHNSNYGNTNFTGGGAANIIVKKGQRGDLTFDGGGLANVLLHQSKEGRMNINATGATNVLIRIGDGEYKAHLTALGNVSIHKGQGDSHITMLGGLNTHTQIDSHQRDKALWRALGGLNVMTQVGAGTITSLLGGGGNVLTKMGEGDLSSIMLGGANIITHISNNKIKSNTYTITLGGLNILTKKGQGDILAIMGGGGNVLTHIGNGNIHGVMLGGANILTKVGNGDLSGIMLGIGNVLTHVGDGQTLGIMGAVGNIFTKVGNGTSMGAMVGGGNIFTHIGNGEAWALMGGLGNVYTKIGNGNTLALMIAKGNVFTHVGDGMSVALMLAIGNIATKVGDGMTLAAMIGSANIFTHIGHEETFAAMVGKGNVLTKVGNGLTLGLMLGVANIYTHVGDGISIGLFSGKANIMTKVGNGTTLSAMFGKANIMTHIGDGITGILALGQANIITKVGDGIAGIIAGAKGNIVTHVGDGITAAILGGKANILTKVGDGLTVGLLISKVGNIMTHIGNSTTIGFAKGNANIITKVGYGLGINAAWGKANIFTHIGDGERYNFAKGNANIITKVGNGQETSVVKGNINIITHVGSGNNYTGAWGNGNVVTQIGDGRQVALAKGHANIVTMLGKGDNYGIVWGKANISTKVGNGTQVTIAKGQANITTTVGDGLGVTVTYGNANINTKVGNGVSVNVAWGKYNVSTKVGDGLNVSVMKGTANANIHVGNGLGINASYAKNNVIVKIGNGDIYSLSVASSNTQSNKLATFFGNIKQSVLGVVGSQAINYLVQGDDVTTSGSRKGKGAIHLIEKSSIDGFKMNKIDEVKSNIDINLKGHITEVETPSLSDVNTDESNLTNNSPNLIINGDFKHGFKPVTEGWNIAYTQDKITAISQYGHRASIDTPTNTNNKDYWDGGLIAEYKEEYEPNIAIYQDISGLMQNEVIELSFEYERQDNTPTENKLSVIWNGEVVFTSSSDDKSIAWQQQQIKLTANAENNRLIFTIPGSDGLQGNNYRLRNIVAKSAVANINKHISDSDATKNALADKKKADANRQKLTDEKQRLLDHISTTQTELESTDHLALEKNGHRERDAILEEANSVTHNLTTVGQTLEVLSEYSQDAPPSDQPWSEPFAEGILKDVQKSLINTKKIVSVPVNNIKTQYVANLTKVKKSIKKSEYGVIQSEEHCQEVQLDTSKAKNDADKRYSDAIDKKNSAQMAEKKASTMVEDARSRGDTEQKTATSISDKAQKEAKSVQLKESDKPNRHRAHGSGLSGEAAYVEGADDNPSSYIKPISTKKNDGRFNNKLTTFNQELLDDAQQAINRLSINAGIRQKSANVLPSFTSDLNGDDVATYQQPSLRSGNLQYHKIGAIAVNLSGLGESPIFETLKQKFNVKIKNRNTYFTFILEKNSGRIQKNIYLDNINDPTQQKIIEHFILANYSNFEAMPNELHLENDKIKSSHNNKDRILAEYVEHKWQMLTDSKVMSVDELHKVASVKGKIQGESYKSIITTLSEYHEKESNTNCLPIEKLRVLAQLRNQIDGYLLGHPDSERNDGLKQLQTQVNTRYKHASALIQDSHTINADSSFSRLYDSLSNANLKRSKHIYIDINGHFVTEGKNNLQGKNRLTSGKEVIERVKNAVEKEYGAPIANKVFSQFANNEFAENGEGIDVSGLKKIHRAIERELSPHSATLYIWKPSNHSNLGHATLQIGQGRLLLNTEDAQNNHKENYISWWPNKAKSYFDVMGVPSQPKESLASDVAAEENDGFGLNYKYKELNRYDRLMNIAKGETVTTADDLSLADAKNILTIPNYIENSKIPRTIGQPFIDEWVITQKKLNNIATNFLEAVQGKFSGNTITINGAMILLTEPTLLSKRKIPLSVAQPFIEQWDNIKTQQEDISIQLLKAMKTWIQEGKDPTLTKKRIALVENEFAEQKQKSIDRFKTSLPDEGRVFRINLEGLDVAAMQAEWQRIKNSPNGRYHLLTQNCSSIVAKILKAGGADELIGYNWQPKYNIWTPNQMFAFAQELQEAQMARQQSRMIPPNLHALSGSENIRQELENTSPLISAEQKLNIVFSEQETGFLLTQASDETNEKFIYIKNGDNQEQQKIMSNFILTHYRDFDSIPEQLYFLDNTIVSLDKNHSRILSEKVGENWQPVAYSNLMTADELTSAAEVTGKARGENYKAIIQSLRDYELQSTNTNNTPIDIFQQLSTLRIQINSYLLKHPDSKRNEALQQLRDQVDIRYKHASILLSNSQQVDSNNTFSYLYEIFSNANLKINKHIYLDENGNFVTKGKNNLQNQDKLISGKNAITSIKRLVEKEYGSEITNQVFNQFTENEFAQNGHGIDLSGLKKIHQAIEQQVSPISSTLYIWKPSKHSRLGHAALQIGSGRLQLDSDSVQDNHDNNYVSWWPAGSKSLANPLNITTEKNPDLKLRWYDLSQPVSRSTNFMTLQIDIQEEEKTNFKLNKDEGENDRQLKEFRDKTNLTRGLENITPEIAGLLLNAPHWIPETLIPPEISHPFIKQWKSPNSNLLEVSTNFSIAVKNWLKVAFPTAMINQTFALEIKKIKEIEDRKTENFKTSVADDTNDGVVFRINLEGLDAAAMQKEWKRINSQSDPRYQLLTKNCSSIVARILKAGGADQLIGHHWKPRFGIWTPNELYKFSQKIQEARLAQIAVQQGKPIHSNLQALSDHNKVAIDNDGTSPNERKNLSPLTRFFNDHFFGSYERRRDMTTVMRIKNEEKITLKGDAGRLTGSYYRGNDNIPEATDKKVVLFLHGSNSPTEKQSSSFYHYYNQQGIDMLAINMRGFGESDGSPTEQGMYADAQTMFRYLVNDKGIDPKNIIIHGYSMGAPIAAKLASDISANGQHIAGLFLDRPMPSMSKAIESYDEYSLKKLTGQLAKKINGQFSVEKNLQGFSKDIPIILLTDCGELGIGGEKMRTKLLDKGYLVKGERTDVSHLESLKLMNQYGKQIISSLLSPEYVNNTNHRNALDSIQNPIKKNKVTDWGMVYVKPNDNGGDSRFDSQIIIQTEDDPIVAQAASALAAKHAKNSIVVQLDADGHYRVAYGDPAQLSGKIRWQLVGHGRETTENNHLRLSNYNADELSNQLVKFNTVFSKENHINTTPEHISIVGCSLISNDKQAGFAHQFINALDQQGIRSSVSARVTEVAVDSNGHKYTKDNNGEWVAKQTQNKVVLDWNKEGKITTEFEQIHNGVAEGDIDLTKVGASADNKVRGAIADNNEVFTAPKKGKKSTKQSSSGSDNSSLSYSGNIQVSVGDGEFTTVNWGTSNLGIKVGTGGFKSLVFGDNNVMVHVGNGDSKHSVDIAGYQAFEGMQLFVGTRNVSFNLGRSNDLIVMLEKSIPTPPLINPFDGAARITKVLESIACSGENNDNDWLSVQNDQWTLAGAKKFAIDMSGIDQTSNVDYKTLTDLNSQNKRSSRGLKSDLEATLNKKYNQWLGGSGNNNEMGKISRAEQLRQLDSKIAFNFAIGGQGADIQVTAGNWNLMFGDNIQSIIDTNLGSLFGLMTQQFTATGMVETTFTYTPQNLPTKLKNKLLGRLASVSSDTTLGDIFGVDSTTDGKIISRNGEPIDVVAILKDMLAVVTEFGGEKLSAFTDPTKLLDNLQSSINLGKDGIISFAESHGLKEKATEDQQNESEVSINAQTPITTSQTENSKITEENDRPFGFNSLNIPNLFATIFNKDKQTDMRDLAENLKENLAADVLNMEKKTLDFLRNSGHLKGDGDIHVSLGNYNFNWGGDGNDLGAYLGDNNNFWGGRGSDTFYATGISNIFTGGYGNDLGVLMGRSNMMFGGDGDDTAIIAGRINNVYLGDGLDKAFVFGEGGEIHTNAGNDYVVTTGNYNRIFSGSEQDFVVTIGNHNQISLEEGNDFAKIFGNYNRLNGGGGDDEIQLMGYHAVVDGGDGNDQLIAASFSKFSLLNGNTGNDIIILGGYQNHFKGGNGIDSFLINNNVIDCYIDDISQEDNIVLGGIDWNKLWFERSGYDLKISHIRFPQNTGEQATFERIGSTTFTDYFNGNQAKIVIAMTDKDHSDQREYTALSSNALAIQIQAMSTFPMKAGASGFFDNISDEAKQMIAVAWTDTISGKGILV

SEQ ID NO: 68922 - protein, 238 aa, Proteus mirabilis
MFDPFNDFEQVGYLRNYYGEKDPIIIRQLEHTMFRAGLDEALAYLVGKEILHYEDFLGVHRILFEAFYPWAGQDRAITAPNCAVSKAGTMFCHPHHARLAIEEGLRLGQNVKYMRQHPGEVMGFFAYGHPFLDGNGRTMLIIHNELCHRAGFSIDWHRTNKMDYLRALSAEIKSPSKGLLDNYLFQFIGDTRDRNLWGESINGIRGLDGQSIENSVDGEYTDIAVAQKYQSFKMNRGL

SEQ ID NO: 68923 - protein, 134 aa, Proteus mirabilis
  MISC_FEATURE (25)..(25): X=any amino acid
  MISC_FEATURE (107)..(107): X=any amino acid
  MISC_FEATURE (127)..(127): X=any amino acid
  MISC_FEATURE (129)..(129): X=any amino acid
GILTRFPSTTLFSLALGVDSPCPDXRWTGTLGLPACGFFTRIIVTYVSIRTSDTSSIPHSTPSQATERSPTQQHLCVAAAASVHGLAPLHLPRGPTRPVSYYAFFKXWLLLSQHPGCLSLPTSFPTXPXLWDLS

SEQ ID NO: 68924 - protein, 134 aa, Proteus mirabilis; identical to SEQ ID NO: 68923
  MISC_FEATURE (25)..(25): X=any amino acid
  MISC_FEATURE (107)..(107): X=any amino acid
  MISC_FEATURE (127)..(127): X=any amino acid
  MISC_FEATURE (129)..(129): X=any amino acid

SEQ ID NO: 68925 - protein, 89 aa, Proteus mirabilis
MRYSEQIKPISYLKANVAEVMTKLTESGAPMIITQNGEAKAVIQDITFYEETQETLALLKILALGQQQVEAGEVKDIKSVVQRLKSKRK

SEQ ID NO: 68926 - protein, 122 aa, Proteus mirabilis
  MISC_FEATURE (19)..(19): X=any amino acid
MLSAVISSALSYRAMPLAXQPEHQWCVHSGPLVLGATPLNLPTPTADRDRTVSRRSKPSSRTTLNGEQPYPWDLLQPQDVMSRHRGAKHRRRYELLGGISLLSPEYLLSVERWPFHSEPPDH

SEQ ID NO: 68927 - protein, 116 aa, Proteus mirabilis
  MISC_FEATURE (19)..(19): X=any amino acid
MLSAVISSALSYRAMPLAXQPEHQWCVHSGPLVLGATPLNLPTPTADRDRTVSRRSKPSSRTTLNGEQPYPWDLLQPQDVMSRHRGAKHRRRYELLGGISLLSPEYLLSVERMAFH

SEQ ID NO: 68928 - protein, 87 aa, Proteus mirabilis
  MISC_FEATURE (19)..(19): X=any amino acid
MLSAVISSALSYRAMPLAXQPEHQWCVHSGPLVLGATPLNLPTPTADRDRTVSRRSKPSSRTTLNGEQPYPWDLLQPQDVMSRHRGA

SEQ ID NO: 68929 - protein, 353 aa, Proteus mirabilis
MSLLLLKSRPLVVIPELAVRLGLNEAMLLQQIQYWLTETTSGVEYDGSRWIYNTVEEWKNQFPFFSESTIKRAFTNLKKQGVLRIEQINKSNHDRTNYYAINYDHHLLTDGVNMTLSNSDNTSNRAVQNDLIDKRKLKPSNSSKCAVLNGSKWPDLTENTTEITSESTTETNSSCQVPTEPDNAPEKLILDYFNKVTNSKYREGKTTTGHIKARLAEGFTSEDLILITDYLTAKWQKDPKMRDYLRPKTLFVPENCIEYQDKAIKWRDAGRPECVNGRWLKPGEVSVEINTVERDETFRKMFTSGWKPENRIQALAVEQAKKNGLGRMSEVAGLASFRGIWKQATEQVALEAK

SEQ ID NO: 68930 - protein, 121 aa, Proteus mirabilis
MSVQTEHFLYDAAANLLTRPHTEAPHNQVPHSDRFDYRYDGFGRMVSRYEKGSSSGQRYHYDSDHRIIAVDIDQGPLGYQRAEYRYDILGRRIEKRLWKASAIANTMTYHQHEPDKVYKRF

SEQ ID NO: 68931 - protein, 127 aa, Proteus mirabilis
MKITHLDHLVLTVADIEVSCHFYHNVLGFEIITFKQGRKALAFGHQKINLHQLGKEFLPKAAKPTAGSADLCFITETPLLDVIEHINQQGINIEEGPVPRTGATGPIMSVYLRDPDNNLLEIANIIE

SEQ ID NO: 68932 - protein, 160 aa, Proteus mirabilis
MTKKKSHKPGSATIALNKRARHEYFMEDEIEAGLSLQGWEVKSLRAGKANISDSYVIMRDGEAYLFGATITPLNVASTHVVCDPTRTRKLLLKQRELANLYGQINRDGYTVVALSLYWKNAWCKIKIGVAKGKKDHDKRDTIKDREWKLDKARIMKNANR

SEQ ID NO: 68933 - protein, 256 aa, Proteus mirabilis
MTNPVILADLDDTLFQTRRKMVDELALAPYKTGALDRSLAPRSFMTQEQAMLVDWMLEHADLIPVTARGTEEMSRVTIPFHSWAITTHGAVILTPEKVADEQWQHHITQSLTPYKQPLLRLQQSITQLMAERNIDGWARINYEYDDLPIYLVMKHNDSARLDELYAIGDEIEKIFSTKGFYIHRNSNNIAWLPEPIEKGKAVTYLLNKLKAERGVFPVIGFGDSLSDHRFMKLCNWYAIPRQSQFANAINTKIFGE

SEQ ID NO: 68934 - protein, 1030 aa, Proteus mirabilis
MSNVGQRERITQNRIVQFFQTDLGYRYLGDWQDRVNNKNIEVEILVDWLTKRGVSEALINRTIRQLDAAAALGEGKKLYYANKEVYRLLRYGVKDKEGAGHQNETVWLIDWHNPEANDFAIAEEVSIKGENKKRPDIVLYVNGIALGVIELKRSSVSVSEGIRQNLDNQKKDFIRNFFTTMQLVMAGNDTQGLRYGTIETPEKFYLEWKEPLENTYDYKLDFHLSRICNKSRFLQIIHDFIVFDAGTKKTCRHNQFFGVEAAKAHITKREGGIIWHTQGSGKSLTMVWLAKWIRENVTDARVLIVTDRTELDEQIEKVFTGVDEEIYRTKSGADLVATLNQPNPWLICSLVHKFGRQSDSENDAATDEFIEELKKSLSSNFRAKGTLFVFVDECHRTQSGKLHNAMKTILPEAMFVGFTGTPLMKKDKKKSVEVFGPYIHTYKFDEAVADGVVLDLRYEARDIDQHITSQKKVDEWFEAKTRGLSRIAKTQLKLKWGTMQKVLSSKSRLQQIVNDILLDMDTRPRLMDGHGNAMLVCSSVYQACKAYEMFSQTDLAGKVAIVTSFQPTPASIKGEETGEGLTEKLFKYDIYRKMLADYFELPEDKAANKVEDFEKEVKKRFVNEPGQMRLLIVVDKLLTGFDAPSATYLYIDKQMADHSLFQAICRVNRLDGDDKEYGYIIDYKDLFRSLDKAISDYTQGAFEGYDKEDVVGLLKDRLEQARLNLDSALEMVRALCEPVKAPRNTEDYIHYFCGESGLNQDELTEKEALRLTLYQSVAKLLRAFANIANEMPDAGYSTHDINSIRSEVCHYEKVRDEVKLASGDLVEMKRFEPAMRHLLDMYIRADDSEVLMDFEELGLIELIVEKGVSAIDTLPEDLRKNPGAMAETIENNVRKIIVDENPVNPKYYEQMSVLLNELIELRRQKAIEYQDYLEKIRELAAKVVRPERTSSSYPASMDTNPKRAFYDNFGKDEWLATKIDSAIRYTKKADWVGDRFKEREIANAVREETAGYEVDIQDVMELAKAQKEYQ

SEQ ID NO: 68935 - protein, 139 aa, Proteus mirabilis
MNYQFQEGAITLPDEEYQDNSLNMLRFPTRQGSISITRDVVAPEITLNDYLAGQLSAIKREMKNAVVKAPTDFRTEKGVTGCEIYCETKQKGIPIYQWIAAFRLENKIVVLTYCQIKPFSNTEQAQWQALRDSFTPSPN

SEQ ID NO: 68936 - protein, 245 aa, Proteus mirabilis
MFAQFLSHYLLEPHYLSWLWQGFLITLLISFWTIIIATLLGFLLSAAYDSHIAPLRWCAAIYTSLFRNTPLLVQLFFWYFASGELLPQTAMIWLNTPHELSLFGLTLSWPSFEFLAGIIGLTFYSVPFIAQELRAGIQGVRQGQKYAALALGLTHWQSMRYVILPQAFRIALPPLLGQYMNIIKNSSLTMAIGVAELSYASRQVETESLRTFEAFGVATILYIAAIALMEAWGQWHQQRKLAQGY

SEQ ID NO: 68937 - protein, 464 aa, Proteus mirabilis
MNKKLGLMSLTALVLSSMVGAGVFSLPQNMAEVASPAALIIGWIITGVGILFLALSLLLLSRLRPDLDGGIFTYAKEGFGEFIGFCSAWGYWVCAVVANVSYLVIVFAAVSFFTDSPNNIIFGDGNTWQALLGESILLWVVHFLVLRGVQTAASINLMATMAKLIPLGLFIIVALLAFNMDIFTLDFEGIKMGVPVWEQVKNTMLITLWVFIGIEGAVVVSARAKNRRDVGLATIFAVVIALIIYILVTLLSQGLVSQPELAMMKNPSMAPLLVQLIGNIGEIVIAAGLILSVCGAYLSWTIMAAEVPYIAALHHSFPKQLSKQNHNDAPSSSLWFTNLAVQLSLVLIWLTGSNYNTLLTIASEMILVPYFLVGAFLFKVAIERSSRGLLLIAIPASLYGLWLLYASGVINLLLSVVLYAPGVLIFLYSRKQYKDKQSLNTSEKILLMMVLIGAIPACGYLVFN

SEQ ID NO: 68938 - protein, 254 aa, Proteus mirabilis
MNSFSTLKTLFCGSLLALSLVNTTQAGVSLDRTRIVLTGNENSASVNLKNTSPDIPFLAQSWVENENGQKISSPLVALPPLQRLDGAQKGVVRITKTAEVGLLPQDRESLFYLNVREIPPAPKQANVLQMAMQSRIKLFYRPSAIVPEKPGMVWQDQLVFKKQGNKFIVNNPTPYYITIISLSNKLNGEDSDKLTTFPGLMVAPKASLDIPVKTSNVNQFYMMYVNDYGGHPELKFVCQQDSCKVAPKDQQPKY

SEQ ID NO: 68939 - protein, 436 aa, Proteus mirabilis
MKFPGKRKSKHYFPVSLRDPLLKPIINMTESESSRAYIVGIDQTLVDIEAKVDEAFINRYNLSQGHSLVIEDDVAEALYRELTVNNLITHEFAGGTIGNTLHNYSVLADDRSVLLGTMCNNIQIGSYAYRYLCNTSSRTDLNYLQGVDGAIGRCFTLITENGERTFAISPGQMNQLQPESIPEDVIADASALVLTAYLVRCKPGEPMPLATMKAIEYAKKHDVPVVLTLGTKYVIADDPQWWRDFLKEHVSVVAMNEDEALELTGHADPLLASDAALEWVDLVLCTAGPAGLYMAGFTESDFKRQTTHPLLPGAIAEFNRYEFSRAMRFKDCQTPEKVYSHIEPYMGGPEKIMNTNGAGDAALSALLHDITANSYHRINVPNSSKHPRSYLTYSSLAQVCKYANRVSYQVLSQHSPRLTRGLPEKEDSLEEAYWER

SEQ ID NO: 68940 - protein, 644 aa, Proteus mirabilis
LDDIPSLAMPVLLLLKNEESAVLTEVSFDETGQRKYKIQQVDGLSIWLTQSELSEKYLGYCWFIKPRITEDVRSELPEYTMPKAWFFKVIWRFKKYYYQIILATFVINFLALVSSLYVMNVYDRVIPNKSYQTLWVLSIGVIIAILFEFTAKMLRGRLTDIAGKKADLIISSALFRKVTNLKLQEKPISSGSYVNNLRDFESVRDFMTSASLLTLVDMPFLILFVSVIALVGGYLAFVPLTIIPLVIIVGLLAQIPLSKYINESMKESSQRQGLAVEAIEGIETLKTNNAMNWAQKRWDYYTAKTASFIMKVKNISNFVIYFAVMMQQLNTIFLVIIGTYLIHSDDPASKITMGALIATVILSGRALSPLGQIAGLAVRFQQAWVALKGVNGIVERPSEREPSRKYITLKQINGNIKFQNVSFAYNQDSSSVVKNLSFEIKPGEKVGILGRIGSGKSTTLKLAAGLYPAEQGSITLDDVDIRQIDPHYLRNQVLLLEQEPRLFLGSLRENLDLARMDGFSSDQDLIVALKRFGLDKVIKKHPRGLDMSLGENGLGLSGGQKQIVALARMTLRNPKIVLLDEPTTGLDQYSEIQALNAISAWCRSKTLLVVTHRPQVLSIVNRIIVVDNGKVVMDGPRDAVLQQL

SEQ ID NO: 68941 - protein, 130 aa, Proteus mirabilis
MKKYIFTAIILSLTASYASAETAVNGCDIKKQNIQRQIDYAKMHGNQYRVQGLERALNKVERYCTPEKVVEDTRLELREKQLEVKERELELKEAQLKGERDKITKREDKLAQAKAELKAAEEELELLTKK

SEQ ID NO: 68942 - protein, 236 aa, Proteus mirabilis
MKPHLKRSLTIKQMAAVAGVTLVTIAIFISIQLVYLIDQRREDYQNQLFNAAVSIQQPLADALLRSDLNDAKQLIISLKTTGILGKAIVTQPENVQVMNLDFAPKKSVSQFSRWLFGIPVEVTIPLQPLGITSADDKAYTSHLILQADTNRFYRFASNTVALMLTTYLLMGLILTIAISWCINRIMVKPLRHIAVTLNKSNQVSMLSCSESHRDDEIGLLIKGYNQQKSDQKESDI

SEQ ID NO: 68943 - protein, 224 aa, Proteus mirabilis
MYRFTSRQKAAALLWLSLFHILIITSSNYLVQLPISIFGFHTTWGAFTFPFIFLATDLTVRIYGAPLARRIITAVMIPALAISYLISTLFFQGSWQGFASLNDFNIMVARIATASFMAYVLGQIMDVSVFNRLRQQQKWWVAPSAAMFFGNFLDTVAFFFIAFYRSTDAFMAANWVEIALVDYTFKLTICMLFFLPAYGVLLNFILRYFFAQENQQQSYAQIRP

SEQ ID NO: 68944 - protein, 238 aa, Proteus mirabilis
MKIAAHRGFSGKAPENTLAAFKMAIDFGCEWIETDVQLTADHVPVLIHDKTVNRCTNGQGAVRFHSLDDLHRLDAGSWFSSLYQGEKIPTLRQGLQLIKRSGTKLNIELKTWPDDDVERLCLAVSEMIKSADIPNEQILFSSFDTHALMVMKRYLPAIRRGQLWDDIPDNALETLQAIEGFSVHCNYQYLTQQQAAMLKQAGYEIYCYTPNDPKEVKDFEAWGVDMLITDVPDIYQQN

SEQ ID NO: 68945 - protein, 244 aa, Proteus mirabilis
MYSVYQFFQAIGLGLILLLPLTNPLTTVALWLGLSGNMTKEQRNQQSFMACVYIFIIMTIAFYAGRVIMTTFGISIPGLRIAGGMIVAFIGFSMLFPHTPNVDDPLSEEKNPHRNPQAPNIAFVPLAMPSTAGPGTIAMIISTAASIPSRTDIAQWVLYVAPITTFFLISLIVWLSLRGSTGIMRYLGHSGIDAISRVMGFLLICMGVQFMINGVLEIIADLPALLQQAQSAAAASLSEKLSAK

SEQ ID NO: 68946 - protein, 271 aa, Proteus mirabilis
MSQTKTSLMGQCISEFIGTALLVFFGLGCVAAARIAGAQLGLWEISIIWGLGVALAVYLTAGTSGAHLNPAVTVAFWLFACFERKKVIPYIVAQMLGGFFAAAVVYFMYYNLFIDYEQVNGIVRGSQESLFTAGVFSTYPAAQISVIHAFFIEVIIAVILVGLILALTDDGNGVPRGPLAPLLIGILIAVIGGAFGPLTGFALNPARDFGPKLVAFFAGWGDIALTGGRDIPYFLVPLIAPMIGGILGALAYRKLIGRHLPCDTCKIENDK

SEQ ID NO: 68947 - protein, 491 aa, Proteus mirabilis
MANYFNTLNLRQQLSQLGKCRFMSRDEFADEANYLKGKKVVIVGCGAQGLNQGLNMRDSGLDIAYALRQEAIDEKRASWRRATENGFEVGTYEALIPQADLVVNLTPDKQHSAVVQAVQPLMKSGAALGYSHGFNIVEVGEKIRDDITVVMVAPKCPGTEVREEYKRGFGVPTLIAVHPENDAKGEGMAIAKAWAAATGGHRAGVLESSFVAEVKSDLMGEQTILCGMLQAGSLLCYDKMVAEGVEPGYAGKLIQFGWETITEALKQGGITLMMDRLSNPAKMRAYALSEQLKEIMAPLFAKHMDDIISGKFSETMMADWANDDKNLLTWREETGASAFENYPEYEGKISEQEYFDHGVLMVAMVKAGVELAFDTMIEAGIIAESAYYESLHELPLIANTIARKRLYEMNVVISDTAEYGNYLFSFAAVPMLKEFMTTLQSGDLAKHVPDSGTDNAQLRDINEAIRQHPIEIVGKKLRGYMTDMKKIAVAN

SEQ ID NO: 68948 - protein, 313 aa, Proteus mirabilis
MKYIKSIGTLSLLAAAVLLSGCDMALMNPKGAIGAEQKTLILIALGLMLIVVIPVILMVIVFAYRYRESNTKATYRPNWAHSNKIELVVWTVPIIIIVILATITWKTTHELDPYKPLVSDEKPVTIEVVSMDWKWLFIYPEQGIATVNELAFPTNVPVNFKITSDSVMNSFFIPRLGGQIYAMAGMQTKLHLIANEPGEYQGMSASYSGHGFSDMKFTAIATPDRAGFDAWVAKVKQSSDTLNTTAAFDELAKPSQKNPVTYYSSVKPMLFQETISKFGHTGHGAHTGSNQTEHSDATMNMNMSHAAHAGAEE

SEQ ID NO: 68949 - protein, 204 aa, Proteus mirabilis
MTIHQNIVWHPHQIGLKEREAQQVHKGCVLWFTGLSGSGKSTLADALEQTLYQYSTLHAPIRTYLLDGDNLRHGLCHDLGFSEQDRHENIRRVGEVAKLMVDAGLIVLTAFISPYQQDRQQVRERFTQGRFIEIFVDTPLALCEARDPKGLYQKARRGEIKQFSGIDSPYERPIAPEIHLDGSLAINELTQQILAYLQQQQIYR

SEQ ID NO: 68950 - protein, 474 aa, Proteus mirabilis
MATVVNFTQWPWHHWAQLNPNETAIISGDSPITWQQLSCHINRLANHLAKQGVNTKSTVLLRGKNHIHVVFTLLAVFQCGAKVLPLDPQLPKSLLDDLLPHLNIDFYADLSGSTLELDARLLDLSGVEFNNKSHQDKNNMAGVAWASSRMATLILTSGSSGLPKAAVHTFQAHLCSAEGVLELIPFEKSDSWLLSLPLFHVSGQGILWRWLLRGATLVVRNMHPFIAALQGCTHASLVPTQLWRLLQNTQQDSSQPITLKAVLLGGAMIPTELTQCAESKGIQCWCGYGMTEMASTVCAKRADGKAGVGTPLKGKAVRLVDNEIQIKSDSVALGYWFDGQLKPLSQTQDDWYATRDRGCFKEGEWCILGRLDNLFFSAGEGIQPEDIEKVLNSHPNVRQTFIVPIDDIEFGQRPVAVVDTDIETINQLPQWYHTRLAGFQRPIACLLLPEQLKSGGIKISRKQVQQWVKGQQVN

SEQ ID NO: 68951 - protein, 632 aa, Proteus mirabilis
MFYPEHFDVIVIGGGHAGTEAAMAAARMGRQTLLLTHNIDTLGQMSCNPAIGGIGKGHLVKEIDAMGGLMATAIDHAGIQFRTLNASKGPAVRATRAQADRVLYRQAIRTTLENQPNLMIFQQPVEDLIVENDQVTGAVTRMGLKFRAKAVVLTVGTFLDGKIHIGLENYSGGRAGDPPSVSLSHRLRELPLRVGRLKTGTPPRIDARTIDFSQLAPQLGDNPMPVFSFLGNVDQHPEQMPCHITHTNEQTHEIIRNNLDRSPMYAGVIEGIGPRYCPSIEDKVMRFADRNSHQIFLEPEGLTSNEIYPNGISTSLPFDVQMQIVNSMKGMENAKIIRPGYAIEYDFFDPRDLKQTLESKFINGLFFAGQINGTTGYEEAAAQGLLAGLNAARYAFDQEGWFPRRDQAYIGVLVDDLCTLGTKEPYRMFTSRAEYRLMLREDNADLRLTEIGRELGMVDDNRWAQFSEKVELVEKERQRLRDIWVHPKADNLEEINQLLKTPLSKEANGEDLLRRPEMTYEILKKIPRFAPGIDDSRPQAAEQVEIQVKYEGYINRQQEEIEKQLRNESAALPIDIDYKQVSGLSNEVIAKLNDHKPTSIGQASRISGVTPAAISILLVWLKKQGLLRRSAS

SEQ ID NO: 68952 - protein, 669 aa, Proteus mirabilis
MAINLLPPQLANQIAAGEVVERPASVVKELLENSLDAGATTIDIDIDKGGAKLIRIRDNGCGISRDDLKLALARHATSKISTLDDLEAIMSMGFRGEALASISSVSRLTLTSRTASQEEAWQAYAEGRDMTVAVKPAAHPVGSTVEVLDLFYNTPARRKFLRTEKTEFGHIDEVVRRIALSRFDVSINLTHNGKRVRQYRAAKETHQHHRRLSAICGNHFVDQAMQLTWEHGDLAIKGWVEHPLAPVQSSEIQYCYVNGRMMRDRLINHAIRQAYEGYLQVEQQPSYVLYLTVDPHQVDVNVHPAKHEVRFHESRLVHDFIYQAVLSVLRQVTEDTLSLDEEDNGALTATTFPENRQVAGENVFSQPYQAPVTSSTQKKSTGAYQGSAGKGLTDTQKSPQKTLDTRQFGESYQRTQGMLYQKMMQESASDVENKEKIPLFPPRPPLNLVDVGHTTNNNETNVISVVPRSVNASAAQTDYTFGRVLAIYQQKYALIESSQGLGLLALEEADFLLKCAQLLPENENLKPQPLLVPLKVTLSKDEINTFKQFQALISDFGIVIDISHGKATIHAVSLPLRQQNLPELLTKLLAYLATEKLCSKQQIGHWLAKQLSHESGVWSQAQAVGLLADIERLCPQYVRQPSKNLLQLIELQPVVAALNNERSKNANKT

SEQ ID NO: 68953 - protein, 250 aa, Proteus mirabilis
MSEETSTIIFEHPLNEKMRSWLRIENSLIQLNSFQSINSLSSALSFFRAVSEFIEVLDRGEIRAELLKELEKRQKKLQQWLSFPNVDKEIVSHIINELSESACALSKAPRIGQHLKQDKIISLVKQRLSIPGGCCSFDVPTLHLWLNLPQTVRTEKLTCWQEGLYPLQNALNALLTLIRQSDTFKPVLSHNGFYQDSTEEGELLRIKLLASQQIYPQVSGHKNRYAIRFLPLDSEHGTIPSELPFEISCC

SEQ ID NO: 68954 - protein, 139 aa, Proteus mirabilis
MSNRTVMGFDFGTKSIGAAIGQEVTGTARPLASFKAKDGIPDWSQIEKIIKEWQPDLVVVGLPLNMDGTEQLVTTQAKKFANRLHGRFGVQIALHDERLSTVEARAHLFEQGGYRSLDKGSVDATSAVIILESWFERQY

SEQ ID NO: 68955 - protein, 114 aa, Proteus mirabilis
MRIKLLLGATAALLLAGCSATNTLTSAGSQVQITDTQPGSECQLLGTVTGVQNNWLSGSRTESQSLRGAANDLRNKAAAMGGNVIFNVGTGAGSIVDSFAPLDSKMSGQVYKCQ

SEQ ID NO: 68956 - protein, 235 aa, Proteus mirabilis
MRVGVIGAMEQEVKLLREQIENCEIVSRGGCEIYTGKINGVDVALLKSGIGKVAAAIGTTLLLEHFRPDVVINTGSAGGLDAKLNVGDIVVSTEVRYHDADVTAFGYEPGQMAQCPPAFIADPKLVNIAQECIGSLKLNAVRGLICSGDAFINGAEPLARIRRTFPEVVAVEMESTAIGHVCHQFDTPFVVVRAISDVADKESHLSFDEFLSVAAQQSSLMVTTMLDKLKTETQF

SEQ ID NO: 68957 - protein, 434 aa, Proteus mirabilis
MKSSASSTIKDRVAIVSGLRLPFAKQATAYRGIPAVELGRSVVQELVIRNEIPPEIIDQLVFGQVVQMPAAPNIAREIVLGAGLSVKTDAYSVTRACATSFQAIANVAESMLAGHVSVGIAGGADSSSVLPIGVSKKLADVLLSLSKAKTLGQRLSYLSQLRFGDLLPVAPAVAEYSTGLRMGDTAEQMAKTYHISRVAQDELAHRSHQLAAKAWEMGKLNDEVMTAFFPPYKSGFHQDNNIRKNSVLDSYAKLKPAFDRRHGSVTAANSTPLTDGAAAVLMMKESVAKSLGYQPLGYLRSYAFTAIDVWKDMLLGPSYATPLALSRAGLTLSDLTLIDMHEAFAAQTLSNLTLFASDKFAQEQLGLSKAIGEVDMDKFNVLGGSIAYGHPFAATGARMVTQTLHELKRRGGGFGLTTACAAGGLGAAMILEVE

SEQ ID NO: 68958 - protein, 328 aa, Proteus mirabilis
MTNSTNKPLLSVKDLCVTFGTPDGDVTAVNKLNFELSAGETLGIVGESGSGKSQTAFALMGLLAKNGRTAGSAHFNGREILNLRQSQLNKMRAEEISMIFQDPMTSLNPYMKVGTQLIEVLMLHKGMSKNDAYAESVRMLDAVKMPEAHKRMGMYPHEFSGGMRQRVMIAMALLCKPKLLIADEPTTALDVTVQAQIMTLLNELKKELNTAIIMITHDLGVVAGICDKVLVMYAGRTMEYGNARDIFYQPSHPYSIGLLQAVPRLDGEDERLATIPGNPPNLLRLPKGCPFQPRCQYATEQCLNSEPQLTQFAQGRLRACFKAAEELV

SEQ ID NO: 68959 - protein, 278 aa, Proteus mirabilis
MGQVLFVVWRESFEALLVVGIIYAWIKRSPTPKQGMKYLWGGVIVGILLSILLALSIYGVFSSLEDIWQSLFMVMMEIIACLLIVQMVYWMNKQGKSLKTNIENELTQKTQQQSVWGILLIIAIAIAREGSEVVVFLSSHIMALTAQTALSFLIEVFIGLLIAGLTLWLFLLTSKMISWRKFFVITGFLLLFLAVSLLLKAVEEIANLLIEMDIELPDFLIYPLWDLSHILDDSSIFGNFLVSFFAYRSQPIGLSVVTFIVFWLVVALLFKQGDRHAK

SEQ ID NO: 68960 - protein, 289 aa, Proteus mirabilis
MYEELAYHGNFDEIKNDYCYARYLFFTAHSIPDEEQHFYNSTYRHVDDMSHSINNLKISHYKTSFRILYSLFDKIAYLVSRFFDLNDIKDDNMISIDNLFRDFKSSNWRKSWSPNKKLETSDNHFIHALFYILKDIRDVKGTSSVSKWIDPDAKAFSEIRNAMEHRSLKIVDDFSYELTTSYNSYHDGELEKLNLEIKKIKEQLKSSLHTEKPRTLESDLKKLESDRYEKKKLSSHSLLIPLGQFETRLMTLMKLARNSIIYLSLSIHFEERKRPKNNLYLPKHVPLKD

SEQ ID NO: 68961 - protein, 459 aa, Proteus mirabilis
MVLLPLLVLAYQAYQSLDQLSNQAAITNKNALADTERSEVMRNLAIEMEGNYRRYCVLRDKTDEEMYQQRYQQYSKMFFTLQQTIIPLSESKEAQALNTSLKTLKSIQCKNSEPTSQMQQALEQFSYANNRIVVLTKEIIFSRGEQLQMAIAEKGRYFGWQSLIVFVFSLILIALFTRMIIGPVKGIEKMINRLGEGRTLNNNLNSFQGPRELRSLAQRIIWLSERLAWLESQRHEFLRHISHELKTPLASMREGTELLADEVAGPLTLDQKEVVAILDNSSKQLQLLIEQLLDYNRKLSEVPQQIEEVDLTTLVNDVVLAHSLPARAKGIKTIISLDLKKCRAETTLLSRVIDNLYSNAVHYGAESGNIWISSYQIEQKIVIDIANKGTPIPESEQKMIFEPFFQGSLLRKGAVKGSGLGLSIAHDCIKRMDGELNIVHSDYADVCFRIELPLLSENK

SEQ ID NO: 68962 - protein, 660 aa, Proteus mirabilis
MFGKLTLDAIPLQEPIVVVTLIGIILGGLAVVGALTYFRKWKWLWSEWLTSVDHKKIGIMYIIVAMVMMFRGFADAIMMRSQQALASAGEAGFLPPHHYDQIFTAHGVIMIFFMATPFVVGLMNLVVPLQIGARDVAFPFLNSLSFWFFVVGVLLINISLGIGEFAQTGWLAYPPLSGLEYNPGVGVDYWIWSLQISGIGTLLTGVNFFATILRMRAPGMTMMKMPVFSWAALCTNVLIIAAFPILTVTITLLTLDRYLGTHFFTNDMGGNMMMYINLVWAWGHPEVYILILPVFGVFSEVTATFSKKRLFGYTSLVGATVVITVLSFIVWLHHFFTMGSGANVNAFFGIATMIIAIPTGVKIFNWLFTMYQGRIEYKSPMLWTIGFLVTFSVGGMTGVLLAVPGANFVLHNSLFLIAHFHNVIIGGVVFGCFAGMTYWFPKAFGFTLNEKWGIRAFWFWFIGFFMAFMPLYILGFMGMTRRLSQNINPEFHPMLMVAAGGAALIALGIVCQVIQIYVSIRDRHLNRDLTGDPWGGRTLEWSISSPAPFYNFAVEPQVKARDEWWDQKEKGTAYQRPAKYEPIHMPKNTAAGVIISAFSLVFGFAMIWHIWWLAIVGFAGMIVTWIAKSFDTDVDYYVQVPEIETIENKHYEELKKAGVK

SEQ ID NO: 68963 - protein, 366 aa, Proteus mirabilis
MSKLRVAIIFGGKSTEHQVSLQSAKNIINELDRTKFDLCLIGINEQGQWHEYAEDNYLINSDNPSTISLSQPLRPVAIIPGSTRQQFISLTDGQPLAQIDVVFPIVHGAYGEDGTLQGLLHMIDMPYVGPNIMSSAACMDKDITKRLLDDAGLAVAPFITLMAHQLNDISYNEVVEQLGLPLFIKPANLGSSVGISKVNNEAEFNAALSMAFEYDLKVIIESAIVGREIECAVLGNEEPEVSPCGEIVLNDAFYAYNTKYIDDDGAKVVVPADLDNAISLHIRQTALKAYQVLNCLGMSRVDVFLTEDNQVIINEINTLPGFTNISMYPKLWQSTGLDYQSLITKLIELALEHHKKTAVLKTKCEL

SEQ ID NO: 68964 - protein, 475 aa, Proteus mirabilis
MIQNTCLNGHKIDMQLQQRELTYTPDLALRVFAPIASLSWSSLLHSGFAEHHHNRFDIVVSDPAITLETRKQITTIKEKTGRVKRSKKDPFTLIQTALDAFNFHPVSDERLPFLGGALGIWSYDLGRRIEILPELAKNELNFADMAIGIYDWALIVDHQLKKATLISYQDIDARLQWLTKHADNNTIEKKEPFVLTSPWQSNMSSDEYNEKIAKIHQYLLSGDCYQVNLAQRFCANYSGDEWNAFLTLNQANKAPFSAFMHLPHHFVMSISPERFIHLSDHKIETRPIKGTLPRKAHPDEDDEQAQLLANSRKDRAENLMIVDLMRNDIGKVATTGSVKVPELFVVERFPAVHHLVSTITAELPENLNATDLLRAAFPGGSITGAPKIRAMEIIEELEPHRRHGYCGAIGYISFCGTMDTNISIRTLLTEKNKIYCWAGGGIVADSVAEQEYQETFDKLGQILTVLSEVSPDDTY

SEQ ID NO: 68965 - protein, 176 aa, Proteus mirabilis
LALSLLAGILPVTQAADDPTETFLYEQVRLGNSKSNDVLVSQSLYRLSLIKPNDPSVLLMRIQFAVKQKETAKAQQLVEQLRMHGENTEQYQRAIKLLSLTHEDNRQILQKAYLYQTAGRYDEALQLYDDIYQGTPPDEGLALEYLNVLIAANHANKMARIKQIYHTYPNNQQIAN

SEQ ID NO: 68966 - protein, 566 aa, Proteus mirabilis
MKTHKVNRVRPFSAFIDACVKEPYSFARLLKDIIAGITVGIIAIPLAMALAIGSGVPPQYGLYTAAIAGIIIAVTGGSRYSVSGPTAAFVVILYPVSQQFGLSGLLIATLMSGIILVVMGLARFGKLIEYIPVSVTLGFTSGIAITIATMQIKDFFGLEMSHVPETYIDKVIALGAALPTIHLGDTLIGVTTLLVLIYWPKLNLRLPGHLPALIAGTAVMGIVNLFGHDVATIGSQFSYLLPDGSTGQGIPPILPQFVLPWNLPSSGESIALNWSTVSALLPAAFSMAMLGAIESLLCAVVLDGMTGKKHHSNGELVGQGIGNIVAPFFGGITATAAIARSAANVRAGATSPVSAIVHSLLVLVTLLVLAPFLSYLPLAAMSALLLIVAWNMSEARKVIDLIRHAPKDDIIVLVLCLSLTVLFDMVIAITIGIVLASLLFMRRIANMTKITESTYTDDDKQLLVVRVNGPLFFAAAERIFNELRERSKGYKTLIMQWDAVPVLDAGGLHAFQHFVADVQHDTHIIVCDIPFQPLKTLARARVTPIDGTLNFYPSLQKALDDMELIQ

SEQ ID NO: 68967 - protein, 394 aa, Proteus mirabilis
MRKLEHANLLLLIIALVAVGQMTQTIYVPVIADMAVYFGEPTGAVQQVMGAYLFSYGFSQLIYGPISDRVGRRPVILVGMSIFCLATIVAIFSQNLTTLVIASTLQGMGTGVAGVMTRTQPRDLYTGTALRYANSLLNMGVLVSPLLAPMIGGVVAHFFGWHACYIFLLLLGGSVLFSMYHWMPETRPVQAERRSMLSSFYLLLSNSTFSAFLIMLICALSGIAVFEASSGVLMGGVLGLNSITISILFILPIPAAFFGAWYAGREGKTFVQLMWHSVFCCVAAGILMWLPGWLNIINIWTLLVPAALFFFGAGMLFPLATTGAMEPFPYLAGAAGALVGGLQNVGSGIATWFSALLPQHNQFSLGMIMFIMSVAIMLCWIPLSHRFSHQQNTV

SEQ ID NO: 68968 - protein, 175 aa, Proteus mirabilis
MKLNKLALVLGLGLSVVAGSALAADQGHGTVKFVGSIIDAPCSITPDTENQTVPLGQISTAALKDGGRSNSRDFKISLENCTTETYKTVQTTFTGSEATEVLEGSLGIEGIAKNAAVVITDAGGKQIKLGTPSAAQNLRDGNNDLNFAAYLQGSASEAAVPGDFTAIATFALTYQ

SEQ ID NO: 68969 - protein, 509 aa, Proteus mirabilis
MRIGIPKERLSNETRVAATPATVTQLLKLGFTVAIENEAGIASSFDNDAYQQAGAEILDCQNIWQSDIILKVNAPLEDEIALLKKGSTLISFIWPAQNAPLLEKLAEKEINVMAMDSVPRISRAQSLDALSSMANIAGYRAVVEAAHEFGRFFTGQITAAGKVPPAKVMVIGAGVAGLAAIGAAGSLGAVVRAFDTRPEVKEQVQSMGAEFLELDFKEEAGSGDGYAKVMSKAFIDAEMALFAEQAKDVDIIITTALIPGKPAPRLITKEMVDSMKPGSVVVDLAAQNGGNCEYTVPGEIFTTEHGVKIIGYTDLAARLPAQSSQLYGTNLVNLLKLLCKEKDGNINIDFDDVVIRGVTVIKAGEVTWPAPPIQVSAQPKAAPAAKPQEKPVAKPISPWKKYGLLAIAFLLFAWLANVAPKEFLSHFTVFALSCVVGYYVVWNVSHSLHTPLMSVTNAISGIIVVGALLQIGSGGWVSFFSFIAILIASINIFGGFTVTQRMLKMFRKG

SEQ ID NO: 68970 - protein, 269 aa, Proteus mirabilis
MFDKLLEVKNLSKTFRYRTGLFHRQQLKAVKPVSFTLEPKQTLAIIGANGSGKSTLARMLSGVTEPTGGDIFINGHQLSFGDYSYRSQRIRMIFQDPTNSLNPRQRIGQTLDLPLRLNTELSGIEREKRIYQTLRQVGLLPEHANYYPHMFASGQRQRIALARALILQPQVIIADEAIASLDMSLRSQIINLMLELQETHEIAYIYVTQNLGMTKHISDKVMVMDNGEVVERGNTAEVLASPLHEVTRRLVASHFGEALTAEAWRQDLP

SEQ ID NO: 68971 - protein, 819 aa, Proteus mirabilis
MRVLKFGGTSVANAERVLNVADIAEKKREQGQVALVLSAPAKITNYLVAMIEKTAEGEEPLTQVREAEQIFANLLQGLRENQPGFDYQGLKDKVEREFAEIKHILHGISLLGQCPDSINAAMICRGEKLSIAIMESVLQARGYNVTVIDPVKNLLAQGHYLESTVDIPESTRRISALNIPKDHMILMAGFTAGNEKNELVVLGRNGSDYSAAVLAACLRAQCCEIWTDVDGVYTCDPRLVPDAHLLKGMSYQEAMELSYFGAKVLHPRTIAPIAQFQIPCLIKNTGNPEAPGTLIGDGQKDDSTPVKGITNLNNMAMINVSGPGMKGMVGMAARVFSVMSRAGISVVLITQSSSEYSISFCVPQKELIRAQKALSEEFYLELKDGVLDPLDIMNNVAIISVVGDGMRTLKGISARFFSALTRGNINIVAIAQGSSERSISAVIANDAATNAVRLCHQMLFNTNQIVEVFIVGVGGVGSALIEQIHRQQAWLKNKHIDLRVCGIANSRAMLTNMQGIDLDNWQQALQAAKEPFSFSQLIRLEKEYHFLNPVIVDCTSNEMISQQYANFLQNGFNVVTPNKKANTMSMDYYHQIRQSAEASRRKFLYDTNVGAGLPVIENLQNLLNAGDELVQFNGILSGSLSYIFGQLDEGKSLSEATLSAKEKGFTEPDPRDDLSGMDVARKLLILAREAGYQLELSDIDVEPVLPSSFDSTGDVESFLNRLPQVDVEFDAKVEEAQKSAKVLRYVGIINEGKCQVKIMAVDANDPLFKVKNGENALAFYTRYYQPIPLVLRGYGAGNDVTAAGVFADVLRTLSWKLGV

SEQ ID NO: 68972 - protein, 280 aa, Proteus mirabilis
MLSYRHSFHAGNHADVLKHIVQTLIIESLKEKEKPFLYLDTHAGAGRYQLTNAHATRTGEYLEGIARLWQQEEVPELILPYLEAVGSLNTSDELRYYPGSPLLAAKLLREQDLLMLTELHPTDFPLLRTEFSRDKRVRVCREDGFGQLKSKLPPASRRGFALIDPPYELKQDYSAVVKGIVEGYKRFATGTYAIWYPVVHRQQIKRMLKELEATGIRKILQIELAVKPDSDQLGMTASGMIVINPPWKLASQMASILPWLHKTLVPEGTGHTLVEWVVPE

SEQ ID NO: 68973 - protein, 233 aa, Proteus mirabilis
MVLVRKLKKLLIILIALWLGIVVLFSFLPVPFSAVMLQRQISSWSKFDFSYVSHSTWVNENEISPQIYLAVIASEDQNFPKHWGFDFDAIEKVFQNSLQSSKTIRGASTISQQTVKNLFLWDGRSWIRKGLEAGMTPVVELIWSKKRILTVYLNIVEFGDGIFGVEQASQHYFRKPAKQLTAHEAALLAAVLPNPHILHVNKPSAYLLKRQQWILNQMRLMGGTSFLSKNALL

SEQ ID NO: 68974 - protein, 710 aa, Proteus mirabilis
EKSPVFQFSVRPDKVGIITINVVDEKVNTLKAAFVEQFQNVLKQAQQHSGVKGLIITSGKPDNFIAGADISMIADCKTKEEATALAKAGQDLFTQLENYPLPVVAAINGACLGGGLELALACHGRICSDNSKTRLGLPEVQLGLLPGSGGTQRLPRLIGVTTALDMILTGRQINAKRAFKLGLVDDVVPQAILLDVAAQWILTAKKAAKKQTIMERFWANTTLGRNILFDQAKKRTLAKTKGHYPAAERILHVIERGLEKDIQTGFKEEANAFGELAMTPVSSALRHLFFASTALKNETGSSAKPDNLHHIGILGGGVMGGGIAFVTATKGNLPVRIKDISDKGIAQALNYSWKALSTKVKKKRLSARERQRQMGLLSGTLDYSGFHQTDLIVEAVFEDLALKQKMVADIEALGEGKIIFASNTSSLPIHKIAEKAQYPEKIIGLHYFSPVEKMPLVEVIPHEKTDAKTIATTVVFAKKQGKVAIVVGDKPGFYVNRILAPYISEALTCLVEGETIENIDKALVQFGFPVGPIQLLDEVGIDIGTKITPILVNEFGERFASPPAVDAIIADDRKGRKNGRGFYLYNQHALPFSLGKNKKRADPMIYRLLQVKPKNQLSASEITERCLLLMLNEAVRCLDENIIQQPRDGDIGAVFGIGFPPFFGGPFRYIDSMGTTKIVDKLNQLTEKYGEKFQPCERLAAMAKLNERFY

SEQ ID NO: 68975 - protein, 208 aa, Proteus mirabilis
MKIVEVKHPLIQHKLGLMRDHDISTKRFRELASEVSSLLTYEATADLETETVTIEGWCGPVEIEQIKGKKITVVPILRAGLGMMDGVLENIPSARISVVGVYRDEETLKPVPYFQKLASHIEERMALVVDPMLATGGSMIATIDLLKNSGCTSIKVLVLVAAPEGIKALEEAHPDVELYTASIDKHLNEHGYIVPGLGDAGDKIFGTK

SEQ ID NO: 68976 - protein, 616 aa, Proteus mirabilis
MPKYRSATTTHGRNMAGARALWRATGMTDADFGKPIIAVVNSFTQFVPGHVHLRDLGKLVAEQIEAAGGVAKEFNTIAVDDGIAMGHGGMLYSLPSRELIADSVEYMVNAHCADAMVCISNCDKITPGMLMASLRLNIPVIFVSGGPMEAGKTKLSDQLIKLDLVDAMIQGANPNVSDADSEQIERSACPTCGSCSGMFTANSMNCLTEALGLSQPGNGSLLATHADRKTLFINAGKRIVELTKRYYEQDDLSALPRNIAKKEAFENAMILDIAMGGSTNTVLHLLAAAQEGDVDFKMEDIDRLSRQVPHLCKVAPSTQKYHMEDVHRAGGVMGILGELDRAGLLNRNVNNILGLSLPETLAQYDVMLSQDEQVKSMYQAGPAGIRTTKAFSQDCRWPTLDTDREQGCIRSKAHAYSQDGGLAVLSGNLAQDGCIVKTAGVDEDNLVFSGPAKVYESQDDAVEAILGGKVVAGDVVIIRYEGPKGGPGMQEMLYPTSYLKSMGLGKACALITDGRFSGGTSGLSIGHVSPEAANGGIIGLVEEGDIVDINIPNREINLRVDEKTLAARREAQLARGDKAWTPKDRQRQVSFALRAYASLATSADKGAVRDKSKLGG

SEQ ID NO: 68977 - protein, 326 aa, Proteus mirabilis
MQQLVDAFSRKFFYLRLSITDVCNFRCTYCLPNGYKPNGHKSFLSLDEIRRLTHSFAELGTEKIRLTGGEPTMRRDFTDIIATINENPAIKKIAVTTNGYRLARDVAQWRDAGLSAINVSVDSLDPRQFHAITGQDKFHQVMEGIDAAFTAGYDKVKVNVVLMRNVNDKNLPDFLHWIKDRPIQLRFIELMETGDGSDVFNRFHLSGEVIRQRLLNEGWLQIPRARSDGPAQVFTHPDYQGEIGLIMPYEKDFCVTCNRLRVSAIGNLHLCLFGENGIPLRDLLADDAQQQALQQRIQGGLLHKRETHFLHQGDSGITPNLSVIGG

SEQ ID NO: 68978 - protein, 347 aa, Proteus mirabilis
MTKNLNVGIIGYGYASKTFHAPLISTTEGLTLSAISSSDESKVIADFPNITVYANPQRLIDDPDIDLIVIPTPNNTHYTYASQALKNGKHVVVDKPFTLTLDEAEKLAQQAKEAKRLLSVFHNRRWDAGFLTVQKLLADKTLGEVSAYEAHFDRFRPAVRQRWREDAGLGGGLWYDLAPHLLDQAVCLFGQPYAITADIAQLRPNAKNADYFHTLLDYGHLKVILHASMLVASPTPIFAIHGTKGSYVKYGLDTQEDALKAGYLPTEMYNWGADPQEGELTLSTESGELVTTKLPTLSGNYPAYYQQIYRAIAFGEESPVTVSQAINVMRLIEAGSLSNQSKTTIKL

SEQ ID NO: 68979 - protein, 77 aa, Proteus mirabilis
MKLKTILPICAASFSLLLLAGCSSPQKIETVDGQTILTTDKPQEDESTGLIIYKDAETGAITQINRDQIRRMVELDD

SEQ ID NO: 68980 - protein, 611 aa, Proteus mirabilis
MNILYLTFVLPLLGFLLLAFSGGRWSENVSAWIGTGAVGLSALVTLWVGIDFFAHGQETEVLTLWTWMSAGNFTIPFTLVLDGLSLTMLGVITGVGFLIHMYASWYMRGEEGYSRFFAYTNLFIASMVVLVLADNMMLMYMGWEGVGLCSYLLIGFYYNNPANGAAAMKAFIVTRIGDVFLAIGMFILFDQLGTLSFREMAVLAPEQLTAGSSIINWAMLMVLGGAVGKSAQLPLQTWLADAMAGPTPVSALIHAATMVTAGVYLVARSHALFLMAPDILELVGIVGAVTLVLAGFAALVQTDIKRILAYSTMSQIGYMFLALGAQAWDGAIFHLMTHAFFKALLFLSAGSVIIACHHEQNIFKMGGLRKKIPFVYACFLIGGGALAALPLLTAGFFSKDEILWGAYANGHFNLMLAGLIGAFFTSLYTFRLIFIVFHGETKTEAHQVKGFTHTFPLAVLALLSTFIGALITQPLGDVFPESTVTHEGKYVLEILSGVVAIVGVAIAAWLYLKQRQLVSQVANTKTGRFFSTWWFHAWGFDALYEVLFVKPYKGAAWLIQNDPVNQFFNLFGCLFKGANKGLSFSENGLARWYAASLGLGAVLVIALLLLV

SEQ ID NO: 68981 - protein, 178 aa, Proteus mirabilis
MILQRLSLSTAIFAAVIAMANADPNMRFHGELIDEPCVIKPGDEIIVITLDKVTDSAFYNGVERTKSQQFEIHLSECDLSMNNKVSITFKGDENKAMAGKGFLALSPISRASGIAIGLEDSDGVLLPINQPSKNMALLSTNNTLRFSAFIQAEPTAIANQSIKRGPFSAIATFHLNYD

SEQ ID NO: 68982 - protein, 854 aa, Proteus mirabilis
MTDSQNFESHTPMMQQYLKLKAEHPEILLFYRMGDFYELFFDDAKKASRLLDISLTKRGQSAGQPIPMAGVPHHAVENYLAKLVQLGESVAICEQIGDPATSKGPVERKVIRIVTPGTVTDEALLEERQDNLLAAIWQDKNGAFGYATLDITSGRFRVTEMPDSESMAAELQRTHPAELLYPETFESMALIERQQGLRRRPIWEFECETAKQQLNLQFGTRDLTGFGVENARLALCAAGCLLQYVKDTQRTALPHIRSITMERPQDTIILDAATRRNLELTQNLAGGCDNTLASVLDLCVTPMGSRMLKRWIHTPLRQREQLIKRQDAISALQPLYFELQPFLRQVGDLERVLARLALRSARPRDLSRMRHAFQQYQDIHQVLDQADMPYIKELQQRISQFDELRELLENAIVETPPVLVRDGGVIAPGYNAELDEWRALADGASDYLEKLEVREREKWGIDTLKVGFNGVHGYYIQVSRGQSNLVPMHYVRRQTLKNAERYIIPELKEYEDKVLTSKGKALAIEKMLYEELFEKLLPHLTALQTSAEALAETDVLANLAERAESLNYTRPELTEKTGIQITGGRHPVVEQVLSEPFISNPLQLAPQRRLLIITGPNMGGKSTYMRQAALITLLAYIGSFVPAEKAVIGPIDRIFTRVGASDDLASGRSTFMVEMTETANILHNATENSLVLMDEIGRGTSTYDGLSLAWACAENLANRIKAMTLFATHYFELTTLPEKLEGTANIHLDAVEHGETIAFMHSVQEGAASKSYGLAVAALAGVPKEVIRRAKQKLKELETLSGHSGASHVETSQLMLLADIEPSEVELALNKIDPDSLTPKQALELLYHLKELNK

SEQ ID NO: 68983 - protein, 413 aa, Proteus mirabilis
MSKRRVVVTGLGMLSPVGNNAEASWKAVCAGQSGIGLIEEFDTSHHATKFAGLVKDFNHEDYNLSRKDARKMDLFIQYGIAAGVQAIADSGLEVTEANASRIGAAIGSGIGGLGLIEENHSSLINGGPRKISPFFVPSTIINMVAGHLSIIYGLRGPTISIATACTSGVHNIGHAARIIAYGDADVMLAGGAEKATTPLGVGGFGAVRALSTRNDDPQAASRPWDKDRDGFVLGDGAGVLVLEEYEHAKARGAKIYAEVVGFGMSSDAYHMTSPAENGAGGALAMENALKDAGITAADVGYINAHGTSTNAGDIAEAQAVETVFGKGTDVLVSSTKSMTGHLLGAAGAIESIFTILSLRDQIVPPTINLDNQDEHCHLDFVPHKARKVENMDYALCNSFGFGGTNGSILFKRV

SEQ ID NO: 68984 - protein, 875 aa, Proteus mirabilis
MAKLFKTIDLNVKHKSKQCRGRSATTLIYFVIIGMASIASESFAVSKDIEFNSDILDLKDRGNIDLSSFSRAGYITPGKYELIININNNELSGTYRVDYIVPKDDPKASEPCISPILVKQFALRPEWLKKLTWKDKGNCLNEASLPGMSLRTDLGSGVFFITLPQAYLEYSSPNWESPSFWDEGIAGLLFDYNVNANVRAPSDGKQKQQITANGTAGANLGVWRFRADWQASYEHTTGVLHSTENHWNWDQFYLYRAITKWGARLVMGETYLRSNLLDNFRFTGISLLTDEQMLPPNLRGYAPEITGVAKTNAKVTVSQQGRIIYETQIAPGPFRIQDLHDAVSGRLDVRIEEQDGTIQEYQIDTANIPYLTRPGRLQYKVSAGKPSRLDHKTEGPIFSMGEFSWGVNNGWSLFGGTLVSKDYNSASLGFGRDLMMLGAISFDTTHSWATFANENKHYHGSSYRISYSKRFESIDGQITFAGYRFSDRHFMSMDQYLDRRYRYGAQENNKELYTLTLSKQFPQWGLSTYINYNHQRYWDRPNNDYYNFSLSKYLAIGKFKNINISLSAYRNRFNGNHDNGVYFNINLPWRDRATISYNSVINKEGNSHNVSYFDRIDDNNNYRLSAGVSSRGKPSADGFFTHYGDVALVTASASHINGDYTSASLSFQGGATLTTKGGDFHRSNMPGATRLLIDTQGVSDVPVKSLSAISHTNIFGKAVIPDINHYYRGSASIDLKQLPDNVEALRSIHQLTLTEGAIGYRQFDVIAGHKAMATVQLAEGGAPPFAATVTTLNGRELGVFNDGGKVYLSGINSGDVLYVHWDGKNQCQLSIPKLADTQLITSLLLTCFQRQPTISTSFLETDKTQALPQHSFLSK

SEQ ID NO: 68985 - protein, 193 aa, Proteus mirabilis
MMMFSFKSIAADTFLIFGDSLSAGYRLPIESAWAQRLADKWKLTYPEINVVNASISGETAFQGQNRLPDLLKQHQPRWVLIELGANDGLQGYPVAQTKEALQNIITQVKEAGATPLFMQIMISPNYGKRYTQSFSAIYPQLAKDNALELIPFYMEQIADKPEWMQNDSIHPNEAAQPFIAQWMDKTLSPYLTR

SEQ ID NO: 68986 - protein, 206 aa, Proteus mirabilis
MARYLGPKLKLSRREGTDLFLKSGVRAIDTKCKLEQAPGQHGARKPRLSDYGVQLREKQKVRRIYGVLERQFRNYYKEATRLKGNTGENLLTLLEGRLDNVVYRMGFGATRAEARQMVSHKAIMVNGRVVNIASYQVSPNDVVSVREKSKKQSRIKAALELAEQREKPTWLEVDAAKMEGVFKRIPERTDLSADINEHLIVELYSK

SEQ ID NO: 68987 - protein, 337 aa, Proteus mirabilis
MTSKSGNQPHTDEAPATLLADTHDQLSQQSIDEQAALWFTRQHSQQMSSQQRQAFKQWVADKDNQQAYQAIAEIWHSCEALPRPTIVPIEKRKSSLWRPFIHTTAALCLVAVLYLPYSHLPALLMDNMTLATSNFPKEMTLADGSKVFLNRNTQVRVSYVQTQRRLWLDKGEAYFKVKPNPYRPFYVHADERLIKVVGTEFEVSRYQNNQISVAVHEGIVEVKATEKSPATYLYAGSQAISQSTDNQFVISSVNADSVASWRFGQLHFFEQPLGDVITKLKPYLDINVHISSADVAKIKVSGVANINDAKSFITALPLLLPVNVIFTDKNNVLIINK

SEQ ID NO: 68988 - protein, 463 aa, Proteus mirabilis
MLKIFNTLTRQKEEFKPIHKGKIGMYVCGITIYDLCHIGHGRTFVAFDAITRYLRYLGYDVNYVRNVTDVDDKIIKRAIENNETCEQLTTRMLAEMHKDFDALNILRPDSEPRATHHIAEIIALTETLIKRGHAYVAENGDVMFAIDTDPDYGLLSRQDLEQLQAGARVEVANVKRNPMDFVLWKMSKPGEPSWTSPWGEGRPGWHIECSAMNGKELGHHFDIHGGGSDLMFPHHENEIAQSTCAHDGPYVNYWMHSGMVMVDKEKMSKSLNNFFTIRDVLAYYDAETVRYFLLSGHYRSQLNYTEENLKQARTALERLYTSLRGTDANAQPAGGEAFEAQFIEAMNDDFNTPEAYSVLFDLAREVNRLKTVNMEAANGLAAVLRKLAKVLGLLEQQPEHFLQSGAQADDADEVEKIEALIQQRNDARKNKDWAAADAARDALTAMGIVLEDGPQGTTWRRNS

SEQ ID NO: 68989 - protein, 330 aa, Proteus mirabilis
MNLKKRCFRQIAPALIFSLLTIGAFSVNANIDVRDETLFEAHQRFKTQIINDSFDNTEAPWEAPAEIFNVVKYPTKLGDMYAYLTPPPANKKNKLPAVIWLNGGYGGIGGDDYFWTPQPVENDQTGATFRDPNMVLMIPSFRGENTNPGRYEMFYGELEDLDSAREYLASLPYVDPKRIYIVGHSTGGTRALLASEYSDKFRAIFSLGGIPDLKLRTEGRMMVELPFDKNNEEEFNVRSVYRYIKSIKTPTFYFEGHDYFWDEFNELRVFAMEQDIPLKIYNIKNGDHFNIIVPVSQLIKEKILQDTDTNKESNIRFTNEEIKWINKMVK

SEQ ID NO: 68990 - protein, 355 aa, Proteus mirabilis
MIDSANLLTAQQFKALNTLLVNFENSRNDGSQFVVYIVPTTGKETIESFAFRVFNQWKIGRKGKDNGLLLVVAINDRNVRFEVGYGYEGALTDVLAGRIIRNEMLPFFRSNNYYAGIEQGVKNAIQAVNHEPISFTNSQINTNTLKIFHTHFILIYLVILGGVYWFQLIFSTRKIKTKINQLLAPRGRKKKNPADQKGKLSIKQRKQLKNYLQYSYYFPTFSTLFFPMTLCFAAAMFYTQVFLDGIIDNFVLVIIVILSLLCNFIVLVVLFGIINLLFPIYRQQRKEWKAICVASPFGSPFNQLPYSKRIRRRSGYSGSGGYSSSSYSSSSSSSSSSSSGGGGGSSGGGGASGSW

SEQ ID NO: 68991 - protein, 401 aa, Proteus mirabilis
MGSFDTVIIGAGAAGLFCASLAGQAGLSVLVLDNGKKAGRKILMSGGGRCNFTNMYIEPSAYLSDNPHFCKSALARYTQWDFIELVQKHHIAYHEKTLGQLFCDDSAQQIVDLLLAECHEGKVSIRLRSEVTQIEKTAEGFTLLVGEKTITASSVVIASGGLSMPGLGATPFGYKIAQQFGLNVLPTRAGLVPFTLHKPQLEQLSPLSGVAIPAIVTAENGTQFKENILFTHRGLSGPAILQISSYWHPGENVSINLLPDTDLEGYLQEKRQAQPNQLLKNTLSRLLPKRFIEIMIENNQLPDTSLAQLSNERITQITTLLQAWLVLPNGTEGYRTAEVTLGGVDTRNLSSKTMEATKITGLYFIGEVVDVTGWLGGYNFQWAWSSAYACAQALISRHMTK

SEQ ID NO: 68992 - protein, 283 aa, Proteus mirabilis
MSGITAALVKELRERTGAGMMECKKALVEANGDIELAIDNMRKSGQAKAAKKAGRVAAEGIILAEVAADGKFGALVELNCETDFVAKDAGFIAFGKDVMAAVLADKTDDIEALKAKFEDARTALVAKIGENINIRRVAILEGEELGTYLHGARIGVLVAAKGANEELIKHIAMHVAARKPEYVRPEDVPADVVEHEHQIQMDIAMQSGKPREIAEKMVTGRMNKFTGEISLTGQHFVMDPSKTVGDLLKENNAEIINFVRFEVGEGIEKVEADFAAEVAAMSK

SEQ ID NO: 68993 - protein, 131 aa, Proteus mirabilis
MRHYEIVFMVHPDQSEQVPGMIERYKTAITNANGQIHRLEDWGRRQLAYPINKLHKAHYVLMNVEAPQEVIDELETTFRFNDAVLRNMIMRTKHAVTEASPMVKAKDERRRDVAEDLDEEEVDDVAEDSEE

SEQ ID NO: 68994 - protein, 659 aa, Proteus mirabilis
MNIKYRADIDGLRAIAVILVIFFHLDNRLIPSGFIGVDIFFVISGFLISLIIKTSLLQGHFSFGDFYIRRLWRLQPLYLFVLVAVLVISGIFYLPSDYLDITNSEKYASAFLSNKYFARATTSYAAQDALFLPLLHTWSLAIEWQWYLFLPFVLYFLHKINHKEKINNFYFIVFITIISFSLVLVYQKDQPKNYYYFSTRIFEFMLGACVAYLPVKVIINQRVNSVISLIALGVIFWVAVQKDVIAGYPNFNTLYVCLSVALIIYTGQHGSIIQKVLSLKPIVIIGLLSYSLYLWHWPLFAIARYIGVFNTEIQKGLFLALTFLLSIFSYLLIEKPFRRQRLNFKYSITLLFVIPILLALGLNALNEKYHGFGVRLGQNYVNLENKLNQFDYPNRGNCMNFQASDPDKMCHIGKVGSQKKAFLLGDSHANHFWGFMDILGKDAELDVYAQATSSCITIPNIYLYDWSNHKNTVYQRCYDQTAKYYQIIKHNRFDYVIFGQVWNNYASNHVINKIGDKRTVEASRQRVEKSMREALDIIVATGAKPVFIKTVYSMPSGFMTCFYENAKLRKDFADNNCNPKNYKGEGNTWMNQLFAKLKQDYPSLIIIDPKDVQCDKDTCLTDIEGVPVYRDVGHITDYASTIFGMMYLNKMGNPFKENQ

SEQ ID NO: 68995 - protein, 252 aa, Proteus mirabilis
MDAQLYKEFKIIEKAFWSEICENNIRIGDHTHCFMTPMDAPIFNFIYLRQGASENTFQQASTLFSSQKKGHMLVLPESLLPEFEEIIKKAGYTGDGMTTAMYLSLSDATYPPYKNNPCDIILTNHDLKQWAQPLKTAFPVGDDTITNEYIRYHQKALDNGATILHYALLVAGQPVSSLTLTLHDKLARFDDIGTDIAYQGNGYATHLITHVLEFCREQGVERCFLDASADGLALYRKFGFKPLFNYLSFINE

SEQ ID NO: 68996 - protein, 205 aa, Proteus mirabilis
MMLADLRLYQLVSPSLPVGAFTYSQGLEWAIEKGWVCSAETLSDWLSAQMTGTLATLELPILRQLQTSLAKGDSDTVKYWCDFMVASRETKELRQEERQRGIAFARLLPQLGIELDDTLQQRVKQTQLMAFALAAVHWHIDSEKLCCAYVWGWLENTVMSGVKLVPLGQSAGQKMLFALAEQIPAIVELSAHWPQENIGSLRQLK

SEQ ID NO: 68997 - protein, 707 aa, Proteus mirabilis
TFQTAPPSPSLLTENTLDSTLLKHSIEQFQSWLADAFHHDADVALLLQARSHFIDQLLTQLWRYTELADHPDLCIIAVGGYGRQELHPLSDIDLLFLSQQPLPPQIAEKVSQLITLLWDIRLEIGVSVRTMEECLLEGLSDLTIATNLLEARLVCGNNALYQQLIKHIFSQGFWPSPDFFAAKIEEQEQRHQRFHSTSYNLEPDIKSSPGGLRDIHTLIWVAHRHFGATSISEMVNFGFLTPAEGQELLECQYTLWKIRFALHLVLNRYDNRLLFDRQLSVAQLLNYQGEGNQPVEKMMKDYYRVTRRVSELNDMLLQLFDEAILALQPNVKPRPLDKEFQLRGTLIDVIDDECFLNDPIAIMRLFLRMAEHAEITGIYSTTLRHLRYARRHLVQPLCEYPLARQVFMQILRHPRAVSGAFVPMHKHSVLSAYFPQWNNIVGQMQFDLFHAYTVDEHTIRVLQKLESFADDANRNRHPLCVDIYPKLPQIELLRLAALFHDIAKGRHGDHSLLGAQDVISFAQQHGLNQREIALVEWLVSHHLLMSVTAQRRDIQDPDVIFQFASEVKNESRLRYLLCLTVADICATNSSLWNSWKQSLLRELFLATANQLRQGMHSIPDLRERIRDHRQQALTILQQQQVDEEKLQAIWARCHADYFLRHTPEQIAWHAQALIEHNSAEPMVLISQQTEMVVQRYLFGVLTDLLYL

SEQ ID NO: 68998 - protein, 334 aa, Proteus mirabilis
MTTTLFQHMWLSREKQFSAFTNGILLDFWNQRQEGEFTGVDGVSIRYAHWRSSSHKKALVICSGRSESYVKYPEVAFDFYHLGYDIFLLDHRGQGLSGRLLDDPQKGHVEKFSDYVDDLSTFIDTIVLPYHYQHYFALAHSMGGAILASYLLRKPDIFQAAALCAPMFGINLPIPRWVANFLVNRAEQSVSERNNYAVSTGKWFPLPFILNVLTHSHERYRRYLRYYADFPQLRLGGPTYHWMKESLETGDWLIEHAKEINTPLLVLEAELDKVVDNRGVRAFCDGYSQSRTREEKQKLPLVIEGAHHEILFEIDKLRSQALIEICEFYDKHLF

SEQ ID NO: 68999 - protein, 114 aa, Proteus mirabilis
MTMENDNKGYLLTLICDNSDDKAEKIFLNPKILYIPDVATKEILLLTNELKSKIDLSAQALTLTLTNKNNGVSVDKECEIKDLLDPDMASLMVKDLINIVRGYDMDEEANVCGW

SEQ ID NO: 69000 - protein, 243 aa, Proteus mirabilis
MRIPRIYHPEPLSAGTQTSLAEEAANHVGRVLRMSKGQKLALFDGSNQVFDADIIESSKKSVIVQVNEGQMDDRESPLDLHLGQVLSRGEKMEFTIQKSVELGVNTITPLISERCGVKLDPSRLEKKHQQWQKIIISACEQCGRNKIPQLMPVMSLEAWCAQTDDSLKLNLHPRASQSINTLPLPVKKVRLLIGPEGGLSPEEIAMTAKYHFTDILLGPRVLRTETTALTAITALQVRFGDLG

SEQ ID NO: 69001 - protein, 415 aa, Proteus mirabilis
MDMKITSRLLIMMFVQYFMQGAWNMTMGLVLSSYGMASIIGNAYALLGVATIISPLFIGMVADRFFASQKVMGILHLINAVVILCVPQFIEAQNSGMTLFLIFIIGLLFYPTTALSNSISFSHINGVKYFPIIRVFGTFGFMAIGFILGEMGFSGSTMTWYIASAVGVLLGFYCFTLPNTPPKAKGQPFSLRDILCLDALSLFKDRYFAILMFSIFILMIPKTAYSAYIPVFIKALGFDNAASIMQIGIACEVLFMFVLSFFLMKFGFKITLLLGAVSWIIRSMFFSYAAVNTELYFIVIGLMLQGLCWDFFFTAGDIYVDRKAKPEIRAQAQGLRFIVSNGFGLLFASTICGQIFNTTVTETGDAALPQWSTFWVYPAIVAAVVTLFFIFFFKDDVSKKRNSENKETSRGITAP

SEQ ID NO: 69002 - protein, 317 aa, Proteus mirabilis
MTNKLTSLRKLTTVVADTGDIAAMKLYQPQDATTNPSLILNAAQIPEYRKLIDEAIEWARSQSDSREQQIVDACDKLAVNIGLEILKLIPGRISTEVDARLSYDTEACIVKARRLIKLYNEAGISNDRILIKLASTWQGIRAAEQLEKEGINCNLTLLFSFAQARACAEAGVYLISPFVGRIMDWYKANTDKKEFAPAEDPGVISVTEIYNYYKEHGYNTVVMGASFRNIGEILELAGCDRLTISPALLKELSEAQGEVEHKLSFNGEVKSRPAPITEAEFYWQHNADPMAVDKLSDGIRKFAVDQEKLEKMIADLL

SEQ ID NO: 69003 - protein, 287 aa, Proteus mirabilis
LIAVAVIIVTVYLLIKKYETRMVLIGAGLLLCILSLTPLDAFTAFSDRMVSSSLIQAICSSMGFAYVMKYTKCDMHLVHVLSKVLTRLGFFLIPATVIVTYFINIAIPSAAGCAAAVGATLIPLLIAARIHPAIAGGAVLCGTIGSMLSPGMSHNAFVANMANMEVVDLIARHSPYSLMAGAIAAVSLAVVALVKKEFKVSSVTTDVANSSSQATPEAVRPNYLYATAPYIPLILLILHLLEPFSTVKLYMPAAMLIGAIYALIITLTNPDQITKEFFKGMGNAYGD

SEQ ID NO: 69004 - protein, 184 aa, Proteus mirabilis
MVTMSEQKTFKEPVEPIVMGKLGSPYGIRGWLRVFSSTEHAENIFEYQPWFIQRHGQWESIEIETWKHHNQDIIVKLKGIDDRDAANILTNFEIVVSATQLPDLDGEYYWKDLMGCQVETDKGYDLGVVNDMMETGSNDVMVIKANLKDAFGVRERLVPFLDGQVIKKVDLSAKKIIVDWDPGF

SEQ ID NO: 69005 - protein, 259 aa, Proteus mirabilis
MLKIADTTFTSRLFTGTGKFATPTLMAEAIKASGSQLVTMAMKRVDLKNGNDDLIAPLKSLGIKLLPNTSGAKTAQEAVFAARLAKEAFDTHWIKLEIHPDTKYLLPDPIETLKAAELLVKEGFVVLPYCSADPVLCRRLEEVGCAAVMPLGSPIGSNQGLQTRDFLRIIIEQTSIPVVVDAGIGAPSHALEALELGADAVLVNTAIAVAKNPVLMAQAFKAAIDAGELARQSGLAVPTAITHMQAQASSPLTQYLEAF

SEQ ID NO: 69006 - protein, 867 aa, Proteus mirabilis
MLKSKTICFNLYIFLGTCFSGVVYADSFFNPNLISNIDNEVADLSRFDKGEGQPEGMYSVEIYVNDEYVETKNLIFYESDASSDDTGLLPCIDNKTLTNFGITLTENSKKKSEEVESKDSACENILDKIENSSVKFDFEGQKLFLSIPQIMFKNNVRGFIPPEKWDNGINAFLLNYNFTGRNSKNFKDNVDNNNYFLNLNPGINLGSWRFRNESSWNYASGESKQNKWRNIRTYVQKPIIPLRAELTLGDSFSNGTIFDSLGFRGIKLESDDNMLPDSMRGFAPTIKGIANSNAIVTVKQNGFVIYQISVPPGAFEIKDLYATSSSGNLDVTIKENNGKITQFVVPYSNVPILQREGRLKYELIGGEFRSGADYQDKPNFGQLSLVYGLPYNMTLYGGSQFSNNYQAYAIGLGGNLGTFGAISADVIQANSILPNDEHKKGQSFRLLYAKSINSTGTNFQIMGYRYSTQGYYTLNEVSYKKMAGREIVTDNGIIRDEDNLSNYYNLNYSKKGRFQLNINQQITNNSSLYILGSYQNYWRTTETEQLWQLGYNANIDRINYSLSLSKLKSPGMRGDNKNVAFNISIPLNDVFNQQTVSDLHSSRNSMYAVYSMNRSDDNVWVNQVGLTGTLLEDNNLNYNIQQGYTHNGSGYSGMVYANYKGKYANIGSGYNYSNDWHEFNYSLNGGVVAHAGGITLTQPLGDTNILIKANDANNIKVENANGILTDNNGYAVLPFASTYKNNRVSLDVNSLEENIELENTIINVVPTKGALVEANFKTNIGYRAMVTLSKKDGAIIPFGAMVVDEERSVSGIVGDNGNVFISGLAPVGRLKAKWGKMADQQCIFDYQINEKSSKEKGIYFISSTCQY

SEQ ID NO: 69007 - protein, 233 aa, Proteus mirabilis
MIKKYIVYIISFVFTFSCYASIQINKDRFFYKEQDKEILFDIRNKSEQKTYIIQSWVSHYNKEDNSEAPFIISPSLIRLAPNENFTLKIIKTDDIKEINQESVYRVNIKLVPVIDDEMADKNLLLISLNSIYNLFYTPSDIINKSDNKDINFFINDENFIKINNPTPYFITIAEAKVDNIDILNERITLSPFKNYSIKNKKITKNIKDKKVHWKRVDEYEQTIIATPKELIYE

SEQ ID NO: 69008 - protein, 180 aa, Proteus mirabilis
MKKTDPLSLFKKQIDNLAETLAPIANKKIAAPCFDTALFHHRSDSLGGYMQQIRDNFTQLITCVEAQRSQQVKFLATQILQQIEALTRELSTQTLRKQENQLSQRKKSVDLYQKLAQHQDYERRLQSMIQDRELALTQAQGFVRQQELQKEIAALENRLARCKSALVSIEKSIERQEDKY

SEQ ID NO: 69009 - protein, 201 aa, Proteus mirabilis
MQTSPLLESLMEALRCLPGVGPKSAQRMAFHLLQRDRSGGMRLAQALTRAMSEIGHCCDCRTFTEEERCTICANARRQQNGQICVVESPADIHAIEQTGQFAGRYFVLMGHLSPLDGIGPMDIGLDRLEERLSQESISEVILATNPTVEGEATANYIAEICAQYDIAASRIAHGVPVGGELEMVDGTTLSHSIAGRQKIHY

SEQ ID NO: 69010 - protein, 2246 aa, Proteus mirabilis
  MISC_FEATURE (1227)..(1227): X=any amino acid
  MISC_FEATURE (1231)..(1231): X=any amino acid
  MISC_FEATURE (1251)..(1251): X=any amino acid
  MISC_FEATURE (1269)..(1269): X=any amino acid
  MISC_FEATURE (1273)..(1273): X=any amino acid
  MISC_FEATURE (1276)..(1276): X=any amino acid
IKRQEVYMGEIPLMTDNGTFVINGTERVIVSQLHRSPGVFFDSDKGKTHSSGKVLYNARIIPYRGSWLDFEFDPKDNLFVRIDRRRKLPATIILRAMNYSTEDILNLFFEKTTFEISNNKLMMTLVPERLRGETASFDIEANGKVYVEKGRRITARHIRQLEKEQIERIEVPVEYIAGKVVARDYIDEATGELICAANMEISLDVLARLSQAGHKTIETLFTNDLDHGAYISETIRVDPTNDRLSALVEIYRMMRPGEPPTREAAENLFENLFFSEDRYDLSAVGRMKFNRSLGREEVEGSGILSQEDIIEVMKKLIDIRNGKGEVDDIDHLGNRRIRSVGEMAENQFRVGLVRVERAVKERLSLGDLDALMPQDMINAKPISAAVKEFFGSSQLSQFMDQNNPLSEITHKRRISALGPGGLTRERAGFEVRDVHPTHYGRVCPIETPEGPNIGLINSLSVYAQTNEYGFLETPYRVVENNAVTDEIHYLSAIEEGNFIIAQANSVLDDDGHFVEELVTCRHKGESSLFSRDQVQYMDVSTQQVVSVGASLIPFLEHDDANRALMGANMQRQAVPTLRGDKPLVGTGMERAVAVDSGVTAVAKRGGTVQYVDASRIVIKVNEDETYAGEAGIDIYSLTKYTRSNQNTCINQTPCVSLGEPVERGDVLADGPSTDLGELALGQNMRVAFMPWNGYNYEDSILVSERVVQEDRFTTIHIQELACVSRDTKLGPEEITADIPNVGEAALSKLDESGIVYIGAEVKGGDILVGKVTPKGETQLTPEEKLLRAIFGEKASDVKDSSLRVPNGVSGTVIDVQVFTRDGVEKDKRALEIEESQLREVKKDLTEELRIFEAGLFARIRGVLIAGGIEADKLDKLPRERWLELGLADEEKQNQLEQLAEQYDELKAEFAKKLEAKRRKITQGDDLAPGVLKIVKVYLAVKRQIQPGDKMAGRHGNKGVISKINPIEDMPYDENGNPVDLVLNPLGVPSRMNIGQILETHLGMAAKGIGDKINAMLKQQQEVAKLREFIQKAYDLGMAPRQKVDLDTFSDEEVLRLAENLKKGMPTATPVFDGAEEMEIKEMLKLADLPTSGQITLFDGRTGEQFERPVTVGYMYMLKLNHLVDDKMHARSTGSYSLVTQQPLGGKAQFGGQRFGEMEVWALEAYGAAYTLQEMLTVKSDDVNGRTKMYKNIVDGNHQMEPGMPESFNVLLKEIRSLGINIELEDEXRIPXKQTAKYGSLLNSDYTGLKGXMTGVICLAVLTPTGAISXKTYXSFXKRKPRPKEFDAIKIALASPDMIRSWSFGEVKKPETINYRTFKPERDGLFCARIFGPVKDYECLCGKYKRLKHRGVICEKCGVEVTQTKVRRERMGHIELASPVAHIWFLKSLPSRIGLLLDMPLRDIERVLYFESYVVVEGGMTSLERGQILTEEQYLDALEEFGDEFDAKMGAEAVQNLLQSMDLEQECETLREELNETNSETKRKKLTKRIKLLEAFMQSGNKPEWMILTVLPVLPPDLRPLVPLDGGRFATSDLNDLYRRVINRNNRLKRLLDLAAPDIIVRNEKRMLQESVDALLDNGRRGRAITGSNKRPLKSLADMIKGKQGRFRQNLLGKRVDYSGRSVITVGPYLRLHQCGLPKKMALELFKPFIYGKLETRGLATTIKAAKKMVEREEAVVWDILDEVIREHPVMLNRAPTLHRLGIQAFEPILIEGKAIQLHPLVCAAYNADFDGDQMAVHVPLTLEAQLEARALMMSTNNILSPASGDPIIVPSQDVVLGLYYMTRDCINAKGEGMVLSGPKEAERVYRAGLASLHARVKVRITEEIKDGEGNITTETSLKDTTVGRAILWMIVPKGLPYALVNQPLGKKAISKMLNTCYRVMGLKPTVIFADQIMYTGFAYAARSGASVGIDDMVIPAKKAEIIAEAEAEVAEIQEQFQSGLVTAGERYNKVIDIWAAANERVAKAMMENLSTETVINRDGEEEQQVSFNSIFMMADSGARGSAAQIRQLAGMRGLMAKPDGSIIETPITANFREGLNVLQYFISTHGARKGLADTALKTANSGYLTRRLVDVAQDLVVTESDCGTTEGVMMTPVIEGGDVKEPLRERVLGRVTAEDILKPGTADILVPRNTLLNEKLCDLLEENSVDSVKVRSVVTCDTDFGVCAKCYGRDLARGHIINKGEAIGVIAAQSIGEPGTQLTMRTFHIGGAASRAAAESSIQVRNKGTLKLINAKFITNTAGKLVITSR

SEQ ID NO: 69011 - protein, 262 aa, Proteus mirabilis
MTYALIIIGQLAENIMKYRLCGVALLVALLSGCASTPNNGDSRSDPLEGFNRQMFNFNYYVLDPYVLRPVAVVWRDYVPPPARNGLSNFLGNLEEPASMLNSILRGDFEKGAKHFGRFWINTVFGIGGLIDVAGMSRESMEKEVPVRFGSTLGHYGVGYGPYVVLPGYGSFTVREEGGDWADATYPVLSYLTFWMSAGKWALEGIETRAQLLDSDAILQNSSDPYLMMREAYFQKNDFDANGGKTGENPNAKAIEDDLDSID

SEQ ID NO: 69012 - protein, 457 aa, Proteus mirabilis
MSNSAKSVVILAAGKGTRMYSQLPKVLHKLAGKSMVQHVIDTAKSLGAQQTHLVYGHGGELMKETLGSQPVNWVLQAEQLGTGHAMQQAAPFFADDEDILMLYGDVPLITKETLERLIAVKPAGGIGLLTVILDNPMGYGRIVRENGDVVGIVEQKDASEEQLKIKEINTGILVANGGDLKRWLAKLDNNNAQKEYYITDIIALAHQEGRKIETAHPTRHSEMEGVNNRLQLASLERIYQTEQAERLLLEGVMLLDPARFDLRGTLTHGKDVVIDTNVIIEGEVTLGNNVEIGTGCVLKNCVIGDGSIISPYTVIEDANLAQECTVGPFARLRPGAQLADKAHVGNFVEMKKASLGVGSKAGHLTYLGDTEVGANVNIGAGTITCNYDGANKFKTIIGDDVFIGSDTQLVAPVCVANGATIGAGTTLTKDVNENELVISRVKQTHISGWKRPVKKKQ

SEQ ID NO: 69013 - protein, 215 aa, Proteus mirabilis
MLQVYLVRHGETEWNVARRIQGQSDSPLTAMGVRQAQQVAERVKSAGITHIISSDLGRTCQTAEIIAQACRCDVITDPRLRELDMGVLEQREIATLNTQEEAWRKSLIDGTPDGRIPQGESMVELANRMQAALNSCLALPEHSRPLLVSHGIALGCLLSTVLGLPAYAERRLRLRNCSISRVDYQNSPWLANGWVIETAGDVSHLTDIALDEVQR

SEQ ID NO: 69014 - protein, 151 aa, Proteus mirabilis
MLLKISLLNKDTNIISTLHSVRSNISIGIETFIIFLVILLILNKENKMIAVIFEVQIATSKQGQYLSLASQLRPLLNNIDGFISIERFQSLATEGKLLSLSWWKNEDAILQWKNNILHTKAQQEGKKSIFDLYKISIVKLERCYEFTSTHT

SEQ ID NO: 69015 - protein, 299 aa, Proteus mirabilis
MAIDLSNLVTESRNHHSEHIDTLSTLEMLKVINNEDKKVPFAVEATLPHIARLVDKVVTAFSQGGRLIYCGAGTSGRLGILDASECPPTYGTPHDMVIGLIAGGHKAILQAVENAEDNVQLGAEDLRQLNFNAKDVLVGIAASGRTPYVIGALEYARSLGAVTGAISCNPDSPIAQRADIAITPIVGPEVVTGSSRMKAGTAQKLVLNMITTGAMIKMGKVFGNLMVDVEATNAKLIERQIRIVMQATECERATAEQALAQCQRHCKTAILMILAGVNAQQATQLLAQNKGFIRQALAK

SEQ ID NO: 69016 - protein, 153 aa, Proteus mirabilis
MKYGKLYAVIAMVGIIVGSYWVINWQANRINSLTDINKKLAVALEEQKSINTDYQARIMRLNQLDIQYTQELANAQNEISHLRDISERHPERVYIKAECPKVKTTPSTSLAYATTARPTDTAIRNYWLLRERIAESEQMIKGLQDYIKQECME

SEQ ID NO: 69017 - protein, 513 aa, Proteus mirabilis
MTEQSVIQRCQQIVENPTLSPEQKRHFLALEAENMLPYPTLSNEASLALNERVICDMYEGHAPYKPRYVLPDYAKFLAQGSRYLELEPAQDFDDALNMLAILYHHVPSVTSMPVYLGRIDKILLPYVGNLTQEQLYPKLKRFWRYLDRTLPDAFMHANIGPEDSIITRLILKVDVELQQVAPNLTFIYDAALTPSDLLHQAITNICHSSKPHIANGTLQDAVFGKDEYGIVSCYNSLPQSGGGSTLVRINLKEVAKRSQNSADFLENVLPFYMQKQIEIINARCEFLYEKSNFFQQSFLVEEGLISPDRFAPMFGIYGMAEAVSLLLEKEGHTANYGHSEAANKLSYIISEKLAQFVAQTPVKYGWKQRAMLHAQSGISSDIGTTPATRIPYGTEPDPVTHLMAVAPHHQFYTSGISDILTVDETIKQNPDALMQLCLGAFSCGLREFTANVGGNDLVRVTGYMVRLSDLKKYKEEGSRLNTTWLGDEATTNCHIAERKPRVISHEQQMRFDK

SEQ ID NO: 69018 - protein, 456 aa, Proteus mirabilis
MRALYDSKSKTIDDRGIKALLSNEAKYSTWLMFEAMLAQAQAEHGFIPQSAADEIKEKAVIENIDFEEMNRIYQKIGHGFVPFLKVLVKACSQESGKYVHYGITTQNIQQSSQLYMMKTVHHKFMLLLGEIIENLANLAEKTKHMVMPGRTHGRHAIPITYGYKVSVWISDFIDCYQRMRECEKRVFTIMMGGAVGAFNSMPEVGMKVQKRVAELVGMEAMEVPSRNLSTHKLEYMANLALMANICHKIGEEVYSTTLEEIAEVSEGFTKGTVGSSTMPHKINPKLAKGIIANSQKLYSLPSVGMYSAVRPYEGDSSSYMLFDGLLEEALELTTEILLRTEELSRTIVPHEERMLHNVMRNKGLDNTEYVMMKMAEKLGKDKAHSLLYEEAIKTAADGEDFYTNLIKNPVISAAFSPEEIKAMLDPRAYIGLSVEIAEKEAKRGHVASQEIKQNYQ

SEQ ID NO: 69019 - protein, 115 aa, Proteus mirabilis
MLDIENCVDSSATDDEFEEIIMGLIINSGQARSIAYAALKKAKQGDFAQAKKMMEQSRAALNEAHKIQTRLIGDDQGLGKTKVSLVLVHAQDHLMTSMLARELVTELIELHEKIK

SEQ ID NO: 69020 - protein, 267 aa, Proteus mirabilis
MSVPVLGLGTFRLKDNAVINSVKTALELGYRAIDTAQIYENEAAIGQAISEGGISRDALYITTKIWVENLSKDKLIPSLKQSLSDLQTDYVDLTLVHWPSPNDAVSVKEFMQELLAAKQMGLTREIGISNFTIPLMEQAIAAVGVENIATNQIELSPYLQNHKVVNWAKQHGIHITSYMTLAYGKALKDETIQTIAKKHNATPAQIILAWAMNEGYSVIPSSTKRENLASNLLSVNIKLDSEDKQAIAKLDCHDRLVSPEGLAPHWD

SEQ ID NO: 69021 - protein, 245 aa, Proteus mirabilis
MTFIKSISTFISLITLFCSFSLHANFEEQDKKLFEDTRKEALNHNALAQYQLAEMYLLGDGVEKNLLNAQLWANEAIKSGYADAYALLADIYLFNADPYFKSYYVEAKELATTAVNKGSMRGKISLATALIAPLSGEVDYQQAMVLLEEATQAHQQELVYAPIWLGILYSGIGNIPVDMEKTNKLFAQANEMTFEGFAQAMASFMFSGQYHIIEPNKQKADAFMKQACEEARKVGNEFYCQPELN

SEQ ID NO: 69022 - protein, 430 aa, Proteus mirabilis
MKLYNLKDNQEQVSFAQAVKQGLGKQQGLFFPKDLPSFSQAEIDALLKLDFATRSSRILSAFIGDEIPADVLAKRVNTAFAFPAPVTQVEEDISCLELFHGPTLAFKDFGGRFMAQMLSEVAGDQPVTILTATSGDTGAAVAHAFYKLDNVQVVILYPQGKISPLQEKLFCTLGENIHTVAIQDDFDACQALVKQAFDDEYLKNTMHLNSANSINISRLLAQICYYFEAVAQIPAEKRQQLVISVPSGNFGDLTAGLLAKSMGLPVKRFIAATNVNDTVPRYLDSGKWEPHRTIATLSNAMDVSQPNNWPRIEELYRRKGWLLSDLSHGAVSDETTEETVRELAQKGYISEPHAAVAYRLLRDELQEGEYGVFLGTAHPAKFKENVERILGDTLPLPKELAERADKKLLSHLLPADFSQLRAFLLERAPK

SEQ ID NO: 69023 - protein, 271 aa, Proteus mirabilis
MIAMVYGAKGEICINGQTITVTTNLTLIIPKYSQVSCDVTNFFPTKPIELHTLVLSETELQSVFSLLKPLIKSGAPITRHLPDYHLSTPEVVKTNFTLLQQCLPLEHGTPSQETLFMQQSLFFILLAVYHEGVDILNIFRFNYDEPKNQAITHLITQDPQRKWHLEDVAKTLYTTPSTLRRHLSKEGVSFCQLLLDVRMGIALNYLTFSNYSVFQISHRCGFGSNAYFCDAFKRKYGMTPSQFRTQSRQANDPNAIATMASQNDESIKKVF

SEQ ID NO: 69024 - protein, 295 aa, Proteus mirabilis
MTEQATTRLKPGKILDTLGAMKNSLTRVSQRIADYILFHPTEVTQLSIAQLSQATKAGEATVVRFCRTLGYKGFQDFKMDLAIEMATSDNDESPILDAEVSHQDDIHTIGLKLQATINNVLSETLNLLDMQQVQGAVNALLSANYVFICGVGSSGITAEDLKNKLMRIGYRVDAVTNNHFMYMQASLLKSGDVAIGISHSGNSLETVHALKLAKEAGASTIALTHNLGSQIMEYADHHLINGNRQGKLQGDSIGTKTAQLFVLDLLYTLLVQAKPETVKEQKLRTLNALKQTHSA

SEQ ID NO: 69025 - protein, 450 aa, Proteus mirabilis
MSKHYDYIAIGGGSGGIASINRAAMYGQKCALIEAKALGGTCVNVGCVPKKVMWHAAQIAEAIHQYGPDYGFDTTVNRFDWDTLISSRTAYIDRIHQSYERVLGNNKVDVIQGFARFVDAHTIEVNGEKITADNILIATGGRPIQPNIPGAEYGINSDGFFELSALPKRVAVVGAGYIAVELAGVLNALGSETHLFVRKHAPLRSFDPLIVDTLVEVMEAEGPKLHTHAVPKAVVKNADGSLTLQLENGLEQTVDTLIWAIGREPATDNINLAATGVKLNEKGYIQVDKFQNTNVPGIYAVGDNTGAVELTPVAVAAGRRLSERLFNNKPNEHLDYTNIPTVVFSHPAIGTVGLTEPQAIEQYGAEQVKVYKSSFTAMYSAVTRHRQPCRMKLVCVGAEEKIVGIHGIGFGMDEMLQGFAVALKMGATKKDFDDTVAIHPTAAEEFVTMR

SEQ ID NO: 69026 - protein, 545 aa, Proteus mirabilis
MLTLLHLLSSVALLVWGTHIVRTGIMRVFGSDLRRILGKSINKKSNAFLAGVGVTALVQSSNATALLVISFVTQGLISITPALVIMLGADVGTALMARVLTFDLSWLSPLLILLGVMTFLSRKKERIGQLGRVGIGLGLIILALQLIVTSAEPITHASAVQAIFTSLSGDTILALLVGAIFAMVSYSSLAAVLLTATLSATGFMPLYISLCIVIGSNIGSGLLALISSRGQSISSRQVVIGSLFFKLIGALLVLPWITIIATKIQQYDFSPAEVIIYFHVIYNLVRCVLMLPFVGPMAKLCQKLVPELPVTGTEVAPRYLDPSAVDTPSLAIANAVRETLRLGDVVEQMLQRFQALMEGDRLQKREISQLEEEVELLHSSIKLYMAQIQQHDLGTEDSRRWAEIIDTAMNLQQSSAIIARMSGEVVNKSLDHHLNLSEEGRRELQTLLERLQSNLNLAMSVFVSGNMEHARKLRRAKHRFRLLNQRYSFAHVERLHLHNMQSIETSSLHTSLLGDMKRLNSLFCAVAYHALERSGSSSEQVNLQQ

SEQ ID NO: 69027 - protein, 140 aa, Proteus mirabilis
MSRRDYGTTELKRRLARRINEVDKAKHSTTDERCLEQVIERLLEGQYLDDNRTVYAFFRRYLSKSYGPLRIRQELQQKGFPSEIIERVLEETETDWYALCQDLKEKKFGTGKPKDFKERAKQIRYLQYRGFTSDYINALF

SEQ ID NO: 69028 - protein, 608 aa, Proteus mirabilis
MCGIVGAVAQRDIAEILIEGLRRLEYRGYDSAGLAVVDNDCHMTRLREVGKVQMLAEEAEKTQVIGGTGIAHTRWATHGEPCQDNAHPHVSGTIAVVHNGIIENYQELKAELINRGYQFASQTDTEVIAHLVNWEQRQGGTLREVVQRVIPQLRGAYGTVIMDSRTPELLVAARSGSPLVVGLGVGENFLASDQLALLPVTRRFIYLEEGDIVEITRRHVHIYDVNGEEVNRDIIESNVQYDAGDKGIYRHYMQKEIYEQPLAIKNTLEGRLKAESIDLSELGAKAPEILSQVEHIQIVACGTSYNAGMVSRYWFESLAGIPCDVEIASEYRYRKPATRRNSLLITLSQSGETADTLAALRLSKELGYLSSLAICNVAGSSLVRESEFVLMTKAGAEIGVASTKAFTTQLAVLLMLVAYMGRIKGVEALEQQVAMALHALPSRIESMLSKDKVIEALAEDFSEKSHALFLGRGDQYPIAVEGALKLKEISYIHAEAYAAGELKHGPLALIDADMPVIIVAPNNELLEKLKSNIEEVRARGGLLYVFADQDAGFEESETMKLISLPHVEELIAPIFYTVPLQLLSYHVALIKGTDVDQPRNLAKSVTVE

SEQ ID NO: 69029 - protein, 266 aa, Proteus mirabilis
MGGSMYHDLQGKVAVVTGSSRGIGAAVVTRLAQEGMNVVINYHSDENEAQALADSLNKHGKGKAIIFGGDISDEKIAHNFIYKAIDHFGQLDLLINNAGIETQTPSHAVNLEDWRKIIDINLTSYFLTARSALKYFVENKIKGNIINMSSVHEVIPWPTFASYAASKGGVRMLTQSLALEYAHYGIRINAIGPGAINTPINKEKMQDDALRKELEEMIPMKYAAEPEAVANVAAWLASEQSTYITGQTIFIDGGMTLYPSFQGGKG

SEQ ID NO: 69030 - protein, 131 aa, Proteus mirabilis
MKRLQAFKFQLRPNGQQEREMRRFAGACRFVFNRALARQNEEHEAGNKYIPYTKMASWLIEWKSDTETQWLKEAPSQPLQQSLKDLERAYKNFFQKRTAFPRFKKRGKNDAFRYPQGVKLDQSNSRISGIH

SEQ ID NO: 69031 - protein, 111 aa, Proteus mirabilis
MKPLQLFKILGDQTRLDIVLLLKASGELCVCDIYTALNLSQPKTSRHLAMLRESGLLLDSKQGKWVHYRLSPVLLPWVKSIIDITYTTEKNRVADLLKILEKKESGHRCSV

SEQ ID NO: 69032 - protein, 420 aa, Proteus mirabilis
  MISC_FEATURE (336)..(336): X=any amino acid
MLGSLTAATLAVAIWRPVVLHTEQSREVPISIQTPLTAQGENTDDIITDSSDQLTDEGLVGADDGVDTSTAVAQVPHTYIVSSGDSLSSILTQFGIDSADIATLSNQNKDLRNLKIGQPISWKLDDDGLLQELSWGVSRRETRVYTRTETGFTEAKEFQKGEWKNSVTTGVIRGSFSASATNAGLTNAEARAVTKALQWQLDFRKLQSGDKFSALFSREVLDGRTEQSELIGVRLRSGGKDYYAFLAEDGRYYDSQAGGLERGFMRFPTVKQFRVSSQFNPRRINPVTGRVAPHKGVDFAMPVGTPVLATGDGEVIVSKYSGAAGNFIAIRHGSQXTTRYMHLRQLLVKPGQRVKRGDRIALSGNTGRSTGPHLHYELWINQQAVNPLTAKLPRADGLTGKEKREYLAKVKEIMPQLTLD

SEQ ID NO: 69033 - protein, 399 aa, Proteus mirabilis
  MISC_FEATURE (17)..(17): X=any amino acid
  MISC_FEATURE (22)..(22): X=any amino acid
LSAFSTVNTGQSLLNKXYTWGXTMSLSFKLSACALTVTLAMAPVMSQAWEKDKTYQITILHTNDHHGHFWHNDHGEYGLAAQKTVVDNIRDEVAKNGGSVLLLSGGDINTGVPESDLQDAEPDFKGMNLVGYDAMALGNHEFDNPLEVLRQQEKWATFPFLSANIYQKSTGERLFKPYTIFDKQGVKIAVLGLTTDDTVRIGNPANFPDTEFRKPADEAKKVVEELRTTEKPDIIIAATHMGHYDDGNHGSNAPGDVEMARALPKGYLDMIVGGHSQDPVCMSQENKNYKQADYVPGTPCAPDNQNGTWIVQAHEWGKYVGRADFEFRNGEFTLKHYQLIPINLNKKVKKEDGTTERVYYTEEIPHNPEMMKLLTPYQEKGGEQLNVKVGEVVGKLEGD

SEQ ID NO: 69034 - protein, 82 aa, Proteus mirabilis
MKENIHPQYRTVIFHDTSVDAYFKVGSTIQTDKTIEYEGQRYPYVTLDVSSQSHPFYTGKQKTHSQEGNVARFNKRFGRFVN

SEQ ID NO: 69035 - protein, 175 aa, Proteus mirabilis
MKLKKLHLVLGLGLSIIAGSALAADQGHGTVEFYGSIIDAPCSIDPDSGAQRIPLGQVSSSALKDGGRSASKMFKIKLLQCSTETYKTVKTTFTGAEAPDVLEGALGIEGIAKNAAVVITNAGGEQIKLGQASAAQTLNDGNNDLNFAAYLQGSSSKAAIPGDFTAIATFALSYQ

SEQ ID NO: 69036 - protein, 460 aa, Proteus mirabilis
MDYFPIFCQLNNKPCLLVGGGEVAERKARLLMDAGAVISVVAPTFTPQFMQWQNEQRLQCFTAEFSVADLADKWLVIAATDNEQVNQLVYQQATEQRIFCNVVDSPKQASFIMPSVIDRSPIMVAISSGGKAPVLARILREKMEQWLPNSLGALAQLAGKLREQVKQRFATMGARRYFWERFFADKALQAEIDAGRDNGIQQRISTLLAENNQPQGSVVLVGAGPGDAGLMTIKGLQQCQQADVVVYDRLVSDEVMHLVRRDAERIYVGKRAGFHCVPQEEINQILINHAKAGKRVVRLKGGDPFIFGRGSEELEALIEHQIPFSVVPGITAASGCTTYAGIPLTHRDYAQSVRFITGHGKGLNDAQWQCIAQDNQTLVFYMGLSKADYIQQMLLNQHMRATMPVAIVEKGTLATQKVVVGQLQQLAEMANSMQSPALIIVGEVVSLNQKLQWFGTTLAN

SEQ ID NO: 69037 - protein, 70 aa, Proteus mirabilis
MSNSMTGTVKWFDEGKGFGFITPADGSKDVFVHFSAIQSDNFKTLAEGQQVSFTMENGMKGPAAGNVVAL

SEQ ID NO: 69038 - protein, 427 aa, Proteus mirabilis
MAQKIQAIRGMNDYLPADTRVWQKIENTLKQILAGYGFSEIRTPIVEHTPLFQRAIGEVTDVVEKEMYTFTDRGEDAQSLTLRPENTAGCVRAGIEHGLLYNQEQRLWYLGPMFRYERPQKGRYRQFHQLGAEVFGLQGPDIDAELIMLTARWWKALGIAEHVTLELNSIGSLEARAKYREALVAFLEQHVDQLDEDCKRRMYSNPLRVLDSKNPEIQTLLNDAPELFDYLDDESREHFDGLCALLDAVGITYRVNQRLVRGLDYYNRTVFEWVTSALGSQGTVCAGGRYDGLVKQLGGHPTPAVGFAMGMERMILLVQAVNPEFVADTHVADVYLASFGDNSQSAALMLAEEIRDQLPTLRLMTNHGKGNFKKQLGRADKHGAKIALILGEDEINAGTVAVKDLRSGEQTIVSRSELAQQLTLLLG

SEQ ID NO: 69039 - protein, 343 aa, Proteus mirabilis
MKGYIQTVTGPVKKADMGLTLPHEHLFNDLSGVVDEPFYEFSHVLVDKKVSADIQWGLKYDPYCCCDNMDKKPIEDVIFELNNFKELGGKTIVDATGSSSIGRDIRKLKQVAELTGINVVASSGLYIEKFEGKRLADDIDAMAKMIDDELNIGIDGTDIRAGMIGEIGVSPFFTDGEKNSLRAAALAQNNNPYASMNIHMPGWQRRGDEVLDILLTEMGCDPAKISLAHSDPSGKDIDYQCKMLDRGVWLEFDMIGLDISFPKEGAAPSVMDTVEAVATLIERGYGNQIVLSHDVFLKQMWAKNGGNGWGFVPNVFLSLLAQRGIDKTIIDKLCIDNPANLLA

SEQ ID NO: 69040 - protein, 1052 aa, Proteus mirabilis
MPKFFIDRPIFAWVIAIITMLAGLLALIKLPVAQYPTIAPPAISISAVYPGADATTVQNTVTQVIEQNMNGIDNMVYMSSTSDSAGMMNITLTFEAGTDPDIAQVQVQNKLQLAMPLLPQEVQQQGISVDKSSSSFLMVAGFISGDGSMSQDDIADYVGATIKDPLSRVTGVGETQLFGTQYAMRIWLDPDKLVKYNMTTLDVINAIKSQNNQVAAGQLGGTPPVPGQRLNVSIIAQTRLNTPEQFADILMKVNQDGSQVKLKDLGIVEMGAENYSTIARFNGLPAAGIGIKLATGANALDTATAVRAALADMEPFFPSGLEVVYPYDTTPFVKISIFEVVKTLVEAIMLVFVVMYLFLQNFRATLIPTIAVPVVLLGTFAILSAFGYSINTLTMFAMVLAIGLLVDDAIVVVENVERVMQEEGLSPKEATRKSMGQIQGALVGIALVLSAVFIPMAFFGGSTGAIYRQFSVTIVSAMVLSVFVALILTPALCATLLKPIPKGSHGVQTGFFGWFNRVFEKSSHHYTDSVSRTLRGTGRYLLIYVLLVAAMAIMFVRLPASFLPEEDQGVLLTMVQLPAGSTQEQTQDVLAQVNDYFNTKEKDVVKSVFTVSGFGFGGQGQNMGLAFVVLNDWDERKSDQDKVPAIVGRANQALSQIKEAFVYSFNIPAIVELGSAGGFEFELIDNANLGHEKLMEARNQLLGMAAQEPQMLTGVRPNGQEDTSQYRLYIDLEKAQAQGVAVSDIYSTLGTMFGGSYVNDFIDRGRVKKVYVQAESQFRMLPQDIANLYVRNNAGQMVPFSSFIDTSKDPWLYGSPRLERYNGLPAVQIQGSATPGQSSGDAMLMMEQLASKLPSGIGYEWTGMSYQERLSGNQAPALYTISLIVVFLCLAALYESWSVPFSVMLVVPLGVIGALAFTTLRGLENDVYFKVGLLTTIGLSAKNAILIVEFAKDLMEKEGKGLVEATLDSVRMRLRPILMTSLAFMLGVIPLVLSNGAGSGAQNSVGTGVFGGMIAATSLAIYFVPIFFVVIRRRFAKKNEDLEHPNYPHQTK

SEQ ID NO: 69041 - protein, 321 aa, Proteus mirabilis
MHLLGTLQRNIALTLSLMLLSFLFSAPAFSAKLAIVIDDFGYRKKEDNQILQLPTAVSIAILPNSPHGKEMATKAHAQGREILIHMPMAPISKQPLEKDTLKPSMDQAEINRIIQNAINRVPYAVGMNNHMGSAMTSDRQAMDRVIKALNHSDLYFLDSVTIGNTQAATAAKAAGVPSLRRHVFLDNVQTEAETRQQLNRAINLARKNGFAIAIGHPHPSTVRALQQQLPLLPADIQLVAPSGLLTPSPDSPMVQEPPAVIPPTEQSKEPKPATWLKPAQQAIISMKKSTLMKVLTKKLMTFEQDKQFPSQHLESNKDKVE

SEQ ID NO: 69042 - protein, 626 aa, Proteus mirabilis
METVEKKSIAGQQTAIQTDFSTRNAFARIIRCLFAEKLLDDNKLQVFNDENNVKYPLSDGIHILQFNQTTVFPANTVINCGDIILKSMDGRHRMVQSHEELMEILKNELSFTPTTEGMTKFNKDVANSIHNDRLARAHRSKWRDTISNEMAQEGTSCFIEWITRHYSRRDGATFLDQWGALEGHSYYPTWKSRPGLSDDDIVALSAEFGARVNLRIAAIQTDMVYCEKMPHIQDIHQWFSSAFPTVWNKWCEWLTSQHQNPQKWLPIPLHPWHLEHWIIEHFSKEIDEGILLPLGPQLETAASMSFRTMLPTASKSPFIKLPVAIWMTSEMRSLQAKSIHMGPRISTIIEDILRVDKDFDGKLDFFREEVAWHFCHNVRMDDAEGKFLSVVFRDTQAWERNDNLIAITVASLFTELPHKPQPLISELIALSGDLPETWFRNYTKVILKPVLAMYLIYGIALEAHQQNTQVLFDDSGHAVTMLIRDFGDGRSWAPALRQQGYELQPYIWPGILPTVFEDDIEPVRTFVVDACLVSHLHEIALCLTQLYDIPDTRIWTVIGEELELVFKALQPRVEADFWHKEREHFLHHPWYTRSLMSMHLQQYTDYRLQHGLNNPLAGEQVDNSKI

SEQ ID NO: 69043 - protein, 242 aa, Proteus mirabilis
MATNAKPVYQRILLKLSGEALQGAEGFGIDASVLDRMAQEIKELVELGIQVGVVIGGGNLFRGAGLAAAGMNRVVGDHMGMLATVMNGLAMRDALHRAYVNARLMSAFPLNGVCDNYSWAEAISLLRHGRVVIFSAGTGNPFFTTDSAACLRGIEIEADVVLKATKVDGVFSADPTKDPDAVLYEKLTYQDVLERELKVMDLAAFTLARDHNLPIRVFNMNKPGALRRVVMGESEGTLISHA

SEQ ID NO: 69044 - protein, 269 aa, Proteus mirabilis
MNNLLTLNQVSIYDPHSEKKRVDNLSFSLKQGRTLAIVGESGSGKSLISKAIIGLLPSTLALSGEIFFDEKPLHLYSEQQRRALLGTSLGMIVQNGMSAFDPLIKIGKQVSQTLIYHFSYTKLQAFNATKQALDEVFEHQSLMIMQAFPHQLSGGQLQRVMIAMALALSPRLLIADEPTTALDAPLRREILQLLQRITISKNTTLIFISHDLGLVSQIADDILVMKEGKLIEFGDKNSVLDTPKQAYTRYLIEARAKLSQRFAQVLYAR

SEQ ID NO: 69045 - protein, 624 aa, Proteus mirabilis
MSIDIEKYPTLALVETPEDLRLLPKESLPKLCDELRLYLLNSVSRSSGHFASGLGAIELTVALHYVYKTPFDNLIWDVGHQAYPHKILTGRRDRIDTIRQKNGLHPFPWRDESEYDKLCVGHSSTSISAGLGMAVAAEQENLGRKTVCVIGDGAITAGMAFEAMNHAGDINPDMLVVLNDNEMSISENVGALNNHLAQLLSGKLYTTLREGGKKVFSGIPPIKELLKKTEEHIKGMVVPGTMFEELGFNYIGPVDGHDVIALVQTLTNMRDLKGPQLLHIMTKKGRGYAPAEQDPISWHAVPKFDPKTGTLPKSPNARPTFSKIFGDWLCEEAATDEKLMAITPAMREGSGMVRFSKEYPAQYFDVAIAEQHAVTFAAGLAIGGYKPIVAIYSTFLQRAYDQVIHDVAIQKLPVLFAIDRGGIVGADGQTHQGAFDLSFLRCIPNMIIMAPSDENECRQMLHTGYHYQEGPVAVRYPRGSGVGAPLQPLSELPIGKGIIRRQGKSIAILNFGTLLPEALDVAEKLDATVADMRFIKPLDKELILSLAKQHDILVTLEENAIMGGAGSGVNELLMQERCLVPVLNLGLPDLFVPQGGQEEIRADLGLDATGIEKSIKAYQAHSLS

SEQ ID NO: 69046 - protein, 795 aa, Proteus mirabilis
MEFNIHMLDAEDRDNVDLSRFSTSNYIIPGMYYLDIRLNGRDFPRQNINYIEVADNHSVACIDPTLLKKLTINQENQKYIKQISPDCFDISQLPGISIKNDGGVLDITLPRSLMKYEESDWTPPELWDSGVSGLIFDYTLTGTSTRPNKGNNNNTLTGYGQAGLNLGEWRLRAEYQGNYSSEYSSNNRFDWNQIYAYKPLPDLAAKLTVGETYLNSQIFDSFRFTGANLQSDERMLPPSLQGYAPEIHGIANTNAKVTVTQNGRLIYETTVPAGPFVINHLQNTVQGQLDVRVEEQNGKINEFQVQTANLPYMTRPGSVRFNTSLGQSSVNNHKMQGPIFYQGDFSWGMNNTWSLYGGALLTAKDYNAWSLGIGHDMGRFGTLSGDITQSYSKTYDNEKINGMSFKLNYAKTFDEYHSTITFAGYRFSEKTFRSFSQYIDERYNGINNNGYEKEMYTITGNKTFWADDAEKSTTLYLSYRHQNYWDKNTQEQYGVTVSRNFSIMGIEQINTNLSAFRTQYKGNTDDTLSFNISLPLGSGRNIGYNLQDNNGKVTQMASYADNRDYNNLWRIRAGLSSDKKANTDGYYQHRSQYAEINANASYQQDNYLAVGATIKGGFTATRYGAALHSSSMTSSTARIMVDTDGVAGVPFNGQSTTTNRFGIGVLTDLTSYNNVDARIDVDKMDQDIETRKAIASTTLTEGAIGYYQFPVRQGERLMAVLQTTDNKYPPFGAEVTNQKGESIGMVMEESLVYIAGVNLNESLNVIWNGKTQCSITIPAEITDPLKHQSLVCQDR

SEQ ID NO: 69047 - protein, 151 aa, Proteus mirabilis
MNEPTVTPPGFFKKLRLGNEYLKTWPVEKQLAPVFPENRMIKATRFGIRYMPPIAIFTLTWQIALGGDLGPAITTALFACSLPMQGLWWLGKRAATPLPAVLLNWFYEIREKFEQAGIALAPVEKTPTYLSLAHLLKRAFKQLDRSFLDDV

SEQ ID NO: 69048 - protein, 403 aa, Proteus mirabilis
MKLTARQVETSKPKEKAYKLSDGGGMYLEVAPNGSKYWRMKYRYAGKEKRLALGVYPSISLAQARAKREEAKRILALGDDPSLVKKAEKREKESQVNNSFEKITLEWHDYKKPNWSKGYADDLLEAFQKDIFPYIGKVSITEIKPLDMLEVLRKLEKRGVLDKLKKIRQACNQVFRYAIVTGRAEYNPASELAGALSTPKAKHFPHLNVNELPEFLQALSVCSGSKITQIATKLLMITGVRTIELRAAEWSEIDFDKAIWEIPKERMKMRRPHMVPLSTQALELFKEIQTITGKFKYIFHGRNDASKPMSEAAINQVIKRIGYDGRATGHGFRHTMSTILHEQGYNSAWIETQLAHVDKNSIRGTYNHAQYIDGRREMLQWYADYMDTLENGDNVVHGNFKRA

SEQ ID NO: 69049 - protein, 97 aa, Proteus mirabilis
MLYTYSVSIYQSDLDAFLSLLTKHDEVLLIQDGVLAVLEDNPLLIYCLAQQISVYALIDDVLARGLKDQVSHQIKLINYGDFVDLTVKHPQQIHWGA

SEQ ID NO: 69050 - protein, 254 aa, Proteus mirabilis
MLQYQPDHTVLRDKIILVTGAGDGIGKEAALTYARYGATLILLGRTLSKLEDVQNEIITSGGQQPMLYPLDLLTASENDYQEFADTIVKRFPHLDGVLQNAGLLGVVEPIINQPSTLWHDVMQVNVNATFMLTKALIPLMLKAPHASLILTTSSVGRQGRYGWGAYSVSKFATEGLMQVLHEEYKDSSLRINCINPGGTRTSMRASAFPDENAQKLKTPKDLMPLYLYLMSDDSIEVSGQSLDAQPDRKAGPAE

SEQ ID NO: 69051 - protein, 732 aa, Proteus mirabilis
  MISC_FEATURE (2)..(2): X=any amino acid
  MISC_FEATURE (663)..(663): X=any amino acid
  MISC_FEATURE (667)..(667): X=any amino acid
  MISC_FEATURE (675)..(675): X=any amino acid
RXRKIKNLKGSTVSKKIIATNLLLTLPFSLLSLQIHAAMTQNSPDKIIVTASPSQHPQGPISGLVATKTLSTNKILSDIDKTPQSISVITRDQMDAQDVSSVSQALRYTPGVFTEYRGSSNRNDEIFIRGYSYAPRFLDGLSYGMGASSSTGAIDPWLLERVELIRGPSSVLYGQLNPGGLVAMTSKRPTSTTINHIQARVGNDKLAETAFDFAGSLSDDNRILYRLNGLAKTQHTQIKDYKEERFALAPAITFLPNEQTRLTLLSFIQQEPEAGYRNFLPAYGTVKKTPEGTIPFDFNVNNADYHQSWRQQYGVGYEFEHEFNDRLKLIQNARYSHIKQKYKYLVFGSLRKDNPYILERRAQQEKRETDTFGIDTRLQADFDTEKLAHTVIIGIDYQWSKNKDNLLQAMGPEYDLDWRNPNYHYPIDISLQKAVTNQLQKHDQLGIYLQDQIQWKNWILLGGLRQDWAQVRTYDHIKNSKDQQDDQKLTGRVGLLYAFDNGISPYISYSTSFEPNLQTRRAPGSAPFEPSEGRQLEAGIKYLTPNEQTLATLSIYQLQQRNVTNYNAEKAYFEPVGEIRSRGIEAQINSQLTENISFISSYAYTDTEVRKTITAGTQGKELPRVPKHMASFWGQYDETSGLFNGAKAGFGVRYIGVISRRYXKYDXCTCSHFVXCHGRLSLGELSSSLKGAEVQLNMNNIANKHYVASCAGETACFYGIGRTMTATINYRW

SEQ ID NO: 69052 - protein, 55 aa, Proteus mirabilis
MAKGIREKIKLVSSAGTGHFYTTTKNKRTMPEKLEMKKFDPVVRQHVTYKEAKIK

SEQ ID NO: 69053 - protein, 177 aa, Proteus mirabilis
MSEIATVARPYAKAAFDFAVENQAVDKWQVMLAFTAEVARNEQVTELLSGSLASEKLADIFIDLCGDQIDEHAQNLIRVMAENDRLSTLPEVLSQFIQLRAVLESTVDVEVTSAIELTKQQLANISAAMEKRLSRKVKLNCKIDKSVIAGMIIRAGDLVIDGSVRGRLERLTDVLQS

SEQ ID NO: 69054 - protein, 46 aa, Proteus mirabilis
MLNLLREQFNLRMQAASGQLQQSHLLKQVRRNIARVKTLLTEKAGA

SEQ ID NO: 69055 - protein, 292 aa, Proteus mirabilis
MNQPNRAAVTTSTLYIVPTPIGNLGDITQRALDVLSHVDLIAAEDTRHTGLLLQHFAINARLFALHDHNEQQKADQLISKLQQGLSIALVSDAGTPLINDPGYHLVNQCRKNGIKVVPLPGACAAITALSAAGLPSDRFCYEGFLPAKTKSRQDCLRDLAQEPRTLIFYESTHRLLDSLADMVTVWGEARYVVLARELTKTWETIQGMPVGELLNWVREDENRRKGEMVLIVEGYQKPQEDHFAPEVLRTLAILQKELPLKKAAAVTAEIYGVKKNALYKHVIAQNEAEQDQ

SEQ ID NO: 69056 - protein, 214 aa, Proteus mirabilis
MRIILLGAPGAGKGTQAQFIKENYGIPQISTGDMLRAAVSAGTELGLKAKALMDNGQLVTDELVIALVKERIKQDDCRNGFLLDGFPRTIPQADAMKEAGINVDFVLEFAVPDEIIVERIVGRRVHAPSGRVYHIKFNPPKVENRDDVTGEELTTRKDDQEETVRKRLVEYHSQTAPLVSYYQNEAKAGNAQYHKIDGTQKVSEINAELKNILG

SEQ ID NO: 69057 - protein, 264 aa, Proteus mirabilis
MAQRDYVGRGQSSARRKKTTKGKGKKAASGLPLTTLIVAIALVALFVGGLYFITHNKKEVVEPTSSSAGQQPTNNLPPKPQERWQYIKELENRQVGNPLQPPATSSGSQINPKATLSPEQLRFLQQIEADKRQPAVELPEVPYNGEVPRSQVVITPPTTTAPSVQPSQPSAPVKQEPAPAITTPKPATTEARFLVQCGSFKTNEQAESVRATLAFSGIESRVTKGNDGWIRVLSGPFNKEQANTLSRQAAGAGVSGCILRTAGG

SEQ ID NO: 69058 - protein, 233 aa, Proteus mirabilis
MAILNCKVSLVEPITDTVYRVRLLPDGPFDFQAGQYLLAVMDERDKRPFSIASIPENKDFIELHIGASDLNLYAMAVLDLILETQQLKIDIPHGNAWFRQQSQRPLLLIAGGTGFSYTHSILLAALQENPQRAITLYWGGREQVHLYDLNELQDLTEKYPSLSVVPVVEQPDDAWRGRKGTVLTAISEDFGDLSSYDIYIAGRFEMAKIARDRFCNERNADRERLFSDAFEFI

SEQ ID NO: 69059 - protein, 443 aa, Proteus mirabilis
MSQTNQVPKIGFVSLGCPKNLVDSERILTELRTEGYQVVPTYDDADLVIVNTCGFIDSAVQESLEAIGEALDENGKVIVTGCLGAKENQIREVHPKVLEITGPHSYEQVLSHIHHYVPKPSHNPFTSLVPEQGVKLTPRHYAYLKISEGCNHRCTFCIIPSMRGDLDSRPIGEVLNEAKRLVNAGVKELLVISQDTSAYGVDTKHQTGFWDGMPVKTSMVSLCEQLAKLGIWVRLHYVYPYPHVDEVIPLMAEGKILPYLDIPLQHASPKVLKLMKRPGSVERTLERVKRWREICPELTLRSTFIVGFPGETEEDFQMLLDFLTEARLDRVGCFKYSPVEGAKANELPDQVPEEIKEERYHRFMQLQQQISTERLQEKIGKVLPVIIDEVDEEGAIGRSMADAPEIDGAVYLNEQFDVEPGQIVRVLIEHADEYDLWGTIVEQ

SEQ ID NO: 69060 - protein, 422 aa, Proteus mirabilis
MKTSYNLRSIAAKAIAQVLDQGLSLSSVIPELQKNISDKDKALLQELCFGTLRTLPQLEWIIQQLMDKPLKGKQRILHYLIMVGLYQLLYTRVPAHAALAETVNGAIALKKPQLKGLINGVLRQFQRQQDVLMERFQNNDSRYLHPSWLLTRIKNAYPELWESIIEGNNQKPPMWLRVNQIHHSREQYLALLEKEGISAFSDDHHPNAIRLETPCNVHLLPGFNEGWVTVQDRSAQRCAELLAPQNNEQILDLCAAPGGKTTHILEIAPKAHVLAIDIDEQRLARVKENLNRLKLHATVKSGDGRYPEQWCANMQFDRILLDAPCSATGVIRRHPDIKWLRRNEDIAQLAQIQKEILHAIWPYLKSGGTLVYATCSILPEENSQQIAAFLSSMQDAQCDYQHQCLPEQYSGDGFFYALINKK

SEQ ID NO: 69061 - protein, 70 aa, Proteus mirabilis
RPLVYRPSNAGTSPSAPANSVVNAHPVNPLTTTTTDKDYGVLLQVVAFTTDVGRNFETVSQTNTAYFTQC

SEQ ID NO: 69062 - protein, 377 aa, Proteus mirabilis
MNAPLRLAIVRQKYRPDGGAERFIARALDALSSDALELNVITRQWQGDTHPDWHIHLCNPKKYGRISRESGFAKAARACWQENHFDIVQSHERIAGCDIFRAGDGVHRRWLLQRQKILPRWKGRWLLYDRYHRYVMNAEQQMYADPALKQVICNSQMVKKEIIADFGLSADKISVIYNAIDHNVFVPATNSQKQRLKTQYNIPQDKPCFIYVGSGFERKGLAAAISAIANTSSILLVVGSDKNQPKYEQLATQLGCRQRIFFLGMQKKTLDFYQIADALLLPTLYDPFPNVILEALSCGLPVITSTSCGGAEFIQNGKNGFVCDALDIPALTEAIVQIPTNSAWSEMSQVARETILPYTPKRLSDELISLYKRILTL

SEQ ID NO: 69063 - protein, 163 aa, Proteus mirabilis
MDQDITLSNLCPCNSQLPYSECCEPYLLGTKNAPTAQALMRSRYSAFVTHNADHLIKTWHPSCRTPSLRDELIATFPNTQWLGLHIISAQENPRDNEAFVEFSACFIEINADDKQYLHERSRFLKIDDCWFYIDGVQPKVGRNDPCPCGSGRKYKKCCEHNRK

SEQ ID NO: 69064 - protein, 322 aa, Proteus mirabilis
MSVPSQENITLTKEDLRQLHVSSSLYRWFLRYFPHGGTYRAIHNELIKQRQTQWIESLIQYIYLRHFSQSSFAKQEQEVIENILSLLGNEKQTGVTLQRLPYHQPQSSDENIQFSTEWHQLIVKSQQFNTALALCGRDNIVAFSGDENSIANTGYSNQLINSGFAGKISNTADQCRIGSLGGRSRICNSGNDVKIYASGQGAHIANSGIRNFINATQSRTKVTNTGDLAHITVTGDNAIAINTGDNCTLSVSGDNSVCISTGHLQQFCLGKGGSAVIAYHDGKRTRFNVFYEGEDNIEAGIHYYLDEKQRPVAMDNITELNN

SEQ ID NO: 69065 - protein, 361 aa, Proteus mirabilis
MAGNSIGQLFRVTTFGESHGTALGCIVDGVPPGLPLTQADLQVDLDRRKPGTSRYTTQRREPDQVRILSGVFNGVTTGTSIGLLIENTDQRSQDYSEIKDVFRPGHADYTYEQKYGLRDYRGGGRSSARETAMRVAAGAIAKKYLKQKFGIEVKGYLSQLGPISCELVDWSIVETNPFFCPDPSRLDALDEYMRALKKEGNSIGAKVTVVAEGVPAGLGEPVFDRLDADLAHALMSINAVKGVEIGDGFDVVTLKGTENRDEITKEGFSSNHAGGVLGGISSGQPIIAHIALKPTSSITIAGKTLNRQGEEVDMITKGRHDPCVGIRAVPIAEAMMAIVLLDHALRQRGQCGDVIPPLMQW

SEQ ID NO: 69066 - protein, 219 aa, Proteus mirabilis
MKKNISLILFLLFSLITASQAAGISVGGTRFVYDDNLREISIPIMNTDKEKPYLIQSWVSAYQGDEKTPFIATPPLFRIEPDSSGTARISYTGAPLASNQEVVYWLNIKSIPPMEKSPENQLQLVINSQFKLFLRAHDIEPLDFDKVKLSKQNKGLVINNDTPYHLTIKHILVGDKRYPFNDFVNPHQEVVLLKENHIPQKVTVQFINDYGATVDKVLN

SEQ ID NO: 69067 - protein, 192 aa, Proteus mirabilis
MFKKALLSLTAGALLFNASSALAADYQIDKQGQHAFVQFRIQHLGYSWLYGTFKDFDGSFTYDKEDPSKDKVDVVIKTGSLDTNHAERDKHLRSADFFNVSKYPEAKFVSTKVTRDGENYTVTGDLTLNGVTKPISLNAKLIGEGTDPWKGYRAGFEATGKVNLKEFNFKSDLGPKSQEAELIISVEGVKKN

SEQ ID NO: 69068 - protein, 223 aa, Proteus mirabilis
MENATIETLLPREKLLLHGVESLTDAELLAIFLRTGTYEKSVLELADFLLRKCGSLYHVINADYETLGCFKGIGVGKFTQLQAINEMAQRFIKTKFMHKNILSSSAETKSYLQKRLNWRDREVFVVLFLDNQNQMIDCEEMFKGTVDRVEVHPREIIRQSIKKNAASIILAHNHPSGLSEPSLADKQITEKIFTACQLVGIKVLDHLVVGHDNCVSFAERGWL

SEQ ID NO: 69069 - protein, 1577 aa, Proteus mirabilis
MKSKNFKLSPSGRLAASLAIIFVSLNAYGNGIVPDAGHQGPDVSAVNGGTQVINIVTPNNEGISHNQYQDFNVGKPGAVFNNALEAGQSQLAGHLNANSNLNGQAASLILNEVVSRNPSFLLGQQEVFGIAAEYVLSNPNGITCDGCGFINTSRSSLVVGNPLFENGQLKGYSTLNNTNLLSLGKNGLNTTGLLDLIAPRIDSRGKITAAEISAFTGQNTFSQHFDILSSQKPVSALDSYFFGSMQSGRIRIINTAEGSGVKLAGKFTADNDLSVKADNIQTDSQVRYDSYDKDGSENYQNYRGGITVNNSGSSQTLTKTELKGKNITLVASSHNQIKASDLMGDDITLQGADLTIDGKQLQQKETDIDNRWFYSWKYDVTKEKEQIQQIGSQIDAKNNATLTAIKGDVTLDAAKINAGNNLAINANKNIHINGLVEKESRSENGNKRNHTSRLESGSWSNSHQTETLKASELTAGKDLGLDAQGSITAQGAKLHANENVLVNAKDNINLNVQKTNNDKTVTDNHVMWGGIGGGQNKNNNNQQQVSHATQLTADGQLLLAADNNVNITGSQVKGNQGAFVKTTQGDVVIDNAMSETISKIDERTGTAFNITKSSHKNETNKQTSTGSELISDAQLTVVSGNDVNVIGSLIKSADKLGIHSLGDINVKSAQQVTKIDDEKTSLAITGHAKEVEDKQYSAGFHITHTTNKNTSTETEQANSTISGANVDLQANKDVTFAGSDLKTTAGNASITGDNVAFVSTENKKQADNTDTTISGGFSYTGGVDKVGSKADFQYDKQHTQTEVTKNRGSQTEVAGDLTITANKDLLHEGASHHVEGRYQESGENIQHLAVNDSETSKTDSLNVGIDVGVNLDYSGVTKPVKKAIEDGVNTTKPGNNTDLTKKVTARDAIANLANLSNLETPNVGVEVGIKGGGSQKSQTDSQPVSTSINAGKINIDSNNKLHDQGTHYQSTQEGISLTANTHTSEVAQDKHQTTFHETKGGGQVGVSTKTGSDITVAIKGEGQTTDNALMETKAKGSQFTSNGDISINVGEDAHYEGAQFDAQKGKTVINAGGDLTLAQATDTHSESQSNVNGSANLKVGTTPESKDYGGGFNAGTTHHSKEQTTAKVGAITGSQGIELNAGHNLTLQGTHLSSEQDIALNATNKVDLQSASSERTEKGNNLSGGVQAGFGKKMTDDASSVNGLGSAQFAIGKQDEKSVSREGGTINNSGNLTINGNSVHLQGAQVNSKDTQLTSQSGDIEITSAQSTDYKNNWGTDIGFNGKKTSTTPKEVTEEKPATSIHNIGGKLLVNVEDQQKTSHQNATLETGTLTINSNKDLTLSGANVTADSVTGNVGGSLNIASQKESDRHVTVGVNVGYNHTNDPKSSQVNKTAKAGGSLLEKTIKDTIDSGIKSSTDAISDKYNSLSSTIADKTGISDETKAKIDQGFGKVGNGIKNIVTGAEGHTANADIKVTHVDNDAVTKTTSLTSNNDLSLNVNGSTKLTGAEIASKQGQVDLGGSSVKLENIEGHHYEAGADLDLKSSVVDLAKQLVGGDISFKSPVKTNETVNTKASISEK

SEQ ID NO: 69070 - protein, 198 aa, Proteus mirabilis
MAQLYFYYSAMNAGKSTSLLQSSYNYNERGMRTLIFTAAIDTRFAKGKVTSRIGLSADALLFSDDMNIRDAILAENNKEPIHCVLIDECQFLTKAHVEQLCEITDSYDIPVLTYGLRTDFRGELFTGSAYLLAWADKLVELKTVCYCGRKANKVLRLAANGKVLSDGAQVEIGGNEKYVSVCRKHYTEATLKGRIEQL

SEQ ID NO: 69071 - protein, 465 aa, Proteus mirabilis
MQHSHFDAIVIGSGPGGEGAAMGLVKQGKRVAVIERYDQVGGGCTHWGTIPSKALRHAVSRIIEFNQNPLYSDQSRLINSSFSQILRQASTVISQQTKMRQGFYERNHCTMYSGEAAFIDDHRISVRYPDGTCDILSADNFIIATGSRPYCPPDVDFSHSRIYNSDTILDLEHEPRHVIIYGAGVIGCEYASIFRGLRVKVDLINTRDHLLSFLDQEMSDALSYHFWNNGIVIRHNEEYDTIEGVDDGVIVHLKSGKKVKADCLLYANGRTGNTDTLGLENVGIKTDSRGQVAVNAHYQTSCEHIYAVGDVIGYPSLASAAYDQGRIAALALTTGTSETHLIEDIPTGIYTIPEISSVGKTEQQLTAMKIPYEVGRSQFKHLARAQIAGMNVGSLKILFHRETKQILGIHCFGERAAEIIHIGQAIMEQKGEGNTIEYFVNTTFNYPTMAEAYRVAALNGLNRLF

SEQ ID NO: 69072 - protein, 479 aa, Proteus mirabilis
MSLRYQRSALSVVVATLFTSVSFSSFAAPVTADTILAQDRAAKGNITEFGGARRITSDQTEALKAALNNHQAKNVILFIGDGMGDSEITVARNYAEGAGGFFKGIDALPVTGQYTHYSLDRKTQKPNYVTDSAASATAWASGVKTYNGALGIDVFGKDHQTILELAKANGKATGNVTTSEIQDATPAALFSHVTGRKCYGPVETLAKCSTNALENGGRGSISEQLLVTRADITLGGGAKSFAQTATAGEYKGKTLEQQAIERGYQIVKDAKSLEAITLANQDKPVLGLFHDGNMAVAWEGPKATYQGNLKNPPLECKPNSKLDPNAPTLAQMTKKAIDLLKTNENGFFLQVESASIDKQDHNANPCGQIGETVALDEAVQIGLDFAKQNGDTLIIVTADHAHSSQIIEADVKSSGLTQALITKDGAVMVVNYGNSETDSQEHTGAQLRVAAYGPHAANVVGLTDQTDLFFTMRDAMGLK

SEQ ID NO: 69073 - protein, 387 aa, Proteus mirabilis
MEKVVIIDGVRTPMGRSKGGAFRHVRAENLSAQLMQALLKRNPDIDPNDIGDVIWGCVQQTLEQGFNIARNAALLAELPHKVPAVTVNRLCGSSMQALHDGARQIMLGESQVALIGGVEHMGHVPMTYNADFNPALNLSVAKASFSMGLTAEMLAKSFQISREEQDKFAYRSHHLAALATQKGYFDNELVAINGHDAAGDFIRVSTDEVIRYNPSLDELAQLRPVFDPATGSVTAGNSSAVSDGASAMFITSESYAKQHHLKPRAIIRSMAVTGCDPAIMGYGPVPATEIALKKAGLTLSDIDIFELNEAFAAQSLACMKKMNLLDSIDDKINLNGGAIALGHPLGCSGARITTTLLNIMERKDAQLGLATMCIGLGQGIATIIERV

SEQ ID NO: 69074 - protein, 208 aa, Proteus mirabilis
MSDLLNRLKKLAKQANIELTDVQAQKLTAYVAMLDKWNKAYNLTSVRDPQQMLIRHILDSIVVSQYLKGNNFIDVGTGPGLPGIPLAIMRPDHHFVLLDSLGKRVRFMKQVQHELALHNIEPVQYRVEEYQVEKPFDGVISRAFASMKDMLSWCSHLVTEEHGRFYALKGQIHQEELDELSENGLKMPEKVINLAIPELNEQRHLVIF

SEQ ID NO: 69075 - protein, 902 aa, Proteus mirabilis
MLGKIVTKIFGSRNERAIRRMRKVVAQINQLEPEFEKLTDDELKAKTDEFRERLKKGEKEEDILPEAFATVREASKRVFGMRHFDVQLIGGMVLNDRCIAEMRTGEGKTLTATLPAYLNALSGKGVHVVTVNDYLAQRDAENNRPLFEFLGLSVGINLPNMAPPAKREAYNADITYGTNNEFGFDYLRDNMAFSPEERVQRKLHYALVDEVDSILIDEARTPLIISGPAEDSSELYIKMNKVIPHLVPQEKEDSDTFQGEGDYSVDEKTRQVNITERGLVKIEGLLAEAGMMKEGESLYSPANIMLMHHVTAALRAHALFTKDVDYIVKDGEVIIVDEHTGRTMQGRRWSDGLHQAVEAKEGVKIQNENQTLASITFQNYFRLYEKLAGMTGTADTEAFEFNSIYRLETIVIPTNRPMVRKDLPDLVYMNEKGKFAAIIEDIRERTKNGQPVLVGTISIEKSEEISQALTKANIHHNVLNAKFHAMEADIIANAGLPSAVTIATNMAGRGTDIVLGGSWQTEVAKLENPTEEQIEEIKAQWQKRHDAVLASGGLHIIGTERHESRRIDNQLRGRAGRQGDEGSSRFYLSMEDSLMRIFASDKVSGMMRKLGMNETEAIEHPWVTKAIANAQRKVENRNFDIRKQLLEYDDVANDQRRAIYTQRNELLDVADVSETIDSIRQDVFTSMIDNYIPPQSLEEMWDIEGLTACLQNDFDLNLPIKEWLDKEPELHEETLRERILEKSIEVYKAKEEIVSAEMMRNFEKGVMLQTLDSLWKEHLAAMDYLRQGIHLRGYAQKDPKQEYKRESFAMFANMLESLKYEVISTLSKVQVRLPEEVEELERRRREEAERLAKQQQLSHEVTKESQMSAVDGQVASGKKVGRNEPCPCGSGKKYKHCHGKLG

SEQ ID NO: 69076 - protein, 302 aa, Proteus mirabilis
MSEEQTYCGFIAIVGRPNVGKSTLLNQLLGQKVSITSRKPQTTRHRIMGIDTDGAYQAIYVDTPGLHIEEKRAINRLMNRAASSSIGDVELVIFVVEGTNWTPDDEMVLNKLESLRCPVLLAINKVDNVTDKTKLLPHIGFLSQQMDFLDVVPISAEKGMNVDTIAKIVRNCLPEAIHHFPEDYITDRSQRFMASEIIREKLMRFLGEELPYSVTVEIEQFVTNDRGGYDIHGLILVEREGQKKMVIGNKGAKIKKIGTEARMDMEDLFENKVHLELWVKVKAGWADDERALRSLGYVDDLK

SEQ ID NO: 69077 - protein, 984 aa, Proteus mirabilis
MAKTTLLALQGLSCSHCVNSVKKSLDARNDIEQSTVTIQYAKIDSDATVESLIKTIEEAGYEAHLATQADVKLNLSGLNCMKCVGKTENALLAVDGVVAVNVDKTSAEIFGTANAKDLIAAVVAEGFEASLANEEENKPKTIELTLSGLNCGHCINSVKKALEGTDGVESAQVELTHATVTGTANTESVITAIQDAGYDAKLAGANHPKTEPLTQTDAPLEASSAAICDIPVEEAILDNNNADISIDDDSTQLLIDGMTCASCVSKVQKALQSVSGVENARVNLAERSALVTGHVNHDDLINAVEKAGYGAEIIQDDVKRRERQQEVAVANMKRFRWQAALALVVGIPVMVWGMIGDNMMLTEANHNIWLTIGIITLIVMIAAGGHFYRNAWQSLKNGSATMDTLVALGTGAAWLYSISVNLWPEVFPAQARHLYYEASAMIIGLINLGHMLEQRARQRSSKALERLLDLTPPTARVVTDNGEVEMPLADVKQGMILRLATGDKVPVDGEITQGEVWMDEAMLTGEPIPQQKSLGDTIHAGTTVQDGSVLFKAAAVGSQTTLARIIKLVRQAQSSKPEIGQLADKISSVFVPIVVVIALIAGAIWYFFGPSPQITYALVIITTVLIIACPCALGLATPMSIISGVGRAAEYGVLVRDADALQQASQLDTLVFDKTGTLTEGMPQVTEIHTFNQISETQALALAGALESGSNHPLAKAILTKAEGIKLPQISQFRTLAGMGLSGEIDGNIVLLGNPKLMEESGIDISEINALIENQSAKGVTPVLLAQNGKIAALLSIRDPLREDTVSALQRLHHQGYRLVMLTGDNPITANAIAKEAGIDQVIAGVMPEGKAQAISQLQAEGRRVAMIGDGINDAPALAKADVGIAMGGGSDIAIETAAITLMRHSLHGVADAVEISKGTLRNMKQNLFGAFIYNSLGIPIAAGILYPFTGTLLNPVVAGAAMALSSITVVSNANRLLRFKPKK

SEQ ID NO: 69078 - protein, 62 aa, Proteus mirabilis
MLILTRRVGETLMIGDDVTVTVLGVKGNQVRIGVNAPKEVSVHREEIYQRIQAEKTQPTDNY

SEQ ID NO: 69079 - protein, 962 aa, Proteus mirabilis
MENKSAPKEPSLDTTYNPTEIEQPLYQHWEKNGYFKANGDTSKESFCIVIPPPNVTGSLHMGHAFQQTIMDTMIRYQRMQGKNTLWQAGTDHAGIATQMVVERKIAAEEGKNRHDYGRDAFIDKIWEWKAESGGNISNQMRRLGNSVDWDRERFTMDEGLSKAVKEAFVRLHKEDLIYRGKRLVNWDPKLHTAISDLEVENREVKGSMWHLRYPLADGVKTAEGKDYLIVATTRPETLLGDTGVAVNPEDPRYKDLIGKEVILPLMNRRIPILADEHADMEKGTGCVKITPAHDFNDYEVGRRHQLPMINIMDFDGNIRVSAEVLDTNGVESDVYSTEIPEAYQGMERFAARKAIVAEFERLGLLEEIKPHDLTVPYGDRGGVVIEPLLTDQWYVRAAPLAKPAVEAVKNGDIQFVPKQYENMYFSWMNDIQDWCISRQLWWGHRIPAWYDNEGHVYVGRDEEEVRRENNIAADVALRQDEDVLDTWFSSALWTFSTLGWPENTEALKTFHPTNVLVSGFDIIFFWIARMIMMTMHFIKDDEGKPQVPFKTVYMTGLIRDEEGQKMSKSKGNVLDPLDMIDGITLDKLLEKRTGNMMQPQMAERIAKRTKKEFPEGIEAHGTDALRFTLAALASTGRDINWDMKRLSGYRNFCNKLWNASRFVLMNTEDQDCGYQGGEMTFSLADRWILAEFNNTIKAYREALDNYRFDIAAGILYEFTWNQFCDWYLELSKPAVHKGNDAQKRAARHTLIEVLEGLLRLAHPIIPFITETIWQRVKEVKGIEGETIMLQAFPEFDASLVDEQALNDLEWIKEVIVAVRNIRAEMNIAPGKPLDVILRGADETAKRRVSDNIGFLKAMGRLADIRPLAEGEEAPLSVTKLVSGAELLIPMAGFIDKDAELARLDKELEKVEKDITTLDSKLSNEGFVNRAPEAVVAKERERLASCLNAKEKLIAQKVSIAAL

SEQ ID NO: 69080 - protein, 218 aa, Proteus mirabilis
MYQHRDWEGSLLDFPVNKVICVGSNYANHIKEMGSVRSEEPVIFIKPETAMCDIRQPIAIPKEMGAVHHEIELAVLIGQPLKQANEDRVDRAIAGFGVGLDLTLRDLQSQLKKAGQPWEKSKAFDGSAPLSGFIPVNSFGDPQNVDLMLKVNGEIRQQGNSRDMLTPVLPLISYMSRFFTLRPGDVILTGTPEGVGPLASGDMLVLSVNEHQLTTRVI

SEQ ID NO: 69081 - protein, 214 aa, Proteus mirabilis
MKAYQRHFIELALAKNVLKFGEFTLKSGRVSPYFFNAGLFNTGRDLALLGQFYAQTLIDNHVPCDVLFGPAYKGIPIATTTAVALVEHHDMDVPYCFNRKEAKDHGEGGTLVGSPLTGNVVIVDDVITAGTAIRESMEIIKQHDATLSGVLLSLDRQEKGRGSLSAIQELERDYQCQVYSIITLDDLISYLTESETLSAHLPAVKAYRERYGIN

SEQ ID NO: 69082 - protein, 55 aa, Proteus mirabilis
MPIIASGKALQTDTHSITVGSKVTVSGFISSHQARNGLFKLVLHAEQIELIDSGD

SEQ ID NO: 69083 - protein, 365 aa, Proteus mirabilis
MRRFAGACRFVFNRALARQNENYEAGNKYIPYTKMASWLIEWKSDTETQWLKEAPSQPLQQSLKDLERAYKNFFQKRTAFPRFKKRGKNDAFRYPQGVKLDQSNSRISLPKLGWMRYRNSREVVGEVRNVTVSQSCGKWYVSIQTEYEATEPQHGSTSIVGLDAGVTKLATLSDGTVYPPVSSFKVNQRKLARLQRKLSRKIKFSANWQKQKRKIQRLHSHIANIRKDYLHKVTSEISKNHAMIVIEDLKVSNMSKSAKGTTERPGRNVKAKSGLNRAILEQGWYEMRRQLEYKQLWRGGQVLAIPPAYTSQKCACCGHTAKENRQSQSQFECLECGYTANADINGARNILAAGHAVLARGGRVQ

SEQ ID NO: 69084 - protein, 73 aa, Proteus mirabilis
MCEPECPNDAISMGNDIYEINPDLCTECVGHYDKPTCQSVCPITNTIIIDPAHTESQDELWEKFVLIHHADKI

SEQ ID NO: 69085 - protein, 417 aa, Proteus mirabilis
MLEQMGKAAREASWHLAQLSTEQKNQALLVIADLLEQQEAIILAANEKDMVAARESNINAAMLDRLLLTSERLKAIADDVRQVCHLEDPVGQVIDGRLLDSGLRLERRRVPLGVVGVIYEARPNVTIDVASLCLKTGNAAILRGGKETHHTNQAVVAVIQQALETCAIPAAAIQAIDKPDRELVAKMLKMDEYIDMLIPRGGAGLHKLCREQSTIPVITGGIGVCHTFVDESADLDQALNVIINAKVQRPSACNSLETLLVHEAIAESFLPQLSDAMAAQKVTLHASQRAITALKKGRATVVDVTEADYCDEWLSLDLNVEVVNDLTAAIAHIRQYGTAHSDAILTQSISHADRFVRQVDSAAVYVNASTRFTDGGQFGLGAEVAVSTQKLHARGPMGLDALTTYKWIGYGDNTLRR

SEQ ID NO: 69086 - protein, 858 aa, Proteus mirabilis
MRLDKLTNKFQQALADAQSLALGNDNQFIEPIHLLSALFNQQGGSIRPLLTSTGVNASQFNERINDALSRLPKVEGAGGEVHPSNDLIKHLNLCDKLAQKKGDEFISSELFLLAAMESGGQVADMLKAAGANKASLELAIEKIRGGETVNDQNAEDQRQALKKYTVDLTERAEQGKLDPVIGRDEEIRRTIQVLQRRTKNNPVLIGEPGVGKTAIVEGLAQRIVNGEVPEGLKNKRVLSLDMGSLLAGAKYRGEFEERLKAVLNDLSKQEGSVILFIDELHTMVGAGKADGAMDAGNMLKPALARGELHCVGATTLDEYRQYIEKDAALERRFQKVYVAEPTVEDTIAILRGLKERYELHHHVQITDPAIVAAATLSHRYISDRMLPDKAIDLIDEAGASLRMQMDSKPEALDRLDRRIIQLKLEQQALQKESDDASKKRLAMLNEELAEKEKEYSSLEEEWKAEKAELTGTQHIKAELEQARIALEQARRSGDLAKMSEIQYGQIPTLEKQLAEANKTEDKHMKLLRNKVTDAEIAEILARWTGIPVSRMLEGEREKLLRMEQELHRRVIGQDEAVNAVSNAIRRSRAGLSDPNRPIGSFLFLGPTGVGKTELCKALADFLFDSDDAMVRIDMSEFMEKHSVSRLVGAPPGYVGYEEGGYLTEAVRRRPYSVILLDEVEKAHPDVFNILLQVLDDGRLTDGQGRTVDFRNTVVIMTSNLGSDLIQERFGTLDYPAMKTIVMDVVGHHFRPEFINRIDEVVVFHPLGKENIAAIAQIQLRRLYQRLEERGYHVTITGAALEKLGEVGFDPIYGARPLKRAIQQEVENPLAQDILSGKLVPGKEIILDGDDNQIIAKQS

SEQ ID NO: 69087 - protein, 1253 aa, Proteus mirabilis
MSKFLDRFRYFKQLGDTFSQDHGQELNVNRDWENSYRSRWQHDKIVRSTHGVNCTGSCSWKIYVKNGLVTWETQQTDYPRTRPDLPDHEPRGCPRGASYSWYLYSANRVKYPMVRKRLIKLWREAKAQHADPVDAWASIVNAPEKTKSYKQARGRGGFVRSSWSEVNEIIAASNVYTAKTFGPDRIIGFSPIPAMSMVSYAAGARYLSLIGGACLSFYDWYCDLPPASPMTWGEQTDVPESADWYNSSYLIAWGSNVPQTRTPDAHFFTEVRYKGTKTVAVTPDYAEIAKLCDQWLNPKQGTDSAMAMAMGHVILNEFHVKRQTEYFSNYVRTYTDMPMLVMLDKHDSGKLVAGRMLRAADLVNNLDQEKNPEWKTIAIDEKTQQLVAPQGSMGFRWEGAAKWNLEPKDGKSGEEVTLQLGLLENHDDVVDVAFPYFGGIKSEYFEGVALDDVLVHRLPAKRITLANGEEKYVTTVYDLLLANYGVDRGLNDENCATNYDEIKAYSPAWAEQVTGVSRQDIIRIAREFADNAEKTHGRSMVIVGAGINHWYHMDMTYRGIINMLIFCGCIGQSGGGWAHYVGQEKLRPQTGWLPLAFGLDWQRPPRHMNSTSFFYNHSSQWRYETVSPTELLSPLADKSRFSGSLIDMNVRSERMGWLPSAPQLNVNPLSITKKAQQAGVSATDYTINALKSGEIRFASEQPDNPQNFPRNLFIWRSNLLGSAGKGHEYLLKYLLGTENGLQGKDLGEQGQVKPQEVEWQDKGGEGKVDLVVTLDFRMSSTCLFSDIVLPTATWYEKDDMNTSDMHPFIHPLTAAVDPAWESKTDWEIYKGIAKTFSKLCVGHLGVETDLVTQPIQHDSAAEMAQPFDVKDWKKGECDLIPGKTAPHLIPVERDYPNTYARFTSLGPLMDKLGNGGKGIGWNTQTEVDFLKKLNRVRHDGVAKGRPAIETAIDAAEVILSLAPETNGQVAVKAWDALSKVTGRDHTHLAKVKEDEKIRFRDIVAQPRKIISSPTWSGLEDEHVSYNACYTNVHEMIPWRTLSGRQQLYQDHEWMRAYGESLVVYRPPIDTKAIEAVKGKKPNGFPEKALNFLTPHQKWGIHSTYSDNLLMLTLGRGGPVVWLSEDDAKEMGISDNDWVEAYNSNGALTARAIVSQRIPDGMIYMYHAQERQINLPGSEITGMRGGIHNSVTRVCPKPTHMIGGYAQLAYSFNYYGTVGSNRDEFVVVRKMKQIDWLDGEGDAYQQTLNGQEKA

SEQ ID NO: 69088 - protein, 230 aa, Proteus mirabilis
MHLISKHFIALFFLFSFSSLSYAGGVALAATRIVYPMDAKQTSITLNNTDKRLRFLVQSWIDDSQDQKSNEFIVTPPLFVSKPESENKLRIIYAGKALPNDRESLFWLNTKAIPEIEREEIKDKNILQLAVLSRIKIFIRPQGLNFNIEDVPNSLEFKKSQGNIIVNNPSPYYATLINLEADNEQLNSIMVPPMGTVMIKVSKPNYSQISYQTINDYGASTPKVTKQIGK

SEQ ID NO: 69089 - protein, 57 aa, Proteus mirabilis; identical to SEQ ID NO: 68568
  MISC_FEATURE (11)..(11): X=any amino acid

SEQ ID NO: 69090 - protein, 457 aa, Proteus mirabilis
MTSFADLHALPAEQLTNLNELGYLTMTPVQEASLPAILAGKDVRAQAKTGSGKTAAFGLGLLQRIDAKQFNTQSLVLCPTRELADQVANELRRLARFLPNIKILTLCGGVPFSIQRDSLIHAAHIIVATPGRLLDHLNKQTVTLADVKTLVLDEADRMLDMGFFDDISDIISQMSTQRQTLLFSATWPDEIAKISRKIQQDPVTIEINSPDELPAVEQQFYEISRYGKLGLLQKLLSHHQPNSCVVFCNTKRDCQDVYEALTESNQSVLALHGDMEQKERDQTLIRFANGSCRVLVATDVAARGLDIKALEMVINYELSHDPEVHIHRIGRTARAGESGLAISFCAPEEIPRANALEEMLNIKLDWQSAPSGLSITPLVATMATLCIDGGKKAKMRPGDILGALTGDLGFSGEDIGKINIHPTHAYVAVKQSIAKQVWKSLQQGKIKGKSVKVRLFR

SEQ ID NO: 69091 - protein, 164 aa, Proteus mirabilis
MRLTSKGRYAVTAMLDVALHSQQGPVPLADISERQGISLSYLEQLFSRLRKNELVASVRGPGGGYLLGREAGQIFVAQVISAVDESVDATRCQGNKEGCQGGDRCLTHTLWRDLSDRITSFLSSISLEELVNNEEVMDVADRQDNEKRHAINGRLQETIVNMRV

SEQ ID NO: 69092 - protein, 376 aa, Proteus mirabilis
MSYTTFSQVRNDQLQEPMFFGQPVNVARYDQQKYPIFEKLIEKQLSFFWRPEEVDVSRDRIDYNALPDHEKHIFISNLKYQTLLDSIQGRSPNVAFLPLISIPELETWVETWSFSETIHSRSYTHIIRNIVNDPSVVFDDIVENEEILKRARDISSYYDELINLTNLYHMFGEGTHQIKGKTVEVTLRKLKKQLYLCLMSVNALEAIRFYVSFACSFAFAERELMEGNAKIIKLIARDEALHLTGTQHMLNLLRSGQDDPEMAEIAAECEQECYDLFVEAAEQEKEWAEYLFSEGSMIGLNKEILCQYVEYITNIRMQAVGLKLPFKARSNPIPWINAWLVSDNVQVAPQEVEVSSYLVGQIDSQVDTDDLSNFEL

SEQ ID NO: 69093 - protein, 465 aa, Proteus mirabilis
MGQNVYQFIDLNRVEPTKKPLAVRKIEFVEIYEAFSAEQASAQADRCLDCGNPYCEWKCPVHNYIPNWLKLANEGRIIEAAELSHQTNSLPEICGRVCPQDRLCEGACTLNDEFGAVTIGNIERYINDTAFALGWRPSLSQVTMTDKKVAIIGAGPAGLACADVLIRQGVKPVVYDKHPEIGGLLTFGIPSFKLEKSLMVRRRELFSEMGITFCLNTEIGKDISLKTLTEQYDAVFLGLGTYQSLSGHFAHENAMGVYNALPYLIGNTRHLMGYAEDPQSPYIDLNKKHVVVLGGGDTAMDCVRTAIRQGATKVTCVYRRDENNMPGSKREVKNAKEEGGEFLFNRQPLDIEVDANNNVIGVRVIKTQTNGELKYIEGSEHILSADAVILAFGFKPAHYPWLDENNIQYASSGRIIINDDPLLPLQTTNPKVFAGGDIVRGSDLVVTAIAQGREAAEGILRYLSC

SEQ ID NO: 69094 - protein, 393 aa, Proteus mirabilis
MSSHDPRPLGGKLFTLAVRVFLPLAVLGFILIGKRLVLGLGDVSDLNGGYPWGIWIAFDLLIGTGFACGGWALAWAVYVCNKGEFHPLVRPALLASLFGYSLGGLSIAIDIGRYWNMPHFFMPQYFNVNSVLFETATCMTIYIMVMALEFLPALLERLGWKVSLRRLNKAMFFIIGLGALLPTMHQSSMGSLMISAGWKVHPLWQSYEMLPLFSLLTAFILGFTIVIFEGSLLKASRTINDDETPLFTKLTKIIEVLLITFLVLRWGEVIWNGKLSYIAKGDMFSWLFLAESALLFIPLVLMHLKNNRRSPRMLFVCALFMLVGAAMWRMNYSLVAYNPGNGYHYFPTASELLISIGFVAFEVTAYILIIRLLPVLPAQTESNIQLKKAEVKS

SEQ ID NO: 69095 - protein, 63 aa, Proteus mirabilis
MRDMQEVLSRWGAWSANEGNSVDYSSIAAGFKGLVPSSRRSRDECSDSDGLKINKAVLHLRKK

SEQ ID NO: 69096 - protein, 313 aa, Proteus mirabilis
MELIRGIQNIRAQHHGCVLTIGNFDGVHRGHQALLKHLKQEASRRGLPTVVMTFEPQPLEFFLPEKAPARLTRLRDKIKYLAECGIDYLLCVKFDKQFAAQTPEEFVSSLLVDKLGVKFLAIGDDFRFGKNRAGDFHFLQQAGARYGFEVANTESYCDKGLRISSTAVREALFNDDLALAESLLGHPYSVCGRVVHGNQLGRTIGFPTANIPMKRLVAPVAGVYAVDVYLADHQSPLAGVANIGSRPTVKGKGVQLEVHLIDVNMDLYGRRIDVVLRKKLRNEQRFASLDALKQQIANDVAAARDFLLQRSES

SEQ ID NO: 69097 - protein, 1485 aa, Proteus mirabilis
MLYQKTAEKENCGFGLIAHIEGKASHKIVRNAIHGLARMQHRGAILSDGKTGDGCGLLLQKPTRFFQLIAEENGWHLANNYAVGMLFLSQDNAIAAQCRQIVEEELQRETLSIVGWRKVPTNTDILGSIALSSLPSIEQIFVNAPAGWRINDIERRLFVARRRIEKRITDNDFYICSLSNLVTVYKGLCMAIDLPRFFTDLADLRMESSICLFHQRFSTNTTPKWPLAQPFRYLAHNGEINTITGNRQWARARAYKFHTPLIPDLQTAAPFVNESGSDSSSLDNMLELFLNGGMDIVRAMRLLVPPAWQNNPQMDDDLRAFFDFNSMHMEPWDGPAGIVLSDGRYAACTLDRNGLRPARYVITTDNIITCASEIGIWDYQPDEVLEKGRVGPGELMVIDTYQGRILHSAETDEDLKRRHPYKLWLERNVKRLIPFEQLPEPQATGERAFDDSLLATYQKQFAYSQEELETILHVLAENGQEATGSMGDDTPFAVLSQRPRLIYDYFRQKFAQVTNPPIDPLREAHVMSLATCIGREMNVFSEAEGQAHRLSFKSPILLYSDFQQLLNQESPYYSSITLDITYQPTENNLETALHILCETAQQAVNRGAVLLVLSDRNITQARLPIPAPMAVGAVQKALVDNNLRCDANIIVETASARDPHHFAVLLGFGATAIYPYLAYESLAQRVDKKILSGTYAQVMLNYRNGINKGLYKIMSKMGISTVASYRCSQLFEAVGLHDNVVKRCFDGVDNRINGADFSDFEQDLFNLSKRAWLTRYPLDAGGLLKYTHQGEYHAYNPDVVQALQKAVNSGDYADYQHYSQLVQQRPITTLRDLLALNDTTPIAIEDVEAESELFKRFDTAAMSIGALSKEAHEALAQAMNTLGGFSNSGEGGEDPARYNTNKVSRIKQIASGRFGVTPSYLMSADVLQIKVAQGAKPGEGGQLPGDKVTPYIAQLRYAVPGVTLISPPPHHDIYSIEDLAQLIFDLKQINPRALISVKLVSEPGVGTIATGVAKAYADLITIAGYDGGTGASPLTSVKYAGSPWELGLVEAQQALVANNLRHKVRLQVDGGLKTGVDIIKAAILGAESFGFGTGPMVALGCKYLRICHLNNCAMGVATQDETLRRQHFHGLPERVINYFRFIAQETRELMAQLGVRKITDLIGRTDLLSCLEGITSKQQKLSLTGLLETATSPTGKALYCQEHNDTYDKGELNQRIVAQTITGVEQKISQTHYFAIRNTDRSVGATLSGLIAKTYGESGLSATPIKLHFTGTAGQSFGVWNAQGVELTLVGDANDYVGKGMAGGRIVISPPVGSAFKAHQTTIMGNTCLYGATGGKLYASGLAGERFAVRNSGAIAVIEGVGDNGCEYMTGGIVCILGKTGINFGAGMTGGFAYLLDEDTTLSQRINNASIELLPVANYAILAEHLRGMIAEHVRLTGSQQGEKLLSQWEYWSQHFKLVKPKSSDVHALLGHPRRSVAELRVQAQ

SEQ ID NO: 69098 - protein, 554 aa, Proteus mirabilis
MQKLKFLRFSKEKVSLFLAVYIGLFLNLSVYIGRYGTQNSHNSLIESLYILGEVAVNIAFTFFLLRLISFCGTLFFKIVASFILLISVCASYYISFFDVVIGYGIIISTLTTDIDLSKELISPNVIIWIIGLSILPLALTWLCKKPEKNITQQQKKKIWIKNTVKMLVIALAVFAYLKTLDRNQKAYEIKNNLDLPSYSGGLSYAYLPTNWIIPLFQYAITQYDDHFNSQNIFDPADNFTYIPSKANEDVYVVFIIGETARWDHMGLFGYERQTNPLLSQEKNLIALKGISCDTATKLSLKCMFVRENGTENNDQRTLKENNIFSVLHQLGMTSELFSMQSELWFYNKLDLDNYAMKEMMTAKNSNFGKELDDTLLINEVADSVAHYSKGNHLVILHTKGSHFMYSQRYPNAFKKYQPECLNVDDECTKEQLVNAYDNSILYTDYFIDGVLNTLRDKKAIVFYTSDHGESISEKGGLHGTPKEIAPPEQFKVPFLVWMSDSYLAEPENKQLFDNLKRNQDNNRTFYHHNIFDSILGCLGYSSPDGGINNQNNLC

SEQ ID NO: 69099 - protein, 152 aa, Proteus mirabilis
MPNIKPFSLFPTLSDNLLSNRFDQIDRLFSQLTGSKPISSPTQTYNLKQIDDNHYELTVSVPGYQEDDLSVSLKGSRLLIEGKKEEKLEEDNDKWIHRGISQGQFTLQFDLGKNVKIEKADLSSGLLTIAIEYELPEEEKRQTIAIENKDKS

SEQ ID NO: 69100 - protein, 463 aa, Proteus mirabilis
MAKAAKRAFVCNECGADYPRWQGQCSACHAWNTITEVRLAATPSARNDRFSGFAGDAKGISRVQKLSEISLEALPRFSTGFKEFDRVLGGGVVPGSAILIGGNPGAGKSTLLLQTMCRLATEMKTLYVTGEESLQQVAMRAHRLGLPTTELNMLSETSIEQICLIAAQEQPKLMVIDSIQVMHMADIQSSPGSVAQVRETAAYLTRFAKTNDIAIIMVGHVTKDGTLAGPKVLEHCIDCSVMLDGETDSRFRTLRSHKNRFGAVNELGVFAMTEQGLREVSNPSAIFLSRGDEVTSGSSVMVVWEGTRPLLVEIQALVDHSMLSNPRRVAVGLEQNRLAILLAVLHRHGGLQMSDQDVFVNVVGGVKVTETSADLALLLSLVSSFRNRPLPRDLVIFGEVGLAGEIRPVPSGQERIAEAAKHGFKRAIVPNANMPKKNPPDMKVYGVKKLSDALSVLDDLDDF

SEQ ID NO: 69101 - protein, 844 aa, Proteus mirabilis
MNFNNQLHLISYRYSLPFCVALGIGVITTSSFAAEEAEFDPSFLHSVQGKNAIDIRRFNYGNPIPEGKYYADIYLNNEWKGKANVQYLYTDNANTSTLCLTPELLSLIDVVKGTVPENSYKATCYPASEGLPSAKFHFDLSTLKLNIEIPQAQVNTRPRGYIAPAQWQSGVPAAFVNYDVNYYQYNTPDINNEQTYLGLKAGLNLWGWAFRHRGGESWNNGHSTGYQNIETNVTHDIARLRAQFTLGDFYTNGELMDSLSLRGIRLASDERMLPNSLRGYAPIVRGIANSNAKVTIYQNAHILYETTVPAGPFVINDLYPSGYAGDLLVQITESNGQTRTFTVPFASVAQLIRPGFSRWQMSVGRYRYANETYHDLIAQGTYQYGLTNDITLNSGLTTSSKYTAGLAGVAFNTPIGAIASDITLSRTTFNHSNVTRKGYSLHTSYSVNIPTTSTNITLAAYRYSSKDFYHLKDALLANHSEFIDDVSIKSAAFYRPKNQFQVSINQELGEKWGNIFLTGTTYNYWEHKGSRNEYQMGYSHFWKKLGYQIGFSQSRDNEQQRRDDRFYVNFTLPLGERVQSPIFSTVLNYNKGEKNSIQTSISGIAGEDNQFSYGISGNSQESGPSGYAMNGGYRSPYVNVTATVGQDTQHNRQMSLGASGAVVVHPYGVTLSNDLSDTFTIIHAKGAQGAVINNAPGSRLDFWGNGIVPYVTPYEKNQISIDPTNLDLNVELSATEQKIIPRANSATLVTFNTQTGRSLLFDIRMPDGSTPPMASEVLDEHKQLVGYVAQAGRLFTRGLPKQGQLDVIWGPNHDDKCSFTYHATRNETDMRPQTIPVQCIPHSN

SEQ ID NO: 69102 - protein, 183 aa, Proteus mirabilis
MDALTLLLNRRSASRLTTPAPNNQQLEAILQAGMRAPDHGALKPWHFVVMKEDGIERFSQLLHKAAVVSQLGAEVEEKAKNAPFRAPLIITVIAKVKAHPKVPEWEQIVAAGCCVQAMQMAAVAQGYSGIWRSGSWTHDPVVRAGLGCGEHDHIVGFLYLGTPALKAPTTVSPADLTDFVTYF

SEQ ID NO: 69103 - protein, 221 aa, Proteus mirabilis
MLLGSGLLLIVPIVVLILGWQWQPSAHPLGGESTLWIANSAAKPWGALTILLCLVLLFFILKLPKKAFIQLAIIMVATLMLGQLIKVAVKNSVKEPRPYVVWVSNQLSISPEHFYQVSRPEREQLLHNGLSHSSLIPQWQLSHWRAETGYAFPSGHSLFSATLALFVFVLCMLRRHYFLASLGILWGIDVTVGRIILGMHWASDVIVGILISAGWCGVHFG

SEQ ID NO: 69104 - protein, 545 aa, Proteus mirabilis
MKTNYIFVTGGVVSSLGKGIAAASLAAILEARGLNVTMMKLDPYINVDPGTMSPIQHGEVFVTDDGAETDLDLGHYERFIRTKMTRRNNFTTGRVYSEVLRKERRGDYLGATIQVIPHITNEIKERIIRGGEGHDVVLVEVGGTVGDIESLPFLEAIRQMAAEVGREHTFYLHLTLVPYLAASGEVKTKPTQHSVKELLSIGIQPDALICRSDRVIPANERAKIALFCNVPEKAVISLKDVDSIYKIPALLKSQGLDDYICKRFSLDCPVANLSEWEQVIYEEANPEGEVTIGMVGKYVELPDAYKSVIEALKHGGFKSRVAVNIKLIDSQDVETRGVEILKGLDAILVPGGFGERGVEGKIMAARYARENKIPYLGICLGMQVAMIEFARNVANMEDANSTEFAPDCKYPVIALITEWRDENGNLEVRTENSDLGGTMRLGAQPCHLSGDSLVRTLYGKNTITERHRHRYEVNNLLLKRIEDAGLRIAGRSVDNKLVEIIENPNHPWFVACQFHPEFTSTPRDGHPLFAGFVKAAFDYQKGLLK

SEQ ID NO: 69105 - protein, 274 aa, Proteus mirabilis
MEKYVVMGNPIEHSQSPFIHQLFSKQSGIDYEYGRLLVPLGEFDKVATQFFSQGGRGANVTVPFKEDAFRFVDKLTQRAQACGAVNTILKLDDGTLLGDNTDGQGLILDLARLDFIIPGKILSVLVIGAGGATRGILLPLLNYNCDITLTNRTVEKAQQLAQEFSQFGTIRASAPQNVTDKHYDLIINASSSSMTDDIPPIPDSAYGFKTACYDLYYKAGMTSFLYHALKNGSTRLSDGLGMLVGQAAYAVELWYERVPDINPTINILRENLNK

SEQ ID NO: 69106 - protein, 410 aa, Proteus mirabilis
MDHEIIDNMKRLQAFKFQLRPNGQQEREMRRFAGACRFVFNRALARQNEEHEAGNKYIPYTKMASWLIEWKSDTETQWLKEAPSQPLQQSLKDLERAYKNFFQKRTAFPRFKKRGKNDAFRYPQGVKLGQSNSRISLPKLGWMRYRNSREVVGEVRNVTVSQSCGKWYVSIQTEYEATEPQHESTSIVGLDAGVTKLATLSDGTVYPPVSSFKVNQRKLARLQRKLSRKIKFSANWQKQKRKIQRLHTHIANIRKDYLHKVTSEISKNHAMIVIEDLKVSNMSKSAKGTTERHGRNVKAKSGLNRSILEQGWYEMRRQLEYKQLWRGGQVVAIPPAYTSQKCACCGHTAKENRQSQSQFECLECGYTANADINGARNILAAGHAVLACGGRVQSDRPSKQEPAEVIQTSV

SEQ ID NO: 69107 - protein, 504 aa, Proteus mirabilis
MSKDNKKAGIEPKVFFPPLIIVGILCWLTVRDLDASNEVINAVFSYVTNVWGWAFEWYMVIMLGGWFWLVFGRYAKKRLGDEKPEFSTASWIFMMFASCTSAAVLFWGSIEIYYYISSPPFGMEGYSAPAKEIGLAYSLFHWGPLPWATYSFLSVAFAYFFFVRKMEVIRPSSTLTPLVGEKHVNGLFGTVVDNFYLVALILAMGTSLGLATPLVTECIQYLFGIPHTLQLDAIIISCWILLNAICVAFGLQKGVKIASDVRTYLSFLMLGWVFIVGGASFIVNYFTDSVGTLLMYMPRMLFYTDPIGKGGFPQAWTVFYWAWWVIYAIQMSIFLARISKGRTVRELCLGMVSGLTAGTWLIWTILGGNTLQLIDQNILNIPQLIDQYGVPRAIIETWAALPLSTATMWGFFILCFIATVTLINACSYTLAMSTCRSMKEGAEPPLLVRIGWSVLVGIIGIILLALGGLKPIQTAIIAGGCPLFFVNIMVTLSFIKDAKVHWKD

SEQ ID NO: 69108 - protein, 137 aa, Proteus mirabilis
MSQPSQESAVRLDKWLWAARFYKTRAIARTMIEGGKVHYNGVRGKPSKNVEVGAEIRLRQGNDERTVTVLMVSAQRLGAAQAQLLYCETPESIAKREKIALARKMNALTMPHPERRPDKKERRTLLRLKQTNLPGSD

SEQ ID NO: 69109 - protein, 139 aa, Proteus mirabilis
MKKGVLLNSSISSVIARLGHTDKITIADAGLPIPSSVERIDLALTQGIPDFMSVLQTITHEMQVEAVMLAIEIKNINPLLFSEITRYLHLLEQQQKKPIEIIYVTHEEFKTQLPDNKAVIRTGECSPYANIVLFSGVTF

SEQ ID NO: 69110 - protein, 513 aa, Proteus mirabilis
MQLNSTEISELIKQRIAQFNVVSEAHNEGTIVSVSDGIIRIHGLAEVMQGEMIALPGNRFAIALNLERDSVGAVVMGPYADLAEGMKVKCTGRILEVPVGRGLLGRVVNTLGEPIDGKGAVEHDGFSPVEMIAPGVIDRQSVDQPVQTGYKSVDAMIPIGRGQRELIIGDRQTGKTALAVDAIINQRDSGIKCIYVAIGQKASTISNVVRKLEEHGALENTIVVVASASESAALQYLAPYAGCAMGEYFRDRGEDALIIYDDLSKQAVAYRQISLLLRRPPGREAYPGDVFYLHSRLLERAARVSAEYVENFTNGEVKGKTGSLTALPIIETQAGDVSAFVPTNVISITDGQIFLESNLFNAGIRPAVNPGISVSRVGGAAQTKIMKKLSGGIRTALAQYRELAAFSQFASDLDDATRKQLNHGQKVTELLKQKQYEPMSVAQQSLSLFAAERGYLEDVEISKVVPFEAALLAYASREHADLLKEINQTGTYNEEIEAKLKGVLDNFKATQSW

SEQ ID NO: 69111 - protein, 282 aa, Proteus mirabilis
MQHQNTQKKILRTICPDAKGLIAKITNICYKHQLNIVQNNEFVDHRTGRFFMRTELEGIFNDETFLADLDDALPQGSQRELNTAGRRRIVIMVTKEAHCIGDLLMKSAFGDLDVEIAAVIGNHDTLKHLVEQFGIPFHLISHEGLTRDQHDEKLIAQIDQYKPDYVVLAKYMRVLTPAFVQHYPNQIINIHHSFLPAFIGARPYHQAYERGVKIIGATAHYVNDNLDEGPIITQNVINVDHTFSAEDMMRAGRDVEKNVLSHALYWVLSQRVFVYGNRTIIL

SEQ ID NO: 69112 - protein, 375 aa, Proteus mirabilis
MFKYSFIAVIVSTVLLSACADSHQKSAEKKPVTSEIANIATSAPARWKQIDVVSLEQAFPKQSRTPAQFPAYVDALKQKAAELGYKPETINFAFSEIHFIDRVVKSDRNQPEKKITLDVYLPRVVTKGRIAEGAKLYQANQQTLAQISNQYGVPANYIVALWGLESGFGRVQGKEDVISALATLAFEGRREALFSRQLMAALEIIENGHLPVGQRLKGSWAGAMGQTQFMPSSFLTYAADGNGDGNIDIWNSREDAFASAANYLATEGWQRDLPWGEQVSLPANFNQQLEGIKTEQQKTVAQWKALGVQLPANSQLSDDMKVWLIIPDDDLHRSYLVTQNFRTIMHWNSSYFFALSIVTMADGVANKINTLPTQH

SEQ ID NO: 69113 - protein, 397 aa, Proteus mirabilis
MKHTLLKTTAIAMALSVGVVQATEYKASTAEHPIKIVNLDALENQVKENMDKGAFGYIRGGAEDENNLRSNTNAFNKKYIMPRALQGIEFSDLNLKTEFLGIKLDTPIIQAPMAAQGLAHQQGEVATAKGMAKAGSIFSLSTYGNKTIKEVAQAQPGYPFFFQLYMSKNDAFNQYILSQAKQYGAKGIILTVDSPVGGYREDDIKNSFQFPLGFANLEAFAKISDDKSKTGKGSGISEIYAQAKQAFTPADIQYVKKMSGLPVIVKGIESPEDADTAIKAGADAIWVSNHGGRQLDSAPATIDVLPAIAKVVNKRVPIVFDSGVRRGSHVFKALASGADVVAVGRPILYGLNLGGAEGVNSVIEQLNKELRINMMLGGARNVKEIQATHLYTDADFK

SEQ ID NO: 69114 - protein, 327 aa, Proteus mirabilis
MKTPIISVIVPMFNEASRITRLLESLLCQTFHDFEVIIINDGSTDNSVDIAMLYCQQDNRFHLYHQTNQGLSSARNTGLKYAQGDWIVFFDSDDFIKPQLLAHWHQLACEQHIDVLIGNGERYDVHNPQKHQTTIHQRQPYQQVISGQEWVIHAVTQHQWPHFVWLQFIRHEIIKKHHLRFIDGLYHEDILWTTQLALVTQRIGFDDQPLYYYCANPNSITRKPNPQKEAKRAQSYLQIVIQLLQLADKQHQPLLANALRQQALREFGSFFILFRKRCDTKNQTIIAQQFRTYHLFPALNKGAQNWRQRWFICRVYCVLYWHRWKKR

SEQ ID NO: 69115 - protein, 848 aa, Proteus mirabilis
MSKKTLAIIGNGMVGHRYIEELIDKGGNETFNIIVFCEEPRIAYDRVHLSSYFSHHTAEELSLVKPGYYEKHHIEVLVGERVITINREEKVVHTNTGRCVSYDKLIMATGSYPWVPPINGNNSPDCFVYRTIEDLNAIEACARLSRKGAVIGGGLLGLEAAGALKSLGIETHVIEFAPTLMAEQLDSMGGEQLKRKIERMGVKVHTAKNTQAILSTGENARKTLQFADDSSLEVDFVVFSTGIRPKDKLARQCSLDIAPRGGIVINDYCQTSDADIYAIGECASWHNQTFGLVAPGYKMAQVAVDHLLGQQTAFQGADLSAKLKLLGVDVGGIGDAHGRQEGCRSYIYLDEGKEIYKRLIVSEDNKYLLGAVLVGDTEDYGNLLQLALNTIELPEHPDTLILPAHAGSKPAIGVDSLPETAQICSCFDVSKGDIIQAIERGCHTVAAIKAETKAGTGCGGCIPLITQVLNAELTKQGIEVNHHLCEHFHYSRQELYHLIRVEGLKSFDELLKKHGQGYGCEICKPTVGSLLASCWNDYILRDDLVALQDTNDNFLANLQKDGTYSIIPRSPGGEITPAGIIAIGQIAQEYNLYTKITGSQRMAMFGAQKQDLPAIWQKLIAAGFETGHAYAKAIRMVKTCVGNSWCRFGVGDSVGLGVFLEHRYKGIRTPHKMKFGVSGCTRECSEAQGKDVGIIATEKGWNLYFGGNGGMKPRHGDLFAADLDEETLIHYIDRFMMFYIRTADKLQRTSVWLESLEGGVEYLREVIIHDKLGLNAQLEKELKVLQERVACEWQETLDSPQALKRFAHFINNPMPDPNIQMVKERAQHRPARVHERIDIKMVTEETQS

SEQ ID NO: 69116 - protein, 418 aa, Proteus mirabilis
  MISC_FEATURE (415)..(415): X=any amino acid
MSKVIGSLEKVLLPFAVKIGKQPHVNAIKNGFIRLMPLTLAGAMFVLINNVFLSFGEGSFFYSLGIRLDTSTIETLNGLKAIGGNVYNGTLGIMSLMAPFFIGMALAEERKVDPIAAGLLSIAAFMTVTPYDAGGAYAVGANWLGGANIISGIIIGLVVAEMFTFIVRRNWVIRLPDSVPASVSRSFSALNSWFYYFINYGNYLLGISALGTHFHQIILDSISTPLASLGSVVGWAYVIFTSLLWFFGIHGSLALAALIRYYDTLGIRNVSIYTEYGSVEAALAAGKTFHLWAKPMLDSFIFLGGTGATLGLILAIFIASRRADHRQVAKLALPAGLFQINEPIIFGLPVIMNPVMFIPFILIQPILAAITVTAYYLGIIPPVTNIAPWTMPTGLGAFFNTNGSIAALLLHSLTXLLQ

SEQ ID NO: 69117 - protein, 455 aa, Proteus mirabilis
MGTSVFDSVLLKNLWSTEEMRTIFSDKTRMQNWLDYEAALAIEQAELGLIPQKAAEVIVQSAKLEKLDMDYVLEQVRLTRHPLVPTIRGLEYACSEHYGEYVHFGPTTQDVIDTGLVLQLKAAHQTFLRDIKILGRSLLSLSEKHRNTPMVGRTLALQALPITFGHKTAIWLTELARHYQRLKEVEPRLFVGSVVGAVGTKASLSDKADELEKRVLKRLGLGIPEISWQPARDRFSEYGMLIGLISGTLGKIANEILILAHNEIDELSEPFGKGQVGSSTMPHKRNPAIVENAACVSNTLKANLSVLTDMMKHQHERDGAIWKMEWKIMPEMCLMLSVILDNMKTVLGGLNVHVEKMRHNMDILGGFMLAERVMFALSDKAGKQTAHEIVYEASMSGQEEGITFVEAINRDTRIRDHISQEELNALLDPTTYVGNAPEQVDRVVAQTKASGWLND

SEQ ID NO: 69118 - protein, 197 aa, Proteus mirabilis
MQKVVLATGNPGKVTELASLLADFGLDIVAQTELGVGSVEETGLTFVENALIKARHAAKVTGLPAIADDSGISVDALGGAPGIYSARYAGIEATDQQNVDKLLEAMKDVPAEKRQAQFNCVLVYLRHENDPTPLIFHGIWQGVLTQEMQGDGGFGYDPIFFIPELNCTAAQLTREQKNQYSHRGKALKLMLDALKNA

SEQ ID NO: 69119 - protein, 320 aa, Proteus mirabilis
MNTENKTEEVKLTAGQLLRQAREKAGLTQQTVADRLCLKLTTVCEIEADTISSGIAPTFLRGYMRSYAKLVGVPESAILGLIDQQAPIKQVKVTTTQNYSLGKRHKKREGWLMKLTWVIVIAMIALVGLWWWQGHQADQQELVSMASQDIGQNSPQENTNTIESPLSTLDNNSPSSEGENVQVPASPLVDNQANKVAEPSVTNATPEAEVKTVPLPVSPLTTSTTSRADSAEGNSTPAPIVENQLVLMFDGECWLEIRNAQNKVLFNGIKKAGDRLEFNGEQPYKLKIGAPSVTRLQFNGEAVDLSRFTGKIAKITVPSA

SEQ ID NO: 69120 - protein, 136 aa, Proteus mirabilis
MSDTQRPQGPASGVLNSLSRIGAVIVGMVETRLKLIAIELEEEKITLIQLILMAGITLLLTAFGLMSLLILLFWVIPPEYRIHALAITTAILLVGALIGAIMTLRKARNSTLLGDTRQQLELDKRLLEQYRDEQTK

SEQ ID NO: 69121 - protein, 518 aa, Proteus mirabilis
MAKKKFSESIQRFGRTLLLPIGVLAPIGMILGISGALVQSYMIARFPFLGNETVNALLVSIRSIAGVVFDNIPLLFAMGVAYGMSHKDKGIAVFASVVGYLTLISTINIWLVLTGKLADPAVMTQVGQIKVLGIQTMNISAAGGIITGLIAAWATDKFYNLELPTAFAFFSGKKSVAIIMVGLMIGVGALLPFIWEVLVMGLTKLSAVFLSPVGPFFTAGGERLFIPFGLHHVWNVLFRFTEAGGSYVIDGQTYVGVVPAMTEVLFNQGPSSEYWLMMPSLTRFMAQQQMLVTLFLFPAIALAIYRTSKKENRAEVKSMLVTMVLTAMLGNVTEPLEFTFVFIAPLLYLIYAIIVGIGAVLLSFAGVAIGYIRGTVFDFTIFGLLYEHTNWIYLVIIGLGLAVVTYFIFYWAIIKFDIKTPGREESSNMKNTLIKEKRYGEIAEILIRALGGKQNIRNVDNCITRLRVDIGEVNQIDKELMLESGCTAFFIPAANHVHIVYGPKVEFVRNAVDEAMKK

SEQ ID NO: 69122 - protein, 282 aa, Proteus mirabilis
MNYKQWLHQAALQLIDSDSPKRDAEILLGHVTKRARTYLIAFSETVLLEDELVQLSSLLARRIKGEPIAYLVGEREFWSLPLKVSPATLIPRPDTECLVEKALEKLSAQASRILDLGTGTGAIALAIASERSDCRVLGVDFQPEAVALAIENAQHLALSNVEFTESCWFSSLSGYQFDMIISNPPYIDEEDEHLYQGDVRFEPLTALVAADHGFADIELIITNARQFLANNGWVLIEHGWQQGERVRNIFIDKGYCCVETFRDYGGNERVTVGRWNDDRNHS

SEQ ID NO: 69123 - protein, 309 aa, Proteus mirabilis
MVKVYAPASIGNVSVGFDVLGAAVSPIDGQLLGDCVTVEAAQEFQLHSKGRFVSKLPSDTKQNIVYQCWELFCEKLGKQLPVSMTLEKNMPIGSGLGSSACSVVAALVALNEFAHKPFSESHLLLMMGELEGRISGSVHYDNVAPCYLGGLQLILEQNDIICQPVPAFDDWYWVMAYPGIKVSTAQARAILPKQYDKADIINHGRYLSGFIHACHTQQPKLAASLMKDVIAEPYRTQLLPGFDKAREAALQKGALACGISGSGPTLFSITDSLAIAQDVAQWLQQHYVQNDEGFVHICRLDTRGAREIG

SEQ ID NO: 69124 - protein, 214 aa, Proteus mirabilis
MKNSKFIVIEGLEGAGKTSAIQTVVDTLKQQGITDLAFTREPGGTPLAEKLRELIKQGIEGEKVTDKAELLMLYAARVQLVENVIKPALAQGKWVIGDRHDLSSQAYQGGGRGIDKALMKSLRDTVLADFKPDLTLYLDLDPAVGLARARARGELDRIEKESMDFFYRTRERYQALAKEDASIITIDASQDIDKVQADIRDVLNQWLTQENSAL

SEQ ID NO: 69125 - protein, 241 aa, Proteus mirabilis
MATVSMRDMLQAGVHFGHQTRYWNPKMKPFIFGARNKVHIINLEKTVPMFNEALVELNKIASRKGKILFVGTKRSAVEAVKEAAESCDQFYVNHRWLGGMLTNWKTVRQSIKRLKDLESQSQDGTFDKLTKKEALMRSRELGKLENSLGGIKDMGGLPDALFVIDAEHEHIAIKEANNLGIPVFAIVDTNSDPDGIDYIIPGNDDAIRAVKLYLTAAATAVREGRSQDLAVQAEEGLVEAE

SEQ ID NO: 69126 - protein, 354 aa, Proteus mirabilis
MLEMNFKQTLGSLCLEVNTQLPTESITAVFGLSGAGKTSLINVIGGLTKPDSGHIVLNNHTLVDIEKKIYLPPEKRKVGYVFQDARLFPHYTVKGNLLYGMSPTMKVQFDRIIYLLGIEHLLSRFPITLSGGEKQRVAIGRALLTAPDIMLMDEPLASLDLPRKRELLPYLEKLSQDVQIPILYVSHSLDEIIRLADNVIVMDAGKIKAMGKLEDVWASSALRPWLQKETLSSVANVMVVEHHSHYAMTATAFGNQVLWLPQIEAKIGRDVRVRIDASDVSLTTTRPSNSSIRNILHMKVVEMIKHDDQVDVKLVNDGNYLWARITPWARDELNIQEGQWLYAQIKSISLSRHL

SEQ ID NO: 69127 - protein, 252 aa, Proteus mirabilis
MMASKHLFMVTTTLLTGMVFTSQVGATIALDRTRIIFNGADKSVSLSISNQNKELPYLAQGWLENEQGEKIETPLIVLPPIQRIEPGNKSQVKVQSLPDIAQLPQDRESVFYFNLREIPPRSDKPNVLQIALQTRIKLFYRPKSIYATQTDLSNPWQEKITLTKQGESYVVHNPTPYYITIVDGLTDLKGESLEGFTPIMVAPRGQEKLNLTVSTLGASPVLSYINDYGGRPRLKFSCDSRECKVIETDQGN

SEQ ID NO: 69128 - protein, 301 aa, Proteus mirabilis
MSSVVRKVRKAVIPVAGLGTRMLPATKAIPKEMLPVVDKPLIQYVVNECIAAGINEIVLVTHSSKNSIENHFDTSFELEAILEKRVKRQLLEEVQGICPSHVTIMQTRQGIAKGLGHAILCAKPLVGDEPFAVILPDVILDRYSADLTKVNLKEMLSHFEQSGASQILVEPVPEEEVSNYGIVDCMGEHLQPGDSKPITRVVEKPKKEEAPSNLSIVGRYVLSENIWPLLAKTAPGAGDEIQLTDAIAMLIEKEPVEAYHLQGKSHDCGNKLGYMKAFVEYGLQHEEFGEEFTKWIKSLQA

SEQ ID NO: 69129 - protein, 417 aa, Proteus mirabilis
MLKREMNIADYDPELWNAMEGEVTRQEEHIELIASENYTSPRVMQAQGSQLTNKYAEGYPGKRYYGGCEYVDVVEQLAIDRAKALFGADYANVQPHSGSQANAAVYMALLKPGDTVLGMNLAQGGHLTHGSPVNFSGKLYNIVPYGIDEAGKIDYQDIAEQAKKHKPKMIIGGFSAYSGLVDWAKMREIADSVGAYLFVDMAHVAGMIAAGVYPNPVPHAHVVTTTTHKTLAGPRGGLILAKGGDEEFYKKLNSAVFPGSQGGPLMHVIAGKAVALKEAMEPEFKVYQQQVAKNAKAMVDVFLARGYKVVSGGTENHLFLLDLVDKDITGKDADAALGRANITVNKNSVPNDPRSPFVTSGIRIGSPAITRRGFKEAEAKDLAGWMCDVLDNINDEANIEKVKQKVLDICAKFPVYA

SEQ ID NO: 69130 - protein, 627 aa, Proteus mirabilis
MSMKDQETRGFQSEVKQLLQLMIHSLYSNKEIFLRELISNASDAADKLRFRALSDAALYENEGELHVRIATDKEKRTLTISDNGIGMTRDEVIDNLGTIAKSGTKAFLESIGQDQAKDSQLIGQFGVGFYSAFIVADKVTVRTRAAGQPADKGVFWESQGEGDYTVADIEKADRGTEITLHLREGEDEYLDDWRLRSIISKYSDHISLPVEIETKNEEDGTVTWEKINKAQALWTRNKSEISDDEYKEFYKHLSHDFADPLCWAHNRVEGKQEYTSLLYVPSKAPWDLWNREHQHGLKLYVQRVFIMDEAEQFMPNYLRFIRGLVDSNDLPLNVSREILQDSSVTRNLRSALTKRALQMLQKLADNNPEEYQTFWKEFGLVLKEGPAEDHANIEAIAKLLRFASTHNDSDAQTVSLADYVSRMVEGQDKIYYITADSYAAAKNSPHLELFRKKGIEVLLLSDRIDEWMMNYLTEFDGKSFQSVSKADESLDKLADEEKQAQQEETDKQLAPFVERVKTLLGDKVKEVKLTHRLTDTPAIVTTGADEMSTQMAKLFAAAGQQVPEVKYNFELNPNHPLVKQTAELTDETQFADWINLLLDQALFAERGTLEDPNQFIRLVNQLLAKNA

SEQ ID NO: 69131 - protein, 167 aa, Proteus mirabilis
MLNIVLFEPEIPPNTGNIIRLCANTGFHLHLIQPLGFTWDDKRLRRAGLDYREFADIKQHHDYYAFLESEGLSPDNAQSPTGARLFALTTKGTPAHSNVSYQDGDYLLFGPETRGLPPYVLDNMPTQQKIRVPMLADSRSMNLSNTVAVVVFEAWRQLGYPGALLRD

SEQ ID NO: 69132 - protein, 408 aa, Proteus mirabilis
MNITTPNSINEVSRKTAWIRVIILSFAAFVFNTTEFVPVALLSNISESFAMVPAQTGLMITIYAWVVALMSLPLMIMTSKVERRKLLIILFIVFILSHVLSGVAWDFNSLIVGRVGVAFAHAVFWSITASLAIRMAPHGKKAQALSLLATGVALATVLGLPLGRVVGQWLGWRATFLGIGVLALITMLALMRYLPLLPSEHSGSLKSVPILLKRAPLVGIFLLTVIAVTAHFTAYSYIEPFVIDIAKLDENFATIVLLIFGGAGILGSVLFSRYSTKMPTSFLFFALILLTVCLSTLMMSSQHTLTFIALIIFWGIGFMCIALGLQVKVIDLAPDATDIAMSIYSGIFNIGIGAGALLGNQVILHAGMPNIGYAGTALSIIALAWCGFIFTRYRVAMGGKPREKNRLH

SEQ ID NO: 69133 - protein, 345 aa, Proteus mirabilis
MSTLKRWTLKEARALFDMPFLDLVFQAQQVHRQHFDPSQIQVSTLLSIKTGACPEDCKYCAQSARYKTGLEKERLMEVQQVIESAKKAKAAGSTRFCMGAAWRNPHERDMPYLEQMVKEVKALGMETCMTLGKLDDSQASRLAQAGLDFYNHNLDTSPEFYGSIITTRTYQDRLDTLDKVRNAGIKVCSGGILGLGEEVKDRAAMLVQLANLPQPPESVPINMLAKIKGTPLADNEDVDPFDFIRTIAVARIMMPRSYVRLSAGREQMSEQTQAFCFMAGANSIFYGCKLLTTTNPTEDKDHQLFRKLGLNPERLSVSMGDQQQEDVLLQAVAEKGTEQFYNAAL

SEQ ID NO: 69134 - protein, 779 aa, Proteus mirabilis
  MISC_FEATURE (206)..(206): X=any amino acid
  MISC_FEATURE (210)..(210): X=any amino acid
MELTPREKDKLLLFTAGLVAERRLAKGLKLNYPEAVALISCAIMEGAREGKTVAQLMSEGRTVLTAEQVMEGVPEMIKDVQVECTFPDGTKLVSIHSPICVGNNMIPGEIRVNAALGDIELNAGRETKTIQVANHGDRPVQVGSHYHFYEVNEALRFAREETLGFRLNIPAGMAVRFEPGQSRTVELVAFAGKREIYGFHGKVMGXIGEXEKMKTISRQAYADMFGPTTGDRLRLADTELFLEIEKDFTTYGEEVKFGGGKVIRDGMGQSQVVSAECVDVLITNAIILDYWGIVKADIGIKDGRIVGIGKAGNPDVQPNVDIVIGPGTEVVAGEGKIVTAGGIDTHIHFICPQQAQEGLVSGVTTFIGGGTGPVAGTNATTVTPGIWNMYRMLEAVDELPINVGLFGKGCVSQPEAIREQITAGAIGLKIHEDWGATPMAIHNCLNVADEMDVQVAIHSDTLNEGGFYEETVKAIAGRVIHVFHTEGAGGGHAPDVIKSVGEPNILPASTNPTMPYTINTVDEHLDMLMVCHHLDPSIPEDVAFAESRIRRETIAAEDILHDMGAISVMSSDSQAMGRVGEVILRTWQCAHKMKLQRGTLAGDSADNDNNRIKRYIAKYTINPALAHGIAHTVGSIEKGKLADIVLWDPAFFGVKPALIIKGGMVAYAPMGDINAAIPTPQPVHYRPMYACLGKAKYQTSMIFMSKAGIEAGVPEKLGLKSLIGRVEGCRHITKASMIHNNYVPHIELDPQTYIVKADGVPLVCEPATELPMAQRYFLF

SEQ ID NO: 69135 - protein, 266 aa, Proteus mirabilis
MYSIVASDLDGTLLSPNHLLTPYTKETLHLLIEKGIHFVFATGRHHIDVAQIRDGLGIDAYMITSNGARVHNTQGTLIFSQDLEPEIVYDLALMVFDHPDIATNIYSSDDWYINKETPELKEFFKESVFNYRLFEKTGFPTTQVCKVFFTSEDHELLVELEKKINQRWGNKINASFSLRNCLEIMAGGVSKGEALQKVAKLMQHSVKDAIAFGDGMNDKEMLQMAGKGCIMQNAHQLLKDLLPDMEVIGSNVDDAVAHYLRKLYQV

SEQ ID NO: 69136 - protein, 221 aa, Proteus mirabilis
MKSIILFFISLFIINISYAGVIISGTRVIYNEGNKNVSINVKNPDKMPYLIQSWIDDFEEKKQSKFTITPPLFRLNPDKENTLRIFLTEEGLPSDQESLFWLNIKTIPATEKTENSLQIAFKTQMKLIYRPKSLKDVNFEEEQKKLSWSKERGKVIVYNPTPYFMNFQTIKFNGKLVDDVSYAKPFSTKSFDINDNNEHGLISWELINDYGANVDLSEVRI

SEQ ID NO: 69137 - protein, 434 aa, Proteus mirabilis
MSIKSFSTLAIAIALFTSPTYAKTEIEWWHAMGGALGQKVNQIASDFNASQSEYVIKPVYKGTYPETMTSAVAAFRAKNQPAIVQVFEVGTASMMGAKKAVFPVYQLMEKTNEPFDPNSYLSTVTAYYTTSDGKMISLPFNSSTPVLYYNKALFKQAGIEQPPKTWKEMGAVSQKLLDAGVKCGFTTTWQSWTQIENFGARNNLPIATKNNGFDGTDTSFLFNQAPFVAHIQRMADWSKSGIFKYGGRQSDAMPLFYTQECAMVMESSAGFAGIKENMKGIDIGVSQLPYDDTLVDKPANSIIGGASLWVMAGRPDAEYNGVAKFFTYLSSPEVQADWHQATGYLPVTKAAYALTQQQGFYQQNPGADTAILQMTTSDSTANSKGLRFGNFLQTREIVDEELEKVWSGKQSAQAALDNAVKRGNEQLRRFERTQ

SEQ ID NO: 69138 - protein, 1128 aa, Proteus mirabilis
  MISC_FEATURE (4)..(4): X=any amino acid
LFDXIILFRQYLLSLILFVLLGNILFTPAKAETVSNNLPTKESIQNQLNLLNKRSDLSAEDKLTIGDLEQALLLLDNIQQLEKKADDYNKTVEQLPEKLRSIQNQLSQLKQKIANKEVDDYRQSLESLPLATLESQLEEVLQSLAKAQEDLANYSNELIVLQTQPERAQSVLFNNSERLQQIRIALNKSSADKAQMRSSSVQLLQLEQYYLQQQNSFQKRTLQSNVQLQSLLQLQRDYSSAYIDLSQEHAQLLQEILSDKRLDSSEEVAKEAQTAELSNQAIKNNAFYLAQADINKKLSDKLIITTQNNNELNRHSLMVKNRLDRAIQSERNLKEQIDVLKGSLLLSRILFEEQIELPDDIFINKLPDKIADLRLEQFEINKQRDQIFQPNLYIDQLMQEYQAAHPEITDKNELKELHNALLQLIDARRDLLDKLNNQLGSQISESINLQMDQQQLRSVVSSLESTLAQQIFWVSSNKPINLSWFSTFPEQAVAEFQSFKLNWSNENLLTGAKKSYPVLIALVLFSSILIWQRKKFDKQFDKLSADINKLNKDTQLHTPLALGIVFLKTLPLSCIVLAIGYWLINSFNVQQEFIWSFTWQFAVFWLMFEWSYRLMSDNGVAVNHFKIPLERVQQNRKRLLRLSLPMLPIILLSAYGINNPLLLVGDVIGQLVTIISLFFISLCALPFCREMWQEKGNHVVRTVVITLLTFSPLLLMGLVIFGYYYTALRLANRWIDSLYLLMLWFIAYHASLRGLTVAARRLAYRRALERRQAMLKEKKEGDDNTLEPIQEPPMDMEQINQQSLRLTTMILFIIFASSFYGIWSDFITIFTYLDGITLWHYNLPTELGNVVKAVTVADLLLSFAIMAISWFMIRNLPGLLEVLILSRIKLQQGASYAITTILTYIIIAIGTIVSLGILGVAWEKLQWLAAALTVGLGFGLQEIFANFVSGIIILFERPVRIGDTVTIGSYSGTVSRIRIRATTVTDFDRKEVIIPNKAFVTERLINWTLSDTVTRIIIQVGVAYGSDLDKVKTILMKAAKDNPKVMTEPEPVVLFTEFGASTLNHELRFYVRTLGDRNTAIDEVNRAIDKLCNENDINIAFNQLEVYLHNKQGEEVQEIKKGPLDGST

SEQ ID NO: 69139 - protein, 493 aa, Proteus mirabilis
MIKLNNVPSEFRPLESYKMLIGGEWVSSTSQQTTKTYSPATGELLSEYPSGTAEDVDLAVKAARKAFDHWRKTSPAQRQALLLKIADRLEQEQERFAWIESLDNGKPLNESKNIDLPASIDHFRYFAGVIRSHTDESAVLDENTLSLVIREPIGVVGQIIPWNFPLLMAAWKLAPAIAAGDTVVINPATLTSLSLLELGRILNEILPAGVINIVTGRGSVAGQAILEHQDIDKLAFTGSTNVGYTVAAAAAKKMVPATLELGGKSANIVFPDANMKKAVKYSALAILMNQGQACESGSRLFLHRDIHDAFLKELKAEFERIRVGDPLDPNTQMGTQVSQAQMDTILGYVELAKKEGATILTGGERITGEGFDDGFFVRPTIIINATNQMRVAREEIFGPVLCVIPFDNEEDVIEMANDSEYGLGGGVWTQDINRALRVAKAVRTGRMWVNTYHELPAHAPFGGYKKSGLGRETHKMMLDAYSQVKNIFISTKE

SEQ ID NO: 69140 - protein, 958 aa, Proteus mirabilis
MTQTLTQLEYRDEFIRRHIGSSPEQIKEMLDVVGISSLNELTQKIVPDNIQLATPPNVGGGATEQEALAELKAIARKNKRFTSYIGMGYAPSVLPPVILRNLLENPGWYTAYTPYQPEVSQGRLESLLNFQQVTIDYTGMDLASASLLDEATAAAEAMAMAKRVSKLKNAERFFVADDIHPQTLDVVKTRANTFGFEVIVDKAEKVLELEGVFGVLLQQVGTTGEIHDYGQLISELKARKIITSVAADLMALVLLTAPGQQGADIVLGSAQRFGVPMGYGGPHAAFFACRDEYKRAMPGRIIGVSRDAAGNRALRMAMQTREQHIRREKANSNICTSQVLLANIAAMYAVYHGPEGLKNIAQRIHRLTDILAAGLIQNGMTLRHQTWFDTLTVETADKAGVLQRAKDAEINLRTDIVGAVGVTLSEVTTREDVVRLIEIISGKAFSDDIDTLDALVASSSTSIPTAMLRKDAVLTHENFHLYHSETEMMRYMHRLENKDLALNQAMIPLGSCTMKLNAAAEMLPITWPEFTEMHPFCPPYQAQGYQIMIEQLSNWLAAITGYDAMCMQPNSGAQGEYAGLLAIRRYHQSRGEGNRHICLIPSSAHGTNPASAHMAGMTVVVVGCDENGNIDIADLKAKAEKHQAELSCVMVTYPSTHGVYEEGIREVCEIIHQYGGQVYLDGANMNAQVGITTPGFIGSDVSHLNLHKTFCIPHGGGGPGMGPIGVKAHLAPFVPGHSVVEMDGVTTQGAVSAAQFGSASILPISWMYIRMMGSEGLKQASQVAILNANYIAQRLKDDYDILYSGAEGYVAHECIIDIRPLKANYGISEMDVAKRLIDYGFHAPTMSFPVAGTLMIEPTESESKVEIDRFIDALLSIRAEIAQVDDGVWPIDDNPLVNAPHTQYELVQEWSHSYSRECAVFPSEATKRNKYWPAVKRLDDVYGDRHLHCSCAPISDYE

SEQ ID NO: 69141 - protein, 55 aa, Proteus mirabilis
MKNFVKIALIASFVTVMTGCTGSVYNKEKDCNYDYLLHPAVSISKIIGGCGDTNK

SEQ ID NO: 69142 - protein, 641 aa, Proteus mirabilis
MGKIIGIDLGTTNSCVAVMDGKNARVIENGEGDRTTPSIVAYAQDGEILVGQPAKRQAVTNPQNTLFAIKRLIGRRFEDAEVQRDVSIMPYKIIKADNGDAWVEARNEKMAPPQVSAEVLKKMKKTAEDYLGEPVTEAVITVPAYFNDAQRQATKDAGRIAGLDVKRIINEPTAAALAYGLDREVGNRTIAVYDLGGGTFDISIIEIDEVDGEKTYEVLSTNGDTHLGGEDFDSRLINYLVDEFKKEQGIDLRNDPLAMQRLKEAAEKAKIELSSAQQTDVNLPYVTADATGPKHLNIKVTRAKLESLVEDLVKRSMEPVKVALEDAGLKVSEVNDVILVGGQTRMPMVQKTVAEFFGKEPRKDVNPDEAVAMGAAVQGGVLAGDVKDVLLLDVTPLSLGIETMGGVMTSLIAKNTTIPTKHSQVFSTAEDNQSAVTIHVLQGERKRASDNKSLGQFNLDGIQPAPRGMPQIEVTFDIDADGILHVSAKDKNSGREQNITIKASSGLNEEEIQKMVRDAEANAEADRKFEELVQTRNQADQLVHGTRKQIEEAGDKLAANDKEAIEKALSELEIASKGEDKAAIEAKLQALVEASKPLLEIAQQQAQAGAGNTADATDAGAKKDDDVVDAEFEEVDGKDKK

SEQ ID NO: 69143 - protein, 288 aa, Proteus mirabilis
MAIARQDVNISSPEATTSDAQSTANPTVLVFDSGVGGLSIYREIREKLPDAHYIYVFDNEAFPYGEKPQEFIIERVVRIVSAVAQQHELAAIVIACNTASTVSLPALRAKFTDIPIVGVVPAIKPAAKLTCNGVVGLLATRATVKRPYTHELIERFATECKVHLLGSAELVELAEKKLHGEKVSCDELRRILAPWLKMKEPPDTVVLGCTHFPLLEEELLSVLPDGTRIIDSGGAIARRTAWLVVNQDKIRGSKEISFAYCLKEDEYSELLKPVLADFGFKTLRKLAL

SEQ ID NO: 69144 - protein, 182 aa, Proteus mirabilis
MKNSIIKSAITCLLLLSPSTFAATDIIGGEMEFKGVVVAHGCTIVAGDENKVIDFKQISAKDLYSLQKSNPVAFSISLENCSQDIYKSVTITLDGQAHSTMPNHIAVTGSGSEDPKSIGIAFTDKAHNIIELKKPSAPQQLNNKRVQFDFMAYVEATSSAIQNQTILTGPFQAQATYTLNYQ

SEQ ID NO: 69145 - protein, 339 aa, Proteus mirabilis
MLQFILQRLGLVIPTFIGITLLTFIFVHLIPGDPVMIMAGERGLSPERHAYLMAELGLDKPLWQQYLNYLNGIMHGDLGISLKSRIPVWDEFLPRFKATLELGICAMIFAVSVGIPVGVLAAVKRGSIFDHTAISVSLAGYSMPIFWWGIMLIMLVSVKLDLTPVSGRLADSVFLDDSYPLTGFMLIDTLFWGEEGDFLDALHHIILPAIVLGTIPLAVIVRMTRSAMLEVLGEDYIRTARAKGLSRARVILIHALRNAMLPVVTVIGLQVGTMLAGAILTETIFSWPGLGRWLIDALQRRDYPVVQGGVLLIATMIIFVNLLVDVLYGIVNPRIRHKK

SEQ ID NO: 69146 - protein, 555 aa, Proteus mirabilis
MNEADARPTNFIRQIIDEDLATGKHNSVHTRFPPEPNGYLHIGHAKSICLNFGIAQDYQGKCNLRFDDTNPVKEDVEYINSIQKDVQWLGFQWDGNVHYSSDYFDQLYQYAIELINKGLAYVDELSAEEIREYRGTLKEPGKNSPYRSRSVEENLALFEKMRAGGFEEGKACLRAKIDMASPFIVMRDPVLYRIKFAEHHQTGNKWCIYPMYDFTHCISDALENITHSLCTLEFQDNRRLYDWVLDNITIPCHPRQYEFSRLNLEYTVMSKRKLNQLVTENIVDGWDDPRMPTISGLRRRGYTAESIREFCQRIGVTKQDNNVEMASLEACIRDDLNENAPRAMAVIDPVRLVIENMPEGEEILTAPNHPNKPEMGTREVPFSREIYIDRADFKEEANRQYKRLVLGKEVRLRNAYVIKAERVEKDEQGEITTIYCTYDPQTLNKDPADGRKVKGVIHWVSIPHAIPAEIRLYDRLFSVPNPGAEEDFLSTINPESLVIRQGFVEASLKDAAIEKAYQFEREGYFCADKLSTADKLVFNRTVGLRDTWAKISKQG

SEQ ID NO: 69147 - protein, 642 aa, Proteus mirabilis
MPIITLPDGSQRQFENAVSVMDVAADIGPGLAKACIAGRVNGELVDACELIEQDSQLAIITAKDDEGLEIIRHSCAHLLGHAIKQLWPQTKMAIGPVIENGFYYDVDLDHSLTQEDLETLEKRMLELAKTDYDVIKKRVTWAQARETFVARGEDYKVAILDENISQDAHPALYHHQEYIDMCRGPHVPNMRFCHHFKLQKIAGAYWRGNSDNKMLQRIYGTAWADKKQLKAYLERLEEAAKRDHRKIGKQLDLYHMQEEAPGMAFWHNDGWTIFRELETFVRCKLKEYDYQEVKGPFMMDRVLWEKTGHWENYKENMFTTSSENREYCIKPMNCPGHVQIFKQGLRSYRDLPLRMAEFGSCHRNEPSGALHGLMRVRGFTQDDAHIFCTEEQILSEVNNCIKLIYDVYSTFGFEKIVVKLSTRPEKRTGEDALWDIAETDLAKALTDNNIEFEYQPGEGAFYGPKIEFTLYDCLDRAWQCGTVQLDFSLPGRLGASYVAENNERKVPVMLHRAVLGSLERFIGILTEEYAGFFPTWLAPQQVVVMNITDGQADYVQKLVKELQDAGIRAKADLRNEKIGFKIREHTLRRVPYMLVCGDKEVESGKVAVRTRRGKDLGSIDVNDFKEKLLQEIRSRSLHQLEE

SEQ ID NO: 69148 - protein, 129 aa, Proteus mirabilis; identical to SEQ ID NO: 59330

SEQ ID NO: 69149 - protein, 274 aa, Proteus mirabilis
MKTDNYQIGIEININHINAVLVFQQNKQWKINAFWQFPLPLNDNIDDINLRTILKRWQQSLPPINRVALALPDTVASYHTIALSNLISLTPAAYYRLAQLRATSHQQVTKQAVQFDYRQHNQHLAIHLHNKTLIETYIALFAKINLTITAIDIPACALRYVATHLNISPHNILIFCQNNQLLWVCADKEMPHYGTLSYQDHQEQEKQLQQLLIKHHWPQEQCYFSGDNAEYFRQQMPIWPTQKERLFMSIPPKKTLPLIAIGLALRPWETACIK

SEQ ID NO: 69150 - protein, 709 aa, Proteus mirabilis
IMQTWEYCHRTVLGREDAQLLLWRGVEMVELLSTLSMDKDSMRAALLFPLAEEDLINQEVITEHFGEAIWNLVRGVMEMDAIRQLKATHTNETSSVQVDNVRRMLLSMVEDFRCVVIKLAERIAHLREVKDATEDERVLAAKECFNIYAPLANRLGIGQLKWELEDFCFRYLHPDEYKQIANLLHERRIDREQYIDNFVSTVRGYMQQENIEVDIYGRPKHIYSIWRKMKKKNLAFDELFDVRAVRIVVERLQDCYAALGIVHTHFRHLPDEFDDYVANPKPNGYQSIHTVVLGPEGKTVEIQIRTRQMHEDAELGVAAHWKYKEGATGANNKGGTGSYENRIAWLRKLIAWQEEMADSGEMLDEVRSQVFDDRVYVFTPKGDVIDLPAGSTPLDFAYHIHSDVGHRCIGAKIGGRIVPFSYQLQMGDQIEIITQKHPNPSRDWLNPNLGYVTTSRGRAKIHNWFRKQDRDKNIIAGRQILDNELAPLDINMKEAEKLLIARYNVHSLDEVLAGIGVGDIRINQLVNFLQSKLNKATAEDEDKEALRSLENKTATPKTTTSGGGSIVVEGVGNLMHHIARCCQPIPGDNIVGFITKGRGISIHRADCDQLAELLSHAPERIVDAVWGENYSSGYSLVVRVVANDRSGLLRDITTILANEKVNVLGVSSRSDVKQQIATIDMNIEIYNLQVLGRILAKLNQLPDVIEAKR

SEQ ID NO: 69151 - protein, 865 aa, Proteus mirabilis
MGKALVIVESPAKAKTINKYLGNDYVVKSSVGHIRDLPKSGSGSQKSENSSATKGVKKVKKDEKSALVSRMGVDPYNGWHANYQILPGKEKVVAELKALAEKADHIYLATDLDREGEAIAWHLREVIGGEDDRFSRVVFNEITKNAITQAFQTPGELNIDRVNAQQARRFMDRVVGYMVSPLLWKKVARGLSAGRVQSVAVRLLVEREREIKAFVPEEYWQLHASLLTPDEQPLRMEVTHYQDNAFKPVSSEETQVAVKALQNATFIVKNREDRPTSSKPSAPLITSTLQQAASTRLSFGVKKTMMLAQCLYEAGYITYMRTDSTNLSQDAIQMARDYIHDKFGAKYLPKEPNVYSSKENSQEAHEAIRPSDINVTAESLKDMDSDAKRLYQLIWDQFVACQMTPAKYDSTTLTVVSGDYKLRAKGRTLRFAGWTKVMPAMRSKDEDKTLPAVDVGAQLALAELSPTQHFTKPPARFSEATLVKELEKRGIGRPSTYASIISTIQDRGYVKVENRRFYAEKMGEIVTDRLEENFSDLMNYDFTAQMEDHLDHVANNQENWKAVLDAFFTDFSQQLEVAEKDPEEGGMRPNPMVITSIECPTCSRHMGIRTATTGVFLGCSGYALPPKERCKQTINLIPEDELLNILEGDDAETNALRARRRCPKCGTAMDSYLIDTHRKLHVCGNNPACDGYEVEEGEFRLKGYEGPVIECDKCGAEMHLKMGRFGKYMGCTNEECKNTRKILKSGEIAPPKEDPVPLPELPCEKSDAYFVLRDGAAGIFLAANTFPKSRETRAPKVAELVRFKDRLSEKMRYLAQAPVTDPEGNPTIVRFSRKTKQQYVSSEKEGKATGWSAFYIDGKWVEKSK

SEQ ID NO: 69152 - protein, 206 aa, Proteus mirabilis
MNRFVIAEPQRCIGCNTCMAACSEVHQAVGLQAHPRLTVVKVEDQTAPMLCRHCEDAPCASVCPVNAITHEDNMIFLNESLCIGCKLCGLVCPFGAITPSGSKPVNLPAVFDHFVPEEMLADVPASLPTTNPFLAWNAGIRAIAVKCDLCAFSDEGPACVKVCPTDALHLVEEDSLEEQMKARRLDSVMEPMTSLDDLSTLTQERK

SEQ ID NO: 69153 - protein, 224 aa, Proteus mirabilis
MKYNVYILFIIILCSTFFTQANVIYSGTRFIYNEDDNDIIINIKNKNSATDYLIQSWITKDENDKNTPFMITPPLFKLNKEQSAILRIAKITSIAQTDRESLFYINSKAIPIAESKHNSIHISIKSVFKLFYRPHGLTETVEEATKKIIFSINNKKEMIIKNNSEYYFTIINIFSNGEKKEISVMLSPFSEINIGKNHFGTAKVGWSYINDFGNEVNINIKNSE

SEQ ID NO: 69154 - protein, 333 aa, Proteus mirabilis
MANVNPNTAVPLLKAVNLAKYYSVKGGLFAKEKTVKALDGVSFELERGKTLAVVGESGCGKSTLGRLLTMIEVPTSGELSYQGQNLLVKDKSAEKLRRQKIQIVFQNPYGSLNPRKKVGQILEEPLLINTTLSAQDRKEKVLSMMAKVGLKAEHYSRYPHMFSGGQRQRIAIARGLMLEPDIVVADEPVSALDVSVRAQVLNLMMDLQQEMGLSYVFISHDLSVVEHIADEVVVMYLGRCVEKGTKTQIFENPQHPYTQALLSATPRLTPTLRRERIKLTGELPSPLNPPPGCAFAARCRRAFGMCTQLQPTLKEYHGQLIACFAVEQDHGEF

SEQ ID NO: 69155 - protein, 259 aa, Proteus mirabilis
MLLFYGAEKTAPFPSRGIMLKFILIFLTLFVSTVAQASVVIMGTRVVYPATQKSINVQLNNNDESPALIQSWLDTGNAAAAPDSIHVPFIITPPIFRMEPKSGQTIRIVYTGESLPQDRESLFYLNVLDIPAKPKVEENSENSEGNNNYLQLAVRSRIKFFFRPDNLNVTPDDAYQKVTWHQEGALRIKAINPTPYYITYNKISVGQDKQLTPVEQSGMIAPFSSKIFSLKEKPILTNKVTWVVVNDYGGYQQGESTLE

SEQ ID NO: 69156 - protein, 195 aa, Proteus mirabilis
MNELRIGLVSVSDRASSGVYEDKGLPALEAWLKKAITTPFHIESRLIPDEQLMIEQTLCELVDEAGCHLVLTTGGTGPARRDVTPDATLAIADREMPGFGEQMRQISLKFVPTAILSRQVGVIRNQALILNLPGQPKAIAETLEGLKDSEGQVIVSGIFASVPYCIQLLDGPYIETNEEIVVAFRPKSARRSTSA

SEQ ID NO: 69157 - protein, 543 aa, Proteus mirabilis
MVNFLFYMEKGDNDKSMSQVINFSLLFILSIVPALLAGSTLHIEQKFSMVIIGWLLMLLCAGIYRFTIGKVITFIVAALWSLNLSISLFFYREHDIPFSSSIAETFINTNGSETVGMLSYNKYYVLFYIVIFTSFFYLIHISARYLNNKTNKRCLIAIFILIILISLYKNLAIRSESKTQLLAEYYLLNTPFYNAAALVRTFHENRQIKKITSEKVNFNYDKVDQKTEIYILLIGESVRRDHLGIYGYPYDTTPNLEKEKNNILLFKQAYSPAPVTILSVPISLSNINLTELYDKKHYADNIISLANHAGFKTYWLSNQGKGNPKTSVISVIANMAQHKKWNEFIGYDEELLPFLDNALNDNSSNKKLIVLHTYGSHEPACNRFPSTYLKTFSQQEDDNCYDSSIAYTDKLISQIIEKIQDKPASILYFSDHALQRLDKNREVRYHHGVNSPRQEAYNIPLFIWYSASATRPNINEENLNKPFSTADNYWLLSQWLGIEHNSAKKCYSPLSECYQTKTSMMVIDGNKKLLNYALLESEEQAPQ

SEQ ID NO: 69158 - protein, 252 aa, Proteus mirabilis
MNLSSDDSSASKPKHVAIIMDGNGRWAKKQGKLRVTGHRAGIKAVRDAVSFSVKHKIESLTLYAFSSENWNRPEQEVSSLMELFVFALDNEVKSLHKHNVRLTIIGDISRFSRRLQDRIKNSVALTANNTGLNLNIAANYGGRWDITQSVQQLASSLAKGELAIEDINENAISSHLCLHDQSPVDLVIRTGGEHRISNFLIWQIAYAELYFTQVLWPDFDEQVFQNALDAFAKRERRFGGTTSETDTVNLGG

SEQ ID NO: 69159 - protein, 199 aa, Proteus mirabilis
MLPLVLASTSPFRAQLLKKLGMPFIQASPNIDETPLPTECAQALVTRLSYEKARALEVQYPNHLIIGSDQVCVLNKKITGKPLNFENAFAQLKQASGQCVSFYTGLTLYNSSTLAYESHCELFQVHFRHLTDDEIIGYLNKETPFYCAGSFKSEGLGITLFDKLSGDDPNSLIGLPLIRLNKMLLSQRINPLLSTDNQE

SEQ ID NO: 69160 - protein, 489 aa, Proteus mirabilis
MNNIRINYFVIVIIALFSAAIIALNITWPDRQKAQINKILSRGELRVSTIPSPLITINDKKDPVGFDYELVKRFADYLGVKLVVNMRTNINQLFDDLENNKADFIAAGLIYNKERLDTTRSGPAYFSVSQQLIYRKGTLRPRRFDELNGRLVVVAGSAHASLLKTLKETQYPELEWEESETKTTSQLLEELSEGKITYVLADSISVAVQQRIHPNVAVAFEVTESRPLTWYLPNQDDNSLYAAMLDYFNQLSQDDVLARLEEKYFGHVGSFDYFDTLSFITAIDSILPNYQPLFEKYAETFDWRLLAAMAWQESHWDPHATSPTGVRGLMMLTRPTASSMGITDRLDPEESIKGGAQYLKHLLSRLPDTIPDDEKIWFALAAYNMGYGHMLDARKLTEQQGANPNSWLDVKARLPLLSQKKYYLDLPYGYARGHEAYRYVENIRRYQLSLEGYLQAKESKNKILSKDEKDDSANTALLPPRSVGSPSSS

SEQ ID NO: 69161 - protein, 716 aa, Proteus mirabilis
MNKNTFLKHIPWVILGIIGAFCLSVVALRRGEHVSALWIVVASVAVYLVAYRYYSLYIAQKVMKLDPTRATPSVINNDGLNYVPTNRYVLFGHHFAAIAGAGPLVGPVLAAQMGYLPGTLWLLAGVVLAGAVQDFMVLFISTRRNGNSLGEMIKKEMGPVPGTIALFGCFLIMIIILAVLALIVVKALAESPWGVFTVCSTVPIALFMGIYMRYIRPGRVGEVSVIGIVLLIAAIWFGGVIASDPYWGPALTFKDTTITFGLIGYAFISALLPVWLILAPRDYLATFLKIGVIVGLAIGIVILNPELKMPAMTQYIDGTGPLWKGALFPFLFITIACGAVSGFHALIASGTTPKLIANEMDARFIGYGAMLMESFVAIMALVAASIIEPGLYFAMNTPPAGLGITMPNLHELGGENTAMIMDQLKDVTVHAAATVSSWGFVISPDEILQTAKDIGEPSVLNRAGGAPTLAVGIAMVFHKILPAADMGFWYHFGILFEALFILTALDAGTRSGRFMLQDLLGNFIPYLKKTDSFIAGVIGTAGCVGLWGYLLYQGVVDPLGGVKSLWPLFGISNQMLAAVALVLGTVILIKMKRTKYIWVTVIPAVWLLICTTWALGLKLLSNDPQMEGFFYLANEYKAKILAGGADLTAAEITNMNHIVINNYTNAGLSILFLVVVYSIIFYGIRTAMKARKNPKESAQETPYVPMPKDVKISSGH

SEQ ID NO: 69162 - protein, 158 aa, Proteus mirabilis
MEQKIIVMGADPSGYELKNAVKSHLQAKNYTIKDITESGPIGYCDVGDKVGAIISEHPEYIGFVFCGTGMGVSISANKHKNVYCGVCESVTTARFCKVINNCNMLAMGGLLITPFKANMMVDAYLSATFTQGFSEATPDDLQCGLQTMKEVEKRIYTD

SEQ ID NO: 69163 - protein, 549 aa, Proteus mirabilis
MNGAQWLVQALRKQRVETVFGYPGGAIMPVYDALYDGGVEHVLCRHEQGAAIAAIGFARSTGTTGVCIATSGPGATNVITGLADALLDSVPVVAITGQVASNLIGTDAFQEVDVLGLSLACTKHSFLVSDVNELPRVVSEAFSIAKQGRPGPVLIDITKDVQLADASHLADYPLPQEQEFPYPEHEIAQALQMLAQAKKPILYVGGGVAMSQGVEALRSFVKQTQIPVVSTLKGLGCANAFDANYLGMLGMHGTKAANYAVQRSDLLIAVGARFDDRVTGRLNTFAPNAKVIHIDIDYAELNKLKQAHIALLGDAKVLLPKLSQPLAIEAWQEEVQQLIAEYAWRYDHPGEAIYAPLLLKQLSDAKPENSIVTTDVGQHQMWSAQHMTFDAPENFITSSGLGTMGFGIPAAIGAQIARPDACVICVSGDGSFMMNVQELGTIKRKQLPIKLVLLDNQRLGMVRQWQELFFEQRYSETILTDNPDFVALAKAFDIPGQRITEKAQVAEAIKCLLTSDGPYLLQVSIDDAENVWPLVPPGASNDEMMEKSK

SEQ ID NO: 69164 - protein, 301 aa, Proteus mirabilis
MKTIVIALGGNALLQRGEILSAENQYKNIELMSETINKLAQEYRVVLVHGNGPQVGLLALQNLAYQAVPAYPLDILVAESQGMIGYMMMQKINQNNPTQAITTVMTRVSVDINDEAFREPSKFIGPIYEEAEKEELINKYQWTFKKDGQYYRRVVPSPAPQKIIDIEAVKLLLDKGHIVICGGGGGIPVNNINNEFIGSEAVIDKDLTAALISRELNAEHFVILTEADAIYKNWGTPEQAAIREATPEELAPMAVADGAMGPKIMAVSDFVNATGQQAHIGALQNIQQVIEGQSGTLIYKS

SEQ ID NO: 69165 - protein, 323 aa, Proteus mirabilis
MASTFALILTLATLITGIFWCIDRFKLKPARKAKLKRLQELTQGSEDQQELAKSINKPSWAETLGSLFPVLAIVLILRSFVYEPFQIPSRSMMPTLLVGDFILVEKFAYGLKDPITQTTLISTGKPKRGDIAVFKYPRDPSTDFIKRVIGLPGDKIVYDMTSKKLHIYPNCNKAICDDEIAVTYGTAYPSEWTLLLQSVPGGQRISGMKSIPIEEPISTATQFRQEERIETIGDVSHRIMTIPGDVTVPEFIQPGLPQGTWIVPEGQYFMMGDNRDGSSDSRFWGFVPEQNLVGKATTIWMSFEKQENEWPTGVRFSRIGGIK

SEQ ID NO: 69166 - protein, 319 aa, Proteus mirabilis
MKRVLIVKTSSMGDVLHTLPALTDARAAYPEICFDWAVEEGFAQIPSWHPAVDTVIPVAIRRWRKNWFSAPIRAERAQFRHAIQAHHYDAVIDAQGLLKSAFLVTRYAKGTKHGYSRQSAREPLASFFYNIRHNVSKKMHAVERIRQLFALSLNYPLPTTQGDYGIAQHFLSLPAIDKRPYLVFLHATTRDEKHWPEAHWRELIALLANSDLRIKLPWGAEHEHQRAIRLAQGFDYVDVLPKMSLAEVAQVIAGAQSVVSVDTGLSHLTAALDKPNITLFGPTDPGLIGGYGKEQRSLKAAGGDIGEITPQKVFNILKI

SEQ ID NO: 69167 - protein, 181 aa, Proteus mirabilis
MQNELNHKEDAAKIEIVDVTHSKKNTFVLTQEERAEIEQEKHHYEDPRAASIEALKIVQKNRGWVEDGAIYAIADVLGIPASDVEGVATFYSQIFRQPVGRHIIRFCDSVVCHITGYQGIQAAIEKHLNILPGQTTPDGRFTLLPTCCLGNCDKGPTMMVDDDTHSFVKPEEIETLLEQYP

SEQ ID NO: 69168 - protein, 274 aa, Proteus mirabilis
MSASGEALTTRDYIGGHLNNLQLDLRTFELVNPHAENTPSFWVLNIDSLFFSVLMGLLFLWIFRKVAVKATSGVPGKFQTAVEMVIGFVDSSVRDMYHGKSKVIAPLALTVFVWVLLMNALDLLPIDFIPYIGEHILGLPALRIVPTADVSITLSMAIGVFILILFYSIKMKGVKGFTKELTLQPFNHPVFIPINLILEGVSLLSKPVSLGLRLFGNMYAGELIFILIAGLLPWWSQWLLSLPWAIFHILIITLQAFIFMVLTIVYLSMASEEH

SEQ ID NO: 69169 - protein, 126 aa, Proteus mirabilis
MAIVGIGMDIVEISRIEEIIGRSGERLARRILTDNEWIIYQSHKQPVRFLAKRFAVKEAAAKALGTGIRLGLAFNHFEVANDELGKPTLHFLAVAKEMAQKAGINAIHVTLADEQRYACATVILEK

SEQ ID NO: 69170 - protein, 339 aa, Proteus mirabilis
MNMEKLIIYSVKHNASDLHLCCGDVPRLRINGVLYQQNQCKPITSDTLLKWITPYLTTAQLQFFGKEGQVDTAITLAEGQRLRVNLFRQQLGISAVLRVINSQLPTLTSLRVPKSITALLDNVSNGLILVTGATGSGKSSTLAAMIDYLNQHKRQHILTLEAPIEFIYTNKQSIIQQREIGRDVQNIASAIEAALRQDPDVIMLGELRDLESIKMALIAAETGHLVLATLHTQGVVQTLERVTNVFSSNERKWISAQLAGSLKAIISQQLVPATQGGRVALFEVMYMTQGIAHLIREGKYHQVTTLMQTGFEYGMQTFTLSRQQRQYEGLLNEHINEEN

SEQ ID NO: 69171 - protein, 280 aa, Proteus mirabilis
HFNPKNSIFDKVDCFAELYSMTGEQYKDNFHLYLKDGYDLKMKFVIKNVYNGEVSLDNLIKDMIDRIHNKNPSIKEDIENIRSYIKKRLHEIPNEANYDINQYNVYLSQIKNDLLPNNYFNVERYLDGVTDFVRLYNINNSRINVDDKIEDRCKLQKLMNIIQHIDIEYRKNIQIKLVKNTVALNIKDKNSKEFLNLIKIELLSLYNPHVGIIEGFIKHGMETLFKDEDKKEKACGSLRKAIIDYNFPFIRTLEFNVTDETINNIYINNIVPSEYISFRQ

SEQ ID NO: 69172 - protein, 51 aa, Proteus mirabilis
MELKDAPKSVQLAVDLIYLFETNHIDPNTVLEALEIVRVDYEKKRDNQTAN

SEQ ID NO: 69173 - protein, 232 aa, Proteus mirabilis
MNTIKQNLVNVRSHIDTAAQKCGRSPDEITLLAVSKTKPVSDIEKAIACGQTEFGENYVQEGVDKISYFAENKNLVWHFIGPLQSNKTRLVAEHFAWCHTIDRLKIAQRLSDQRPTTLPPLNVLIQINISDENSKSGISLTELDGLAAQISILPGIKLRGLMAIPAPENDYNKQVEVLEKMHQAFKQLQNQYPDIDTLSMGMTGDMEAAIACGSTLVRIGTAIFGARDYANK

SEQ ID NO: 69174 - protein, 389 aa, Proteus mirabilis
MYKITISGTGYVGLSNGILLSQHNKVVALDINKEKVELLNKKISPISDKEIEEFLATKELDFTATLDKEFAYKDAEFVIIATPTDYDPKTNYFNTSSVESVIRDVLEYNPNTTMIIKSTIPVGFTKQMREKYHTDNIIFSPEFLREGRALYDNLYPSRIVIGEQSARAEKFAELLQQGALKKDIDVLFTDSTEAEAIKLFANTYLALRVAYFNELDSYAQAYNLNARQIIEGVCLDPRIGNHYNNPSFGYGGYCLPKDTKQLLANYESVPNNIIGAIVEANRTRKDFIADSIIAKSPKIVGVYRLIMKSGSDNFRSSSIQGIMKRIKAKGIEVVIYEPEMKEETFFNSKLIRDLDEFKAMSDVIITNRMASALNDVEEKVYTRDLFGND

SEQ ID NO: 69175 - protein, 212 aa, Proteus mirabilis
MSYQVLARKWRPQTFNDVVGQRHVLTALANGLDHQRLHHAYLFSGTRGVGKTTIARLFAKGLNCETGITSKPCGKCANCLEIEQGRFVDLIEIDAASRTKVEDTRELLDNVQYAPARGRFKVYLIDEVHMLSRHSFNALLKTLEEPPEHVKFLLATTDPQKLPVTILSRCLQFHLRALDVDQIATQLEKVVSAEHIENDVRARQLIARAADG

SEQ ID NO: 69176 - protein, 82 aa, Proteus mirabilis
MNMVENMLDQAFKKLNPHEHPVLHSDQGWQYRMRRYQNILKEHGIKQSMSRKGNCLDNALVECFFGTLKSECFYLDEFSNIR

SEQ ID NO: 69177 - protein, 782 aa, Proteus mirabilis
AGGLSLPFSQAMASEQTAPTSTNKEKVVWSACTVNCGSRCPLRMHVVDGEIKYVETDNTGNDVYDEFHQVRACLRGRSMRRRVYNPDRLRYPMKRVGKRGEGKFERISWDEAFDTISDTMKRLIKDYGNESIYLNYGTGTLGGTMTKSWPPGATLIARLMNCCGGYLNHYGDYSTAQIAAGLNYTYGGWADGNSPSDIENTKLVVMFGNNPGETRMSGGGVTYYVEQAREKSDARMIIIDPRYTDTGAGREDEWIPIRPGTDAALVNALSYVMIKEDLVDKPFLDKYCVGYDETTMPEGAPKNAHYKAYILGDGADGQPKTPEWAAQITGIPAARIVKLAREIAGAKPAYITQGWGPQRRSNGELASRAIAMLAILTGNVGINGGNTGAREGSYSIPFVRMPTLTNPVTTSISMFMWTDAILRGPEMTATRDGVRGKDKLDVPIKMVWNYAGNCLVNQHSEINRTHEILQDDKKCEMIVVIDNHMTASAKYADILLPDCTASEQMDFCMDASAGNMAYVIFADQAIKPRFESRNIYEMTSEIAKRMGVGEKFTENRPQEEWLRHLYEQSRQNLPELPTFEEFRAQGIFKKRDPQGHHVAYREFRADPLNNPLTTPSGKIEIYSSQLAEIKATWELAADDVIDPLPIYSAGFESYGDPAMDKYPLQMTGFHYKARTHSTYGNVDVLKAACPQEIWINPVDATKRGIKHGDLVRIYNDRGEVRINAKVTPRILPGVVGLSEGAWYNPDSNRIDHAGCINVLTTQRPSPLAKGNPSHSNLVEVVK

SEQ ID NO: 69178 - protein, 424 aa, Proteus mirabilis
MAWNQPGNNGQDRDPWGNRNGGNNNGDGNSNGNQGGRDRKASDLDDLFRKLSAKLGGFGGKKGGNSSSGQNGGPRGNAGNVLVSLALGAVVVVWAASGFYTIKEAEQGVVTRFGKFYQIVEPGLNWKPTFIDEVQPVNVKTIRDLTTGGMMLTSDENMVQVEINVQYVVSDPEAFLFNVTTPMNSLGQATDSAVRGVIGRSEMEKILTSNRSEIRDQTRQELEETIRPYKMGISIVDVNFQVARPPEAVKAAFDDVIAAREEEQKTIRQAEAYKNEVLPLAKGNAQRMIEEATAYKTSVVMKAEGEVASFAKILPEYRAAPEITRERLYIETMEKVLSKTRKVIANDKGNSMLVLPLEQMLRQQPKAPTSFNSVTEAPARISTPTPSTNTTPTQKPATTYGNGGYGSNNSGGYGQPYGSNQGGQ

SEQ ID NO: 69179 - protein, 548 aa, Proteus mirabilis
QFFYLVSPFWGARTALYCWFLLILSLTLTLSSVWFNVKMNEWNGSFYNALQQLDGQALYKLLQQFVIIIAGLITVVVMGDFLRQKMIIRWREGMTEQVLERWLSKNSKHYMLRLTSQEPDNPDQRIAEDIRLLIESTMRLTVTFLHSLLTLISFATILWSLSGALSFSLAGKEWNIPGYMFWACIIYTLIGITITQLIGSPLRKINMDKQRKEADYRTALITRKQHGDAIAGQRGEMSDRHELMGRFLGVIRNWNNLIRYERNLAFFTVGYQQATAMAPIIFALPKFLAGELMLGGLMQLRQAFSSVAGALSWFIFSYKEIAAWQATVTRLYHFVVLLEHDHQPEITELDDKQTKLTANLSLFMQDDRLLINNIHFALKAGELAVIEGSSGIGKSTLLRALSGHWPYFKGDIQRVTNISWLPQRMYLPVARLDNLLAYPCQASQFSQQEYQEVLHWVGLDKIKNQLSLETDWTTRLSGGEQQRLIFARLLLNKPDLILLDETTSALDEQNALHMLLLLKQHLPTSGIVLVSHQRFTHAIAEQVISLQA

SEQ ID NO: 69180 - protein, 829 aa, Proteus mirabilis
MNTPTTLSSANRLSLPVEGMTCASCVGRVERALKAVPEIKDAVVNLATERADITFSSTPNPVLAVSAIESSGYKVPEEITELAIEEMTCASCVGRVEKALAQIPGVLEATVNLATERARVRHLSGVVSITDLEVAVVHAGYKPRRLSDNPANTRDLSEERREKEARSLRRALLIATIFTLPVFVIEMGSHFIPGVHHWVTQTLGQQLNWYIQFVLATIVMFGPGLRFFKKGIPALLRGAPDMNSLVSVGTVAAYGYSVVSTFIPQVLPAGTANIYFEAAVVIVTLILLGRNLEAKAKGNTSQAIKRLVGLQAKTARVSRHGEILEIPLDQVMMGDIVVVRPGEKIPVDGEVVEGHSYVDESMITGEPVPVAKEIGAEVVGGTINKTGAFSFKVTKVGANTILAQIIRLVEEAQGSKLPIQALVDKVTMWFVPAVMIGATITFFIWLAFGPEPALTFALINAVAVLIIACPCAMGLATPTSIMVGTGRAAELGILFRKGEALQALRDVSVVALDKTGTLTKGRPELTDLIPAEKFEYNEILSLVASIETYSEHPIAQAIVNAANEAKLTLASVDNFEAIPGFGVSATVDGRSVSVGADRFMKQLGLDVSQFASSAQKLGEQGKTPLYTAIDGRLAAIIAVADPIKETTPEAIKALHALGLKVAMITGDNKATAKAIAKQLGIDEIVAEVLPDGKVAALKQLSQKGDKVAFVGDGINDAPALAQADVGLAIGTGTDVAIEAADVVLMSGDLRGVVDAIALSQATIRNIKQNLFWAFAYNALLIPVAAGMLYPINGMLLSPIFAAAAMALSSVFVLGNALRLKRFQAPMKTH

SEQ ID NO: 69181 - protein, 325 aa, Proteus mirabilis
MEPIAVTILTGFLGSGKTTLLRHMLNEEHGYKIAVIENEFGEVPIDDEIIGDRATQIKTLTNGCICCSKSNELEDTLLDLCDSLDRGDIVFDRLVIECTGMADPGPITQTFFSHEVICQRYLLDGIITLVDTIHAQQQLDQFAIAQSQIGYADRILLTKTDIQPASQQLLARLRRINARAPTYTVINGQIDLALLFNVKGFMLNDTLEVKQPLFRFQPEKQDDIQSIVLNFDYPVELQAVSDVMESLLLSFADNLLRYKGILNIKDSPNRLLFQGVQRLYSADWDRPWQENETRQSTLVFIGIHLPEEEIKASFDALMHNTKEYE

SEQ ID NO: 69182 - protein, 269 aa, Proteus mirabilis
MKDIIQKIKKWIGIQKTSYYPYPAIDISLPNHVSLHLVGSIHMGVPTMSPLSNVLINKIATADAVIVEADISTETQPFDQLSLLREPLEKRVNETQLATIISHCDLLSIPRYQIDDKPLWQIALILQSTQAMQLGLQPQHGIDYQVIQQANKQQKAIIELEGIERQVALLLDFPQDGAQLLEDTLKNWHENARALQIMINWWLNYTSEKHPSPLPNTFSKAVFDILMEKRNQVWATTLSNLPAGHYVVTVGALHLFGEDNLVDRLTYQA

SEQ ID NO: 69183 - protein, 287 aa, Proteus mirabilis
MIRSMTAFARRDIKKEWGSAAWELRSVNQRYLETYIRLPEQLRSLEPVIRERLRNRLTRGKIECNLRFELNAHSQGELTLDENLARQLIVSANWVKSQSHEGTISPFDILRWPGVISAQEQDLDAIGSELLAELDVAIDAFIASREAEGQALKTLIEQRLDAVSAEVVKVRAQMPEILQWQRERLTSKLEEAQVQVDNNRLEQELVMLAQRLDVAEELDRLDAHVKETRKILSKKEAVGRRLDFMMQEFNRESNTLASKSINTDVTNSAIELKVLIEQMREQIQNIE

SEQ ID NO: 69184 - protein, 476 aa, Proteus mirabilis
MSNSANTPTFYIHDYETFGTHPAMDRPAQFAGVRTDMDFNIIEDPLVIYCKPNDDYLPQPEAVMITGITPQIALKNGVSEAEFTRQIHQAFSQPNSCIMGYNNLRFDDEVTRNILYRNFYDPYAYSWQKGNSRWDLLDVLRACYALRPEGINWPENDDGFPSFRLELLTKANGISHENAHDAMSDVYATIAMAKKLKQAQPRMFDYFFNLRDKRKVQALIDIPTMTPLVHVSGMFGAARSNLSLIAPLAWHPDNRNAVIVCDLAADISPLLTLTSEQLRERLYTPRSELSADEPPVPIKLLHINKCPIVAPKNTLRSQDADRIGLDIDNCLNNQAILLSNPEIRNKVVEIFAQQTPFTPADDVDAQLYNGFFSDNDRSAMEIIRSTQPQNLPALNLTFEDPRMEPLFFRYRARNFPATLTYDEQQRWLAHRKEQLTPEKLTEYINTIQLLAEEHSDNEEKLKQLQELYLYAQEIAS

SEQ ID NO: 69185 - protein, 671 aa, Proteus mirabilis
  MISC_FEATURE (20)..(20): X=any amino acid
  MISC_FEATURE (22)..(22): X=any amino acid
  MISC_FEATURE (25)..(25): X=any amino acid
  MISC_FEATURE (30)..(30): X=any amino acid
  MISC_FEATURE (33)..(33): X=any amino acid
MRKKETMSSLPSFVNDFLTXYXQQXGEQLXQKXTNITFLANIAEHALINKEQYQKDYALSIENPEAFWADKGKIVDWITSYTIVKNTSFDPGHVRIRWFEDGQLNISQNCLDRHLEKRADQVAIIWEGDSPNESKSITYRQLHQDVCQFANVLKKLGIKKGDVVAIYMPMVPEAAVAMLACTRIGAIHSVIFGGFSPEAVAGRIIDSKAKLVITADEGLRAGRAIPLKKNVDDALTHVDIPPIEHVVVLRRTGQTEQWIEGRDLWWDEIVQGVSTECDVEVMNAEDPLFILYTSGSTGKPKGVLHTTGGYLVYASMTFKYTFDYHDGEIYWCTADVGWVTGHSYLLYGPLSNGATTVMFEGVPNYPSVNRMAQIVDKHQVNILYTAPTAIRALMAEGDKAIEGTQRTSLRILGSVGEPINPEAWEWFYQKMGRSQCPIVDTWWQTETGGFMITPLPGAMDLKPGSATRPFFGVQPAIVDNMGEIQDGACEGNLVIVDSWPGQARTLFGDHDRFEQTYFSTFKGMYFSGDGARRDEDGDYWITGRVDDVLNISGHRLGTAEIESALVAHPKIAEAAVVGIPHNIKGQAIYAYVTLNHGEDATAELYTEVRNWVRKEIGPIATPDILHWTDALPKTRSGKIMRRILRKIASGDTTNLGDTSTLADPGVVEKLL

SEQ ID NO: 69186 - protein, 535 aa, Proteus mirabilis
MRSSKKQTGLLTATIGLLALAISAGVQAKTLVYCSEGSPEGFNPQLFTSGTTYDASSVPLYDRLVEFKLGTTEITPGLAESWEVSDDGKVYTFHLRKGVSWHSNKEFKPTREFNADDVIYTFMRQMDPNHPYHKVSGGSYEYFTGMDMNNMIEKIEKVDDNTVRFVLTRSEAPFLADMAMDFASILSAEYADNMMKAGTPEKVDLNPIGTGPFQLQQYQKDSRILYKANDKYWGKKPDIDRLVFSITPDASVRYAKLQKNECQAMPYPNPADIAKMKQNKDIQLLEQPGLNVGYISFNVEKKPLDNQKVRQALSMAVNKDAIIEAVYQGAGQKAKNLIPPTMWGYNDDIVDYEYNPEKAKALLKEAGLADGFTIDLWAMPVQRPYNPNARRMAEMVQADWEKIGVKTKIVSYEWGEYLKRAKSGEHQAVMMGWTGDNGDPDNFFATLFSCAAKEQGSNYSKWCYKPFEDLIQPARITADHDKRVELYKQAQVVMHDQAPALIIAHSTVYEPISKKVENYVVDPLGKHHFNNVSLK

SEQ ID NO: 69187 - protein, 672 aa, Proteus mirabilis
MAHYSYLFTPLDLGFTTLKNRILMGSMHTGLEEDPHDAPKLAEFYAQRAAAGVALIVTGEISPNKQGVLLPHAATLMSEDQLASHQLVTDAVHKQDGKIALQILHTGRYSYQPNLVAPSAIQSPITPFMPQAMSHEQIEQTIEDYIHCAKLAQKAGYDGVEIMGSEGYLINQFLVSHTNQRDDQWGGSIENRCRFALRILAGIREAVGEHFIIIYRLSMLDLITEGANASEVFYLAQAVEKAGATLINSGIGWHEARIPTIATMVPRGQFAYVTRQLMGKINIPLITSNRINTPQVAEAILAEGCADMVSMARPFLADPQFVLKAQLGREDEINTCIACNQACLDEIFSGHPASCLVNPFACRETELILTPTQAPKKIAVVGAGPAGLAFAITAAKRGHHITLFEKEDRIGGQLNIASQIPGKEEFKETLRYFKRQLQITGVIVKNNTEATLSHLQHFDEIILASGVIPHIPEIDGHDNPIVKTYLDVLKYHQPTGEKVVIIGSGGIGFDTGLYLTQTGQCSSLSPCAFNKEWGIDPTLTHRGGITSAHPFIKKDKQIVMTQRKSGKFGLSLGKTTGWIHRLTLQKKGVKWLTGCHYQKITEQGVIIEHNEQQQLLAADSVILCTGQQSYRPLLQALQQENKTVHLIGGAKEAKALDAKRAIKQGTELALTI

SEQ ID NO: 69188 - protein, 402 aa, Proteus mirabilis
MKRLQAFKFQLRPNGQQEREMRRFAGACRFVFNRALARQNENHEAGNKYIPYTKMASWLIEWKSDTETQWLKEAPSQPLQQSLKDLERAYKNFFQKRTAFPRFKKRSKNDAFRYPQGVKLDQSNSRISLPKLGWMRYRNSREVVGEVRNVTVSQSCGKWYVSIQTEYEATEPQHESTSIVGLDAGVTKLATLSDGTVYPPVSSFKVNQRKLARLQRKLSRKITFSANGQKQKRKIQRLHSHIANIRKDYLHKVTSEISKNHAMIVIEDLKVSNMSKSAKGTTERHGRNVKAKSGLNRSILEQGWYEMRRQLEYKQLWRGGQVLAIPPAYTSQKCACCGHTAKENRQSQSQFECLECGYTANADINGARNILAAGHAVLACGGRVQSDRPSKQEPAEVIQRSV

SEQ ID NO: 69189 - protein, 337 aa, Proteus mirabilis
MGPVMLDVEGYELDNEEREILKHPLVGGLILFTRNFHDAEQLNELVRQIRDASHERLVIAVDQEGGRVQRFRDGFTRLPAAQSYAALNERYQASRLAQEAGWLMASEMIAMDIDISFAPVLDLGHDCIAIGERSFHECPEIAMDMAESFIKGMRSAGMKSTGKHFPGHGAVRADSHKETPRDERSLNDIRQRDMAIFKDFIQRQLLDAIMPAHVIYSQIDERPASGSPYWLKSILREQLGFQGVIFSDDLSMEGAAIMGSYAQRAQRSLDAGCDMLLVCNNRKGAVSVLDNLSFVKAERISALYHHRGRYTLSELQASDRWKKANQMLTQLQEQWQE

SEQ ID NO: 69190 - protein, 436 aa, Proteus mirabilis
MYFEMSNNVVVLGTQWGDEGKGKIVDLLTERAKYVVRYQGGHNAGHTLVIDGEKTVLHLIPSGILRENVVSIIANGVVLSPEALMKEMTQLEERGIPVRSRLLLSEACPLILPYHIALDNAREKARGEKAIGTTGRGIGPAYEDKVARRGLRVGDLFDKKAFAQKLKEIIEYHNFQLVNYYKVEPVDYQKTLDDIMAIADILTGMVVDVSDLLYKATQKGELVMFEGAQGTLLDIDHGTYPYVTSSNTTAGGVATGSGLGPRYVGYVLGIIKAYSTRVGAGPFPTELFDETGDFLREKGQEFGATTGRSRRTGWLDIIAIRRAVQINSLSGFCMTKLDVLDGLKEVKVCVGYRLPNGEVIETTPLAADDWEGIEPIYESMPGWNESTFGVKDKAQLPQAALNYIKRVEELTGVPVDIVSTGPDRSETIILRHPFDA

SEQ ID NO: 69191 - protein, 153 aa, Proteus mirabilis
MKHWKLYIVVVMVGIVAGGCALINAQAKRINTLTENNKELTTALEEQKDINIDYQARIERLNQLDTRHTQELVNAKNEISRLRDISERNPDRVYIKAECPKSTTTSTASMDDATTARPTDTAIRNYWLLRERIAESEQIIKGLQDYIKQECME

SEQ ID NO: 69192 - protein, 411 aa, Proteus mirabilis
MALKEDVSINTTSKPNSPKHYIQRDDALYIKVTVSFFMVGLATFALLYFVQPILPILSKEFSVTPATSSLALSLSTGLMACGLLITGPLSDAFGRKNVMVIALFCAAFFTLLSAMMNSWTGILITRALVGLSLSGVAAVAMTYLSEEIHPAYLALSMGLYISGNSIGGMSGRVITGVLSDYYSWRVSVIILGIFALVAAIIFWRILPTSQHFRPATLKPRNLLITTKLHFRDKGLPLLFIEGGLLMGGFVTLFNYIGYRLLDAPYSLTQTTVGLISIVYLSGTYSASKAGLLTNKYGLGKVFIAGVSMMLAGILITLFDSLAIIFIGMLILTTGFFAAHAVASSWVGRRAKRGRAQASSLYLFTYYAGSSIAGTLGGIFWVNFGWLGVGLFIAFLMLTALLIALRLNQIAQ

SEQ ID NO: 69193 - protein, 314 aa, Proteus mirabilis
MELKDYYAIMGVKPSDDMKTIKTAYRRLAKKYHPDVSKEPDAEERFKEIAQAWEILGDEQRRAEYDELWAHRNDPKFKQFTQHNNSHSNQQSFSQEDFDDLYASFFGQGSPFEGRHSRQAPRQRGQDLEIELPVFLEEAQEEHKRTISYHLPVYNVFGMIEKEIPKTLNVKIPAGVVDGQRIRLKGQGTAGENGGENGDLWLTIRIAPHPLFDVKGHDLEIVVPIAPWEAALGTKIAIPTLKDKILLTIPPASQAGQRLRIKGKGLVSKQKSGDLYAILKVVMPPKVDEKTHSLWQQLAEAQADYNPRKNWENK

SEQ ID NO: 69194 - protein, 326 aa, Proteus mirabilis
MKLNDELTNSIASVTEAAAIAAMPWVGKQDKNAADAAAVAAMRERLNSLNINGQIVIGEGEIDEAPMLYIGEPVGNGQGEKIEIAVDPIDGTRMVATGENNSLAILAAGFEGSFLQAPDMYMEKLVVGKKAAGVIDLNHCLEYNLDAIAQTLNKSLSQLTLAILDKPRHHDIIIDLRNRGINVITLPDGDVLASLYATMPNNPIDVMYGIGGAPEGVISAAIAKALGGDMQARLITRDIAKGNNATNREIAAQEISRCHNMGTDVNITLPLEILVRHQDVMFAATAITAGDLLSGVTEQSDYLRTHSLVINGSTHSLRYIENYHLR

SEQ ID NO: 69195 - protein, 932 aa, Proteus mirabilis
MYRKLLIISVSLSLLGCATGTSSEHTNNTLSLRPDIRHFTLDNGLNVYLLQRPQTGVEMRLLVKSGSVQEDEKQLGFAHFTEHMAFKGTTHFPGTTGFKQLESLGMKLGSHVNAATSLNSTTYKLSLPNANPTQIKTGLRILSDWAFGMTFDPVEFDKERPVIVEEWRLRQGIGFRINRQLEELRYYGSRYLDRDPIGDLDIVKHGDVKEAKRYYDTWYQPERMALVLVGNFNQGDAIADITQMFNAKNSENKGVDSPSWHHFIDNKDLLVKTIFDKEQGSRIVQFTLQRTLPAPLNSRQGQYDDLMDSLWLSILNQRFSTIVDNGLVPSVSANTQGAMLDARRSQQLMIAHPKGDDYQGTLDILFTEVQRLASQPVSQQELDNARNALLKRLSQQAAGEERYEHGYLANQITTALELEMPIQSKKQALNLSYQLINNVTPDTLKHYFAQYLTQASPRVAIIGPDSDSQVFSATKASQRWQEIRQSDPGAFTLKTHAVVLDIKPEQTGTIVTTQTLPIEKTQLWTLSNNVKVIIKNDQWLKDNIQVSLRIPGGVSLETGQSLGLVQWALNLPEVSGYGHYNARELALFSKQHQISLRPYSELLFHGLRGEAPIDELDTLLALLHLKVTAPQFNGQKLEQQKQATALGIAKTPVERIFLDHINKESYQNGERLVISPQGPWQQFTAQQLQQTNQSLLGQPADMVLVISGPINLNQVKPMIERWIATLPTRSSQRLFWADPAINPKLSSFNKTYPIASSDKSMISIQYAAKAQWSQQQLLALNLLDTVVSQRLRLNLRERAGGIYSLGFSESLTKLPSSFYTGRLNFTASPQRADELIALARKVVNDVKQAGITDKELQEAKNIWLTEYGQAKESASYWTDALAQVATDDQQYQRLLTETAIVNGISVSDVNQVARQWLGENEKIFKLTPPTKQ

SEQ ID NO: 69196 - protein, 276 aa, Proteus mirabilis
MRFLNTFALLLSLILTPCYVIAATPAQRVITLSPSATEMAYAAGMGENMVAASAYSDYPQAAKDLVQVADWQGINVERILLLKPDLIIAWPSGNPQRPLDQLKSLGIPIIYSDPHSIEEIIDDLTRLSSYSTHPEVALASAQKLRQQYQELQQKYASTTPHQAKKKVFIQFGMQPLFTTSKHSLQNEITELCGGENIFANSAVPWPQVSREQVISKKPDLILFSGKPNQIAAIQQFWQPQLDIPIIAIDEDSFSRPAPLIIYAAQQICEAIKDNNK

SEQ ID NO: 69197 - protein, 110 aa, Proteus mirabilis
MKRIIIPTNYIHIRTTPFWTRETAPKSIWERHLDKGTQQGVYPRLSVMQGTIIYYAYADQYSPKPTETLVIKEGEFGVFPPETWHRIEAQTEDTVFNTDFYVDPKILAEG

SEQ ID NO: 69198 - protein, 145 aa, Proteus mirabilis
MLQEVMQFFSRHTLLSFIWIALLVAVIVLTFKGLFSKTKNISRTEAISLINKENAVCVDIRSRDEFRKGHIIDSINLTPSEIKSNNIAELEKYKSQPVIVVSPSGIEGAKPAESLIKLGFEKVFILKDGLSGWSGENLPLAKGKK

SEQ ID NO: 69199 - protein, 313 aa, Proteus mirabilis
MRRRVATITLNPAYDLVGLSTPIELGEVNRVTTAGFHAAGKGINVAKVLKSLGIDVTVGGFLGKENQDGFQKEFSEAGIANRFQMVEGRTRINVKLTEPSGKVTDFNFSGFEITKQDWTRFVNDTLSWAGQFDMICVSGSVPPSIDLNDFTAWMKRLRSECMCLIFDSSREAFVAGLKALPWLVKPNHHELEIWAGRPLPELSDVVQAAHELRQQGIAHVVISLGEQGAMWVNASGAWMAKPPKCDVVSTVGAGDSMVGGLIYGLMMRQTSEHTLRLATAISALAVSQTNVGITDREQLARMMTEVELTPLKI

SEQ ID NO: 69200 - protein, 98 aa, Proteus mirabilis
MADAINRCNAEETAACCCVDVGTIIDNKNCTASYQHVFADKAQAEAMLNELTAKANATASEPCQIKHQFADVEGGVQLTADFTFSCEAENLIFQLGLR

SEQ ID NO: 69201 - protein, 153 aa, Proteus mirabilis
MSISIDIANASEAKELTTIALESKQYWGYSSDFIEMCRDELTLKEADFVNSLILVAKNNEKYCGFVQLKFNDNAGQGELEKLFVAPSFIGQGIGKTLYERAVEHARKMNVKELVLDADPNAENFYKKMGAITMYNTPSESIPGRFIPKMKITL

SEQ ID NO: 69202 - protein, 311 aa, Proteus mirabilis
MRNRTLSDLDRVVALGGGHGLGRVLSALSYLGTRLTGIVTTTDNGGSTGRIRKDEGGIAWGDMRNCINQLITEPSVASAMFEYRFSGTGELAGHNLGNLMLKALDNLSVRPLEAINLIRGLLRVNAHLIPMSEQAVDLMAIDDEGNEIYGEVNVDNLPRMPRQLKLYPDVTTTREAIEAIEQADLILIGPGSFFTSLMPLLLLPDLAKALRRSSATTIYIGNLGKELSPAAASMTMSDKIAMMETYIGLQTIDAVIISPETQYESMKGRLIVQAQLEAKDIPYRHDRHLLSKAIELTLQQLGQRNTACTAS

SEQ ID NO: 69203 - protein, 275 aa, Proteus mirabilis
MYWVNGQQQQSINVSDRAVQFGDGCFTTLAVEQGKPILLSAHLKRLQRGCDALFLPSPDWQWLASHLLQIASTITEKSVIKVIISRGSGGRGYSSKGFDTPTVITSCSTYPFYYHDLQKQGVSLAISPVRLGQNSLLAGIKHLNRLEQVLIKHHLETTPFDDMLVCDNEGYLVEANAANLFWRKGNQLFTPDISLSGVNGIMRQQVLDFAQQLEWDIHIVREKPQTLYQADEIWLTNALMPIIPVKQIYFSDDKHYQYRDRDAYHVVLQHCLSLT

SEQ ID NO: 69204 - protein, 97 aa, Proteus mirabilis
MKMICAIYRSTKRDQTYLYIEKKDDFSRIPEELLQSFGEPQFAMLLDLAQRQRLANADIEKVKQALTDQGFYLQVPPPVESMLNAYLDELKNSEKTE

SEQ ID NO: 69205 - protein, 655 aa, Proteus mirabilis
MRLFIAEKPSLARAIADVLPKPHKRGDGFIVCGDNQYVTWCVGHLLEQAEPDAYDPRYARWSLDDLPIIPNKWQLKPRADVKKQLDTINTLLKQADEVIHAGDPDREGQLLVDEVLNYLNISDAQRKQARRCLINDLNPAAVSRAIDKLRYNHEFIPLCVSALARARADWLYGINMTRAYTLLGQRNGYQGVLSVGRVQTPVLGLVVRRDEEIENFVPKDFFEVKAHIVTPADERFTAIWQPSEHCEPWQDEEGRLLHRKLAEHVVDRIAGKPANVTDYQDKQESEIAPLPFSLSALQIEAAKRFGLSAQQVLDTCQRLYETHKLITYPRSDSRYLPDEHFAGRHAVMNAISVHDNSLLPQETLDIDKKNRCWDDKKVDAHHAIIPTAKTGNISLSENEKNIYYLIARQYLMQFMPDAVYRKCVIELDIENGKFIAKARFLAQAGWRTLLGSKEQDAENDGSALPIVAKGDELLCEKGEIVAKQTQPPRPFTDATLLSAMTGIARFVQDKELKKILRATDGLGTEATRAGIIELLFKRGFLQKKGRAINSTPAGRALIHVLPDMATLPDMTAHWESILTQISEKQFKYQDFMMPLSNTLFELITQAKRRPNIQAFRNLPAPAQNKKRKGAMKKSAQGKSRSAQSQSTNRNIKSDA

SEQ ID NO: 69206 - protein, 385 aa, Proteus mirabilis
MSVIKMTDLDLAGKRVLIRADLNVPVKDGKVTSDARIRASLPTIEAALKQGAKVMVTSHLGRPTEGEYNEEFSLKPVVDYLKEKLSAPVSLAKDYLNGVDVNAGELVVLENVRFNKGEKKDDETLSKQYAALCDVFVMDAFGTAHRAQASTHGVAKFADIACAGPLLSAELEALGKALDKPERPMVAIVGGSKVSTKLTVLDSLSKIADQLIVGGGIANTFIAAEGHSVGRSLYEADLVDDAKKLMEKCDIPVPTDVRVATEFSETAPAVRKSADDIKDDEQVLDIGDVTAERLAEILKNAKTILWNGPVGVFEFPNFRKGTEVIAKAIADSDAFSIAGGGDTLAAIDLFDIADKISYISTGGGAFLEFVEGKKLPAVAMLEERA

SEQ ID NO: 69207 - protein, 453 aa, Proteus mirabilis
VISVFDMFKVGIGPSSSHTVGPMKAGKEFVDDLVSQDLIASVTRVAVDVYGSLSLTGKGHHTDIAIIMGLAGNAPATVDIDSIPGFIREVEETGRLPLANGLKVVDFPAESMHFSNDNLSLHENGMTIHAFAGDKEIYRKTYYSIGGGFIVDEENFGKSVLDSQPVSYPYASAEELLKHCKETGLSISSLMMKNELDLHTQAEISAYFADVYKTMQECIEHGLNTEGLLPGTLRVPRRAASLNRLLTSSNSLSNDPMKVVDLINMFALAVNEENAAGGRVVTAPTNGACGIVPAVLAYYDRCIEKVTPEIYTRYFLASGAIGILYKMNASISGAEVGCQGEVGVACSMAAAGLAELLGASPEQVCVAAEIGMEHNLGLTCDPVAGQVQVPCIERNAIASVKAVNAARMALRRTSEPRVSLDKVIETMYETGKDMNAKYRETSRGGLAIKVQCD

SEQ ID NO: 69208 - protein, 184 aa, Proteus mirabilis
MSSKKLTPAEVNDAHKLQTRPLSTPTDLAPKATKEVSAAMNAILADVFALYLKTKNFHWHVSGPHFRDYHLMLDEQGDQLFAMTDPIAERVRKIGGMTLRSIGQISKMQRIKDNDAEFVEPLDMLAELCQDNQLLAAELRKAHVVCDENNDISTASLIENWIDETERRTWFLFEACRRAETSGH

SEQ ID NO: 69209 - protein, 278 aa, Proteus mirabilis
MNEEISYLFVPANKKVMISKALTYGANAIILDLEDAVHPDEKPLGRDNIQNWLTTINNTIINTSIYIRINHPKEKEFKNDVDLLNSLNETLMTGVMIPKLEDAEILSYIKSKLHLAISKRPFIGIIETARGVHHCEEIANSGVTRLAFGSLDYSLDIDCQQTAEALLYARSRIVIASRIANLISPIDCVTPEFCTPNTLLMDANHARALGFGAKLCIHPDQIDTVNKAFKPTEEKIKWAQEVVKQSTASYAFQINGEMIDLPLIKQATRIINGKYKPN

SEQ ID NO: 69210 - protein, 46 aa, Proteus mirabilis
CGYTANADINGARNILAAGHAVLACGGRVQSDRPSKQEPAELIQTS

SEQ ID NO: 69211 - protein, 256 aa, Proteus mirabilis
MKKLSGKLLAGAIISFALVSQSMASEKITVFAAASLTNALNEISAQYKQEKQADVVASYASSSTLARQIEQGAPANLFISADQQWMDYVINKNLMVTDSRHTLLGNDLVLIAPKDSKLNNVVINKDTKWKSLLNGGKLAVGDPDHVPVGIYAKESLEYLGAWDVVSPEMARTNNVRSGMALVERDEAPLGIVYGSDAVASDKVKVVGVFPTDSHKPVEYPMAVVKGQDNKAVRDFYDYLKTPQAAEIFKKYGFSPL

SEQ ID NO: 69212 - protein, 373 aa, Proteus mirabilis
MHKESPIIRRKSTRIYVGNVPIGDGAPIAVQSMTNTRTTDVEATVNQIKSLERVGVDIVRVSVPTMDAAEAFKLIKQQVKVPLVADIHFDYRIALKVAEYGVDCLRINPGNIGNEERIRQVVDCARDRNIPIRIGVNGGSLEKDIQEKYGEPTPEALVESAMRHVDILDKLNFDQFKVSVKASDVFLAVDSYRLLAKKIDQPLHLGITEAGGARAGSVKSAIGLGILLSEGIGDTLRISLAADPVEEVKVGFDILKSLRIRSRGINFIACPTCSRQEFDVIGTVNELEQRLEDIITPMDVSIIGCVVNGPGEAEVSTLGVTGAKTRSGFYEDGVRQKERLDNSNMIDLLEAKIRTKAAMLDGNLRININQLDK

SEQ ID NO: 69213 - protein, 78 aa, Proteus mirabilis
MSRVCQVTGKRPVSGNNRSHALNATKRRFLPNLHSHRFWVESEKRFVTLRVSAKGMRVIDKKGIESVLADLRARGEKY

SEQ ID NO: 69214 - protein, 600 aa, Proteus mirabilis
MPSAQVILRETFGYQQFRPGQQEIIDTIITGRDCLVVMPTGGGKSLCYQIPALLLDGLTVVVSPLISLMKDQVDQLCLHGIDAAFLNSTQSRDEQLQVQMRCQRGEIKLLYIAPERLMMESFLHHLVQWQPALLAVDEAHCISQWGHDFRPEYRGIGLLRQYLPDVPIIALTATADNTTRHDIINQLALRTPLVHISSFDRPNIRYTLVEKYKPLDQLWLFIRGQKGKSGIIYCNSRSKVEETAERLGKRGLSIAAYHAGMDIATRAKVQDAFQRDDLQIVVATVAFGMGINKPNVRFVVHFDIPRNIESYYQETGRAGRDGLPAQAVLFYDPADMAWLRRCLDEKPESEQKAIESHKLNAMGAFAEAQTCRRLVLLNYFGEHRQQACGNCDICLDPPKQYDGLVDAQKALSCIYRTGQRFGIGYIVEILRGANNQRIRDNGHDKLPVYGIGKAHSHEYWMSVIRQLIHLGMVAQNIVHRSALQLTEIARPILRGEVSLPLAVPRLLSPTKSRYQQTKNSHRQYDRKLFAKLRKLRKSIADEENIPPFVVFNDVTLIEMAEQCPVCPDELLLINGVGQRKLERFGPAFMTLIRDHIEGFE

SEQ ID NO: 69215 - protein, 261 aa, Proteus mirabilis
MASSNMAYTKIRQPKLSDVIEQQLEHLILEGTLRPGEKLLPERELAKQFDVSRPSLREAIQKLEAKGFLLRRQGGGTFVQDNLWQSFSDPLAQLLSGHPESQFDLLETRHALEGIAAYYAALRGTDDDLERIKASHARIIDAHDKGDIAAESDAVLQYQLIVTEAAHNVVLLHLLRCMVPMLEQNIRQNFEFLYTRKEMLTAVSEHRTQIYQAIINREPEAAREASHRHLAFIEDVLLDMSREHTRRERSLRRLQQHPDLF

SEQ ID NO: 69216 - protein, 101 aa, Proteus mirabilis
MSHQRSNEDLRSELKSLADTLEEVLNSSADKSKEELQSLREKAEYALRGSRAKLSDAGREIVDNTKEMAGKADNYVRENPWTGVGIGAAVGVVLGVLLSKR

SEQ ID NO: 69217 - protein, 722 aa, Proteus mirabilis
MNKINSVCPYCGAGCKINLCVENGRIIKAEGANGVTNQGELCLKGLYGWDFLNDNKLLTARIHQPMIRRQKGADFEIVSWDEAIEFTAKKLLAIKEKYGAKSIMCTGSSRGTGNETNFVMQKFARAVLGNNNVDCCARVCHGPSVAGLQETLGNGAMSNSIADIEDSDCLLVFGYNCADSHPIVARRVVKAKQKGAKIIVCDPRKIETAKIANQYLPLKNGTNMALVNAFAYTLIDEDLYDKEYVSRYTEGFEEYKKQLVDYSPEAVERIVGVSASEIRQAMRTYAAAKTATIMWGMGVTQFGQAVDVVKGLASLALLTGNLGKPHAGVAPVRGQNNVQGACDMGVLPNMFPGYQSVTDEGIRQKFAQAWHIPVEKLDPQVGYRITEVPHLAIEGKVKAYYIMGEDPLQTEADLGLVRKGFQALDFIVVQDIFMTKTAEQADVILPSTSWGEHGGIFTCADRGFQRFEQAVQARGNVKRDWEIISLLATAMGYPMSYTDNEEIWHEVRALCPLFFGATYEKLAGLAHIQWPCPELDHPGTPYLYSDNRFTTPSGKGQLFATAWRAPAELPDEEYPMILSTVREVGHYSCRSMTGNCKALASLADEPGYVQIHPDIAKAAGIADQEIVWVASRRGKVLSRCNLNETVNKQAIYMTYQWWIGACNELTQDNLDPVSKTPETKYCAARVVKIDDQKWAESQVAQDNHAMRSRLINLVEQAKTATH

SEQ ID NO: 69218 - protein, 156 aa, Proteus mirabilis
MNLNATILGQAIAFVLFVLFCMKYVWPPIMAAIEKRQKEIADGLSSAERAKKDLDLAKADAGEQLAKAKAEAQAIIESANKQRTQMIEEAKAEAEQERSKIVAQAQSELEAERKRAREELRKQVAMLAIAGAEKIIERSVDEAANSDIVDKLVAEL

SEQ ID NO: 69219 - protein, 256 aa, Proteus mirabilis
MCLDINTIMNIPNSTFPIVAVIPAAGIGSRMQATCPKQYLKIGRLTILEHTINALLKHPRISQIIVAINPEDDYFYHLALAKDKRIIVVKGGGQRADSVLSGLRYITEHLAQNTWALVHDAARPCLSFSDLDNLIQLIDDNHLDPQFCGGILASPVRDTMKRSHQQDNHIEKTVARDTLWHALTPQFFPAALLKQNLENALAQNVPITDEASAMEFGGYEPLLVKGRADNIKVTQPEDLALAEFFLSRQITSIRNT

SEQ ID NO: 69220 - protein, 135 aa, Proteus mirabilis
MSTLIKVYGFHLDVFEHVNNARYLEFLEQARWDWIEQHLDLAWFKRHGLALVVANININYRLPANLGDELIISCDIAEVGIKSGVLSQKIVRKQDGALISDALVTFVLVDINTKKALTLTDQLREKLEYVRQSAD

SEQ ID NO: 69221 - protein, 325 aa, Proteus mirabilis
MSEIADWQPSASIANLLKKAKIVSNIRRFFADRGVLEVETPMMSQATVTDIHLCPFETQFVGPGASQGLKLYLMTSPEYHMKRLLAANSGPIYQMGRCFRNEEAGRYHNPEFTMLEWYRPCFDMYRLMNEVDDLLQEVLDCEASESLSYQQAFLRYLDIDPLSADKEKLREVAAKLDLSNIADTEENRDTLLQLLFVSGVEPHIGLEKPTFIYHFPASQASLAEISSEDHRVAERFEVYFKGVELANGFRELTDAKEQRLRFERDNRQRVAMGLPEQPIDERFLAALEAGLPECSGVALGVDRLIMLALGVERISDVIAFPVYRA

SEQ ID NO: 69222 - protein, 186 aa, Proteus mirabilis
MTLIDTFINRFQLTLPEPVNQPIDAKKSAAVLLPIINKPNPTILLTERASTLRSHAGQVALPGGKRDPQDKSLIETALREAHEEVDIPPSMVSVIGQLAPLRSSEGYLVTPIVGVIPPNLSLRHNPTEVASVFEMPLSYVLNTQRYLPLDFRRAGKMHRIYFYPYEGHLVWGLTAAILHNLALHIT

SEQ ID NO: 69223 - protein, 82 aa, Proteus mirabilis
MGFLSWIVFGLIAGILAKFLMPGSYDIGLIWTCILGIVGAVVGGVISNFFGKGKVDGFNFGSFVVAVIGAIVVLYLAKIFAS

SEQ ID NO: 69224 - protein, 157 aa, Proteus mirabilis
MYQDYLNTPKGFPKPYISITADDDGITSLNFVSEKEALVNSNAIIDLCIKQLKEYFSGKRTLFSVPLAPKGTEFQIRVWQTLQSIPYGEIWSYKKLALTLGSVNYCRAVGMANSRNPISLIIPCHRVIGHNGKLVGYTGGLDIKRWLLHYEKVDIDE

SEQ ID NO: 69225 - protein, 538 aa, Proteus mirabilis
MSRKLKLALAQLNLVVGDIEGNCERMLATVKAQEDADLVLFSELALCGYSPEDLLFRPDFQQRCEEQLVRLEQASKKTAIVVGHPWWQKGTIYNALSFFYQGELQARYFKQQLPNYGVFDEKRYFQQGNERCVVPFKGYHLGLLICEDIWINEPIDALKQAGADLVLSINASPYSREKPHIRTQLIKEHCQRTHLPVVYLNQIGGQDELVFDGCSKVFDERGTITHRLAAFDEQVAVVEFDELTIVPMQDAAPELSPLAQVYQALVLATRDYVTKNGFKGAILGLSGGIDSGLTVAIAVDALGKESVQAVMMPFRYTSEMSIHDAKEQADLLGVEFDTVSIEPMFDAFMDQLSPMFKGSAVDTTEENLQARCRAVILMAMSNKRRRLVLTTSNKSESAVGYSTLYGDMAGGFDVLKDVPKTLVFELAKYRNTLSPAIPQRVIDRPPSAELAPGQTDQDNLPPYDILDALLEGYVEQDKSVSDLVAAGFDEAIVRKVVKLVDINEYKRRQAPVGPRITSRNFGKDRRYPITSGFGRHNW

SEQ ID NO: 69226 - protein, 325 aa, Pseudomonas syringae
MKQMTFADAEYAGKRKHTRRERFLIEMDQVVPWKGLIALIEPHYPKGEGGRPAYPLMAMLRIHLMQNWFGYSDPAMEEALYETTILRQFAGLSLDRIADETTILNFRRLLEKHELAGGILQVINGYLGDRGLMLRQGTVVDATIIHAPSSTKNKDGKRDPEMHQTKKGNQYFFGMKAHIGVDAESGLVHSLVGTAANVADVTQVDQLLHGEETYVSGDAGYTGVDKRAEHQDRQMIWSIAARPSRYKKHGEKSLIARVYRKIEFTKAQLRAKVEHPFRVIKRQFGYTKVRFRGLAKNTAQQATLFALSNLWMVRKRLLAMGEVRL

SEQ ID NO: 69227 - protein, 459 aa, Pseudomonas syringae
MTNTAFNSLPLSAAMLANLESLGYAEMTPIQAQSLPVILKGMDLIAQAKTGSGKTAAFGIGLLNPINPRFFGCQALVMCPTRELADQVAKEIRRLARSEDNIKVLTLCGGVSFGPQIGSLEHGAHIIVGTPGRIQQHLRKGSLVLDGLNTLILDEADRMLDMGFYDSIADIIEQTPQRRQTLLFSATYPVGIKQLSSKFMRDPQTVKVEALHADSQIEQIFYEISPEQRLEAVVKVLGHFRPTSCVAFCFTKQQVQEVVDHLTAKGMSAVGLHGDLEQRDRDQVLAMFANRSTSVLVATDVAARGLDIDALDMVLNVELARDSEIHIHRVGRTGRAGETGIAVSLVAPSESQRARAIEELQKAPLNWQQYDSLSIKEGGKLLPAMTTLCIGSGRKDKLRPGDILGALTGEAGIAGTQVGKIAIFDFQAYVAVERSMAKQALERLNNGKIKGKSLRVRIL

SEQ ID NO: 69228 - protein, 1636 aa, Pseudomonas syringae
MSALSSLLDTYRSAAVTEREKGTYFEELICGYLRNEATYRDLYEKVWTYAEWAKEQGLSGKDAGIDLVARTQGTGEYHAIQCKLYAEDYKVQKKDIDSFFTASGKAPFTHRIIVATTNNWSEHAEDALQGQHQTINKIDLQALEESQIDWAKYQPHQAVVLKARKQLRDHQQTALNATAAGLNDAERGKLIMACGTGKTFTSLKIAERLAGKGKRVLFLVPSLSLLSQTLTEWTQESETPLHSFAVCSDSDVGKKRKADEDTVQVFTHELRYPATTKADRLAAEMLKRHDAEHMSVVFSTYHSIDVISRAQHEYDLAAFDLVICDEAHRTTGATFDDDDESTFVRIHDVDYIRAIKRLYMTATPRIYGDNAKIKAESGEVTLCSMDDEALYGKELFVINFSEAVQRGLLTDYKVLVLTVEESIVNRRLQELLKDEDNQLKVDDAAKIVGCWKALAKQGLAENLVGDDQPMKRAVAFCQVISPSYKGTKHKVSSINIASMFQSVVEAYQESENIDEASRIICEAAHVDGCMNASQKEAKLNWLKEEPPANTCRILSNVRCLSEGVDVPALDAVLFLTPRNSQVDVVQSVGRVMRNAPGKRRGYVVLPVVIPAGMEPHEALNDNQTYKVVWQVLQALRSHDDSFDAMVNKLDLIGSDPRKMEVIAITDKADKKAKRTSGTSNGQAGKGQYGIGEKRPRHDAEGQMTQQAELTYEVGEIEKAIYAKIVEKCGNRHHWEDWANDIAKIARTHIDRIQGILENSANTREKAAFNAFAAELRDDLNDSISDGEIVEMLAQHLVTKPVFDALFDEYSFAKHNPMAKAMQGVLDALHEHHLEKEADTLEKFYASVRQRALGIDNAQGKQKIIVELYDKFFRNAFPKMTERLGIVYTPVEVVDFILHSVNHLLQQEFGQTLGSKGVHIIDPFTGTGTFITRLIQSGLIKPEELPHKYKHEIHANELVLLAYYIAAINIEAAYHGEVIDGYTPFEGICLTDTFQMYEKDDLVDALLVDNSARRKRQKNLDIRVIVGNPPYSEGQKSENDNNANLGYPKLDSQIRSTYARQSAATLSKGLYNSYIRAIRWASDRLGESGIVGFVTNAGFLEARFADGMRKCLAEEFSNIYIFHLRGLRGKHTSGERAKQEGGQIFGMGSGTAICIFFLVKNTDSERRGNIYFHSIEEYLDRDQKLAKLKELQDVSGIAAANGWTEISPDSYGDWLRQREDGFNDFFLLGDKKVNSPKLFHSYSQGILTARDTWCFNGSNKKVVKNMGAMIDFYNGEVLRFNKRFNGIDQKSRNALVDSFIDANPEKISWTRALKQDLSKGKKFDFQESGMRECLYRPFTKQWIYFDRRFNEMVYQMPRIFPNAADHNLMICVSGPGCITGFSAIISKVPVEFCIAAMKGGSQCFPLYLYDEPTEGPDQGGLFVTSETPALRRRDAITDEGLTHFEASYQDEKIGKEDLFYYVYGILHSQDYRERYADNLSKELPRIPAVRNAADFWVFSKAGRALADLHLNYETVEPYPLTIEAKGTLTDADYRVEKMKFAKKGDKTTVIYNHRITLKGVPEAAWDYVVNAKAALSWVMERQAVRTDKASGIVNDANDWATETMGNPKYPLELFQRVVTVSLETQKIVNSLPALDIA

SEQ ID NO: 69229 - protein, 289 aa, Pseudomonas syringae
AEERPHVGALINGAKERVTEVLNARKASFEQAELTAKLAAECIDVTLPGRGQTSGGLHPITRTLERIEQFFTHIGYGIAEGPEVEDDYHNFEALNIPGHHPARSMHDTFYFNANMLLRTHTSPVQVRTMESQQPPIRIVCPGRVYRSDSDITHSPMFHQIEGLLVDRDINFADLKGTIEEFLRVFFEKELAVRFRPSYFPFTEPSAEVDMECVMCSGKGCRVCKQTGWLEVMGCGMVHPNVLRMSGIDPEEFQGFAFGMGVERLAMLRYGVNDLRLFFDNDLRFLAQFR

SEQ ID NO: 69230 - protein, 792 aa, Pseudomonas syringae
MKFSEQWLRGWVSPQVSRDELVARLSMAGLEVDSVTLAAGIFTGVVVGEVLSTEQHPDADKLRVCQVSNGRETFQVVCGAPNVRPGLKIPFAMIGSELPGDFKIKKAKLRGVESNGMLCSAAELQAGEGNDGLMELAADAPVGQDIRVYLGLDDASIEVDLTPNRGDCLSVAGLAREVGALYAADVTRPQIAAVSAVHDEVRPVEVLAPAACPRYLGRVIRNVDLSRPTPLWMVERLRRSDVRSIDAAVDITNYVMLELGQPLHAFDLAEINGGIRVRMAEEGEKLVLLDGQEVSLRADTLVIADHQRALAIAGVMGGEHSGVTAGTRDIFLESAFFDTISVAGKARSYGLHTDASHRYERGVDWQLAREAMERATGLLLDITGGEAGPVIEVVSEQHLPSIAPVTLRASRVEQMLGLVIENAEIERLLTGLGLTVSAEADGQWRVDVPSHRFDISLEVDLIEELARLYGYNRLPVRYPQARLAPQANAEAKGDLPELRRLLVARGYQEAITYSFIDPKWFELFSPGVKPLLLANPISNDMAAMRASLWPGLVKALQHNLNRQQDRVRMFESGLRFVGQLDGLKQEPMLAGVVCGSRLPEGWAQGRDAVDFFDVKADVEAVLGFAGALGEFTFTPGQHPALHPGQTARILRDGREVGFLGAIHPELSKNLGLDRPVFVFELVLAEVATGRLPKFHELSRFPEVRRDLALLADRDVSASAVLDVIRENAGEWLTDLRLFDVYQGKGIDPHRKSLAVGLTWQHPSRTLNDDEVNATTLAILTSLEERLNATLRK

SEQ ID NO: 69231 - protein, 116 aa, Pseudomonas syringae
MRAHFTKILNKWKQDLMQEVDRTVDHMKDEAANFPDPADRASQEEEFSLELRARDRERKLIKKIDKTLQLIKDEEYGWCESCGVEIGIRRLEARPTADQCVDCKTLAEIKEKQVGK

SEQ ID NO: 69232 - protein, 805 aa, Pseudomonas syringae
MSENQTYDSSSIKVLKGLDAVRKRPGMYIGDTDDGSGLHHMVFEVVDNSIDEALAGHCDDISIIIHPDESITVRDNGRGIPVDVHKEEGVSAAEVIMTVLHAGGKFDDNSYKVSGGLHGVGVSVVNALSELLLLTVRRSGKIWEQTYIHGVPQEPMKIVGESDSTGTQIHFKPSAETFKNIHFSWDILAKRIRELSFLNSGVGIVLKDERSGKEELFKYEGGLRAFVEYLNTNKTPVNEVFHFNVQRDDGIGVEIALQWNDSFNENLLCFTNNIPQRDGGTHLVGFRSALTRNLNNYIEQEGLAKKHKVATTGDDAREGLTAIISVKVPDPKFSSQTKDKLVSSEVKTAVEQEMGKYFSDFLLENPNEAKAVVGKMIDAARAREAARKAREMTRRKGALDIAGLPGKLADCQEKDPALSELYLVEGDSAGGSAKQGRNRRTQAILPLKGKILNVEKARFDKMISSQEVGTLITALGCGIGREEYNIDKLRYHNIIIMTDADVDGSHIRTLLLTFFFRQLPELIERGYIYIAQPPLYKVKKGKQEQYIKDDEAMEEYMTQSALEDASLHLSESAPGISGTALEKLVHDFRMVMKTLKRLSRLYPQELTEHFVYLPPITLEQLSDHEGMQAWLALFDVRLRTGEKSGLVYKASLREDRERNVWLPEVELISHGLSNYITFNRDFFGSNDYKTVTALGAQISTLLEEGAYVQRGERKKPVTEFKQALAWLMAESTKRHTIQRYKGLGEMNPDQLWETTMDPSVRRMLKVTIEDAIGADQIFNTLMGDAVEPRRDFIESNALAVSNLDF

SEQ ID NO: 69233 - protein, 183 aa, Pseudomonas syringae
MAIFLLQSVAEREFESTQQCATFIIVLGSGGQGNVQTAESIDLVVIDFRENDLLFYAHAVVTTTIEGLGIQAAEVANPRQGDRQQTIQELIHTIAAQSHFDADRPTFTDFKASDGFPSVSHNDFLTGDLFQVSNSVLDDFFVTDRLAQTHVQGDFGNARNFHHVPKLKFFLKLRSDFLPINLF

SEQ ID NO: 69234 - protein, 104 aa, Pseudomonas syringae
MQKIRRDDEIIVIAGKDKGKRGKVLKVLADDRLVVGGINLVKRHTKPNPMSGVQGGIVEKEAPLHASNVAIFNGATNKADRVGFKVEDGKKIRVFKSTQKAVDA

SEQ ID NO: 69235 - protein, 122 aa, Pseudomonas syringae; identical to SEQ ID NO: 68062

SEQ ID NO: 69236 - protein, 466 aa, Pseudomonas syringae
MVEEAVSVIKDAQARLDQVYAEYAEPDADFDKLAAEQAKLESILQASDGHNLERQLEVAADALRLPAWDAKVSVLSGGEKRRVALCRLLLSAPDMLLLDEPTNHLDADSVAWLEHFLHDFPGTVVAITHDRYFLDNVAGWILELDRGAGIPYEGNYSGWLEAKSDRLAQESKQQTAHEKAMKDELEWVRKGAKARQSKSKARLQRFEEMQSQEFQKRSETNEIYIPAGPRLGDKVIEFKNVTKGYGDRVLIDNLSFSMPKGAIVGVIGGNGAGKSTLFRMLMGKEQPDSGSIEVGETVQLACVDQSRDDLDGSKSVFQAVSDGSDVIRIGNYEIPSRTYVGRFNFKGGDQQKFVKDLSGGERGRLHLALTLKEGGNVLLLDEPSNDLDVETLRSLEEALLDFPGAAIVISHDRWFLDRVATHILAYEDDSQAIFFEGNYTEYEADRKKRLGDAAAQPHRVRHKKLA

SEQ ID NO: 69237 - protein, 223 aa, Pseudomonas syringae
ILNFRRLLEKAELAGGILQVINGYLGDRGLMLRQGTVVDATIIHAPSSTKNKDGKRDPEMHQTKKGNQYFFGMKAHIGVDAESGLVHSLVGTAANVADVTQVDQLLHGEETYVSGDAGYTGVDKRAEHQDRQMIWSIAARPSRYKKHGEKSLIARVYRKIEFTKAQLRAKVEHPFRVIKRQFGYTKVRFRGLAKNTAQQATLFALSNLWMVRKRLLAMGEVRL

SEQ ID NO: 69238 - protein, 281 aa, Pseudomonas syringae
MRTAPSRPAYPLMAMLRIHLMQNWFGYSDPAMEEALYETTILRQFAGLSLDRIADETTILNFRRLLEKHELAGGILQVINGYLGDRGLMLRQGTVVDATIIHAPSSTKNKDGKRDPEMHQTKKGNQYFFGMKAHIGVDAESGLVHSLVGTAANVADVTQVDQLLHGEETYVSGDAGYTGVDKRAEHQDRQMIWSIAARPSRYKKHGEKSLIARVYRKIEFTKAQLRAKVEHPFRVIKRQFGYTKVRFRGLAKNTAQQATLFALSNLWMVRKRLLAMGEVRL

SEQ ID NO: 69239 - protein, 259 aa, Pseudomonas syringae
MKELTADDERLARKAIELLELFALNIDDTEQRIVGVCQRAWTPVGPVAAVCVQQRFVCLARTTLDRMYARDIKVVAVVNFPHGGSNVDLVASEVRSALMSGADEIDVVYPFRALLGGDRQTGMELLATCAKLCSGRATLTATLETGDLRDSQMILDACRDAIASGADFIKTSTGKAAVHVTPQAARIMLGALADVGGQAGLKVAGGLRTFEEARAYMAMARGRFGPQWVNIRRVRLGGSSLLDDLLASLGLLEASSSGF

SEQ ID NO: 69240 - protein, 325 aa, Pseudomonas syringae; identical to SEQ ID NO: 69226

SEQ ID NO: 69241 - protein, 389 aa, Pseudomonas syringae
MLMTVLKMTDLDLQGKRVLIREDLNVPIKDGVVSSDARILASLPTIRLALEKGAAVMVCSHLGRPTEGEFSAENSLKPVAEYLSKALGRDVPLVADYLDGVDVKAGDIVLFENVRFNKGEKKNADELAQKYAALCDVFVMDAFGTAHRAEGSTHGVAKYAKVAAAGPLLAAELEALGKALGAPAQPMAAIVAGSKVSTKLDVLNSLSAICDQLIVGGGIANTFLAAAGHKVGKSLYEPDLLDTARAIAAKVSVPLPTDVVVAKEFAESATATVKLIADVADDDMILDIGPQTAAHFAELLKSSGTILWNGPVGVFEFDQFGEGTKTLAKAIAESKAFSIAGGGDTLAAIDKYGVADQISYISTGGGAFLEFVEGKVLPAVEMLEQRARA

SEQ ID NO: 69242 - protein, 354 aa, Pseudomonas syringae
MALISMRQMLDHAAEFGYGVPAFNVNNLEQMRAIMEAADKTDSPVIVQASAGARKYAGAPFLRHLILAAIEEFPHIPVVMHQDHGTSPDICQRSIQLGFSSVMMDGSLREDGKTPADYDYNVDVTRRVVAFAHACGVSVEGELGVLGSLETGMAGEEDGVGAEGVLDHSQMLTDPEEAADFVKRTQVDALAIAIGTSHGAYKFTKPPTGDILAIERIKEIHKRIPNTHLVMHGSSSVPQEWLKIINEFGGDIKETYGVPVEEIVEGIKHGVRKVNIDTDLRLASTGAIREFMAKHPSEFDPRKYLAKTVSAMRDVCIARYEAFGTAGNASKIKPVSLDAMFERYARGELDAKIN

SEQ ID NO: 69243 - protein, 436 aa, Pseudomonas syringae
MYVCGMTVYDYCHLGHGRSMVAFDLVTRWLRFSGYDLTYVRNITDIDDKIINRARDNGESFDALTARMIDAMHEDEARLNILKPDMEPRATDHIPGMHAMIQTLIDKGYAYAPGNGDVYYRVGKFQGYGKLSRKKIEDLRIGARIEVDESKQDPLDFVLWKGVKPGEPSWESPWGAGRPGWHIECSVMSTCCLGDTFDIHGGGSDLEFPHHENEIAQSEAATGKPYANAWLHCGMIRINGEKMSKSLNNFFTLRDVLEKYHPEVVRYLLVSSHYRSAINYSEDSLRESKAALERFYHALKGLPAAEPAGGEAFVERFTTAMNDDFGTPEACAVLFEMVREINRLRETDVAAAAGLAARLKQLASVLGVLQLEADDFLRAGAQGRVDAAEVEALIQARLAARAAKDWAESDRIRDQITAMGVLLEDGKGGTTWRLGD

SEQ ID NO: 69244 - protein, 564 aa, Pseudomonas syringae
MSKPTPEPAAHSKAGPAVPTNFLRPIVQADLDSGKHSKIITRFPPEPNGYLHIGHAKSICVNFGLAKEFGGDTHLRFDDTNPAKEDQEYIDAIMNDVKWLGFEWAGEVRYASQYFDQLHDWAVELIKAGKAYVDDLTPEQAREYRGTLTEPGKNSPFRERSVEENIDLFARMKAGEFEDGARVLRAKIDMASPNMNLRDPILYRIRHAHHHQTGDKWCIYPIYDFTHGQSDAIEGITHSICTLEFESHRPLYDWFLDNLPVPCKPRQYEFSRLNLNYTITSKRKLKQLVDEKHVNGWDDPRMSTLSGFRRRGYTPKSIRNFCEMIGTNRSDGVVDFGMLEFSIRDDLDHSAPRAMCVLRPLKVVITNYPEGQVEKLELPRHPKEDLGMRELPFSREIYIDRDDYMEEPPKGYKRLEPNGEVRLRGSYVIRADEAIKDADGNIVELRCSYDPDTLGKNPEGRKVKGVVHWVPAAESVECEVRLYDRLFRSANPEKAEDGASFLDNINPDSLQVLTGCRAEPSLGHAQPEDRFQFEREGYFCADIKDSKPGQPVFNRTVTLRDSWT

SEQ ID NO: 69245 - protein, 101 aa, Pseudomonas syringae
MAKKSMKNRELKRQLTVAKYAKKRAELKAIIVDLNASPEARWEATVALQKQPRDASAARMRNRCRITGRPHGVYRKFGLGRNKLREAAMRGDVPGLVKASW

SEQ ID NO: 69246 - protein, 84 aa, Pseudomonas syringae
MYEFLDRLLSISLPRVRDFRGLNAKSFDGRGNYSMGVKEQIIFPEIDYDKIDALRGLDITLTTTAKNDDEGRALLRAFKFPFRN

SEQ ID NO: 69247 - protein, 136 aa, Pseudomonas syringae
MLILHGKQSLNEDVRDAVADKRKQGWELDVRLTWKAGDAQRLVNEALAAGHRHIVAGGGDGTLRDIAEALALAATKASLTILPLGTANDFARAAGVPLDVSKALQLMDVAPRAVDLGEVGGKLFLNMATGGFGSQA

SEQ ID NO: 69248 - protein, 257 aa, Pseudomonas syringae
MLGCDMVFAVYLPPQAEQGGKLPVLYWLSGLTCTDENFMQKAAALRFAAELGIIIVAPDTSPRGADVPDDPEGAWDFGHGAGFYLNATEQPYARHYQMHDYVVKELPALVEAHFPASQARSISGHSMGGHGALVCALRNPGRYKSVSAFSPISNPIDCPWGQKAFSRYLGEDRSRWREWDASVLIAEAAEKLPTLVDQGDRDDFLLNQLKPEVLVQAAKAAHYPLTLRMQPGYDHSYFFIASFIEDHLRHHAAALNS

SEQ ID NO: 69249 - protein, 204 aa, Pseudomonas syringae
VQHIIGMPLQLIIIGMVQSFIIFIINAQQLLIISMLMPGIGINMHFMQSASTVQVIMHFIIGIGMPIGIIIGMFMPDIMFIIAIPSSDMHIIDMLPHCIIIGMPQVIIIDIMSALFLNIVMSMPAAGFMVHIMPSAIISHCMVAIIMGMPIIGIIGMALFIGICIAFIMFETPVIERDVEIHGRDSRDTQTRRKTLVKRSDSTL

SEQ ID NO: 69250 - protein, 164 aa, Pseudomonas syringae
MQLDSSFSPVRRIAYVVENARVEQRTNLDKLVIDLETNGTLDPEEAIRRAATILQQQLAAFVDLKGDSEPVVIEQEDEIDPILLRPVDDLELTVRSANCLKAENIYYIGDLIQRTEVELLKTPNLGKKSLTEIKDVLASRGLSLGMRLDNWPPASLKKDDKATA

SEQ ID NO: 69251 - protein, 241 aa, Pseudomonas syringae
MATLKAQHLAKSYKSRQVVRDVSISIDSGQIVGLLGPNGAGKTTCFYMIVGLVQADQGRVLIDDLDISHQPMHGRARAGIGYLPQEASIFRKLSVSDNIMAILETRKELDAGARRKELESLLQEFHITHIRDNLGMSLSGGERRRVEIARALATSPKFILLDEPFAGVDPISVGDIKQIIHHLKAKGIGVLITDHNVRETLDICETAYIVNDGQLIAEGDSETILANQLVKEVYLGHEFRL

SEQ ID NO: 69252 - protein, 177 aa, Pseudomonas syringae
MSRVAKNPVKLPSGVEVKLVGQQLSVKGAKGTLELIIHSSVEIVEEAGELRFAARNGDQQTRAMAGTTRALVNNMVQGVSQGFERKLQLVGVGYKAQAKGTVLNLALGFSHPVDYELPNGITAETPSQTDILIRGIDKQLVGQVAAEIRDFRRPEPYKGKGVRYADEVVRRKEAKKK

SEQ ID NO: 69253 - protein, 444 aa, Pseudomonas syringae
MAKQGALSALGKGGMSELWARLRFLFLAIIVYRIGAHIPVPGINPDRLAELFRQNEGTILSLFNMFSGGALERMSIFALGIMPYISASIIMQLMTAVSPQLEQLKKEGEAGRRKISQYTRYGTVVLALVQAIGMSVGLASQGVAFSGDLGFHFVAVTTFVAGAMFMMWLGEQITERGVGNGISMLIFAGIVAGLPRAIGQSFESARQGDINIFALVAIGLLAVAIIGFVVFIERGQRRIAVHYAKRQQGRKVFAAQTSHLPLKVNMAGVIPAIFASSILLFPASLGSWFGQSEGLGWLQDISQSIAPGQPLNILLFSAGIIFFCFFYTALMFNPKDVAENLKKSGAFIPGIRPGEQSARYIDGVLTRLTMFGALYMTAVCLLPQFLVVAANVPFYLGGTSLLIVVVVVMDFMSQVQSHLVSHQYESLMKKANLKGYGGSGGMLR

SEQ ID NO: 69254 - protein, 332 aa, Pseudomonas syringae
SLREQLTARLPDYMVPAQILLLDQLPLTANGKLDKRALPKPGVVKQRYTAPVGEIEEKLAAVWADVLKLEQVGSTDNFFELGGDSILSLQIIARAKRQGIKLSPKQLFEKQTIGQLASVARLIEKKPAAAAEQVSGSLPLLPIQARFFEMDIPERQHWNQALMLKPLQTLDVTHLQAALTAVAIVMLSARDELDDRLIGFKVGADDYITKPFAMSEVLARVEAVVGRRQRKDNRVMVVADLQFDLDTLEISRNGAPLKLNPTNMKLLELLMRKSPHIVKRSELEEVLWGRDAPNSSSLRSNIHILRRVLDGGHETPLLHTAHGLGYKLCVQS

SEQ ID NO: 69255 - protein, 161 aa, Pseudomonas syringae
MGWVSLLEQRLKAEGYTDKVVNASISGDTSAGGQARLPALLAEHKPALVILELGGNDGLRGQQPAQLQQNLSSMIDSSRAAGARVLLLGMQIPPNYGPRYTTAFKEVYSHLAEEKKVPFVPFFLEGVGGVPGLMQADGLHPAAAAQGKLLENVWPSLKPLL

SEQ ID NO: 69256 - protein, 325 aa, Pseudomonas syringae; identical to SEQ ID NO: 69226

SEQ ID NO: 69257 - protein, 325 aa, Pseudomonas syringae; identical to SEQ ID NO: 69226

SEQ ID NO: 69258 - protein, 393 aa, Pseudomonas syringae
MPRITLESATLERAHYDYLIVGAGFAGSVLAERLAAGSDKRVLLIDRRPHIAGNAYDHLDGAGVLVHQYGPHIFHTNAARIVEYLSRFTEWRDYEHRVLASVDGQLLPIPINLDTLNSLYGLQMNEREAEAFLASRAEPVETIQTSEDVVINQVGRELYEKFFRGYTRKQWGLDPSQLDRAVTARVPTRTNSDSRYFTDTFQKMPLHGYTRMFERMLDHPLIDIALGVGFADVREVAQYRHLIYCGPIDEYFDYCYGRLPYRSLRFEHTTVDQARFQSVAVVNYPDETVPHTRITEYKHLTGQQHARTSLSHEFPSAEGDPYYPIPRPENAELYKRYKALADQSDEVTFVGRLGTYKYYNMDQVVGQALALYQRLRQGLPERIPEAVERPARG

SEQ ID NO: 69259 - protein, 316 aa, Pseudomonas syringae
MQAATRKHTRRERFLIEMDQVVPWKGLIALIEPHYPKGEGGRPAYPLMAMLRIHLMQNWFGYSDPAMEEALYETTILRQFAGLSLDRIADETTILNFRRLLEKHELAGGILQVINGYLGDRGLMLRQGTVVDATIIHAPSSTKNKDGKRDPEMHQTKKGNQYFFGMKAHIGVDAESGLVHSLVGTAANVADVTQVDQLLHGEETYVSGDAGYTGVDKRAEHQDRQMIWSIAARPSRYKKHGEKSLIARVYRKIEFTKAQLRAKVEHPFRVIKRQFGYTKVRFRGLAKNTAQQATLFALSNLWMVRKRLLAMGEVRL

SEQ ID NO: 69260 - protein, 243 aa, Pseudomonas syringae
MRSSRHACSARGHKVKIKAPVITIDGPSGSGKGTVAGLLAKKLGWCLLDSGALYRLLAFAARNHGVDLTNEEALKLLAAHLDVQFETTAAGQGQRIILEGEDVTQAIRNEQIGSGASQVASLPAVRDALLMRQRAFQEEPGLVADGRDMGTVVFPDAPLKVFLTASAEERARRRYLQLKAKGDDVSLSSLLDEICARDERDTQRAVAPLKPAHDAIQLDSTELSIEQVLERILSEIALRDIAG

SEQ ID NO: 69261 - protein, 118 aa, Pseudomonas syringae
MEIFKEFTFESAHLLPHVPAGHKCGRLHGHSFRVGIHLAGKVDPHTGWIRDFSEIKAIFKPLYERLDHNYLNDIPGLENPTSENLAKWIWNELKPLLPELSAIRIHETCTSGCEYRGD

SEQ ID NO: 69262 - protein, 331 aa, Pseudomonas syringae
MITRQLGNHGPQVSAIGLGCMGMSDFYTTGIDEQESIATLHRALELGVTFFDTADMYGPHTNEALLGRALQGRREGIYLASKFGIVRGDDPHARGVNGSPEYIRQSIDGSLKRLSTDYLDLYYQHRVDPNVPIEDTIGAMAELVKAGKVRHIGICEASAATIERAHKVHPLAAVQSEYSLWSRDPEHDDVLATCRRLGIAFVAYSPLGRGFLTGALRTVDDFAEDDYRRFSPRFQGENFNRNLALVEKVKGLATAKGISASQLALAWVLAQGDDIIPIPGTKQRKYLESNVAAATLTLSHDELAQLDAIFPASGAVSGERYNAESMKSLNG

SEQ ID NO: 69263 - protein, 325 aa, Pseudomonas syringae
  MISC_FEATURE (131)..(131): X=any amino acid
  MISC_FEATURE (207)..(207): X=any amino acid
MKQMTFADAEYAGKRKHTRRERFLIEMDQVVPWKGLIALIEPHYPKGEGGRPAYPLMAMLRIHLMQNWFGYSDPAMEEALYETTILRQFAGLSLDRIADETTILNFRRLLEKHELAGGILQVINGYLGDRXLMLRQGTVVDATIIHAPSSTKNKDGKRDPEMHQTKKGNQYFFGMKAHIGVDAESGLVHSLVGTAANVADVTQVDQXLHGEETYVSGDAGYTGVDKRAEHQDRQMIWSIAARPSRYKKHGEKSLIARVYRKIEFTKAQLRAKVEHPFRVIKRQFGYTKVRFRGLAKNTAQQATLFALSNLWMVRKRLLAMGEVRL

SEQ ID NO: 69264 - protein, 325 aa, Pseudomonas syringae; identical to SEQ ID NO: 69226

SEQ ID NO: 69265 - protein, 108 aa, Pseudomonas syringae
MMKGGMAGLMKQAQQMQEKMAKMQEELANAEVTGQSGAGLVSVVMTGRHDVKRINLDDSLMQEDKEVLEDLIAAAVNDAVRKIEQASQDKTASMTAGMQLPPGMKLPF

SEQ ID NO: 69266 - protein, 340 aa, Pseudomonas syringae
MLMTSHARIVDIEYELPVHSLDNETLAREFPEWDVDKIFAKTGIGERHIIDKNETASDLAYRACEKLFLKGHIQRDEIDALIYCTQSPDYVLPATACILQHRLQLPTTCAAFDFNQGCSGFIYGLGIAKGLIESGQCKNVLLVTAETYSRYIHPQDKSVRTLFGDAAAVTLLRATEGGPFLDRFRYGSDGSGAENLIVPIGGARRPSAENIEPPAYGDDSGNVRTDANLYMNGPAIFEFSMKRVPQLFASLFDDEVGVSDVDLFVFHQANHFMLDALRRRLKLPAEKFVSAFQHCGNTVSCTIPIALKESMDKGVLKPGDRVATVGFGVGYSWGACVIRW

SEQ ID NO: 69267 - protein, 1047 aa, Pseudomonas syringae
MSLFFIKRPNFAWVLALFILLAGLMALPALPVAQYPNVAPPQITITATYPGASAKVLVDSVTSVIEEELNGAKGMLYYESTSNSTGSAEINVTFVPGTNPDMAQVEVQNRIKKAEARLPQTVLSQGLQVEQASSGFLMIYTLSYTGDSANKDTVALADYAARNVNNEISRVNGVGRLQFFAAEAAMRVWIDPQKLVGFGLSIDDVNAAVRAQNVQVPAGSFGSSPGSSLQELTATLAVKGTLDNPEEFGRIVLRANEDGSTVHLSDVARVAIGSQDYSFESRLNGKRAVAGAVQLSPGANAIETVKAVKQRLTELSVNFPEGVEFSVPYDTSRFVDVAIDKVIYTLIEAMVLVFLVMFLFLQNIRYTLIPTIVVPVCLAGTLAIMYLLGFSVNMMTMFGMVLAIGILVDDAIVVVENVERIMAEEGLSPAAATVKAMQQVSGAIFGITLVLAAVFLPLAFMGGSVGVIYQQFSLSLAVSILFSGFLALTFTPALCATLLKPIPAGHHEKRGFFGGFNRLFGKFTDRYERVSSSMIKRAGRYMLLYVGIVGLLGFFYLRLPESFVPVEDQGYLIIDVQLPPGATRARTDATAQLLEIYMLSREATGAVTMLLGFSFSGMGENAGLAFPTLKDWSVRGDGQSAGEEAAAFNQHFAGLSDGTVMAVTPPPIDGLGTSGGFALRLQDRAGLGREALLAARNELLGKANGNPKILYAMMEGLAEAPQLRLNIDREKARALGVSFESISNALSTAFGSSVISDFANAGRQQRVVVQAEQSSRMTPESVLKLYVPNSSGTLVPLSAFVSTHWEEGPVQIARYNGYPTFRIAGDAPPGVSTGEAMAEIERIVSRLPPGIGYEWTGLSYQEKVASGQATGLFALALLVVFLLLVALYESWAIPLVVMLIVPVGALGSVLAVTAVGMPNDVYFKVGLITIIGLAAKNAILIVEFAKELWDQGHSLRDAALQAARLRFRPIVMTSLAFILGVVPLTLATGAGAASQRAIGTGVIGGMLSATLLGVVLVPIFFVWVLSVLRRKPHETKQLADAEQPDKD

SEQ ID NO: 69268 - protein, 419 aa, Pseudomonas syringae
MNLTELKQKPITELLEMAEQAGIENMARSRKQDVIFSLLKRHAKSGEEISGDGVLEILQDGFGFLRSADASYLAGPDDIYVSPSQIRRFNLRTGDTIVGKIRPPKEGERYFALLKVDTINYDRPENAKNKILFENLTPLFPTIRMKMEAGNGSTEDLTGRVIDLCAPIGKGQRGLIVAPPKAGKTIMLQNIASNITRNNPEVHLIVLLIDERPEEVTEMQRTVRGEVVASTFDEPPTRHVQVAEMVIEKAKRLVEHKKDVVILLDSITRLARAYNTVIPSSGKVLTGGVDAHALEKPKRFFGAARNIEEGGSLTIIATALVETGSKMDEVIYEEFKGTGNMELPLDRKIAEKRVFPAININRSGTRREELLTADDELQRMWILRKLLHPMDEVAAIEFLIDKLKQTKTNDEFFLSMKRK

SEQ ID NO: 69269 - protein, 502 aa, Pseudomonas syringae
MAHNEAVDVVLVGAGIMSATLAVLLKELDPGLKLEVVELMDSGAAESSNPWNNAGTGHAGLCELNYTPPAADGSIDIKKAVHINTQFEVSKQFWAFLARKGTFGSAKSFINPVPHLSFVQGENGISFLKTRFEAMSKHHAFSSMEYTEDKATLAEWMPLMMSGRAADEKIAATRMLNGTDVNFGALTNQLLNHLSSAPDTQIKYRSRVTGLTRKGAGWTVMVKDVNGGGTREIDAKFVFLGAGGAALPLLQMSGIEESKGFGGFPVSGQWLRCDNPEVVKHHQAKVYSQAAVGSPPMSVPHLDTRVVDGNKSLLFGPYAGFTTKFLKHGSFLDLPLSVRVANIKPMLAVARDNMDLTKYLVSEVMQSMEQRLESLRRFYPEAKAEDWRLEVAGQRVQIIKKDAKKGGVLQFGTELVSAQDGSLAALLGASPGASVTVSIMLELIERCFPEKTRTEWASKLNEIFPAREKILETDAQLYERVSTQNDEALELVEKKSQEQSFA

SEQ ID NO: 69270 - protein, 554 aa, Pseudomonas syringae
MAYYRNPSDVTAMPAWQALTKHRQAMQDFSMREAFTDDPKRFSQFTLSSAGLFLDYSKNLITAETRDLLVALAGEVGLKDAIKAQYYGELVNSSEGRPALHTALRRPVGDKLKVNGVDVIPDVHRVLNQMTELVGRIHDGLWRGYTEKPITDVVNIGIGGSFLGPELVSEALVAYAHKGVRCHYLANIDGSEFHELSMKIRAETTLFIVSSKSFNTLETLKNAQAARAWYLAQGGSEVELHRHFIAVSSNNAAAVAFGIREENIFPMWDWVGGRYSLWSAIGLPIALAIGMSNFKELLSGAYTMDQHFQSAPFDQNMPVLLALLGVWYGNFWNAQSHAILPYDHYLRNITKHLQQLDMESNGKSVRQDGTPALTDTGPVIWGGVGANGQHAYHQLLHQGTQMIPADFIVPIVSFNPVADHHQWLYANCLSQSQALMMGKTRAEAEAELRDKGMSEEEVQKLAPHKVIPGNRPSNTLVVERISPRRLGALVAMYEHKVFVQSVIWGTNAFDQWGVELGKEMGKAVYQRLTGGTEEPADDASTQGLINYFRGRHRG

SEQ ID NO: 69271 - protein, 325 aa, Pseudomonas syringae
  MISC_FEATURE (222)..(222): X=any amino acid
MKQMTFADAEYAGKRKHTRRERFLIEMDQVVPWKGLIALIEPHYPKGEGGRPAYPLMAMLRIHLMQNWFGYSDPAMEEALYETTILRQFAGLSLDRIADETTILNFRRLLEKHELAGGILQVINGYLGDRGLMLRQGTVVDATIIHAPSSTKNKDGKRDPEMHQTKKGNQYFFGMKAHIGVDAESGLVHSLVGTAANVADVTQVDQLLHGEETYVSGDAGYXGVDKRAEHQDRQMIWSIAARPSRYKKHGEKSLIARVYRKIEFTKAQLRAKVEHPFRVIKRQFGYTKVRFRGLAKNTAQQATLFALSNLWMVRKRLLAMGEVRL

SEQ ID NO: 69272 - protein, 75 aa, Pseudomonas syringae
MAKYPNTFHRASLMKQMTFADAEYAGKRKHTRRERFLIEMDQVVPWKGLIALIEPHYPKGEGGRPAYASPHSAWP

SEQ ID NO: 69273 - protein, 296 aa, Pseudomonas syringae
MEQFRNIGIIGRLGSVQVLDTVRRLKRFLLDRHLHVILEETIAEVLPGHGLQTSSRKMLGEVCDMVIVVGGDGSLLGAARALARHNVPVLGINRGSLGFLTDIRPDELEVKCAEVLDGHYLVENRFLLQAEVRRHGEAIGQGDALNDVVLHPGKSTRMIEFEIYIDGQFVCSQKADGLIVATPTGSTAYALSAGGPIMHPKLDAIVIVPMYPHTLSGRPIVVDGNSELKIVVSKDMTIYPQVSCDGQNHFTCAPGDTITVSKKPQKLRLIHPLDHNYYEVCRTKLGWGSRLGGGGD

SEQ ID NO: 69274 - protein, 1211 aa, Pseudomonas syringae
KILAIRLKNLASLAGPFEIDFTAEPLASAGLFAITGPTGAGKSTLLDALCLALFGAIPRLSNIGQSKVPDIDGDITTSDPRTLLRRGTGSGYAEVDFIGIDQRRYRARWENNRARDNATKKLQASRQTLTDLDSEQILSNHSKREFEQLIESRLGLNFEQFTRAVMLAQSEFSAFLKADDKERSELLEKLTNTAIYSQLGRRAYSKSKEAEEALKALTTQASNIVPLGPEQLVELEQRFSDAQQHLKTHQAQQRQLELKQQWLIELHRLGDEQLAAQEALNSAQQTWDQQSGERQTLGQLERLGPQRHRFARRTTLNAQLDPLAEQIRQHQAQHTSLQGQQQQLETHRAQAHTSLLDAQQQHGSAKPLLQQAFDAQNTLNHLAQELTKACDLHQHTGQLCAEGQASLQTLLDQQQQVAQRLERIAEQLQRSSELAPLAQAWNAWRDRLKSLTLIANRLKHGHSELPALQQRAGVADQQLDEQRSALELLYREADCEVEAVTEQVQILGSLLQDNRKQQRAFEELTRLWASQQDVDRQLADLTRQQQSAQQQREQLNSEGLRVRDELAVAEQTLTVTRQLLERQRLARSASVEELRVQLQDDQPCPVCGSVEHPWHQPEALLESLTRHDDDEQASAQKAVDLLTEQRNQLREQVGGVIARQKELLRQHEQLLERHQALAPDLEAHPLAAQLLDRDADKRDGWLSQQLSQLNEVIARDEQRQQALLTLQKDAARLQQQLQAATDASQTAARHVAEQLKQLDADQQRLEEELTAFTPLVSPQVLEGLRSDASATVMQLEQQITQRLDQLEQQAEEQQEQRERQQKLEKQQIEQQARLQRQSELALEVTRLDAQQQASQQALTGLLGEHATAEQWQQALENAIEQARQTESSAARPLQQIHSQLIQLAGELKSGQQQQHAIQQELAELDVQISEWRSQHPELDDAALDTLLTYDDAHVDQLRQQLQATEKNLEQAKVLLQERDQRLQQHQAQHSDLNDDQQLTADLQTAQEQLAQSEQQCADLRAELSEDQRRRNANSELQTRIADANSEYLRWARLASLIGSAEGDKFRKIAQAYNLDLLVHHANAQLKQLVRRYRLKRGGSMLGLLVMDTEMGDELRSVHSLSGGETFLVSLALALGLASMASSTLRIESLFIDEGFGSLDPESLQLAMDALDGLQAQGRKVGVISHVQEMHERIPVQIRVRRQGNGLSTIEV

SEQ ID NO: 69275 - protein, 885 aa, Pseudomonas syringae
TEQPKMIYLKDYQAPEYLIDETNLTFELFDDHSLVHAQLVMRRNPERGAGLPPLVLDGQHLELVSVKLSDIELGAADYQLTDDHLTLHPQAESFTVDSTVRIHPETNTALEGLYKSSGMFCTQCEAEGFRKITYYLDRPDVMSTFTTTLSADKQNFPILLSNGNPIASGEEEGGRHWATWEDPFMKPAYLFALVAGDLWCIEDTFTTMSQREVTLRIYVEPENVDKCQHAMTSLKKSMRWDEEAYGREYDLDIFMIVAVNDFNMGAMENKGLNIFNSSAVLARAETATDAAHQRVEAIVAHEYFHNWSGNRVTCRDWFQLSLKEGFTVYRDAGFSADMNSATVKRIQDVAYLRTHQFAEDAGPMAHAVRPDSFIEISNFYTLTVYEKGSEVVGMLHTLLGAQGFRKGSDLYFERHDGQAVTCDDFIKAMEDANGVDLTQFKRWYSQAGTPRLAVSESYDAAANTYSLTFRQSCPTTPGQPGDQKQPFVIPVELGLLDSKGGEIALRLANETAATGSTRVLSVTEAEQTFTFVDLAEKPLPSLLRGFSAPVRLSFPYDRDQLMFLMQHDSDGFNRWDAGQQLSVQVLQELIAQHQQGQPLVMDQRLITALGTVLADEQLDQAMVAEMLSLPGEAYLAEISEVADVDAIHAAREFARQQLADGLFDSLLARYKANRELSKATPYVAESAHFARRALQNIALSYLMLSGKPEVLAATIDQFDTSDNMTERLTALAVLVNSPFAEERDKALAVFAENFKNNALVMDQWFSVQAASTQPGGLQRVQELMKHPAFSIKNPNKVRALIGAFAGQNLINFHAADGSGYRFLADLVIELNALNPQIASRQLAPLTRWRKYDSARQALMKAELERILASGKLSADVYEVVSKSLA

SEQ ID NO: 69276 - protein, 341 aa, Pseudomonas syringae
MTLLLLLRRHTSSFFERFGWAGIGMLLLVHYGVSWLLLTLAGEEHLLQGADFTYFYLTTATTVGYGDLSPKSGWGKLVTTTWIMLGGIALLTTVIGKASTSVGDIWRRNMKGQGDCSALTGHTVLVGWDGEASERIVELLGQDTSTSRAGLVICDSIITENPLPGRASFIKGDSLDSPAVLSRAGVVGAQRILVHTQSDSLTLAIVLTLKSLGPTGHVVAHFNNSERAALARTYAPELECTSNMAIEMLVRSAQDPGSSSVITELLCVGVGATQYRHVLPADFACSCGELYIRMRQEFNATLIGYRSSTMQQFEINPANDMSILGGEIFYIASSRLQGNAL

SEQ ID NO: 69277 - protein, 402 aa, Pseudomonas syringae
MPLSDTTIRTAKPKDKLYRLTDANGLCLEIAPSGSKLWRYRYRFNGKAKMLALGAYPAVTLLKARQLRDSARQLLVEGNDPGEHKKTAQQAQKVEGLTFETLAREWFAYNSPRWAESTTYKAKLYMENDLIPGIGARPVKALTRPDLVDLVRKVEARGTLNAAGKIRQWLHQIFRYGLAKGVVESNPATDLDVVAAPQKAPRHHPHVPFSELPELLEICDGSKINTLTRCAIHLLVLTAVRPGELRNAPWSEFDLDAATWAIPKERMKARRPHVVPLPTQAVDILRQLQPITGRYPLVFAGQHNPSRPMSENTINKALRLLGYENRQTGHGFRHLLSTELNGRGYNKDWIERQLAHGDADGIRDTYNHASYLEQRRGMMQAWADSIDALSAGSNVVSIKRQA

SEQ ID NO: 69278 - protein, 682 aa, Pseudomonas syringae
MSEPRKILVTSALPYANGPVHLGHMLEYIQTDMWVRFQKHRGNQCIYVCADDAHGSAIMLRAEKEGITPEQLIDNVKAEHSADFADFLVDFDNFHSTHSDENRELSSMIYTRLRDAGHIATRSVTQYFDPEKKMFLADRFIKGTCPKCAAVDQYGDNCEKCGATYAPTDLKDPKSAISGATPVLKDSKHFFFDLPAFDTMLKSWTRSGTLQDAVANKIAEWLDSGLQQWDISRDAPYFGFEIPDEPGKYFYVWLDAPIGYMASFKNLCARRPDLDFDAYWGKDATTELYHFIGKDIVNFHALFWPAMLEGADLRKPTGVNVHGYLTVNGQKMSKSRGTFIKARTYLDHLPPEYLRYYYASKLGRGVDDLDLNLEDFVQKVNSDLIGKVVNIASRCAGFIHKGNAGVMVDANAAPELTDAFLAAAPSIADAYEARDFARAMRETMALADRANAYIAEKAPWALAKQEGKQDEVQAVCALGVNLFRQLVIFLKPVLPNLAADAEKFLNVAPLTWDDHKTLLTHHQLNPFSALMTRIDPLKVEAMAAASKEDLTATDTSTDAAPAGNGELAKDPLSAEIDFDAFAAVDLRVALILKAEHVEGADKLLRLTLDIGDEQRNVFSGIKSAYPDPSKLEGRLTMMIANLKPRKMRFGISEGMVMAAGPGGEEIYLLSPDSGAKPGQRIK

SEQ ID NO: 69279 - protein, 468 aa, Pseudomonas syringae
  MISC_FEATURE (191)..(191): X=any amino acid
  MISC_FEATURE (199)..(199): X=any amino acid
AQAKEDARLAAEAELTRLAVEAAEQARLAAEVEAQRIAAETAEHARVVAEAEAKRVADEQALFAAEAEAHRITAEAAEQARMEAEAQAQRDADEHARVTAEAQALEAGKTLRLPEAGTPQLGAVAGVISVTAGSGLFLDATIQAAIEILAALVGTAVSSTTAVGIGTLLYSPSLGNGSYREECWTFRPGFXCLICPTPXMDVAATGGTVDMPYRIYGDQSKYSVVATQPEGGFSPKVPVRALILDPVANAYTFTTSDTPPITLTFPIAAPENSSTTTVAQPIETPAYTGITLEPIEVKAEPLPATSPLDIRDAIYVYPVNSGLPPVYVVFSSPYEGATTKGEHSGRMYDPDNAGGPTQNLDWTTASVTQNGIDLVKLHTGRFEPSDANAVMIDRLEKILRSELSMTDTDKRFYTHELRELERYRALGVADGVEGEVWNNAHTATLEDYKLKDSSESFYTPEAITAENK

SEQ ID NO: 69280 - protein, 710 aa, Pseudomonas syringae
  MISC_FEATURE (112)..(112): X=any amino acid
  MISC_FEATURE (115)..(115): X=any amino acid
GQRQEALALLDRLQPVASGSPERQLTLASAYIDAGEPARGREMARAAIAQAPLPSADLMLQYAGLLLAAGDDVQVNAILRNVQGQPMSVQTRKRFDDLLYRYRIRQARSAAXRRXSGGRVRHAGPALAQRPDDIQAVSAFARMYTANGDSARAFELYKPLLQRQPNDPQVLLGAADAAVKAHDYGFAEKALSQFRKLERNDPQTLTEAARIYQSMGQTGAATELLRKAVAIEQSEKQRAMAVQAVSTSTTSSNPFATGGSRSLAAASAIPAPAQVSLSGGRALETNSAPEISAPRDTAYPGQIAAPQPLSAARTQSVRGNPFMAATDRDQASSAQQALNRILEQRSGFVSQGLAVRSNNSESGLSKLTVVETPLEVNLPAGDNRVAVRVTPVSLNAGSLKSDAGARFGGGTSGAAGSQSDKGVGLAVAFERPEEGLKADIGTTPMGFKYTTVAGGASVDRPLGNNPDLRYGLNVSRRPVTDSVTSFAGSTDERSGLSWGGVTANGGRGQLSYDDQTIGGYGYGSWHKLVGNNVKSNTRGEVGGGVYWYLRNAEDSKLTAGLSLMGMSYDNDQSYFTYGHGGYFSPQSFYAIGVPVMWAQRTERFSYQVKSSVGVQHFKQDGAEFFPDDSTLQAASAQRYTGQSKTGIGYNLSAAGEYKLDSSLFMGASLGLDNARDYRQFSGALYLRYMFEDITGPMALPVSPYRSPYSN

SEQ ID NO: 69281 - protein, 403 aa, Pseudomonas syringae
MPTLVINLRRAVGWMTGVLASATLTPALAASTCDGPAWPFWQDYATRYVQADGRMLESSLKANHSTSEGQSYGMLFALVANDRARFDTLWTWTAENMTGADPRTRLPGWLWGQGEDGSWKLQDANSASDADLWIIYALLEAARIWQHPAYRNDALALLKTVEARLVVNLPGLGKMLLPGPEGFVQPDHLWRLNSSYLPVPLLRRLAREEPAGPWKEIADNTAKLIDASSPKGFIADWVGYRGTSPKTGLFVVDPVSGELGSYDAIRVYLWAGMTPASDPLAARLLARLDGMAVSTASSGTPPEKVQVMSGASQGQAPFGYSAALLPYFQAKGQTWLAEQQQRRVEAGVSTALARDPTDRTEPAYYNLMLSLFALGWVEKRYQFREDGTLKLSWETSCPRAATR

SEQ ID NO: 69282 - protein, 571 aa, Pseudomonas syringae
MKAFAELYAQLDATTSSNAKLAAMRDYFEKAAAEDAAWAVYFLSGGRPRQLVPTRVLREQAMTLASLPEWLFEESYQAVGDLAETLSLLLPQADHSNDEGLATWMEDKLLPLRGLPPEELAARLPMFWSQLDRSSLMVCIKLITGSFRVGVSKLLVTRALAALADIDSKRVAQRLVGYTDLSHRPSAERYLKLIAPESEDEHAQRGGQPYPFFLAHSLQQPADQFETLLGPAENWQVEWKWDGIRAQLVKRDGRLWIWSRGEELVTDRFPELHSLAQCLPDGTVIDGEIVVWKAPDINPDISHDSDAAFALDNDAPNAAPSVQPFALLQQRIGRKTLGKKILTDIPVVVLAYDLLEWQGADWRSRPQHERRTQLETLIDSCQSEVLMPSPVLTGKDWLDLATQREASRSLGVEGMMLKARDSLYGVGRTKDMGVWWKWKIDPFSVDAVLIYAQRGHGRRASLYSDYTFAVWDGPPEASERTLVPFAKAYSGLTDEEMRKVDAIVRKTTVEKFGPVSSVTPTLVFELGFEGIALSKRHKSGIAVRFPRMLRWRQDKPVAEADSLTTLQDLLN

SEQ ID NO: 69283 - protein, 254 aa, Pseudomonas syringae
MGVFVAKRKALSMLDALMQTLGLSAFSLKGFGPLLLEGTWMTIKLAVLSLALSILLGLVGASAKLSSSALLRVPAQIYTTLIRGIPDLVLMLLIFYSLQTWLTMLTDAMEWEYIEINPFGAGVISLGFIYGAYFTETFRGAILSVPRGQVEAATAYGLKRGQRFRYVVFPQMMRYALPGIGNNWQVLLKATALVSIIGLADLVKASQDAGKSTYQLFYFLVLAALIYLMITSASNFALRWAERHYAAGSREAQR

SEQ ID NO: 69284 - protein, 836 aa, Pseudomonas syringae
MSRPTDFARRWFLARGWKPFAFQKEVWAAVKNGESGLLHASTGSGKTYAVWFAALNRFANANANTNTNTLTADDKPRKRKPPAAPLSVLWITPMRALAADTARALEAPLAELDIAWSVGLRTGDTSGSERARQSRRLPSALITTPESLTLLLTRADAQVALSTLKMVVVDEWHELIGNKRGVQLQLALARLRHWNPQLIVWGISATLGNQEHAQQVLIGDGGVTVQGKIVKQLLVDTLLPTAIERFPWAGHMGLRMLPQVVAEVHSSASCLVFTNTRAQSEIWYQALLEARPDWAGLIALHHGSLAREVRDWVERALKEGVLKAVVCTSSLDLGVDFLPVERVLQIGSPKGVARLMQRAGRSGHAPGRPSRVTLVPTHSLELVEAAAAHDAVAARMIEPRESPHQPLDVLVQHLVSMALGGGFLPDELLVEVRSAWAYRDLSDDQWQWALAFVRNGGHSLTAYPDYRRAEPDEHGVWRVPDARLARRHRMSVGTIVSEATVNLKYWKKGGGGGSLGSVEEGFIARLKPGDGFLFGGRLLELVRVENMTAYVKRATGKKAAVPRWNGGRMPLSSELANAVVEQFDAAARGEFNSPEMQAIKPLLEVQQQWSGLPQRDTLLAETLKSREGWHLFLYPFAGRHVHLGLGSLLAWRLSRYQPLTFSIAVNDYGLELLSASEIDWAQALQGDLFSETDLLADIIASLNAGELALRRFREIARISGLVFSGYPGAAKSNRQLQASSGLFFEVFKQYDAENMLLTQAEQEVLRQELDLQRLELTLRQINSRTLDLHAIKRATPLAFPLLVERFRESLSSEKLADRIARMVRDLEKAAGPEPER

SEQ ID NO: 69285 - protein, 151 aa, Pseudomonas syringae
MDIRKVKKLIELLEESGIDELEIREGEESVRISRHSKTPAQPYYAPAPVAAPVAAPAPAAAPAAAEAPSAPKLNGFVVKSPMVGTFYRTPAPTSPAFVEVGQTVKKGDTICIVEAMKMMNHIQAEASGVIESILVENGQPVEFDQPLFTIV

SEQ ID NO: 69286 - protein, 566 aa, Pseudomonas syringae
MKISRQAYADMFGPTVGDKVRLADTELWIEVEKDFTTYGEEVKFGGGKVIRDGMGQGQLLAADVVDTLITNALIIDHWGIVKADVGIKNGRIAAIGKAGNPDIQPDVTIAVGAATEVIAGEGMILTAGGVDTHIHFICPQQIEEALMSGVTTMIGGGTGPATGTNATTVTPGPWHMARMLQASDSFPMNIGFTGKGNVSLPGPLIEQVKAGAIGLKLHEDWGTTPAAIDNCLSVADEYDVQVAIHTDTLNESGFVETTLAAFKNRTIHTYHTEGAGGGHAPDIIKACGSPNVLPSSTNPTRPFTRNTIDEHLDMLMVCHHLDPSIAEDVAFAESRIRRETIAAEDILHDLGAFSMLSSDSQAMGRVGEVIMRTWQTADKMKKQRGPLPQDGPGNDNFRAKRYIAKYTINPAITHGISHEVGSIEVGKWADLVLWRPAFFGVKPTLILKGGAIAASLMGDANASIPTPQPVHYRPMFASFGSSLHATSLTFISQAAFDAGVPETLGLKKQIGVVKGCRTVQKKDLIHNDYLPDIEVDPQTYQVKADGVLLWCEPADVLPMAQRYFLF

SEQ ID NO: 69287 - protein, 319 aa, Pseudomonas syringae
MGDRYMDFKDYYKILDVEPAADDKAIKTAYRKLARKYHPDVSKEAGAEDKFKEASEAYEVLSSPEKRAEYDELRKYGRQGRPFQTPPGWQSRAGAGAGGFEETADFSEFFSSIFGGRPQQGGRTRNPGRKGQDVEMELAVFLEETLSGESKQVSFKVPQHSPNGQRMGDITKTLNVKIPAGVVDGERIRLKGQGAPGIGGGANGDLYLIIRLAPHPMFEVEGHDLVITVPLAPWEAALGTKVAVPTLTSRLNLTIRPDSQNGQRLRIKGNGLMNKSGERGDLYAQLKIVMPKQTDEAARALWQKLADSAAFDPRAQWKG

SEQ ID NO: 69288 - protein, 762 aa, Pseudomonas syringae
MLLIALLWLADRLWPLPLPKDDLARVVLAEDGTPLWRFADANGVWRYPVTNQQVSPYYLEALLTYEDRWFYSHPGVNPLALVRASWQNLRGARVVSGGSTLSMQVARLLDPHSRTLPGKFRQLWRTLQLEWHLSKDEILSLYLNRAPFGGTLQGVAAASWAYLGKSPQNLTRAEAALLAVLPQAPSRLRPDRHPQRAQLARDKVLRRLAEFQVWPQGSVDEALEEPLWLAPRQEPSLAPLLARRLNRPNSPPLIRTTLDAPLQRRMEDLLMGWRARLPERTSAAILVVEAENMAVRAYVGSVDISDVKRFGHVDMVTALRSPGSTLKPFLYGMAMDAGLIHSESLMQDVPRRYGDYRPGNFSTGFGGPVAASSALSMSLNLPAVQLLEVYGPKRFAAELRNGGVPLTLPPLAEPNLALILGGAGSRLEDLVAGYSAFARGGRSADVRLQPQDRLRERRMMSPGAAWIIRRILSGQSRPDIDPRAELVQRPQLAWKTGTSYGFRDAWAIGVGPRFLVGVWIGRPDGTPVPGQFGLASAAPLMLQVHDVLVNRDSQRGIAAPVQAVPLNVGVAAICWPLGQPMSKSDPNCRRQRFAWTLDDTTPPTLQAADQPLGLGLQERIWVNDKGLRVSASCSDAQPRDIALWPAPLEPWLPRAERREARLPPADPDCPPQNLSQAPPLSIVGVREGDNLRLPAGSRQALRLKLSALGGSGRRWWFIDGAPMADTDAGHDFTPTLNKPGRYQLSVLDESGQTARVEFSVVE

SEQ ID NO: 69289 - protein, 325 aa, Pseudomonas syringae; identical to SEQ ID NO: 69226

SEQ ID NO: 69290 - protein, 309 aa, Pseudomonas syringae
MSQMSFSDFEYAGKRKQTRRERFLAEMDQVVPWTGLLGLIEPFYPKAGGGRKPYPLETMLRIHLLQNWFSLSDPAMEEALYETTPMRQFARLTLSAPIPEDTTIMNFQHLLEKHQLAPAILAVINGYLQEKGLSLRQGTIVDATIIHAPSSTKNEEGKRDPEMHQTKKGNQYFFGMKAHIGADAESGLVHHVHGTAANVADVTQVAELLRGEENAVYADAGYISVEKREEHENREVIWQIAARRSTYSRFNKRSVLYKAKRKIEYCKAQTRAKVEHPFRVIKRHVSVVQLSVVSLISKGVELNIPSLGL

SEQ ID NO: 69291 - protein, 340 aa, Pseudomonas syringae
MKALGLMDNQRLELVDCKDPVMLAPDGVEIDIVLSGICGTDLAVLSGREGGEVGIIRGHEAVGIIIDVGKDVVHLQKGMRVVVDPNEYCGVCEPCRLAKTHLCNGGVNAGLDIAGVNKHGTFAERFVTRERFVYQLPDDMSWAAGVLVEPVACILNNIDQAFIRAGERVLILGSGPMSLIAQIVLRSMGVDTLATDRNTHRIQFGRSQSLDVIHADDLELQMQHQEKFDVVIDTVGNQIDTASRYIGRGGRIVLFGFDSDYHYMLPVKYFLVNAISIISAGEYNQHFPRAIRLVQKLPELGRLVTHRYVLENHSEVFDALLNDASAPNIKSVFTPNLAYL

SEQ ID NO: 69292 - protein, 367 aa, Pseudomonas syringae
MRFDLSKEIYAQNGTRSKFTVSIADGVESYNDWTATESNLNVRQVFTELDHIAAFKGNPVFENATLWAGKRFDRDNFDIHWLDSDVVFLAGTGGGIYDVQMNKGWRSNYSLIGRNYGDFSEGGVDADVESYILTSNQFFDSGQWQWMFNAIGAKKNDVGTRTNQAGSTPADSGLHSMLANHQKDFFGREGFFKTALLYGQGLGAQVKDIGSDGELLDDARAVRLALYGETPVAPGWRIGPSLLAEQSKDRYVKGDDYRWLTLNMRLANEINSNFEMAYELSWQTMDLDPKGYLQRNAVDGNFWKFTVAPTFKPDMGDLLTRPELRVFASLMNWSSDLDRYSTTGNFGKSDFSAGGVWQFGIQMETWF

SEQ ID NO: 69293 - protein, 820 aa, Pseudomonas syringae
MQALLEQQGGSIKPLLLQVGFDINSLRKELSAELDRLPKIQNPTGDVNMSQDLARLLNQADRLAQQKGDQFISSELVLLAAMDENSKLGKLLLGQGVSKKALENAINNLRGEGAVNDPNIEESRQALDKYTVDLTKRAEEGKLDPVIGRDDEIRRTIQVLQRRTKNNPVLIGEPGVGKTAIAEGLAQRIINGEVPDGLRGKRLLSLDMGALIAGAKYRGEFEERLKSLLNELSKQEGQIILFIDELHTMVGAGKGEGSMDAGNMLKPALARGELHCVGATTLNEYRQYIEKDAALERRFQKVLVDEPSEEDTIAILRGLKERYEVHHKVAITDGAIIAAAKLSHRYITDRQLPDKAIDLIDEAASRIRMEIDSKPEVLDRLERRLIQLKVEAQALKKEKDEAAIKRLEKLQEEIVRLEKEYADLEEIWTSEKAEVTGSAQIQQKIEQSRQELEAARRRGDLNRMAELQYGIIPDLERSLQMVDQHGKPENQLLRSKVTEEEIAEVVSKWTGIPVSKMLEGEREKLLRMETLLHNRVIGQEEAVVAVSNAVRRSRAGLSDPNRPSGSFMFLGPTGVGKTELCKALAEFLFDTEEAMVRIDMSEFMEKHSVARLIGAPPGYVGYEEGGYLTEAVRRKPYSVILLDEVEKAHSDVFNILLQVLEDGRLTDSHGRTVDFRNTVIVMTSNLGSAQIQELVGDREAQRAAVMDAVSTHFRPEFVNRIDEVVIFEPLARDQIAGITDIQLGRLRKRLAERELTMVLSPEALDKLIAVGYDPVYGARPLKRAIQRWIENPLAQLILSGGFEPGSSITGKVVDDEIVFG

SEQ ID NO: 69294 - protein, 381 aa, Pseudomonas syringae
MMKLKLANIDKQLGGMRILRDVSLEIAAGEFVVFVGPSGCGKSTLLRLIAGLDSICSGDLLIDGRRVNDLEPRERGVGMVFQSYALYPHMSVYDNISFGLKLAKTEKSSLRERVLKTAQILQLDKLLQRKPKELSGGQRQRVAMGRAMAREPDILLFDEPLSNLDASLRVQMRNEIARLHKRLGSTMIYVTHDQVEAMTLADKIVVLNGGQVEQVGSPRELYERPASRFVAGFLGSPRMNFLPVRLQAPGRNSLIDVPALGMTSLPFDSSNLANGAQLTLGVRPEHIALTAANNGVGVMVTGVEYLGSEVYVHLATGESEPLICRCDAKAGWQAGDQVALQLDDSNLHVFDADGLALKRHADAGQQLTPGTTPHLVQAGTL

SEQ ID NO: 69295 - protein, 114 aa, Pseudomonas syringae
  MISC_FEATURE (3)..(3): X=any amino acid
HDXAGGISGNAGYTGVDKHQDRQIIWSILYVRAAAKSLMRLVGSCRCIAKSSTESPVRAKVEHPFRVIKRQFGYTKVRFRGRSKNTGQQAALFTLSNSWGGGRKRLPVIGKLHL

SEQ ID NO: 69296 - protein, 224 aa, Pseudomonas syringae
MNSAWALLRLASPQLPIGGYSYSQGLEMAVEQSIVIDPQTAGRWIGDQLLLNLARFEAPLLLAHCEAAAVGDWGQLLQVSEQHRASRETRELHQESRQMGYSLQQLLNGLPELDRDARRFLEQTTEPHLALGWALAARTWRISPQDALAAWLWSWLENQLAVLMKTLPLGQQAAQRLTSELLPLLQQAQVNASAQDTHPAGSAAFGLALASMAHERQYSRLFRS

SEQ ID NO: 69297 - protein, 376 aa, Pseudomonas syringae
MTRSADRHVLQFCHGYDGPFLDCARQYASLFVGKGYRVTTVFLTGAADPDVVADCGSDEVLFMEYSSSAIRGLKLGAIRDLCKIAATRSFSFCIAHRFKPVYIALLATSLPVIGVHHAFGDYKRRTRKLFATLFRKRLSLLGVSDAVRDDMRSSLPKWPAERIQTLYNRIDVEQLQGSQFSAEDARTELGLSPSAWIVGNVGRLHPDKDQATLLRGFAEALPSLPENSQLVLLGKGRLDETLKSLALELGIGPHVLFLGQVPDARRYFKAFDVFALSSDHEPFGMVLLEAMVAGVPLVATSCGGAKEVVEDVGLLFPLGDAHSLAHGLVHMAGLDVEQRQDCAERMLLRLRERFSDHAVRDVFWRLPQVSSLTAGA

SEQ ID NO: 69298 - protein, 551 aa, Pseudomonas syringae
MARQLYQGLTELNQLITPGDNRLQLLELLRPEVYFVCKHLERHFLNQAIVLDERPRKVANLCQALQNHLATGYKQIIQQVASRYTRDQAGLFSMALQRALHGLTGPLIRANQLYCPVQDGLWLELHQIYQIARQYQLHHALVDEPLAHHTKALSIEQTYVIALLMGCSRCNQMRQLNIGKLADALEAWSPLVKLQWPAEQNGLFALDPTVDKPPLYHALFTDEQSSRLLGINTFALAEAINQYLALPDDQRSPSTLLIPTGINTDLLQHLAVAWGDVAERTFHRTPGQGTLKLCIGMSALHFYVAGQRSFSDLLQLNSASGAANFSLKIANTDEEDDPWSSAFDTHRGKTSSVLLPYEEIEYPKIEGDNDSLSNGQHAFPTFDLNIVNHSPGGYCLAWQKEVPQQLQAGELVGIQDDSGLGWSVAIVRWVRQVRSGGTQMGIELIAPFAQPCGMQLIREQQNSQYLRTLMLPEVRAMEKPPTVLAPRLPFQEGSKVMINVDGEERRASLSNRRISSASYNQFEYQIYDAPKAAEVEQAKPGQEFDSLWGTL

SEQ ID NO: 69299 - protein, 275 aa, Pseudomonas syringae
MHAVQRQIAEQLKVQPPFADQNALQAEVARRVGFIKDCLQNARLKTLVLGISGGVDSLTAGLLAQRAVKELRESTGDTRYRFIAVRLPYVVQADEHEAQASVDFIEPDERHTINIGSSVKALAAEVKAFDGLPASSVDFVLGNTKARMRMVAQYTVAGAYQGLVIGTDHAAEAVMGFFTKFGDGACDLAPLSGLVKNQVRAIARHFGAPESLVEKVPTADLEDLSPGKPDEASHGVTYAEIDAFLHGEPVREEAFRIICETYAKTQHKRELPYAP

SEQ ID NO: 69300 - protein, 421 aa, Pseudomonas syringae
MNDQSPARACGIDFGTSNSTVGWQRPGVESLIALEDDKITLPSVVFFNIEERRPVYGRLALHEYLEGYEGRLMRSLKSLLGSKLIKHDTSVLGTAMPFKDLLALFIGELKKRAENTAGREFEQVVLGRPVHFVDDDAQADQEAEDTLAEVARKIGFKDVSFQFEPIAAAFDYESTIENEELVLIVDIGGGTSDFSLVRLSPERRTHADREQDILATGGVHIGGTDFDKQLSLQGVMPLFGYGSRMKSGAYMPTSHHMNLATWHTINAVYSQKSQLALGSMRYDIEDTGGIDRLFKLIEQRAGHWLAMEVEETKIQLTHTENRHLPMDRVEAGLSVDLSRVMFEAAIDAQLERVRNSVTTLLNDAGVSVEQVNTVFFTGGSSGIPALRNSVSAMLPNARHVEGNIFGSIGSGLAIEAKKRYG

SEQ ID NO: 69301 - protein, 246 aa, Pseudomonas syringae
MIKPVWANRAAIKPLLGKIFVLAVLGTAMYQSLAYFAAGLTTATNMGIIQSLVPMMALGLSIACLGNHLTSGALLGAILSFAGVVVVVSAGNPAQLIEHGVNRGDAMVLVAAASYAVYSTLLKKWQLRLPPLQLLYVQILLAILVLLPPFILSSKTGLNASNIPMVLYAAIPTSMLAPWLWMTAIMRLGPSRTTLFFNLMPIATALIAAATLGEQLALYHLFGGALTLCGVVLAERWATPLRSKAS

SEQ ID NO: 69302 - protein, 831 aa, Pseudomonas syringae
MPDLLDQYPLSEGTYHEMLDADGAVRPHWRRLYEHLRRSTSAQLIQRQDLLTRQIQENGVTYNVYADPKGADRPWELDLLPHIIAADEWQHVAAGIAQRARLLNAVLADLYGPQTLIANGLLPAELVFGHNNFLWPCQGVKPPEGTFLHMYAVDLARTPDGRWWVTADRTQAPSGAGYALENRQSVARALPETYRDLQVRHLSGFFDTLQQTLARQAPTSSEAPLVVLLTPGRFNESYFEHLYLARQLGYPLVEGGDLTVRDATVYLKTLSGLRRVHAIMRRLDDDFCDPLELRTDSALGVPGLLEAVRQGNVLVANALGSGVLESPGLLGFLPKISQYLFGEELILPSVATWWCGEPTVLAQALEKLPDLLIKPAFPSQHFAPVFGRDLNEEQCNALAQRMQSRPYAYVAQELAQLSHAPVLQADGTGLQPRAIGMRVYAVASLDGYRVLPGGLTRVAAEADADVVSMQRGGASKDTWVLGERSHLGEPWKGQRALGVYDLIRRDPYLPSRVVENLFWFGRYCERCDDSARLLRIMLTRYVDDDDPLALQAAVALAESLGMVPEAEEDEELKDRLLVALLGDEWPFSLRANLQRLQWAASQVRGKLSRENWQALVELQREALSLETEEPDFGQLLDFLNRLVMSLAALSGFALDDMTRDEGWSFLMIGRRIERLKFLSTSLAAFLRGSVASEQAGLEWLLELGNSSITYRSRYMAVPHLIPVLDLLLLDEQNPHAVLFQLKLVQRSLRRLNDEFDAPRDNSLAVLAQRLAAFDLGSLENPLFGQSSIDAVLDGLADLLHSIGDSSGQASDRMALRHFAHVDDVSQRTVSV

SEQ ID NO: 69303 - protein, 464 aa, Pseudomonas syringae
MNDISAPEQYDLQTAALKVPPHSIEAEQAVLGGLMLDNNAWERVLDQVSDGDFYRHDHRLIFRAIAKLADQNSPIDVVTLAEQLDKEGQTSQVGGLGYLSELAKNTPSVANIKAYAQIVRARATLRQLIGISTEIADSAFNPEGRTAEEILDEAERQIFQIAEARPKTGGPVSVNDLLTKAIDRIDTLFNSDNAITGLSTGYTDLDEKTSGLQPADLIIVAGRPSMGKTTFAMNLVENAVLRSDKVVLVYSLEMPGESLIMRMLSSLGRIDQTKVRAGRLDDDDWPRLTSAVNLLNDRKLFIDDTAGISPSEMRARTRRIVREHGEIGMIMIDYLQLMQIPGSSGDNRTNEISEISRSLKALAKEFNCPVIALSQLNRSLEQRPNKRPINSDLRESGAIEQDADVIMFVYRDEVYHPETEHKGIAEIIIGKQRNGPIGTTRLAFIGKYTRFENLAPGSYNFDDD

SEQ ID NO: 69304 - protein, 283 aa, Pseudomonas syringae
MPHHIIALNPLWETALPSAALSSSVLLVQISDSHLFAEADGALLGMSTRDSLEKVVDQVLAEQPHIDLVVASGDISQDGSVESYEAFRRISGRIDAPARWFAGNHDELPQMEHVAQGEGLLDPVVDIGRWRVTLLDSAVPGSVPGFLADGQLQLLERSLSEAPDRHHLVCLHHHPVAIGCEWMAPIGLRNADALFAVLDQFVQVKAVLWGHVHQEFDQVRNGVRLLASPSTCIQFAPGSVDFKVDTLAPGYRWLRLHDDGRLETGVSRVVGMVFEADYGGTGY

SEQ ID NO: 69305 - protein, 148 aa, Pseudomonas syringae
MQLILLEKVANLGNLGDKVNVKAGYGRNYLLPYGKATAATAANVAAFEERRAELEKLAADKKASAETRAAQLAELEVTITATAGDEGKLFGSIGTHDIADALTASGVEVAKSEVRLPNGTIRNVGEFDVAVHLHSDVEATVRVVVVAA

SEQ ID NO: 69306 - protein, 76 aa, Pseudomonas syringae
MARFFRRRKFCRFTAEDVKEIDYKDLNTLKAYVSETGKIVPSRITGTKARYQRQLATAIKRARFLALLAYTDSHGR

SEQ ID NO: 69307 - protein, 141 aa, Pseudomonas syringae
MRHYEIIFLVHPDQSEQVGGMVERYTKLIEEDGGKIHRLEDWGRRQLAYAINNVHKAHYVMLNVECTGKALAELEDNFRYNDAVIRNLVIRRDEAVTGQSEMLKAEENRSERRERRDRPEHSDSADGDDGDNSDVSDNADE

SEQ ID NO: 69308 - protein, 162 aa, Pseudomonas syringae
MAGAESCRDKGVMVVNLLRERYRVDLAGLQAACEANYARLMRLLPDMRNEQRSRRVAVTQGDQMLGVLAVEVLLDCPYTTTLQVRQEHSLPWLPVPVLEVQVYHDARMAEVIGAEHARRFRGIYPYPNADMHQPDEKVQLNLFLGEWLSHCLACGHEFEAVR

SEQ ID NO: 69309 - protein, 430 aa, Pseudomonas syringae
MGKNVVVLGTQWGDEGKGKIVDLLTEHATAVVRYQGGHNAGHTLVIDGEKTVLHLIPSGVLREGVQCLIGNGVVVAPDALLREIIKLEEKGIPVRERLRISPSCPLILSYHVALDQAREKARGEFKIGTTGRGIGPAYEDKVARRGLRIGDLFHRERFAAKLGELLDYHNFVLVNYYKEPAIDFQKTLDECMEYADMLKPLMLDVTAALHEMRRDGKDIMFEGAQGSLLDIDHGTYPYVTSSNTTAGGIATGSGFGPMYLDYILGITKAYTTRVGSGPFPTELFDDVGAFLAKRGHEFGATTGRARRCGWFDAVILRRAIEINSISGLCLTKLDVLDGLETINICIGYENEEGAVIDAPTDADSYLGLRPVYEEMPGWSESTLGAKTLEELPAAARAYIKRVEELVGAPIDIISTGPDRNETIVLRHPFG

SEQ ID NO: 69310 - protein, 351 aa, Pseudomonas syringae
MFGGGNKRGSDGGSGNGGGSGKGGGFGLLGIGLVVLVAFWLYSAIYVVDEQEQAVVLRFGQYHETVGPGLNIYFPPFDRKYMENVTRERAYSKQGQMLTEDENIVEVPLTVQYKISNLEAFVLNVDQPEISLQHATESALRHVVGSTAMDQVLTEGRELMASEIKERLQRFLDTYGTGITVTQVNVQSAAAPREVQEAFDDVIRAREDEQRSRNQAESYANGVIPEARGQAQRILEDANGYRDEVVSRAKGEADRFTKLVAEYRKAPEVTRQRLYLDTMQEVFSNTSKVLVTGDKGQNNLLYLPLDKMIESSRSTTGNGSATGTPSQSNTDTAARAADTQQRGEVRTRETR

SEQ ID NO: 69311 - protein, 645 aa, Pseudomonas syringae
MTDLLLDGSEADNAQTVLNAARIELLSPRLANQIAAGEVVERPASVIKELLENSLDSGARRIDIDVEQAGIKLLKVRDDGGGISSDDLPLALARHATSKIRDLEDLERVMSLGFRGEALASISSVARLTLTSRTRDADQAWQVETEGRDMDARVQPAAHPVGTSVEVRDLFFNTPARRKFLKAEKTEFDHLHEVIKRMALARFDVAFHLRHNGKTVLSLHEAHDDTARARRVSAICGPGFLEQALPIEIERNGLHLWGWVGLPTFSRSQADLQYFFVNGRAVRDKLVAHAVRQAYRDVLFNGRHPTFVLFFEVDPAAVDVNVHPTKHEVRFRDGRMVHDFLYGTLHRALGDVRPENQLGGSVPAAAEPRPTGPDAGEFGPQGEMRLANNVLEQPQGEPFARPAGGGSGSGYQYSPRPTTGVPVAEAQSAYREFFAPLPGTTPSALPESPSDIPPLGYALAQLKGIYILAENAHGLVLVDMHAAHERIMYERLKIAMANEGLSGQPLLVPESIAVSQREADCAEEHITTFQRLGFELQRLGPETLAIRQIPALLKQAEANRLVSDVLADLMEYGTSDRVQAHMNELLGTMACHGAIRANRRLAIPEMNGLLRDMENTERSGQCNHGRPTWTQMGLSDLDKLFLRGQ

SEQ ID NO: 69312 - protein, 474 aa, Pseudomonas syringae
MKLSMPRFDQAPVLVVGDVMLDRYWHGGTSRISPEAPVPVVKVDQIEDRPGGAANVALNIAALGAPASLVGVTGDDEAAESLTNSLKAAGVVARFQRIADQPTIVKLRVMSRHQQLLRIDFEEPFNTDPLALSAEVYSLLDGIKVLVLSDYGKGALKNHQALIQAARKRGIPVLADPKGKDFAIYRGASLITPNLSEFEAIVGHCEDEAQLVTKGAQLMQELDLGALLVTRGEHGMTLLRPDQQALHLPARAREVFDVTGAGDTVISTLAAAIAAGEELPHAVALANLAAGIVVGKLGTAAISAPELRRAIQREEGSERGVLGLEQLLLAVDDARAHKEKIVFTNGCFDILHAGHVTYLEQARAQGDRLIVAVNDDASVSRLKGPGRPINSVDRRMAVLAGLGAVDWVISFPEGTPENLLTHVKPDVLVKGGDYGIDQVVGADIVQAYGGEVRVLGLVENSSTTAIVEKIRGQG

SEQ ID NO: 69313 - protein, 409 aa, Pseudomonas syringae
MIDINGATLGGPLNVSTANTPISSMRSAQRTPTDLRVVIDLKKAVTPKSFTLAPNQQYGNRLVVDLFDSAADANPTPVIPDTAANTAPAVPVSPAKPEIKLTPVPNGKRDIVIVIDAGHGGEDPGASGGAGQKEKNVVLSIAKELQRQVNAEKGYRAELTRTGDYFIPLRKRTEIARSKGADLFVSIHADAAPSTAAFGASVFALSDRGATSETARWLADSENRSDLIGGAGAVSLDDKDRMLAGVLLDLSMTASLSSSLNVGQKVLSNIGRVTSLHKSRVEQAGFMVLKSPDIPSILVETGFISNANEANKLSSASHQQALARSINSGVKQFFQQNPPQGTYIAWLRDTGKLAQGARNHVVRSGETLAMLAARYDMNIATLRSANNLKTDELKIGQDLRIPSAEVATQ

SEQ ID NO: 69314 - protein, 556 aa, Pseudomonas syringae
MLAGILKYFVDGLSNPEAVLFPNVPYLRELQLLQAVPLLIVLIAAWQGLGSFLGNYFLAKVSLGLVHDLRVELFNKLLVLPNRYFDTTNSGHLISRITFNVTMVTGAATDAIKVVIREGLTVVFLFIYLLMMNWKLTLVMLAILPLIAVMVSSASKKFRKQSKKIQVAMGDVTHVASETIQGYRVVRSFGGEAYEQNRFAEASDSNTRKQLRMTKTGAIYTPMLQLVIYSAMAVLMFLVLFLRGDATAGDLVAYITAAGLLPKPIRQLSEVSSTIQKGVAGAESIFEQLDVEEEVDTGTIELDRVSGHLEVKNLSFFYPQTERQVLNDISFSAAPGQMIALVGRSGSGKSTLANLIPRFYGHEMGNILLDGVEINDYRLRNLRKHIAQVNQNVTLFNDSIANNIAYGDLAGAPRADIEAAAADAYAKEFIDQLPQGFDTQVGENGVLLSGGQRQRLAIARALLKNAPLLILDEATSALDTESERHIQAALDHVMKGRTTLVIAHRLSTIEKADMILVMDAGKIVERGTHTELLAQNGYYARLHAMGLDEPAPAGAV

SEQ ID NO: 69315 - protein, 379 aa, Pseudomonas syringae
MKAIVYNGPRDVSVKNVPDAKIEKPTDALVRVTTTNICGSDLHMYEGRTSFETGRIFGHENMGEVIEVGAGVDRVKVGDRVCLPFNIGCGFCENCEKGLTGYCLTANPGSAGAAYGFAEMGSHEGGQAELLRVPYADFNCLLLPEDAAEREDDYVMLSDIFPTGWHATELAGLLPGESVAIYGAGPVGLMAVHSAMIKGASQVFVVDNHPDRLALAAKMGATPINSLEQGAVDQILNLTDGRGTDRGCECVGYQCCDRHGHEANHVTMNNLVASTKATGGIGVVGVFVPQDPGAHSDLAKEGKMAFDFGSFWFKGQQIRTGQANVKAYNRRLAELIHHDRAKPSQIISHRLKLEEGPAAYQHFDARDDGWTKVVLKPNG

SEQ ID NO: 69316 - protein, 286 aa, Pseudomonas syringae
MNEDYPKPPFASQPQNVPGEQGRMDPYPDCGEKSYKGSGRLQGKIALITGADSGIGRAVAIAFAREGAQVAISYLNEHEDAQETKRWVEEAGMRCLLLPGDLAHKQQCEDIVSKTVAEFGHIDVLVNNAAFQMTHEALEDISDEEWVKTFDINITAMFRICKAAVPHMPRGGSIINTSSVNSDMPKPTLLAYAATKGAIANFTGGLAQLLGEKGIRVNSVAPGPIWTPLIPATMTDEDVKTFGSETPLGRPGQPVEVSPIYVLLASDEASYISGSRYGVTGGKPIL

SEQ ID NO: 69317 - protein, 91 aa, Pseudomonas syringae
MPRSLKKGPFIDLHLLKKIEVAAEKNDRKPVKTWSRRSMILPQMVGLTIAVHNGRQHVPVLVSEDMVGHKLGEFAGTRTYRGHVADKKAKR

SEQ ID NO: 69318 - protein, 302 aa, Pseudomonas syringae
MSKGAVGVDIFFVISGLVIFLSTQNSDIPPRRFILHRLIRIVPAYWLYTAAMALLLLIAAPMLPHQVIGWQNFLLSLVFIPSENPGGYGLYPTLNVGWTLNYEMFFYLLFSMVFLFEQRHRPLIIAAALFAVSEVLAKAGLISRFYGNDIVYEFLLGIGIGILYRRGWIRQAVWLPLAGIAVGLYAINHLTNEQRLLNWGLPSALIVLSCISLEPFFKGSRLLKVLGDCSYSVYLLHVLVLYGGLLMAQRYGLSPYVVFAFCVPIIAIGAWVSYEWIEKGLYRRMKGWLDGRRAVSQAQALT

SEQ ID NO: 69319 - protein, 493 aa, Pseudomonas syringae
MKLNKNNISRLDADIALPAYSADDTRQGIAHIGVGGFHRAHQAFYTDALMNSGEGFEWSICGVGLRAEDRAVRDALAQQDYLYTLYELGDTPDTETRIIASISGMLLAEDSPQALIDKLASPDIRIVSLTITEGGYCIDDSNGQFMAHLPQIQHDLANPNQPKTVFGFLCAALARRRAEGTPAFTLMSCDNLPHNGAVTRKALLTFAALRDADLHDWIAANVSFPNAMVDRITPMTSAAHRLKLADEKHIDDAWPVVCEPFVQWVLEDKFVNGRPAWEKVGVQFTDDVTPYEEMKIKLLNGSHLALTYLGFLKGYRFVHETMNDPLFVRYIRAYMDKDVTPQLASVPGIDLEGYKDTLIERFSNQAIADQLARVCSDGSSKFPKFTVPTINRLIVDQGNFQRASLVVAAWALYLKGVDENGVTYTIPDPRAEFCQGLVADDALIAQRLLQVEEIFGLAIPQSPEFVAAFEQNLADLRALGVSGTLERILANGL

SEQ ID NO: 69320 - protein, 195 aa, Pseudomonas syringae
MCRVLGKSAPAFTGLKYPLLNSSRAFTLMNDRARELASRLIRNFNEASLEHEVREPLYESAAARLGTGTVAHKLGASVDVVAPGKRSCPYHFHHAQEEMFVIIEGEGSLRVAGEMLPIKTGDVLFIPAGPEYPHQIINTSQAPLKYLSISTRETPEVCEYPDSGKYQAMVSANGARVFTANQRTTENVDYWDGEP

SEQ ID NO: 69321 - protein, 1035 aa, Pseudomonas syringae
MNLSAPFIRRPVATVLLSLAIMLLGAVSFRLLPVAPLPNMDFPVIVVSASLAGASPEVMASTVATPLERSLGSIAGVNTMTSNSSQGSTRIILQFDLNRDINGAAREVQAAINASRNLLPSGMRSMPTYKKVNPSQAPIMVLSMTSTVLEKGQLYDLASTILSQSLSQVSGVGEVQIGGSSLPAVRIELEPQMLSQYGVSLDDVRTAITNANVRRPKGFVEDDQHNWQVQANDQLESAKDYAPLIIRYQDGATLRLKDVAKVSDAVEDRYNSGFYNNDRAVLLVVNRQAGANIIETVAQIKAQLPALRAVLPASVSLNIAMDRSPVIKATLHEAEMTLLIAVVLVVMVVFLFLGSFRASLIPTLAVPVSLVGTFAIMHLFGFSLNNLSLMALILATGLVVDDAIVVLENISRHIHNGLDPMKAAFLGAKEVGFTLLSMNVSLVAVFISILFMGGLVESLFREFSITLSVSIVVSLIVSLTLTPMLCARWLKPHVAEKDNAFQRWSERVNDRMVAAYDRSLGWVLRHRRLTVLSLLVTVIVNVALYVVVPKTFLPQQDTGQLMGFVRGDDGLSFSVMQPKMEIFRRSVLADPAVESVAGFIGGSGGTNNAFMIVRLKPIAERKLSAEKVVERLRKNMPQVPGGRLFLAPDQDLQLGGGREQTSSQYQYIVQSADLASLRLWYPKIVAALKSIPELTAIDAREGRGAQQVTLVVNRDTAKRLGIDMNMVTAVLNNAYSQRQVSTIYDSLNQYKVVMEVNPKYAQDPVTLEQVQLITADGQRVPLSSIAHYERSLANDRVSHDGQFAAENISFDLAEGASLDKATVAIERAIAAIGLPSDIISKMAGTANAFASTQKGQPWMILGSLLAVYLVLGILYESYIHPLTILSTLPSAGVGALLTIYVLGSEFSLISLLGLFLLIGLVKKNAIMMIDLALHLEREQGMTPEESIRSACLQRLRPILMTTMAAILGALPLLLSTAEGAEMRKPLGLTIIGGLIFSQVLTLYTTPVVYLYLDRLRHRFNKWRGVRTDAALETSL

SEQ ID NO: 69322 - protein, 357 aa, Pseudomonas syringae
MRPARALIDLQALRHNYRLARDSSGGRALAVIKADAYGHGAVHVAQALEAQADGFAVACIEEALELRAAGIRAPILLLEGFFEADELALIVEHDLWTVVHAIWQLEAIEQAQLGKPLTVWLKLDTGMHRVGLHPSEYRAAYQRLLATGKVARVVLMSHFSCADELNSACSDQQVAVFEAARQGLVAETSLKNSPAVMGWPKIPSDWSRTGIMLYGATPFDQTQPLAERLQPVMTLESKVISVRELPAGEAVGYGATFVSERPLRIGVVAMGYADGYPRHAPTGTPVLIDGQRSRLLGRVSMDMLCVDLTDVPQAGLGSRVELWGKAVLASEVATQAGTIPYQIFCNLRRVPRIYSEN

SEQ ID NO: 69323 - protein, 643 aa, Pseudomonas syringae
MPYSCSIEQAVDHVLAQLPEHVHLGMPLGLGKPNRFVNALYQRISQLPERRLTIYTALTLGRPTPGEGLQARFLEPFLERTFGDYPELEFLAALRRDKLPPNIRVQQFFMQPGSLLDSAPAQQDYVSSNYSHAARDINAHGLNLVAQLVARDDQRPGTLSLSCNPDVTLDLLPMIAKRRAAGETILMLGQVHADLPYMPGDSELDVEAFDLLLNEDEHSTLFSTPNMPVGYQDHLIGLHASTLVRDGGTLQIGIGSMGDALTGALLARQADNETWRSLLADLNMSNWQTLIDREGGTQPFASGLYGCSEMFVNGLLVLADAGIVRRKVYADAELQRLANMGTLDEDAHPEGVVVHGGFFLGPSSFYERLRELPAERLAQFNMTAISYINELYGQEDLKRLQRRDARFINSAFTVTLMGAAVADQLEDGRVLSGVGGQYNFVAQAHALEGARSILMLRSWRESGGEVSSNIVWQYGHTTIPRHLRDIVVTEYGIADLRGQTDATVIERILNISDSRFQPGLIEQAQKAGKLPKDFILDPRFTQNTPERLRGIAAHYPSLFTEYPLGCDFTPEERDLLRALNWLKSKLKLTEILELGKATLDAPDPETFPQHLQRMQLDQPQGLREELYQRLLLAGLHNTTGLTG

SEQ ID NO: 69324 - protein, 701 aa, Pseudomonas syringae
MPSIDALADRLSAYLGKDQVNLVRRAYFYAEQAHDGQRRRSGEAYVTHPLAVANILADMHMDHQSLMAAMLHDVIEDTGIAKEALSAQFGETVAELVDGVSKLTQMNFETKAEAQAENFQKMAMAMARDIRVILVKLADRLHNMRTLEVLSGEKRRRIAKETLEIYAPIANRLGMHSVRIEFEDLGFKAMYPMRSSRINQAVKRARGNRKELVNKIEESLSHCLAVDGIEGDVSGRQKHLYGIYKKMRGKRRAFNEIMDVYAFRIIVDKVDTCYRVLGAVHNLYKPLPGRFKDYIAIPKANGYQSLHTTLFGMHGVPIEIQIRTREMEEMANNGIAAHWLYKSSDDEQPKGTHARARQWVKGVLEMQQRAGNSLEFIESVKIDLFPDEVYVFTPKGRIMELPKGSTAVDFAYAVHTDVGNSCIACRINRRLAPLSEPLQSGSTVEIVSAPGARPNPAWLNFVVTGKARTHIRHALKLQRRSESINLGERLLNKVLNGFECSLDKVTPERIQLVLNEYRVEVLEDLLEDIGLGNRMAYVVARRLLGEGEQLPSPEGPLAIRGTEGLVLSYAKCCTPIPGDPIVGHLSAGKGMVVHLDNCRNISEIRHNPEKCIQLSWAKDVTGEFNVELRVELEHQRGLIALLASSVNAADGNIEKISMDERDGRISVVQLVVSVHDRVHLARVIKKLRALTGVTRITRMRA

SEQ ID NO: 69325 - protein, 559 aa, Pseudomonas syringae
MGKPQGAFSMLTLLDLLSAVALLIWGTHIVRTGILRVYGAQLRRLLSQNMSKRPLAFIAGILVTAMVQSSNATAMLVTSFVGQGLMTLTPALVIMLGADVGTALMSRVLTFDLSWLSPLLIFLGVVFFLSRKQTRAGQLGRVGIGLGLIVLALQLIVAAAAPITQAAGVKVLFASLTGDLLLDALVGAMFALISYSSLAAVLLTATLAGTEVIGLPVAIGLVIGANIGSGLLAFLSTSMQNVAGRQVALGSLLYKLFGLLLIIPVLDPLVAWIDTLGFRPQELVIGFHLIYNTVRCLIMLPTVGPMARLCAGLLPQQNEVGGLARPRHLDLTALATPSLALANAVRETLRMGDLIESMLGSMLAVLRGTQTAVTQEVRRLNDDVEALYSAIKLYLAQMPREDLGEHDNRRWAEIIELTINLELASGLIERMLRKIQQQKTSHRRSFSEVGLEELADLQVQLQSNLRLGLSVFLSGDEESARQLLREKRRFRAQERRLAHAHVSRLRHKVVQSIETSSLHLELIADMKRLNSLFCSSAYVVLETSDTGALSSEDQPERSL

SEQ ID NO: 69326 - protein, 413 aa, Pseudomonas syringae
MLNGLWLGFFVVATISALVQWLVGGNAGIFAAMVESIFAMAKLSVEVMVLLFGTLTLWLGFLRIAEKAGIVDWLAKVLGPLFLRLMPEVPPGHPALGLITLNFAANALGLDNAATPIGLKAMRSLQELNPSKTAASNAQILFLVLNASSLTLLPVTIFMYRAQQGAPDPTLVFLPILLATSVSTFVGLLSVAFMQRLRLWDPVVLAYLIPGALLLGAFMAFLGTLSAAALAGLSSILGNLTLFGLIMMFLIIGTLRKVLVYEAFVEGAKEGFDVAKSLLPYLVAMLCAVGVLRASGALDFGLEGIRHVVQWLGLDTRFVDALPTAMVKPFSGSAARALLIETMQTQGVDSFAALAAATIQGSTETTFYVLAVYFGAVGIQRARHAVGCALLAEFSGVVAAIFVCYWFFGATAT

SEQ ID NO: 69327 - protein, 220 aa, Pseudomonas syringae
MRWPVQSQELDRLKHSLREQVRSHRGHVCPVNGLPPRSWTPIRPNGGVQMAKYSEQFKLTVVKAYLAGNIGFRKVSSQFSIDSSLLRRWVANYKSHGHTGHRKPGLRYSEAFKRSVLEHKREHGLSLRQTAAHFGIGDPGQIVIWEQQHYSNDLAPYVPKRRKSVAMPKKPYPTAPVIDDDTQKTRDQLMAELEYLRMENAYLKKLEELKEQQRRQKKKP

SEQ ID NO: 69328 - protein, 661 aa, Pseudomonas syringae
MLIESAVLSGFRCFAPRPISVTISPKITTIVGPNAAGKTALLHALAKLFGVTRAQRTVRRSDFHLGPDDDPTSLESKHLYIEVLIALPELIDGTATPETIAPSFRHMLIERPDDAPVCRLRLDAQWEDDGTVEGEVSQTLHWVDTLDDAPPEDKCHPVSVADRGLIQLYYTPASRDAAAQTRATAGALAARLLRAIEWSSDTEEAVHDATENLASAFEEEAAIAAITEALQTRWSALHDDVVDTNPRLSLVSRRFEEVVNKIAVMFEQGPDGQERGIEALSDGQQSLFYFALAAAVFDLEREVVAGSIEGFRSDALRIPALTIFALEEPENHLSPYFLARIIRQVRSLTTDGSAQAIVTSHSPAVLSRVNPTEVRYCRCDPKTRVSTVKRIKLPVNDVEASKFVRGAMLAYPELYFARFVLLVEGDSERIVLPRLAEALNLLIDPAFVAIVPLGGRHVQHFWRLLKHLGIPHATLLDLDLGRDGGGFGRVKTAIEKLIEFGAPKAEVLRITTGILSDADLANMHNWPDSVDHSGLLSWINNNLKAHGVYFSSPLDLDLAMLEAFPAAYAAIVPERGGSRMAADKAAEVVLGTAGPGLKAYTGPFVGYPPQFPSYRYHFLTNSKPATHLAALTHITKAQLVAHMPVVLASVLKHISASLRRD

SEQ ID NO: 69329 - protein, 287 aa, Pseudomonas syringae
MVHSMTAFARVERAGAQGTLSWELRSVNHRYLEPHLRLPESFRDLEGAIREALRQGLSRGKVECTLRFVEETAGKPLQVDRERAGQLIAAAESVAGLIKQPAALNPLEVLAWPGVLVADASDPQVLNTEALTLFNDALSELKLGRGREGADLARLLDERLSSIVGEVATLRTLVPQMLAAQRQKVLDRFADMKAELDPQRLEQEMVLLAQKSDVAEELDRLSTHVTEVRRVLKAGGQAGRRLDFLMQELNREANTLGSKAFDPRSTQAAVNLKVLIEQMREQVQNIE

SEQ ID NO: 69330 - protein, 464 aa, Pseudomonas syringae
MSTDKTNQSWGGRFSEPVDAFVARFTASVTFDQRLYRHDIMGSIAHATMLAKVGVLTDAERDTIVDGLNTIQAEIEAGNFEWRVDLEDVHMNIEARLTDRIGITGKKLHTGRSRNDQVATDIRLWLRDEIDLILSEITRLQKGLLVQAERESDTIMPGFTHLQTAQPVTFGHHMLAWFEMLSRDYERLVDCRKRLNRMPLGSAALAGTTYPIDRELTCKLLGFDVVGGNSLDGVSDRDFAIEFCSAASIAMMHLSRFSEELVLWTSAQFQFIDLPDRFCTGSSIMPQKKNPDVPELVRGKSGRVFGALMGLLTLMKGQPLAYNKDNQEDKEPLFDAADTLRDSLRAFADMIPAIKPRHAIMREAALRGFSTATDLADYLVRRGLPFRDCHEIVGHAVKYGVETGKDLAEMSLEELRQFSNQIEQDVFAVLTLEGSVNARNHVGGTAPEQVRAAVARGQELLAGR

SEQ ID NO: 69331 - protein, 360 aa, Pseudomonas syringae
MRIEPVKTPARPAPGKDFFLPELCLPQALLVLVVLAELLVVILVLVEPMRAGFDWVRLALMSLFVQWIVLLSAALLCGLRPWLARLTPGLAGMLSCLLVVGLTLLCTAVTDVCQLTGRISISGMVERYLRYSTIALIMSALMLRYFYLQSQWRKQQQGELRARIESLQARIRPHFLFNTLNSIASLVASDPGKAEQAVLDLSDLFRASLAKPGSLVTWSEELALAKRYLSIEQYRLGERLQLDWRVSAIPDDLPIPQLTLQPLLENALIYGIAPRIDGGVVTVEADYKGGEFILSVSNPYEEVANRQTSNGTQQALSNIGARIAALFGPHASLSVERRDGRHYTCLRYPCARLTQEARAI

SEQ ID NO: 69332 - protein, 248 aa, Pseudomonas syringae
MNVLIVDDEPLARERLSRMVNEIEGYRVLEDSASNGEEALALIEKHKPDVVLLDIRMPGIDGLQVAAKLCEREAPPAVVFCTAHDEFALEAFQVSAVGYLVKPVRAEHLIEALKKAERPNRVQLAAMTRPAAESGSGPRTHISARTRKGIELIPLDQVIYFIADHKYVTLRHEGGEVLLDEPLKALEDEFGDRFVRIHRNALVARKRIESMKRTPVGHFELFLRGLNGDALIVSRRHVAGVRKMMQQL

SEQ ID NO: 69333 - protein, 313 aa, Pseudomonas syringae
MSSREIRIATRKSALALWQAEYVKARLEQAHPGLLVTLVPMVSRGDKLLDSPLSKIGGKGLFVKELETALLEDNADIAVHSMKDVPMDFPQGLGLFCICEREDPRDAFVSNTFESLDALPAGSIVGTSSLRRQAQLLARRPDLQIRFLRGNVNTRLAKLDAGEYNAIILAAAGLIRLGFEDRITSAISVDDSLPAGGQGAVGIECRSVDAEIHALLAPLHHEDTAVRVIAERSLNKHLNGGCQVPIACYAVLEGDDVWLRGLVGDPSGRVLLHADARAPQTSAQALGVQVAEALLAQGAAEILKAVYGEANNE

SEQ ID NO: 69334 - protein, 409 aa, Pseudomonas syringae
MTQTNFRSGPDANGLFGSFGGRYVAETLMPLVLDLNREYEAAKADPEFIKEMAYFQRDYIGRPNPLYFAERLTEFCGGAKIYFKREELNHTGAHKINNCIGQVLLAKRMGKKRLIAETGAGMHGVATATVAARFGLPCVIYMGATDIERQQANVFRMKLLGAEIVPVTSGTGTLKDAMNEALRDWVTNVDDTFYLIGTVAGPHPYPAMVRDFQSVIGKETKEQMQEKEGRLPDSLIACVGGGSNAMGLFHPFLDDASVEIIGVEAGGHGVDTDKHAASLNGGVPGVLHGNRTYLLQDNDGQITDAHSISAGLDYPGIGPEHAYLHEVKRVEYVSITDEEALDAFHQCCLLEGIIPALETAHALAEAMKRATNLRDDHLMVVCLSGRGDKDMQTVMNHMAAADNTQEKLV

SEQ ID NO: 69335 - protein, 522 aa, Pseudomonas syringae
MRWLNRHKFLPFLAWLPQQSRASVGRDALVGLSGAILALPQSIAYALIAGLPPEYGLYAAIVPVLIACLWGSSWHLICGPTAAISIVLYVSVSPLAVPASQDYIMLILLLTFIAGVFQLLLGMMRFGALVNFVSHSVVLGFTLGAAVVIALGQMPNLLGIDLPSQTTALKSLSAVLEHRGELDKPSLMLGLLTLTLGIGLKAWVPRWPTLLIALVSSSLLVWLWPAMFGHVRVVSAFVGHLPPFSPLPLDLELILKLLPTAVAVGMLGLVNSLSIARSLSARSQQMLNANQEVRAQGLSNMVGSLFSGYLSAGSFTRAALSYEAGARSPLAGVFSALWVALFAVAGASLVSHIPIPAMAASILLICWGLVDRRGIRALLRVSRAEFFVMALTCLATLLLELQTAIYAGVLASLFFYLKRTSQPRVQQWREGDEDVLRVGGSIFFGASHYLQTRLQRTEGLRVVIDAQQINFIDYSGVEMLHQEARRLGQQGRVLVLRNARPLVIEELHKLEGPENCPILFED

SEQ ID NO: 69336 - protein, 224 aa, Pseudomonas syringae
MSIRSWPAAERPRERLLELGAASLSDAELLAIFLRTGVAGKSAVDLARHLLNQFDGLRSLLDADQPAFTAQLGLGPAKFAQLQAVMEMARRHMAESLRRDSALENPAQVRNYLKAQLRHEPHEVFACLFLDNKHRVMTFEILFRGTINASYVHPRQVVKRALAHNAASLILCHNHPSGITTPSRSDIDLTKRLKEALKLVDVHVLDHVIVGDGEPLSMVEKGLM

SEQ ID NO: 69337 - protein, 318 aa, Pseudomonas syringae
MSAKKKPVNTPLHLLQQLSGSLLEHLEDACSQALADAEKLLAKLEKQRGKAQEKLHNSRIKLQDAATAGKSKAQTKAKDAVAELEELLDALKSRQTETRTYILHLKRDAQESLKLAQGIGRVKEAVGKILTTRSAKPAAPKAATKAPAAKAPAKAPSKAPAKPPVKAAAAKPVAKAAAKPAVAAKPAAKPAVVKAPAKTAAKPAARSAAAAKPVAAKSTAAKPAAKPAVTKAPAAAKAPASSAAKPAAAKPAVAKPAVKAPAKAPVKAVTKPAAVKPAAKPAAAKSATPAPAAAKPTPAAPAAASAKPADNATPTSAS

SEQ ID NO: 69338 - protein, 210 aa, Pseudomonas syringae
MALETWLGFFAACWIISLSPGAGAIASMSCGLQYGFLRGYWNALGLQIALVAQIAIVAAGLGAVLAASEMAFTLIKWFGVAYLVYLGIKQWRASPTDLADESAVRPVGKPMTLVFRGFLVNISNPKALIFILAILPQFIEPTAPLFMQYVIIAATMVVVDLIVMAGYTGLASKVLRALKTPRQQRRLNRTFASLFVGAAGFLATLHRGTA

SEQ ID NO: 69339 - protein, 632 aa, Pseudomonas syringae
MPLRSRFLVWLLVPLLTLCSSIALADPVEGAAQALHLLDYLGADYPASVADGKVVEAADYQQQIEALTTLQGLVLALPQRAERADLEQAVAQLKNAVSSKQDGTQVARQARQLAAKLAVAYEVSQAPAITPDPARGAPLYAQHCSVCHGDTGAGDGPAGIGLEPPPSNLRDTARLDRLSLYDLYNALGLGIAGTDMPAFADQLDDRQRWDIATSIASFSAQPVATATKAFNLADLARQTPAEVQAAEGPDAAATFRAQRAQPPQVQRGPAQLLDYTGVTLDKSLAAYKAGDREQAYDLSVAAYLEGFELVESSLDNVDANVRKDTEKSLMAYRQSLQDSLPLPQVEQKLEVAKAKLKESAGLLGSDGLSLSLSYISGLLILLREGLEAILVLAAILAFLRNTGQQSAVRSVNVGWGLALLAGLGTWALAAYVIDVSGAQRELLEGATALFASVMVLWLGVWMHDRRHAAAWQDYVKSSLVGGGGRFGFAVLAFFSVYRELFEVILFYETLWLQAGPAGHNAVLAGGATALVLLVGLAWVILRGSAKLPLSLFFGINAALLCALSVVFAGHGVKALQEAGIFGTRPVPFFEFDWLGIHADLYSLGAQAIALTAIAVLYGRSVLAEKRRLQASA

SEQ ID NO: 69340 - protein, 476 aa, Pseudomonas syringae
MTSSIFWYDYETTGINPRNDRALQMAGIRTDAELNEIAPPVNLYCQPSDDILPHPAACVITGITPATLAEKGLCEADFMTRVHAELAAPGTCGAGYNTLRFDDEVTRYSFYRNFFDPYAREWQGGNSRWDLIDVVRAAYALRPEGIVWPEQDGRVTLKLERLTAANGIDHGQAHDALSDVRATIALARLIREKQPRLYDYLFTLRTKQKVQEHIHLMKPLVHISGRFSAARSYLGVVLPLAWHPHNRNALIVCDLHLDHSPLLQCDAETLKQRLYTRLDALKEGELPVPLKLLHINRCPVIAPLGVLRSEDQQRLKLDMAGYQARAAQLSESLEVWQDKLQVLYGKDDFVASEDPEQQLYDGFIGDRDRRLCEQVRQAEPEQLARDAWPFDDARLPDLLFRYRARNFPETLSADEQHRWQDFCRQRLSSPEWGAPTTLQDFTSALNECSLSATPEQLEVLRQWQDHALQLSKRLGV

SEQ ID NO: 69341 - protein, 336 aa, Pseudomonas syringae
MSFTPANRLFPLTRLRRNRRDDFSRRLMRENVVTVDDLILPVFVLDGENRRESIASMPGVERLSVDLLLEEAEHWVALGIPALALFPVTPPEKKSLDGAEAWNPDGIAQRATRALRDRFPELGVITDVALDPFTTHGQDGILDEEGYVQNDITVDALVKQALSHADAGAQVIAPSDMMDGRIQAIRESLELAGHVNVRIMAYSAKYASAYYGPFRDAVGSSLNLGKANKASYQMDPANSNEALHEVAADLAEGADMVMVKPGMPYLDILHRVKDEFKVPTFVYQVSGEYAMHMAAIQNGWLSEGVILESLTAFKRAGADGILTYFAVRAAQLLKGQ

SEQ ID NO: 69342 - protein, 755 aa, Pseudomonas syringae
MQGQYGTDEAIARLLSGSGLRATALSANRYRIETAPEAVEGSLELQATTISGASRLETATGPVTGYVATRGLSATKTDTALIETPQSISVVTKDQMKAQGAENLSQMLRYSAAVVPETRGSTASRLDMLSIRGFSPALYLDGLRMPDNRDAAPQKDVFDLERVEVLRGPASVLYGQASPSGVVNMVSKLPTETPFHEIGLTYGTFNKKRTTFDFGGPIDDQGVYSYRLSGLYDDADGQIEHTETRRQSLASAFTWRPDEDTSLTLLANLQSDPKGASYGSMPAYGSVVKSPTGRHIDFDFYDGEKNFEKSDREYHAVGYLFEHHLNDVWTLRQNARYLRSEGVYRSIYNGWGTLQPDYRTSERATIATDVNLDSYTIDNQMQANFDTGPLQHTLLLGADYQNTSTDTKAGYGIGPTLDIFDPVYGSPVEVPAFTESSTQRDQQKGLYLQEQLKWDKWVLLMGGRYDWAESSNSSTNLTSSTKTRSSADSEAFTGRLGLVYLFDNGLAPYISYSESFEPQSGTGLGGALFDPTEGTQYELGIKYQPPGSNSFITAAIFDLRRSNVLSQDPNGNLCNGAVCQVQTGEVQSRGFELEGKASLNDNLDITAAYAYLDNRVTKSSNVVNVTSGIIGDAPGPDLTTKGTTAPAIPRHTASAWVDYTVHDGQLKGAGVGGGARYVGASWGDEANTLKVPGYTLFDAAVHYDIPNISNAMDNLRLALNVTNLANKEYVASCYTYSWCWYGSQRTVQASATYRW

SEQ ID NO: 69343 - protein, 721 aa, Pseudomonas syringae
MLISYGSQITSGLKSRGLEGQYTPEQGLNALLEGTGLQAMADGNNGFTLQSASAAGAPIELGASTVIGDWLGEAQQTNVFEHPGARDVVRREEFERVGATSAREVLNRIPGVNAPDNNGTGSHDMALNFGIRGLNPRLASRSTVLMDGIPVPFAPYGQPQLSFAPISMGNMDAVDVVRGGGAVRYGPQNVGGIVNFVTRAIPDAPTLKGGIQTETSPSSSHDGFKTTGNLLAGGTADNGLGGAILYSGVRGGDWREHSDTQIDDLILKGKYQIDEANSLNATAQYYEGEAQMPGGLSVKDYDADPYQSTRLKDKFWGRRTLFNFGYRYEEDARVFTANTFFTKTLRSGYLDQGSFVSLSPREYWVRGLETRFSQGFALGETWHEVGVGYRYVNEAGHELRYREPVTGNLPTTASRNDRDTRGATEAHAFYIDDRIDIGKWTITPGVRYEMIDTAQNNNLTNARYQGDYSTALPALNVLYHLTDTWNLYANTEGSFGSVQYSQMPNRVTGDEVKPEKARTWELGTRYDNGNLRAEIGAFLINFDNQYDSNQTNDTVIARGETRHQGIETSVNYALEGLNPILAGYDVYATYAFVDATIREDGPNKGNRVPFSSKHKGTMGVSYTEGPWKLNFDSSFQSDQFADNANTAAESADGSTGKIPGYMLFSTRANYDFGPQLSDLNVAVGMKNIFNRQYYTRSFDDNNRGKYVGEPRTVYVQTSVAF

SEQ ID NO: 69344 - protein, 325 aa, Pseudomonas syringae
MNLSNDSLNKSDISPAVAQQAVGWLLEMQEGALDARRQHAWQSWLNGNSEHQRAWAHMQRVNQRLSGLSSPLAHAALGAPKSAGRRHALKLLLLLGAGSMAGWSLREQIALQPLLADYNSGVGEQRKVALSDGSRVQLNTASAVDVRFDAQQRLIKLLQGELLMSASADARPLNLLSAQGTVRASTGSSRFNLRQLDGRTQLAVFAGAIEVAPANKSGPGLMLRASQQVTFGRDAWDSVRTVDANSGAWADGMLVASRMKLSDFLAELGRYRRGRLNCDANVADLLISGSYPLADSERILDMLQLALPVRVQRFTRYWVNVQARV

SEQ ID NO: 69345 - protein, 322 aa, Pseudomonas syringae
MRVTLQPSGAVLETLPGERILDAAQRLGHECPQSCRNGNCHVCSALLVEGRVMQSGQVLDHGEIHTCVAEPLEACVVLWDGVLAKGELPVRSFACQLSECVEIGGDVWRVGLRAPAGKPPRYHAGQYLMIERENGEKSAFSIASAPHSGRELELHVLAREDSARSLIEQLQRNKMARVELPFGDTHLAELPNGPLVLIAAGTGMAQMNSLLEHCRSTGFSHPVHLYWGVRRPEDFYQVSHWDEWATLPNLFLHKVVSDLCGWEGRCGLLHEAVCEDIKDLSAVHVYASGSPAMIYGTLDALVSAGMDAHQMRADVFAYAPRP

SEQ ID NO: 69346 - protein, 458 aa, Pseudomonas syringae
MTSQDGLKRGLSARHIRFMALGSAIGTGLFYGSASAIQQAGPAVLLAYLIGGAAVYMVMRALGEMAVHDPVSGSFSHYATRYMGPLAGFVLGWTYAFEMIIVCLADVTAFGIYMGFWFPEVPRWIWVLGIVFLIGALNLCNVKVFGETEFWLSILKVSAIVAMIVAGFGIMIFGIGSSTSGTEIGISNLWAHGGFMPNGVTGLIASFAVVMFAFGGIEIIGITAGEAKDPQRSLPQAINAVPLRILLFYVLTLFVLMCIYPWPQIGTQGSPFVQIFDNLGIASAATILNIVVISAAVSAINSDIFGAGRMMYGLARDGQAPASFARLSRQGVPWMTVLVMGVTLLGGVLLNYLIPKDVFLLIASLATFATVWVWLMILLTQVAMRRSMSREEVTQLKFAVPFWPYGPAAAIAFMLFIFGVLGYFPDNRAALIVGAIWIALLLIAYGLWVKPKALNKTH

SEQ ID NO: 69347 - protein, 515 aa, Pseudomonas syringae
MTTLSAKTLNLIPGQLTLAQLRAIHQQPVSLTLDSSANQQIDDSVACVERILAENRTAYGINTGFGLLASTRIASEDLENLQRSLVLSHAAGVGQPISDDLVRLIMVLKVNSLSRGFSGIRRVVIDALIALINAEVYPHIPLKGSVGASGDLAPLAHMSLVLLGEGKARHKGEWLNAVDALAVAGLKPLTLAAKEGLALLNGTQVSTAYALRGLFEGEDLFAAALTCGSLTVEAVLGSRSPFDARIHAARGQRGQIDAAACYRELLGESSGVSESHRNCDKVQDPYSLRCQPQVMGACLTQLRQAAEVLEVESNAVSDNPLVFAAENDVISGGNFHAEPVAMAADNLALAIAEIGSLSERRISLMMDKHMSQLPPFLVANGGVNSGFMIAQVTAAALASENKALAHPHSVDSLPTSANQEDHVSMAPAAGKRLWEMAENVRGILAVEWLAACQGLDLREGLKTSAKLEQARSLLRSKVPFYEKDRFFAPDIEAASQLLSSTCLNPLVPARLLPSL

SEQ ID NO: 69348 - protein, 655 aa, Pseudomonas syringae
MADEQEKHIYVKYWPIPDLGSADRAAAEAAANKASGGGNSGWSIGIGGGGGGPSTTGLGPGRGRRRGITNKQLRRLLRQQEAEAHALAQRQAAEHAAHLARVEAEAHARAMAEAAERERVETQVRAQAEKDQAHRQALETLTASYPSLQSGLAQNYLLASASLPNDLQKEIASGHDLNADPPRDEQTLELILQKKTRVNYLLAIKQPLLDERRAQALSLTGQELDHATQKDHLNYLVYYSQGDPPRVQQAHEAWVNALSQTYEAKLLAESVTLLNEQSAALSMRHAELSLANKPASQEARQAAGIDKLWSVIAPASTTTAAPGIRTVATNIAKDQLIRIATRTLGSNLVTLLAMYPQPLGDAELPPAVIATPLSQLNLPPHIDLHYLASVKGTLDVPHRLTSDEAGTSATRWVATDGVKVGTKVRVRTFTYNAQNNSYEFIRDGESTPALIWTPIAQPADSSTSSPAGPPALPVDPGNVVTPFVPELEAYPAIDRDDPDDYILISPIDSGLPNTYLLFKDPRSIPGVASGYGEPVTGVWLGDRTRAEGASIPTHIADQLRGRRFGDFASLRKATWIAVADDPELGKQSTQNNLEIMRGGGAPHPKLSDQAGGRTRFEIHHKNYISKGGAVYDIDNLVIMTSRQHIDHHRSQKNDL

SEQ ID NO: 69349 - protein, 243 aa, Pseudomonas syringae
MRFQGQYFDAETGLHYNRHRYYNPGTGRFLTPDPIKLAGGLNNYQYVPNPTGWVDPLGLIFGAIRAAAVRSAGTARKAASTVQSNIRSQTAISNCPGSSIGNPIGKTKAPETKASVNQGEPSLPIVSGSHKALNDAKAKDSHHIIQDAAVRDLPGYDRNAAPAVQLPGPSTKKGTPHYEATQAQRRSGGGTYRLERIFGYRALRKAGVSKDDAKTLIRGADEHFKGIGVTPETTTRIPGNRRK

SEQ ID NO: 69350 - protein, 273 aa, Pseudomonas syringae
MRTLELAGNTVPVLGQGTWHMGEKGHQRSAEIAGLCLGIEQGLTLIDTAEMYADGAAEEIVGQAIAGQRDKVFVVSKVYPHNASSAGIPVACEASLRRMNTDYIDLYLLHWPGNYPLTETVEAFERLREAGKIGAWGVSNFDVRDMIELNNPRCATNQVLYNPEQRGIEFDLMPWSADRHLPLMAYCPIGQAGDLLYHPALHEIAKRHEATPAQISLAWVLRQDNLIAIPKATNPEHIRLNIAAEQIRLTEQDLADIDLAWPAPTRKVPLAMV

SEQ ID NO: 69351 - protein, 568 aa, Pseudomonas syringae
  MISC_FEATURE (10)..(10): X=any amino acid
AIGLVGIDRXGFFCDENNQDLKQNWTRHREGVVRAARGTQLTAKTWMTEAPLRMLMNNLDPEVAENPNELVVYGGIGRAARNWECYDKIVESLTRLNDDETLLVQSGKPVGVFKTHSNAPRVLIANSNLVPHWASWEHFNELDAKGLAMYGQMTAGSWIYIGSQGIVQGTYETFVEAGRQHYDGNLKGRWVLTAGLGGMGGAQPLAATLAGACSLNIECQQSRIDFRIKTRYVDEQAADLDDALARIAKYTAEGKAISIALCGNAADILPEMVRRGVRPDMVTDQTSAHDPLNGYLPKGWTWDEYRARSVSEPAEVVKAAKQSMAEHVEAMLAFQQAGIPTFDYGNNIRQMAKEVGVSNAFDFPGFVPAYIRPLFCRGIGPFRWAALSGDPQDIYKTDAKVKELIPDDDHLHNWLDMARERISFQGLPARICWVGLGQRAKLGLAFNEMVRSGELSAPVVIGRDHLDSGSVASPNRETESMRDGSDAVSDWPLLNALLNTASGATWVSLHHGGGVGMGFSQHSGMVIVCDGTDEAAERIARVLHNDPATGVMRHADAGYDIAIDCAKE

SEQ ID NO: 69352 - protein, 182 aa, Pseudomonas syringae
MLTRSQQRAAARGLYQQLAQHPLFRRARHVSLYLPMDGEIDPRLLLREAQRRGKATYLPVLNAWPRTRMVFQRVRPGEKFIPNRFRIPEPRINRTKQRPVWALDLVLMPLVGFDDEGGRLGMGGGFYDRSLAYLARRKTWRKPALLGLAHECQKVDRLAQAIWDVPLQGTVSDKQWYLTQRL

SEQ ID NO: 69353 - protein, 341 aa, Pseudomonas syringae
MWDGIASRRTSPYAHMHVWDGSGTGQIHFSASSVHADVLGHIVENRVVQDALLDRLHDSDIGLLANARLEQMRHSGDDWLLTLADGRLLRAPLVVAADGANSAVRRLTETPTREWDYLHHAIVTSVRTADSHKKTAWQRFTDDGPLAFLPLDREGEHWCSIVWSVTPAEAERLMVLEDDLFCRELEQAFEGRLGQVLSADARLCVPLRQRHAKRYVANGLALIGDAAHTIHPLAGQGVNLGFLDAAVLAQVLTHAAQRGERVADLRVLGRYERRRMPHNLALMAAMEGFERLFQANPLPLRWLRNTGLKMVNQMPEAKALFVREALGLSGDLPELARLDAR

SEQ ID NO: 69354 - protein, 315 aa, Pseudomonas syringae
MDTLQNMRAFSSVAQAGSFTAAAAVLDTTTANVSRAVSNLEAHLQTRLLNRTTRRIALTEAGKRYLLRCEQILASVEEAEAEASDAHARPAGQLKVHSMPGVGQHYVIDAIARYRRNHPDVAFDLTMTHRVPDLLEEGFDVSIVLASELADSGFVSQRLGITYSIVCASPEYVKTFGMAHKPADLLNHACLRLVSPVFPLDKWLFDGPEGQEMVTINSSPLLVNSADAMKTAISSGMGIGILPIYSAIEGLRNGTLVRVLSDYRSQELNLYAIYPSRQYLDAKIRTWVEYLRGSLPEILAADEADLHVQALKASC

SEQ ID NO: 69355 - protein, 286 aa, Pseudomonas syringae
MKKFFSLFATLLVLAIALWIGRTLWVDYMDSPWTRDGRVRADIINVAADVSGSVVDVPVHDNQWVKRGDLLMQIDPEHYRIAVKQAQALLASRKATWEMRKLNARRRADMDELVISAENRDDASNVATSALADYQLAQAQLEAAELNLARTRVLAAVDGYVTNLNVHRGDYARIGEAKMAVVDMNSFWVYGFFEETKLPHLKVGDPADLQLMSGEVLKGHVESIARGIYDRDNPQSRELIADVNPTFNWVRLAQRVPVRIHLDQVPQDVLLAAGMTCTVIVRPVDG

SEQ ID NO: 69356 - protein, 44 aa, Pseudomonas syringae
MNPTFNWVHLAQRVPVRIHLDQVPQDVLLAAGMTCTVIVRPVGG

SEQ ID NO: 69357 - protein, 571 aa, Pseudomonas syringae
MRDVRGFAVKFYTGEGNFDLVGNNMPIFFIQDAIKFPDFVHAVKPEPHNEIPTGGSAHDTFWDFVSLVPESAHMVLWTMSDRAIPKSLRTMQGFGIHTFRLINTEGKSSFVKFHWKPKFGVCSLVWDEAQKLAGKDTDFHRRDLWESIEMGDYPEWELGVQIVAEEDEHKFDFDLLDPTKIIPEELVPVTPLGKMVLNRNPDNYFAETEQVAFCPGHIVPGIDFSNDPLLQGRLFSYTDTQISRLGGPNFHEIPINRPIAPNNNGQRDAQHRTTIDKGRASYEPNSIDGGWPKETPAAAVDGGFETYPERVEAHKVRERSESFGDHFSQATLFFQSMSHHEKEHIIAAYSFELGKVEREYIRARQVNEILANIDLELASRVAANLGLPAPTAGTVPVRNTSVKESPALSQVNLLSGDIVSRKVAILVANGVDGKAVEAMKKELTAKGAHAKVLGPTSAPVKTADGASLPVDASAEGLPSVAFDAVFVPGGKDSVKALSTDGVALHFILEAYKHLKAISVAGEAKELLTLLRLEEDAGLLVVSDSKSFETFFNAIAQHRVWDREVKAKAVPA

SEQ ID NO: 69358 - protein, 224 aa, Pseudomonas syringae
MDAFLNLFANVDWYEIWVATGDTLIMLSVSLGFTILLGLPLGVLMFLTSPRQLLEHKQLYATVGLIVNMLRALPFIILLIVMMPLTEIITGTSLGILGTLPPLIAGATPFFARLVETALREVDRGIIEATQAMGATTRQIIVKALLPEARPGIVAAITVTAIALVSFTAMAGAVGAGGLGDLAIRYGYQRFQNDVMFVTVVLLLVLVQILQTIGDRLVAHFTHR

SEQ ID NO: 69359 - protein, 257 aa, Pseudomonas syringae
MKKLLAIFAAVTALSAQANETLTVAASAVPHAEILEFVKPTLAKEGVDLEIKVFNDYIQPNAQVSQKRLDANFFQHQPYLDEYNKGKGTDLVAVAKVHVEPFGAYSDKFKKLDELPAGANVALPNDATNEGRALLLLAKAGLITLKDPSNILSKPSDVVNNPKDLKFRELEAATLPRVLTQVDLALINTNYALSAKLDPTKDALIIEGADSPYANILVTRPDNKDSDAIKKLVAALQSPEVKTFLAEKYKGAVVPAF

SEQ ID NO: 69360 - protein, 260 aa, Pseudomonas syringae
MKKTFLITALAAALSIGLAHAGEKLVVGATPVPHAEILELIKPTLAKEGVDLEIKVFTDYVQPNVQLNEKRLDANYFQTKPYLDGFNKGKGANLVTGVGVHVEPFGGYSNKYKKLADLPEGATIAIPNEGSNAGRALLLLQKGGLITLKDPTNALATPKDIATNPKKLKFRELESAVLPRALSQVDLALINTNYALEAKLNPKKDALIIEGADSPYVNFLVTREDNAHTDAIEKLSKALTSQQVKDFINKKYDGAVLPAF

SEQ ID NO: 69361 - protein, 616 aa, Pseudomonas syringae
MSGKAQQQSRIKELITLGREQKYLTYAEVNDHLPEDISDPEQVEDIIRMINDMGIPVHESAPDADALMLADADTDEAAAEEAAAALAAVETDIGRTTDPVRMYMREMGTVELLTREGEIEIAKRIEEGIREVMGAIAHFPGTVDHILSEYTRVTSEGGRLSDVLSGYIDPDDGIAPPAEVPPPVDPKAVKAEGADDDEEESADSSDEEDEVESGPDPVIAQQRFGAVSDQMEITRKALKKFGRDDKHAIAELVALAELFMPIKLVPKQFEGLVERVRGALERLRAQERAIMQLCVRDARMPRADFLRQFPGHEVDESWTDGLAKGKGKYAEAIGRLQPDIQRCQQKLSALEEETGLKIAEIKDINRRMSIGEAKARRAKKEMVEANLRLVISIAKKYTNRGLQFLDLIQEGNIGLMKAVDKFEYRRGYKFSTYATWWIRQAITRSIADQARTIRIPVHMIETINKLNRISRQMLQEMGREPTPEELGERMEMPEDKIRKVLKIAKEPISMETPIGDDEDSHLGDFIEDSTMQSPIDVATVESLKEATREVLSGLTAREAKVLRMRFGIDMNTDHTLEEVGKQFDVTRERIRQIEAKALRKLRHPTRSEHLRSFLDE

SEQ ID NO: 69362 - protein, 379 aa, Pseudomonas syringae
PEQSNETAQPDARSAQQQAPGEADPGSSANVDDQKRAAPPAATDQEMSSDAPVLNQPPLAAAEPEQSNETAQQQAPGEADPGSSANLDDQKRAAPPAATDQEMSSDAPVLNQPPLAAAEPEQSNETAQQQAPGEADPGSSANVDDQKRAAPPAATDQEMSSDAPVLNRPPLAAAEPEQSNETAQPAAPPAKQQASVEADPDTSPVAEDQPIIAPAGPAQNEDNESLSDVEVPVSGALPRRFTTARKTGPAVVPDAIFVGAPIGADEPQLQASNIDKDALLARISREVQGDNSVLYKLDAEPAFVDRGSRLEMVQGAGQEDEKVIAALLTAAQFYRGRIELTGSDEFKAKAIELIAQHQINGRMKNPAQQMLLDDARNAL

SEQ ID NO: 69363 - protein, 414 aa, Pseudomonas syringae
MRLFHTSDWHLGQNLHGQERDFEHACFLTWLLARLAERQPDVLLIAGDIFDTVNPPVKAQERLYDFIVNAHEQQPLLTIVMIAGNHDSGSRIELPAPLMRRLRTHALGRVMWLNDGVLDAERLLLPLPDANGDIKAWCLALPFLRPAEVTGPTLGDDYLRGIGRVHELLIDAANLKRQPGQALIAISHAHMAGGSVSEDSERSLIIGNAEALPASLFGPSITYVALGHLHKPQRVNGEERIRYSGSPIPLSFSEIGYQHQILEINCDGDTLTSVEPCLIPRAVNLQRLGPAPLADLLVQLKSLPDIDLLADPDRQPWLEVRVRLDEPQPDLRNQIETALQGKAVRLVRIGAEYAGKGSADGSDGEAGLIELDQLTPQELFSRAWQDNFGSEVDEQTLTDFATLLREVQQESEQP

SEQ ID NO: 69364 - protein, 338 aa, Pseudomonas syringae
MAKYPNTFHLASLMKQMTFADAEYAGKRKHTRRERFLIEMDQVVPWKGLIALIEPHYPKGEGGRPAYPLMAMLRIHLMQNWFGYSDPAMEEALYETTILRQFAGLSLDRIADETTILNFRRLLEKHELAGGILQVINGYLGDRGLMLRQGTVVDATIIHAPSSTKNKDGKRDPEMHQTKKGNQYFFGMKAHIGVDAESGLVHSLVGTAANVADVTQVDQLLHGEETYVSGDAGYTGVDKRAEHQDRQMIWSIAARPSRYKKHGEKSLIARVYRKIEFTKAQLRAKVEHPFRVIKRQFGYTKVRFRGLAKNTAQQATLFALSNLWMVRKRLLAMGEVRL

SEQ ID NO: 69365 - protein, 122 aa, Pseudomonas syringae; identical to SEQ ID NO: 66131
  MISC_FEATURE (19)..(19): X=any amino acid

SEQ ID NO: 69366 - protein, 525 aa, Pseudomonas syringae
MALDIHAHRILILDFGSQYTQLIARRVREIGVYCELHPFDMDDEAIREFAPKGVILAGGPESVHEANSPRCPQAVFDLGVPVFGICYGMQTMAEQLGGKVAGSELREFGYARVDVVGKSRLLDGIEDHIDADGLFGLDVWMSHGDKVTKLPEDFHILASTPSCPIAGMADDARGYYGVQFHPEVTHTKQGGRILSRFILDICGCEALWTPSKIAEDAIAQVRAQVGTDSVLLGLSGGVDSSVVAALLHKAIGDQLTCVFVDNGLLRLHEGEQVMAMFAENMGVKVIRANAEEQFLNNLEGESDPEKKRKIIGRTFIDVFDAESCKLDNIKYLAQGTIYPDVIESAGAKSGKAHVIKSHHNVGGLPEEMNLKLVEPLRELFKDEVRRLGLELGLPYDMVYRHPFPGPGLGVRILGEVKKEYADILRRADHIFIEELRKADWYHKVSQAFVVFQPVKSVGVVGDGRRYAWVVALRAVETIDFMTARWAHLPYELLETVSGRIINEIEGISRVTYDVSSKPPATIEWE

SEQ ID NO: 69367 - protein, 310 aa, Pseudomonas syringae
  MISC_FEATURE (149)..(149): X=any amino acid
VLRRAQLPGDLFTRQNVRLDSAHFFKLWEAIEAEAASINADLPAPLQIAKVMSSDWFDPELFAALCSANMADALERIAKYVRLIAPMVIRVVPTKAHTTVTMDFLDACEPPTVFLAFKLVFFVQLARLATRSPVQPLQVNWPSPSTPGXDLQAYQAYFGIPVTHAPQASLVFAAADVERPFLTENHKMWLFFEPGLRQRLSDLDRTSGMVERVRSALLESLPAGAVSMQQISRKLGVSTRTLQRRLQDEGTTFQQTLDTLRDSLARHYLRSTAMSSAQISFLLGFEDANSFARAFQSWTGSTPGKVRAEM

SEQ ID NO: 69368 - protein, 1618 aa, Pseudomonas syringae
MAFFTAASKSDFQHQLQAALAQHISEQALPQVALFAEQFFGIISLDELTQRRLSDLAGCTLSAWRLLERFEHAHPQVRVYNPDYERHGWQSTHTAVEVLHHDLPFLVDSVRTELNRRGYSIHTLQTTVLSVRRGANGELLELLPKGATGEDVLQESLMYLEIDRCASASELNVLARELEQVLGEVRVAVEDFAPMKARLHDLLASIDANESNTDAEEKAEIKVFLQWLVDNHFTFLGYEEFEVRTDANGGQLVYDESSFLGLTRLLRPGLSHEDLHIEDYAVKYLQEPVLLSFAKAAHPSRVHRPAYPDYVSIRQIDASGKVIKECRFMGLYTSSVYGESVRQIPYIRRKVAEVERRSGFDAKAHLGKELAQVVEVLPRDDLFQTPVDELFATVMSIVQIQERNKIRVFLRKDPYGRFCYCLAYVPRDVYSTEVRQKIQQVLMDRLKASDCEFWTFFSESVLARVQLILRVDPKINLDIDVAQLENEVIQACRSWKDDYASLVVESFGEAQGTNVLADFPKGFPAGYRERFAAHSAVVDMQHMLSLSETNPLVMSFYQPLAGDRQQLHCKLYHADTPLALSDVLPILENLGLRVLGEFPYRLHHANGREFWIHDFAFTYGEGLSLDIQQLNDTLQDAFVHIVRGDAENDAFNRLVLTAGLPWRDVALLRAYARYLKQIRLGFDLGYIATTLNNHTDIARELTRMFKTRFYLARKLGSDDLDDKQLRLEQAILTALDDVQVLNEDRILRRYLDLIKATLRTNFYQADANGQSKSYFSFKFNPRLIPELPKPVPKFEIFVYSPRVEGVHLRFGNVARGGLRWSDREEDFRTEVLGLVKAQQVKNSVIVPVGAKGGFVPRRLPTTGNRDEVQAEAIACYRIFISGLLDITDNLKEGVLVPPVNVVRHDDDDPYLVVAADKGTATFSDIANGIAIDYGFWLGDAFASGGSAGYDHKKMGITAKGAWVGVQRHFRERDINVQQDSISVIGIGDMAGDVFGNGLLMSDKLQLVAAFNHLHIFIDPNPEPASSFAERERLFNLPRSSWTDYDTSIMSAGGGIFPRSLKSIAITEQMKARFDIKADKLTPTELLHALLKAPVDLLWNGGIGTYVKSSEESHADVGDKANDALRVDGNELRCKVVGEGGNLGMTQLGRVEFGLNGGATNTDFIDNAGGVDCSDHEVNIKILLNEVVQAGDMTEKQRNQLLESMTDEVGHLVLGNNYKQTQALSLAARRAYERIAEYKRLMSDLEARGKLDRAIEFLPAEDQIAERVAAKQGLSRAELSVLISYSKIDLKEALLESRVPDDDYLTRDMETAFPPSLGARFSTAMRSHRLKREIVSTQIANDLVNHMGITFVQRLKESTGMSAAAVAGAYVIVRDIFHLPHWFRQIESLDYKVSAEIQLALMDELMRLGRRATRWFLRSRRNELDAGRDVAHFGPHLAALGLKLDELLEGPTREIWQTRYQAYVEAGVPELLARMVAGTTHLYTLLPIIEASDVTGQNAADVAKAYFAVGSALDITWYLQQISSLPVENNWQALAREAFRDDIDWQQRAITVSVLQMADGPSDIEARLALWLEQHSLMVERWRAMLVELRAASGTDYAMYAVANRELLDLAMSGQSLTV

SEQ ID NO: 69369 - protein, 889 aa, Pseudomonas syringae
MGAYDFWMSVPDTHLGPLMRVNTVLEAYRKHIEERAAQGIVPQPLNAEQTAGLVELLKNPPAGEEAFLVDLITNRIPPGVDEAAYVKAGSLSALAKGEATSPLIDKKRATELLGTMQGGYNIVTLVELLDDATLAPVAAEQLKHTLLMFDAFHDVAEKAKSGNAHAKAVVQSWADGEWFKKRPTLADKISLRVFKVTGETNTDDLSPAPDAWSRPDIPLHALAMLKMARDGIVPDVQGSIGPMKQIEEMRGQGFPIAYVGDVVGTGSSRKSATNSVLWFFGDDVPYVPNKRAGGFCFGTKIAPIFYNTMEDAGALPIEFDVSNINMGDVIDVYPYEGKVCKHDSDEVITTFEMKTPVLLDEVRAGGRIPLIIGRGLTSKARAELGLPAFDLFKTPDQPAESTKGFTLAQKMVGKACGVAGIRPGTYCEPKMTTVGSQDTTGPMTRDELKDLACLGFSTDLVMQSFCHTAAYPKPIDVKTHHTLPDFIMTRGGVSLRPGDGIIHSWLNRMLLPDTVGTGGDSHTRFPIGISFPAGSGLVAFAAATGVMPLDMPESILVRFKGKLQPGITLRDLVHAIPYYAIQAGLLTVEKKGKKNAFSGRILEIEGLDNLSIEQAFELSDASAERSAAGCTIKLAKEPIIEYLNSNITLLRWMIEQGYGDPRTLERRAQAMEAWVANPELLEADADAEYAEIIEIDLADVKEPVLCAPNDPDDARLLSSVQGEKIDEVFIGSCMTNIGHFRAAGKLLEQVKGQLPTRLWLSPPTKMDAHQLTEEGYYGIYGKAGARMEMPGCSLCMGNQARVEPNSTVVSTSTRNFPNRLGDGANVYLASAELASVASILGRLPTVEEYMGYANQIDTMAADVYRYLSFDQIAEFREAAANANIPALQV

SEQ ID NO: 69370 - protein, 207 aa, Pseudomonas syringae
MYPIPEIEAFLLCRTPDSWVQAALRNLDILLIDHANNEKKAAGAAFQFMFQYNDKFDLLSKMSRLAREELRHFEQVISIIRKRQIPMANISSARYAGALRKLVRNHNPYRLTDALIVGAIVEARSCERFAALVPHLDEELAKFYGGLLKSEARHFQDYLKLAYSYGDKADVDAKIEEIRLAERELIESPDEEFRFHSGVPTGVSAAA

SEQ ID NO: 69371 - protein, 310 aa, Pseudomonas syringae
MSSEHFASVMVDAFIAAVDEGLDLVPVVSDSTSTAKIGPFMQRFPERVINVGIAEQSLVSVAAGLALGGKIAATCNAAPFLISRANEQVKVDVCYNQANVKMFGLNAGTSYGPLASTHHCLDDISVMRGFGNVQIFAPSDPLECRQIIDYVLRYHGPVYIRLDGKPLRELHDPGYRFVPGNVDILRQGSDLTIVALGSVVHEAVDAAAQLAEQGLDAQVINLSSIRPLQRDALLSALSGSRGVITVEEHNINGGLGSLVAELLAENALGITLIRLGIGDGEYAAAGAREPTRALHGIDADGIVAAAARLR

SEQ ID NO: 69372 - protein, 247 aa, Pseudomonas syringae
MPLLEALNVGNVDISADVADTVPIFAQAAQARLTYFAQEAASPSAQAIIVHKDSAVQQLSDLKGKKVAVTKAAGSHYLLIAALQKTGLAFSDIQPAYLSPADGRAAFENHKVDAWVTWEPFLTSAQRQLPTRTLADGSGLASYKRYYLTGTGYAKAHPQVLSVVYDQLHKTGNWLKANPKDAAQVLSPLWGNLDIETVEIANSHRSYQIRPVKRDELGEQQKIADAFFAAGLLPKAVDAGDVEIWKP

SEQ ID NO: 69373 - protein, 308 aa, Pseudomonas syringae
  MISC_FEATURE (282)..(282): X=any amino acid
MSKIASLYYEEGLKQSEISTRLDLSQSFISRALRRALQEGVVKITVMRPQGLHLELETRLQKMYGIRQVIVVEATEPDDEESIKQAIGSAAAHYLETSLSAQDHIGISSWSSTIRAMVSHMHPQPGKQSAQEVVQLLGGVGNKGAFEATLLTQRLATLLNCPAFLLPSQSIEQSVESKQRIVEMEEVKEVLHRFDSITLAIVGIGELEPSQLLRNSGNYYTEDMLRVLAERGAVGDICLRYFDAQGKPVLEEDEEFVVSMGLGKLRSINRVLGLAGGVRKVXAIKGALLGGYLDVLITDVGTARGLGG

SEQ ID NO: 69374 - protein, 232 aa, Pseudomonas syringae
MLASNDLERMTFSSEQLASEYSVNSLALGIDVTDEADIQRLYQSAHERFGSIDVSVQNAGIITIDHCESMPRADFDKVLQVNTTGVWLGCREAARYMVKQGSGRLINTSSGQGRQGFIYTPHYAASKMGVIGITQSLALELARHNITVNAFCPGIIESEMWDYNDRVWGEILGTEEKRYAKGELMAEWVRNIPMRRAGKPSDVAGLVAFLASDDAAYLTGQAINIDGGLIMS

SEQ ID NO: 69375 - protein, 310 aa, Pseudomonas syringae
MFMTKKLLLATALAAVTLTTAGSTWAKELTIGLAVANLQADFFNQIKQSVEAEGKARGVKIITVDAQGNSSTQVSQIEDLITRQIDALIYIPAGATAAGVPVKAAKAAGIPVIAVDRNAPDAPGDTFIASDSVAGAKALAEYVGKVTDGKGRIAILQGQLGTTPENDRAKGFQEGLKGFPGLKVVAEQPAEWAQDKGFAVAQDLLQRDPNITVFFGRADAMALGAAQAVKVANLSQPVVVVGFDGDVAGLKAVASGVLQATMTQQTQKMGRMAVASALDLKAGKAVPKEQLLETVLTTKDNVAPFLQQHP

SEQ ID NO: 69376 - protein, 307 aa, Pseudomonas syringae
MGNLHLLASIESAGHSVPFRGKNVRVREVDAFDFSQVRLAFFAAGPAISRSYAEKAIAAGCSVIDLSGAFPSAQAPNVVPEINATLLNTCGVAPHLVASPSASATAVALALAPLRALLDIQSVAVTACLAVSALGREGVSELARQTTELLNVRPLETRFFDRQMAFNVLAQVGKPDESGHLSLEKRLVDELRELLALPSLKVSATCIQVPVFFGDSFTVALRTAGPVDVVAVNAALESADGIELVDAGDYPTPVGDAVGQDVVYVGRVRAGTDDPEQLNLWLTCDNVRKGAALNAVQVGELLIKDYV

SEQ ID NO: 69377 - protein, 261 aa, Pseudomonas syringae
MLVDSHCHLDRLDLTQHDGSLDAALEAARGRGVGHFLCIGVSADNAGAVKALADRYADVDCSVGIHPLDVKPGEMPPLDWLLKELDHPRVVAIGETGLDYHYEPEAAELQQASFRVHLEAASVTGKPVIIHTRGARADTLSLLREAALPQAGVLHCFTEDWDMAKAALDMGYYISLSGIVTFRNADALRDVARQVPADRLLVETDSPYLAPIPYRGKPNLPQYVREVAEFLAMLRGESYERFAEQTTANFARLFPLAHLQR

SEQ ID NO: 69378 - protein, 210 aa, Pseudomonas syringae [sequence omitted]

SEQ ID NO: 69379 - protein, 271 aa, Pseudomonas syringae
MLAWVDGCCADTLSVKDRGLAYGDGVFETVAVKGGQPLLLERHLQRLENGCQRLAIAIDQVLVRTEMTRFAAELGDGVMKLILTRGDSQRGYAPAPDTQSRRILLGSPAPAYPVAHAEQGVRLFACQTRLAEQPLLAGLKHLNRLEQVLARSEWSDSEHAEGLMCDTSGRLIEGVYSNLFLVSAGRLLTADLSRCGVAGVMRAELLDQARNLGLAVDIRDVHLSDLEAADEVFLCNSVYGVWPVCRFAALNWPVGPLTRKLQGIARALLDI

SEQ ID NO: 69380 - protein, 414 aa, Pseudomonas syringae
MSRRRVVVTGMGMLSPLGNDVPSSWQGILAGRSGIGLIEHTDLSAFTTRFGGSVKGFNVEEYLAPKEARRLDLFIQYGLAASFQAVRNAGLEVTDANRERIGVAMGSGIGGLTNIENSSRLLHEQGPGRISPFFVPGSIINMISGFLSIHLGAQGPNYAIATACTTATHCIGMAARNIAYDEADVMIAGGAEMAACGLGLGGFGAARALSTRNDDPTRASRPWDKGRDGFVLSDGAGAMVLEELEHAKARGATIYAELVGFGMSGDAYHMTSPPDDGAGAARCIVNALRDAKVNADQVQYINAHGTSTPAGDLAEASAIKSVFGDHAYKLAVSSTKSMTGHLLGAAGAVEAIFSVLAMVDQVAPPTINLDEPSEGCDLNFVPHEARRMPIDVVLSNSFGFGGTNGSLVFRRFAE

SEQ ID NO: 69381 - protein, 312 aa, Pseudomonas syringae
MSASLAFVFPGQGSQSLGMLAEQGAQHPLILDTFEQASEALGYDLWALTQSGPAELLNQTDKTQPAILTASIALWHVWLAEGGAVPAFVAGHSLGEYSALVAAQSLSLADAVKLVERRGQLMQEAVPAGQGGMAAILGLDDADVIAACAEAAQGEVVSAVNFNSPGQVVIAGSAEAVKRAMELCKARGAKRALPLPVSVPSHCELMRPAAERFVEAVEAIEWQAPSIALVQNVSASAVSDLATLKRDLLEQLYKPVRWVESIQCLASHGATRLVECGPGKVLAGLNKRCAEGVITYNLDTPDAFAAARAALA

SEQ ID NO: 69382 - protein, 192 aa, Pseudomonas syringae
MPSLLLASSSPYRRELLARLRLPFACESPDIDESHRPGETPHDLVQRLAREKAEALASEYPGHLIIGSDQVAVLDGQILGKPHTFERAREQLTAASDTRVTFLTGLALLNSSTGECQVDCVPFTVHMRELDQASIERYLRAETPYDCAGSFKAEGLGVSLFRSTQGADATSLIGLPLIRLVDMLIKEGVSVP

SEQ ID NO: 69383 - protein, 339 aa, Pseudomonas syringae
MTLHVQSAVSLRPFNTFGVDVQARLFAQARNDDEVREALAYSAEHDVPLLVIGGGSNLLLSGDVQALVLRMASRGIRIVREDCLEAIVEAEAGEPWHPFVQSCLELGLAGLENLSLIPGTVGAAPMQNIGAYGVEIKDVFHGLTALDRETGELREFALQDCAFGYRDSVFKHQPGRWLILRVRFKLSREANLHLEYGPVRQRLDQLGIDKPTPFDVSRAICAIRSEKLPDPAVLGNAGSFFKNPLVAAELYATIKSQHPGVVGYPQADGQVKLAAGWLIEQAGWKGYRDGDAGVHKLQSLVLVNYGHASGLQLLNLARRIQADIVERFGVELEMEPNLY

SEQ ID NO: 69384 - protein, 306 aa, Pseudomonas syringae
MSNWLVDKLIPSIMRSEVKKSSVPEGLWHKCPSCDAVLYRPELEKTLDVCPKCNHHMRIGARARLNIFLDVDGREELGVDLEPVDRLKFRDGKKYKDRLTAAQKQTGEKDALISMSGTLLGMPVVASAFEFSFMGGSMGAIVGERFVRAANYALENRCPMICFAASGGARMQEALISLMQMAKTSAVLARLREEGLPFISVLTDPVYGGVSASLAMLGDVIVAEPKALIGFAGPRVIEQTVREKLPEGFQRSEFLLDHGAIDMIIARSELRPRLGNLLAQMMNLPTPRFVAPVIEPIIVPPAPATI

SEQ ID NO: 69385 - protein, 299 aa, Pseudomonas syringae
MFDYKLLSALAAVIEQAGFERAAQVLGLSQSAISQRIKLLEARIGQPVLVRATPPVPTDIGRRLLNHVQQVRLLERDLQSQVPALDEEGLPERLRIALNADSLATWWAPAIGDFCTRHRLLLDLVVEDQDVGLKRMRAGEVAACLCGSERPVAGARSQLLGAMRYRAVASPAFIERHFPDGVSPEKLVRCAALVYGPDDFLQHRYLASLGVQEGFEHHLCPSSEGFIRMIEAGMGWGLVPELQVRGQLGSGALRELLADRCIDVPLYWHHWRNGGQLLTQLTEQLAQHSARWLVPLSEE

SEQ ID NO: 69386 - protein, 549 aa, Pseudomonas syringae
MIMAAKEVKFGDAGRKKMLAGVNVLADAVKATLGPKGRNVIIEKSFGAPLITKDGVSVAKEIELKDRFENMGAQLVKDVASRANDDAGDGTTTATVLAQAIVNEGLKAVAAGMNPMDLKRGIDKATIAIVAELKKLSKPCTDTKAIAQVGTISANSDHSIGDIIAEAMEKVTKDGVITVEEGSGLENELSVVEGMQFDRGYLSPYFINKPDTMVAELDSPLLLLVDKKISNIREMLPVLEAVAKAGRPLLIVAEDVEGEALATLVVNNMRGIVKVAAVKAPGFGDRRKAMLQDIAVLTGGTVISEEIGLSLETTTLEHLGNAKRVILNKENTTIIDGAGVKTDIDSRISQIRQQIGDTSSDYDKEKLQERLAKLSGGVAVIKVGAGSEVEMKEKKARVEDALHATRAAVEEGVVPGGGVALVRSLQAIEGLKGDNADQDVGIALLRRAVEAPLRQIVANSGDEPSVVVDKVKQGSGNFGYNAASGEYGDMIEMGILDPAKVTRSALQAASSIASLMITTEAMIADVADEKAAGGGMPDMGGMGGMGGMM

SEQ ID NO: 69387 - protein, 290 aa, Pseudomonas syringae
MATHRNRFQCKMGFLRPAYPLMAMLRIHLMQNWFDYSDPAMEEALYETTILRQFAGLSLDRIADETTILNFRRLLEKHELAGGILQVINGYLGDRGLMLRQGMVVDATIIHAPSSTKNKDGKRDPEMHQTKKGNQYFFGMKAHIGVDAESGLVHSLVGTAANVADVTQVDQLLHSEETYVSGDAGYTGVDKRAEHQDRQMIWSIAARPSRYKKHGEKSLIARVYRKIEFTKAQLRAKVEHPLRVIKRQFGYTKVRFRGLAKNTAQQATLFALSNLWMVRKRLLAMGEVRL

SEQ ID NO: 69388 - protein, 227 aa, Pseudomonas syringae
MLRRFVRLCLVLILGLSAQGVVAQTWPTEQWSSQPVPRSAAIEELEAYAFPPRDEATRKGIRTDALLVIRDGEVVYERYAGVTNAQTPHLTWSISKSIMATVLGVAFTEGRFQLSDPVAKFYAPFQSHPDITLTDLMHWASGLDWQEDYEYAPLNSSVVAMLYTRGRNDMARFTAEHAAAGPPGKAYLYSSGDSTVLAAALKNMVGPQAYPDYPWTALFDPLGIRSA

SEQ ID NO: 69389 - protein, 104 aa, Pseudomonas syringae
MPIDLDDIIKALAHPVRREILTWLKDPRTTFPAQEHSIEHGVCAGQIDQRAGLSQSTVSAHLATLQRAGLISSKKVGQWHFFRRNEEVIEAFVQALIKELNNPT

SEQ ID NO: 69390 - protein, 388 aa, Pseudomonas syringae
MPLSLLILALSAFAIGTTEFVIMGLLPDVAADLGVSIPGAGWLVTGYALGVAVGAPFMAMATAKLPRKAALVTLMGIFIIGNLLCALASDYNVLMFARVVTALCHGAFFGIGSVVAAGLVPANRRASAVALMFTGLTLANVLGVPLGTALGQYAGWRSTFWAVTVIGVIALIGLIRYLPTNRNEEKLDMRAELAALKGAGIWLSLTMTALFSASMFTLFTYIAPLLGEVTGVSPQGVTWTLLLIGLGLTAGNVIGGKMADRRVSTTLIAVFVSMAVISTALSWTSAALIPTEITLFLWAVAAFAAVPALQINVVTFGKAAPNLVSTLNIGAFNVGNALGAWVGGSVIAHGLGLTSVPLAAAVLAVLALLITLITFRQTGNPDLAPATH

SEQ ID NO: 69391 - protein, 330 aa, Pseudomonas syringae
MKILVTGASGFIGGRFARFALEQGMSVRINGRRAEGVEHLVRRGAEFIQGDLADPYLVRALCDDVEAVVHCAGSVGVWGRRQDFMQGNVQLTENIVEGCLKQRVRRLVHLSSPSIYFDGRSHLGIKEEQVPKRFHNHYAATKYLAEQKVFGAEEFGLEVIALRPRFVTGAGDNSIFPRLLHMQRKKRLSIVGNGLNVVDFTSMQNLNEALLSSLLATGSALGKAYNISNVTPVPLWDAINYVMRQMHLPQVTRYRSYGLAYSAAAINEGACMLWPGRPEPTLSRLGMQVMNKDFTLDISRARHYLDYQPQVSLWTALDEFCGWWQAQHAI

SEQ ID NO: 69392 - protein, 735 aa, Pseudomonas syringae
  MISC_FEATURE (445)..(445): X=any amino acid
MSYQVLARKWRPRSFREMVGQAHVLKALINALDSQRLHHAYLFTGTRGVGKTTIARIIAKCLNCETGITSTPCGTCSVCKEIDEGRFVDLIEIDAASRTKVEDTRELLDNVQYAPSRGRFKVYLIDEVHMLSSHSFNALLKTLEEPPPYVKFILATTDPQKLPATILSRCLQFSLKNMTPERVVEHLTHVLGVENVPFEDDALWLLGRAADGSMRDAMSLTDQAIAFGEGKVMAADVRAMLGTLDHGQVFDVLTALLEGDARGVLEAVRHLAEQGPDWNGVLSEILNVLHRVAIAQALPEGVDNGHGDRDRVLALAQALPAEDVQFYYQMGLIGRRDLPLAPDPRGGFEMVLLRMLAFRPADSEDAPRQPLKPVGISQATADSRKTVADATPVASPASTPPVVAAPDPAFEAQPPAYAPAPAAVQPEAKAEPAPQIKPEPEPQPXTQACAGRRNRSAVERVESAGGRKACRARARARARARSCAEVEAEPQPEPVAEPVLETVSEQPDLTPMPAPAPASPVPDAPQAQPSPPVEEQQVTPAMLEAIPDSAYLSAPMDRDDEPPADDDYVEPDIDIDPASYSYLDELAHESVVELEAVEPEPAPAAMPATGLAADWLEVFPKLPISGMTGSIAANCTLMAVDGDNWLLHLDPAHSALFNSTQQRRLNDALNQYHGRTINLSIELIKPEQETPAQAASRLRTERQRQAEASIQADPYIQQMLQQFGAVIREDTIKPV

SEQ ID NO: 69393 - protein, 223 aa, Pseudomonas syringae
MSCVFAALILREARLLARRPAELANPLVFFALVIALFPLAIGPDTQLLQALSPGLLWVAALLAVLLSLDGLFRGDFEDGSLEQWVLSPHPLALLILGKVLAHWVFSGLALVLLSPVLALMLGLPVQCLPVLMLSLLLGTPVLSLLGAVGAALTVGLKRGGVLLALLILPLYIPVLILGSAALQAALQGVSATGYLLWLGSLTVLAITLTPFAIAAGLKISVGE

SEQ ID NO: 69394 - protein, 200 aa, Pseudomonas syringae
MSFSPLIRQLIDAFRVLPGVGQKTAQRMALQLLERDRSGGSRLALALGQAMDGVGHCRLCRTLTEEELCPQCSDLRRNDTLLCVVEGPTDVYAVEQTGYRGRYFVLKGHLSPLDGLGPEAIGIPQLMERISQQATFTEVILATNPTVEGEATAHYIAQLLHDKGLVASRIAHGVPLGGELDLVDGGTLAHSFAGRKPIAL

SEQ ID NO: 69395 - protein, 688 aa, Pseudomonas syringae
MPPARDWFYGVRTFGASMLALYIALLMEMPRPYWAMATVYIVSSPFVGPTSSKALYRAAGTLAGAAASVLLVPMFVQTPLLLAIVVGLWTGTLLFLSLHLRTANSYALMLAGYTMPLISLPVVDNPQAVFDIAVSRTEEIFLGIICASVVGAMFWPRRLAPVFQATTEKWFGDAATYSQRFISRTCQAEEIGTLRNSMVGSFNSLEMMIGQLSHEGARKQTVRNANELRGRMIHLLPVIDALDDALWALERRTPELLASLKPMLQRACDWLESTADGPQHEPWRQLHRELEGLQPGSAQLDDRDRLLLSNTLFRLSEWIDLWQDCRTLQYAIKTDDQSPWRAVYRHWRLGRLTPFLDRGLMLYSVTSTVLAIIAASVLWILLGWKDGASAVALAAVSCSFFAAMDDPAPQIYRFFFWTLLSVVFASLYLFVVLPNLHDFPMLVLAFAVPFICVGTLTVQPRFFLGTLLTIVNTSSFISIQSAYDADFMNFLNSNLAGPAGLLFAFIWTLVFRPFGVDLAVKRLTRFSWRDIASLSEHSSLAEHRRMGVQMLDRLMQQLPRLTITAQDTGIALRELRVALNMLDLLAYTRRATPAAQVLLRQVIDEVSGYFKHCSKAGERLPAPRGLLMAMDRARRALTDQEMGDNPARVHLLHALSGLRLALLPGVEIVTVGGELTEQLPHNIDGAPL

SEQ ID NO: 69396 - protein, 332 aa, Pseudomonas syringae
MNKLFAASLLAAGLAFASATQAAQPLLNVSYDVMRDFYKDYNSAFQKHWKAEKNEDVTVQMSFGGSSKQARSVIDGLPADVITMNMATDINALADNGELVPKDWVSRLPNNSAPFTSATVFIVRKGNPKALKDWPDLIKDGVEVIVPNPKTSGNGRYTYLSAWGYTLKNGGDEAAAKKFVGDLFRHVPVLDTGGRGATTTFMTNQIGDVLVTFENEAEMIAREFGRDQFEVVYPSVSAEAEPPVSVVDKVVDKKQSRPLAEEYLKYLWSPEGQEIAAKNYLRPRDTQILAKYKDRFPKVDFLSVEKTFGDWRTVQKTHFIDGGVFDQIYPGK
